United States Patent Application Publication US 2020/0095579 A1 - sequence listing, part 22

SEQ ID NO: 349584 - DNA, 20 bp, Artificial Sequence
  Description of Artificial Sequence: Synthetic oligonucleotide
  Target: LAMA2; (+) strand; PAM type: YTN; PAM sequence: CTT
gtatgttgccctaaagatat

SEQ ID NO: 349585 - DNA, 20 bp, Artificial Sequence
  Description of Artificial Sequence: Synthetic oligonucleotide
  Target: LAMA2; (+) strand; PAM type: YTN; PAM sequence: TTG
tatgttgccctaaagatata

SEQ ID NO: 349586 - DNA, 20 bp, Artificial Sequence
  Description of Artificial Sequence: Synthetic oligonucleotide
  Target: LAMA2; (+) strand; PAM type: YTN; PAM sequence: TTG
ccctaaagatataaaactgc

SEQ ID NO: 349587 - DNA, 20 bp, Artificial Sequence
  Description of Artificial Sequence: Synthetic oligonucleotide
  Target: LAMA2; (+) strand; PAM type: YTN; PAM sequence: CTA
aagatataaaactgcttaca

SEQ ID NO: 349588 - DNA, 20 bp, Artificial Sequence
  Description of Artificial Sequence: Synthetic oligonucleotide
  Target: LAMA2; (+) strand; PAM type: YTN; PAM sequence: CTG
cttacaatgcctagtgattt

SEQ ID NO: 349589 - DNA, 20 bp, Artificial Sequence
  Description of Artificial Sequence: Synthetic oligonucleotide
  Target: LAMA2; (+) strand; PAM type: YTN; PAM sequence: CTT
acaatgcctagtgatttgta

SEQ ID NO: 349590 - DNA, 20 bp, Artificial Sequence
  Description of Artificial Sequence: Synthetic oligonucleotide
  Target: LAMA2; (+) strand; PAM type: YTN; PAM sequence: TTA
caatgcctagtgatttgtat

SEQ ID NO: 349591 - DNA, 20 bp, Artificial Sequence
  Description of Artificial Sequence: Synthetic oligonucleotide
  Target: LAMA2; (+) strand; PAM type: YTN; PAM sequence: CTA
gtgatttgtattgattacta

SEQ ID NO: 349592 - DNA, 20 bp, Artificial Sequence
  Description of Artificial Sequence: Synthetic oligonucleotide
  Target: LAMA2; (+) strand; PAM type: YTN; PAM sequence: TTT
gtattgattactatgtgttc

SEQ ID NO: 349593 - DNA, 20 bp, Artificial Sequence
  Description of Artificial Sequence: Synthetic oligonucleotide
  Target: LAMA2; (+) strand; PAM type: YTN; PAM sequence: TTG
tattgattactatgtgttcc

SEQ ID NO: 349594 - DNA, 20 bp, Artificial Sequence
  Description of Artificial Sequence: Synthetic oligonucleotide
  Target: LAMA2; (+) strand; PAM type: YTN; PAM sequence: TTG
attactatgtgttccctaaa

SEQ ID NO: 349595 - DNA, 20 bp, Artificial Sequence
  Description of Artificial Sequence: Synthetic oligonucleotide
  Target: LAMA2; (+) strand; PAM type: YTN; PAM sequence: TTA
ctatgtgttccctaaagttt

SEQ ID NO: 349596 - DNA, 20 bp, Artificial Sequence
  Description of Artificial Sequence: Synthetic oligonucleotide
  Target: LAMA2; (+) strand; PAM type: YTN; PAM sequence: CTA
tgtgttccctaaagtttgaa

SEQ ID NO: 349597 - DNA, 20 bp, Artificial Sequence
  Description of Artificial Sequence: Synthetic oligonucleotide
  Target: LAMA2; (+) strand; PAM type: YTN; PAM sequence: TTC
cctaaagtttgaaactctcc

SEQ ID NO: 349598 - DNA, 20 bp, Artificial Sequence
  Description of Artificial Sequence: Synthetic oligonucleotide
  Target: LAMA2; (+) strand; PAM type: YTN; PAM sequence: CTA
aagtttgaaactctccatta

SEQ ID NO: 349599 - DNA, 20 bp, Artificial Sequence
  Description of Artificial Sequence: Synthetic oligonucleotide
  Target: LAMA2; (+) strand; PAM type: YTN; PAM sequence: TTT
gaaactctccattaacatag

SEQ ID NO: 349600 - DNA, 20 bp, Artificial Sequence
  Description of Artificial Sequence: Synthetic oligonucleotide
  Target: LAMA2; (+) strand; PAM type: YTN; PAM sequence: TTG
aaactctccattaacatagc

SEQ ID NO: 349601 - DNA, 20 bp, Artificial Sequence
  Description of Artificial Sequence: Synthetic oligonucleotide
  Target: LAMA2; (+) strand; PAM type: YTN; PAM sequence: CTC
tccattaacatagcaaaact

SEQ ID NO: 349602 - DNA, 20 bp, Artificial Sequence
  Description of Artificial Sequence: Synthetic oligonucleotide
  Target: LAMA2; (+) strand; PAM type: YTN; PAM sequence: CTC
cattaacatagcaaaactac

SEQ ID NO: 349603 - DNA, 20 bp, Artificial Sequence
  Description of Artificial Sequence: Synthetic oligonucleotide
  Target: LAMA2; (+) strand; PAM type: YTN; PAM sequence: TTA
acatagcaaaactactatat

SEQ ID NO: 349604 - DNA, 20 bp, Artificial Sequence
  Description of Artificial Sequence: Synthetic oligonucleotide
  Target: LAMA2; (+) strand; PAM type: YTN; PAM sequence: CTA
ctatattctaaatcaaatgt

SEQ ID NO: 349605 - DNA, 20 bp, Artificial Sequence
  Description of Artificial Sequence: Synthetic oligonucleotide
  Target: LAMA2; (+) strand; PAM type: YTN; PAM sequence: CTA
tattctaaatcaaatgtcag

SEQ ID NO: 349606 - DNA, 20 bp, Artificial Sequence
  Description of Artificial Sequence: Synthetic oligonucleotide
  Target: LAMA2; (+) strand; PAM type: YTN; PAM sequence: TTC
taaatcaaatgtcagcaggt

SEQ ID NO: 349607 - DNA, 20 bp, Artificial Sequence
  Description of Artificial Sequence: Synthetic oligonucleotide
  Target: LAMA2; (+) strand; PAM type: YTN; PAM sequence: CTA
aatcaaatgtcagcaggttg

SEQ ID NO: 349608 - DNA, 20 bp, Artificial Sequence
  Description of Artificial Sequence: Synthetic oligonucleotide
  Target: LAMA2; (+) strand; PAM type: YTN; PAM sequence: TTG
ggaaaggtatttacaacaaa

SEQ ID NO: 349609 - DNA, 20 bp, Artificial Sequence
  Description of Artificial Sequence: Synthetic oligonucleotide
  Target: LAMA2; (+) strand; PAM type: YTN; PAM sequence: TTT
acaacaaacatgacaagggg

SEQ ID NO: 349610 - DNA, 20 bp, Artificial Sequence
  Description of Artificial Sequence: Synthetic oligonucleotide
  Target: LAMA2; (+) strand; PAM type: YTN; PAM sequence: TTA
caacaaacatgacaagggga

SEQ ID NO: 349611 - DNA, 20 bp, Artificial Sequence
  Description of Artificial Sequence: Synthetic oligonucleotide
  Target: LAMA2; (+) strand; PAM type: YTN; PAM sequence: CTT
tctatattaagagatcttac

SEQ ID NO: 349612 - DNA, 20 bp, Artificial Sequence
  Description of Artificial Sequence: Synthetic oligonucleotide
  Target: LAMA2; (+) strand; PAM type: YTN; PAM sequence: TTT
ctatattaagagatcttaca

SEQ ID NO: 349613 - DNA, 20 bp, Artificial Sequence
  Description of Artificial Sequence: Synthetic oligonucleotide
  Target: LAMA2; (+) strand; PAM type: YTN; PAM sequence: TTC
tatattaagagatcttacat

SEQ ID NO: 349614 - DNA, 20 bp, Artificial Sequence
  Description of Artificial Sequence: Synthetic oligonucleotide
  Target: LAMA2; (+) strand; PAM type: YTN; PAM sequence: CTA
tattaagagatcttacatat

SEQ ID NO: 349615 - DNA, 20 bp, Artificial Sequence
  Description of Artificial Sequence: Synthetic oligonucleotide
  Target: LAMA2; (+) strand; PAM type: YTN; PAM sequence: TTA
agagatcttacatatcaata

SEQ ID NO: 349616 - DNA, 20 bp, Artificial Sequence
  Description of Artificial Sequence: Synthetic oligonucleotide
  Target: LAMA2; (+) strand; PAM type: YTN; PAM sequence: CTT
acatatcaataagaaaaaag

SEQ ID NO: 349617 - DNA, 20 bp, Artificial Sequence
  Description of Artificial Sequence: Synthetic oligonucleotide
  Target: LAMA2; (+) strand; PAM type: YTN; PAM sequence: TTA
catatcaataagaaaaaagt

SEQ ID NO: 349618 - DNA, 20 bp, Artificial Sequence
  Description of Artificial Sequence: Synthetic oligonucleotide
  Target: LAMA2; (+) strand; PAM type: YTN; PAM sequence: TTA
acctgttagaaagatcaaaa

SEQ ID NO: 349619 - DNA, 20 bp, Artificial Sequence
  Description of Artificial Sequence: Synthetic oligonucleotide
  Target: LAMA2; (+) strand; PAM type: YTN; PAM sequence: CTG
ttagaaagatcaaaacaggt

SEQ ID NO: 349620 - DNA, 20 bp, Artificial Sequence
  Description of Artificial Sequence: Synthetic oligonucleotide
  Target: LAMA2; (+) strand; PAM type: YTN; PAM sequence: TTA
gaaagatcaaaacaggtatt

SEQ ID NO: 349621 - DNA, 20 bp, Artificial Sequence
  Description of Artificial Sequence: Synthetic oligonucleotide
  Target: LAMA2; (+) strand; PAM type: YTN; PAM sequence: TTC
ctcagaaatgacatataact

SEQ ID NO: 349622 - DNA, 20 bp, Artificial Sequence
  Description of Artificial Sequence: Synthetic oligonucleotide
  Target: LAMA2; (+) strand; PAM type: YTN; PAM sequence: CTC
agaaatgacatataactttg

SEQ ID NO: 349623 - DNA, 20 bp, Artificial Sequence
  Description of Artificial Sequence: Synthetic oligonucleotide
  Target: LAMA2; (+) strand; PAM type: YTN; PAM sequence: CTT
tgtaaaaagataatgacact

SEQ ID NO: 349624 - DNA, 20 bp, Artificial Sequence
  Description of Artificial Sequence: Synthetic oligonucleotide
  Target: LAMA2; (+) strand; PAM type: YTN; PAM sequence: TTT
gtaaaaagataatgacactc

SEQ ID NO: 349625 - DNA, 20 bp, Artificial Sequence
  Description of Artificial Sequence: Synthetic oligonucleotide
  Target: LAMA2; (+) strand; PAM type: YTN; PAM sequence: TTG
taaaaagataatgacactca

SEQ ID NO: 349626 - DNA, 20 bp, Artificial Sequence
  Description of Artificial Sequence: Synthetic oligonucleotide
  Target: LAMA2; (+) strand; PAM type: YTN; PAM sequence: CTC
ataatgaaggaagtatcaat

SEQ ID NO: 349627 - DNA, 20 bp, Artificial Sequence
  Description of Artificial Sequence: Synthetic oligonucleotide
  Target: LAMA2; (+) strand; PAM type: YTN; PAM sequence: TTA
aaacaatgacatattatttt

SEQ ID NO: 349628 - DNA, 20 bp, Artificial Sequence
  Description of Artificial Sequence: Synthetic oligonucleotide
  Target: LAMA2; (+) strand; PAM type: YTN; PAM sequence: TTA
tttttcacctatcaaagtgt

SEQ ID NO: 349629 - DNA, 20 bp, Artificial Sequence
  Description of Artificial Sequence: Synthetic oligonucleotide
  Target: LAMA2; (+) strand; PAM type: YTN; PAM sequence: TTT
ttcacctatcaaagtgttta

SEQ ID NO: 349630 - DNA, 20 bp, Artificial Sequence
  Description of Artificial Sequence: Synthetic oligonucleotide
  Target: LAMA2; (+) strand; PAM type: YTN; PAM sequence: TTT
tcacctatcaaagtgtttat

SEQ ID NO: 349631 - DNA, 20 bp, Artificial Sequence
  Description of Artificial Sequence: Synthetic oligonucleotide
  Target: LAMA2; (+) strand; PAM type: YTN; PAM sequence: TTT
cacctatcaaagtgtttatt

SEQ ID NO: 349632 - DNA, 20 bp, Artificial Sequence
  Description of Artificial Sequence: Synthetic oligonucleotide
  Target: LAMA2; (+) strand; PAM type: YTN; PAM sequence: TTC
acctatcaaagtgtttattc

SEQ ID NO: 349633 - DNA, 20 bp, Artificial Sequence
  Description of Artificial Sequence: Synthetic oligonucleotide
  Target: LAMA2; (+) strand; PAM type: YTN; PAM sequence: CTA
tcaaagtgtttattcttcta

SEQ ID NO: 349634 - DNA, 20 bp, Artificial Sequence
  Description of Artificial Sequence: Synthetic oligonucleotide
  Target: LAMA2; (+) strand; PAM type: YTN; PAM sequence: TTT
attcttctactcaacaaata

SEQ ID NO: 349635 - DNA, 20 bp, Artificial Sequence
  Description of Artificial Sequence: Synthetic oligonucleotide
  Target: LAMA2; (+) strand; PAM type: YTN; PAM sequence: TTA
ttcttctactcaacaaatat

SEQ ID NO: 349636 - DNA, 20 bp, Artificial Sequence
  Description of Artificial Sequence: Synthetic oligonucleotide
  Target: LAMA2; (+) strand; PAM type: YTN; PAM sequence: TTC
ttctactcaacaaatatttg

SEQ ID NO: 349637 - DNA, 20 bp, Artificial Sequence
  Description of Artificial Sequence: Synthetic oligonucleotide
  Target: LAMA2; (+) strand; PAM type: YTN; PAM sequence: CTT
ctactcaacaaatatttgaa

SEQ ID NO: 349638 - DNA, 20 bp, Artificial Sequence
  Description of Artificial Sequence: Synthetic oligonucleotide
  Target: LAMA2; (+) strand; PAM type: YTN; PAM sequence: TTC
tactcaacaaatatttgaat

SEQ ID NO: 349639 - DNA, 20 bp, Artificial Sequence
  Description of Artificial Sequence: Synthetic oligonucleotide
  Target: LAMA2; (+) strand; PAM type: YTN; PAM sequence: CTA
ctcaacaaatatttgaatgc

SEQ ID NO: 349640 - DNA, 20 bp, Artificial Sequence
  Description of Artificial Sequence: Synthetic oligonucleotide
  Target: LAMA2; (+) strand; PAM type: YTN; PAM sequence: CTC
aacaaatatttgaatgctta

SEQ ID NO: 349641 - DNA, 20 bp, Artificial Sequence
  Description of Artificial Sequence: Synthetic oligonucleotide
  Target: LAMA2; (+) strand; PAM type: YTN; PAM sequence: TTT
gaatgcttattatgtccagg

SEQ ID NO: 349642 - DNA, 20 bp, Artificial Sequence
  Description of Artificial Sequence: Synthetic oligonucleotide
  Target: LAMA2; (+) strand; PAM type: YTN; PAM sequence: TTG
aatgcttattatgtccagga

SEQ ID NO: 349643 - DNA, 20 bp, Artificial Sequence
  Description of Artificial Sequence: Synthetic oligonucleotide
  Target: LAMA2; (+) strand; PAM type: YTN; PAM sequence: CTT
attatgtccaggaattgtat

SEQ ID NO: 349644 - DNA, 20 bp, Artificial Sequence
  Description of Artificial Sequence: Synthetic oligonucleotide
  Target: LAMA2; (+) strand; PAM type: YTN; PAM sequence: TTA
ttatgtccaggaattgtatt

SEQ ID NO: 349645 - DNA, 20 bp, Artificial Sequence
  Description of Artificial Sequence: Synthetic oligonucleotide
  Target: LAMA2; (+) strand; PAM type: YTN; PAM sequence: TTA
tgtccaggaattgtattcaa

SEQ ID NO: 349646 - DNA, 20 bp, Artificial Sequence
  Description of Artificial Sequence: Synthetic oligonucleotide
  Target: LAMA2; (+) strand; PAM type: YTN; PAM sequence: TTG
tattcaagggttgataacac

SEQ ID NO: 349647 - DNA, 20 bp, Artificial Sequence
  Description of Artificial Sequence: Synthetic oligonucleotide
  Target: LAMA2; (+) strand; PAM type: YTN; PAM sequence: TTC
aagggttgataacacacaag

SEQ ID NO: 349648 - DNA, 20 bp, Artificial Sequence
  Description of Artificial Sequence: Synthetic oligonucleotide
  Target: LAMA2; (+) strand; PAM type: YTN; PAM sequence: TTG
ataacacacaaggttggtgg

SEQ ID NO: 349649 - DNA, 20 bp, Artificial Sequence
  Description of Artificial Sequence: Synthetic oligonucleotide
  Target: LAMA2; (+) strand; PAM type: YTN; PAM sequence: TTG
gtggctatggagaaagtgtt

SEQ ID NO: 349650 - DNA, 20 bp, Artificial Sequence
  Description of Artificial Sequence: Synthetic oligonucleotide
  Target: LAMA2; (+) strand; PAM type: YTN; PAM sequence: CTA
tggagaaagtgttttatcat

SEQ ID NO: 349651 - DNA, 20 bp, Artificial Sequence
  Description of Artificial Sequence: Synthetic oligonucleotide
  Target: LAMA2; (+) strand; PAM type: YTN; PAM sequence: TTT
tatcatatctactagaggaa

SEQ ID NO: 349652 - DNA, 20 bp, Artificial Sequence
  Description of Artificial Sequence: Synthetic oligonucleotide
  Target: LAMA2; (+) strand; PAM type: YTN; PAM sequence: TTT
atcatatctactagaggaaa

SEQ ID NO: 349653 - DNA, 20 bp, Artificial Sequence
  Description of Artificial Sequence: Synthetic oligonucleotide
  Target: LAMA2; (+) strand; PAM type: YTN; PAM sequence: TTA
tcatatctactagaggaaaa

SEQ ID NO: 349654 - DNA, 20 bp, Artificial Sequence
  Description of Artificial Sequence: Synthetic oligonucleotide
  Target: LAMA2; (+) strand; PAM type: YTN; PAM sequence: CTA
ctagaggaaaagtcatttgt

SEQ ID NO: 349655 - DNA, 20 bp, Artificial Sequence
  Description of Artificial Sequence: Synthetic oligonucleotide
  Target: LAMA2; (+) strand; PAM type: YTN; PAM sequence: CTA
gaggaaaagtcatttgtcat

SEQ ID NO: 349656 - DNA, 20 bp, Artificial Sequence
  Description of Artificial Sequence: Synthetic oligonucleotide
  Target: LAMA2; (+) strand; PAM type: YTN; PAM sequence: TTT
gtcatagcgttcctggaggg

SEQ ID NO: 349657 - DNA, 20 bp, Artificial Sequence
  Description of Artificial Sequence: Synthetic oligonucleotide
  Target: LAMA2; (+) strand; PAM type: YTN; PAM sequence: TTG
tcatagcgttcctggagggg

SEQ ID NO: 349658 - DNA, 20 bp, Artificial Sequence
  Description of Artificial Sequence: Synthetic oligonucleotide
  Target: LAMA2; (+) strand; PAM type: YTN; PAM sequence: TTC
ctggaggggaattttttaag

SEQ ID NO: 349659 - DNA, 20 bp, Artificial Sequence
  Description of Artificial Sequence: Synthetic oligonucleotide
  Target: LAMA2; (+) strand; PAM type: YTN; PAM sequence: CTG
gaggggaattttttaagcga

SEQ ID NO: 349660 - DNA, 20 bp, Artificial Sequence
  Description of Artificial Sequence: Synthetic oligonucleotide
  Target: LAMA2; (+) strand; PAM type: YTN; PAM sequence: TTT
tttaagcgattaaaatttaa

SEQ ID NO: 349661 - DNA, 20 bp, Artificial Sequence
  Description of Artificial Sequence: Synthetic oligonucleotide
  Target: LAMA2; (+) strand; PAM type: YTN; PAM sequence: TTT
ttaagcgattaaaatttaaa

SEQ ID NO: 349662 - DNA, 20 bp, Artificial Sequence
  Description of Artificial Sequence: Synthetic oligonucleotide
  Target: LAMA2; (+) strand; PAM type: YTN; PAM sequence: TTT
taagcgattaaaatttaaat

SEQ ID NO: 349663 - DNA, 20 bp, Artificial Sequence
  Description of Artificial Sequence: Synthetic oligonucleotide
  Target: LAMA2; (+) strand; PAM type: YTN; PAM sequence: TTT
aagcgattaaaatttaaatt

SEQ ID NO: 349664 - DNA, 20 bp, Artificial Sequence
  Description of Artificial Sequence: Synthetic oligonucleotide
  Target: LAMA2; (+) strand; PAM type: YTN; PAM sequence: TTA
agcgattaaaatttaaattt

SEQ ID NO: 349665 - DNA, 20 bp, Artificial Sequence
  Description of Artificial Sequence: Synthetic oligonucleotide
  Target: LAMA2; (+) strand; PAM type: YTN; PAM sequence: TTA
aaatttaaattttacatatc

SEQ ID NO: 349666 - DNA, 20 bp, Artificial Sequence
  Description of Artificial Sequence: Synthetic oligonucleotide
  Target: LAMA2; (+) strand; PAM type: YTN; PAM sequence: TTT
aaattttacatatcctttga

SEQ ID NO: 349667 - DNA, 20 bp, Artificial Sequence
  Description of Artificial Sequence: Synthetic oligonucleotide
  Target: LAMA2; (+) strand; PAM type: YTN; PAM sequence: TTA
aattttacatatcctttgac

SEQ ID NO: 349668 - DNA, 20 bp, Artificial Sequence
  Description of Artificial Sequence: Synthetic oligonucleotide
  Target: LAMA2; (+) strand; PAM type: YTN; PAM sequence: TTT
tacatatcctttgactagaa

SEQ ID NO: 349669 - DNA, 20 bp, Artificial Sequence
  Description of Artificial Sequence: Synthetic oligonucleotide
  Target: LAMA2; (+) strand; PAM type: YTN; PAM sequence: TTT
acatatcctttgactagaaa

SEQ ID NO: 349670 - DNA, 20 bp, Artificial Sequence
  Description of Artificial Sequence: Synthetic oligonucleotide
  Target: LAMA2; (+) strand; PAM type: YTN; PAM sequence: TTA
catatcctttgactagaaat

SEQ ID NO: 349671 - DNA, 20 bp, Artificial Sequence
  Description of Artificial Sequence: Synthetic oligonucleotide
  Target: LAMA2; (+) strand; PAM type: YTN; PAM sequence: CTT
tgactagaaattatgcttcc

SEQ ID NO: 349672 - DNA, 20 bp, Artificial Sequence
  Description of Artificial Sequence: Synthetic oligonucleotide
  Target: LAMA2; (+) strand; PAM type: YTN; PAM sequence: TTT
gactagaaattatgcttcca

SEQ ID NO: 349673 - DNA, 20 bp, Artificial Sequence
  Description of Artificial Sequence: Synthetic oligonucleotide
  Target: LAMA2; (+) strand; PAM type: YTN; PAM sequence: TTG
actagaaattatgcttccag

SEQ ID NO: 349674 - DNA, 20 bp, Artificial Sequence
  Description of Artificial Sequence: Synthetic oligonucleotide
  Target: LAMA2; (+) strand; PAM type: YTN; PAM sequence: CTA
gaaattatgcttccaggaat

SEQ ID NO: 349675 - DNA, 20 bp, Artificial Sequence
  Description of Artificial Sequence: Synthetic oligonucleotide
  Target: LAMA2; (+) strand; PAM type: YTN; PAM sequence: TTA
tgcttccaggaatttaccct

SEQ ID NO: 349676 - DNA, 20 bp, Artificial Sequence
  Description of Artificial Sequence: Synthetic oligonucleotide
  Target: LAMA2; (+) strand; PAM type: YTN; PAM sequence: CTT
ccaggaatttaccctataga

SEQ ID NO: 349677 - DNA, 20 bp, Artificial Sequence
  Description of Artificial Sequence: Synthetic oligonucleotide
  Target: LAMA2; (+) strand; PAM type: YTN; PAM sequence: TTC
caggaatttaccctatagat

SEQ ID NO: 349678 - DNA, 20 bp, Artificial Sequence
  Description of Artificial Sequence: Synthetic oligonucleotide
  Target: LAMA2; (+) strand; PAM type: YTN; PAM sequence: TTT
accctatagatatattcata

SEQ ID NO: 349679 - DNA, 20 bp, Artificial Sequence
  Description of Artificial Sequence: Synthetic oligonucleotide
  Target: LAMA2; (+) strand; PAM type: YTN; PAM sequence: TTA
ccctatagatatattcatat

SEQ ID NO: 349680 - DNA, 20 bp, Artificial Sequence
  Description of Artificial Sequence: Synthetic oligonucleotide
  Target: LAMA2; (+) strand; PAM type: YTN; PAM sequence: CTA
tagatatattcatatagatg

SEQ ID NO: 349681 - DNA, 20 bp, Artificial Sequence
  Description of Artificial Sequence: Synthetic oligonucleotide
  Target: LAMA2; (+) strand; PAM type: YTN; PAM sequence: TTC
atatagatgtacaggcatat

SEQ ID NO: 349682 - DNA, 20 bp, Artificial Sequence
  Description of Artificial Sequence: Synthetic oligonucleotide
  Target: LAMA2; (+) strand; PAM type: YTN; PAM sequence: TTA
tcatgatcctcgtcattatt

SEQ ID NO: 349683 - DNA, 20 bp, Artificial Sequence
  Description of Artificial Sequence: Synthetic oligonucleotide
  Target: LAMA2; (+) strand; PAM type: YTN; PAM sequence: CTC
gtcattattatacaagtgct

SEQ ID NO: 349684 - DNA, 20 bp, Artificial Sequence
  Description of Artificial Sequence: Synthetic oligonucleotide
  Target: LAMA2; (+) strand; PAM type: YTN; PAM sequence: TTA
ttatacaagtgctaccacta

SEQ ID NO: 349685 - DNA, 20 bp, Artificial Sequence
  Description of Artificial Sequence: Synthetic oligonucleotide
  Target: LAMA2; (+) strand; PAM type: YTN; PAM sequence: TTA
tacaagtgctaccactactg

SEQ ID NO: 349686 - DNA, 20 bp, Artificial Sequence
  Description of Artificial Sequence: Synthetic oligonucleotide
  Target: LAMA2; (+) strand; PAM type: YTN; PAM sequence: CTA
ccactactgctactaacatt

SEQ ID NO: 349687 - DNA, 20 bp, Artificial Sequence
  Description of Artificial Sequence: Synthetic oligonucleotide
  Target: LAMA2; (+) strand; PAM type: YTN; PAM sequence: CTA
ctgctactaacatttattga

SEQ ID NO: 349688 - DNA, 20 bp, Artificial Sequence
  Description of Artificial Sequence: Synthetic oligonucleotide
  Target: LAMA2; (+) strand; PAM type: YTN; PAM sequence: CTG
ctactaacatttattgagct

SEQ ID NO: 349689 - DNA, 20 bp, Artificial Sequence
  Description of Artificial Sequence: Synthetic oligonucleotide
  Target: LAMA2; (+) strand; PAM type: YTN; PAM sequence: CTA
ctaacatttattgagctcag

SEQ ID NO: 349690 - DNA, 20 bp, Artificial Sequence
  Description of Artificial Sequence: Synthetic oligonucleotide
  Target: LAMA2; (+) strand; PAM type: YTN; PAM sequence: CTA
acatttattgagctcagtat

SEQ ID NO: 349691 - DNA, 20 bp, Artificial Sequence
  Description of Artificial Sequence: Synthetic oligonucleotide
  Target: LAMA2; (+) strand; PAM type: YTN; PAM sequence: TTT
attgagctcagtatttagta

SEQ ID NO: 349692 - DNA, 20 bp, Artificial Sequence
  Description of Artificial Sequence: Synthetic oligonucleotide
  Target: LAMA2; (+) strand; PAM type: YTN; PAM sequence: TTA
ttgagctcagtatttagtat

SEQ ID NO: 349693 - DNA, 20 bp, Artificial Sequence
  Description of Artificial Sequence: Synthetic oligonucleotide
  Target: LAMA2; (+) strand; PAM type: YTN; PAM sequence: TTG
agctcagtatttagtatgtt

SEQ ID NO: 349694 - DNA, 20 bp, Artificial Sequence
  Description of Artificial Sequence: Synthetic oligonucleotide
  Target: LAMA2; (+) strand; PAM type: YTN; PAM sequence: CTC
agtatttagtatgtttcagg

SEQ ID NO: 349695 - DNA, 20 bp, Artificial Sequence
  Description of Artificial Sequence: Synthetic oligonucleotide
  Target: LAMA2; (+) strand; PAM type: YTN; PAM sequence: TTT
agtatgtttcaggcattctg

SEQ ID NO: 349696 - DNA, 20 bp, Artificial Sequence
  Description of Artificial Sequence: Synthetic oligonucleotide
  Target: LAMA2; (+) strand; PAM type: YTN; PAM sequence: TTA
gtatgtttcaggcattctgc

SEQ ID NO: 349697 - DNA, 20 bp, Artificial Sequence
  Description of Artificial Sequence: Synthetic oligonucleotide
  Target: LAMA2; (+) strand; PAM type: YTN; PAM sequence: TTT
caggcattctgctaagcatt

SEQ ID NO: 349698 - DNA, 20 bp, Artificial Sequence
  Description of Artificial Sequence: Synthetic oligonucleotide
  Target: LAMA2; (+) strand; PAM type: YTN; PAM sequence: TTC
aggcattctgctaagcattc

SEQ ID NO: 349699 - DNA, 20 bp, Artificial Sequence
  Description of Artificial Sequence: Synthetic oligonucleotide
  Target: LAMA2; (+) strand; PAM type: YTN; PAM sequence: TTC
tgctaagcattctcaaaaca

SEQ ID NO: 349700 - DNA, 20 bp, Artificial Sequence
  Description of Artificial Sequence: Synthetic oligonucleotide
  Target: LAMA2; (+) strand; PAM type: YTN; PAM sequence: CTG
ctaagcattctcaaaacatg

SEQ ID NO: 349701 - DNA, 20 bp, Artificial Sequence
  Description of Artificial Sequence: Synthetic oligonucleotide
  Target: LAMA2; (+) strand; PAM type: YTN; PAM sequence: CTA
agcattctcaaaacatgtat

SEQ ID NO: 349702 - DNA, 20 bp, Artificial Sequence
  Description of Artificial Sequence: Synthetic oligonucleotide
  Target: LAMA2; (+) strand; PAM type: YTN; PAM sequence: TTC
tcaaaacatgtatgagacaa

SEQ ID NO: 349703 - DNA, 20 bp, Artificial Sequence
  Description of Artificial Sequence: Synthetic oligonucleotide
  Target: LAMA2; (+) strand; PAM type: YTN; PAM sequence: CTC
aaaacatgtatgagacaagt

SEQ ID NO: 349704 - DNA, 20 bp, Artificial Sequence
  Description of Artificial Sequence: Synthetic oligonucleotide
  Target: LAMA2; (+) strand; PAM type: YTN; PAM sequence: CTA
aagtgatgctaggactcgag

SEQ ID NO: 349705 - DNA, 20 bp, Artificial Sequence
  Description of Artificial Sequence: Synthetic oligonucleotide
  Target: LAMA2; (+) strand; PAM type: YTN; PAM sequence: CTA
ggactcgagtttttgcctca

SEQ ID NO: 349706 - DNA, 20 bp, Artificial Sequence
  Description of Artificial Sequence: Synthetic oligonucleotide
  Target: LAMA2; (+) strand; PAM type: YTN; PAM sequence: CTC
gagtttttgcctcaaagtca

SEQ ID NO: 349707 - DNA, 20 bp, Artificial Sequence
  Description of Artificial Sequence: Synthetic oligonucleotide
  Target: LAMA2; (+) strand; PAM type: YTN; PAM sequence: TTT
ttgcctcaaagtcactcaac

SEQ ID NO: 349708 - DNA, 20 bp, Artificial Sequence
  Description of Artificial Sequence: Synthetic oligonucleotide
  Target: LAMA2; (+) strand; PAM type: YTN; PAM sequence: TTT
tgcctcaaagtcactcaact

SEQ ID NO: 349709 - DNA, 20 bp, Artificial Sequence
  Description of Artificial Sequence: Synthetic oligonucleotide
  Target: LAMA2; (+) strand; PAM type: YTN; PAM sequence: TTT
gcctcaaagtcactcaactg

SEQ ID NO: 349710 - DNA, 20 bp, Artificial Sequence
  Description of Artificial Sequence: Synthetic oligonucleotide
  Target: LAMA2; (+) strand; PAM type: YTN; PAM sequence: TTG
cctcaaagtcactcaactgg

SEQ ID NO: 349711 - DNA, 20 bp, Artificial Sequence
  Description of Artificial Sequence: Synthetic oligonucleotide
  Target: LAMA2; (+) strand; PAM type: YTN; PAM sequence: CTC
aaagtcactcaactggcaaa

SEQ ID NO: 349712 - DNA, 20 bp, Artificial Sequence
  Description of Artificial Sequence: Synthetic oligonucleotide
  Target: LAMA2; (+) strand; PAM type: YTN; PAM sequence: CTC
aactggcaaataggaaactt

SEQ ID NO: 349713 - DNA, 20 bp, Artificial Sequence
  Description of Artificial Sequence: Synthetic oligonucleotide
  Target: LAMA2; (+) strand; PAM type: YTN; PAM sequence: CTG
gcaaataggaaacttttcta

SEQ ID NO: 349714 - DNA, 20 bp, Artificial Sequence
  Description of Artificial Sequence: Synthetic oligonucleotide
  Target: LAMA2; (+) strand; PAM type: YTN; PAM sequence: CTT
ttctaacattagagcgcctc

SEQ ID NO: 349715 - DNA, 20 bp, Artificial Sequence
  Description of Artificial Sequence: Synthetic oligonucleotide
  Target: LAMA2; (+) strand; PAM type: YTN; PAM sequence: TTT
tctaacattagagcgcctcc

SEQ ID NO: 349716 - DNA, 20 bp, Artificial Sequence
  Description of Artificial Sequence: Synthetic oligonucleotide
  Target: LAMA2; (+) strand; PAM type: YTN; PAM sequence: TTT
ctaacattagagcgcctccc

SEQ ID NO: 349717 - DNA, 20 bp, Artificial Sequence
  Description of Artificial Sequence: Synthetic oligonucleotide
  Target: LAMA2; (+) strand; PAM type: YTN; PAM sequence: TTC
taacattagagcgcctccct

SEQ ID NO: 349718 - DNA, 20 bp, Artificial Sequence
  Description of Artificial Sequence: Synthetic oligonucleotide
  Target: LAMA2; (+) strand; PAM type: YTN; PAM sequence: CTA
acattagagcgcctccctcc

SEQ ID NO: 349719 - DNA, 20 bp, Artificial Sequence
  Description of Artificial Sequence: Synthetic oligonucleotide
  Target: LAMA2; (+) strand; PAM type: YTN; PAM sequence: TTA
gagcgcctccctccacccgg

SEQ ID NO: 349720 - DNA, 20 bp, Artificial Sequence
  Description of Artificial Sequence: Synthetic oligonucleotide
  Target: LAMA2; (+) strand; PAM type: YTN; PAM sequence: CTC
cctccacccggcatccttgt

SEQ ID NO: 349721 - DNA, 20 bp, Artificial Sequence
  Description of Artificial Sequence: Synthetic oligonucleotide
  Target: LAMA2; (+) strand; PAM type: YTN; PAM sequence: CTC
cacccggcatccttgtcctc

SEQ ID NO: 349722 - DNA, 20 bp, Artificial Sequence
  Description of Artificial Sequence: Synthetic oligonucleotide
  Target: LAMA2; (+) strand; PAM type: YTN; PAM sequence: CTT
gtcctcccagtatgtgtgtg

SEQ ID NO: 349723 - DNA, 20 bp, Artificial Sequence
  Description of Artificial Sequence: Synthetic oligonucleotide
  Target: LAMA2; (+) strand; PAM type: YTN; PAM sequence: TTG
tcctcccagtatgtgtgtgg

SEQ ID NO: 349724 - DNA, 20 bp, Artificial Sequence
  Description of Artificial Sequence: Synthetic oligonucleotide
  Target: LAMA2; (+) strand; PAM type: YTN; PAM sequence: CTC
ccagtatgtgtgtggtgtta

SEQ ID NO: 349725 - DNA, 20 bp, Artificial Sequence
  Description of Artificial Sequence: Synthetic oligonucleotide
  Target: LAMA2; (+) strand; PAM type: YTN; PAM sequence: TTA
tttgtaaagggagaaacatg

SEQ ID NO: 349726 - DNA, 20 bp, Artificial Sequence
  Description of Artificial Sequence: Synthetic oligonucleotide
  Target: LAMA2; (+) strand; PAM type: YTN; PAM sequence: TTT
gtaaagggagaaacatggaa

SEQ ID NO: 349727 - DNA, 20 bp, Artificial Sequence
  Description of Artificial Sequence: Synthetic oligonucleotide
  Target: LAMA2; (+) strand; PAM type: YTN; PAM sequence: TTG
taaagggagaaacatggaaa

SEQ ID NO: 349728 - DNA, 20 bp, Artificial Sequence
  Description of Artificial Sequence: Synthetic oligonucleotide
  Target: LAMA2; (+) strand; PAM type: YTN; PAM sequence: CTG
tgtaactgttcattaatagg

SEQ ID NO: 349729 - DNA, 20 bp, Artificial Sequence
  Description of Artificial Sequence: Synthetic oligonucleotide
  Target: LAMA2; (+) strand; PAM type: YTN; PAM sequence: CTG
ttcattaatagggacctgat

SEQ ID NO: 349730 - DNA, 20 bp, Artificial Sequence
  Description of Artificial Sequence: Synthetic oligonucleotide
  Target: LAMA2; (+) strand; PAM type: YTN; PAM sequence: TTC
attaatagggacctgataaa

SEQ ID NO: 349731 - DNA, 20 bp, Artificial Sequence
  Description of Artificial Sequence: Synthetic oligonucleotide
  Target: LAMA2; (+) strand; PAM type: YTN; PAM sequence: TTA
atagggacctgataaatacc

SEQ ID NO: 349732 - DNA, 20 bp, Artificial Sequence
  Description of Artificial Sequence: Synthetic oligonucleotide
  Target: LAMA2; (+) strand; PAM type: YTN; PAM sequence: CTG
ataaataccttcattcaagt

SEQ ID NO: 349733 - DNA, 20 bp, Artificial Sequence
  Description of Artificial Sequence: Synthetic oligonucleotide
  Target: LAMA2; (+) strand; PAM type: YTN; PAM sequence: CTT
cattcaagtagtaccctgtg

SEQ ID NO: 349734 - DNA, 20 bp, Artificial Sequence
  Description of Artificial Sequence: Synthetic oligonucleotide
  Target: LAMA2; (+) strand; PAM type: YTN; PAM sequence: TTC
attcaagtagtaccctgtgt

SEQ ID NO: 349735 - DNA, 20 bp, Artificial Sequence
  Description of Artificial Sequence: Synthetic oligonucleotide
  Target: LAMA2; (+) strand; PAM type: YTN; PAM sequence: TTC
aagtagtaccctgtgtaccc

SEQ ID NO: 349736 - DNA, 20 bp, Artificial Sequence
  Description of Artificial Sequence: Synthetic oligonucleotide
  Target: LAMA2; (+) strand; PAM type: YTN; PAM sequence: CTG
tgtacccttaggggatacac

SEQ ID NO: 349737 - DNA, 20 bp, Artificial Sequence
  Description of Artificial Sequence: Synthetic oligonucleotide
  Target: LAMA2; (+) strand; PAM type: YTN; PAM sequence: CTT
aggggatacacatgctaata

SEQ ID NO: 349738 - DNA, 20 bp, Artificial Sequence
  Description of Artificial Sequence: Synthetic oligonucleotide
  Target: LAMA2; (+) strand; PAM type: YTN; PAM sequence: TTA
ggggatacacatgctaatat

SEQ ID NO: 349739 - DNA, 20 bp, Artificial Sequence
  Description of Artificial Sequence: Synthetic oligonucleotide
  Target: LAMA2; (+) strand; PAM type: YTN; PAM sequence: CTA
atatggaaagggctccatga

SEQ ID NO: 349740 - DNA, 20 bp, Artificial Sequence
  Description of Artificial Sequence: Synthetic oligonucleotide
  Target: LAMA2; (+) strand; PAM type: YTN; PAM sequence: CTC
catgatttactgttagtaaa

SEQ ID NO: 349741 - DNA, 20 bp, Artificial Sequence
  Description of Artificial Sequence: Synthetic oligonucleotide
  Target: LAMA2; (+) strand; PAM type: YTN; PAM sequence: TTT
actgttagtaaaaagaaccg

SEQ ID NO: 349742 - DNA, 20 bp, Artificial Sequence
  Description of Artificial Sequence: Synthetic oligonucleotide
  Target: LAMA2; (+) strand; PAM type: YTN; PAM sequence: TTA
ctgttagtaaaaagaaccgg

SEQ ID NO: 349743 - DNA, 20 bp, Artificial Sequence
  Description of Artificial Sequence: Synthetic oligonucleotide
  Target: LAMA2; (+) strand; PAM type: YTN; PAM sequence: CTG
ttagtaaaaagaaccggttc

SEQ ID NO: 349744 - DNA, 20 bp, Artificial Sequence
  Description of Artificial Sequence: Synthetic oligonucleotide
  Target: LAMA2; (+) strand; PAM type: YTN; PAM sequence: TTA
gtaaaaagaaccggttctaa

SEQ ID NO: 349745 - DNA, 20 bp, Artificial Sequence
  Description of Artificial Sequence: Synthetic oligonucleotide
  Target: LAMA2; (+) strand; PAM type: YTN; PAM sequence: TTC
taaacagtatacaaatgccc

SEQ ID NO: 349746 - DNA, 20 bp, Artificial Sequence
  Description of Artificial Sequence: Synthetic oligonucleotide
  Target: LAMA2; (+) strand; PAM type: YTN; PAM sequence: CTA
aacagtatacaaatgcccct

SEQ ID NO: 349747 - DNA, 20 bp, Artificial Sequence
  Description of Artificial Sequence: Synthetic oligonucleotide
  Target: LAMA2; (+) strand; PAM type: YTN; PAM sequence: CTT
cccttttgtagaataaataa

SEQ ID NO: 349748 - DNA, 20 bp, Artificial Sequence
  Description of Artificial Sequence: Synthetic oligonucleotide
  Target: LAMA2; (+) strand; PAM type: YTN; PAM sequence: TTC
ccttttgtagaataaataaa

SEQ ID NO: 349749 - DNA, 20 bp, Artificial Sequence
  Description of Artificial Sequence: Synthetic oligonucleotide
  Target: LAMA2; (+) strand; PAM type: YTN; PAM sequence: CTT
ttgtagaataaataaaaaga

SEQ ID NO: 349750 - DNA, 20 bp, Artificial Sequence
  Description of Artificial Sequence: Synthetic oligonucleotide
  Target: LAMA2; (+) strand; PAM type: YTN; PAM sequence: TTT
tgtagaataaataaaaagat

SEQ ID NO: 349751 - DNA, 20 bp, Artificial Sequence
  Description of Artificial Sequence: Synthetic oligonucleotide
  Target: LAMA2; (+) strand; PAM type: YTN; PAM sequence: TTT
gtagaataaataaaaagatt

SEQ ID NO: 349752 - DNA, 20 bp, Artificial Sequence
  Description of Artificial Sequence: Synthetic oligonucleotide
  Target: LAMA2; (+) strand; PAM type: YTN; PAM sequence: TTG
tagaataaataaaaagattg

SEQ ID NO: 349753 - DNA, 20 bp, Artificial Sequence
  Description of Artificial Sequence: Synthetic oligonucleotide
  Target: LAMA2; (+) strand; PAM type: YTN; PAM sequence: TTG
agctgtatgcatacaagcac

SEQ ID NO: 349754 - DNA, 20 bp, Artificial Sequence
  Description of Artificial Sequence: Synthetic oligonucleotide
  Target: LAMA2; (+) strand; PAM type: YTN; PAM sequence: CTG
tatgcatacaagcacaccta

SEQ ID NO: 349755 - DNA, 20 bp, Artificial Sequence
  Description of Artificial Sequence: Synthetic oligonucleotide
  Target: LAMA2; (+) strand; PAM type: YTN; PAM sequence: CTA
cacacacacacacacacgtg

SEQ ID NO: 349756 - DNA, 20 bp, Artificial Sequence
  Description of Artificial Sequence: Synthetic oligonucleotide
  Target: LAMA2; (+) strand; PAM type: YTN; PAM sequence: CTC
ctaagaaactcaacatgtca

SEQ ID NO: 349757 - DNA, 20 bp, Artificial Sequence
  Description of Artificial Sequence: Synthetic oligonucleotide
  Target: LAMA2; (+) strand; PAM type: YTN; PAM sequence: CTA
agaaactcaacatgtcaggt

SEQ ID NO: 349758 - DNA, 20 bp, Artificial Sequence
  Description of Artificial Sequence: Synthetic oligonucleotide
  Target: LAMA2; (+) strand; PAM type: YTN; PAM sequence: CTC
aacatgtcaggtaggaagga

SEQ ID NO: 349759 - DNA, 20 bp, Artificial Sequence
  Description of Artificial Sequence: Synthetic oligonucleotide
  Target: LAMA2; (+) strand; PAM type: YTN; PAM sequence: CTG
catcgatatatttccctggt

SEQ ID NO: 349760 - DNA, 20 bp, Artificial Sequence
  Description of Artificial Sequence: Synthetic oligonucleotide
  Target: LAMA2; (+) strand; PAM type: YTN; PAM sequence: TTT
ccctggttctatcctaatat

SEQ ID NO: 349761 - DNA, 20 bp, Artificial Sequence
  Description of Artificial Sequence: Synthetic oligonucleotide
  Target: LAMA2; (+) strand; PAM type: YTN; PAM sequence: TTC
cctggttctatcctaatata

SEQ ID NO: 349762 - DNA, 20 bp, Artificial Sequence
  Description of Artificial Sequence: Synthetic oligonucleotide
  Target: LAMA2; (+) strand; PAM type: YTN; PAM sequence: CTG
gttctatcctaatataaatt

SEQ ID NO: 349763 - DNA, 20 bp, Artificial Sequence
  Description of Artificial Sequence: Synthetic oligonucleotide
  Target: LAMA2; (+) strand; PAM type: YTN; PAM sequence: TTC
tatcctaatataaattcttc

SEQ ID NO: 349764 - DNA, 20 bp, Artificial Sequence
  Description of Artificial Sequence: Synthetic oligonucleotide
  Target: LAMA2; (+) strand; PAM type: YTN; PAM sequence: CTA
tcctaatataaattcttcat

SEQ ID NO: 349765 - DNA, 20 bp, Artificial Sequence
  Description of Artificial Sequence: Synthetic oligonucleotide
  Target: LAMA2; (+) strand; PAM type: YTN; PAM sequence: CTA
atataaattcttcatattta

SEQ ID NO: 349766 - DNA, 20 bp, Artificial Sequence
  Description of Artificial Sequence: Synthetic oligonucleotide
  Target: LAMA2; (+) strand; PAM type: YTN; PAM sequence: TTC
ttcatatttagaagagtctt

SEQ ID NO: 349767 - DNA, 20 bp, Artificial Sequence
  Description of Artificial Sequence: Synthetic oligonucleotide
  Target: LAMA2; (+) strand; PAM type: YTN; PAM sequence: CTT
catatttagaagagtcttac

SEQ ID NO: 349768 - DNA, 20 bp, Artificial Sequence
  Description of Artificial Sequence: Synthetic oligonucleotide
  Target: LAMA2; (+) strand; PAM type: YTN; PAM sequence: TTC
atatttagaagagtcttacc

SEQ ID NO: 349769 - DNA, 20 bp, Artificial Sequence
  Description of Artificial Sequence: Synthetic oligonucleotide
  Target: LAMA2; (+) strand; PAM type: YTN; PAM sequence: TTT
agaagagtcttacccaatcc

SEQ ID NO: 349770 - DNA, 20 bp, Artificial Sequence
  Description of Artificial Sequence: Synthetic oligonucleotide
  Target: LAMA2; (+) strand; PAM type: YTN; PAM sequence: TTA
gaagagtcttacccaatcct

SEQ ID NO: 349771 - DNA, 20 bp, Artificial Sequence
  Description of Artificial Sequence: Synthetic oligonucleotide
  Target: LAMA2; (+) strand; PAM type: YTN; PAM sequence: CTT
acccaatcctttctggagaa

SEQ ID NO: 349772 - DNA, 20 bp, Artificial Sequence
  Description of Artificial Sequence: Synthetic oligonucleotide
  Target: LAMA2; (+) strand; PAM type: YTN; PAM sequence: TTA
cccaatcctttctggagaaa

SEQ ID NO: 349773 - DNA, 20 bp, Artificial Sequence
  Description of Artificial Sequence: Synthetic oligonucleotide
  Target: LAMA2; (+) strand; PAM type: YTN; PAM sequence: CTT
tctggagaaagtgatttttc

SEQ ID NO: 349774 - DNA, 20 bp, Artificial Sequence
  Description of Artificial Sequence: Synthetic oligonucleotide
  Target: LAMA2; (+) strand; PAM type: YTN; PAM sequence: TTT
ctggagaaagtgatttttca

SEQ ID NO: 349775 - DNA, 20 bp, Artificial Sequence
  Description of Artificial Sequence: Synthetic oligonucleotide
  Target: LAMA2; (+) strand; PAM type: YTN; PAM sequence: TTC
tggagaaagtgatttttcac

SEQ ID NO: 349776 - DNA, 20 bp, Artificial Sequence
  Description of Artificial Sequence: Synthetic oligonucleotide
  Target: LAMA2; (+) strand; PAM type: YTN; PAM sequence: CTG
gagaaagtgatttttcactt

SEQ ID NO: 349777 - DNA, 20 bp, Artificial Sequence
  Description of Artificial Sequence: Synthetic oligonucleotide
  Target: LAMA2; (+) strand; PAM type: YTN; PAM sequence: TTT
ttcacttcttggaattcttc

SEQ ID NO: 349778 - DNA, 20 bp, Artificial Sequence
  Description of Artificial Sequence: Synthetic oligonucleotide
  Target: LAMA2; (+) strand; PAM type: YTN; PAM sequence: TTT
tcacttcttggaattcttct

SEQ ID NO: 349779 - DNA, 20 bp, Artificial Sequence
  Description of Artificial Sequence: Synthetic oligonucleotide
  Target: LAMA2; (+) strand; PAM type: YTN; PAM sequence: TTT
cacttcttggaattcttcta

SEQ ID NO: 349780 - DNA, 20 bp, Artificial Sequence
  Description of Artificial Sequence: Synthetic oligonucleotide
  Target: LAMA2; (+) strand; PAM type: YTN; PAM sequence: TTC
acttcttggaattcttctaa

SEQ ID NO: 349781 - DNA, 20 bp, Artificial Sequence
  Description of Artificial Sequence: Synthetic oligonucleotide
  Target: LAMA2; (+) strand; PAM type: YTN; PAM sequence: CTT
cttggaattcttctaatgta

SEQ ID NO: 349782 - DNA, 20 bp, Artificial Sequence
  Description of Artificial Sequence: Synthetic oligonucleotide
  Target: LAMA2; (+) strand; PAM type: YTN; PAM sequence: TTC
ttggaattcttctaatgtaa

SEQ ID NO: 349783 - DNA, 20 bp, Artificial Sequence
  Description of Artificial Sequence: Synthetic oligonucleotide
  Target: LAMA2; (+) strand; PAM type: YTN; PAM sequence: CTT
ggaattcttctaatgtaaca

SEQ ID NO: 349784 - DNA, 20 bp, Artificial Sequence
  Description of Artificial Sequence: Synthetic oligonucleotide
  Target: LAMA2; (+) strand; PAM type: YTN; PAM sequence: TTG
gaattcttctaatgtaacat

SEQ ID NO: 349785 - DNA, 20 bp, Artificial Sequence
  Description of Artificial Sequence: Synthetic oligonucleotide
  Target: LAMA2; (+) strand; PAM type: YTN; PAM sequence: TTC
ttctaatgtaacatgaaaaa

SEQ ID NO: 349786 - DNA, 20 bp, Artificial Sequence
  Description of Artificial Sequence: Synthetic oligonucleotide
  Target: LAMA2; (+) strand; PAM type: YTN; PAM sequence: CTT
ctaatgtaacatgaaaaaga

SEQ ID NO: 349787 - DNA, 20 bp, Artificial Sequence
  Description of Artificial Sequence: Synthetic oligonucleotide
  Target: LAMA2; (+) strand; PAM type: YTN; PAM sequence: TTC
taatgtaacatgaaaaagac

SEQ ID NO: 349788 - DNA, 20 bp, Artificial Sequence
  Description of Artificial Sequence: Synthetic oligonucleotide
  Target: LAMA2; (+) strand; PAM type: YTN; PAM sequence: CTA
atgtaacatgaaaaagacaa

SEQ ID NO: 349789 - DNA, 20 bp, Artificial Sequence
  Description of Artificial Sequence: Synthetic oligonucleotide
  Target: LAMA2; (+) strand; PAM type: YTN; PAM sequence: TTG
ctaacttctttataagacat

SEQ ID NO: 349790 - DNA, 20 bp, Artificial Sequence
  Description of Artificial Sequence: Synthetic oligonucleotide
  Target: LAMA2; (+) strand; PAM type: YTN; PAM sequence: CTA
acttctttataagacattac

SEQ ID NO: 349791 - DNA, 20 bp, Artificial Sequence
  Description of Artificial Sequence: Synthetic oligonucleotide
  Target: LAMA2; (+) strand; PAM type: YTN; PAM sequence: CTT
ctttataagacattacgcta

SEQ ID NO: 349792 - DNA, 20 bp, Artificial Sequence
  Description of Artificial Sequence: Synthetic oligonucleotide
  Target: LAMA2; (+) strand; PAM type: YTN; PAM sequence: TTC
tttataagacattacgctaa

SEQ ID NO: 349793 - DNA, 20 bp, Artificial Sequence
  Description of Artificial Sequence: Synthetic oligonucleotide
  Target: LAMA2; (+) strand; PAM type: YTN; PAM sequence: CTT
tataagacattacgctaatg

SEQ ID NO: 349794 - DNA, 20 bp, Artificial Sequence
  Description of Artificial Sequence: Synthetic oligonucleotide
  Target: LAMA2; (+) strand; PAM type: YTN; PAM sequence: TTT
ataagacattacgctaatga

SEQ ID NO: 349795 - DNA, 20 bp, Artificial Sequence
  Description of Artificial Sequence: Synthetic oligonucleotide
  Target: LAMA2; (+) strand; PAM type: YTN; PAM sequence: TTA
taagacattacgctaatgat

SEQ ID NO: 349796 - DNA, 20 bp, Artificial Sequence
  Description of Artificial Sequence: Synthetic oligonucleotide
  Target: LAMA2; (+) strand; PAM type: YTN; PAM sequence: TTA
cgctaatgatttcacatgca

SEQ ID NO: 349797 - DNA, 20 bp, Artificial Sequence
  Description of Artificial Sequence: Synthetic oligonucleotide
  Target: LAMA2; (+) strand; PAM type: YTN; PAM sequence: CTA
atgatttcacatgcattatc

SEQ ID NO: 349798 - DNA, 20 bp, Artificial Sequence
  Description of Artificial Sequence: Synthetic oligonucleotide
  Target: LAMA2; (+) strand; PAM type: YTN; PAM sequence: TTT
cacatgcattatctcacttg

SEQ ID NO: 349799 - DNA, 20 bp, Artificial Sequence
  Description of Artificial Sequence: Synthetic oligonucleotide
  Target: LAMA2; (+) strand; PAM type: YTN; PAM sequence: TTC
acatgcattatctcacttgt

SEQ ID NO: 349800 - DNA, 20 bp, Artificial Sequence
  Description of Artificial Sequence: Synthetic oligonucleotide
  Target: LAMA2; (+) strand; PAM type: YTN; PAM sequence: TTA
tctcacttgtgcttttaaat

SEQ ID NO: 349801 - DNA, 20 bp, Artificial Sequence
  Description of Artificial Sequence: Synthetic oligonucleotide
  Target: LAMA2; (+) strand; PAM type: YTN; PAM sequence: CTC
acttgtgcttttaaatatcc

SEQ ID NO: 349802 - DNA, 20 bp, Artificial Sequence
  Description of Artificial Sequence: Synthetic oligonucleotide
  Target: LAMA2; (+) strand; PAM type: YTN; PAM sequence: CTT
gtgcttttaaatatcccaat

SEQ ID NO: 349803 - DNA, 20 bp, Artificial Sequence
  Description of Artificial Sequence: Synthetic oligonucleotide
  Target: LAMA2; (+) strand; PAM type: YTN; PAM sequence: TTG
tgcttttaaatatcccaatc

SEQ ID NO: 349804 - DNA, 20 bp, Artificial Sequence
  Description of Artificial Sequence: Synthetic oligonucleotide
  Target: LAMA2; (+) strand; PAM type: YTN; PAM sequence: CTT
ttaaatatcccaatctagta

SEQ ID NO: 349805 - DNA, 20 bp, Artificial Sequence
  Description of Artificial Sequence: Synthetic oligonucleotide
  Target: LAMA2; (+) strand; PAM type: YTN; PAM sequence: TTT
taaatatcccaatctagtaa

SEQ ID NO: 349806 - DNA, 20 bp, Artificial Sequence
  Description of Artificial Sequence: Synthetic oligonucleotide
  Target: LAMA2; (+) strand; PAM type: YTN; PAM sequence: TTT
aaatatcccaatctagtaat

SEQ ID NO: 349807 - DNA, 20 bp, Artificial Sequence
  Description of Artificial Sequence: Synthetic oligonucleotide
  Target: LAMA2; (+) strand; PAM type: YTN; PAM sequence: TTA
aatatcccaatctagtaatt

SEQ ID NO: 349808 - DNA, 20 bp, Artificial Sequence
  Description of Artificial Sequence: Synthetic oligonucleotide
  Target: LAMA2; (+) strand; PAM type: YTN; PAM sequence: CTA
gtaattactattgaccactc

SEQ ID NO: 349809 - DNA, 20 bp, Artificial Sequence
  Description of Artificial Sequence: Synthetic oligonucleotide
  Target: LAMA2; (+) strand; PAM type: YTN; PAM sequence: TTA
ctattgaccactccatgtat

SEQ ID NO: 349810 - DNA, 20 bp, Artificial Sequence
  Description of Artificial Sequence: Synthetic oligonucleotide
  Target: LAMA2; (+) strand; PAM type: YTN; PAM sequence: CTA
ttgaccactccatgtattat

SEQ ID NO: 349811 - DNA, 20 bp, Artificial Sequence
  Description of Artificial Sequence: Synthetic oligonucleotide
  Target: LAMA2; (+) strand; PAM type: YTN; PAM sequence: TTG
accactccatgtattatatg

SEQ ID NO: 349812 - DNA, 20 bp, Artificial Sequence
  Description of Artificial Sequence: Synthetic oligonucleotide
  Target: LAMA2; (+) strand; PAM type: YTN; PAM sequence: CTC
catgtattatatggaaactg

SEQ ID NO: 349813 - DNA, 20 bp, Artificial Sequence
  Description of Artificial Sequence: Synthetic oligonucleotide
  Target: LAMA2; (+) strand; PAM type: YTN; PAM sequence: TTA
tatggaaactgagccttcgt

SEQ ID NO: 349814 - DNA, 20 bp, Artificial Sequence
  Description of Artificial Sequence: Synthetic oligonucleotide
  Target: LAMA2; (+) strand; PAM type: YTN; PAM sequence: CTG
agccttcgtgaaattaagaa

SEQ ID NO: 349815 - DNA, 20 bp, Artificial Sequence
  Description of Artificial Sequence: Synthetic oligonucleotide
  Target: LAMA2; (+) strand; PAM type: YTN; PAM sequence: CTT
cgtgaaattaagaagtttcc

SEQ ID NO: 349816 - DNA, 20 bp, Artificial Sequence
  Description of Artificial Sequence: Synthetic oligonucleotide
  Target: LAMA2; (+) strand; PAM type: YTN; PAM sequence: TTC
gtgaaattaagaagtttcca

SEQ ID NO: 349817 - DNA, 20 bp, Artificial Sequence
  Description of Artificial Sequence: Synthetic oligonucleotide
  Target: LAMA2; (+) strand; PAM type: YTN; PAM sequence: TTA
agaagtttccaatgtcatat

SEQ ID NO: 349818 - DNA, 20 bp, Artificial Sequence
  Description of Artificial Sequence: Synthetic oligonucleotide
  Target: LAMA2; (+) strand; PAM type: YTN; PAM sequence: TTT
ccaatgtcatatgactgcta

SEQ ID NO: 349819 - DNA, 20 bp, Artificial Sequence
  Description of Artificial Sequence: Synthetic oligonucleotide
  Target: LAMA2; (+) strand; PAM type: YTN; PAM sequence: TTC
caatgtcatatgactgctaa

SEQ ID NO: 349820 - DNA, 20 bp, Artificial Sequence
  Description of Artificial Sequence: Synthetic oligonucleotide
  Target: LAMA2; (+) strand; PAM type: YTN; PAM sequence: CTG
ctaagtagaggagagcacac

SEQ ID NO: 349821 - DNA, 20 bp, Artificial Sequence
  Description of Artificial Sequence: Synthetic oligonucleotide
  Target: LAMA2; (+) strand; PAM type: YTN; PAM sequence: CTA
agtagaggagagcacaccca

SEQ ID NO: 349822 - DNA, 20 bp, Artificial Sequence
  Description of Artificial Sequence: Synthetic oligonucleotide
  Target: LAMA2; (+) strand; PAM type: YTN; PAM sequence: TTG
gttgcaaaatagcatgatct

SEQ ID NO: 349823 - DNA, 20 bp, Artificial Sequence
  Description of Artificial Sequence: Synthetic oligonucleotide
  Target: LAMA2; (+) strand; PAM type: YTN; PAM sequence: TTG
caaaatagcatgatcttagc

SEQ ID NO: 349824 - DNA, 20 bp, Artificial Sequence
  Description of Artificial Sequence: Synthetic oligonucleotide
  Target: LAMA2; (+) strand; PAM type: YTN; PAM sequence: CTT
agccaccagtaaactagctc

SEQ ID NO: 349825 - DNA, 20 bp, Artificial Sequence
  Description of Artificial Sequence: Synthetic oligonucleotide
  Target: LAMA2; (+) strand; PAM type: YTN; PAM sequence: TTA
gccaccagtaaactagctct

SEQ ID NO: 349826 - DNA, 20 bp, Artificial Sequence
  Description of Artificial Sequence: Synthetic oligonucleotide
  Target: LAMA2; (+) strand; PAM type: YTN; PAM sequence: CTA
gctctcggtttgtcttaatt

SEQ ID NO: 349827 - DNA, 20 bp, Artificial Sequence
  Description of Artificial Sequence: Synthetic oligonucleotide
  Target: LAMA2; (+) strand; PAM type: YTN; PAM sequence: CTC
tcggtttgtcttaattcctt

SEQ ID NO: 349828 - DNA, 20 bp, Artificial Sequence
  Description of Artificial Sequence: Synthetic oligonucleotide
  Target: LAMA2; (+) strand; PAM type: YTN; PAM sequence: CTC
ggtttgtcttaattccttgg

SEQ ID NO: 349829 - DNA, 20 bp, Artificial Sequence
  Description of Artificial Sequence: Synthetic oligonucleotide
  Target: LAMA2; (+) strand; PAM type: YTN; PAM sequence: TTT
gtcttaattccttggcacct

SEQ ID NO: 349830 - DNA, 20 bp, Artificial Sequence
  Description of Artificial Sequence: Synthetic oligonucleotide
  Target: LAMA2; (+) strand; PAM type: YTN; PAM sequence: TTG
tcttaattccttggcacctg

SEQ ID NO: 349831 - DNA, 20 bp, Artificial Sequence
  Description of Artificial Sequence: Synthetic oligonucleotide
  Target: LAMA2; (+) strand; PAM type: YTN; PAM sequence: CTT
aattccttggcacctgccat

SEQ ID NO: 349832 - DNA, 20 bp, Artificial Sequence
  Description of Artificial Sequence: Synthetic oligonucleotide
  Target: LAMA2; (+) strand; PAM type: YTN; PAM sequence: TTA
attccttggcacctgccatg

SEQ ID NO: 349833 - DNA, 20 bp, Artificial Sequence
  Description of Artificial Sequence: Synthetic oligonucleotide
  Target: LAMA2; (+) strand; PAM type: YTN; PAM sequence: TTC
cttggcacctgccatgtatc

SEQ ID NO: 349834 - DNA, 20 bp, Artificial Sequence
  Description of Artificial Sequence: Synthetic oligonucleotide
  Target: LAMA2; (+) strand; PAM type: YTN; PAM sequence: CTT
ggcacctgccatgtatctta

SEQ ID NO: 349835 - DNA, 20 bp, Artificial Sequence
  Description of Artificial Sequence: Synthetic oligonucleotide
  Target: LAMA2; (+) strand; PAM type: YTN; PAM sequence: TTG
gcacctgccatgtatcttat

SEQ ID NO: 349836 - DNA, 20 bp, Artificial Sequence
  Description of Artificial Sequence: Synthetic oligonucleotide
  Target: LAMA2; (+) strand; PAM type: YTN; PAM sequence: CTG
ccatgtatcttatttcattc

SEQ ID NO: 349837 - DNA, 20 bp, Artificial Sequence
  Description of Artificial Sequence: Synthetic oligonucleotide
  Target: LAMA2; (+) strand; PAM type: YTN; PAM sequence: CTT
atttcattcaccgggtagga

SEQ ID NO: 349838 - DNA, 20 bp, Artificial Sequence
  Description of Artificial Sequence: Synthetic oligonucleotide
  Target: LAMA2; (+) strand; PAM type: YTN; PAM sequence: TTA
tttcattcaccgggtaggat

SEQ ID NO: 349839 - DNA, 20 bp, Artificial Sequence
  Description of Artificial Sequence: Synthetic oligonucleotide
  Target: LAMA2; (+) strand; PAM type: YTN; PAM sequence: TTT
cattcaccgggtaggatgtg

SEQ ID NO: 349840 - DNA, 20 bp, Artificial Sequence
  Description of Artificial Sequence: Synthetic oligonucleotide
  Target: LAMA2; (+) strand; PAM type: YTN; PAM sequence: TTC
attcaccgggtaggatgtga

SEQ ID NO: 349841 - DNA, 20 bp, Artificial Sequence
  Description of Artificial Sequence: Synthetic oligonucleotide
  Target: LAMA2; (+) strand; PAM type: YTN; PAM sequence: TTC
accgggtaggatgtgaagag

SEQ ID NO: 349842 - DNA, 20 bp, Artificial Sequence
  Description of Artificial Sequence: Synthetic oligonucleotide
  Target: LAMA2; (+) strand; PAM type: YTN; PAM sequence: TTC
tggcagtctttagcagtgca

SEQ ID NO: 349843 - DNA, 20 bp, Artificial Sequence
  Description of Artificial Sequence: Synthetic oligonucleotide
  Target: LAMA2; (+) strand; PAM type: YTN; PAM sequence: CTG
gcagtctttagcagtgcaga

SEQ ID NO: 349844 - DNA, 20 bp, Artificial Sequence
  Description of Artificial Sequence: Synthetic oligonucleotide
  Target: LAMA2; (+) strand; PAM type: YTN; PAM sequence: CTT
tagcagtgcagactctggag

SEQ ID NO: 349845 - DNA, 20 bp, Artificial Sequence
  Description of Artificial Sequence: Synthetic oligonucleotide
  Target: LAMA2; (+) strand; PAM type: YTN; PAM sequence: TTT
agcagtgcagactctggagt

SEQ ID NO: 349846 - DNA, 20 bp, Artificial Sequence
  Description of Artificial Sequence: Synthetic oligonucleotide
  Target: LAMA2; (+) strand; PAM type: YTN; PAM sequence: TTA
gcagtgcagactctggagtc

SEQ ID NO: 349847 - DNA, 20 bp, Artificial Sequence
  Description of Artificial Sequence: Synthetic oligonucleotide
  Target: LAMA2; (+) strand; PAM type: YTN; PAM sequence: CTC
tggagtctggcttcagaggt

SEQ ID NO: 349848 - DNA, 20 bp, Artificial Sequence
  Description of Artificial Sequence: Synthetic oligonucleotide
  Target: LAMA2; (+) strand; PAM type: YTN; PAM sequence: CTG
gagtctggcttcagaggttg

SEQ ID NO: 349849 - DNA, 20 bp, Artificial Sequence
  Description of Artificial Sequence: Synthetic oligonucleotide
  Target: LAMA2; (+) strand; PAM type: YTN; PAM sequence: CTG
gcttcagaggttggtttcca

SEQ ID NO: 349850 - DNA, 20 bp, Artificial Sequence
  Description of Artificial Sequence: Synthetic oligonucleotide
  Target: LAMA2; (+) strand; PAM type: YTN; PAM sequence: CTT
cagaggttggtttccaatac

SEQ ID NO: 349851 - DNA, 20 bp, Artificial Sequence
  Description of Artificial Sequence: Synthetic oligonucleotide
  Target: LAMA2; (+) strand; PAM type: YTN; PAM sequence: TTC
agaggttggtttccaatact

SEQ ID NO: 349852 - DNA, 20 bp, Artificial Sequence
  Description of Artificial Sequence: Synthetic oligonucleotide
  Target: LAMA2; (+) strand; PAM type: YTN; PAM sequence: TTG
gtttccaatactgattagaa

SEQ ID NO: 349853 - DNA, 20 bp, Artificial Sequence
  Description of Artificial Sequence: Synthetic oligonucleotide
  Target: LAMA2; (+) strand; PAM type: YTN; PAM sequence: TTT
ccaatactgattagaatatc

SEQ ID NO: 349854 - DNA, 20 bp, Artificial Sequence
  Description of Artificial Sequence: Synthetic oligonucleotide
  Target: LAMA2; (+) strand; PAM type: YTN; PAM sequence: TTC
caatactgattagaatatct

SEQ ID NO: 349855 - DNA, 20 bp, Artificial Sequence
  Description of Artificial Sequence: Synthetic oligonucleotide
  Target: LAMA2; (+) strand; PAM type: YTN; PAM sequence: CTG
attagaatatcttttacacg

SEQ ID NO: 349856 - DNA, 20 bp, Artificial Sequence
  Description of Artificial Sequence: Synthetic oligonucleotide
  Target: LAMA2; (+) strand; PAM type: YTN; PAM sequence: TTA
gaatatcttttacacgttat

SEQ ID NO: 349857 - DNA, 20 bp, Artificial Sequence
  Description of Artificial Sequence: Synthetic oligonucleotide
  Target: LAMA2; (+) strand; PAM type: YTN; PAM sequence: CTT
ttacacgttatttcacttct

SEQ ID NO: 349858 - DNA, 20 bp, Artificial Sequence
  Description of Artificial Sequence: Synthetic oligonucleotide
  Target: LAMA2; (+) strand; PAM type: YTN; PAM sequence: TTT
tacacgttatttcacttctc

SEQ ID NO: 349859 - DNA, 20 bp, Artificial Sequence
  Description of Artificial Sequence: Synthetic oligonucleotide
  Target: LAMA2; (+) strand; PAM type: YTN; PAM sequence: TTT
acacgttatttcacttctct

SEQ ID NO: 349860 - DNA, 20 bp, Artificial Sequence
  Description of Artificial Sequence: Synthetic oligonucleotide
  Target: LAMA2; (+) strand; PAM type: YTN; PAM sequence: TTA
cacgttatttcacttctctg

SEQ ID NO: 349861 - DNA, 20 bp, Artificial Sequence
  Description of Artificial Sequence: Synthetic oligonucleotide
  Target: LAMA2; (+) strand; PAM type: YTN; PAM sequence: TTA
tttcacttctctggactcag

SEQ ID NO: 349862 - DNA, 20 bp, Artificial Sequence
  Description of Artificial Sequence: Synthetic oligonucleotide
  Target: LAMA2; (+) strand; PAM type: YTN; PAM sequence: TTT
cacttctctggactcaggtt

SEQ ID NO: 349863 - DNA, 20 bp, Artificial Sequence
  Description of Artificial Sequence: Synthetic oligonucleotide
  Target: LAMA2; (+) strand; PAM type: YTN; PAM sequence: TTC
acttctctggactcaggttt

SEQ ID NO: 349864 - DNA, 20 bp, Artificial Sequence
  Description of Artificial Sequence: Synthetic oligonucleotide
  Target: LAMA2; (+) strand; PAM type: YTN; PAM sequence: CTT
ctctggactcaggtttctag

SEQ ID NO: 349865 - DNA, 20 bp, Artificial Sequence
  Description of Artificial Sequence: Synthetic oligonucleotide
  Target: LAMA2; (+) strand; PAM type: YTN; PAM sequence: TTC
tctggactcaggtttctagt

SEQ ID NO: 349866 - DNA, 20 bp, Artificial Sequence
  Description of Artificial Sequence: Synthetic oligonucleotide
  Target: LAMA2; (+) strand; PAM type: YTN; PAM sequence: CTC
tggactcaggtttctagtat

SEQ ID NO: 349867 - DNA, 20 bp, Artificial Sequence
  Description of Artificial Sequence: Synthetic oligonucleotide
  Target: LAMA2; (+) strand; PAM type: YTN; PAM sequence: CTG
gactcaggtttctagtatac

SEQ ID NO: 349868 - DNA, 20 bp, Artificial Sequence
  Description of Artificial Sequence: Synthetic oligonucleotide
  Target: LAMA2; (+) strand; PAM type: YTN; PAM sequence: CTC
aggtttctagtatacaaaaa

SEQ ID NO: 349869 - DNA, 20 bp, Artificial Sequence
  Description of Artificial Sequence: Synthetic oligonucleotide
  Target: LAMA2; (+) strand; PAM type: YTN; PAM sequence: TTT
ctagtatacaaaaataggtt

SEQ ID NO: 349870 - DNA, 20 bp, Artificial Sequence
  Description of Artificial Sequence: Synthetic oligonucleotide
  Target: LAMA2; (+) strand; PAM type: YTN; PAM sequence: TTC
tagtatacaaaaataggtta

SEQ ID NO: 349871 - DNA, 20 bp, Artificial Sequence
  Description of Artificial Sequence: Synthetic oligonucleotide
  Target: LAMA2; (+) strand; PAM type: YTN; PAM sequence: CTA
gtatacaaaaataggttaat

SEQ ID NO: 349872 - DNA, 20 bp, Artificial Sequence
  Description of Artificial Sequence: Synthetic oligonucleotide
  Target: LAMA2; (+) strand; PAM type: YTN; PAM sequence: TTA
ataataataatacctaattc

SEQ ID NO: 349873 - DNA, 20 bp, Artificial Sequence
  Description of Artificial Sequence: Synthetic oligonucleotide
  Target: LAMA2; (+) strand; PAM type: YTN; PAM sequence: CTA
attcctaaaagcatttttga

SEQ ID NO: 349874 - DNA, 20 bp, Artificial Sequence
  Description of Artificial Sequence: Synthetic oligonucleotide
  Target: LAMA2; (+) strand; PAM type: YTN; PAM sequence: TTC
ctaaaagcatttttgaggat

SEQ ID NO: 349875 - DNA, 20 bp, Artificial Sequence
  Description of Artificial Sequence: Synthetic oligonucleotide
  Target: LAMA2; (+) strand; PAM type: YTN; PAM sequence: CTA
aaagcatttttgaggattaa

SEQ ID NO: 349876 - DNA, 20 bp, Artificial Sequence
  Description of Artificial Sequence: Synthetic oligonucleotide
  Target: LAMA2; (+) strand; PAM type: YTN; PAM sequence: TTT
ttgaggattaaaatcagtag

SEQ ID NO: 349877 - DNA, 20 bp, Artificial Sequence
  Description of Artificial Sequence: Synthetic oligonucleotide
  Target: LAMA2; (+) strand; PAM type: YTN; PAM sequence: TTT
tgaggattaaaatcagtagc

SEQ ID NO: 349878 - DNA, 20 bp, Artificial Sequence
  Description of Artificial Sequence: Synthetic oligonucleotide
  Target: LAMA2; (+) strand; PAM type: YTN; PAM sequence: TTT
gaggattaaaatcagtagca

SEQ ID NO: 349879 - DNA, 20 bp, Artificial Sequence
  Description of Artificial Sequence: Synthetic oligonucleotide
  Target: LAMA2; (+) strand; PAM type: YTN; PAM sequence: TTG
aggattaaaatcagtagcaa

SEQ ID NO: 349880 - DNA, 20 bp, Artificial Sequence
  Description of Artificial Sequence: Synthetic oligonucleotide
  Target: LAMA2; (+) strand; PAM type: YTN; PAM sequence: TTA
aaatcagtagcaacaaatat

SEQ ID NO: 349881 - DNA, 20 bp, Artificial Sequence
  Description of Artificial Sequence: Synthetic oligonucleotide
  Target: LAMA2; (+) strand; PAM type: YTN; PAM sequence: TTT
agaacagtgtctggcattga

SEQ ID NO: 349882 - DNA, 20 bp, Artificial Sequence
  Description of Artificial Sequence: Synthetic oligonucleotide
  Target: LAMA2; (+) strand; PAM type: YTN; PAM sequence: TTA
gaacagtgtctggcattgag

SEQ ID NO: 349883 - DNA, 20 bp, Artificial Sequence
  Description of Artificial Sequence: Synthetic oligonucleotide
  Target: LAMA2; (+) strand; PAM type: YTN; PAM sequence: CTG
gcattgagaaaacctatgtt

SEQ ID NO: 349884 - DNA, 20 bp, Artificial Sequence
  Description of Artificial Sequence: Synthetic oligonucleotide
  Target: LAMA2; (+) strand; PAM type: YTN; PAM sequence: TTG
agaaaacctatgttttagtt

SEQ ID NO: 349885 - DNA, 20 bp, Artificial Sequence
  Description of Artificial Sequence: Synthetic oligonucleotide
  Target: LAMA2; (+) strand; PAM type: YTN; PAM sequence: CTA
tgttttagttgttattagta

SEQ ID NO: 349886 - DNA, 20 bp, Artificial Sequence
  Description of Artificial Sequence: Synthetic oligonucleotide
  Target: LAMA2; (+) strand; PAM type: YTN; PAM sequence: TTT
tagttgttattagtattaaa

SEQ ID NO: 349887 - DNA, 20 bp, Artificial Sequence
  Description of Artificial Sequence: Synthetic oligonucleotide
  Target: LAMA2; (+) strand; PAM type: YTN; PAM sequence: TTT
agttgttattagtattaaaa

SEQ ID NO: 349888 - DNA, 20 bp, Artificial Sequence
  Description of Artificial Sequence: Synthetic oligonucleotide
  Target: LAMA2; (+) strand; PAM type: YTN; PAM sequence: TTA
gttgttattagtattaaaag

SEQ ID NO: 349889 - DNA, 20 bp, Artificial Sequence
  Description of Artificial Sequence: Synthetic oligonucleotide
  Target: LAMA2; (+) strand; PAM type: YTN; PAM sequence: TTG
ttattagtattaaaagaaag

SEQ ID NO: 349890 - DNA, 20 bp, Artificial Sequence
  Description of Artificial Sequence: Synthetic oligonucleotide
  Target: LAMA2; (+) strand; PAM type: YTN; PAM sequence: TTA
ttagtattaaaagaaaggaa

SEQ ID NO: 349891 - DNA, 20 bp, Artificial Sequence
  Description of Artificial Sequence: Synthetic oligonucleotide
  Target: LAMA2; (+) strand; PAM type: YTN; PAM sequence: TTA
gtattaaaagaaaggaatta

SEQ ID NO: 349892 - DNA, 20 bp, Artificial Sequence
  Description of Artificial Sequence: Synthetic oligonucleotide
  Target: LAMA2; (+) strand; PAM type: YTN; PAM sequence: TTA
aaagaaaggaattatattat

SEQ ID NO: 349893 - DNA, 20 bp, Artificial Sequence
  Description of Artificial Sequence: Synthetic oligonucleotide
  Target: LAMA2; (+) strand; PAM type: YTN; PAM sequence: TTA
tattatacatacttttcttt

SEQ ID NO: 349894 - DNA, 20 bp, Artificial Sequence
  Description of Artificial Sequence: Synthetic oligonucleotide
  Target: LAMA2; (+) strand; PAM type: YTN; PAM sequence: TTA
tacatacttttctttaccca

SEQ ID NO: 349895 - DNA, 20 bp, Artificial Sequence
  Description of Artificial Sequence: Synthetic oligonucleotide
  Target: LAMA2; (+) strand; PAM type: YTN; PAM sequence: CTT
ttctttacccacaggctcta

SEQ ID NO: 349896 - DNA, 20 bp, Artificial Sequence
  Description of Artificial Sequence: Synthetic oligonucleotide
  Target: LAMA2; (+) strand; PAM type: YTN; PAM sequence: TTT
tctttacccacaggctctaa

SEQ ID NO: 349897 - DNA, 20 bp, Artificial Sequence
  Description of Artificial Sequence: Synthetic oligonucleotide
  Target: LAMA2; (+) strand; PAM type: YTN; PAM sequence: TTT
ctttacccacaggctctaat

SEQ ID NO: 349898 - DNA, 20 bp, Artificial Sequence
  Description of Artificial Sequence: Synthetic oligonucleotide
  Target: LAMA2; (+) strand; PAM type: YTN; PAM sequence: TTC
tttacccacaggctctaata

SEQ ID NO: 349899 - DNA, 20 bp, Artificial Sequence
  Description of Artificial Sequence: Synthetic oligonucleotide
  Target: LAMA2; (+) strand; PAM type: YTN; PAM sequence: CTT
tacccacaggctctaataca

SEQ ID NO: 349900 - DNA, 20 bp, Artificial Sequence
  Description of Artificial Sequence: Synthetic oligonucleotide
  Target: LAMA2; (+) strand; PAM type: YTN; PAM sequence: TTT
acccacaggctctaatacag

SEQ ID NO: 349901 - DNA, 20 bp, Artificial Sequence
  Description of Artificial Sequence: Synthetic oligonucleotide
  Target: LAMA2; (+) strand; PAM type: YTN; PAM sequence: TTA
cccacaggctctaatacaga

SEQ ID NO: 349902 - DNA, 20 bp, Artificial Sequence
  Description of Artificial Sequence: Synthetic oligonucleotide
  Target: LAMA2; (+) strand; PAM type: YTN; PAM sequence: CTC
taatacagaaatttccatat

SEQ ID NO: 349903 - DNA, 20 bp, Artificial Sequence
  Description of Artificial Sequence: Synthetic oligonucleotide
  Target: LAMA2; (+) strand; PAM type: YTN; PAM sequence: CTA
atacagaaatttccatatgg

SEQ ID NO: 349904 - DNA, 20 bp, Artificial Sequence
  Description of Artificial Sequence: Synthetic oligonucleotide
  Target: LAMA2; (+) strand; PAM type: YTN; PAM sequence: TTT
ccatatggtagtaattcatt

SEQ ID NO: 349905 - DNA, 20 bp, Artificial Sequence
  Description of Artificial Sequence: Synthetic oligonucleotide
  Target: LAMA2; (+) strand; PAM type: YTN; PAM sequence: TTC
catatggtagtaattcatta

SEQ ID NO: 349906 - DNA, 20 bp, Artificial Sequence
  Description of Artificial Sequence: Synthetic oligonucleotide
  Target: LAMA2; (+) strand; PAM type: YTN; PAM sequence: TTC
attacagattacctagctgt

SEQ ID NO: 349907 - DNA, 20 bp, Artificial Sequence
  Description of Artificial Sequence: Synthetic oligonucleotide
  Target: LAMA2; (+) strand; PAM type: YTN; PAM sequence: TTA
cagattacctagctgttaat

SEQ ID NO: 349908 - DNA, 20 bp, Artificial Sequence
  Description of Artificial Sequence: Synthetic oligonucleotide
  Target: LAMA2; (+) strand; PAM type: YTN; PAM sequence: TTA
cctagctgttaatcattcag

SEQ ID NO: 349909 - DNA, 20 bp, Artificial Sequence
  Description of Artificial Sequence: Synthetic oligonucleotide
  Target: LAMA2; (+) strand; PAM type: YTN; PAM sequence: CTA
gctgttaatcattcagtgcc

SEQ ID NO: 349910 - DNA, 20 bp, Artificial Sequence
  Description of Artificial Sequence: Synthetic oligonucleotide
  Target: LAMA2; (+) strand; PAM type: YTN; PAM sequence: CTG
ttaatcattcagtgccatca

SEQ ID NO: 349911 - DNA, 20 bp, Artificial Sequence
  Description of Artificial Sequence: Synthetic oligonucleotide
  Target: LAMA2; (+) strand; PAM type: YTN; PAM sequence: TTA
atcattcagtgccatcattg

SEQ ID NO: 349912 - DNA, 20 bp, Artificial Sequence
  Description of Artificial Sequence: Synthetic oligonucleotide
  Target: LAMA2; (+) strand; PAM type: YTN; PAM sequence: TTC
agtgccatcattgaataatt

SEQ ID NO: 349913 - DNA, 20 bp, Artificial Sequence
  Description of Artificial Sequence: Synthetic oligonucleotide
  Target: LAMA2; (+) strand; PAM type: YTN; PAM sequence: TTG
aataatttattatttgttat

SEQ ID NO: 349914 - DNA, 20 bp, Artificial Sequence
  Description of Artificial Sequence: Synthetic oligonucleotide
  Target: LAMA2; (+) strand; PAM type: YTN; PAM sequence: TTT
attatttgttataataggaa

SEQ ID NO: 349915 - DNA, 20 bp, Artificial Sequence
  Description of Artificial Sequence: Synthetic oligonucleotide
  Target: LAMA2; (+) strand; PAM type: YTN; PAM sequence: TTA
ttatttgttataataggaaa

SEQ ID NO: 349916 - DNA, 20 bp, Artificial Sequence
  Description of Artificial Sequence: Synthetic oligonucleotide
  Target: LAMA2; (+) strand; PAM type: YTN; PAM sequence: TTA
tttgttataataggaaattg

SEQ ID NO: 349917 - DNA, 20 bp, Artificial Sequence
  Description of Artificial Sequence: Synthetic oligonucleotide
  Target: LAMA2; (+) strand; PAM type: YTN; PAM sequence: TTT
gttataataggaaattgtaa

SEQ ID NO: 349918 - DNA, 20 bp, Artificial Sequence
  Description of Artificial Sequence: Synthetic oligonucleotide
  Target: LAMA2; (+) strand; PAM type: YTN; PAM sequence: TTG
ttataataggaaattgtaag

SEQ ID NO: 349919 - DNA, 20 bp, Artificial Sequence
  Description of Artificial Sequence: Synthetic oligonucleotide
  Target: LAMA2; (+) strand; PAM type: YTN; PAM sequence: TTA
taataggaaattgtaagttg

SEQ ID NO: 349920 - DNA, 20 bp, Artificial Sequence
  Description of Artificial Sequence: Synthetic oligonucleotide
  Target: LAMA2; (+) strand; PAM type: YTN; PAM sequence: TTG
taagttgaaccatataaaat

SEQ ID NO: 349921 - DNA, 20 bp, Artificial Sequence
  Description of Artificial Sequence: Synthetic oligonucleotide
  Target: LAMA2; (+) strand; PAM type: YTN; PAM sequence: TTG
aaccatataaaattgcacgt

SEQ ID NO: 349922 - DNA, 20 bp, Artificial Sequence
  Description of Artificial Sequence: Synthetic oligonucleotide
  Target: LAMA2; (+) strand; PAM type: YTN; PAM sequence: TTG
cacgttagtcaaaaccaaat

SEQ ID NO: 349923 - DNA, 20 bp, Artificial Sequence
  Description of Artificial Sequence: Synthetic oligonucleotide
  Target: LAMA2; (+) strand; PAM type: YTN; PAM sequence: TTA
gtcaaaaccaaatattggca

SEQ ID NO: 349924 - DNA, 20 bp, Artificial Sequence
  Description of Artificial Sequence: Synthetic oligonucleotide
  Target: LAMA2; (+) strand; PAM type: YTN; PAM sequence: TTG
gcaattgcatatgattgagc

SEQ ID NO: 349925 - DNA, 20 bp, Artificial Sequence
  Description of Artificial Sequence: Synthetic oligonucleotide
  Target: LAMA2; (+) strand; PAM type: YTN; PAM sequence: TTG
catatgattgagcttaattt

SEQ ID NO: 349926 - DNA, 20 bp, Artificial Sequence
  Description of Artificial Sequence: Synthetic oligonucleotide
  Target: LAMA2; (+) strand; PAM type: YTN; PAM sequence: TTG
agcttaatttatatgtttta

SEQ ID NO: 349927 - DNA, 20 bp, Artificial Sequence
  Description of Artificial Sequence: Synthetic oligonucleotide
  Target: LAMA2; (+) strand; PAM type: YTN; PAM sequence: CTT
aatttatatgttttaatcat

SEQ ID NO: 349928 - DNA, 20 bp, Artificial Sequence
  Description of Artificial Sequence: Synthetic oligonucleotide
  Target: LAMA2; (+) strand; PAM type: YTN; PAM sequence: TTA
atttatatgttttaatcatt

SEQ ID NO: 349929 - DNA, 20 bp, Artificial Sequence
  Description of Artificial Sequence: Synthetic oligonucleotide
  Target: LAMA2; (+) strand; PAM type: YTN; PAM sequence: TTT
atatgttttaatcatttcaa

SEQ ID NO: 349930 - DNA, 20 bp, Artificial Sequence
  Description of Artificial Sequence: Synthetic oligonucleotide
  Target: LAMA2; (+) strand; PAM type: YTN; PAM sequence: TTA
tatgttttaatcatttcaaa

SEQ ID NO: 349931 - DNA, 20 bp, Artificial Sequence
  Description of Artificial Sequence: Synthetic oligonucleotide
  Target: LAMA2; (+) strand; PAM type: YTN; PAM sequence: TTT
taatcatttcaaattctatt

SEQ ID NO: 349932 - DNA, 20 bp, Artificial Sequence
  Description of Artificial Sequence: Synthetic oligonucleotide
  Target: LAMA2; (+) strand; PAM type: YTN; PAM sequence: TTT
aatcatttcaaattctatta

SEQ ID NO: 349933 - DNA, 20 bp, Artificial Sequence
  Description of Artificial Sequence: Synthetic oligonucleotide
  Target: LAMA2; (+) strand; PAM type: YTN; PAM sequence: TTA
atcatttcaaattctattaa

SEQ ID NO: 349934 - DNA, 20 bp, Artificial Sequence
  Description of Artificial Sequence: Synthetic oligonucleotide
  Target: LAMA2; (+) strand; PAM type: YTN; PAM sequence: TTT
caaattctattaaaatgtgt

SEQ ID NO: 349935 - DNA, 20 bp, Artificial Sequence
  Description of Artificial Sequence: Synthetic oligonucleotide
  Target: LAMA2; (+) strand; PAM type: YTN; PAM sequence: TTC
aaattctattaaaatgtgtg

SEQ ID NO: 349936 - DNA, 20 bp, Artificial Sequence
  Description of Artificial Sequence: Synthetic oligonucleotide
  Target: LAMA2; (+) strand; PAM type: YTN; PAM sequence: TTC
tattaaaatgtgtgaattta

SEQ ID NO: 349937 - DNA, 20 bp, Artificial Sequence
  Description of Artificial Sequence: Synthetic oligonucleotide
  Target: LAMA2; (+) strand; PAM type: YTN; PAM sequence: CTA
ttaaaatgtgtgaatttatt

SEQ ID NO: 349938 - DNA, 20 bp, Artificial Sequence
  Description of Artificial Sequence: Synthetic oligonucleotide
  Target: LAMA2; (+) strand; PAM type: YTN; PAM sequence: TTA
aaatgtgtgaatttattaat

SEQ ID NO: 349939 - DNA, 20 bp, Artificial Sequence
  Description of Artificial Sequence: Synthetic oligonucleotide
  Target: LAMA2; (+) strand; PAM type: YTN; PAM sequence: TTT
attaatacctccaatacatc

SEQ ID NO: 349940 - DNA, 20 bp, Artificial Sequence
  Description of Artificial Sequence: Synthetic oligonucleotide
  Target: LAMA2; (+) strand; PAM type: YTN; PAM sequence: TTA
ttaatacctccaatacatcc

SEQ ID NO: 349941 - DNA, 20 bp, Artificial Sequence
  Description of Artificial Sequence: Synthetic oligonucleotide
  Target: LAMA2; (+) strand; PAM type: YTN; PAM sequence: TTA
atacctccaatacatccaga

SEQ ID NO: 349942 - DNA, 20 bp, Artificial Sequence
  Description of Artificial Sequence: Synthetic oligonucleotide
  Target: LAMA2; (+) strand; PAM type: YTN; PAM sequence: CTC
caatacatccagatactttc

SEQ ID NO: 349943 - DNA, 20 bp, Artificial Sequence
  Description of Artificial Sequence: Synthetic oligonucleotide
  Target: LAMA2; (+) strand; PAM type: YTN; PAM sequence: CTT
tctggatatgtttgtgtgtg

SEQ ID NO: 349944 - DNA, 20 bp, Artificial Sequence
  Description of Artificial Sequence: Synthetic oligonucleotide
  Target: LAMA2; (+) strand; PAM type: YTN; PAM sequence: TTT
ctggatatgtttgtgtgtgt

SEQ ID NO: 349945 - DNA, 20 bp, Artificial Sequence
  Description of Artificial Sequence: Synthetic oligonucleotide
  Target: LAMA2; (+) strand; PAM type: YTN; PAM sequence: TTC
tggatatgtttgtgtgtgtg

SEQ ID NO: 349946 - DNA, 20 bp, Artificial Sequence
  Description of Artificial Sequence: Synthetic oligonucleotide
  Target: LAMA2; (+) strand; PAM type: YTN; PAM sequence: CTG
gatatgtttgtgtgtgtgta

SEQ ID NO: 349947 - DNA, 20 bp, Artificial Sequence
  Description of Artificial Sequence: Synthetic oligonucleotide
  Target: LAMA2; (+) strand; PAM type: YTN; PAM sequence: TTT
gtgtgtgtgtacgctaaatg

SEQ ID NO: 349948 - DNA, 20 bp, Artificial Sequence
  Description of Artificial Sequence: Synthetic oligonucleotide
  Target: LAMA2; (+) strand; PAM type: YTN; PAM sequence: TTG
tgtgtgtgtacgctaaatgt

SEQ ID NO: 349949 - DNA, 20 bp, Artificial Sequence
  Description of Artificial Sequence: Synthetic oligonucleotide
  Target: LAMA2; (+) strand; PAM type: YTN; PAM sequence: CTA
aatgtaatttcccgtatggt

SEQ ID NO: 349950 - DNA, 20 bp, Artificial Sequence
  Description of Artificial Sequence: Synthetic oligonucleotide
  Target: LAMA2; (+) strand; PAM type: YTN; PAM sequence: TTT
cccgtatggtataaaagtct

SEQ ID NO: 349951 - DNA, 20 bp, Artificial Sequence
  Description of Artificial Sequence: Synthetic oligonucleotide
  Target: LAMA2; (+) strand; PAM type: YTN; PAM sequence: TTC
ccgtatggtataaaagtcta

SEQ ID NO: 349952 - DNA, 20 bp, Artificial Sequence
  Description of Artificial Sequence: Synthetic oligonucleotide
  Target: LAMA2; (+) strand; PAM type: YTN; PAM sequence: CTA
ggccgggggcagtggctcac

SEQ ID NO: 349953 - DNA, 20 bp, Artificial Sequence
  Description of Artificial Sequence: Synthetic oligonucleotide
  Target: LAMA2; (+) strand; PAM type: YTN; PAM sequence: CTC
acgcctgtaattccagcact

SEQ ID NO: 349954 - DNA, 20 bp, Artificial Sequence
  Description of Artificial Sequence: Synthetic oligonucleotide
  Target: LAMA2; (+) strand; PAM type: YTN; PAM sequence: CTG
taattccagcactttgagag

SEQ ID NO: 349955 - DNA, 20 bp, Artificial Sequence
  Description of Artificial Sequence: Synthetic oligonucleotide
  Target: LAMA2; (+) strand; PAM type: YTN; PAM sequence: TTC
cagcactttgagaggctgag

SEQ ID NO: 349956 - DNA, 20 bp, Artificial Sequence
  Description of Artificial Sequence: Synthetic oligonucleotide
  Target: LAMA2; (+) strand; PAM type: YTN; PAM sequence: CTT
tgagaggctgaggcgggtgg

SEQ ID NO: 349957 - DNA, 20 bp, Artificial Sequence
  Description of Artificial Sequence: Synthetic oligonucleotide
  Target: LAMA2; (+) strand; PAM type: YTN; PAM sequence: TTT
gagaggctgaggcgggtgga

SEQ ID NO: 349958 - DNA, 20 bp, Artificial Sequence
  Description of Artificial Sequence: Synthetic oligonucleotide
  Target: LAMA2; (+) strand; PAM type: YTN; PAM sequence: TTG
agaggctgaggcgggtggat

SEQ ID NO: 349959 - DNA, 20 bp, Artificial Sequence
  Description of Artificial Sequence: Synthetic oligonucleotide
  Target: LAMA2; (+) strand; PAM type: YTN; PAM sequence: CTG
aggcgggtggatcatgggtc

SEQ ID NO: 349960 - DNA, 20 bp, Artificial Sequence
  Description of Artificial Sequence: Synthetic oligonucleotide
  Target: LAMA2; (+) strand; PAM type: YTN; PAM sequence: TTC
aagaccagcctggccaacat

SEQ ID NO: 349961 - DNA, 20 bp, Artificial Sequence
  Description of Artificial Sequence: Synthetic oligonucleotide
  Target: LAMA2; (+) strand; PAM type: YTN; PAM sequence: CTG
gccaacatggtgaagcccca

SEQ ID NO: 349962 - DNA, 20 bp, Artificial Sequence
  Description of Artificial Sequence: Synthetic oligonucleotide
  Target: LAMA2; (+) strand; PAM type: YTN; PAM sequence: CTC
tactaaaaatacagaaatta

SEQ ID NO: 349963 - DNA, 20 bp, Artificial Sequence
  Description of Artificial Sequence: Synthetic oligonucleotide
  Target: LAMA2; (+) strand; PAM type: YTN; PAM sequence: CTA
ctaaaaatacagaaattagc

SEQ ID NO: 349964 - DNA, 20 bp, Artificial Sequence
  Description of Artificial Sequence: Synthetic oligonucleotide
  Target: LAMA2; (+) strand; PAM type: YTN; PAM sequence: CTA
aaaatacagaaattagctgg

SEQ ID NO: 349965 - DNA, 20 bp, Artificial Sequence
  Description of Artificial Sequence: Synthetic oligonucleotide
  Target: LAMA2; (+) strand; PAM type: YTN; PAM sequence: TTA
gctgggtgtggtggtgcatg

SEQ ID NO: 349966 - DNA, 20 bp, Artificial Sequence
  Description of Artificial Sequence: Synthetic oligonucleotide
  Target: LAMA2; (+) strand; PAM type: YTN; PAM sequence: CTG
ggtgtggtggtgcatgcctg

SEQ ID NO: 349967 - DNA, 20 bp, Artificial Sequence
  Description of Artificial Sequence: Synthetic oligonucleotide
  Target: LAMA2; (+) strand; PAM type: YTN; PAM sequence: CTG
ttgtccccagctactcggga

SEQ ID NO: 349968 - DNA, 20 bp, Artificial Sequence
  Description of Artificial Sequence: Synthetic oligonucleotide
  Target: LAMA2; (+) strand; PAM type: YTN; PAM sequence: TTG
tccccagctactcgggaggc

SEQ ID NO: 349969 - DNA, 20 bp, Artificial Sequence
  Description of Artificial Sequence: Synthetic oligonucleotide
  Target: LAMA2; (+) strand; PAM type: YTN; PAM sequence: CTA
ctcgggaggctgagacagga

SEQ ID NO: 349970 - DNA, 20 bp, Artificial Sequence
  Description of Artificial Sequence: Synthetic oligonucleotide
  Target: LAMA2; (+) strand; PAM type: YTN; PAM sequence: CTC
gggaggctgagacaggagga

SEQ ID NO: 349971 - DNA, 20 bp, Artificial Sequence
  Description of Artificial Sequence: Synthetic oligonucleotide
  Target: LAMA2; (+) strand; PAM type: YTN; PAM sequence: CTG
agacaggaggattgcttgaa

SEQ ID NO: 349972 - DNA, 20 bp, Artificial Sequence
  Description of Artificial Sequence: Synthetic oligonucleotide
  Target: LAMA2; (+) strand; PAM type: YTN; PAM sequence: TTG
cttgaacctggaaggcagag

SEQ ID NO: 349973 - DNA, 20 bp, Artificial Sequence
  Description of Artificial Sequence: Synthetic oligonucleotide
  Target: LAMA2; (+) strand; PAM type: YTN; PAM sequence: CTT
gaacctggaaggcagaggtt

SEQ ID NO: 349974 - DNA, 20 bp, Artificial Sequence
  Description of Artificial Sequence: Synthetic oligonucleotide
  Target: LAMA2; (+) strand; PAM type: YTN; PAM sequence: TTG
aacctggaaggcagaggttg

SEQ ID NO: 349975 - DNA, 20 bp, Artificial Sequence
  Description of Artificial Sequence: Synthetic oligonucleotide
  Target: LAMA2; (+) strand; PAM type: YTN; PAM sequence: CTG
gaaggcagaggttgcagtga

SEQ ID NO: 349976 - DNA, 20 bp, Artificial Sequence
  Description of Artificial Sequence: Synthetic oligonucleotide
  Target: LAMA2; (+) strand; PAM type: YTN; PAM sequence: TTG
cagtgagccgagatcgtgcc

SEQ ID NO: 349977 - DNA, 20 bp, Artificial Sequence
  Description of Artificial Sequence: Synthetic oligonucleotide
  Target: LAMA2; (+) strand; PAM type: YTN; PAM sequence: CTC
tgcactccagcctgggcgac

SEQ ID NO: 349978 - DNA, 20 bp, Artificial Sequence
  Description of Artificial Sequence: Synthetic oligonucleotide
  Target: LAMA2; (+) strand; PAM type: YTN; PAM sequence: CTG
cactccagcctgggcgacag

SEQ ID NO: 349979 - DNA, 20 bp, Artificial Sequence
  Description of Artificial Sequence: Synthetic oligonucleotide
  Target: LAMA2; (+) strand; PAM type: YTN; PAM sequence: CTC
cagcctgggcgacagagtga

SEQ ID NO: 349980 - DNA, 20 bp, Artificial Sequence
  Description of Artificial Sequence: Synthetic oligonucleotide
  Target: LAMA2; (+) strand; PAM type: YTN; PAM sequence: CTG
ggcgacagagtgagactctg

SEQ ID NO: 349981 - DNA, 20 bp, Artificial Sequence
  Description of Artificial Sequence: Synthetic oligonucleotide
  Target: LAMA2; (+) strand; PAM type: YTN; PAM sequence: CTC
tgtctcaaaaaaaaaatcta

SEQ ID NO: 349982 - DNA, 20 bp, Artificial Sequence
  Description of Artificial Sequence: Synthetic oligonucleotide
  Target: LAMA2; (+) strand; PAM type: YTN; PAM sequence: CTG
tctcaaaaaaaaaatctatt

SEQ ID NO: 349983 - DNA, 20 bp, Artificial Sequence
  Description of Artificial Sequence: Synthetic oligonucleotide
  Target: LAMA2; (+) strand; PAM type: YTN; PAM sequence: CTC
aaaaaaaaaatctattatgt

SEQ ID NO: 349984 - DNA, 20 bp, Artificial Sequence
  Description of Artificial Sequence: Synthetic oligonucleotide
  Target: LAMA2; (+) strand; PAM type: YTN; PAM sequence: CTA
ttatgtataacagaaatgat

SEQ ID NO: 349985 - DNA, 20 bp, Artificial Sequence
  Description of Artificial Sequence: Synthetic oligonucleotide
  Target: LAMA2; (+) strand; PAM type: YTN; PAM sequence: TTA
tgtataacagaaatgatttt

SEQ ID NO: 349986 - DNA, 20 bp, Artificial Sequence
  Description of Artificial Sequence: Synthetic oligonucleotide
  Target: LAMA2; (+) strand; PAM type: YTN; PAM sequence: TTT
ttaaatgtatctgaaatcaa

SEQ ID NO: 349987 - DNA, 20 bp, Artificial Sequence
  Description of Artificial Sequence: Synthetic oligonucleotide
  Target: LAMA2; (+) strand; PAM type: YTN; PAM sequence: TTT
taaatgtatctgaaatcaaa

SEQ ID NO: 349988 - DNA, 20 bp, Artificial Sequence
  Description of Artificial Sequence: Synthetic oligonucleotide
  Target: LAMA2; (+) strand; PAM type: YTN; PAM sequence: TTT
aaatgtatctgaaatcaaat

SEQ ID NO: 349989 - DNA, 20 bp, Artificial Sequence
  Description of Artificial Sequence: Synthetic oligonucleotide
  Target: LAMA2; (+) strand; PAM type: YTN; PAM sequence: TTA
aatgtatctgaaatcaaatt

SEQ ID NO: 349990 - DNA, 20 bp, Artificial Sequence
  Description of Artificial Sequence: Synthetic oligonucleotide
  Target: LAMA2; (+) strand; PAM type: YTN; PAM sequence: CTG
aaatcaaattgatgtttatt

SEQ ID NO: 349991 - DNA, 20 bp, Artificial Sequence
  Description of Artificial Sequence: Synthetic oligonucleotide
  Target: LAMA2; (+) strand; PAM type: YTN; PAM sequence: TTG
atgtttattaatttattttt

SEQ ID NO: 349992 - DNA, 20 bp, Artificial Sequence
  Description of Artificial Sequence: Synthetic oligonucleotide
  Target: LAMA2; (+) strand; PAM type: YTN; PAM sequence: TTT
attaatttatttttccttaa

SEQ ID NO: 349993 - DNA, 20 bp, Artificial Sequence
  Description of Artificial Sequence: Synthetic oligonucleotide
  Target: LAMA2; (+) strand; PAM type: YTN; PAM sequence: TTA
ttaatttatttttccttaat

SEQ ID NO: 349994 - DNA, 20 bp, Artificial Sequence
  Description of Artificial Sequence: Synthetic oligonucleotide
  Target: LAMA2; (+) strand; PAM type: YTN; PAM sequence: TTA
atttatttttccttaatgca

SEQ ID NO: 349995 - DNA, 20 bp, Artificial Sequence
  Description of Artificial Sequence: Synthetic oligonucleotide
  Target: LAMA2; (+) strand; PAM type: YTN; PAM sequence: TTT
atttttccttaatgcagcat

SEQ ID NO: 349996 - DNA, 20 bp, Artificial Sequence
  Description of Artificial Sequence: Synthetic oligonucleotide
  Target: LAMA2; (+) strand; PAM type: YTN; PAM sequence: TTA
tttttccttaatgcagcatg

SEQ ID NO: 349997 - DNA, 20 bp, Artificial Sequence
  Description of Artificial Sequence: Synthetic oligonucleotide
  Target: LAMA2; (+) strand; PAM type: YTN; PAM sequence: TTT
ttccttaatgcagcatgcaa

SEQ ID NO: 349998 - DNA, 20 bp, Artificial Sequence
  Description of Artificial Sequence: Synthetic oligonucleotide
  Target: LAMA2; (+) strand; PAM type: YTN; PAM sequence: TTT
tccttaatgcagcatgcaat

SEQ ID NO: 349999 - DNA, 20 bp, Artificial Sequence
  Description of Artificial Sequence: Synthetic oligonucleotide
  Target: LAMA2; (+) strand; PAM type: YTN; PAM sequence: TTT
ccttaatgcagcatgcaatt

SEQ ID NO: 350000 - DNA, 20 bp, Artificial Sequence
  Description of Artificial Sequence: Synthetic oligonucleotide
  Target: LAMA2; (+) strand; PAM type: YTN; PAM sequence: TTC
cttaatgcagcatgcaattg

SEQ ID NO: 350001 - DNA, 20 bp, Artificial Sequence
  Description of Artificial Sequence: Synthetic oligonucleotide
  Target: LAMA2; (+) strand; PAM type: YTN; PAM sequence: CTT
aatgcagcatgcaattgtca

SEQ ID NO: 350002 - DNA, 20 bp, Artificial Sequence
  Description of Artificial Sequence: Synthetic oligonucleotide
  Target: LAMA2; (+) strand; PAM type: YTN; PAM sequence: TTA
atgcagcatgcaattgtcat

SEQ ID NO: 350003 - DNA, 20 bp, Artificial Sequence
  Description of Artificial Sequence: Synthetic oligonucleotide
  Target: LAMA2; (+) strand; PAM type: YTN; PAM sequence: TTG
tcatggaaaagctgaagaat

SEQ ID NO: 350004 - DNA, 20 bp, Artificial Sequence
  Description of Artificial Sequence: Synthetic oligonucleotide
  Target: LAMA2; (+) strand; PAM type: YTN; PAM sequence: CTG
aagaatgctattatgatgaa

SEQ ID NO: 350005 - DNA, 20 bp, Artificial Sequence
  Description of Artificial Sequence: Synthetic oligonucleotide
  Target: LAMA2; (+) strand; PAM type: YTN; PAM sequence: CTA
ttatgatgaaaatgttgcca

SEQ ID NO: 350006 - DNA, 20 bp, Artificial Sequence
  Description of Artificial Sequence: Synthetic oligonucleotide
  Target: LAMA2; (+) strand; PAM type: YTN; PAM sequence: TTA
tgatgaaaatgttgccagaa

SEQ ID NO: 350007 - DNA, 20 bp, Artificial Sequence
  Description of Artificial Sequence: Synthetic oligonucleotide
  Target: LAMA2; (+) strand; PAM type: YTN; PAM sequence: TTG
ccagaagaaatctgagtttg

SEQ ID NO: 350008 - DNA, 20 bp, Artificial Sequence
  Description of Artificial Sequence: Synthetic oligonucleotide
  Target: LAMA2; (+) strand; PAM type: YTN; PAM sequence: CTG
agtttgaatatacgtggaaa

SEQ ID NO: 350009 - DNA, 20 bp, Artificial Sequence
  Description of Artificial Sequence: Synthetic oligonucleotide
  Target: LAMA2; (+) strand; PAM type: YTN; PAM sequence: TTT
gaatatacgtggaaagtaca

SEQ ID NO: 350010 - DNA, 20 bp, Artificial Sequence
  Description of Artificial Sequence: Synthetic oligonucleotide
  Target: LAMA2; (+) strand; PAM type: YTN; PAM sequence: TTG
aatatacgtggaaagtacat

SEQ ID NO: 350011 - DNA, 20 bp, Artificial Sequence
  Description of Artificial Sequence: Synthetic oligonucleotide
  Target: LAMA2; (+) strand; PAM type: YTN; PAM sequence: TTG
gagggggtgtctgcattaat

SEQ ID NO: 350012 - DNA, 20 bp, Artificial Sequence
  Description of Artificial Sequence: Synthetic oligonucleotide
  Target: LAMA2; (+) strand; PAM type: YTN; PAM sequence: CTG
cattaattgtacccaaaaca

SEQ ID NO: 350013 - DNA, 20 bp, Artificial Sequence
  Description of Artificial Sequence: Synthetic oligonucleotide
  Target: LAMA2; (+) strand; PAM type: YTN; PAM sequence: TTA
attgtacccaaaacactgct

SEQ ID NO: 350014 - DNA, 20 bp, Artificial Sequence
  Description of Artificial Sequence: Synthetic oligonucleotide
  Target: LAMA2; (+) strand; PAM type: YTN; PAM sequence: TTG
tacccaaaacactgctggta

SEQ ID NO: 350015 - DNA, 20 bp, Artificial Sequence
  Description of Artificial Sequence: Synthetic oligonucleotide
  Target: LAMA2; (+) strand; PAM type: YTN; PAM sequence: CTG
ctggtataaactgcgagaca

SEQ ID NO: 350016 - DNA, 20 bp, Artificial Sequence
  Description of Artificial Sequence: Synthetic oligonucleotide
  Target: LAMA2; (+) strand; PAM type: YTN; PAM sequence: CTG
gtataaactgcgagacatgt

SEQ ID NO: 350017 - DNA, 20 bp, Artificial Sequence
  Description of Artificial Sequence: Synthetic oligonucleotide
  Target: LAMA2; (+) strand; PAM type: YTN; PAM sequence: CTG
cgagacatgtactgatggct

SEQ ID NO: 350018 - DNA, 20 bp, Artificial Sequence
  Description of Artificial Sequence: Synthetic oligonucleotide
  Target: LAMA2; (+) strand; PAM type: YTN; PAM sequence: CTG
atggcttcttcagacccaaa

SEQ ID NO: 350019 - DNA, 20 bp, Artificial Sequence
  Description of Artificial Sequence: Synthetic oligonucleotide
  Target: LAMA2; (+) strand; PAM type: YTN; PAM sequence: CTT
cttcagacccaaaggggtaa

SEQ ID NO: 350020 - DNA, 20 bp, Artificial Sequence
  Description of Artificial Sequence: Synthetic oligonucleotide
  Target: LAMA2; (+) strand; PAM type: YTN; PAM sequence: TTC
ttcagacccaaaggggtaaa

SEQ ID NO: 350021 - DNA, 20 bp, Artificial Sequence
  Description of Artificial Sequence: Synthetic oligonucleotide
  Target: LAMA2; (+) strand; PAM type: YTN; PAM sequence: CTT
cagacccaaaggggtaaagt

SEQ ID NO: 350022 - DNA, 20 bp, Artificial Sequence
  Description of Artificial Sequence: Synthetic oligonucleotide
  Target: LAMA2; (+) strand; PAM type: YTN; PAM sequence: TTC
agacccaaaggggtaaagta

SEQ ID NO: 350023 - DNA, 20 bp, Artificial Sequence
  Description of Artificial Sequence: Synthetic oligonucleotide
  Target: LAMA2; (+) strand; PAM type: YTN; PAM sequence: CTT
tttctttcataaagagttat

SEQ ID NO: 350024 - DNA, 20 bp, Artificial Sequence
  Description of Artificial Sequence: Synthetic oligonucleotide
  Target: LAMA2; (+) strand; PAM type: YTN; PAM sequence: TTT
ttctttcataaagagttatt

SEQ ID NO: 350025 - DNA, 20 bp, Artificial Sequence
  Description of Artificial Sequence: Synthetic oligonucleotide
  Target: LAMA2; (+) strand; PAM type: YTN; PAM sequence: TTT
tctttcataaagagttattt

SEQ ID NO: 350026 - DNA, 20 bp, Artificial Sequence
  Description of Artificial Sequence: Synthetic oligonucleotide
  Target: LAMA2; (+) strand; PAM type: YTN; PAM sequence: TTT
ctttcataaagagttatttt

SEQ ID NO: 350027 - DNA, 20 bp, Artificial Sequence
  Description of Artificial Sequence: Synthetic oligonucleotide
  Target: LAMA2; (+) strand; PAM type: YTN; PAM sequence: TTC
tttcataaagagttattttt

SEQ ID NO: 350028 - DNA, 20 bp, Artificial Sequence
  Description of Artificial Sequence: Synthetic oligonucleotide
  Target: LAMA2; (+) strand; PAM type: YTN; PAM sequence: CTT
tcataaagagttattttttt

SEQ ID NO: 350029 - DNA, 20 bp, Artificial Sequence
  Description of Artificial Sequence: Synthetic oligonucleotide
  Target: LAMA2; (+) strand; PAM type: YTN; PAM sequence: TTT
cataaagagttatttttttg

SEQ ID NO: 350030 - DNA, 20 bp, Artificial Sequence
  Description of Artificial Sequence: Synthetic oligonucleotide
  Target: LAMA2; (+) strand; PAM type: YTN; PAM sequence: TTC
ataaagagttatttttttgc

SEQ ID NO: 350031 - DNA, 20 bp, Artificial Sequence
  Description of Artificial Sequence: Synthetic oligonucleotide
  Target: LAMA2; (+) strand; PAM type: YTN; PAM sequence: TTA
tttttttgctttttcataca

SEQ ID NO: 350032 - DNA, 20 bp, Artificial Sequence
  Description of Artificial Sequence: Synthetic oligonucleotide
  Target: LAMA2; (+) strand; PAM type: YTN; PAM sequence: TTT
ttttgctttttcatacaaaa

SEQ ID NO: 350033 - DNA, 20 bp, Artificial Sequence
  Description of Artificial Sequence: Synthetic oligonucleotide
  Target: LAMA2; (+) strand; PAM type: YTN; PAM sequence: TTT
tttgctttttcatacaaaaa

SEQ ID NO: 350034 - DNA, 20 bp, Artificial Sequence
  Description of Artificial Sequence: Synthetic oligonucleotide
  Target: LAMA2; (+) strand; PAM type: YTN; PAM sequence: TTT
ttgctttttcatacaaaaat

SEQ ID NO: 350035 - DNA, 20 bp, Artificial Sequence
  Description of Artificial Sequence: Synthetic oligonucleotide
  Target: LAMA2; (+) strand; PAM type: YTN; PAM sequence: TTT
tgctttttcatacaaaaatg

SEQ ID NO: 350036 - DNA, 20 bp, Artificial Sequence
  Description of Artificial Sequence: Synthetic oligonucleotide
  Target: LAMA2; (+) strand; PAM type: YTN; PAM sequence: TTT
gctttttcatacaaaaatgt

SEQ ID NO: 350037 - DNA, 20 bp, Artificial Sequence
  Description of Artificial Sequence: Synthetic oligonucleotide
  Target: LAMA2; (+) strand; PAM type: YTN; PAM sequence: TTG
ctttttcatacaaaaatgtt

SEQ ID NO: 350038 - DNA, 20 bp, Artificial Sequence
  Description of Artificial Sequence: Synthetic oligonucleotide
  Target: LAMA2; (+) strand; PAM type: YTN; PAM sequence: CTT
tttcatacaaaaatgtttta

SEQ ID NO: 350039 - DNA, 20 bp, Artificial Sequence
  Description of Artificial Sequence: Synthetic oligonucleotide
  Target: LAMA2; (+) strand; PAM type: YTN; PAM sequence: TTT
ttcatacaaaaatgttttat

SEQ ID NO: 350040 - DNA, 20 bp, Artificial Sequence
  Description of Artificial Sequence: Synthetic oligonucleotide
  Target: LAMA2; (+) strand; PAM type: YTN; PAM sequence: TTT
tcatacaaaaatgttttata

SEQ ID NO: 350041 - DNA, 20 bp, Artificial Sequence
  Description of Artificial Sequence: Synthetic oligonucleotide
  Target: LAMA2; (+) strand; PAM type: YTN; PAM sequence: TTT
catacaaaaatgttttatac

SEQ ID NO: 350042 - DNA, 20 bp, Artificial Sequence
  Description of Artificial Sequence: Synthetic oligonucleotide
  Target: LAMA2; (+) strand; PAM type: YTN; PAM sequence: TTC
atacaaaaatgttttataca

SEQ ID NO: 350043 - DNA, 20 bp, Artificial Sequence
  Description of Artificial Sequence: Synthetic oligonucleotide
  Target: LAMA2; (+) strand; PAM type: YTN; PAM sequence: TTT
tatacaaaaaaataataatt

SEQ ID NO: 350044 - DNA, 20 bp, Artificial Sequence
  Description of Artificial Sequence: Synthetic oligonucleotide
  Target: LAMA2; (+) strand; PAM type: YTN; PAM sequence: TTT
atacaaaaaaataataattt

SEQ ID NO: 350045 - DNA, 20 bp, Artificial Sequence
  Description of Artificial Sequence: Synthetic oligonucleotide
  Target: LAMA2; (+) strand; PAM type: YTN; PAM sequence: TTA
tacaaaaaaataataatttt

SEQ ID NO: 350046 - DNA, 20 bp, Artificial Sequence
  Description of Artificial Sequence: Synthetic oligonucleotide
  Target: LAMA2; (+) strand; PAM type: YTN; PAM sequence: TTT
tgaaagcttctgtaaacagt

SEQ ID NO: 350047 - DNA, 20 bp, Artificial Sequence
  Description of Artificial Sequence: Synthetic oligonucleotide
  Target: LAMA2; (+) strand; PAM type: YTN; PAM sequence: TTT
gaaagcttctgtaaacagtt

SEQ ID NO: 350048 - DNA, 20 bp, Artificial Sequence
  Description of Artificial Sequence: Synthetic oligonucleotide
  Target: LAMA2; (+) strand; PAM type: YTN; PAM sequence: TTG
aaagcttctgtaaacagttg

SEQ ID NO: 350049 - DNA, 20 bp, Artificial Sequence
  Description of Artificial Sequence: Synthetic oligonucleotide
  Target: LAMA2; (+) strand; PAM type: YTN; PAM sequence: CTT
ctgtaaacagttgaacttca

SEQ ID NO: 350050 - DNA, 20 bp, Artificial Sequence
  Description of Artificial Sequence: Synthetic oligonucleotide
  Target: LAMA2; (+) strand; PAM type: YTN; PAM sequence: TTC
tgtaaacagttgaacttcaa

SEQ ID NO: 350051 - DNA, 20 bp, Artificial Sequence
  Description of Artificial Sequence: Synthetic oligonucleotide
  Target: LAMA2; (+) strand; PAM type: YTN; PAM sequence: CTG
taaacagttgaacttcaaat

SEQ ID NO: 350052 - DNA, 20 bp, Artificial Sequence
  Description of Artificial Sequence: Synthetic oligonucleotide
  Target: LAMA2; (+) strand; PAM type: YTN; PAM sequence: TTG
aacttcaaattaaaaggtaa

SEQ ID NO: 350053 - DNA, 20 bp, Artificial Sequence
  Description of Artificial Sequence: Synthetic oligonucleotide
  Target: LAMA2; (+) strand; PAM type: YTN; PAM sequence: CTT
caaattaaaaggtaagtagg

SEQ ID NO: 350054 - DNA, 20 bp, Artificial Sequence
  Description of Artificial Sequence: Synthetic oligonucleotide
  Target: LAMA2; (+) strand; PAM type: YTN; PAM sequence: TTC
aaattaaaaggtaagtagga

SEQ ID NO: 350055 - DNA, 20 bp, Artificial Sequence
  Description of Artificial Sequence: Synthetic oligonucleotide
  Target: LAMA2; (+) strand; PAM type: YTN; PAM sequence: TTA
aaaggtaagtaggaacattt

SEQ ID NO: 350056 - DNA, 20 bp, Artificial Sequence
  Description of Artificial Sequence: Synthetic oligonucleotide
  Target: LAMA2; (+) strand; PAM type: YTN; PAM sequence: TTT
cgtagttgaaactgacctaa

SEQ ID NO: 350057 - DNA, 20 bp, Artificial Sequence
  Description of Artificial Sequence: Synthetic oligonucleotide
  Target: LAMA2; (+) strand; PAM type: YTN; PAM sequence: TTC
gtagttgaaactgacctaaa

SEQ ID NO: 350058 - DNA, 20 bp, Artificial Sequence
  Description of Artificial Sequence: Synthetic oligonucleotide
  Target: LAMA2; (+) strand; PAM type: YTN; PAM sequence: TTG
aaactgacctaaatctttga

SEQ ID NO: 350059 - DNA, 20 bp, Artificial Sequence
  Description of Artificial Sequence: Synthetic oligonucleotide
  Target: LAMA2; (+) strand; PAM type: YTN; PAM sequence: CTG
acctaaatctttgaggatgt

SEQ ID NO: 350060 - DNA, 20 bp, Artificial Sequence
  Description of Artificial Sequence: Synthetic oligonucleotide
  Target: LAMA2; (+) strand; PAM type: YTN; PAM sequence: CTA
aatctttgaggatgtaagat

SEQ ID NO: 350061 - DNA, 20 bp, Artificial Sequence
  Description of Artificial Sequence: Synthetic oligonucleotide
  Target: LAMA2; (+) strand; PAM type: YTN; PAM sequence: CTT
tgaggatgtaagataaaact

SEQ ID NO: 350062 - DNA, 20 bp, Artificial Sequence
  Description of Artificial Sequence: Synthetic oligonucleotide
  Target: LAMA2; (+) strand; PAM type: YTN; PAM sequence: TTT
gaggatgtaagataaaactt

SEQ ID NO: 350063 - DNA, 20 bp, Artificial Sequence
  Description of Artificial Sequence: Synthetic oligonucleotide
  Target: LAMA2; (+) strand; PAM type: YTN; PAM sequence: TTG
aggatgtaagataaaacttt

SEQ ID NO: 350064 - DNA, 20 bp, Artificial Sequence
  Description of Artificial Sequence: Synthetic oligonucleotide
  Target: LAMA2; (+) strand; PAM type: YTN; PAM sequence: CTT
ttccatcactccagaaagtt

SEQ ID NO: 350065 - DNA, 20 bp, Artificial Sequence
  Description of Artificial Sequence: Synthetic oligonucleotide
  Target: LAMA2; (+) strand; PAM type: YTN; PAM sequence: TTT
tccatcactccagaaagttt

SEQ ID NO: 350066 - DNA, 20 bp, Artificial Sequence
  Description of Artificial Sequence: Synthetic oligonucleotide
  Target: LAMA2; (+) strand; PAM type: YTN; PAM sequence: TTT
ccatcactccagaaagtttt

SEQ ID NO: 350067 - DNA, 20 bp, Artificial Sequence
  Description of Artificial Sequence: Synthetic oligonucleotide
  Target: LAMA2; (+) strand; PAM type: YTN; PAM sequence: TTC
catcactccagaaagtttta

SEQ ID NO: 350068 - DNA, 20 bp, Artificial Sequence
  Description of Artificial Sequence: Synthetic oligonucleotide
  Target: LAMA2; (+) strand; PAM type: YTN; PAM sequence: CTC
cagaaagttttatcatggct

SEQ ID NO: 350069 - DNA, 20 bp, Artificial Sequence
  Description of Artificial Sequence: Synthetic oligonucleotide
  Target: LAMA2; (+) strand; PAM type: YTN; PAM sequence: TTT
tatcatggctccttccagtc

SEQ ID NO: 350070 - DNA, 20 bp, Artificial Sequence
  Description of Artificial Sequence: Synthetic oligonucleotide
  Target: LAMA2; (+) strand; PAM type: YTN; PAM sequence: TTT
atcatggctccttccagtca

SEQ ID NO: 350071 - DNA, 20 bp, Artificial Sequence
  Description of Artificial Sequence: Synthetic oligonucleotide
  Target: LAMA2; (+) strand; PAM type: YTN; PAM sequence: TTA
tcatggctccttccagtcaa

SEQ ID NO: 350072 - DNA, 20 bp, Artificial Sequence
  Description of Artificial Sequence: Synthetic oligonucleotide
  Target: LAMA2; (+) strand; PAM type: YTN; PAM sequence: CTC
cttccagtcaaggagtggac

SEQ ID NO: 350073 - DNA, 20 bp, Artificial Sequence
  Description of Artificial Sequence: Synthetic oligonucleotide
  Target: LAMA2; (+) strand; PAM type: YTN; PAM sequence: CTT
ccagtcaaggagtggacccc

SEQ ID NO: 350074 - DNA, 20 bp, Artificial Sequence
  Description of Artificial Sequence: Synthetic oligonucleotide
  Target: LAMA2; (+) strand; PAM type: YTN; PAM sequence: TTC
cagtcaaggagtggacccct

SEQ ID NO: 350075 - DNA, 20 bp, Artificial Sequence
  Description of Artificial Sequence: Synthetic oligonucleotide
  Target: LAMA2; (+) strand; PAM type: YTN; PAM sequence: CTA
ggcaaactctgttctgattt

SEQ ID NO: 350076 - DNA, 20 bp, Artificial Sequence
  Description of Artificial Sequence: Synthetic oligonucleotide
  Target: LAMA2; (+) strand; PAM type: YTN; PAM sequence: CTC
tgttctgatttttagaacgt

SEQ ID NO: 350077 - DNA, 20 bp, Artificial Sequence
  Description of Artificial Sequence: Synthetic oligonucleotide
  Target: LAMA2; (+) strand; PAM type: YTN; PAM sequence: CTG
ttctgatttttagaacgtaa

SEQ ID NO: 350078 - DNA, 20 bp, Artificial Sequence
  Description of Artificial Sequence: Synthetic oligonucleotide
  Target: LAMA2; (+) strand; PAM type: YTN; PAM sequence: TTC
tgatttttagaacgtaaatt

SEQ ID NO: 350079 - DNA, 20 bp, Artificial Sequence
  Description of Artificial Sequence: Synthetic oligonucleotide
  Target: LAMA2; (+) strand; PAM type: YTN; PAM sequence: CTG
atttttagaacgtaaattag

SEQ ID NO: 350080 - DNA, 20 bp, Artificial Sequence
  Description of Artificial Sequence: Synthetic oligonucleotide
  Target: LAMA2; (+) strand; PAM type: YTN; PAM sequence: TTT
ttagaacgtaaattagttgt

SEQ ID NO: 350081 - DNA, 20 bp, Artificial Sequence
  Description of Artificial Sequence: Synthetic oligonucleotide
  Target: LAMA2; (+) strand; PAM type: YTN; PAM sequence: TTT
tagaacgtaaattagttgtg

SEQ ID NO: 350082 - DNA, 20 bp, Artificial Sequence
  Description of Artificial Sequence: Synthetic oligonucleotide
  Target: LAMA2; (+) strand; PAM type: YTN; PAM sequence: TTT
agaacgtaaattagttgtgc

SEQ ID NO: 350083 - DNA, 20 bp, Artificial Sequence
  Description of Artificial Sequence: Synthetic oligonucleotide
  Target: LAMA2; (+) strand; PAM type: YTN; PAM sequence: TTA
gaacgtaaattagttgtgcc

SEQ ID NO: 350084 - DNA, 20 bp, Artificial Sequence
  Description of Artificial Sequence: Synthetic oligonucleotide
  Target: LAMA2; (+) strand; PAM type: YTN; PAM sequence: TTA
gttgtgcctcttagagaatt

SEQ ID NO: 350085 - DNA, 20 bp, Artificial Sequence
  Description of Artificial Sequence: Synthetic oligonucleotide
  Target: LAMA2; (+) strand; PAM type: YTN; PAM sequence: TTG
tgcctcttagagaatttcat

SEQ ID NO: 350086 - DNA, 20 bp, Artificial Sequence
  Description of Artificial Sequence: Synthetic oligonucleotide
  Target: LAMA2; (+) strand; PAM type: YTN; PAM sequence: CTC
ttagagaatttcataaaaat

SEQ ID NO: 350087 - DNA, 20 bp, Artificial Sequence
  Description of Artificial Sequence: Synthetic oligonucleotide
  Target: LAMA2; (+) strand; PAM type: YTN; PAM sequence: CTT
agagaatttcataaaaatga

SEQ ID NO: 350088 - DNA, 20 bp, Artificial Sequence
  Description of Artificial Sequence: Synthetic oligonucleotide
  Target: LAMA2; (+) strand; PAM type: YTN; PAM sequence: TTA
gagaatttcataaaaatgaa

SEQ ID NO: 350089 - DNA, 20 bp, Artificial Sequence
  Description of Artificial Sequence: Synthetic oligonucleotide
  Target: LAMA2; (+) strand; PAM type: YTN; PAM sequence: TTT
cataaaaatgaaatcataca

SEQ ID NO: 350090 - DNA, 20 bp, Artificial Sequence
  Description of Artificial Sequence: Synthetic oligonucleotide
  Target: LAMA2; (+) strand; PAM type: YTN; PAM sequence: TTC
ataaaaatgaaatcatacag

SEQ ID NO: 350091 - DNA, 20 bp, Artificial Sequence
  Description of Artificial Sequence: Synthetic oligonucleotide
  Target: LAMA2; (+) strand; PAM type: YTN; PAM sequence: CTA
gtgagtcttttttcactcga

SEQ ID NO: 350092 - DNA, 20 bp, Artificial Sequence
  Description of Artificial Sequence: Synthetic oligonucleotide
  Target: LAMA2; (+) strand; PAM type: YTN; PAM sequence: CTT
ttttcactcgacataatatg

SEQ ID NO: 350093 - DNA, 20 bp, Artificial Sequence
  Description of Artificial Sequence: Synthetic oligonucleotide
  Target: LAMA2; (+) strand; PAM type: YTN; PAM sequence: TTT
tttcactcgacataatatgt

SEQ ID NO: 350094 - DNA, 20 bp, Artificial Sequence
  Description of Artificial Sequence: Synthetic oligonucleotide
  Target: LAMA2; (+) strand; PAM type: YTN; PAM sequence: TTT
ttcactcgacataatatgtt

SEQ ID NO: 350095 - DNA, 20 bp, Artificial Sequence
  Description of Artificial Sequence: Synthetic oligonucleotide
  Target: LAMA2; (+) strand; PAM type: YTN; PAM sequence: TTT
tcactcgacataatatgtta

SEQ ID NO: 350096 - DNA, 20 bp, Artificial Sequence
  Description of Artificial Sequence: Synthetic oligonucleotide
  Target: LAMA2; (+) strand; PAM type: YTN; PAM sequence: TTT
cactcgacataatatgttaa

SEQ ID NO: 350097 - DNA, 20 bp, Artificial Sequence
  Description of Artificial Sequence: Synthetic oligonucleotide
  Target: LAMA2; (+) strand; PAM type: YTN; PAM sequence: TTC
actcgacataatatgttaag

SEQ ID NO: 350098 - DNA, 20 bp, Artificial Sequence
  Description of Artificial Sequence: Synthetic oligonucleotide
  Target: LAMA2; (+) strand; PAM type: YTN; PAM sequence: CTC
gacataatatgttaagattt

SEQ ID NO: 350099 - DNA, 20 bp, Artificial Sequence
  Description of Artificial Sequence: Synthetic oligonucleotide
  Target: LAMA2; (+) strand; PAM type: YTN; PAM sequence: TTA
agatttatccatgttgtttg

SEQ ID NO: 350100 - DNA, 20 bp, Artificial Sequence
  Description of Artificial Sequence: Synthetic oligonucleotide
  Target: LAMA2; (+) strand; PAM type: YTN; PAM sequence: TTT
atccatgttgtttgtgcatc

SEQ ID NO: 350101 - DNA, 20 bp, Artificial Sequence
  Description of Artificial Sequence: Synthetic oligonucleotide
  Target: LAMA2; (+) strand; PAM type: YTN; PAM sequence: TTA
tccatgttgtttgtgcatca

SEQ ID NO: 350102 - DNA, 20 bp, Artificial Sequence
  Description of Artificial Sequence: Synthetic oligonucleotide
  Target: LAMA2; (+) strand; PAM type: YTN; PAM sequence: TTG
tttgtgcatcagtagttctt

SEQ ID NO: 350103 - DNA, 20 bp, Artificial Sequence
  Description of Artificial Sequence: Synthetic oligonucleotide
  Target: LAMA2; (+) strand; PAM type: YTN; PAM sequence: TTT
gtgcatcagtagttcttttt

SEQ ID NO: 350104 - DNA, 20 bp, Artificial Sequence
  Description of Artificial Sequence: Synthetic oligonucleotide
  Target: LAMA2; (+) strand; PAM type: YTN; PAM sequence: TTG
tgcatcagtagttctttttc

SEQ ID NO: 350105 - DNA, 20 bp, Artificial Sequence
  Description of Artificial Sequence: Synthetic oligonucleotide
  Target: LAMA2; (+) strand; PAM type: YTN; PAM sequence: TTC
tttttcttttgaaagaaatt

SEQ ID NO: 350106 - DNA, 20 bp, Artificial Sequence
  Description of Artificial Sequence: Synthetic oligonucleotide
  Target: LAMA2; (+) strand; PAM type: YTN; PAM sequence: CTT
tttcttttgaaagaaattgc

SEQ ID NO: 350107 - DNA, 20 bp, Artificial Sequence
  Description of Artificial Sequence: Synthetic oligonucleotide
  Target: LAMA2; (+) strand; PAM type: YTN; PAM sequence: TTT
ttcttttgaaagaaattgct

SEQ ID NO: 350108 - DNA, 20 bp, Artificial Sequence
  Description of Artificial Sequence: Synthetic oligonucleotide
  Target: LAMA2; (+) strand; PAM type: YTN; PAM sequence: TTT
tcttttgaaagaaattgctg

SEQ ID NO: 350109 - DNA, 20 bp, Artificial Sequence
  Description of Artificial Sequence: Synthetic oligonucleotide
  Target: LAMA2; (+) strand; PAM type: YTN; PAM sequence: TTT
cttttgaaagaaattgctga

SEQ ID NO: 350110 - DNA, 20 bp, Artificial Sequence
  Description of Artificial Sequence: Synthetic oligonucleotide
  Target: LAMA2; (+) strand; PAM type: YTN; PAM sequence: TTC
ttttgaaagaaattgctgag

SEQ ID NO: 350111 - DNA, 20 bp, Artificial Sequence
  Description of Artificial Sequence: Synthetic oligonucleotide
  Target: LAMA2; (+) strand; PAM type: YTN; PAM sequence: CTT
ttgaaagaaattgctgagta

SEQ ID NO: 350112 - DNA, 20 bp, Artificial Sequence
  Description of Artificial Sequence: Synthetic oligonucleotide
  Target: LAMA2; (+) strand; PAM type: YTN; PAM sequence: TTT
tgaaagaaattgctgagtag

SEQ ID NO: 350113 - DNA, 20 bp, Artificial Sequence
  Description of Artificial Sequence: Synthetic oligonucleotide
  Target: LAMA2; (+) strand; PAM type: YTN; PAM sequence: TTT
gaaagaaattgctgagtagt

SEQ ID NO: 350114 - DNA, 20 bp, Artificial Sequence
  Description of Artificial Sequence: Synthetic oligonucleotide
  Target: LAMA2; (+) strand; PAM type: YTN; PAM sequence: TTG
aaagaaattgctgagtagta

SEQ ID NO: 350115 - DNA, 20 bp, Artificial Sequence
  Description of Artificial Sequence: Synthetic oligonucleotide
  Target: LAMA2; (+) strand; PAM type: YTN; PAM sequence: TTG
ctgagtagtatttctctgca

SEQ ID NO: 350116 - DNA, 20 bp, Artificial Sequence
  Description of Artificial Sequence: Synthetic oligonucleotide
  Target: LAMA2; (+) strand; PAM type: YTN; PAM sequence: CTG
agtagtatttctctgcacga

SEQ ID NO: 350117 - DNA, 20 bp, Artificial Sequence
  Description of Artificial Sequence: Synthetic oligonucleotide
  Target: LAMA2; (+) strand; PAM type: YTN; PAM sequence: TTT
ctctgcacgaacatatcaaa

SEQ ID NO: 350118 - DNA, 20 bp, Artificial Sequence
  Description of Artificial Sequence: Synthetic oligonucleotide
  Target: LAMA2; (+) strand; PAM type: YTN; PAM sequence: TTC
tctgcacgaacatatcaaaa

SEQ ID NO: 350119 - DNA, 20 bp, Artificial Sequence
  Description of Artificial Sequence: Synthetic oligonucleotide
  Target: LAMA2; (+) strand; PAM type: YTN; PAM sequence: CTC
tgcacgaacatatcaaaatt

SEQ ID NO: 350120 - DNA, 20 bp, Artificial Sequence
  Description of Artificial Sequence: Synthetic oligonucleotide
  Target: LAMA2; (+) strand; PAM type: YTN; PAM sequence: CTG
cacgaacatatcaaaatttt

SEQ ID NO: 350121 - DNA, 20 bp, Artificial Sequence
  Description of Artificial Sequence: Synthetic oligonucleotide
  Target: LAMA2; (+) strand; PAM type: YTN; PAM sequence: TTT
taaatccattctcctgttga

SEQ ID NO: 350122 - DNA, 20 bp, Artificial Sequence
  Description of Artificial Sequence: Synthetic oligonucleotide
  Target: LAMA2; (+) strand; PAM type: YTN; PAM sequence: TTT
aaatccattctcctgttgat

SEQ ID NO: 350123 - DNA, 20 bp, Artificial Sequence
  Description of Artificial Sequence: Synthetic oligonucleotide
  Target: LAMA2; (+) strand; PAM type: YTN; PAM sequence: TTA
aatccattctcctgttgata

SEQ ID NO: 350124 - DNA, 20 bp, Artificial Sequence
  Description of Artificial Sequence: Synthetic oligonucleotide
  Target: LAMA2; (+) strand; PAM type: YTN; PAM sequence: TTC
tcctgttgatagaaattagg

SEQ ID NO: 350125 - DNA, 20 bp, Artificial Sequence
  Description of Artificial Sequence: Synthetic oligonucleotide
  Target: LAMA2; (+) strand; PAM type: YTN; PAM sequence: CTC
ctgttgatagaaattaggat

SEQ ID NO: 350126 - DNA, 20 bp, Artificial Sequence
  Description of Artificial Sequence: Synthetic oligonucleotide
  Target: LAMA2; (+) strand; PAM type: YTN; PAM sequence: CTG
ttgatagaaattaggatcat

SEQ ID NO: 350127 - DNA, 20 bp, Artificial Sequence
  Description of Artificial Sequence: Synthetic oligonucleotide
  Target: LAMA2; (+) strand; PAM type: YTN; PAM sequence: TTG
atagaaattaggatcatttc

SEQ ID NO: 350128 - DNA, 20 bp, Artificial Sequence
  Description of Artificial Sequence: Synthetic oligonucleotide
  Target: LAMA2; (+) strand; PAM type: YTN; PAM sequence: TTA
ggatcatttccagttttagc

SEQ ID NO: 350129 - DNA, 20 bp, Artificial Sequence
  Description of Artificial Sequence: Synthetic oligonucleotide
  Target: LAMA2; (+) strand; PAM type: YTN; PAM sequence: TTT
ccagttttagcttagctcct

SEQ ID NO: 350130 - DNA, 20 bp, Artificial Sequence
  Description of Artificial Sequence: Synthetic oligonucleotide
  Target: LAMA2; (+) strand; PAM type: YTN; PAM sequence: TTC
cagttttagcttagctccta

SEQ ID NO: 350131 - DNA, 20 bp, Artificial Sequence
  Description of Artificial Sequence: Synthetic oligonucleotide
  Target: LAMA2; (+) strand; PAM type: YTN; PAM sequence: TTT
tagcttagctcctacaaata

SEQ ID NO: 350132 - DNA, 20 bp, Artificial Sequence
  Description of Artificial Sequence: Synthetic oligonucleotide
  Target: LAMA2; (+) strand; PAM type: YTN; PAM sequence: TTT
agcttagctcctacaaataa

SEQ ID NO: 350133 - DNA, 20 bp, Artificial Sequence
  Description of Artificial Sequence: Synthetic oligonucleotide
  Target: LAMA2; (+) strand; PAM type: YTN; PAM sequence: TTA
gcttagctcctacaaataat

SEQ ID NO: 350134 - DNA, 20 bp, Artificial Sequence
  Description of Artificial Sequence: Synthetic oligonucleotide
  Target: LAMA2; (+) strand; PAM type: YTN; PAM sequence: CTT
agctcctacaaataatttta

SEQ ID NO: 350135 - DNA, 20 bp, Artificial Sequence
  Description of Artificial Sequence: Synthetic oligonucleotide
  Target: LAMA2; (+) strand; PAM type: YTN; PAM sequence: TTA
gctcctacaaataattttat

SEQ ID NO: 350136 - DNA, 20 bp, Artificial Sequence
  Description of Artificial Sequence: Synthetic oligonucleotide
  Target: LAMA2; (+) strand; PAM type: YTN; PAM sequence: CTC
ctacaaataattttatacta

SEQ ID NO: 350137 - DNA, 20 bp, Artificial Sequence
  Description of Artificial Sequence: Synthetic oligonucleotide
  Target: LAMA2; (+) strand; PAM type: YTN; PAM sequence: CTA
caaataattttatactagtt

SEQ ID NO: 350138 - DNA, 20 bp, Artificial Sequence
  Description of Artificial Sequence: Synthetic oligonucleotide
  Target: LAMA2; (+) strand; PAM type: YTN; PAM sequence: TTT
tatactagttattttatagt

SEQ ID NO: 350139 - DNA, 20 bp, Artificial Sequence
  Description of Artificial Sequence: Synthetic oligonucleotide
  Target: LAMA2; (+) strand; PAM type: YTN; PAM sequence: TTT
atactagttattttatagtc

SEQ ID NO: 350140 - DNA, 20 bp, Artificial Sequence
  Description of Artificial Sequence: Synthetic oligonucleotide
  Target: LAMA2; (+) strand; PAM type: YTN; PAM sequence: TTA
tactagttattttatagtca

SEQ ID NO: 350141 - DNA, 20 bp, Artificial Sequence
  Description of Artificial Sequence: Synthetic oligonucleotide
  Target: LAMA2; (+) strand; PAM type: YTN; PAM sequence: CTA
gttattttatagtcatattt

SEQ ID NO: 350142 - DNA, 20 bp, Artificial Sequence
  Description of Artificial Sequence: Synthetic oligonucleotide
  Target: LAMA2; (+) strand; PAM type: YTN; PAM sequence: TTA
ttttatagtcatatttttat

SEQ ID NO: 350143 - DNA, 20 bp, Artificial Sequence
  Description of Artificial Sequence: Synthetic oligonucleotide
  Target: LAMA2; (+) strand; PAM type: YTN; PAM sequence: TTT
tatagtcatatttttattta

SEQ ID NO: 350144 - DNA, 20 bp, Artificial Sequence
  Description of Artificial Sequence: Synthetic oligonucleotide
  Target: LAMA2; (+) strand; PAM type: YTN; PAM sequence: TTT
atagtcatatttttatttac

SEQ ID NO: 350145 - DNA, 20 bp, Artificial Sequence
  Description of Artificial Sequence: Synthetic oligonucleotide
  Target: LAMA2; (+) strand; PAM type: YTN; PAM sequence: TTA
tagtcatatttttatttacc

SEQ ID NO: 350146 - DNA, 20 bp, Artificial Sequence
  Description of Artificial Sequence: Synthetic oligonucleotide
  Target: LAMA2; (+) strand; PAM type: YTN; PAM sequence: TTT
ttatttaccttgtgtaaata

SEQ ID NO: 350147 - DNA, 20 bp, Artificial Sequence
  Description of Artificial Sequence: Synthetic oligonucleotide
  Target: LAMA2; (+) strand; PAM type: YTN; PAM sequence: TTT
tatttaccttgtgtaaatac

SEQ ID NO: 350148 - DNA, 20 bp, Artificial Sequence
  Description of Artificial Sequence: Synthetic oligonucleotide
  Target: LAMA2; (+) strand; PAM type: YTN; PAM sequence: TTT
atttaccttgtgtaaatact

SEQ ID NO: 350149 - DNA, 20 bp, Artificial Sequence
  Description of Artificial Sequence: Synthetic oligonucleotide
  Target: LAMA2; (+) strand; PAM type: YTN; PAM sequence: TTA
tttaccttgtgtaaatactt

SEQ ID NO: 350150 - DNA, 20 bp, Artificial Sequence
  Description of Artificial Sequence: Synthetic oligonucleotide
  Target: LAMA2; (+) strand; PAM type: YTN; PAM sequence: TTT
accttgtgtaaatacttagg

SEQ ID NO: 350151 - DNA, 20 bp, Artificial Sequence
  Description of Artificial Sequence: Synthetic oligonucleotide
  Target: LAMA2; (+) strand; PAM type: YTN; PAM sequence: TTA
ccttgtgtaaatacttagga

SEQ ID NO: 350152 - DNA, 20 bp, Artificial Sequence
  Description of Artificial Sequence: Synthetic oligonucleotide
  Target: LAMA2; (+) strand; PAM type: YTN; PAM sequence: CTT
gtgtaaatacttaggaatag

SEQ ID NO: 350153 - DNA, 20 bp, Artificial Sequence
  Description of Artificial Sequence: Synthetic oligonucleotide
  Target: LAMA2; (+) strand; PAM type: YTN; PAM sequence: TTG
tgtaaatacttaggaataga

SEQ ID NO: 350154 - DNA, 20 bp, Artificial Sequence
  Description of Artificial Sequence: Synthetic oligonucleotide
  Target: LAMA2; (+) strand; PAM type: YTN; PAM sequence: CTT
aggaatagaaagcttttttc

SEQ ID NO: 350155 - DNA, 20 bp, Artificial Sequence
  Description of Artificial Sequence: Synthetic oligonucleotide
  Target: LAMA2; (+) strand; PAM type: YTN; PAM sequence: TTA
ggaatagaaagcttttttca

SEQ ID NO: 350156 - DNA, 20 bp, Artificial Sequence
  Description of Artificial Sequence: Synthetic oligonucleotide
  Target: LAMA2; (+) strand; PAM type: YTN; PAM sequence: CTT
ttttcataggataggtagat

SEQ ID NO: 350157 - DNA, 20 bp, Artificial Sequence
  Description of Artificial Sequence: Synthetic oligonucleotide
  Target: LAMA2; (+) strand; PAM type: YTN; PAM sequence: TTT
tttcataggataggtagatg

SEQ ID NO: 350158 - DNA, 20 bp, Artificial Sequence
  Description of Artificial Sequence: Synthetic oligonucleotide
  Target: LAMA2; (+) strand; PAM type: YTN; PAM sequence: TTT
ttcataggataggtagatgc

SEQ ID NO: 350159 - DNA, 20 bp, Artificial Sequence
  Description of Artificial Sequence: Synthetic oligonucleotide
  Target: LAMA2; (+) strand; PAM type: YTN; PAM sequence: TTT
tcataggataggtagatgct

SEQ ID NO: 350160 - DNA, 20 bp, Artificial Sequence
  Description of Artificial Sequence: Synthetic oligonucleotide
  Target: LAMA2; (+) strand; PAM type: YTN; PAM sequence: TTT
cataggataggtagatgctt

SEQ ID NO: 350161 - DNA, 20 bp, Artificial Sequence
  Description of Artificial Sequence: Synthetic oligonucleotide
  Target: LAMA2; (+) strand; PAM type: YTN; PAM sequence: TTC
ataggataggtagatgctta

SEQ ID NO: 350162 - DNA, 20 bp, Artificial Sequence
  Description of Artificial Sequence: Synthetic oligonucleotide
  Target: LAMA2; (+) strand; PAM type: YTN; PAM sequence: CTT
aactttataagaaaccgtca

SEQ ID NO: 350163 - DNA, 20 bp, Artificial Sequence
  Description of Artificial Sequence: Synthetic oligonucleotide
  Target: LAMA2; (+) strand; PAM type: YTN; PAM sequence: TTA
actttataagaaaccgtcaa

SEQ ID NO: 350164 - DNA, 20 bp, Artificial Sequence
  Description of Artificial Sequence: Synthetic oligonucleotide
  Target: LAMA2; (+) strand; PAM type: YTN; PAM sequence: CTT
tataagaaaccgtcaacatt

SEQ ID NO: 350165 - DNA, 20 bp, Artificial Sequence
  Description of Artificial Sequence: Synthetic oligonucleotide
  Target: LAMA2; (+) strand; PAM type: YTN; PAM sequence: TTT
ataagaaaccgtcaacattt

SEQ ID NO: 350166 - DNA, 20 bp, Artificial Sequence
  Description of Artificial Sequence: Synthetic oligonucleotide
  Target: LAMA2; (+) strand; PAM type: YTN; PAM sequence: TTA
taagaaaccgtcaacatttt

SEQ ID NO: 350167 - DNA, 20 bp, Artificial Sequence
  Description of Artificial Sequence: Synthetic oligonucleotide
  Target: LAMA2; (+) strand; PAM type: YTN; PAM sequence: TTT
tgccaaattagtaataatgt

SEQ ID NO: 350168 - DNA, 20 bp, Artificial Sequence
  Description of Artificial Sequence: Synthetic oligonucleotide
  Target: LAMA2; (+) strand; PAM type: YTN; PAM sequence: TTT
gccaaattagtaataatgta

SEQ ID NO: 350169 - DNA, 20 bp, Artificial Sequence
  Description of Artificial Sequence: Synthetic oligonucleotide
  Target: LAMA2; (+) strand; PAM type: YTN; PAM sequence: TTG
ccaaattagtaataatgtat

SEQ ID NO: 350170 - DNA, 20 bp, Artificial Sequence
  Description of Artificial Sequence: Synthetic oligonucleotide
  Target: LAMA2; (+) strand; PAM type: YTN; PAM sequence: TTA
gtaataatgtataaaatgtt

SEQ ID NO: 350171 - DNA, 20 bp, Artificial Sequence
  Description of Artificial Sequence: Synthetic oligonucleotide
  Target: LAMA2; (+) strand; PAM type: YTN; PAM sequence: TTC
accaaaaagttatatgagtt

SEQ ID NO: 350172 - DNA, 20 bp, Artificial Sequence
  Description of Artificial Sequence: Synthetic oligonucleotide
  Target: LAMA2; (+) strand; PAM type: YTN; PAM sequence: TTA
tatgagtttcagtcattcta

SEQ ID NO: 350173 - DNA, 20 bp, Artificial Sequence
  Description of Artificial Sequence: Synthetic oligonucleotide
  Target: LAMA2; (+) strand; PAM type: YTN; PAM sequence: TTT
cagtcattctatatcatctc

SEQ ID NO: 350174 - DNA, 20 bp, Artificial Sequence
  Description of Artificial Sequence: Synthetic oligonucleotide
  Target: LAMA2; (+) strand; PAM type: YTN; PAM sequence: TTC
agtcattctatatcatctct

SEQ ID NO: 350175 - DNA, 20 bp, Artificial Sequence
  Description of Artificial Sequence: Synthetic oligonucleotide
  Target: LAMA2; (+) strand; PAM type: YTN; PAM sequence: TTC
tatatcatctctaatatttg

SEQ ID NO: 350176 - DNA, 20 bp, Artificial Sequence
  Description of Artificial Sequence: Synthetic oligonucleotide
  Target: LAMA2; (+) strand; PAM type: YTN; PAM sequence: CTA
tatcatctctaatatttgat

SEQ ID NO: 350177 - DNA, 20 bp, Artificial Sequence
  Description of Artificial Sequence: Synthetic oligonucleotide
  Target: LAMA2; (+) strand; PAM type: YTN; PAM sequence: CTC
taatatttgatgttgactat

SEQ ID NO: 350178 - DNA, 20 bp, Artificial Sequence
  Description of Artificial Sequence: Synthetic oligonucleotide
  Target: LAMA2; (+) strand; PAM type: YTN; PAM sequence: CTA
atatttgatgttgactatct

SEQ ID NO: 350179 - DNA, 20 bp, Artificial Sequence
  Description of Artificial Sequence: Synthetic oligonucleotide
  Target: LAMA2; (+) strand; PAM type: YTN; PAM sequence: TTT
gatgttgactatctttttgg

SEQ ID NO: 350180 - DNA, 20 bp, Artificial Sequence
  Description of Artificial Sequence: Synthetic oligonucleotide
  Target: LAMA2; (+) strand; PAM type: YTN; PAM sequence: TTG
atgttgactatctttttgga

SEQ ID NO: 350181 - DNA, 20 bp, Artificial Sequence
  Description of Artificial Sequence: Synthetic oligonucleotide
  Target: LAMA2; (+) strand; PAM type: YTN; PAM sequence: TTG
actatctttttggattttag

SEQ ID NO: 350182 - DNA, 20 bp, Artificial Sequence
  Description of Artificial Sequence: Synthetic oligonucleotide
  Target: LAMA2; (+) strand; PAM type: YTN; PAM sequence: CTA
tctttttggattttagtcat

SEQ ID NO: 350183 - DNA, 20 bp, Artificial Sequence
  Description of Artificial Sequence: Synthetic oligonucleotide
  Target: LAMA2; (+) strand; PAM type: YTN; PAM sequence: CTT
tttggattttagtcatctag

SEQ ID NO: 350184 - DNA, 20 bp, Artificial Sequence
  Description of Artificial Sequence: Synthetic oligonucleotide
  Target: LAMA2; (+) strand; PAM type: YTN; PAM sequence: TTT
ttggattttagtcatctagt

SEQ ID NO: 350185 - DNA, 20 bp, Artificial Sequence
  Description of Artificial Sequence: Synthetic oligonucleotide
  Target: LAMA2; (+) strand; PAM type: YTN; PAM sequence: TTT
tggattttagtcatctagtg

SEQ ID NO: 350186 - DNA, 20 bp, Artificial Sequence
  Description of Artificial Sequence: Synthetic oligonucleotide
  Target: LAMA2; (+) strand; PAM type: YTN; PAM sequence: TTT
ggattttagtcatctagtgg

SEQ ID NO: 350187 - DNA, 20 bp, Artificial Sequence
  Description of Artificial Sequence: Synthetic oligonucleotide
  Target: LAMA2; (+) strand; PAM type: YTN; PAM sequence: TTG
gattttagtcatctagtggg

SEQ ID NO: 350188 - DNA, 20 bp, Artificial Sequence
  Description of Artificial Sequence: Synthetic oligonucleotide
  Target: LAMA2; (+) strand; PAM type: YTN; PAM sequence: TTT
tagtcatctagtgggtgtga

SEQ ID NO: 350189 - DNA, 20 bp, Artificial Sequence
  Description of Artificial Sequence: Synthetic oligonucleotide
  Target: LAMA2; (+) strand; PAM type: YTN; PAM sequence: TTT
agtcatctagtgggtgtgaa

SEQ ID NO: 350190 - DNA, 20 bp, Artificial Sequence
  Description of Artificial Sequence: Synthetic oligonucleotide
  Target: LAMA2; (+) strand; PAM type: YTN; PAM sequence: TTA
gtcatctagtgggtgtgaaa

SEQ ID NO: 350191 - DNA, 20 bp, Artificial Sequence
  Description of Artificial Sequence: Synthetic oligonucleotide
  Target: LAMA2; (+) strand; PAM type: YTN; PAM sequence: CTA
gtgggtgtgaaatggcatct

SEQ ID NO: 350192 - DNA, 20 bp, Artificial Sequence
  Description of Artificial Sequence: Synthetic oligonucleotide
  Target: LAMA2; (+) strand; PAM type: YTN; PAM sequence: CTG
attatggatttaattttaat

SEQ ID NO: 350193 - DNA, 20 bp, Artificial Sequence
  Description of Artificial Sequence: Synthetic oligonucleotide
  Target: LAMA2; (+) strand; PAM type: YTN; PAM sequence: TTA
tggatttaattttaatcgta

SEQ ID NO: 350194 - DNA, 20 bp, Artificial Sequence
  Description of Artificial Sequence: Synthetic oligonucleotide
  Target: LAMA2; (+) strand; PAM type: YTN; PAM sequence: TTT
aattttaatcgtaagggctt

SEQ ID NO: 350195 - DNA, 20 bp, Artificial Sequence
  Description of Artificial Sequence: Synthetic oligonucleotide
  Target: LAMA2; (+) strand; PAM type: YTN; PAM sequence: TTA
attttaatcgtaagggctta

SEQ ID NO: 350196 - DNA, 20 bp, Artificial Sequence
  Description of Artificial Sequence: Synthetic oligonucleotide
  Target: LAMA2; (+) strand; PAM type: YTN; PAM sequence: TTT
taatcgtaagggcttattga

SEQ ID NO: 350197 - DNA, 20 bp, Artificial Sequence
  Description of Artificial Sequence: Synthetic oligonucleotide
  Target: LAMA2; (+) strand; PAM type: YTN; PAM sequence: TTT
aatcgtaagggcttattgac

SEQ ID NO: 350198 - DNA, 20 bp, Artificial Sequence
  Description of Artificial Sequence: Synthetic oligonucleotide
  Target: LAMA2; (+) strand; PAM type: YTN; PAM sequence: TTA
atcgtaagggcttattgacc

SEQ ID NO: 350199 - DNA, 20 bp, Artificial Sequence
  Description of Artificial Sequence: Synthetic oligonucleotide
  Target: LAMA2; (+) strand; PAM type: YTN; PAM sequence: CTT
attgaccattcctgtatctt

SEQ ID NO: 350200 - DNA, 20 bp, Artificial Sequence
  Description of Artificial Sequence: Synthetic oligonucleotide
  Target: LAMA2; (+) strand; PAM type: YTN; PAM sequence: TTA
ttgaccattcctgtatcttc

SEQ ID NO: 350201 - DNA, 20 bp, Artificial Sequence
  Description of Artificial Sequence: Synthetic oligonucleotide
  Target: LAMA2; (+) strand; PAM type: YTN; PAM sequence: TTG
accattcctgtatcttctct

SEQ ID NO: 350202 - DNA, 20 bp, Artificial Sequence
  Description of Artificial Sequence: Synthetic oligonucleotide
  Target: LAMA2; (+) strand; PAM type: YTN; PAM sequence: TTC
ctgtatcttctcttatgaag

SEQ ID NO: 350203 - DNA, 20 bp, Artificial Sequence
  Description of Artificial Sequence: Synthetic oligonucleotide
  Target: LAMA2; (+) strand; PAM type: YTN; PAM sequence: CTG
tatcttctcttatgaagtag

SEQ ID NO: 350204 - DNA, 20 bp, Artificial Sequence
  Description of Artificial Sequence: Synthetic oligonucleotide
  Target: LAMA2; (+) strand; PAM type: YTN; PAM sequence: CTT
ctcttatgaagtagatgttc

SEQ ID NO: 350205 - DNA, 20 bp, Artificial Sequence
  Description of Artificial Sequence: Synthetic oligonucleotide
  Target: LAMA2; (+) strand; PAM type: YTN; PAM sequence: TTC
tcttatgaagtagatgttca

SEQ ID NO: 350206 - DNA, 20 bp, Artificial Sequence
  Description of Artificial Sequence: Synthetic oligonucleotide
  Target: LAMA2; (+) strand; PAM type: YTN; PAM sequence: CTC
ttatgaagtagatgttcaaa

SEQ ID NO: 350207 - DNA, 20 bp, Artificial Sequence
  Description of Artificial Sequence: Synthetic oligonucleotide
  Target: LAMA2; (+) strand; PAM type: YTN; PAM sequence: CTT
atgaagtagatgttcaaagt

SEQ ID NO: 350208 - DNA, 20 bp, Artificial Sequence
  Description of Artificial Sequence: Synthetic oligonucleotide
  Target: LAMA2; (+) strand; PAM type: YTN; PAM sequence: TTA
tgaagtagatgttcaaagtc

SEQ ID NO: 350209 - DNA, 20 bp, Artificial Sequence
  Description of Artificial Sequence: Synthetic oligonucleotide
  Target: LAMA2; (+) strand; PAM type: YTN; PAM sequence: TTC
aaagtctaaatattttttta

SEQ ID NO: 350210 - DNA, 20 bp, Artificial Sequence
  Description of Artificial Sequence: Synthetic oligonucleotide
  Target: LAMA2; (+) strand; PAM type: YTN; PAM sequence: CTA
aatatttttttatcctaaaa

SEQ ID NO: 350211 - DNA, 20 bp, Artificial Sequence
  Description of Artificial Sequence: Synthetic oligonucleotide
  Target: LAMA2; (+) strand; PAM type: YTN; PAM sequence: TTT
ttttatcctaaaaaccaaaa

SEQ ID NO: 350212 - DNA, 20 bp, Artificial Sequence
  Description of Artificial Sequence: Synthetic oligonucleotide
  Target: LAMA2; (+) strand; PAM type: YTN; PAM sequence: TTT
tttatcctaaaaaccaaaat

SEQ ID NO: 350213 - DNA, 20 bp, Artificial Sequence
  Description of Artificial Sequence: Synthetic oligonucleotide
  Target: LAMA2; (+) strand; PAM type: YTN; PAM sequence: TTT
ttatcctaaaaaccaaaatt

SEQ ID NO: 350214 - DNA, 20 bp, Artificial Sequence
  Description of Artificial Sequence: Synthetic oligonucleotide
  Target: LAMA2; (+) strand; PAM type: YTN; PAM sequence: TTT
tatcctaaaaaccaaaattt

SEQ ID NO: 350215 - DNA, 20 bp, Artificial Sequence
  Description of Artificial Sequence: Synthetic oligonucleotide
  Target: LAMA2; (+) strand; PAM type: YTN; PAM sequence: TTT
atcctaaaaaccaaaatttt

SEQ ID NO: 350216 - DNA, 20 bp, Artificial Sequence
  Description of Artificial Sequence: Synthetic oligonucleotide
  Target: LAMA2; (+) strand; PAM type: YTN; PAM sequence: TTA
tcctaaaaaccaaaatttta

SEQ ID NO: 350217 - DNA, 20 bp, Artificial Sequence
  Description of Artificial Sequence: Synthetic oligonucleotide
  Target: LAMA2; (+) strand; PAM type: YTN; PAM sequence: CTA
aaaaccaaaattttaactta

SEQ ID NO: 350218 - DNA, 20 bp, Artificial Sequence
  Description of Artificial Sequence: Synthetic oligonucleotide
  Target: LAMA2; (+) strand; PAM type: YTN; PAM sequence: TTT
taacttatagagctattacc

SEQ ID NO: 350219 - DNA, 20 bp, Artificial Sequence
  Description of Artificial Sequence: Synthetic oligonucleotide
  Target: LAMA2; (+) strand; PAM type: YTN; PAM sequence: TTT
aacttatagagctattaccc

SEQ ID NO: 350220 - DNA, 20 bp, Artificial Sequence
  Description of Artificial Sequence: Synthetic oligonucleotide
  Target: LAMA2; (+) strand; PAM type: YTN; PAM sequence: TTA
acttatagagctattaccca

SEQ ID NO: 350221 - DNA, 20 bp, Artificial Sequence
  Description of Artificial Sequence: Synthetic oligonucleotide
  Target: LAMA2; (+) strand; PAM type: YTN; PAM sequence: CTT
atagagctattacccatatc

SEQ ID NO: 350222 - DNA, 20 bp, Artificial Sequence
  Description of Artificial Sequence: Synthetic oligonucleotide
  Target: LAMA2; (+) strand; PAM type: YTN; PAM sequence: TTA
tagagctattacccatatca

SEQ ID NO: 350223 - DNA, 20 bp, Artificial Sequence
  Description of Artificial Sequence: Synthetic oligonucleotide
  Target: LAMA2; (+) strand; PAM type: YTN; PAM sequence: CTA
ttacccatatcaagtaaatg

SEQ ID NO: 350224 - DNA, 20 bp, Artificial Sequence
  Description of Artificial Sequence: Synthetic oligonucleotide
  Target: LAMA2; (+) strand; PAM type: YTN; PAM sequence: TTA
cccatatcaagtaaatgttt

SEQ ID NO: 350225 - DNA, 20 bp, Artificial Sequence
  Description of Artificial Sequence: Synthetic oligonucleotide
  Target: LAMA2; (+) strand; PAM type: YTN; PAM sequence: TTT
gtgtgtggtgtgaataagta

SEQ ID NO: 350226 - DNA, 20 bp, Artificial Sequence
  Description of Artificial Sequence: Synthetic oligonucleotide
  Target: LAMA2; (+) strand; PAM type: YTN; PAM sequence: TTG
tgtgtggtgtgaataagtaa

SEQ ID NO: 350227 - DNA, 20 bp, Artificial Sequence
  Description of Artificial Sequence: Synthetic oligonucleotide
  Target: LAMA2; (+) strand; PAM type: YTN; PAM sequence: TTT
atatggttaacctgaagttc

SEQ ID NO: 350228 - DNA, 20 bp, Artificial Sequence
  Description of Artificial Sequence: Synthetic oligonucleotide
  Target: LAMA2; (+) strand; PAM type: YTN; PAM sequence: TTA
tatggttaacctgaagttct

SEQ ID NO: 350229 - DNA, 20 bp, Artificial Sequence
  Description of Artificial Sequence: Synthetic oligonucleotide
  Target: LAMA2; (+) strand; PAM type: YTN; PAM sequence: TTA
acctgaagttctagcaccat

SEQ ID NO: 350230 - DNA, 20 bp, Artificial Sequence
  Description of Artificial Sequence: Synthetic oligonucleotide
  Target: LAMA2; (+) strand; PAM type: YTN; PAM sequence: CTG
aagttctagcaccatttgtt

SEQ ID NO: 350231 - DNA, 20 bp, Artificial Sequence
  Description of Artificial Sequence: Synthetic oligonucleotide
  Target: LAMA2; (+) strand; PAM type: YTN; PAM sequence: TTC
tagcaccatttgttgaaaaa

SEQ ID NO: 350232 - DNA, 20 bp, Artificial Sequence
  Description of Artificial Sequence: Synthetic oligonucleotide
  Target: LAMA2; (+) strand; PAM type: YTN; PAM sequence: CTA
gcaccatttgttgaaaaatc

SEQ ID NO: 350233 - DNA, 20 bp, Artificial Sequence
  Description of Artificial Sequence: Synthetic oligonucleotide
  Target: LAMA2; (+) strand; PAM type: YTN; PAM sequence: TTT
gttgaaaaatcaattgatca

SEQ ID NO: 350234 - DNA, 20 bp, Artificial Sequence
  Description of Artificial Sequence: Synthetic oligonucleotide
  Target: LAMA2; (+) strand; PAM type: YTN; PAM sequence: TTG
ttgaaaaatcaattgatcat

SEQ ID NO: 350235 - DNA, 20 bp, Artificial Sequence
  Description of Artificial Sequence: Synthetic oligonucleotide
  Target: LAMA2; (+) strand; PAM type: YTN; PAM sequence: TTG
aaaaatcaattgatcatatt

SEQ ID NO: 350236 - DNA, 20 bp, Artificial Sequence
  Description of Artificial Sequence: Synthetic oligonucleotide
  Target: LAMA2; (+) strand; PAM type: YTN; PAM sequence: TTG
atcatattacatggatcaat

SEQ ID NO: 350237 - DNA, 20 bp, Artificial Sequence
  Description of Artificial Sequence: Synthetic oligonucleotide
  Target: LAMA2; (+) strand; PAM type: YTN; PAM sequence: TTA
catggatcaatttctagaac

SEQ ID NO: 350238 - DNA, 20 bp, Artificial Sequence
  Description of Artificial Sequence: Synthetic oligonucleotide
  Target: LAMA2; (+) strand; PAM type: YTN; PAM sequence: TTT
ctagaacctcagttatctat

SEQ ID NO: 350239 - DNA, 20 bp, Artificial Sequence
  Description of Artificial Sequence: Synthetic oligonucleotide
  Target: LAMA2; (+) strand; PAM type: YTN; PAM sequence: TTC
tagaacctcagttatctatt

SEQ ID NO: 350240 - DNA, 20 bp, Artificial Sequence
  Description of Artificial Sequence: Synthetic oligonucleotide
  Target: LAMA2; (+) strand; PAM type: YTN; PAM sequence: CTA
gaacctcagttatctatttt

SEQ ID NO: 350241 - DNA, 20 bp, Artificial Sequence
  Description of Artificial Sequence: Synthetic oligonucleotide
  Target: LAMA2; (+) strand; PAM type: YTN; PAM sequence: CTC
agttatctatttttcctagc

SEQ ID NO: 350242 - DNA, 20 bp, Artificial Sequence
  Description of Artificial Sequence: Synthetic oligonucleotide
  Target: LAMA2; (+) strand; PAM type: YTN; PAM sequence: TTA
tctatttttcctagcatcta

SEQ ID NO: 350243 - DNA, 20 bp, Artificial Sequence
  Description of Artificial Sequence: Synthetic oligonucleotide
  Target: LAMA2; (+) strand; PAM type: YTN; PAM sequence: CTA
tttttcctagcatctatttt

SEQ ID NO: 350244 - DNA, 20 bp, Artificial Sequence
  Description of Artificial Sequence: Synthetic oligonucleotide
  Target: LAMA2; (+) strand; PAM type: YTN; PAM sequence: TTT
ttcctagcatctatttttcc

SEQ ID NO: 350245 - DNA, 20 bp, Artificial Sequence
  Description of Artificial Sequence: Synthetic oligonucleotide
  Target: LAMA2; (+) strand; PAM type: YTN; PAM sequence: TTT
tcctagcatctatttttccc

SEQ ID NO: 350246 - DNA, 20 bp, Artificial Sequence
  Description of Artificial Sequence: Synthetic oligonucleotide
  Target: LAMA2; (+) strand; PAM type: YTN; PAM sequence: TTT
cctagcatctatttttccct

SEQ ID NO: 350247 - DNA, 20 bp, Artificial Sequence
  Description of Artificial Sequence: Synthetic oligonucleotide
  Target: LAMA2; (+) strand; PAM type: YTN; PAM sequence: TTC
ctagcatctatttttccctc

SEQ ID NO: 350248 - DNA, 20 bp, Artificial Sequence
  Description of Artificial Sequence: Synthetic oligonucleotide
  Target: LAMA2; (+) strand; PAM type: YTN; PAM sequence: CTA
gcatctatttttccctctgc

SEQ ID NO: 350249 - DNA, 20 bp, Artificial Sequence
  Description of Artificial Sequence: Synthetic oligonucleotide
  Target: LAMA2; (+) strand; PAM type: YTN; PAM sequence: CTA
tttttccctctgcgtgctaa

SEQ ID NO: 350250 - DNA, 20 bp, Artificial Sequence
  Description of Artificial Sequence: Synthetic oligonucleotide
  Target: LAMA2; (+) strand; PAM type: YTN; PAM sequence: TTT
ttccctctgcgtgctaatac

SEQ ID NO: 350251 - DNA, 20 bp, Artificial Sequence
  Description of Artificial Sequence: Synthetic oligonucleotide
  Target: LAMA2; (+) strand; PAM type: YTN; PAM sequence: TTT
tccctctgcgtgctaatacc

SEQ ID NO: 350252 - DNA, 20 bp, Artificial Sequence
  Description of Artificial Sequence: Synthetic oligonucleotide
  Target: LAMA2; (+) strand; PAM type: YTN; PAM sequence: TTT
ccctctgcgtgctaatacca

SEQ ID NO: 350253 - DNA, 20 bp, Artificial Sequence
  Description of Artificial Sequence: Synthetic oligonucleotide
  Target: LAMA2; (+) strand; PAM type: YTN; PAM sequence: TTC
cctctgcgtgctaataccat

SEQ ID NO: 350254 - DNA, 20 bp, Artificial Sequence
  Description of Artificial Sequence: Synthetic oligonucleotide
  Target: LAMA2; (+) strand; PAM type: YTN; PAM sequence: CTC
tgcgtgctaataccatacta

SEQ ID NO: 350255 - DNA, 20 bp, Artificial Sequence
  Description of Artificial Sequence: Synthetic oligonucleotide
  Target: LAMA2; (+) strand; PAM type: YTN; PAM sequence: CTG
cgtgctaataccatactatc

SEQ ID NO: 350256 - DNA, 20 bp, Artificial Sequence
  Description of Artificial Sequence: Synthetic oligonucleotide
  Target: LAMA2; (+) strand; PAM type: YTN; PAM sequence: CTA
ataccatactatcttcattg

SEQ ID NO: 350257 - DNA, 20 bp, Artificial Sequence
  Description of Artificial Sequence: Synthetic oligonucleotide
  Target: LAMA2; (+) strand; PAM type: YTN; PAM sequence: CTA
tcttcattgctttagtaagt

SEQ ID NO: 350258 - DNA, 20 bp, Artificial Sequence
  Description of Artificial Sequence: Synthetic oligonucleotide
  Target: LAMA2; (+) strand; PAM type: YTN; PAM sequence: CTT
cattgctttagtaagtctag

SEQ ID NO: 350259 - DNA, 20 bp, Artificial Sequence
  Description of Artificial Sequence: Synthetic oligonucleotide
  Target: LAMA2; (+) strand; PAM type: YTN; PAM sequence: TTC
attgctttagtaagtctaga

SEQ ID NO: 350260 - DNA, 20 bp, Artificial Sequence
  Description of Artificial Sequence: Synthetic oligonucleotide
  Target: LAMA2; (+) strand; PAM type: YTN; PAM sequence: TTG
ctttagtaagtctagaattt

SEQ ID NO: 350261 - DNA, 20 bp, Artificial Sequence
  Description of Artificial Sequence: Synthetic oligonucleotide
  Target: LAMA2; (+) strand; PAM type: YTN; PAM sequence: CTT
tagtaagtctagaatttagg

SEQ ID NO: 350262 - DNA, 20 bp, Artificial Sequence
  Description of Artificial Sequence: Synthetic oligonucleotide
  Target: LAMA2; (+) strand; PAM type: YTN; PAM sequence: TTT
agtaagtctagaatttaggt

SEQ ID NO: 350263 - DNA, 20 bp, Artificial Sequence
  Description of Artificial Sequence: Synthetic oligonucleotide
  Target: LAMA2; (+) strand; PAM type: YTN; PAM sequence: TTA
gtaagtctagaatttaggta

SEQ ID NO: 350264 - DNA, 20 bp, Artificial Sequence
  Description of Artificial Sequence: Synthetic oligonucleotide
  Target: LAMA2; (+) strand; PAM type: YTN; PAM sequence: CTA
gaatttaggtaatataatgt

SEQ ID NO: 350265 - DNA, 20 bp, Artificial Sequence
  Description of Artificial Sequence: Synthetic oligonucleotide
  Target: LAMA2; (+) strand; PAM type: YTN; PAM sequence: TTT
aggtaatataatgtaccaac

SEQ ID NO: 350266 - DNA, 20 bp, Artificial Sequence
  Description of Artificial Sequence: Synthetic oligonucleotide
  Target: LAMA2; (+) strand; PAM type: YTN; PAM sequence: TTA
ggtaatataatgtaccaact

SEQ ID NO: 350267 - DNA, 20 bp, Artificial Sequence
  Description of Artificial Sequence: Synthetic oligonucleotide
  Target: LAMA2; (+) strand; PAM type: YTN; PAM sequence: CTT
tattttttattttcaagatt

SEQ ID NO: 350268 - DNA, 20 bp, Artificial Sequence
  Description of Artificial Sequence: Synthetic oligonucleotide
  Target: LAMA2; (+) strand; PAM type: YTN; PAM sequence: TTT
attttttattttcaagattg

SEQ ID NO: 350269 - DNA, 20 bp, Artificial Sequence
  Description of Artificial Sequence: Synthetic oligonucleotide
  Target: LAMA2; (+) strand; PAM type: YTN; PAM sequence: TTA
ttttttattttcaagattgt

SEQ ID NO: 350270 - DNA, 20 bp, Artificial Sequence
  Description of Artificial Sequence: Synthetic oligonucleotide
  Target: LAMA2; (+) strand; PAM type: YTN; PAM sequence: TTT
tttattttcaagattgtcta

SEQ ID NO: 350271 - DNA, 20 bp, Artificial Sequence
  Description of Artificial Sequence: Synthetic oligonucleotide
  Target: LAMA2; (+) strand; PAM type: YTN; PAM sequence: TTT
ttattttcaagattgtctat

SEQ ID NO: 350272 - DNA, 20 bp, Artificial Sequence
  Description of Artificial Sequence: Synthetic oligonucleotide
  Target: LAMA2; (+) strand; PAM type: YTN; PAM sequence: TTT
tattttcaagattgtctata

SEQ ID NO: 350273 - DNA, 20 bp, Artificial Sequence
  Description of Artificial Sequence: Synthetic oligonucleotide
  Target: LAMA2; (+) strand; PAM type: YTN; PAM sequence: TTT
attttcaagattgtctatag

SEQ ID NO: 350274 - DNA, 20 bp, Artificial Sequence
  Description of Artificial Sequence: Synthetic oligonucleotide
  Target: LAMA2; (+) strand; PAM type: YTN; PAM sequence: TTA
ttttcaagattgtctatagt

SEQ ID NO: 350275 - DNA, 20 bp, Artificial Sequence
  Description of Artificial Sequence: Synthetic oligonucleotide
  Target: LAMA2; (+) strand; PAM type: YTN; PAM sequence: TTT
tcaagattgtctatagtagg

SEQ ID NO: 350276 - DNA, 20 bp, Artificial Sequence
  Description of Artificial Sequence: Synthetic oligonucleotide
  Target: LAMA2; (+) strand; PAM type: YTN; PAM sequence: TTT
caagattgtctatagtaggg

SEQ ID NO: 350277 - DNA, 20 bp, Artificial Sequence
  Description of Artificial Sequence: Synthetic oligonucleotide
  Target: LAMA2; (+) strand; PAM type: YTN; PAM sequence: TTC
aagattgtctatagtagggg

SEQ ID NO: 350278 - DNA, 20 bp, Artificial Sequence
  Description of Artificial Sequence: Synthetic oligonucleotide
  Target: LAMA2; (+) strand; PAM type: YTN; PAM sequence: TTG
tctatagtaggggctttttt

SEQ ID NO: 350279 - DNA, 20 bp, Artificial Sequence
  Description of Artificial Sequence: Synthetic oligonucleotide
  Target: LAMA2; (+) strand; PAM type: YTN; PAM sequence: CTA
tagtaggggcttttttgtgt

SEQ ID NO: 350280 - DNA, 20 bp, Artificial Sequence
  Description of Artificial Sequence: Synthetic oligonucleotide
  Target: LAMA2; (+) strand; PAM type: YTN; PAM sequence: CTT
ttttgtgtgtgtttctatac

SEQ ID NO: 350281 - DNA, 20 bp, Artificial Sequence
  Description of Artificial Sequence: Synthetic oligonucleotide
  Target: LAMA2; (+) strand; PAM type: YTN; PAM sequence: TTT
tttgtgtgtgtttctataca

SEQ ID NO: 350282 - DNA, 20 bp, Artificial Sequence
  Description of Artificial Sequence: Synthetic oligonucleotide
  Target: LAMA2; (+) strand; PAM type: YTN; PAM sequence: TTT
ttgtgtgtgtttctatacaa

SEQ ID NO: 350283 - DNA, 20 bp, Artificial Sequence
  Description of Artificial Sequence: Synthetic oligonucleotide
  Target: LAMA2; (+) strand; PAM type: YTN; PAM sequence: TTT
tgtgtgtgtttctatacaat

SEQ ID NO: 350284 - DNA, 20 bp, Artificial Sequence
  Description of Artificial Sequence: Synthetic oligonucleotide
  Target: LAMA2; (+) strand; PAM type: YTN; PAM sequence: TTT
gtgtgtgtttctatacaatt

SEQ ID NO: 350285 - DNA, 20 bp, Artificial Sequence
  Description of Artificial Sequence: Synthetic oligonucleotide
  Target: LAMA2; (+) strand; PAM type: YTN; PAM sequence: TTG
tgtgtgtttctatacaattt

SEQ ID NO: 350286 - DNA, 20 bp, Artificial Sequence
  Description of Artificial Sequence: Synthetic oligonucleotide
  Target: LAMA2; (+) strand; PAM type: YTN; PAM sequence: TTT
ctatacaattttagaatcaa

SEQ ID NO: 350287 - DNA, 20 bp, Artificial Sequence
  Description of Artificial Sequence: Synthetic oligonucleotide
  Target: LAMA2; (+) strand; PAM type: YTN; PAM sequence: TTC
tatacaattttagaatcaac

SEQ ID NO: 350288 - DNA, 20 bp, Artificial Sequence
  Description of Artificial Sequence: Synthetic oligonucleotide
  Target: LAMA2; (+) strand; PAM type: YTN; PAM sequence: CTA
tacaattttagaatcaactt

SEQ ID NO: 350289 - DNA, 20 bp, Artificial Sequence
  Description of Artificial Sequence: Synthetic oligonucleotide
  Target: LAMA2; (+) strand; PAM type: YTN; PAM sequence: TTT
tagaatcaacttgtcaatta

SEQ ID NO: 350290 - DNA, 20 bp, Artificial Sequence
  Description of Artificial Sequence: Synthetic oligonucleotide
  Target: LAMA2; (+) strand; PAM type: YTN; PAM sequence: TTT
agaatcaacttgtcaattac

SEQ ID NO: 350291 - DNA, 20 bp, Artificial Sequence
  Description of Artificial Sequence: Synthetic oligonucleotide
  Target: LAMA2; (+) strand; PAM type: YTN; PAM sequence: TTA
gaatcaacttgtcaattaca

SEQ ID NO: 350292 - DNA, 20 bp, Artificial Sequence
  Description of Artificial Sequence: Synthetic oligonucleotide
  Target: LAMA2; (+) strand; PAM type: YTN; PAM sequence: CTT
gtcaattacagaaaatatta

SEQ ID NO: 350293 - DNA, 20 bp, Artificial Sequence
  Description of Artificial Sequence: Synthetic oligonucleotide
  Target: LAMA2; (+) strand; PAM type: YTN; PAM sequence: TTG
tcaattacagaaaatattag

SEQ ID NO: 350294 - DNA, 20 bp, Artificial Sequence
  Description of Artificial Sequence: Synthetic oligonucleotide
  Target: LAMA2; (+) strand; PAM type: YTN; PAM sequence: TTA
cagaaaatattaggattatt

SEQ ID NO: 350295 - DNA, 20 bp, Artificial Sequence
  Description of Artificial Sequence: Synthetic oligonucleotide
  Target: LAMA2; (+) strand; PAM type: YTN; PAM sequence: TTA
ggattattgcttagactcta

SEQ ID NO: 350296 - DNA, 20 bp, Artificial Sequence
  Description of Artificial Sequence: Synthetic oligonucleotide
  Target: LAMA2; (+) strand; PAM type: YTN; PAM sequence: TTA
ttgcttagactctatataca

SEQ ID NO: 350297 - DNA, 20 bp, Artificial Sequence
  Description of Artificial Sequence: Synthetic oligonucleotide
  Target: LAMA2; (+) strand; PAM type: YTN; PAM sequence: TTG
cttagactctatatacaaat

SEQ ID NO: 350298 - DNA, 20 bp, Artificial Sequence
  Description of Artificial Sequence: Synthetic oligonucleotide
  Target: LAMA2; (+) strand; PAM type: YTN; PAM sequence: CTT
agactctatatacaaatatg

SEQ ID NO: 350299 - DNA, 20 bp, Artificial Sequence
  Description of Artificial Sequence: Synthetic oligonucleotide
  Target: LAMA2; (+) strand; PAM type: YTN; PAM sequence: TTA
gactctatatacaaatatgg

SEQ ID NO: 350300 - DNA, 20 bp, Artificial Sequence
  Description of Artificial Sequence: Synthetic oligonucleotide
  Target: LAMA2; (+) strand; PAM type: YTN; PAM sequence: CTC
tatatacaaatatggaaaat

SEQ ID NO: 350301 - DNA, 20 bp, Artificial Sequence
  Description of Artificial Sequence: Synthetic oligonucleotide
  Target: LAMA2; (+) strand; PAM type: YTN; PAM sequence: CTA
tatacaaatatggaaaatgg

SEQ ID NO: 350302 - DNA, 20 bp, Artificial Sequence
  Description of Artificial Sequence: Synthetic oligonucleotide
  Target: LAMA2; (+) strand; PAM type: YTN; PAM sequence: CTT
gaggagatgttggtcaaaga

SEQ ID NO: 350303 - DNA, 20 bp, Artificial Sequence
  Description of Artificial Sequence: Synthetic oligonucleotide
  Target: LAMA2; (+) strand; PAM type: YTN; PAM sequence: TTG
aggagatgttggtcaaagaa

SEQ ID NO: 350304 - DNA, 20 bp, Artificial Sequence
  Description of Artificial Sequence: Synthetic oligonucleotide
  Target: LAMA2; (+) strand; PAM type: YTN; PAM sequence: TTG
gtcaaagaatataaaatttc

SEQ ID NO: 350305 - DNA, 20 bp, Artificial Sequence
  Description of Artificial Sequence: Synthetic oligonucleotide
  Target: LAMA2; (+) strand; PAM type: YTN; PAM sequence: TTT
cagttagatagtaggaatac

SEQ ID NO: 350306 - DNA, 20 bp, Artificial Sequence
  Description of Artificial Sequence: Synthetic oligonucleotide
  Target: LAMA2; (+) strand; PAM type: YTN; PAM sequence: TTC
agttagatagtaggaataca

SEQ ID NO: 350307 - DNA, 20 bp, Artificial Sequence
  Description of Artificial Sequence: Synthetic oligonucleotide
  Target: LAMA2; (+) strand; PAM type: YTN; PAM sequence: TTA
gatagtaggaatacattgaa

SEQ ID NO: 350308 - DNA, 20 bp, Artificial Sequence
  Description of Artificial Sequence: Synthetic oligonucleotide
  Target: LAMA2; (+) strand; PAM type: YTN; PAM sequence: TTG
aagatatttattgtacagca

SEQ ID NO: 350309 - DNA, 20 bp, Artificial Sequence
  Description of Artificial Sequence: Synthetic oligonucleotide
  Target: LAMA2; (+) strand; PAM type: YTN; PAM sequence: TTT
attgtacagcatggtgactg

SEQ ID NO: 350310 - DNA, 20 bp, Artificial Sequence
  Description of Artificial Sequence: Synthetic oligonucleotide
  Target: LAMA2; (+) strand; PAM type: YTN; PAM sequence: TTA
ttgtacagcatggtgactgt

SEQ ID NO: 350311 - DNA, 20 bp, Artificial Sequence
  Description of Artificial Sequence: Synthetic oligonucleotide
  Target: LAMA2; (+) strand; PAM type: YTN; PAM sequence: TTG
tacagcatggtgactgtagt

SEQ ID NO: 350312 - DNA, 20 bp, Artificial Sequence
  Description of Artificial Sequence: Synthetic oligonucleotide
  Target: LAMA2; (+) strand; PAM type: YTN; PAM sequence: CTG
tagttaataacaatgtattt

SEQ ID NO: 350313 - DNA, 20 bp, Artificial Sequence
  Description of Artificial Sequence: Synthetic oligonucleotide
  Target: LAMA2; (+) strand; PAM type: YTN; PAM sequence: TTA
ataacaatgtatttactctt

SEQ ID NO: 350314 - DNA, 20 bp, Artificial Sequence
  Description of Artificial Sequence: Synthetic oligonucleotide
  Target: LAMA2; (+) strand; PAM type: YTN; PAM sequence: TTT
actcttaaaaaatgctgaga

SEQ ID NO: 350315 - DNA, 20 bp, Artificial Sequence
  Description of Artificial Sequence: Synthetic oligonucleotide
  Target: LAMA2; (+) strand; PAM type: YTN; PAM sequence: TTA
ctcttaaaaaatgctgagag

SEQ ID NO: 350316 - DNA, 20 bp, Artificial Sequence
  Description of Artificial Sequence: Synthetic oligonucleotide
  Target: LAMA2; (+) strand; PAM type: YTN; PAM sequence: CTC
ttaaaaaatgctgagagtag

SEQ ID NO: 350317 - DNA, 20 bp, Artificial Sequence
  Description of Artificial Sequence: Synthetic oligonucleotide
  Target: LAMA2; (+) strand; PAM type: YTN; PAM sequence: CTT
aaaaaatgctgagagtagat

SEQ ID NO: 350318 - DNA, 20 bp, Artificial Sequence
  Description of Artificial Sequence: Synthetic oligonucleotide
  Target: LAMA2; (+) strand; PAM type: YTN; PAM sequence: TTA
aaaaatgctgagagtagatt

SEQ ID NO: 350319 - DNA, 20 bp, Artificial Sequence
  Description of Artificial Sequence: Synthetic oligonucleotide
  Target: LAMA2; (+) strand; PAM type: YTN; PAM sequence: CTG
agagtagattttaagtgttc

SEQ ID NO: 350320 - DNA, 20 bp, Artificial Sequence
  Description of Artificial Sequence: Synthetic oligonucleotide
  Target: LAMA2; (+) strand; PAM type: YTN; PAM sequence: TTT
taagtgttctcaccaaaaaa

SEQ ID NO: 350321 - DNA, 20 bp, Artificial Sequence
  Description of Artificial Sequence: Synthetic oligonucleotide
  Target: LAMA2; (+) strand; PAM type: YTN; PAM sequence: TTT
aagtgttctcaccaaaaaaa

SEQ ID NO: 350322 - DNA, 20 bp, Artificial Sequence
  Description of Artificial Sequence: Synthetic oligonucleotide
  Target: LAMA2; (+) strand; PAM type: YTN; PAM sequence: TTA
agtgttctcaccaaaaaaat

SEQ ID NO: 350323 - DNA, 20 bp, Artificial Sequence
  Description of Artificial Sequence: Synthetic oligonucleotide
  Target: LAMA2; (+) strand; PAM type: YTN; PAM sequence: TTC
tcaccaaaaaaattgataat

SEQ ID NO: 350324 - DNA, 20 bp, Artificial Sequence
  Description of Artificial Sequence: Synthetic oligonucleotide
  Target: LAMA2; (+) strand; PAM type: YTN; PAM sequence: CTC
accaaaaaaattgataatta

SEQ ID NO: 350325 - DNA, 20 bp, Artificial Sequence
  Description of Artificial Sequence: Synthetic oligonucleotide
  Target: LAMA2; (+) strand; PAM type: YTN; PAM sequence: TTG
ataattatgttaggtaatat

SEQ ID NO: 350326 - DNA, 20 bp, Artificial Sequence
  Description of Artificial Sequence: Synthetic oligonucleotide
  Target: LAMA2; (+) strand; PAM type: YTN; PAM sequence: TTA
tgttaggtaatatgttaatt

SEQ ID NO: 350327 - DNA, 20 bp, Artificial Sequence
  Description of Artificial Sequence: Synthetic oligonucleotide
  Target: LAMA2; (+) strand; PAM type: YTN; PAM sequence: TTA
ggtaatatgttaattagctt

SEQ ID NO: 350328 - DNA, 20 bp, Artificial Sequence
  Description of Artificial Sequence: Synthetic oligonucleotide
  Target: LAMA2; (+) strand; PAM type: YTN; PAM sequence: TTA
attagcttgatataaccatt

SEQ ID NO: 350329 - DNA, 20 bp, Artificial Sequence
  Description of Artificial Sequence: Synthetic oligonucleotide
  Target: LAMA2; (+) strand; PAM type: YTN; PAM sequence: TTA
gcttgatataaccatttcac

SEQ ID NO: 350330 - DNA, 20 bp, Artificial Sequence
  Description of Artificial Sequence: Synthetic oligonucleotide
  Target: LAMA2; (+) strand; PAM type: YTN; PAM sequence: CTT
gatataaccatttcacaatt

SEQ ID NO: 350331 - DNA, 20 bp, Artificial Sequence
  Description of Artificial Sequence: Synthetic oligonucleotide
  Target: LAMA2; (+) strand; PAM type: YTN; PAM sequence: TTG
atataaccatttcacaattt

SEQ ID NO: 350332 - DNA, 20 bp, Artificial Sequence
  Description of Artificial Sequence: Synthetic oligonucleotide
  Target: LAMA2; (+) strand; PAM type: YTN; PAM sequence: TTT
cacaatttgtatatatataa

SEQ ID NO: 350333 - DNA, 20 bp, Artificial Sequence
  Description of Artificial Sequence: Synthetic oligonucleotide
  Target: LAMA2; (+) strand; PAM type: YTN; PAM sequence: TTC
acaatttgtatatatataat

SEQ ID NO: 350334 - DNA, 20 bp, Artificial Sequence
  Description of Artificial Sequence: Synthetic oligonucleotide
  Target: LAMA2; (+) strand; PAM type: YTN; PAM sequence: TTT
gtatatatataatatatata

SEQ ID NO: 350335 - DNA, 20 bp, Artificial Sequence
  Description of Artificial Sequence: Synthetic oligonucleotide
  Target: LAMA2; (+) strand; PAM type: YTN; PAM sequence: TTG
tatatatataatatatatat

SEQ ID NO: 350336 - DNA, 20 bp, Artificial Sequence
  Description of Artificial Sequence: Synthetic oligonucleotide
  Target: LAMA2; (+) strand; PAM type: YTN; PAM sequence: TTC
aaaatatcatgtcacacatg

SEQ ID NO: 350337 - DNA, 20 bp, Artificial Sequence
  Description of Artificial Sequence: Synthetic oligonucleotide
  Target: LAMA2; (+) strand; PAM type: YTN; PAM sequence: TTT
tgtcaaaaaggaaattaaac

SEQ ID NO: 350338 - DNA, 20 bp, Artificial Sequence
  Description of Artificial Sequence: Synthetic oligonucleotide
  Target: LAMA2; (+) strand; PAM type: YTN; PAM sequence: TTT
gtcaaaaaggaaattaaact

SEQ ID NO: 350339 - DNA, 20 bp, Artificial Sequence
  Description of Artificial Sequence: Synthetic oligonucleotide
  Target: LAMA2; (+) strand; PAM type: YTN; PAM sequence: TTG
tcaaaaaggaaattaaactt

SEQ ID NO: 350340 - DNA, 20 bp, Artificial Sequence
  Description of Artificial Sequence: Synthetic oligonucleotide
  Target: LAMA2; (+) strand; PAM type: YTN; PAM sequence: TTA
aactttaaaagcaaacaagt

SEQ ID NO: 350341 - DNA, 20 bp, Artificial Sequence
  Description of Artificial Sequence: Synthetic oligonucleotide
  Target: LAMA2; (+) strand; PAM type: YTN; PAM sequence: CTT
taaaagcaaacaagtattga

SEQ ID NO: 350342 - DNA, 20 bp, Artificial Sequence
  Description of Artificial Sequence: Synthetic oligonucleotide
  Target: LAMA2; (+) strand; PAM type: YTN; PAM sequence: TTT
aaaagcaaacaagtattgag

SEQ ID NO: 350343 - DNA, 20 bp, Artificial Sequence
  Description of Artificial Sequence: Synthetic oligonucleotide
  Target: LAMA2; (+) strand; PAM type: YTN; PAM sequence: TTA
aaagcaaacaagtattgagg

SEQ ID NO: 350344 - DNA, 20 bp, Artificial Sequence
  Description of Artificial Sequence: Synthetic oligonucleotide
  Target: LAMA2; (+) strand; PAM type: YTN; PAM sequence: TTG
aggaaaataacatcataata

SEQ ID NO: 350345 - DNA, 20 bp, Artificial Sequence
  Description of Artificial Sequence: Synthetic oligonucleotide
  Target: LAMA2; (+) strand; PAM type: YTN; PAM sequence: TTG
aatcatttaaccaatgaaca

SEQ ID NO: 350346 - DNA, 20 bp, Artificial Sequence
  Description of Artificial Sequence: Synthetic oligonucleotide
  Target: LAMA2; (+) strand; PAM type: YTN; PAM sequence: TTT
aaccaatgaacatagcatat

SEQ ID NO: 350347 - DNA, 20 bp, Artificial Sequence
  Description of Artificial Sequence: Synthetic oligonucleotide
  Target: LAMA2; (+) strand; PAM type: YTN; PAM sequence: TTA
accaatgaacatagcatatc

SEQ ID NO: 350348 - DNA, 20 bp, Artificial Sequence
  Description of Artificial Sequence: Synthetic oligonucleotide
  Target: LAMA2; (+) strand; PAM type: YTN; PAM sequence: CTC
tccatttatttctatcttct

SEQ ID NO: 350349 - DNA, 20 bp, Artificial Sequence
  Description of Artificial Sequence: Synthetic oligonucleotide
  Target: LAMA2; (+) strand; PAM type: YTN; PAM sequence: CTC
catttatttctatcttcttt

SEQ ID NO: 350350 - DNA, 20 bp, Artificial Sequence
  Description of Artificial Sequence: Synthetic oligonucleotide
  Target: LAMA2; (+) strand; PAM type: YTN; PAM sequence: TTT
atttctatcttctttattca

SEQ ID NO: 350351 - DNA, 20 bp, Artificial Sequence
  Description of Artificial Sequence: Synthetic oligonucleotide
  Target: LAMA2; (+) strand; PAM type: YTN; PAM sequence: TTA
tttctatcttctttattcat

SEQ ID NO: 350352 - DNA, 20 bp, Artificial Sequence
  Description of Artificial Sequence: Synthetic oligonucleotide
  Target: LAMA2; (+) strand; PAM type: YTN; PAM sequence: TTT
ctatcttctttattcatgtc

SEQ ID NO: 350353 - DNA, 20 bp, Artificial Sequence
  Description of Artificial Sequence: Synthetic oligonucleotide
  Target: LAMA2; (+) strand; PAM type: YTN; PAM sequence: TTC
tatcttctttattcatgtca

SEQ ID NO: 350354 - DNA, 20 bp, Artificial Sequence
  Description of Artificial Sequence: Synthetic oligonucleotide
  Target: LAMA2; (+) strand; PAM type: YTN; PAM sequence: CTA
tcttctttattcatgtcagt

SEQ ID NO: 350355 - DNA, 20 bp, Artificial Sequence
  Description of Artificial Sequence: Synthetic oligonucleotide
  Target: LAMA2; (+) strand; PAM type: YTN; PAM sequence: CTT
ctttattcatgtcagtgttc

SEQ ID NO: 350356 - DNA, 20 bp, Artificial Sequence
  Description of Artificial Sequence: Synthetic oligonucleotide
  Target: LAMA2; (+) strand; PAM type: YTN; PAM sequence: TTC
tttattcatgtcagtgttcc

SEQ ID NO: 350357 - DNA, 20 bp, Artificial Sequence
  Description of Artificial Sequence: Synthetic oligonucleotide
  Target: LAMA2; (+) strand; PAM type: YTN; PAM sequence: CTT
tattcatgtcagtgttccag

SEQ ID NO: 350358 - DNA, 20 bp, Artificial Sequence
  Description of Artificial Sequence: Synthetic oligonucleotide
  Target: LAMA2; (+) strand; PAM type: YTN; PAM sequence: TTT
attcatgtcagtgttccagt

SEQ ID NO: 350359 - DNA, 20 bp, Artificial Sequence
  Description of Artificial Sequence: Synthetic oligonucleotide
  Target: LAMA2; (+) strand; PAM type: YTN; PAM sequence: TTA
ttcatgtcagtgttccagta

SEQ ID NO: 350360 - DNA, 20 bp, Artificial Sequence
  Description of Artificial Sequence: Synthetic oligonucleotide
  Target: LAMA2; (+) strand; PAM type: YTN; PAM sequence: TTC
atgtcagtgttccagtacag

SEQ ID NO: 350361 - DNA, 20 bp, Artificial Sequence
  Description of Artificial Sequence: Synthetic oligonucleotide
  Target: LAMA2; (+) strand; PAM type: YTN; PAM sequence: TTC
cagtacagagatcttgcatg

SEQ ID NO: 350362 - DNA, 20 bp, Artificial Sequence
  Description of Artificial Sequence: Synthetic oligonucleotide
  Target: LAMA2; (+) strand; PAM type: YTN; PAM sequence: CTT
gcatgtcttttgttaaatta

SEQ ID NO: 350363 - DNA, 20 bp, Artificial Sequence
  Description of Artificial Sequence: Synthetic oligonucleotide
  Target: LAMA2; (+) strand; PAM type: YTN; PAM sequence: TTG
catgtcttttgttaaattaa

SEQ ID NO: 350364 - DNA, 20 bp, Artificial Sequence
  Description of Artificial Sequence: Synthetic oligonucleotide
  Target: LAMA2; (+) strand; PAM type: YTN; PAM sequence: CTT
ttgttaaattaatctttaga

SEQ ID NO: 350365 - DNA, 20 bp, Artificial Sequence
  Description of Artificial Sequence: Synthetic oligonucleotide
  Target: LAMA2; (+) strand; PAM type: YTN; PAM sequence: TTT
tgttaaattaatctttagaa

SEQ ID NO: 350366 - DNA, 20 bp, Artificial Sequence
  Description of Artificial Sequence: Synthetic oligonucleotide
  Target: LAMA2; (+) strand; PAM type: YTN; PAM sequence: TTT
gttaaattaatctttagaat

SEQ ID NO: 350367 - DNA, 20 bp, Artificial Sequence
  Description of Artificial Sequence: Synthetic oligonucleotide
  Target: LAMA2; (+) strand; PAM type: YTN; PAM sequence: TTG
ttaaattaatctttagaatt

SEQ ID NO: 350368 - DNA, 20 bp, Artificial Sequence
  Description of Artificial Sequence: Synthetic oligonucleotide
  Target: LAMA2; (+) strand; PAM type: YTN; PAM sequence: TTA
aattaatctttagaattttg

SEQ ID NO: 350369 - DNA, 20 bp, Artificial Sequence
  Description of Artificial Sequence: Synthetic oligonucleotide
  Target: LAMA2; (+) strand; PAM type: YTN; PAM sequence: TTA
atctttagaattttgctttg

SEQ ID NO: 350370 - DNA, 20 bp, Artificial Sequence
  Description of Artificial Sequence: Synthetic oligonucleotide
  Target: LAMA2; (+) strand; PAM type: YTN; PAM sequence: CTT
tagaattttgctttgcatga

SEQ ID NO: 350371 - DNA, 20 bp, Artificial Sequence
  Description of Artificial Sequence: Synthetic oligonucleotide
  Target: LAMA2; (+) strand; PAM type: YTN; PAM sequence: TTT
agaattttgctttgcatgac

SEQ ID NO: 350372 - DNA, 20 bp, Artificial Sequence
  Description of Artificial Sequence: Synthetic oligonucleotide
  Target: LAMA2; (+) strand; PAM type: YTN; PAM sequence: TTA
gaattttgctttgcatgact

SEQ ID NO: 350373 - DNA, 20 bp, Artificial Sequence
  Description of Artificial Sequence: Synthetic oligonucleotide
  Target: LAMA2; (+) strand; PAM type: YTN; PAM sequence: TTT
tgctttgcatgactgtaaaa

SEQ ID NO: 350374 - DNA, 20 bp, Artificial Sequence
  Description of Artificial Sequence: Synthetic oligonucleotide
  Target: LAMA2; (+) strand; PAM type: YTN; PAM sequence: TTT
gctttgcatgactgtaaaaa

SEQ ID NO: 350375 - DNA, 20 bp, Artificial Sequence
  Description of Artificial Sequence: Synthetic oligonucleotide
  Target: LAMA2; (+) strand; PAM type: YTN; PAM sequence: TTG
ctttgcatgactgtaaaaaa

SEQ ID NO: 350376 - DNA, 20 bp, Artificial Sequence
  Description of Artificial Sequence: Synthetic oligonucleotide
  Target: LAMA2; (+) strand; PAM type: YTN; PAM sequence: CTT
tgcatgactgtaaaaaaaat

SEQ ID NO: 350377 - DNA, 20 bp, Artificial Sequence
  Description of Artificial Sequence: Synthetic oligonucleotide
  Target: LAMA2; (+) strand; PAM type: YTN; PAM sequence: TTT
gcatgactgtaaaaaaaatt

SEQ ID NO: 350378 - DNA, 20 bp, Artificial Sequence
  Description of Artificial Sequence: Synthetic oligonucleotide
  Target: LAMA2; (+) strand; PAM type: YTN; PAM sequence: TTG
catgactgtaaaaaaaattt

SEQ ID NO: 350379 - DNA, 20 bp, Artificial Sequence
  Description of Artificial Sequence: Synthetic oligonucleotide
  Target: LAMA2; (+) strand; PAM type: YTN; PAM sequence: CTG
taaaaaaaatttttaaataa

SEQ ID NO: 350380 - DNA, 20 bp, Artificial Sequence
  Description of Artificial Sequence: Synthetic oligonucleotide
  Target: LAMA2; (+) strand; PAM type: YTN; PAM sequence: TTT
ttaaataattttccaattat

SEQ ID NO: 350381 - DNA, 20 bp, Artificial Sequence
  Description of Artificial Sequence: Synthetic oligonucleotide
  Target: LAMA2; (+) strand; PAM type: YTN; PAM sequence: TTT
taaataattttccaattatt

SEQ ID NO: 350382 - DNA, 20 bp, Artificial Sequence
  Description of Artificial Sequence: Synthetic oligonucleotide
  Target: LAMA2; (+) strand; PAM type: YTN; PAM sequence: TTT
aaataattttccaattattt

SEQ ID NO: 350383 - DNA, 20 bp, Artificial Sequence
  Description of Artificial Sequence: Synthetic oligonucleotide
  Target: LAMA2; (+) strand; PAM type: YTN; PAM sequence: TTA
aataattttccaattattta

SEQ ID NO: 350384 - DNA, 20 bp, Artificial Sequence
  Description of Artificial Sequence: Synthetic oligonucleotide
  Target: LAMA2; (+) strand; PAM type: YTN; PAM sequence: TTT
tccaattatttaatgtaatt

SEQ ID NO: 350385 - DNA, 20 bp, Artificial Sequence
  Description of Artificial Sequence: Synthetic oligonucleotide
  Target: LAMA2; (+) strand; PAM type: YTN; PAM sequence: TTT
ccaattatttaatgtaattg

SEQ ID NO: 350386 - DNA, 20 bp, Artificial Sequence
  Description of Artificial Sequence: Synthetic oligonucleotide
  Target: LAMA2; (+) strand; PAM type: YTN; PAM sequence: TTC
caattatttaatgtaattgt

SEQ ID NO: 350387 - DNA, 20 bp, Artificial Sequence
  Description of Artificial Sequence: Synthetic oligonucleotide
  Target: LAMA2; (+) strand; PAM type: YTN; PAM sequence: TTA
tttaatgtaattgttaaaga

SEQ ID NO: 350388 - DNA, 20 bp, Artificial Sequence
  Description of Artificial Sequence: Synthetic oligonucleotide
  Target: LAMA2; (+) strand; PAM type: YTN; PAM sequence: TTT
aatgtaattgttaaagaatt

SEQ ID NO: 350389 - DNA, 20 bp, Artificial Sequence
  Description of Artificial Sequence: Synthetic oligonucleotide
  Target: LAMA2; (+) strand; PAM type: YTN; PAM sequence: TTA
atgtaattgttaaagaattt

SEQ ID NO: 350390 - DNA, 20 bp, Artificial Sequence
  Description of Artificial Sequence: Synthetic oligonucleotide
  Target: LAMA2; (+) strand; PAM type: YTN; PAM sequence: TTG
ttaaagaattttgaatattg

SEQ ID NO: 350391 - DNA, 20 bp, Artificial Sequence
  Description of Artificial Sequence: Synthetic oligonucleotide
  Target: LAMA2; (+) strand; PAM type: YTN; PAM sequence: TTA
aagaattttgaatattgact

SEQ ID NO: 350392 - DNA, 20 bp, Artificial Sequence
  Description of Artificial Sequence: Synthetic oligonucleotide
  Target: LAMA2; (+) strand; PAM type: YTN; PAM sequence: TTT
tgaatattgactttatgccc

SEQ ID NO: 350393 - DNA, 20 bp, Artificial Sequence
  Description of Artificial Sequence: Synthetic oligonucleotide
  Target: LAMA2; (+) strand; PAM type: YTN; PAM sequence: TTT
gaatattgactttatgccct

SEQ ID NO: 350394 - DNA, 20 bp, Artificial Sequence
  Description of Artificial Sequence: Synthetic oligonucleotide
  Target: LAMA2; (+) strand; PAM type: YTN; PAM sequence: TTG
aatattgactttatgcccta

SEQ ID NO: 350395 - DNA, 20 bp, Artificial Sequence
  Description of Artificial Sequence: Synthetic oligonucleotide
  Target: LAMA2; (+) strand; PAM type: YTN; PAM sequence: TTG
actttatgccctatagccat

SEQ ID NO: 350396 - DNA, 20 bp, Artificial Sequence
  Description of Artificial Sequence: Synthetic oligonucleotide
  Target: LAMA2; (+) strand; PAM type: YTN; PAM sequence: CTT
tatgccctatagccatcctt

SEQ ID NO: 350397 - DNA, 20 bp, Artificial Sequence
  Description of Artificial Sequence: Synthetic oligonucleotide
  Target: LAMA2; (+) strand; PAM type: YTN; PAM sequence: TTT
atgccctatagccatcctta

SEQ ID NO: 350398 - DNA, 20 bp, Artificial Sequence
  Description of Artificial Sequence: Synthetic oligonucleotide
  Target: LAMA2; (+) strand; PAM type: YTN; PAM sequence: TTA
tgccctatagccatccttaa

SEQ ID NO: 350399 - DNA, 20 bp, Artificial Sequence
  Description of Artificial Sequence: Synthetic oligonucleotide
  Target: LAMA2; (+) strand; PAM type: YTN; PAM sequence: CTA
tagccatccttaatttcttt

SEQ ID NO: 350400 - DNA, 20 bp, Artificial Sequence
  Description of Artificial Sequence: Synthetic oligonucleotide
  Target: LAMA2; (+) strand; PAM type: YTN; PAM sequence: CTT
aatttcttttttttttttta

SEQ ID NO: 350401 - DNA, 20 bp, Artificial Sequence
  Description of Artificial Sequence: Synthetic oligonucleotide
  Target: LAMA2; (+) strand; PAM type: YTN; PAM sequence: TTA
atttctttttttttttttaa

SEQ ID NO: 350402 - DNA, 20 bp, Artificial Sequence
  Description of Artificial Sequence: Synthetic oligonucleotide
  Target: LAMA2; (+) strand; PAM type: YTN; PAM sequence: TTT
ctttttttttttttaaataa

SEQ ID NO: 350403 - DNA, 20 bp, Artificial Sequence
  Description of Artificial Sequence: Synthetic oligonucleotide
  Target: LAMA2; (+) strand; PAM type: YTN; PAM sequence: TTC
tttttttttttttaaataac

SEQ ID NO: 350404 - DNA, 20 bp, Artificial Sequence
  Description of Artificial Sequence: Synthetic oligonucleotide
  Target: LAMA2; (+) strand; PAM type: YTN; PAM sequence: CTT
tttttttttttaaataactt

SEQ ID NO: 350405 - DNA, 20 bp, Artificial Sequence
  Description of Artificial Sequence: Synthetic oligonucleotide
  Target: LAMA2; (+) strand; PAM type: YTN; PAM sequence: TTT
ttttttttttaaataacttc

SEQ ID NO: 350406 - DNA, 20 bp, Artificial Sequence
  Description of Artificial Sequence: Synthetic oligonucleotide
  Target: LAMA2; (+) strand; PAM type: YTN; PAM sequence: TTT
tttttttttaaataacttcc

SEQ ID NO: 350407 - DNA, 20 bp, Artificial Sequence
  Description of Artificial Sequence: Synthetic oligonucleotide
  Target: LAMA2; (+) strand; PAM type: YTN; PAM sequence: TTT
ttttttttaaataacttccc

SEQ ID NO: 350408 - DNA, 20 bp, Artificial Sequence
  Description of Artificial Sequence: Synthetic oligonucleotide
  Target: LAMA2; (+) strand; PAM type: YTN; PAM sequence: TTT
tttttttaaataacttccct

SEQ ID NO: 350409 - DNA, 20 bp, Artificial Sequence
  Description of Artificial Sequence: Synthetic oligonucleotide
  Target: LAMA2; (+) strand; PAM type: YTN; PAM sequence: TTT
ttttttaaataacttccctt

SEQ ID NO: 350410 - DNA, 20 bp, Artificial Sequence
  Description of Artificial Sequence: Synthetic oligonucleotide
  Target: LAMA2; (+) strand; PAM type: YTN; PAM sequence: TTT
tttttaaataacttcccttt

SEQ ID NO: 350411 - DNA, 20 bp, Artificial Sequence
  Description of Artificial Sequence: Synthetic oligonucleotide
  Target: LAMA2; (+) strand; PAM type: YTN; PAM sequence: TTT
ttttaaataacttccctttt

SEQ ID NO: 350412 - DNA, 20 bp, Artificial Sequence
  Description of Artificial Sequence: Synthetic oligonucleotide
  Target: LAMA2; (+) strand; PAM type: YTN; PAM sequence: TTT
tttaaataacttccctttta

SEQ ID NO: 350413 - DNA, 20 bp, Artificial Sequence
  Description of Artificial Sequence: Synthetic oligonucleotide
  Target: LAMA2; (+) strand; PAM type: YTN; PAM sequence: TTT
ttaaataacttcccttttaa

SEQ ID NO: 350414 - DNA, 20 bp, Artificial Sequence
  Description of Artificial Sequence: Synthetic oligonucleotide
  Target: LAMA2; (+) strand; PAM type: YTN; PAM sequence: TTT
taaataacttcccttttaaa

SEQ ID NO: 350415 - DNA, 20 bp, Artificial Sequence
  Description of Artificial Sequence: Synthetic oligonucleotide
  Target: LAMA2; (+) strand; PAM type: YTN; PAM sequence: TTT
aaataacttcccttttaaaa

SEQ ID NO: 350416 - DNA, 20 bp, Artificial Sequence
  Description of Artificial Sequence: Synthetic oligonucleotide
  Target: LAMA2; (+) strand; PAM type: YTN; PAM sequence: TTA
aataacttcccttttaaaag

SEQ ID NO: 350417 - DNA, 20 bp, Artificial Sequence
  Description of Artificial Sequence: Synthetic oligonucleotide
  Target: LAMA2; (+) strand; PAM type: YTN; PAM sequence: CTT
cccttttaaaagttactgag

SEQ ID NO: 350418 - DNA, 20 bp, Artificial Sequence
  Description of Artificial Sequence: Synthetic oligonucleotide
  Target: LAMA2; (+) strand; PAM type: YTN; PAM sequence: TTC
ccttttaaaagttactgaga

SEQ ID NO: 350419 - DNA, 20 bp, Artificial Sequence
  Description of Artificial Sequence: Synthetic oligonucleotide
  Target: LAMA2; (+) strand; PAM type: YTN; PAM sequence: CTT
ttaaaagttactgagaataa

SEQ ID NO: 350420 - DNA, 20 bp, Artificial Sequence
  Description of Artificial Sequence: Synthetic oligonucleotide
  Target: LAMA2; (+) strand; PAM type: YTN; PAM sequence: TTT
taaaagttactgagaataaa

SEQ ID NO: 350421 - DNA, 20 bp, Artificial Sequence
  Description of Artificial Sequence: Synthetic oligonucleotide
  Target: LAMA2; (+) strand; PAM type: YTN; PAM sequence: TTT
aaaagttactgagaataaag

SEQ ID NO: 350422 - DNA, 20 bp, Artificial Sequence
  Description of Artificial Sequence: Synthetic oligonucleotide
  Target: LAMA2; (+) strand; PAM type: YTN; PAM sequence: TTA
aaagttactgagaataaaga

SEQ ID NO: 350423 - DNA, 20 bp, Artificial Sequence
  Description of Artificial Sequence: Synthetic oligonucleotide
  Target: LAMA2; (+) strand; PAM type: YTN; PAM sequence: TTA
ctgagaataaagaatacaga

SEQ ID NO: 350424 - DNA, 20 bp, Artificial Sequence
  Description of Artificial Sequence: Synthetic oligonucleotide
  Target: LAMA2; (+) strand; PAM type: YTN; PAM sequence: CTG
agaataaagaatacagaaca

SEQ ID NO: 350425 - DNA, 20 bp, Artificial Sequence
  Description of Artificial Sequence: Synthetic oligonucleotide
  Target: LAMA2; (+) strand; PAM type: YTN; PAM sequence: TTA
taggcacttacattgctatc

SEQ ID NO: 350426 - DNA, 20 bp, Artificial Sequence
  Description of Artificial Sequence: Synthetic oligonucleotide
  Target: LAMA2; (+) strand; PAM type: YTN; PAM sequence: CTT
acattgctatcaaatgcagg

SEQ ID NO: 350427 - DNA, 20 bp, Artificial Sequence
  Description of Artificial Sequence: Synthetic oligonucleotide
  Target: LAMA2; (+) strand; PAM type: YTN; PAM sequence: TTA
cattgctatcaaatgcagga

SEQ ID NO: 350428 - DNA, 20 bp, Artificial Sequence
  Description of Artificial Sequence: Synthetic oligonucleotide
  Target: LAMA2; (+) strand; PAM type: YTN; PAM sequence: TTG
ctatcaaatgcaggaattca

SEQ ID NO: 350429 - DNA, 20 bp, Artificial Sequence
  Description of Artificial Sequence: Synthetic oligonucleotide
  Target: LAMA2; (+) strand; PAM type: YTN; PAM sequence: CTA
tcaaatgcaggaattcactt

SEQ ID NO: 350430 - DNA, 20 bp, Artificial Sequence
  Description of Artificial Sequence: Synthetic oligonucleotide
  Target: LAMA2; (+) strand; PAM type: YTN; PAM sequence: TTC
acttcaataagaagtgcttt

SEQ ID NO: 350431 - DNA, 20 bp, Artificial Sequence
  Description of Artificial Sequence: Synthetic oligonucleotide
  Target: LAMA2; (+) strand; PAM type: YTN; PAM sequence: CTT
caataagaagtgctttctct

SEQ ID NO: 350432 - DNA, 20 bp, Artificial Sequence
  Description of Artificial Sequence: Synthetic oligonucleotide
  Target: LAMA2; (+) strand; PAM type: YTN; PAM sequence: TTC
aataagaagtgctttctctg

SEQ ID NO: 350433 - DNA, 20 bp, Artificial Sequence
  Description of Artificial Sequence: Synthetic oligonucleotide
  Target: LAMA2; (+) strand; PAM type: YTN; PAM sequence: CTT
tctctgtaagcatggttcat

SEQ ID NO: 350434 - DNA, 20 bp, Artificial Sequence
  Description of Artificial Sequence: Synthetic oligonucleotide
  Target: LAMA2; (+) strand; PAM type: YTN; PAM sequence: TTT
ctctgtaagcatggttcatg

SEQ ID NO: 350435 - DNA, 20 bp, Artificial Sequence
  Description of Artificial Sequence: Synthetic oligonucleotide
  Target: LAMA2; (+) strand; PAM type: YTN; PAM sequence: TTC
tctgtaagcatggttcatgg

SEQ ID NO: 350436 - DNA, 20 bp, Artificial Sequence
  Description of Artificial Sequence: Synthetic oligonucleotide
  Target: LAMA2; (+) strand; PAM type: YTN; PAM sequence: CTC
tgtaagcatggttcatggca

SEQ ID NO: 350437 - DNA, 20 bp, Artificial Sequence
  Description of Artificial Sequence: Synthetic oligonucleotide
  Target: LAMA2; (+) strand; PAM type: YTN; PAM sequence: CTG
taagcatggttcatggcaat

SEQ ID NO: 350438 - DNA, 20 bp, Artificial Sequence
  Description of Artificial Sequence: Synthetic oligonucleotide
  Target: LAMA2; (+) strand; PAM type: YTN; PAM sequence: TTC
atggcaatagaagctccaac

SEQ ID NO: 350439 - DNA, 20 bp, Artificial Sequence
  Description of Artificial Sequence: Synthetic oligonucleotide
  Target: LAMA2; (+) strand; PAM type: YTN; PAM sequence: CTC
caacttaggagaggatgttt

SEQ ID NO: 350440 - DNA, 20 bp, Artificial Sequence
  Description of Artificial Sequence: Synthetic oligonucleotide
  Target: LAMA2; (+) strand; PAM type: YTN; PAM sequence: CTT
aggagaggatgttttccgtg

SEQ ID NO: 350441 - DNA, 20 bp, Artificial Sequence
  Description of Artificial Sequence: Synthetic oligonucleotide
  Target: LAMA2; (+) strand; PAM type: YTN; PAM sequence: TTA
ggagaggatgttttccgtga

SEQ ID NO: 350442 - DNA, 20 bp, Artificial Sequence
  Description of Artificial Sequence: Synthetic oligonucleotide
  Target: LAMA2; (+) strand; PAM type: YTN; PAM sequence: TTT
tccgtgacaaaaataataac

SEQ ID NO: 350443 - DNA, 20 bp, Artificial Sequence
  Description of Artificial Sequence: Synthetic oligonucleotide
  Target: LAMA2; (+) strand; PAM type: YTN; PAM sequence: TTT
ccgtgacaaaaataataaca

SEQ ID NO: 350444 - DNA, 20 bp, Artificial Sequence
  Description of Artificial Sequence: Synthetic oligonucleotide
  Target: LAMA2; (+) strand; PAM type: YTN; PAM sequence: TTC
cgtgacaaaaataataacaa

SEQ ID NO: 350445 - DNA, 20 bp, Artificial Sequence
  Description of Artificial Sequence: Synthetic oligonucleotide
  Target: LAMA2; (+) strand; PAM type: YTN; PAM sequence: TTG
aaggaaaacagtccaaattt

SEQ ID NO: 350446 - DNA, 20 bp, Artificial Sequence
  Description of Artificial Sequence: Synthetic oligonucleotide
  Target: LAMA2; (+) strand; PAM type: YTN; PAM sequence: TTT
acagatgctttaaacttctt

SEQ ID NO: 350447 - DNA, 20 bp, Artificial Sequence
  Description of Artificial Sequence: Synthetic oligonucleotide
  Target: LAMA2; (+) strand; PAM type: YTN; PAM sequence: TTA
cagatgctttaaacttcttt

SEQ ID NO: 350448 - DNA, 20 bp, Artificial Sequence
  Description of Artificial Sequence: Synthetic oligonucleotide
  Target: LAMA2; (+) strand; PAM type: YTN; PAM sequence: CTT
taaacttcttttggccttgg

SEQ ID NO: 350449 - DNA, 20 bp, Artificial Sequence
  Description of Artificial Sequence: Synthetic oligonucleotide
  Target: LAMA2; (+) strand; PAM type: YTN; PAM sequence: TTT
aaacttcttttggccttggc

SEQ ID NO: 350450 - DNA, 20 bp, Artificial Sequence
  Description of Artificial Sequence: Synthetic oligonucleotide
  Target: LAMA2; (+) strand; PAM type: YTN; PAM sequence: TTA
aacttcttttggccttggca

SEQ ID NO: 350451 - DNA, 20 bp, Artificial Sequence
  Description of Artificial Sequence: Synthetic oligonucleotide
  Target: LAMA2; (+) strand; PAM type: YTN; PAM sequence: CTT
cttttggccttggcatcagc

SEQ ID NO: 350452 - DNA, 20 bp, Artificial Sequence
  Description of Artificial Sequence: Synthetic oligonucleotide
  Target: LAMA2; (+) strand; PAM type: YTN; PAM sequence: TTC
ttttggccttggcatcagct

SEQ ID NO: 350453 - DNA, 20 bp, Artificial Sequence
  Description of Artificial Sequence: Synthetic oligonucleotide
  Target: LAMA2; (+) strand; PAM type: YTN; PAM sequence: CTT
ttggccttggcatcagcttt

SEQ ID NO: 350454 - DNA, 20 bp, Artificial Sequence
  Description of Artificial Sequence: Synthetic oligonucleotide
  Target: LAMA2; (+) strand; PAM type: YTN; PAM sequence: TTT
tggccttggcatcagctttc

SEQ ID NO: 350455 - DNA, 20 bp, Artificial Sequence
  Description of Artificial Sequence: Synthetic oligonucleotide
  Target: LAMA2; (+) strand; PAM type: YTN; PAM sequence: TTT
ggccttggcatcagctttca

SEQ ID NO: 350456 - DNA, 20 bp, Artificial Sequence
  Description of Artificial Sequence: Synthetic oligonucleotide
  Target: LAMA2; (+) strand; PAM type: YTN; PAM sequence: TTG
gccttggcatcagctttcat

SEQ ID NO: 350457 - DNA, 20 bp, Artificial Sequence
  Description of Artificial Sequence: Synthetic oligonucleotide
  Target: LAMA2; (+) strand; PAM type: YTN; PAM sequence: CTT
ggcatcagctttcatgttaa

SEQ ID NO: 350458 - DNA, 20 bp, Artificial Sequence
  Description of Artificial Sequence: Synthetic oligonucleotide
  Target: LAMA2; (+) strand; PAM type: YTN; PAM sequence: TTG
gcatcagctttcatgttaaa

SEQ ID NO: 350459 - DNA, 20 bp, Artificial Sequence
  Description of Artificial Sequence: Synthetic oligonucleotide
  Target: LAMA2; (+) strand; PAM type: YTN; PAM sequence: CTT
tcatgttaaaaaataaagct

SEQ ID NO: 350460 - DNA, 20 bp, Artificial Sequence
  Description of Artificial Sequence: Synthetic oligonucleotide
  Target: LAMA2; (+) strand; PAM type: YTN; PAM sequence: TTT
catgttaaaaaataaagctg

SEQ ID NO: 350461 - DNA, 20 bp, Artificial Sequence
  Description of Artificial Sequence: Synthetic oligonucleotide
  Target: LAMA2; (+) strand; PAM type: YTN; PAM sequence: TTC
atgttaaaaaataaagctgg

SEQ ID NO: 350462 - DNA, 20 bp, Artificial Sequence
  Description of Artificial Sequence: Synthetic oligonucleotide
  Target: LAMA2; (+) strand; PAM type: YTN; PAM sequence: TTA
aaaaataaagctggtgggga

SEQ ID NO: 350463 - DNA, 20 bp, Artificial Sequence
  Description of Artificial Sequence: Synthetic oligonucleotide
  Target: LAMA2; (+) strand; PAM type: YTN; PAM sequence: CTG
gtggggaagctatctcactt

SEQ ID NO: 350464 - DNA, 20 bp, Artificial Sequence
  Description of Artificial Sequence: Synthetic oligonucleotide
  Target: LAMA2; (+) strand; PAM type: YTN; PAM sequence: CTA
tctcacttgcaaagtaaatg

SEQ ID NO: 350465 - DNA, 20 bp, Artificial Sequence
  Description of Artificial Sequence: Synthetic oligonucleotide
  Target: LAMA2; (+) strand; PAM type: YTN; PAM sequence: CTC
acttgcaaagtaaatggctt

SEQ ID NO: 350466 - DNA, 20 bp, Artificial Sequence
  Description of Artificial Sequence: Synthetic oligonucleotide
  Target: LAMA2; (+) strand; PAM type: YTN; PAM sequence: CTT
gcaaagtaaatggcttgtat

SEQ ID NO: 350467 - DNA, 20 bp, Artificial Sequence
  Description of Artificial Sequence: Synthetic oligonucleotide
  Target: LAMA2; (+) strand; PAM type: YTN; PAM sequence: TTG
caaagtaaatggcttgtatg

SEQ ID NO: 350468 - DNA, 20 bp, Artificial Sequence
  Description of Artificial Sequence: Synthetic oligonucleotide
  Target: LAMA2; (+) strand; PAM type: YTN; PAM sequence: CTT
gtatgagattggcgaatctt

SEQ ID NO: 350469 - DNA, 20 bp, Artificial Sequence
  Description of Artificial Sequence: Synthetic oligonucleotide
  Target: LAMA2; (+) strand; PAM type: YTN; PAM sequence: TTG
tatgagattggcgaatcttg

SEQ ID NO: 350470 - DNA, 20 bp, Artificial Sequence
  Description of Artificial Sequence: Synthetic oligonucleotide
  Target: LAMA2; (+) strand; PAM type: YTN; PAM sequence: TTG
gcgaatcttggtcagatatt

SEQ ID NO: 350471 - DNA, 20 bp, Artificial Sequence
  Description of Artificial Sequence: Synthetic oligonucleotide
  Target: LAMA2; (+) strand; PAM type: YTN; PAM sequence: CTT
ggtcagatattgcattttta

SEQ ID NO: 350472 - DNA, 20 bp, Artificial Sequence
  Description of Artificial Sequence: Synthetic oligonucleotide
  Target: LAMA2; (+) strand; PAM type: YTN; PAM sequence: TTG
gtcagatattgcatttttaa

SEQ ID NO: 350473 - DNA, 20 bp, Artificial Sequence
  Description of Artificial Sequence: Synthetic oligonucleotide
  Target: LAMA2; (+) strand; PAM type: YTN; PAM sequence: TTG
catttttaaagcacaaaacc

SEQ ID NO: 350474 - DNA, 20 bp, Artificial Sequence
  Description of Artificial Sequence: Synthetic oligonucleotide
  Target: LAMA2; (+) strand; PAM type: YTN; PAM sequence: TTT
ttaaagcacaaaaccaccgg

SEQ ID NO: 350475 - DNA, 20 bp, Artificial Sequence
  Description of Artificial Sequence: Synthetic oligonucleotide
  Target: LAMA2; (+) strand; PAM type: YTN; PAM sequence: TTT
taaagcacaaaaccaccggc

SEQ ID NO: 350476 - DNA, 20 bp, Artificial Sequence
  Description of Artificial Sequence: Synthetic oligonucleotide
  Target: LAMA2; (+) strand; PAM type: YTN; PAM sequence: TTT
aaagcacaaaaccaccggcc

SEQ ID NO: 350477 - DNA, 20 bp, Artificial Sequence
  Description of Artificial Sequence: Synthetic oligonucleotide
  Target: LAMA2; (+) strand; PAM type: YTN; PAM sequence: TTA
aagcacaaaaccaccggcca

SEQ ID NO: 350478 - DNA, 20 bp, Artificial Sequence
  Description of Artificial Sequence: Synthetic oligonucleotide
  Target: LAMA2; (+) strand; PAM type: YTN; PAM sequence: CTT
cctgtgcatgcatataaatt

SEQ ID NO: 350479 - DNA, 20 bp, Artificial Sequence
  Description of Artificial Sequence: Synthetic oligonucleotide
  Target: LAMA2; (+) strand; PAM type: YTN; PAM sequence: TTC
ctgtgcatgcatataaatta

SEQ ID NO: 350480 - DNA, 20 bp, Artificial Sequence
  Description of Artificial Sequence: Synthetic oligonucleotide
  Target: LAMA2; (+) strand; PAM type: YTN; PAM sequence: CTG
tgcatgcatataaattattt

SEQ ID NO: 350481 - DNA, 20 bp, Artificial Sequence
  Description of Artificial Sequence: Synthetic oligonucleotide
  Target: LAMA2; (+) strand; PAM type: YTN; PAM sequence: TTA
ttttcttctaattcaaatgg

SEQ ID NO: 350482 - DNA, 20 bp, Artificial Sequence
  Description of Artificial Sequence: Synthetic oligonucleotide
  Target: LAMA2; (+) strand; PAM type: YTN; PAM sequence: TTT
tcttctaattcaaatggcaa

SEQ ID NO: 350483 - DNA, 20 bp, Artificial Sequence
  Description of Artificial Sequence: Synthetic oligonucleotide
  Target: LAMA2; (+) strand; PAM type: YTN; PAM sequence: TTT
cttctaattcaaatggcaac

SEQ ID NO: 350484 - DNA, 20 bp, Artificial Sequence
  Description of Artificial Sequence: Synthetic oligonucleotide
  Target: LAMA2; (+) strand; PAM type: YTN; PAM sequence: TTC
ttctaattcaaatggcaaca

SEQ ID NO: 350485 - DNA, 20 bp, Artificial Sequence
  Description of Artificial Sequence: Synthetic oligonucleotide
  Target: LAMA2; (+) strand; PAM type: YTN; PAM sequence: CTT
ctaattcaaatggcaacaga

SEQ ID NO: 350486 - DNA, 20 bp, Artificial Sequence
  Description of Artificial Sequence: Synthetic oligonucleotide
  Target: LAMA2; (+) strand; PAM type: YTN; PAM sequence: TTC
taattcaaatggcaacagag

SEQ ID NO: 350487 - DNA, 20 bp, Artificial Sequence
  Description of Artificial Sequence: Synthetic oligonucleotide
  Target: LAMA2; (+) strand; PAM type: YTN; PAM sequence: CTA
attcaaatggcaacagagga

SEQ ID NO: 350488 - DNA, 20 bp, Artificial Sequence
  Description of Artificial Sequence: Synthetic oligonucleotide
  Target: LAMA2; (+) strand; PAM type: YTN; PAM sequence: TTC
aaatggcaacagaggaatcc

SEQ ID NO: 350489 - DNA, 20 bp, Artificial Sequence
  Description of Artificial Sequence: Synthetic oligonucleotide
  Target: LAMA2; (+) strand; PAM type: YTN; PAM sequence: CTG
gcgtgcatgtgcatggagac

SEQ ID NO: 350490 - DNA, 20 bp, Artificial Sequence
  Description of Artificial Sequence: Synthetic oligonucleotide
  Target: LAMA2; (+) strand; PAM type: YTN; PAM sequence: CTA
aggagacaggacaaactatc

SEQ ID NO: 350491 - DNA, 20 bp, Artificial Sequence
  Description of Artificial Sequence: Synthetic oligonucleotide
  Target: LAMA2; (+) strand; PAM type: YTN; PAM sequence: CTA
tcataaactaagcagtatcc

SEQ ID NO: 350492 - DNA, 20 bp, Artificial Sequence
  Description of Artificial Sequence: Synthetic oligonucleotide
  Target: LAMA2; (+) strand; PAM type: YTN; PAM sequence: CTA
agcagtatcccaaacacatc

SEQ ID NO: 350493 - DNA, 20 bp, Artificial Sequence
  Description of Artificial Sequence: Synthetic oligonucleotide
  Target: LAMA2; (+) strand; PAM type: YTN; PAM sequence: CTA
taggctgttttacaaaggtg

SEQ ID NO: 350494 - DNA, 20 bp, Artificial Sequence
  Description of Artificial Sequence: Synthetic oligonucleotide
  Target: LAMA2; (+) strand; PAM type: YTN; PAM sequence: CTG
ttttacaaaggtggaataca

SEQ ID NO: 350495 - DNA, 20 bp, Artificial Sequence
  Description of Artificial Sequence: Synthetic oligonucleotide
  Target: LAMA2; (+) strand; PAM type: YTN; PAM sequence: TTT
tacaaaggtggaatacaaac

SEQ ID NO: 350496 - DNA, 20 bp, Artificial Sequence
  Description of Artificial Sequence: Synthetic oligonucleotide
  Target: LAMA2; (+) strand; PAM type: YTN; PAM sequence: TTT
acaaaggtggaatacaaacg

SEQ ID NO: 350497 - DNA, 20 bp, Artificial Sequence
  Description of Artificial Sequence: Synthetic oligonucleotide
  Target: LAMA2; (+) strand; PAM type: YTN; PAM sequence: TTA
caaaggtggaatacaaacga

SEQ ID NO: 350498 - DNA, 20 bp, Artificial Sequence
  Description of Artificial Sequence: Synthetic oligonucleotide
  Target: LAMA2; (+) strand; PAM type: YTN; PAM sequence: CTG
aatgtctcaggtaaaaggca

SEQ ID NO: 350499 - DNA, 20 bp, Artificial Sequence
  Description of Artificial Sequence: Synthetic oligonucleotide
  Target: LAMA2; (+) strand; PAM type: YTN; PAM sequence: CTC
aggtaaaaggcaaagtctat

SEQ ID NO: 350500 - DNA, 20 bp, Artificial Sequence
  Description of Artificial Sequence: Synthetic oligonucleotide
  Target: LAMA2; (+) strand; PAM type: YTN; PAM sequence: CTA
tttctccaactctgctgcac

SEQ ID NO: 350501 - DNA, 20 bp, Artificial Sequence
  Description of Artificial Sequence: Synthetic oligonucleotide
  Target: LAMA2; (+) strand; PAM type: YTN; PAM sequence: TTT
ctccaactctgctgcactca

SEQ ID NO: 350502 - DNA, 20 bp, Artificial Sequence
  Description of Artificial Sequence: Synthetic oligonucleotide
  Target: LAMA2; (+) strand; PAM type: YTN; PAM sequence: TTC
tccaactctgctgcactcat

SEQ ID NO: 350503 - DNA, 20 bp, Artificial Sequence
  Description of Artificial Sequence: Synthetic oligonucleotide
  Target: LAMA2; (+) strand; PAM type: YTN; PAM sequence: CTC
caactctgctgcactcattt

SEQ ID NO: 350504 - DNA, 20 bp, Artificial Sequence
  Description of Artificial Sequence: Synthetic oligonucleotide
  Target: LAMA2; (+) strand; PAM type: YTN; PAM sequence: CTC
tgctgcactcatttatcttc

SEQ ID NO: 350505 - DNA, 20 bp, Artificial Sequence
  Description of Artificial Sequence: Synthetic oligonucleotide
  Target: LAMA2; (+) strand; PAM type: YTN; PAM sequence: CTG
ctgcactcatttatcttctt

SEQ ID NO: 350506 - DNA, 20 bp, Artificial Sequence
  Description of Artificial Sequence: Synthetic oligonucleotide
  Target: LAMA2; (+) strand; PAM type: YTN; PAM sequence: CTG
cactcatttatcttcttaag

SEQ ID NO: 350507 - DNA, 20 bp, Artificial Sequence
  Description of Artificial Sequence: Synthetic oligonucleotide
  Target: LAMA2; (+) strand; PAM type: YTN; PAM sequence: CTC
atttatcttcttaaggcttt

SEQ ID NO: 350508 - DNA, 20 bp, Artificial Sequence
  Description of Artificial Sequence: Synthetic oligonucleotide
  Target: LAMA2; (+) strand; PAM type: YTN; PAM sequence: TTT
atcttcttaaggctttcaca

SEQ ID NO: 350509 - DNA, 20 bp, Artificial Sequence
  Description of Artificial Sequence: Synthetic oligonucleotide
  Target: LAMA2; (+) strand; PAM type: YTN; PAM sequence: TTA
tcttcttaaggctttcacag

SEQ ID NO: 350510 - DNA, 20 bp, Artificial Sequence
  Description of Artificial Sequence: Synthetic oligonucleotide
  Target: LAMA2; (+) strand; PAM type: YTN; PAM sequence: CTT
cttaaggctttcacagaaag

SEQ ID NO: 350511 - DNA, 20 bp, Artificial Sequence
  Description of Artificial Sequence: Synthetic oligonucleotide
  Target: LAMA2; (+) strand; PAM type: YTN; PAM sequence: TTC
ttaaggctttcacagaaagc

SEQ ID NO: 350512 - DNA, 20 bp, Artificial Sequence
  Description of Artificial Sequence: Synthetic oligonucleotide
  Target: LAMA2; (+) strand; PAM type: YTN; PAM sequence: CTT
aaggctttcacagaaagcac

SEQ ID NO: 350513 - DNA, 20 bp, Artificial Sequence
  Description of Artificial Sequence: Synthetic oligonucleotide
  Target: LAMA2; (+) strand; PAM type: YTN; PAM sequence: TTA
aggctttcacagaaagcacc

SEQ ID NO: 350514 - DNA, 20 bp, Artificial Sequence
  Description of Artificial Sequence: Synthetic oligonucleotide
  Target: LAMA2; (+) strand; PAM type: YTN; PAM sequence: CTT
tcacagaaagcaccgtttta

SEQ ID NO: 350515 - DNA, 20 bp, Artificial Sequence
  Description of Artificial Sequence: Synthetic oligonucleotide
  Target: LAMA2; (+) strand; PAM type: YTN; PAM sequence: TTT
cacagaaagcaccgttttat

SEQ ID NO: 350516 - DNA, 20 bp, Artificial Sequence
  Description of Artificial Sequence: Synthetic oligonucleotide
  Target: LAMA2; (+) strand; PAM type: YTN; PAM sequence: TTC
acagaaagcaccgttttatg

SEQ ID NO: 350517 - DNA, 20 bp, Artificial Sequence
  Description of Artificial Sequence: Synthetic oligonucleotide
  Target: LAMA2; (+) strand; PAM type: YTN; PAM sequence: TTT
tatgaacaggcaattcagta

SEQ ID NO: 350518 - DNA, 20 bp, Artificial Sequence
  Description of Artificial Sequence: Synthetic oligonucleotide
  Target: LAMA2; (+) strand; PAM type: YTN; PAM sequence: TTT
atgaacaggcaattcagtac

SEQ ID NO: 350519 - DNA, 20 bp, Artificial Sequence
  Description of Artificial Sequence: Synthetic oligonucleotide
  Target: LAMA2; (+) strand; PAM type: YTN; PAM sequence: TTA
tgaacaggcaattcagtacc

SEQ ID NO: 350520 - DNA, 20 bp, Artificial Sequence
  Description of Artificial Sequence: Synthetic oligonucleotide
  Target: LAMA2; (+) strand; PAM type: YTN; PAM sequence: TTC
agtacccagagcttgactgg

SEQ ID NO: 350521 - DNA, 20 bp, Artificial Sequence
  Description of Artificial Sequence: Synthetic oligonucleotide
  Target: LAMA2; (+) strand; PAM type: YTN; PAM sequence: CTT
gactggagacactaatcagg

SEQ ID NO: 350522 - DNA, 20 bp, Artificial Sequence
  Description of Artificial Sequence: Synthetic oligonucleotide
  Target: LAMA2; (+) strand; PAM type: YTN; PAM sequence: TTG
actggagacactaatcagga

SEQ ID NO: 350523 - DNA, 20 bp, Artificial Sequence
  Description of Artificial Sequence: Synthetic oligonucleotide
  Target: LAMA2; (+) strand; PAM type: YTN; PAM sequence: CTG
gagacactaatcaggattga

SEQ ID NO: 350524 - DNA, 20 bp, Artificial Sequence
  Description of Artificial Sequence: Synthetic oligonucleotide
  Target: LAMA2; (+) strand; PAM type: YTN; PAM sequence: CTA
atcaggattgaagtcttgat

SEQ ID NO: 350525 - DNA, 20 bp, Artificial Sequence
  Description of Artificial Sequence: Synthetic oligonucleotide
  Target: LAMA2; (+) strand; PAM type: YTN; PAM sequence: TTG
aagtcttgatgcagttcata

SEQ ID NO: 350526 - DNA, 20 bp, Artificial Sequence
  Description of Artificial Sequence: Synthetic oligonucleotide
  Target: LAMA2; (+) strand; PAM type: YTN; PAM sequence: CTT
gatgcagttcataaaaaccc

SEQ ID NO: 350527 - DNA, 20 bp, Artificial Sequence
  Description of Artificial Sequence: Synthetic oligonucleotide
  Target: LAMA2; (+) strand; PAM type: YTN; PAM sequence: TTG
atgcagttcataaaaaccca

SEQ ID NO: 350528 - DNA, 20 bp, Artificial Sequence
  Description of Artificial Sequence: Synthetic oligonucleotide
  Target: LAMA2; (+) strand; PAM type: YTN; PAM sequence: TTC
ataaaaacccatttaaaaaa

SEQ ID NO: 350529 - DNA, 20 bp, Artificial Sequence
  Description of Artificial Sequence: Synthetic oligonucleotide
  Target: LAMA2; (+) strand; PAM type: YTN; PAM sequence: TTT
aaaaaaaggcatcaaaaacc

SEQ ID NO: 350530 - DNA, 20 bp, Artificial Sequence
  Description of Artificial Sequence: Synthetic oligonucleotide
  Target: LAMA2; (+) strand; PAM type: YTN; PAM sequence: TTA
aaaaaaggcatcaaaaacca

SEQ ID NO: 350531 - DNA, 20 bp, Artificial Sequence
  Description of Artificial Sequence: Synthetic oligonucleotide
  Target: LAMA2; (+) strand; PAM type: YTN; PAM sequence: TTT
aaaataaagttgtccatata

SEQ ID NO: 350532 - DNA, 20 bp, Artificial Sequence
  Description of Artificial Sequence: Synthetic oligonucleotide
  Target: LAMA2; (+) strand; PAM type: YTN; PAM sequence: TTA
aaataaagttgtccatatat

SEQ ID NO: 350533 - DNA, 20 bp, Artificial Sequence
  Description of Artificial Sequence: Synthetic oligonucleotide
  Target: LAMA2; (+) strand; PAM type: YTN; PAM sequence: TTG
tccatatataaagaatgaag

SEQ ID NO: 350534 - DNA, 20 bp, Artificial Sequence
  Description of Artificial Sequence: Synthetic oligonucleotide
  Target: LAMA2; (+) strand; PAM type: YTN; PAM sequence: TTT
agaagttcccagcttgtatc

SEQ ID NO: 350535 - DNA, 20 bp, Artificial Sequence
  Description of Artificial Sequence: Synthetic oligonucleotide
  Target: LAMA2; (+) strand; PAM type: YTN; PAM sequence: TTA
gaagttcccagcttgtatcc

SEQ ID NO: 350536 - DNA, 20 bp, Artificial Sequence
  Description of Artificial Sequence: Synthetic oligonucleotide
  Target: LAMA2; (+) strand; PAM type: YTN; PAM sequence: TTC
ccagcttgtatcctaataag

SEQ ID NO: 350537 - DNA, 20 bp, Artificial Sequence
  Description of Artificial Sequence: Synthetic oligonucleotide
  Target: LAMA2; (+) strand; PAM type: YTN; PAM sequence: CTT
gtatcctaataagagtactg

SEQ ID NO: 350538 - DNA, 20 bp, Artificial Sequence
  Description of Artificial Sequence: Synthetic oligonucleotide
  Target: LAMA2; (+) strand; PAM type: YTN; PAM sequence: TTG
tatcctaataagagtactga

SEQ ID NO: 350539 - DNA, 20 bp, Artificial Sequence
  Description of Artificial Sequence: Synthetic oligonucleotide
  Target: LAMA2; (+) strand; PAM type: YTN; PAM sequence: CTA
ataagagtactgaaaggttt

SEQ ID NO: 350540 - DNA, 20 bp, Artificial Sequence
  Description of Artificial Sequence: Synthetic oligonucleotide
  Target: LAMA2; (+) strand; PAM type: YTN; PAM sequence: CTG
aaaggtttaatattagcagc

SEQ ID NO: 350541 - DNA, 20 bp, Artificial Sequence
  Description of Artificial Sequence: Synthetic oligonucleotide
  Target: LAMA2; (+) strand; PAM type: YTN; PAM sequence: TTT
aatattagcagcctgtgaac

SEQ ID NO: 350542 - DNA, 20 bp, Artificial Sequence
  Description of Artificial Sequence: Synthetic oligonucleotide
  Target: LAMA2; (+) strand; PAM type: YTN; PAM sequence: TTA
atattagcagcctgtgaaca

SEQ ID NO: 350543 - DNA, 20 bp, Artificial Sequence
  Description of Artificial Sequence: Synthetic oligonucleotide
  Target: LAMA2; (+) strand; PAM type: YTN; PAM sequence: TTA
gcagcctgtgaacacgtagt

SEQ ID NO: 350544 - DNA, 20 bp, Artificial Sequence
  Description of Artificial Sequence: Synthetic oligonucleotide
  Target: LAMA2; (+) strand; PAM type: YTN; PAM sequence: CTG
tgaacacgtagtgaagaaag

SEQ ID NO: 350545 - DNA, 20 bp, Artificial Sequence
  Description of Artificial Sequence: Synthetic oligonucleotide
  Target: LAMA2; (+) strand; PAM type: YTN; PAM sequence: CTG
agaaccaagttaacatcctt

SEQ ID NO: 350546 - DNA, 20 bp, Artificial Sequence
  Description of Artificial Sequence: Synthetic oligonucleotide
  Target: LAMA2; (+) strand; PAM type: YTN; PAM sequence: TTA
acatccttattccactctaa

SEQ ID NO: 350547 - DNA, 20 bp, Artificial Sequence
  Description of Artificial Sequence: Synthetic oligonucleotide
  Target: LAMA2; (+) strand; PAM type: YTN; PAM sequence: CTT
attccactctaattccaccc

SEQ ID NO: 350548 - DNA, 20 bp, Artificial Sequence
  Description of Artificial Sequence: Synthetic oligonucleotide
  Target: LAMA2; (+) strand; PAM type: YTN; PAM sequence: TTA
ttccactctaattccaccca

SEQ ID NO: 350549 - DNA, 20 bp, Artificial Sequence
  Description of Artificial Sequence: Synthetic oligonucleotide
  Target: LAMA2; (+) strand; PAM type: YTN; PAM sequence: TTC
cactctaattccacccatgc

SEQ ID NO: 350550 - DNA, 20 bp, Artificial Sequence
  Description of Artificial Sequence: Synthetic oligonucleotide
  Target: LAMA2; (+) strand; PAM type: YTN; PAM sequence: CTC
taattccacccatgccatgg

SEQ ID NO: 350551 - DNA, 20 bp, Artificial Sequence
  Description of Artificial Sequence: Synthetic oligonucleotide
  Target: LAMA2; (+) strand; PAM type: YTN; PAM sequence: CTA
attccacccatgccatgggt

SEQ ID NO: 350552 - DNA, 20 bp, Artificial Sequence
  Description of Artificial Sequence: Synthetic oligonucleotide
  Target: LAMA2; (+) strand; PAM type: YTN; PAM sequence: TTC
cacccatgccatgggtaaaa

SEQ ID NO: 350553 - DNA, 20 bp, Artificial Sequence
  Description of Artificial Sequence: Synthetic oligonucleotide
  Target: LAMA2; (+) strand; PAM type: YTN; PAM sequence: TTC
ttgcagtctagagtttctcc

SEQ ID NO: 350554 - DNA, 20 bp, Artificial Sequence
  Description of Artificial Sequence: Synthetic oligonucleotide
  Target: LAMA2; (+) strand; PAM type: YTN; PAM sequence: CTT
gcagtctagagtttctcctc

SEQ ID NO: 350555 - DNA, 20 bp, Artificial Sequence
  Description of Artificial Sequence: Synthetic oligonucleotide
  Target: LAMA2; (+) strand; PAM type: YTN; PAM sequence: TTG
cagtctagagtttctcctcc

SEQ ID NO: 350556 - DNA, 20 bp, Artificial Sequence
  Description of Artificial Sequence: Synthetic oligonucleotide
  Target: LAMA2; (+) strand; PAM type: YTN; PAM sequence: CTA
gagtttctcctccgatggtt

SEQ ID NO: 350557 - DNA, 20 bp, Artificial Sequence
  Description of Artificial Sequence: Synthetic oligonucleotide
  Target: LAMA2; (+) strand; PAM type: YTN; PAM sequence: TTT
ctcctccgatggtttaaccg

SEQ ID NO: 350558 - DNA, 20 bp, Artificial Sequence
  Description of Artificial Sequence: Synthetic oligonucleotide
  Target: LAMA2; (+) strand; PAM type: YTN; PAM sequence: TTC
tcctccgatggtttaaccgt

SEQ ID NO: 350559 - DNA, 20 bp, Artificial Sequence
  Description of Artificial Sequence: Synthetic oligonucleotide
  Target: LAMA2; (+) strand; PAM type: YTN; PAM sequence: CTC
ctccgatggtttaaccgtca

SEQ ID NO: 350560 - DNA, 20 bp, Artificial Sequence
  Description of Artificial Sequence: Synthetic oligonucleotide
  Target: LAMA2; (+) strand; PAM type: YTN; PAM sequence: CTC
cgatggtttaaccgtcagat

SEQ ID NO: 350561 - DNA, 20 bp, Artificial Sequence
  Description of Artificial Sequence: Synthetic oligonucleotide
  Target: LAMA2; (+) strand; PAM type: YTN; PAM sequence: TTT
aaccgtcagatttttacatc

SEQ ID NO: 350562 - DNA, 20 bp, Artificial Sequence
  Description of Artificial Sequence: Synthetic oligonucleotide
  Target: LAMA2; (+) strand; PAM type: YTN; PAM sequence: TTA
accgtcagatttttacatct

SEQ ID NO: 350563 - DNA, 20 bp, Artificial Sequence
  Description of Artificial Sequence: Synthetic oligonucleotide
  Target: LAMA2; (+) strand; PAM type: YTN; PAM sequence: TTT
ttacatcttgggattcaacc

SEQ ID NO: 350564 - DNA, 20 bp, Artificial Sequence
  Description of Artificial Sequence: Synthetic oligonucleotide
  Target: LAMA2; (+) strand; PAM type: YTN; PAM sequence: TTT
tacatcttgggattcaacca

SEQ ID NO: 350565 - DNA, 20 bp, Artificial Sequence
  Description of Artificial Sequence: Synthetic oligonucleotide
  Target: LAMA2; (+) strand; PAM type: YTN; PAM sequence: TTT
acatcttgggattcaaccat

SEQ ID NO: 350566 - DNA, 20 bp, Artificial Sequence
  Description of Artificial Sequence: Synthetic oligonucleotide
  Target: LAMA2; (+) strand; PAM type: YTN; PAM sequence: TTA
catcttgggattcaaccatc

SEQ ID NO: 350567 - DNA, 20 bp, Artificial Sequence
  Description of Artificial Sequence: Synthetic oligonucleotide
  Target: LAMA2; (+) strand; PAM type: YTN; PAM sequence: CTT
gggattcaaccatcttggca

SEQ ID NO: 350568 - DNA, 20 bp, Artificial Sequence
  Description of Artificial Sequence: Synthetic oligonucleotide
  Target: LAMA2; (+) strand; PAM type: YTN; PAM sequence: TTG
ggattcaaccatcttggcaa

SEQ ID NO: 350569 - DNA, 20 bp, Artificial Sequence
  Description of Artificial Sequence: Synthetic oligonucleotide
  Target: LAMA2; (+) strand; PAM type: YTN; PAM sequence: TTC
aaccatcttggcaagcgtct

SEQ ID NO: 350570 - DNA, 20 bp, Artificial Sequence
  Description of Artificial Sequence: Synthetic oligonucleotide
  Target: LAMA2; (+) strand; PAM type: YTN; PAM sequence: CTT
ggcaagcgtcttcttaattc

SEQ ID NO: 350571 - DNA, 20 bp, Artificial Sequence
  Description of Artificial Sequence: Synthetic oligonucleotide
  Target: LAMA2; (+) strand; PAM type: YTN; PAM sequence: TTG
gcaagcgtcttcttaattct

SEQ ID NO: 350572 - DNA, 20 bp, Artificial Sequence
  Description of Artificial Sequence: Synthetic oligonucleotide
  Target: LAMA2; (+) strand; PAM type: YTN; PAM sequence: CTT
cttaattctcaacgctgtga

SEQ ID NO: 350573 - DNA, 20 bp, Artificial Sequence
  Description of Artificial Sequence: Synthetic oligonucleotide
  Target: LAMA2; (+) strand; PAM type: YTN; PAM sequence: TTC
ttaattctcaacgctgtgag

SEQ ID NO: 350574 - DNA, 20 bp, Artificial Sequence
  Description of Artificial Sequence: Synthetic oligonucleotide
  Target: LAMA2; (+) strand; PAM type: YTN; PAM sequence: CTT
aattctcaacgctgtgagtc

SEQ ID NO: 350575 - DNA, 20 bp, Artificial Sequence
  Description of Artificial Sequence: Synthetic oligonucleotide
  Target: LAMA2; (+) strand; PAM type: YTN; PAM sequence: TTA
attctcaacgctgtgagtct

SEQ ID NO: 350576 - DNA, 20 bp, Artificial Sequence
  Description of Artificial Sequence: Synthetic oligonucleotide
  Target: LAMA2; (+) strand; PAM type: YTN; PAM sequence: TTC
tcaacgctgtgagtctgggg

SEQ ID NO: 350577 - DNA, 20 bp, Artificial Sequence
  Description of Artificial Sequence: Synthetic oligonucleotide
  Target: LAMA2; (+) strand; PAM type: YTN; PAM sequence: CTC
aacgctgtgagtctgggggc

SEQ ID NO: 350578 - DNA, 20 bp, Artificial Sequence
  Description of Artificial Sequence: Synthetic oligonucleotide
  Target: LAMA2; (+) strand; PAM type: YTN; PAM sequence: CTG
tgagtctgggggctggattg

SEQ ID NO: 350579 - DNA, 20 bp, Artificial Sequence
  Description of Artificial Sequence: Synthetic oligonucleotide
  Target: LAMA2; (+) strand; PAM type: YTN; PAM sequence: CTG
ggggctggattgtgggccca

SEQ ID NO: 350580 - DNA, 20 bp, Artificial Sequence
  Description of Artificial Sequence: Synthetic oligonucleotide
  Target: LAMA2; (+) strand; PAM type: YTN; PAM sequence: CTG
gattgtgggcccagcattct

SEQ ID NO: 350581 - DNA, 20 bp, Artificial Sequence
  Description of Artificial Sequence: Synthetic oligonucleotide
  Target: LAMA2; (+) strand; PAM type: YTN; PAM sequence: TTG
tgggcccagcattctgacat

SEQ ID NO: 350582 - DNA, 20 bp, Artificial Sequence
  Description of Artificial Sequence: Synthetic oligonucleotide
  Target: LAMA2; (+) strand; PAM type: YTN; PAM sequence: TTC
tgacattagcttcaaaactg

SEQ ID NO: 350583 - DNA, 20 bp, Artificial Sequence
  Description of Artificial Sequence: Synthetic oligonucleotide
  Target: LAMA2; (+) strand; PAM type: YTN; PAM sequence: CTG
acattagcttcaaaactgct

SEQ ID NO: 350584 - DNA, 20 bp, Artificial Sequence
  Description of Artificial Sequence: Synthetic oligonucleotide
  Target: LAMA2; (+) strand; PAM type: YTN; PAM sequence: TTA
gcttcaaaactgctcgtaga

SEQ ID NO: 350585 - DNA, 20 bp, Artificial Sequence
  Description of Artificial Sequence: Synthetic oligonucleotide
  Target: LAMA2; (+) strand; PAM type: YTN; PAM sequence: CTT
caaaactgctcgtagacatt

SEQ ID NO: 350586 - DNA, 20 bp, Artificial Sequence
  Description of Artificial Sequence: Synthetic oligonucleotide
  Target: LAMA2; (+) strand; PAM type: YTN; PAM sequence: TTC
aaaactgctcgtagacattc

SEQ ID NO: 350587 - DNA, 20 bp, Artificial Sequence
  Description of Artificial Sequence: Synthetic oligonucleotide
  Target: LAMA2; (+) strand; PAM type: YTN; PAM sequence: CTG
ctcgtagacattcatcactg

SEQ ID NO: 350588 - DNA, 20 bp, Artificial Sequence
  Description of Artificial Sequence: Synthetic oligonucleotide
  Target: LAMA2; (+) strand; PAM type: YTN; PAM sequence: CTC
gtagacattcatcactgttc

SEQ ID NO: 350589 - DNA, 20 bp, Artificial Sequence
  Description of Artificial Sequence: Synthetic oligonucleotide
  Target: LAMA2; (+) strand; PAM type: YTN; PAM sequence: TTC
atcactgttccaccgattag

SEQ ID NO: 350590 - DNA, 20 bp, Artificial Sequence
  Description of Artificial Sequence: Synthetic oligonucleotide
  Target: LAMA2; (+) strand; PAM type: YTN; PAM sequence: CTG
ttccaccgattagacacaat

SEQ ID NO: 350591 - DNA, 20 bp, Artificial Sequence
  Description of Artificial Sequence: Synthetic oligonucleotide
  Target: LAMA2; (+) strand; PAM type: YTN; PAM sequence: TTC
caccgattagacacaattgg

SEQ ID NO: 350592 - DNA, 20 bp, Artificial Sequence
  Description of Artificial Sequence: Synthetic oligonucleotide
  Target: LAMA2; (+) strand; PAM type: YTN; PAM sequence: TTA
gacacaattggccgcaaacg

SEQ ID NO: 350593 - DNA, 20 bp, Artificial Sequence
  Description of Artificial Sequence: Synthetic oligonucleotide
  Target: LAMA2; (+) strand; PAM type: YTN; PAM sequence: TTG
gccgcaaacgtttgacacac

SEQ ID NO: 350594 - DNA, 20 bp, Artificial Sequence
  Description of Artificial Sequence: Synthetic oligonucleotide
  Target: LAMA2; (+) strand; PAM type: YTN; PAM sequence: TTT
gacacacacaacctcacgca

SEQ ID NO: 350595 - DNA, 20 bp, Artificial Sequence
  Description of Artificial Sequence: Synthetic oligonucleotide
  Target: LAMA2; (+) strand; PAM type: YTN; PAM sequence: TTG
acacacacaacctcacgcat

SEQ ID NO: 350596 - DNA, 20 bp, Artificial Sequence
  Description of Artificial Sequence: Synthetic oligonucleotide
  Target: LAMA2; (+) strand; PAM type: YTN; PAM sequence: CTC
acgcatatcttcgtatgacg

SEQ ID NO: 350597 - DNA, 20 bp, Artificial Sequence
  Description of Artificial Sequence: Synthetic oligonucleotide
  Target: LAMA2; (+) strand; PAM type: YTN; PAM sequence: CTT
cgtatgacggatcactcggt

SEQ ID NO: 350598 - DNA, 20 bp, Artificial Sequence
  Description of Artificial Sequence: Synthetic oligonucleotide
  Target: LAMA2; (+) strand; PAM type: YTN; PAM sequence: TTC
gtatgacggatcactcggta

SEQ ID NO: 350599 - DNA, 20 bp, Artificial Sequence
  Description of Artificial Sequence: Synthetic oligonucleotide
  Target: LAMA2; (+) strand; PAM type: YTN; PAM sequence: CTC
ggtaccatgttataatatgg

SEQ ID NO: 350600 - DNA, 20 bp, Artificial Sequence
  Description of Artificial Sequence: Synthetic oligonucleotide
  Target: LAMA2; (+) strand; PAM type: YTN; PAM sequence: TTA
taatatggcaattggtagtc

SEQ ID NO: 350601 - DNA, 20 bp, Artificial Sequence
  Description of Artificial Sequence: Synthetic oligonucleotide
  Target: LAMA2; (+) strand; PAM type: YTN; PAM sequence: TTG
gtagtcttccacgatccctc

SEQ ID NO: 350602 - DNA, 20 bp, Artificial Sequence
  Description of Artificial Sequence: Synthetic oligonucleotide
  Target: LAMA2; (+) strand; PAM type: YTN; PAM sequence: CTT
ccacgatccctcctgtgata

SEQ ID NO: 350603 - DNA, 20 bp, Artificial Sequence
  Description of Artificial Sequence: Synthetic oligonucleotide
  Target: LAMA2; (+) strand; PAM type: YTN; PAM sequence: TTC
cacgatccctcctgtgatac

SEQ ID NO: 350604 - DNA, 20 bp, Artificial Sequence
  Description of Artificial Sequence: Synthetic oligonucleotide
  Target: LAMA2; (+) strand; PAM type: YTN; PAM sequence: CTC
ctgtgatacaacgacgagcc

SEQ ID NO: 350605 - DNA, 20 bp, Artificial Sequence
  Description of Artificial Sequence: Synthetic oligonucleotide
  Target: LAMA2; (+) strand; PAM type: YTN; PAM sequence: CTG
tgatacaacgacgagccatc

SEQ ID NO: 350606 - DNA, 20 bp, Artificial Sequence
  Description of Artificial Sequence: Synthetic oligonucleotide
  Target: LAMA2; (+) strand; PAM type: YTN; PAM sequence: CTC
ccaaatgattaggccgaagc

SEQ ID NO: 350607 - DNA, 20 bp, Artificial Sequence
  Description of Artificial Sequence: Synthetic oligonucleotide
  Target: LAMA2; (+) strand; PAM type: YTN; PAM sequence: TTA
ggccgaagctgtagatatca

SEQ ID NO: 350608 - DNA, 20 bp, Artificial Sequence
  Description of Artificial Sequence: Synthetic oligonucleotide
  Target: LAMA2; (+) strand; PAM type: YTN; PAM sequence: CTG
tagatatcagccatgatgta

SEQ ID NO: 350609 - DNA, 20 bp, Artificial Sequence
  Description of Artificial Sequence: Synthetic oligonucleotide
  Target: LAMA2; (+) strand; PAM type: YTN; PAM sequence: CTG
gaagtggtttttgttcaggc

SEQ ID NO: 350610 - DNA, 20 bp, Artificial Sequence
  Description of Artificial Sequence: Synthetic oligonucleotide
  Target: LAMA2; (+) strand; PAM type: YTN; PAM sequence: TTT
ttgttcaggctttcgtccag

SEQ ID NO: 350611 - DNA, 20 bp, Artificial Sequence
  Description of Artificial Sequence: Synthetic oligonucleotide
  Target: LAMA2; (+) strand; PAM type: YTN; PAM sequence: TTT
tgttcaggctttcgtccagc

SEQ ID NO: 350612 - DNA, 20 bp, Artificial Sequence
  Description of Artificial Sequence: Synthetic oligonucleotide
  Target: LAMA2; (+) strand; PAM type: YTN; PAM sequence: TTT
gttcaggctttcgtccagca

SEQ ID NO: 350613 - DNA, 20 bp, Artificial Sequence
  Description of Artificial Sequence: Synthetic oligonucleotide
  Target: LAMA2; (+) strand; PAM type: YTN; PAM sequence: TTG
ttcaggctttcgtccagcac

SEQ ID NO: 350614 - DNA, 20 bp, Artificial Sequence
  Description of Artificial Sequence: Synthetic oligonucleotide
  Target: LAMA2; (+) strand; PAM type: YTN; PAM sequence: TTC
aggctttcgtccagcacttc

SEQ ID NO: 350615 - DNA, 20 bp, Artificial Sequence
  Description of Artificial Sequence: Synthetic oligonucleotide
  Target: LAMA2; (+) strand; PAM type: YTN; PAM sequence: CTT
tcgtccagcacttctggagc

SEQ ID NO: 350616 - DNA, 20 bp, Artificial Sequence
  Description of Artificial Sequence: Synthetic oligonucleotide
  Target: LAMA2; (+) strand; PAM type: YTN; PAM sequence: TTT
cgtccagcacttctggagcc

SEQ ID NO: 350617 - DNA, 20 bp, Artificial Sequence
  Description of Artificial Sequence: Synthetic oligonucleotide
  Target: LAMA2; (+) strand; PAM type: YTN; PAM sequence: TTC
gtccagcacttctggagcca

SEQ ID NO: 350618 - DNA, 20 bp, Artificial Sequence
  Description of Artificial Sequence: Synthetic oligonucleotide
  Target: LAMA2; (+) strand; PAM type: YTN; PAM sequence: CTT
ctggagccaggtagcgtttg

SEQ ID NO: 350619 - DNA, 20 bp, Artificial Sequence
  Description of Artificial Sequence: Synthetic oligonucleotide
  Target: LAMA2; (+) strand; PAM type: YTN; PAM sequence: TTC
tggagccaggtagcgtttgg

SEQ ID NO: 350620 - DNA, 20 bp, Artificial Sequence
  Description of Artificial Sequence: Synthetic oligonucleotide
  Target: LAMA2; (+) strand; PAM type: YTN; PAM sequence: CTG
gagccaggtagcgtttggtg

SEQ ID NO: 350621 - DNA, 20 bp, Artificial Sequence
  Description of Artificial Sequence: Synthetic oligonucleotide
  Target: LAMA2; (+) strand; PAM type: YTN; PAM sequence: TTT
ggtgcccaccctggtattca

SEQ ID NO: 350622 - DNA, 20 bp, Artificial Sequence
  Description of Artificial Sequence: Synthetic oligonucleotide
  Target: LAMA2; (+) strand; PAM type: YTN; PAM sequence: TTG
gtgcccaccctggtattcaa

SEQ ID NO: 350623 - DNA, 20 bp, Artificial Sequence
  Description of Artificial Sequence: Synthetic oligonucleotide
  Target: LAMA2; (+) strand; PAM type: YTN; PAM sequence: CTG
gtattcaagggcacatcaac

SEQ ID NO: 350624 - DNA, 20 bp, Artificial Sequence
  Description of Artificial Sequence: Synthetic oligonucleotide
  Target: LAMA2; (+) strand; PAM type: YTN; PAM sequence: TTC
aagggcacatcaacttcatt

SEQ ID NO: 350625 - DNA, 20 bp, Artificial Sequence
  Description of Artificial Sequence: Synthetic oligonucleotide
  Target: LAMA2; (+) strand; PAM type: YTN; PAM sequence: CTT
catttgtgtcactgttgaat

SEQ ID NO: 350626 - DNA, 20 bp, Artificial Sequence
  Description of Artificial Sequence: Synthetic oligonucleotide
  Target: LAMA2; (+) strand; PAM type: YTN; PAM sequence: TTC
atttgtgtcactgttgaatt

SEQ ID NO: 350627 - DNA, 20 bp, Artificial Sequence
  Description of Artificial Sequence: Synthetic oligonucleotide
  Target: LAMA2; (+) strand; PAM type: YTN; PAM sequence: TTT
gtgtcactgttgaatttaac

SEQ ID NO: 350628 - DNA, 20 bp, Artificial Sequence
  Description of Artificial Sequence: Synthetic oligonucleotide
  Target: LAMA2; (+) strand; PAM type: YTN; PAM sequence: TTG
tgtcactgttgaatttaaca

SEQ ID NO: 350629 - DNA, 20 bp, Artificial Sequence
  Description of Artificial Sequence: Synthetic oligonucleotide
  Target: LAMA2; (+) strand; PAM type: YTN; PAM sequence: CTG
ttgaatttaacagcaaggcc

SEQ ID NO: 350630 - DNA, 20 bp, Artificial Sequence
  Description of Artificial Sequence: Synthetic oligonucleotide
  Target: LAMA2; (+) strand; PAM type: YTN; PAM sequence: TTG
aatttaacagcaaggcccag

SEQ ID NO: 350631 - DNA, 20 bp, Artificial Sequence
  Description of Artificial Sequence: Synthetic oligonucleotide
  Target: LAMA2; (+) strand; PAM type: YTN; PAM sequence: TTT
aacagcaaggcccaggtcag

SEQ ID NO: 350632 - DNA, 20 bp, Artificial Sequence
  Description of Artificial Sequence: Synthetic oligonucleotide
  Target: LAMA2; (+) strand; PAM type: YTN; PAM sequence: TTA
acagcaaggcccaggtcagc

SEQ ID NO: 350633 - DNA, 20 bp, Artificial Sequence
  Description of Artificial Sequence: Synthetic oligonucleotide
  Target: LAMA2; (+) strand; PAM type: YTN; PAM sequence: CTC
ccatttttcttgatgaggat

SEQ ID NO: 350634 - DNA, 20 bp, Artificial Sequence
  Description of Artificial Sequence: Synthetic oligonucleotide
  Target: LAMA2; (+) strand; PAM type: YTN; PAM sequence: TTT
ttcttgatgaggatgttttt

SEQ ID NO: 350635 - DNA, 20 bp, Artificial Sequence
  Description of Artificial Sequence: Synthetic oligonucleotide
  Target: LAMA2; (+) strand; PAM type: YTN; PAM sequence: TTT
tcttgatgaggatgtttttg

SEQ ID NO: 350636 - DNA, 20 bp, Artificial Sequence
  Description of Artificial Sequence: Synthetic oligonucleotide
  Target: LAMA2; (+) strand; PAM type: YTN; PAM sequence: TTT
cttgatgaggatgtttttgc

SEQ ID NO: 350637 - DNA, 20 bp, Artificial Sequence
  Description of Artificial Sequence: Synthetic oligonucleotide
  Target: LAMA2; (+) strand; PAM type: YTN; PAM sequence: TTC
ttgatgaggatgtttttgct

SEQ ID NO: 350638 - DNA, 20 bp, Artificial Sequence
  Description of Artificial Sequence: Synthetic oligonucleotide
  Target: LAMA2; (+) strand; PAM type: YTN; PAM sequence: CTT
gatgaggatgtttttgctct

SEQ ID NO: 350639 - DNA, 20 bp, Artificial Sequence
  Description of Artificial Sequence: Synthetic oligonucleotide
  Target: LAMA2; (+) strand; PAM type: YTN; PAM sequence: TTG
atgaggatgtttttgctctt

SEQ ID NO: 350640 - DNA, 20 bp, Artificial Sequence
  Description of Artificial Sequence: Synthetic oligonucleotide
  Target: LAMA2; (+) strand; PAM type: YTN; PAM sequence: TTT
ttgctctttaggtctcgatg

SEQ ID NO: 350641 - DNA, 20 bp, Artificial Sequence
  Description of Artificial Sequence: Synthetic oligonucleotide
  Target: LAMA2; (+) strand; PAM type: YTN; PAM sequence: TTT
tgctctttaggtctcgatga

SEQ ID NO: 350642 - DNA, 20 bp, Artificial Sequence
  Description of Artificial Sequence: Synthetic oligonucleotide
  Target: LAMA2; (+) strand; PAM type: YTN; PAM sequence: TTT
gctctttaggtctcgatgag

SEQ ID NO: 350643 - DNA, 20 bp, Artificial Sequence
  Description of Artificial Sequence: Synthetic oligonucleotide
  Target: LAMA2; (+) strand; PAM type: YTN; PAM sequence: TTG
ctctttaggtctcgatgagc

SEQ ID NO: 350644 - DNA, 20 bp, Artificial Sequence
  Description of Artificial Sequence: Synthetic oligonucleotide
  Target: LAMA2; (+) strand; PAM type: YTN; PAM sequence: CTC
tttaggtctcgatgagcaat

SEQ ID NO: 350645 - DNA, 20 bp, Artificial Sequence
  Description of Artificial Sequence: Synthetic oligonucleotide
  Target: LAMA2; (+) strand; PAM type: YTN; PAM sequence: CTT
taggtctcgatgagcaattg

SEQ ID NO: 350646 - DNA, 20 bp, Artificial Sequence
  Description of Artificial Sequence: Synthetic oligonucleotide
  Target: LAMA2; (+) strand; PAM type: YTN; PAM sequence: TTT
aggtctcgatgagcaattgc

SEQ ID NO: 350647 - DNA, 20 bp, Artificial Sequence
  Description of Artificial Sequence: Synthetic oligonucleotide
  Target: LAMA2; (+) strand; PAM type: YTN; PAM sequence: TTA
ggtctcgatgagcaattgcg

SEQ ID NO: 350648 - DNA, 20 bp, Artificial Sequence
  Description of Artificial Sequence: Synthetic oligonucleotide
  Target: LAMA2; (+) strand; PAM type: YTN; PAM sequence: CTC
gatgagcaattgcgggcttt

SEQ ID NO: 350649 - DNA, 20 bp, Artificial Sequence
  Description of Artificial Sequence: Synthetic oligonucleotide
  Target: LAMA2; (+) strand; PAM type: YTN; PAM sequence: TTG
cgggctttccttgggtgcca

SEQ ID NO: 350650 - DNA, 20 bp, Artificial Sequence
  Description of Artificial Sequence: Synthetic oligonucleotide
  Target: LAMA2; (+) strand; PAM type: YTN; PAM sequence: CTT
tccttgggtgccatacgttt

SEQ ID NO: 350651 - DNA, 20 bp, Artificial Sequence
  Description of Artificial Sequence: Synthetic oligonucleotide
  Target: LAMA2; (+) strand; PAM type: YTN; PAM sequence: TTT
ccttgggtgccatacgtttc

SEQ ID NO: 350652 - DNA, 20 bp, Artificial Sequence
  Description of Artificial Sequence: Synthetic oligonucleotide
  Target: LAMA2; (+) strand; PAM type: YTN; PAM sequence: TTC
cttgggtgccatacgtttct

SEQ ID NO: 350653 - DNA, 20 bp, Artificial Sequence
  Description of Artificial Sequence: Synthetic oligonucleotide
  Target: LAMA2; (+) strand; PAM type: YTN; PAM sequence: CTT
gggtgccatacgtttctgtg

SEQ ID NO: 350654 - DNA, 20 bp, Artificial Sequence
  Description of Artificial Sequence: Synthetic oligonucleotide
  Target: LAMA2; (+) strand; PAM type: YTN; PAM sequence: TTG
ggtgccatacgtttctgtgt

SEQ ID NO: 350655 - DNA, 20 bp, Artificial Sequence
  Description of Artificial Sequence: Synthetic oligonucleotide
  Target: LAMA2; (+) strand; PAM type: YTN; PAM sequence: TTT
ctgtgtgcaggtggcacaga

SEQ ID NO: 350656 - DNA, 20 bp, Artificial Sequence
  Description of Artificial Sequence: Synthetic oligonucleotide
  Target: LAMA2; (+) strand; PAM type: YTN; PAM sequence: TTC
tgtgtgcaggtggcacagac

SEQ ID NO: 350657 - DNA, 20 bp, Artificial Sequence
  Description of Artificial Sequence: Synthetic oligonucleotide
  Target: LAMA2; (+) strand; PAM type: YTN; PAM sequence: CTG
tgtgcaggtggcacagacca

SEQ ID NO: 350658 - DNA, 20 bp, Artificial Sequence
  Description of Artificial Sequence: Synthetic oligonucleotide
  Target: LAMA2; (+) strand; PAM type: YTN; PAM sequence: CTG
aataagccaatttaagcagg

SEQ ID NO: 350659 - DNA, 20 bp, Artificial Sequence
  Description of Artificial Sequence: Synthetic oligonucleotide
  Target: LAMA2; (+) strand; PAM type: YTN; PAM sequence: TTT
aagcagggctctggtgtcca

SEQ ID NO: 350660 - DNA, 20 bp, Artificial Sequence
  Description of Artificial Sequence: Synthetic oligonucleotide
  Target: LAMA2; (+) strand; PAM type: YTN; PAM sequence: TTA
agcagggctctggtgtccag

SEQ ID NO: 350661 - DNA, 20 bp, Artificial Sequence
  Description of Artificial Sequence: Synthetic oligonucleotide
  Target: LAMA2; (+) strand; PAM type: YTN; PAM sequence: CTC
tggtgtccagcgtagcacat

SEQ ID NO: 350662 - DNA, 20 bp, Artificial Sequence
  Description of Artificial Sequence: Synthetic oligonucleotide
  Target: LAMA2; (+) strand; PAM type: YTN; PAM sequence: CTG
gtgtccagcgtagcacattt

SEQ ID NO: 350663 - DNA, 20 bp, Artificial Sequence
  Description of Artificial Sequence: Synthetic oligonucleotide
  Target: LAMA2; (+) strand; PAM type: YTN; PAM sequence: TTT
caggaagtcatagagagatc

SEQ ID NO: 350664 - DNA, 20 bp, Artificial Sequence
  Description of Artificial Sequence: Synthetic oligonucleotide
  Target: LAMA2; (+) strand; PAM type: YTN; PAM sequence: TTC
aggaagtcatagagagatcc

SEQ ID NO: 350665 - DNA, 20 bp, Artificial Sequence
  Description of Artificial Sequence: Synthetic oligonucleotide
  Target: LAMA2; (+) strand; PAM type: YTN; PAM sequence: TTT
tcatggtaatcagtaatcaa

SEQ ID NO: 350666 - DNA, 20 bp, Artificial Sequence
  Description of Artificial Sequence: Synthetic oligonucleotide
  Target: LAMA2; (+) strand; PAM type: YTN; PAM sequence: TTT
catggtaatcagtaatcaaa

SEQ ID NO: 350667 - DNA, 20 bp, Artificial Sequence
  Description of Artificial Sequence: Synthetic oligonucleotide
  Target: LAMA2; (+) strand; PAM type: YTN; PAM sequence: TTC
atggtaatcagtaatcaaat

SEQ ID NO: 350668 - DNA, 20 bp, Artificial Sequence
  Description of Artificial Sequence: Synthetic oligonucleotide
  Target: LAMA2; (+) strand; PAM type: YTN; PAM sequence: CTG
agtccaggaacctgtacctt

SEQ ID NO: 350669 - DNA, 20 bp, Artificial Sequence
  Description of Artificial Sequence: Synthetic oligonucleotide
  Target: LAMA2; (+) strand; PAM type: YTN; PAM sequence: CTG
tacctttaatatctgccgct

SEQ ID NO: 350670 - DNA, 20 bp, Artificial Sequence
  Description of Artificial Sequence: Synthetic oligonucleotide
  Target: LAMA2; (+) strand; PAM type: YTN; PAM sequence: CTT
taatatctgccgctatgaaa

SEQ ID NO: 350671 - DNA, 20 bp, Artificial Sequence
  Description of Artificial Sequence: Synthetic oligonucleotide
  Target: LAMA2; (+) strand; PAM type: YTN; PAM sequence: TTT
aatatctgccgctatgaaac

SEQ ID NO: 350672 - DNA, 20 bp, Artificial Sequence
  Description of Artificial Sequence: Synthetic oligonucleotide
  Target: LAMA2; (+) strand; PAM type: YTN; PAM sequence: TTA
atatctgccgctatgaaacc

SEQ ID NO: 350673 - DNA, 20 bp, Artificial Sequence
  Description of Artificial Sequence: Synthetic oligonucleotide
  Target: LAMA2; (+) strand; PAM type: YTN; PAM sequence: CTG
ccgctatgaaaccaagtatg

SEQ ID NO: 350674 - DNA, 20 bp, Artificial Sequence
  Description of Artificial Sequence: Synthetic oligonucleotide
  Target: LAMA2; (+) strand; PAM type: YTN; PAM sequence: CTA
tgaaaccaagtatgttttca

SEQ ID NO: 350675 - DNA, 20 bp, Artificial Sequence
  Description of Artificial Sequence: Synthetic oligonucleotide
  Target: LAMA2; (+) strand; PAM type: YTN; PAM sequence: TTT
tcatggcgcattagcacagt

SEQ ID NO: 350676 - DNA, 20 bp, Artificial Sequence
  Description of Artificial Sequence: Synthetic oligonucleotide
  Target: LAMA2; (+) strand; PAM type: YTN; PAM sequence: TTT
catggcgcattagcacagtt

SEQ ID NO: 350677 - DNA, 20 bp, Artificial Sequence
  Description of Artificial Sequence: Synthetic oligonucleotide
  Target: LAMA2; (+) strand; PAM type: YTN; PAM sequence: TTC
atggcgcattagcacagttt

SEQ ID NO: 350678 - DNA, 20 bp, Artificial Sequence
  Description of Artificial Sequence: Synthetic oligonucleotide
  Target: LAMA2; (+) strand; PAM type: YTN; PAM sequence: TTA
gcacagtttggtagatttct

SEQ ID NO: 350679 - DNA, 20 bp, Artificial Sequence
  Description of Artificial Sequence: Synthetic oligonucleotide
  Target: LAMA2; (+) strand; PAM type: YTN; PAM sequence: TTT
ggtagatttctgtttctcga

SEQ ID NO: 350680 - DNA, 20 bp, Artificial Sequence
  Description of Artificial Sequence: Synthetic oligonucleotide
  Target: LAMA2; (+) strand; PAM type: YTN; PAM sequence: TTG
gtagatttctgtttctcgaa

SEQ ID NO: 350681 - DNA, 20 bp, Artificial Sequence
  Description of Artificial Sequence: Synthetic oligonucleotide
  Target: LAMA2; (+) strand; PAM type: YTN; PAM sequence: TTT
ctgtttctcgaaaccagctg

SEQ ID NO: 350682 - DNA, 20 bp, Artificial Sequence
  Description of Artificial Sequence: Synthetic oligonucleotide
  Target: LAMA2; (+) strand; PAM type: YTN; PAM sequence: TTC
tgtttctcgaaaccagctgg

SEQ ID NO: 350683 - DNA, 20 bp, Artificial Sequence
  Description of Artificial Sequence: Synthetic oligonucleotide
  Target: LAMA2; (+) strand; PAM type: YTN; PAM sequence: CTG
tttctcgaaaccagctggct

SEQ ID NO: 350684 - DNA, 20 bp, Artificial Sequence
  Description of Artificial Sequence: Synthetic oligonucleotide
  Target: LAMA2; (+) strand; PAM type: YTN; PAM sequence: TTT
ctcgaaaccagctggcttct

SEQ ID NO: 350685 - DNA, 20 bp, Artificial Sequence
  Description of Artificial Sequence: Synthetic oligonucleotide
  Target: LAMA2; (+) strand; PAM type: YTN; PAM sequence: TTC
tcgaaaccagctggcttctt

SEQ ID NO: 350686 - DNA, 20 bp, Artificial Sequence
  Description of Artificial Sequence: Synthetic oligonucleotide
  Target: LAMA2; (+) strand; PAM type: YTN; PAM sequence: CTC
gaaaccagctggcttcttca

SEQ ID NO: 350687 - DNA, 20 bp, Artificial Sequence
  Description of Artificial Sequence: Synthetic oligonucleotide
  Target: LAMA2; (+) strand; PAM type: YTN; PAM sequence: CTG
gcttcttcagtggtaaagaa

SEQ ID NO: 350688 - DNA, 20 bp, Artificial Sequence
  Description of Artificial Sequence: Synthetic oligonucleotide
  Target: LAMA2; (+) strand; PAM type: YTN; PAM sequence: CTT
cttcagtggtaaagaatact

SEQ ID NO: 350689 - DNA, 20 bp, Artificial Sequence
  Description of Artificial Sequence: Synthetic oligonucleotide
  Target: LAMA2; (+) strand; PAM type: YTN; PAM sequence: TTC
ttcagtggtaaagaatactt

SEQ ID NO: 350690 - DNA, 20 bp, Artificial Sequence
  Description of Artificial Sequence: Synthetic oligonucleotide
  Target: LAMA2; (+) strand; PAM type: YTN; PAM sequence: CTT
cagtggtaaagaatactttc

SEQ ID NO: 350691 - DNA, 20 bp, Artificial Sequence
  Description of Artificial Sequence: Synthetic oligonucleotide
  Target: LAMA2; (+) strand; PAM type: YTN; PAM sequence: TTC
agtggtaaagaatactttca

SEQ ID NO: 350692 - DNA, 20 bp, Artificial Sequence
  Description of Artificial Sequence: Synthetic oligonucleotide
  Target: LAMA2; (+) strand; PAM type: YTN; PAM sequence: CTT
tcaccgccactctttcgcca

SEQ ID NO: 350693 - DNA, 20 bp, Artificial Sequence
  Description of Artificial Sequence: Synthetic oligonucleotide
  Target: LAMA2; (+) strand; PAM type: YTN; PAM sequence: TTT
caccgccactctttcgccat

SEQ ID NO: 350694 - DNA, 20 bp, Artificial Sequence
  Description of Artificial Sequence: Synthetic oligonucleotide
  Target: LAMA2; (+) strand; PAM type: YTN; PAM sequence: TTC
accgccactctttcgccatg

SEQ ID NO: 350695 - DNA, 20 bp, Artificial Sequence
  Description of Artificial Sequence: Synthetic oligonucleotide
  Target: LAMA2; (+) strand; PAM type: YTN; PAM sequence: CTC
tttcgccatgccatttgccc

SEQ ID NO: 350696 - DNA, 20 bp, Artificial Sequence
  Description of Artificial Sequence: Synthetic oligonucleotide
  Target: LAMA2; (+) strand; PAM type: YTN; PAM sequence: CTT
tcgccatgccatttgcccat

SEQ ID NO: 350697 - DNA, 20 bp, Artificial Sequence
  Description of Artificial Sequence: Synthetic oligonucleotide
  Target: LAMA2; (+) strand; PAM type: YTN; PAM sequence: TTT
cgccatgccatttgcccatc

SEQ ID NO: 350698 - DNA, 20 bp, Artificial Sequence
  Description of Artificial Sequence: Synthetic oligonucleotide
  Target: LAMA2; (+) strand; PAM type: YTN; PAM sequence: TTC
gccatgccatttgcccatcc

SEQ ID NO: 350699 - DNA, 20 bp, Artificial Sequence
  Description of Artificial Sequence: Synthetic oligonucleotide
  Target: LAMA2; (+) strand; PAM type: YTN; PAM sequence: TTT
gcccatccgtacttctccat

SEQ ID NO: 350700 - DNA, 20 bp, Artificial Sequence
  Description of Artificial Sequence: Synthetic oligonucleotide
  Target: LAMA2; (+) strand; PAM type: YTN; PAM sequence: TTG
cccatccgtacttctccata

SEQ ID NO: 350701 - DNA, 20 bp, Artificial Sequence
  Description of Artificial Sequence: Synthetic oligonucleotide
  Target: LAMA2; (+) strand; PAM type: YTN; PAM sequence: CTT
ctccatatcggcctttacca

SEQ ID NO: 350702 - DNA, 20 bp, Artificial Sequence
  Description of Artificial Sequence: Synthetic oligonucleotide
  Target: LAMA2; (+) strand; PAM type: YTN; PAM sequence: TTC
tccatatcggcctttaccaa

SEQ ID NO: 350703 - DNA, 20 bp, Artificial Sequence
  Description of Artificial Sequence: Synthetic oligonucleotide
  Target: LAMA2; (+) strand; PAM type: YTN; PAM sequence: CTC
catatcggcctttaccaact

SEQ ID NO: 350704 - DNA, 20 bp, Artificial Sequence
  Description of Artificial Sequence: Synthetic oligonucleotide
  Target: LAMA2; (+) strand; PAM type: YTN; PAM sequence: CTT
taccaacttgccggaccatc

SEQ ID NO: 350705 - DNA, 20 bp, Artificial Sequence
  Description of Artificial Sequence: Synthetic oligonucleotide
  Target: LAMA2; (+) strand; PAM type: YTN; PAM sequence: TTT
accaacttgccggaccatct

SEQ ID NO: 350706 - DNA, 20 bp, Artificial Sequence
  Description of Artificial Sequence: Synthetic oligonucleotide
  Target: LAMA2; (+) strand; PAM type: YTN; PAM sequence: TTA
ccaacttgccggaccatctg

SEQ ID NO: 350707 - DNA, 20 bp, Artificial Sequence
  Description of Artificial Sequence: Synthetic oligonucleotide
  Target: LAMA2; (+) strand; PAM type: YTN; PAM sequence: CTT
gccggaccatctgaatctgt

SEQ ID NO: 350708 - DNA, 20 bp, Artificial Sequence
  Description of Artificial Sequence: Synthetic oligonucleotide
  Target: LAMA2; (+) strand; PAM type: YTN; PAM sequence: TTG
ccggaccatctgaatctgtt

SEQ ID NO: 350709 - DNA, 20 bp, Artificial Sequence
  Description of Artificial Sequence: Synthetic oligonucleotide
  Target: LAMA2; (+) strand; PAM type: YTN; PAM sequence: CTG
aatctgtttggcaatagttc

SEQ ID NO: 350710 - DNA, 20 bp, Artificial Sequence
  Description of Artificial Sequence: Synthetic oligonucleotide
  Target: LAMA2; (+) strand; PAM type: YTN; PAM sequence: CTG
tttggcaatagttcgctgaa

SEQ ID NO: 350711 - DNA, 20 bp, Artificial Sequence
  Description of Artificial Sequence: Synthetic oligonucleotide
  Target: LAMA2; (+) strand; PAM type: YTN; PAM sequence: TTT
ggcaatagttcgctgaacca

SEQ ID NO: 350712 - DNA, 20 bp, Artificial Sequence
  Description of Artificial Sequence: Synthetic oligonucleotide
  Target: LAMA2; (+) strand; PAM type: YTN; PAM sequence: TTG
gcaatagttcgctgaaccaa

SEQ ID NO: 350713 - DNA, 20 bp, Artificial Sequence
  Description of Artificial Sequence: Synthetic oligonucleotide
  Target: LAMA2; (+) strand; PAM type: YTN; PAM sequence: TTC
gctgaaccaataaaggtagt

SEQ ID NO: 350714 - DNA, 20 bp, Artificial Sequence
  Description of Artificial Sequence: Synthetic oligonucleotide
  Target: LAMA2; (+) strand; PAM type: YTN; PAM sequence: CTG
aaccaataaaggtagtccag

SEQ ID NO: 350715 - DNA, 20 bp, Artificial Sequence
  Description of Artificial Sequence: Synthetic oligonucleotide
  Target: LAMA2; (+) strand; PAM type: YTN; PAM sequence: CTA
ccagaactttgtgactggtc

SEQ ID NO: 350716 - DNA, 20 bp, Artificial Sequence
  Description of Artificial Sequence: Synthetic oligonucleotide
  Target: LAMA2; (+) strand; PAM type: YTN; PAM sequence: CTT
tgtgactggtcaataaggtc

SEQ ID NO: 350717 - DNA, 20 bp, Artificial Sequence
  Description of Artificial Sequence: Synthetic oligonucleotide
  Target: LAMA2; (+) strand; PAM type: YTN; PAM sequence: TTT
gtgactggtcaataaggtct

SEQ ID NO: 350718 - DNA, 20 bp, Artificial Sequence
  Description of Artificial Sequence: Synthetic oligonucleotide
  Target: LAMA2; (+) strand; PAM type: YTN; PAM sequence: TTG
tgactggtcaataaggtctt

SEQ ID NO: 350719 - DNA, 20 bp, Artificial Sequence
  Description of Artificial Sequence: Synthetic oligonucleotide
  Target: LAMA2; (+) strand; PAM type: YTN; PAM sequence: CTG
gtcaataaggtcttttagtg

SEQ ID NO: 350720 - DNA, 20 bp, Artificial Sequence
  Description of Artificial Sequence: Synthetic oligonucleotide
  Target: LAMA2; (+) strand; PAM type: YTN; PAM sequence: CTT
ttagtgattttccaactgga

SEQ ID NO: 350721 - DNA, 20 bp, Artificial Sequence
  Description of Artificial Sequence: Synthetic oligonucleotide
  Target: LAMA2; (+) strand; PAM type: YTN; PAM sequence: TTT
tagtgattttccaactggaa

SEQ ID NO: 350722 - DNA, 20 bp, Artificial Sequence
  Description of Artificial Sequence: Synthetic oligonucleotide
  Target: LAMA2; (+) strand; PAM type: YTN; PAM sequence: TTT
agtgattttccaactggaat

SEQ ID NO: 350723 - DNA, 20 bp, Artificial Sequence
  Description of Artificial Sequence: Synthetic oligonucleotide
  Target: LAMA2; (+) strand; PAM type: YTN; PAM sequence: TTA
gtgattttccaactggaata

SEQ ID NO: 350724 - DNA, 20 bp, Artificial Sequence
  Description of Artificial Sequence: Synthetic oligonucleotide
  Target: LAMA2; (+) strand; PAM type: YTN; PAM sequence: TTT
tccaactggaataaatgctt

SEQ ID NO: 350725 - DNA, 20 bp, Artificial Sequence
  Description of Artificial Sequence: Synthetic oligonucleotide
  Target: LAMA2; (+) strand; PAM type: YTN; PAM sequence: TTT
ccaactggaataaatgcttc

SEQ ID NO: 350726 - DNA, 20 bp, Artificial Sequence
  Description of Artificial Sequence: Synthetic oligonucleotide
  Target: LAMA2; (+) strand; PAM type: YTN; PAM sequence: TTC
caactggaataaatgcttca

SEQ ID NO: 350727 - DNA, 20 bp, Artificial Sequence
  Description of Artificial Sequence: Synthetic oligonucleotide
  Target: LAMA2; (+) strand; PAM type: YTN; PAM sequence: CTG
gaataaatgcttcatcctgt

SEQ ID NO: 350728 - DNA, 20 bp, Artificial Sequence
  Description of Artificial Sequence: Synthetic oligonucleotide
  Target: LAMA2; (+) strand; PAM type: YTN; PAM sequence: CTT
catcctgttccaaatcacga

SEQ ID NO: 350729 - DNA, 20 bp, Artificial Sequence
  Description of Artificial Sequence: Synthetic oligonucleotide
  Target: LAMA2; (+) strand; PAM type: YTN; PAM sequence: TTC
atcctgttccaaatcacgat

SEQ ID NO: 350730 - DNA, 20 bp, Artificial Sequence
  Description of Artificial Sequence: Synthetic oligonucleotide
  Target: LAMA2; (+) strand; PAM type: YTN; PAM sequence: CTG
ttccaaatcacgattgtaac

SEQ ID NO: 350731 - DNA, 20 bp, Artificial Sequence
  Description of Artificial Sequence: Synthetic oligonucleotide
  Target: LAMA2; (+) strand; PAM type: YTN; PAM sequence: TTC
caaatcacgattgtaacgac

SEQ ID NO: 350732 - DNA, 20 bp, Artificial Sequence
  Description of Artificial Sequence: Synthetic oligonucleotide
  Target: LAMA2; (+) strand; PAM type: YTN; PAM sequence: TTG
taacgacgtctgcttgagat

SEQ ID NO: 350733 - DNA, 20 bp, Artificial Sequence
  Description of Artificial Sequence: Synthetic oligonucleotide
  Target: LAMA2; (+) strand; PAM type: YTN; PAM sequence: CTG
cttgagatgctcttgcaata

SEQ ID NO: 350734 - DNA, 20 bp, Artificial Sequence
  Description of Artificial Sequence: Synthetic oligonucleotide
  Target: LAMA2; (+) strand; PAM type: YTN; PAM sequence: CTT
gagatgctcttgcaataatg

SEQ ID NO: 350735 - DNA, 20 bp, Artificial Sequence
  Description of Artificial Sequence: Synthetic oligonucleotide
  Target: LAMA2; (+) strand; PAM type: YTN; PAM sequence: TTG
agatgctcttgcaataatgt

SEQ ID NO: 350736 - DNA, 20 bp, Artificial Sequence
  Description of Artificial Sequence: Synthetic oligonucleotide
  Target: LAMA2; (+) strand; PAM type: YTN; PAM sequence: CTC
ttgcaataatgtttgtaaca

SEQ ID NO: 350737 - DNA, 20 bp, Artificial Sequence
  Description of Artificial Sequence: Synthetic oligonucleotide
  Target: LAMA2; (+) strand; PAM type: YTN; PAM sequence: CTT
gcaataatgtttgtaacaaa

SEQ ID NO: 350738 - DNA, 20 bp, Artificial Sequence
  Description of Artificial Sequence: Synthetic oligonucleotide
  Target: LAMA2; (+) strand; PAM type: YTN; PAM sequence: TTG
caataatgtttgtaacaaaa

SEQ ID NO: 350739 - DNA, 20 bp, Artificial Sequence
  Description of Artificial Sequence: Synthetic oligonucleotide
  Target: LAMA2; (+) strand; PAM type: YTN; PAM sequence: TTT
gtaacaaaagcagctggaga

SEQ ID NO: 350740 - DNA, 20 bp, Artificial Sequence
  Description of Artificial Sequence: Synthetic oligonucleotide
  Target: LAMA2; (+) strand; PAM type: YTN; PAM sequence: TTG
taacaaaagcagctggagaa

SEQ ID NO: 350741 - DNA, 20 bp, Artificial Sequence
  Description of Artificial Sequence: Synthetic oligonucleotide
  Target: LAMA2; (+) strand; PAM type: YTN; PAM sequence: CTG
gagaagatgatcatagcaat

SEQ ID NO: 350742 - DNA, 20 bp, Artificial Sequence
  Description of Artificial Sequence: Synthetic oligonucleotide
  Target: LAMA2; (+) strand; PAM type: YTN; PAM sequence: TTA
tgcagacagccatagaaatg

SEQ ID NO: 350743 - DNA, 20 bp, Artificial Sequence
  Description of Artificial Sequence: Synthetic oligonucleotide
  Target: LAMA2; (+) strand; PAM type: YTN; PAM sequence: CTG
ccatcaaaaaacggacctat

SEQ ID NO: 350744 - DNA, 20 bp, Artificial Sequence
  Description of Artificial Sequence: Synthetic oligonucleotide
  Target: LAMA2; (+) strand; PAM type: YTN; PAM sequence: CTA
tgacaacagggggcatgtgg

SEQ ID NO: 350745 - DNA, 20 bp, Artificial Sequence
  Description of Artificial Sequence: Synthetic oligonucleotide
  Target: LAMA2; (+) strand; PAM type: YTN; PAM sequence: TTG
caaatactggttacataaat

SEQ ID NO: 350746 - DNA, 20 bp, Artificial Sequence
  Description of Artificial Sequence: Synthetic oligonucleotide
  Target: LAMA2; (+) strand; PAM type: YTN; PAM sequence: CTG
gttacataaattggtccgac

SEQ ID NO: 350747 - DNA, 20 bp, Artificial Sequence
  Description of Artificial Sequence: Synthetic oligonucleotide
  Target: LAMA2; (+) strand; PAM type: YTN; PAM sequence: TTA
cataaattggtccgacaaca

SEQ ID NO: 350748 - DNA, 20 bp, Artificial Sequence
  Description of Artificial Sequence: Synthetic oligonucleotide
  Target: LAMA2; (+) strand; PAM type: YTN; PAM sequence: TTG
gtccgacaacattctattgt

SEQ ID NO: 350749 - DNA, 20 bp, Artificial Sequence
  Description of Artificial Sequence: Synthetic oligonucleotide
  Target: LAMA2; (+) strand; PAM type: YTN; PAM sequence: TTC
tattgtccggcgtagctggg

SEQ ID NO: 350750 - DNA, 20 bp, Artificial Sequence
  Description of Artificial Sequence: Synthetic oligonucleotide
  Target: LAMA2; (+) strand; PAM type: YTN; PAM sequence: CTA
ttgtccggcgtagctgggct

SEQ ID NO: 350751 - DNA, 20 bp, Artificial Sequence
  Description of Artificial Sequence: Synthetic oligonucleotide
  Target: LAMA2; (+) strand; PAM type: YTN; PAM sequence: TTG
tccggcgtagctgggctttt

SEQ ID NO: 350752 - DNA, 20 bp, Artificial Sequence
  Description of Artificial Sequence: Synthetic oligonucleotide
  Target: LAMA2; (+) strand; PAM type: YTN; PAM sequence: CTG
ggcttttggagaatctttgc

SEQ ID NO: 350753 - DNA, 20 bp, Artificial Sequence
  Description of Artificial Sequence: Synthetic oligonucleotide
  Target: LAMA2; (+) strand; PAM type: YTN; PAM sequence: CTT
ttggagaatctttgcactga

SEQ ID NO: 350754 - DNA, 20 bp, Artificial Sequence
  Description of Artificial Sequence: Synthetic oligonucleotide
  Target: LAMA2; (+) strand; PAM type: YTN; PAM sequence: TTT
tggagaatctttgcactgaa

SEQ ID NO: 350755 - DNA, 20 bp, Artificial Sequence
  Description of Artificial Sequence: Synthetic oligonucleotide
  Target: LAMA2; (+) strand; PAM type: YTN; PAM sequence: TTT
ggagaatctttgcactgaaa

SEQ ID NO: 350756 - DNA, 20 bp, Artificial Sequence
  Description of Artificial Sequence: Synthetic oligonucleotide
  Target: LAMA2; (+) strand; PAM type: YTN; PAM sequence: TTG
gagaatctttgcactgaaaa

SEQ ID NO: 350757 - DNA, 20 bp, Artificial Sequence
  Description of Artificial Sequence: Synthetic oligonucleotide
  Target: LAMA2; (+) strand; PAM type: YTN; PAM sequence: CTT
tgcactgaaaatcagatcct

SEQ ID NO: 350758 - DNA, 20 bp, Artificial Sequence
  Description of Artificial Sequence: Synthetic oligonucleotide
  Target: LAMA2; (+) strand; PAM type: YTN; PAM sequence: TTT
gcactgaaaatcagatcctt

SEQ ID NO: 350759 - DNA, 20 bp, Artificial Sequence
  Description of Artificial Sequence: Synthetic oligonucleotide
  Target: LAMA2; (+) strand; PAM type: YTN; PAM sequence: TTG
cactgaaaatcagatccttc

SEQ ID NO: 350760 - DNA, 20 bp, Artificial Sequence
  Description of Artificial Sequence: Synthetic oligonucleotide
  Target: LAMA2; (+) strand; PAM type: YTN; PAM sequence: CTG
aaaatcagatccttcatatt

SEQ ID NO: 350761 - DNA, 20 bp, Artificial Sequence
  Description of Artificial Sequence: Synthetic oligonucleotide
  Target: LAMA2; (+) strand; PAM type: YTN; PAM sequence: CTT
catatttcatacaccctgaa

SEQ ID NO: 350762 - DNA, 20 bp, Artificial Sequence
  Description of Artificial Sequence: Synthetic oligonucleotide
  Target: LAMA2; (+) strand; PAM type: YTN; PAM sequence: TTC
atatttcatacaccctgaag

SEQ ID NO: 350763 - DNA, 20 bp, Artificial Sequence
  Description of Artificial Sequence: Synthetic oligonucleotide
  Target: LAMA2; (+) strand; PAM type: YTN; PAM sequence: TTT
catacaccctgaagctaatg

SEQ ID NO: 350764 - DNA, 20 bp, Artificial Sequence
  Description of Artificial Sequence: Synthetic oligonucleotide
  Target: LAMA2; (+) strand; PAM type: YTN; PAM sequence: TTC
atacaccctgaagctaatgt

SEQ ID NO: 350765 - DNA, 20 bp, Artificial Sequence
  Description of Artificial Sequence: Synthetic oligonucleotide
  Target: LAMA2; (+) strand; PAM type: YTN; PAM sequence: CTG
aagctaatgtggtttctccc

SEQ ID NO: 350766 - DNA, 20 bp, Artificial Sequence
  Description of Artificial Sequence: Synthetic oligonucleotide
  Target: LAMA2; (+) strand; PAM type: YTN; PAM sequence: CTA
atgtggtttctccctggtca

SEQ ID NO: 350767 - DNA, 20 bp, Artificial Sequence
  Description of Artificial Sequence: Synthetic oligonucleotide
  Target: LAMA2; (+) strand; PAM type: YTN; PAM sequence: TTT
ctccctggtcatcttcttct

SEQ ID NO: 350768 - DNA, 20 bp, Artificial Sequence
  Description of Artificial Sequence: Synthetic oligonucleotide
  Target: LAMA2; (+) strand; PAM type: YTN; PAM sequence: TTC
tccctggtcatcttcttcta

SEQ ID NO: 350769 - DNA, 20 bp, Artificial Sequence
  Description of Artificial Sequence: Synthetic oligonucleotide
  Target: LAMA2; (+) strand; PAM type: YTN; PAM sequence: CTC
cctggtcatcttcttctatg

SEQ ID NO: 350770 - DNA, 20 bp, Artificial Sequence
  Description of Artificial Sequence: Synthetic oligonucleotide
  Target: LAMA2; (+) strand; PAM type: YTN; PAM sequence: CTG
gtcatcttcttctatgatgg

SEQ ID NO: 350771 - DNA, 20 bp, Artificial Sequence
  Description of Artificial Sequence: Synthetic oligonucleotide
  Target: LAMA2; (+) strand; PAM type: YTN; PAM sequence: CTT
cttctatgatggcaaagcaa

SEQ ID NO: 350772 - DNA, 20 bp, Artificial Sequence
  Description of Artificial Sequence: Synthetic oligonucleotide
  Target: LAMA2; (+) strand; PAM type: YTN; PAM sequence: TTC
ttctatgatggcaaagcaac

SEQ ID NO: 350773 - DNA, 20 bp, Artificial Sequence
  Description of Artificial Sequence: Synthetic oligonucleotide
  Target: LAMA2; (+) strand; PAM type: YTN; PAM sequence: CTT
ctatgatggcaaagcaacgt

SEQ ID NO: 350774 - DNA, 20 bp, Artificial Sequence
  Description of Artificial Sequence: Synthetic oligonucleotide
  Target: LAMA2; (+) strand; PAM type: YTN; PAM sequence: TTC
tatgatggcaaagcaacgtc

SEQ ID NO: 350775 - DNA, 20 bp, Artificial Sequence
  Description of Artificial Sequence: Synthetic oligonucleotide
  Target: LAMA2; (+) strand; PAM type: YTN; PAM sequence: CTA
tgatggcaaagcaacgtcca

SEQ ID NO: 350776 - DNA, 20 bp, Artificial Sequence
  Description of Artificial Sequence: Synthetic oligonucleotide
  Target: LAMA2; (+) strand; PAM type: YTN; PAM sequence: TTA
gttatgcatgtgttattaat

SEQ ID NO: 350777 - DNA, 20 bp, Artificial Sequence
  Description of Artificial Sequence: Synthetic oligonucleotide
  Target: LAMA2; (+) strand; PAM type: YTN; PAM sequence: TTA
tgcatgtgttattaatagca

SEQ ID NO: 350778 - DNA, 20 bp, Artificial Sequence
  Description of Artificial Sequence: Synthetic oligonucleotide
  Target: LAMA2; (+) strand; PAM type: YTN; PAM sequence: TTA
ttaatagcatcatctgggca

SEQ ID NO: 350779 - DNA, 20 bp, Artificial Sequence
  Description of Artificial Sequence: Synthetic oligonucleotide
  Target: LAMA2; (+) strand; PAM type: YTN; PAM sequence: TTA
atagcatcatctgggcagtg

SEQ ID NO: 350780 - DNA, 20 bp, Artificial Sequence
  Description of Artificial Sequence: Synthetic oligonucleotide
  Target: LAMA2; (+) strand; PAM type: YTN; PAM sequence: CTG
ggcagtgccctcagcaatag

SEQ ID NO: 350781 - DNA, 20 bp, Artificial Sequence
  Description of Artificial Sequence: Synthetic oligonucleotide
  Target: LAMA2; (+) strand; PAM type: YTN; PAM sequence: CTC
agcaatagcacttgaaaaaa

SEQ ID NO: 350782 - DNA, 20 bp, Artificial Sequence
  Description of Artificial Sequence: Synthetic oligonucleotide
  Target: LAMA2; (+) strand; PAM type: YTN; PAM sequence: CTT
gaaaaaaggcaaggtatcct

SEQ ID NO: 350783 - DNA, 20 bp, Artificial Sequence
  Description of Artificial Sequence: Synthetic oligonucleotide
  Target: LAMA2; (+) strand; PAM type: YTN; PAM sequence: TTG
aaaaaaggcaaggtatcctc

SEQ ID NO: 350784 - DNA, 20 bp, Artificial Sequence
  Description of Artificial Sequence: Synthetic oligonucleotide
  Target: LAMA2; (+) strand; PAM type: YTN; PAM sequence: CTC
tggtgctaaggttactccat

SEQ ID NO: 350785 - DNA, 20 bp, Artificial Sequence
  Description of Artificial Sequence: Synthetic oligonucleotide
  Target: LAMA2; (+) strand; PAM type: YTN; PAM sequence: CTG
gtgctaaggttactccattt

SEQ ID NO: 350786 - DNA, 20 bp, Artificial Sequence
  Description of Artificial Sequence: Synthetic oligonucleotide
  Target: LAMA2; (+) strand; PAM type: YTN; PAM sequence: CTA
aggttactccattttctgac

SEQ ID NO: 350787 - DNA, 20 bp, Artificial Sequence
  Description of Artificial Sequence: Synthetic oligonucleotide
  Target: LAMA2; (+) strand; PAM type: YTN; PAM sequence: TTA
ctccattttctgactttttc

SEQ ID NO: 350788 - DNA, 20 bp, Artificial Sequence
  Description of Artificial Sequence: Synthetic oligonucleotide
  Target: LAMA2; (+) strand; PAM type: YTN; PAM sequence: CTC
cattttctgactttttctgg

SEQ ID NO: 350789 - DNA, 20 bp, Artificial Sequence
  Description of Artificial Sequence: Synthetic oligonucleotide
  Target: LAMA2; (+) strand; PAM type: YTN; PAM sequence: TTT
tctgactttttctggtcgga

SEQ ID NO: 350790 - DNA, 20 bp, Artificial Sequence
  Description of Artificial Sequence: Synthetic oligonucleotide
  Target: LAMA2; (+) strand; PAM type: YTN; PAM sequence: TTT
ctgactttttctggtcggag

SEQ ID NO: 350791 - DNA, 20 bp, Artificial Sequence
  Description of Artificial Sequence: Synthetic oligonucleotide
  Target: LAMA2; (+) strand; PAM type: YTN; PAM sequence: TTC
tgactttttctggtcggagt

SEQ ID NO: 350792 - DNA, 20 bp, Artificial Sequence
  Description of Artificial Sequence: Synthetic oligonucleotide
  Target: LAMA2; (+) strand; PAM type: YTN; PAM sequence: CTG
actttttctggtcggagtct

SEQ ID NO: 350793 - DNA, 20 bp, Artificial Sequence
  Description of Artificial Sequence: Synthetic oligonucleotide
  Target: LAMA2; (+) strand; PAM type: YTN; PAM sequence: CTT
tttctggtcggagtctgatt

SEQ ID NO: 350794 - DNA, 20 bp, Artificial Sequence
  Description of Artificial Sequence: Synthetic oligonucleotide
  Target: LAMA2; (+) strand; PAM type: YTN; PAM sequence: TTT
ttctggtcggagtctgattt

SEQ ID NO: 350795 - DNA, 20 bp, Artificial Sequence
  Description of Artificial Sequence: Synthetic oligonucleotide
  Target: LAMA2; (+) strand; PAM type: YTN; PAM sequence: TTT
tctggtcggagtctgatttc

SEQ ID NO: 350796 - DNA, 20 bp, Artificial Sequence
  Description of Artificial Sequence: Synthetic oligonucleotide
  Target: LAMA2; (+) strand; PAM type: YTN; PAM sequence: TTT
ctggtcggagtctgatttca

SEQ ID NO: 350797 - DNA, 20 bp, Artificial Sequence
  Description of Artificial Sequence: Synthetic oligonucleotide
  Target: LAMA2; (+) strand; PAM type: YTN; PAM sequence: TTC
tggtcggagtctgatttcat

SEQ ID NO: 350798 - DNA, 20 bp, Artificial Sequence
  Description of Artificial Sequence: Synthetic oligonucleotide
  Target: LAMA2; (+) strand; PAM type: YTN; PAM sequence: CTG
gtcggagtctgatttcatcc

SEQ ID NO: 350799 - DNA, 20 bp, Artificial Sequence
  Description of Artificial Sequence: Synthetic oligonucleotide
  Target: LAMA2; (+) strand; PAM type: YTN; PAM sequence: CTG
atttcatcccagtgccgtgg

SEQ ID NO: 350800 - DNA, 20 bp, Artificial Sequence
  Description of Artificial Sequence: Synthetic oligonucleotide
  Target: LAMA2; (+) strand; PAM type: YTN; PAM sequence: TTT
catcccagtgccgtggagca

SEQ ID NO: 350801 - DNA, 20 bp, Artificial Sequence
  Description of Artificial Sequence: Synthetic oligonucleotide
  Target: LAMA2; (+) strand; PAM type: YTN; PAM sequence: TTC
atcccagtgccgtggagcat

SEQ ID NO: 350802 - DNA, 20 bp, Artificial Sequence
  Description of Artificial Sequence: Synthetic oligonucleotide
  Target: LAMA2; (+) strand; PAM type: YTN; PAM sequence: CTA
tccagattctgtccttgaac

SEQ ID NO: 350803 - DNA, 20 bp, Artificial Sequence
  Description of Artificial Sequence: Synthetic oligonucleotide
  Target: LAMA2; (+) strand; PAM type: YTN; PAM sequence: TTC
tgtccttgaacacgagaaat

SEQ ID NO: 350804 - DNA, 20 bp, Artificial Sequence
  Description of Artificial Sequence: Synthetic oligonucleotide
  Target: LAMA2; (+) strand; PAM type: YTN; PAM sequence: CTG
tccttgaacacgagaaatga

SEQ ID NO: 350805 - DNA, 20 bp, Artificial Sequence
  Description of Artificial Sequence: Synthetic oligonucleotide
  Target: LAMA2; (+) strand; PAM type: YTN; PAM sequence: CTT
gaacacgagaaatgatgaac

SEQ ID NO: 350806 - DNA, 20 bp, Artificial Sequence
  Description of Artificial Sequence: Synthetic oligonucleotide
  Target: LAMA2; (+) strand; PAM type: YTN; PAM sequence: TTG
aacacgagaaatgatgaaca

SEQ ID NO: 350807 - DNA, 20 bp, Artificial Sequence
  Description of Artificial Sequence: Synthetic oligonucleotide
  Target: LAMA2; (+) strand; PAM type: YTN; PAM sequence: CTC
ccaataatctgatgtaaatg

SEQ ID NO: 350808 - DNA, 20 bp, Artificial Sequence
  Description of Artificial Sequence: Synthetic oligonucleotide
  Target: LAMA2; (+) strand; PAM type: YTN; PAM sequence: CTG
atgtaaatgtatagctgagt

SEQ ID NO: 350809 - DNA, 20 bp, Artificial Sequence
  Description of Artificial Sequence: Synthetic oligonucleotide
  Target: LAMA2; (+) strand; PAM type: YTN; PAM sequence: CTG
agtcattgttcaattgtaat

SEQ ID NO: 350810 - DNA, 20 bp, Artificial Sequence
  Description of Artificial Sequence: Synthetic oligonucleotide
  Target: LAMA2; (+) strand; PAM type: YTN; PAM sequence: TTG
ttcaattgtaatgtttcctg

SEQ ID NO: 350811 - DNA, 20 bp, Artificial Sequence
  Description of Artificial Sequence: Synthetic oligonucleotide
  Target: LAMA2; (+) strand; PAM type: YTN; PAM sequence: TTC
aattgtaatgtttcctgtgt

SEQ ID NO: 350812 - DNA, 20 bp, Artificial Sequence
  Description of Artificial Sequence: Synthetic oligonucleotide
  Target: LAMA2; (+) strand; PAM type: YTN; PAM sequence: TTG
taatgtttcctgtgtactgt

SEQ ID NO: 350813 - DNA, 20 bp, Artificial Sequence
  Description of Artificial Sequence: Synthetic oligonucleotide
  Target: LAMA2; (+) strand; PAM type: YTN; PAM sequence: TTT
cctgtgtactgtcaccttta

SEQ ID NO: 350814 - DNA, 20 bp, Artificial Sequence
  Description of Artificial Sequence: Synthetic oligonucleotide
  Target: LAMA2; (+) strand; PAM type: YTN; PAM sequence: TTC
ctgtgtactgtcacctttag

SEQ ID NO: 350815 - DNA, 20 bp, Artificial Sequence
  Description of Artificial Sequence: Synthetic oligonucleotide
  Target: LAMA2; (+) strand; PAM type: YTN; PAM sequence: CTG
tgtactgtcacctttagtaa

SEQ ID NO: 350816 - DNA, 20 bp, Artificial Sequence
  Description of Artificial Sequence: Synthetic oligonucleotide
  Target: LAMA2; (+) strand; PAM type: YTN; PAM sequence: CTG
tcacctttagtaattggtct

SEQ ID NO: 350817 - DNA, 20 bp, Artificial Sequence
  Description of Artificial Sequence: Synthetic oligonucleotide
  Target: LAMA2; (+) strand; PAM type: YTN; PAM sequence: CTT
tagtaattggtcttgctact

SEQ ID NO: 350818 - DNA, 20 bp, Artificial Sequence
  Description of Artificial Sequence: Synthetic oligonucleotide
  Target: LAMA2; (+) strand; PAM type: YTN; PAM sequence: TTT
agtaattggtcttgctactt

SEQ ID NO: 350819 - DNA, 20 bp, Artificial Sequence
  Description of Artificial Sequence: Synthetic oligonucleotide
  Target: LAMA2; (+) strand; PAM type: YTN; PAM sequence: TTA
gtaattggtcttgctacttc

SEQ ID NO: 350820 - DNA, 20 bp, Artificial Sequence
  Description of Artificial Sequence: Synthetic oligonucleotide
  Target: LAMA2; (+) strand; PAM type: YTN; PAM sequence: TTG
gtcttgctacttcaccaatt

SEQ ID NO: 350821 - DNA, 20 bp, Artificial Sequence
  Description of Artificial Sequence: Synthetic oligonucleotide
  Target: LAMA2; (+) strand; PAM type: YTN; PAM sequence: CTT
gctacttcaccaatttaaat

SEQ ID NO: 350822 - DNA, 20 bp, Artificial Sequence
  Description of Artificial Sequence: Synthetic oligonucleotide
  Target: LAMA2; (+) strand; PAM type: YTN; PAM sequence: TTG
ctacttcaccaatttaaatg

SEQ ID NO: 350823 - DNA, 20 bp, Artificial Sequence
  Description of Artificial Sequence: Synthetic oligonucleotide
  Target: LAMA2; (+) strand; PAM type: YTN; PAM sequence: CTA
cttcaccaatttaaatgact

SEQ ID NO: 350824 - DNA, 20 bp, Artificial Sequence
  Description of Artificial Sequence: Synthetic oligonucleotide
  Target: LAMA2; (+) strand; PAM type: YTN; PAM sequence: CTT
caccaatttaaatgactgtc

SEQ ID NO: 350825 - DNA, 20 bp, Artificial Sequence
  Description of Artificial Sequence: Synthetic oligonucleotide
  Target: LAMA2; (+) strand; PAM type: YTN; PAM sequence: TTC
accaatttaaatgactgtca

SEQ ID NO: 350826 - DNA, 20 bp, Artificial Sequence
  Description of Artificial Sequence: Synthetic oligonucleotide
  Target: LAMA2; (+) strand; PAM type: YTN; PAM sequence: TTT
aaatgactgtcattcagtga

SEQ ID NO: 350827 - DNA, 20 bp, Artificial Sequence
  Description of Artificial Sequence: Synthetic oligonucleotide
  Target: LAMA2; (+) strand; PAM type: YTN; PAM sequence: TTA
aatgactgtcattcagtgag

SEQ ID NO: 350828 - DNA, 20 bp, Artificial Sequence
  Description of Artificial Sequence: Synthetic oligonucleotide
  Target: LAMA2; (+) strand; PAM type: YTN; PAM sequence: CTG
tcattcagtgagattttctt

SEQ ID NO: 350829 - DNA, 20 bp, Artificial Sequence
  Description of Artificial Sequence: Synthetic oligonucleotide
  Target: LAMA2; (+) strand; PAM type: YTN; PAM sequence: TTC
agtgagattttcttgtaaaa

SEQ ID NO: 350830 - DNA, 20 bp, Artificial Sequence
  Description of Artificial Sequence: Synthetic oligonucleotide
  Target: LAMA2; (+) strand; PAM type: YTN; PAM sequence: TTT
tcttgtaaaagatcgcaagc

SEQ ID NO: 350831 - DNA, 20 bp, Artificial Sequence
  Description of Artificial Sequence: Synthetic oligonucleotide
  Target: LAMA2; (+) strand; PAM type: YTN; PAM sequence: TTT
cttgtaaaagatcgcaagca

SEQ ID NO: 350832 - DNA, 20 bp, Artificial Sequence
  Description of Artificial Sequence: Synthetic oligonucleotide
  Target: LAMA2; (+) strand; PAM type: YTN; PAM sequence: TTC
ttgtaaaagatcgcaagcac

SEQ ID NO: 350833 - DNA, 20 bp, Artificial Sequence
  Description of Artificial Sequence: Synthetic oligonucleotide
  Target: LAMA2; (+) strand; PAM type: YTN; PAM sequence: CTT
gtaaaagatcgcaagcactt

SEQ ID NO: 350834 - DNA, 20 bp, Artificial Sequence
  Description of Artificial Sequence: Synthetic oligonucleotide
  Target: LAMA2; (+) strand; PAM type: YTN; PAM sequence: TTG
taaaagatcgcaagcacttg

SEQ ID NO: 350835 - DNA, 20 bp, Artificial Sequence
  Description of Artificial Sequence: Synthetic oligonucleotide
  Target: LAMA2; (+) strand; PAM type: YTN; PAM sequence: CTT
gacaatgacttcaactccca

SEQ ID NO: 350836 - DNA, 20 bp, Artificial Sequence
  Description of Artificial Sequence: Synthetic oligonucleotide
  Target: LAMA2; (+) strand; PAM type: YTN; PAM sequence: TTG
acaatgacttcaactcccac

SEQ ID NO: 350837 - DNA, 20 bp, Artificial Sequence
  Description of Artificial Sequence: Synthetic oligonucleotide
  Target: LAMA2; (+) strand; PAM type: YTN; PAM sequence: CTT
caactcccactgctttctta

SEQ ID NO: 350838 - DNA, 20 bp, Artificial Sequence
  Description of Artificial Sequence: Synthetic oligonucleotide
  Target: LAMA2; (+) strand; PAM type: YTN; PAM sequence: TTC
aactcccactgctttcttac

SEQ ID NO: 350839 - DNA, 20 bp, Artificial Sequence
  Description of Artificial Sequence: Synthetic oligonucleotide
  Target: LAMA2; (+) strand; PAM type: YTN; PAM sequence: CTC
ccactgctttcttacgactc

SEQ ID NO: 350840 - DNA, 20 bp, Artificial Sequence
  Description of Artificial Sequence: Synthetic oligonucleotide
  Target: LAMA2; (+) strand; PAM type: YTN; PAM sequence: CTG
ctttcttacgactcctccaa

SEQ ID NO: 350841 - DNA, 20 bp, Artificial Sequence
  Description of Artificial Sequence: Synthetic oligonucleotide
  Target: LAMA2; (+) strand; PAM type: YTN; PAM sequence: CTT
tcttacgactcctccaagat

SEQ ID NO: 350842 - DNA, 20 bp, Artificial Sequence
  Description of Artificial Sequence: Synthetic oligonucleotide
  Target: LAMA2; (+) strand; PAM type: YTN; PAM sequence: TTT
cttacgactcctccaagatg

SEQ ID NO: 350843 - DNA, 20 bp, Artificial Sequence
  Description of Artificial Sequence: Synthetic oligonucleotide
  Target: LAMA2; (+) strand; PAM type: YTN; PAM sequence: TTC
ttacgactcctccaagatgt

SEQ ID NO: 350844 - DNA, 20 bp, Artificial Sequence
  Description of Artificial Sequence: Synthetic oligonucleotide
  Target: LAMA2; (+) strand; PAM type: YTN; PAM sequence: CTT
acgactcctccaagatgtgg

SEQ ID NO: 350845 - DNA, 20 bp, Artificial Sequence
  Description of Artificial Sequence: Synthetic oligonucleotide
  Target: LAMA2; (+) strand; PAM type: YTN; PAM sequence: TTA
cgactcctccaagatgtggc

SEQ ID NO: 350846 - DNA, 20 bp, Artificial Sequence
  Description of Artificial Sequence: Synthetic oligonucleotide
  Target: LAMA2; (+) strand; PAM type: YTN; PAM sequence: CTC
ctccaagatgtggctagata

SEQ ID NO: 350847 - DNA, 20 bp, Artificial Sequence
  Description of Artificial Sequence: Synthetic oligonucleotide
  Target: LAMA2; (+) strand; PAM type: YTN; PAM sequence: CTC
caagatgtggctagataaaa

SEQ ID NO: 350848 - DNA, 20 bp, Artificial Sequence
  Description of Artificial Sequence: Synthetic oligonucleotide
  Target: LAMA2; (+) strand; PAM type: YTN; PAM sequence: CTA
gataaaactgtacttccgat

SEQ ID NO: 350849 - DNA, 20 bp, Artificial Sequence
  Description of Artificial Sequence: Synthetic oligonucleotide
  Target: LAMA2; (+) strand; PAM type: YTN; PAM sequence: CTG
tacttccgattttctccaaa

SEQ ID NO: 350850 - DNA, 20 bp, Artificial Sequence
  Description of Artificial Sequence: Synthetic oligonucleotide
  Target: LAMA2; (+) strand; PAM type: YTN; PAM sequence: CTT
ccgattttctccaaacagct

SEQ ID NO: 350851 - DNA, 20 bp, Artificial Sequence
  Description of Artificial Sequence: Synthetic oligonucleotide
  Target: LAMA2; (+) strand; PAM type: YTN; PAM sequence: TTC
cgattttctccaaacagctt

SEQ ID NO: 350852 - DNA, 20 bp, Artificial Sequence
  Description of Artificial Sequence: Synthetic oligonucleotide
  Target: LAMA2; (+) strand; PAM type: YTN; PAM sequence: TTT
tctccaaacagctttgacct

SEQ ID NO: 350853 - DNA, 20 bp, Artificial Sequence
  Description of Artificial Sequence: Synthetic oligonucleotide
  Target: LAMA2; (+) strand; PAM type: YTN; PAM sequence: TTT
ctccaaacagctttgaccta

SEQ ID NO: 350854 - DNA, 20 bp, Artificial Sequence
  Description of Artificial Sequence: Synthetic oligonucleotide
  Target: LAMA2; (+) strand; PAM type: YTN; PAM sequence: TTC
tccaaacagctttgacctat

SEQ ID NO: 350855 - DNA, 20 bp, Artificial Sequence
  Description of Artificial Sequence: Synthetic oligonucleotide
  Target: LAMA2; (+) strand; PAM type: YTN; PAM sequence: CTC
caaacagctttgacctatgc

SEQ ID NO: 350856 - DNA, 20 bp, Artificial Sequence
  Description of Artificial Sequence: Synthetic oligonucleotide
  Target: LAMA2; (+) strand; PAM type: YTN; PAM sequence: CTT
tgacctatgcttccatctca

SEQ ID NO: 350857 - DNA, 20 bp, Artificial Sequence
  Description of Artificial Sequence: Synthetic oligonucleotide
  Target: LAMA2; (+) strand; PAM type: YTN; PAM sequence: TTT
gacctatgcttccatctcat

SEQ ID NO: 350858 - DNA, 20 bp, Artificial Sequence
  Description of Artificial Sequence: Synthetic oligonucleotide
  Target: LAMA2; (+) strand; PAM type: YTN; PAM sequence: TTG
acctatgcttccatctcatg

SEQ ID NO: 350859 - DNA, 20 bp, Artificial Sequence
  Description of Artificial Sequence: Synthetic oligonucleotide
  Target: LAMA2; (+) strand; PAM type: YTN; PAM sequence: CTA
tgcttccatctcatgaattc

SEQ ID NO: 350860 - DNA, 20 bp, Artificial Sequence
  Description of Artificial Sequence: Synthetic oligonucleotide
  Target: LAMA2; (+) strand; PAM type: YTN; PAM sequence: CTT
ccatctcatgaattccaaga

SEQ ID NO: 350861 - DNA, 20 bp, Artificial Sequence
  Description of Artificial Sequence: Synthetic oligonucleotide
  Target: LAMA2; (+) strand; PAM type: YTN; PAM sequence: TTC
catctcatgaattccaagac

SEQ ID NO: 350862 - DNA, 20 bp, Artificial Sequence
  Description of Artificial Sequence: Synthetic oligonucleotide
  Target: LAMA2; (+) strand; PAM type: YTN; PAM sequence: CTC
atgaattccaagacagtatt

SEQ ID NO: 350863 - DNA, 20 bp, Artificial Sequence
  Description of Artificial Sequence: Synthetic oligonucleotide
  Target: LAMA2; (+) strand; PAM type: YTN; PAM sequence: TTC
caagacagtattaaactgat

SEQ ID NO: 350864 - DNA, 20 bp, Artificial Sequence
  Description of Artificial Sequence: Synthetic oligonucleotide
  Target: LAMA2; (+) strand; PAM type: YTN; PAM sequence: TTA
aactgatgcatattttcata

SEQ ID NO: 350865 - DNA, 20 bp, Artificial Sequence
  Description of Artificial Sequence: Synthetic oligonucleotide
  Target: LAMA2; (+) strand; PAM type: YTN; PAM sequence: CTG
atgcatattttcataagtcg

SEQ ID NO: 350866 - DNA, 20 bp, Artificial Sequence
  Description of Artificial Sequence: Synthetic oligonucleotide
  Target: LAMA2; (+) strand; PAM type: YTN; PAM sequence: TTT
tcataagtcgctcccggcgt

SEQ ID NO: 350867 - DNA, 20 bp, Artificial Sequence
  Description of Artificial Sequence: Synthetic oligonucleotide
  Target: LAMA2; (+) strand; PAM type: YTN; PAM sequence: TTT
cataagtcgctcccggcgtc

SEQ ID NO: 350868 - DNA, 20 bp, Artificial Sequence
  Description of Artificial Sequence: Synthetic oligonucleotide
  Target: LAMA2; (+) strand; PAM type: YTN; PAM sequence: TTC
ataagtcgctcccggcgtct

SEQ ID NO: 350869 - DNA, 20 bp, Artificial Sequence
  Description of Artificial Sequence: Synthetic oligonucleotide
  Target: LAMA2; (+) strand; PAM type: YTN; PAM sequence: CTC
ccggcgtctcttcccgggct

SEQ ID NO: 350870 - DNA, 20 bp, Artificial Sequence
  Description of Artificial Sequence: Synthetic oligonucleotide
  Target: LAMA2; (+) strand; PAM type: YTN; PAM sequence: CTC
ttcccgggctccttgccagc

SEQ ID NO: 350871 - DNA, 20 bp, Artificial Sequence
  Description of Artificial Sequence: Synthetic oligonucleotide
  Target: LAMA2; (+) strand; PAM type: YTN; PAM sequence: CTT
cccgggctccttgccagcgt

SEQ ID NO: 350872 - DNA, 20 bp, Artificial Sequence
  Description of Artificial Sequence: Synthetic oligonucleotide
  Target: LAMA2; (+) strand; PAM type: YTN; PAM sequence: TTC
ccgggctccttgccagcgtg

SEQ ID NO: 350873 - DNA, 20 bp, Artificial Sequence
  Description of Artificial Sequence: Synthetic oligonucleotide
  Target: LAMA2; (+) strand; PAM type: YTN; PAM sequence: CTC
cttgccagcgtgccgaggcg

SEQ ID NO: 350874 - DNA, 20 bp, Artificial Sequence
  Description of Artificial Sequence: Synthetic oligonucleotide
  Target: LAMA2; (+) strand; PAM type: YTN; PAM sequence: CTT
gccagcgtgccgaggcgcag

SEQ ID NO: 350875 - DNA, 20 bp, Artificial Sequence
  Description of Artificial Sequence: Synthetic oligonucleotide
  Target: LAMA2; (+) strand; PAM type: YTN; PAM sequence: TTG
ccagcgtgccgaggcgcagg

SEQ ID NO: 350876 - DNA, 20 bp, Artificial Sequence
  Description of Artificial Sequence: Synthetic oligonucleotide
  Target: LAMA2; (+) strand; PAM type: YTN; PAM sequence: CTG
ccggggagagcggctttcct

SEQ ID NO: 350877 - DNA, 20 bp, Artificial Sequence
  Description of Artificial Sequence: Synthetic oligonucleotide
  Target: LAMA2; (+) strand; PAM type: YTN; PAM sequence: CTT
tcctcatcgattcgggagca

SEQ ID NO: 350878 - DNA, 20 bp, Artificial Sequence
  Description of Artificial Sequence: Synthetic oligonucleotide
  Target: LAMA2; (+) strand; PAM type: YTN; PAM sequence: TTT
cctcatcgattcgggagcac

SEQ ID NO: 350879 - DNA, 20 bp, Artificial Sequence
  Description of Artificial Sequence: Synthetic oligonucleotide
  Target: LAMA2; (+) strand; PAM type: YTN; PAM sequence: TTC
ctcatcgattcgggagcacc

SEQ ID NO: 350880 - DNA, 20 bp, Artificial Sequence
  Description of Artificial Sequence: Synthetic oligonucleotide
  Target: LAMA2; (+) strand; PAM type: YTN; PAM sequence: CTC
atcgattcgggagcacccac

SEQ ID NO: 350881 - DNA, 20 bp, Artificial Sequence
  Description of Artificial Sequence: Synthetic oligonucleotide
  Target: LAMA2; (+) strand; PAM type: YTN; PAM sequence: TTC
gggagcacccaccatgctta

SEQ ID NO: 350882 - DNA, 20 bp, Artificial Sequence
  Description of Artificial Sequence: Synthetic oligonucleotide
  Target: LAMA2; (+) strand; PAM type: YTN; PAM sequence: CTT
aatttctttattaattctag

SEQ ID NO: 350883 - DNA, 20 bp, Artificial Sequence
  Description of Artificial Sequence: Synthetic oligonucleotide
  Target: LAMA2; (+) strand; PAM type: YTN; PAM sequence: TTA
atttctttattaattctagt

SEQ ID NO: 350884 - DNA, 20 bp, Artificial Sequence
  Description of Artificial Sequence: Synthetic oligonucleotide
  Target: LAMA2; (+) strand; PAM type: YTN; PAM sequence: TTT
ctttattaattctagtagtt

SEQ ID NO: 350885 - DNA, 20 bp, Artificial Sequence
  Description of Artificial Sequence: Synthetic oligonucleotide
  Target: LAMA2; (+) strand; PAM type: YTN; PAM sequence: TTC
tttattaattctagtagttt

SEQ ID NO: 350886 - DNA, 20 bp, Artificial Sequence
  Description of Artificial Sequence: Synthetic oligonucleotide
  Target: LAMA2; (+) strand; PAM type: YTN; PAM sequence: CTT
tattaattctagtagtttta

SEQ ID NO: 350887 - DNA, 20 bp, Artificial Sequence
  Description of Artificial Sequence: Synthetic oligonucleotide
  Target: LAMA2; (+) strand; PAM type: YTN; PAM sequence: TTT
attaattctagtagttttaa

SEQ ID NO: 350888 - DNA, 20 bp, Artificial Sequence
  Description of Artificial Sequence: Synthetic oligonucleotide
  Target: LAMA2; (+) strand; PAM type: YTN; PAM sequence: TTA
ttaattctagtagttttaaa

SEQ ID NO: 350889 - DNA, 20 bp, Artificial Sequence
  Description of Artificial Sequence: Synthetic oligonucleotide
  Target: LAMA2; (+) strand; PAM type: YTN; PAM sequence: TTA
attctagtagttttaaacta

SEQ ID NO: 350890 - DNA, 20 bp, Artificial Sequence
  Description of Artificial Sequence: Synthetic oligonucleotide
  Target: LAMA2; (+) strand; PAM type: YTN; PAM sequence: TTC
tagtagttttaaactacatg

SEQ ID NO: 350891 - DNA, 20 bp, Artificial Sequence
  Description of Artificial Sequence: Synthetic oligonucleotide
  Target: LAMA2; (+) strand; PAM type: YTN; PAM sequence: CTA
gtagttttaaactacatgct

SEQ ID NO: 350892 - DNA, 20 bp, Artificial Sequence
  Description of Artificial Sequence: Synthetic oligonucleotide
  Target: LAMA2; (+) strand; PAM type: YTN; PAM sequence: TTT
taaactacatgctttagaaa

SEQ ID NO: 350893 - DNA, 20 bp, Artificial Sequence
  Description of Artificial Sequence: Synthetic oligonucleotide
  Target: LAMA2; (+) strand; PAM type: YTN; PAM sequence: TTT
aaactacatgctttagaaac

SEQ ID NO: 350894 - DNA, 20 bp, Artificial Sequence
  Description of Artificial Sequence: Synthetic oligonucleotide
  Target: LAMA2; (+) strand; PAM type: YTN; PAM sequence: TTA
aactacatgctttagaaacg

SEQ ID NO: 350895 - DNA, 20 bp, Artificial Sequence
  Description of Artificial Sequence: Synthetic oligonucleotide
  Target: LAMA2; (+) strand; PAM type: YTN; PAM sequence: CTA
catgctttagaaacgtacac

SEQ ID NO: 350896 - DNA, 20 bp, Artificial Sequence
  Description of Artificial Sequence: Synthetic oligonucleotide
  Target: LAMA2; (+) strand; PAM type: YTN; PAM sequence: CTT
tagaaacgtacacataaaca

SEQ ID NO: 350897 - DNA, 20 bp, Artificial Sequence
  Description of Artificial Sequence: Synthetic oligonucleotide
  Target: LAMA2; (+) strand; PAM type: YTN; PAM sequence: TTT
agaaacgtacacataaacaa

SEQ ID NO: 350898 - DNA, 20 bp, Artificial Sequence
  Description of Artificial Sequence: Synthetic oligonucleotide
  Target: LAMA2; (+) strand; PAM type: YTN; PAM sequence: TTA
gaaacgtacacataaacaat

SEQ ID NO: 350899 - DNA, 20 bp, Artificial Sequence
  Description of Artificial Sequence: Synthetic oligonucleotide
  Target: LAMA2; (+) strand; PAM type: YTN; PAM sequence: TTT
tacctgcaagtacattcagg

SEQ ID NO: 350900 - DNA, 20 bp, Artificial Sequence
  Description of Artificial Sequence: Synthetic oligonucleotide
  Target: LAMA2; (+) strand; PAM type: YTN; PAM sequence: TTT
acctgcaagtacattcaggc

SEQ ID NO: 350901 - DNA, 20 bp, Artificial Sequence
  Description of Artificial Sequence: Synthetic oligonucleotide
  Target: LAMA2; (+) strand; PAM type: YTN; PAM sequence: TTA
cctgcaagtacattcaggct

SEQ ID NO: 350902 - DNA, 20 bp, Artificial Sequence
  Description of Artificial Sequence: Synthetic oligonucleotide
  Target: LAMA2; (+) strand; PAM type: YTN; PAM sequence: CTG
caagtacattcaggcttact

SEQ ID NO: 350903 - DNA, 20 bp, Artificial Sequence
  Description of Artificial Sequence: Synthetic oligonucleotide
  Target: LAMA2; (+) strand; PAM type: YTN; PAM sequence: TTC
aggcttacttcttcctttgc

SEQ ID NO: 350904 - DNA, 20 bp, Artificial Sequence
  Description of Artificial Sequence: Synthetic oligonucleotide
  Target: LAMA2; (+) strand; PAM type: YTN; PAM sequence: CTT
acttcttcctttgcaatctt

SEQ ID NO: 350905 - DNA, 20 bp, Artificial Sequence
  Description of Artificial Sequence: Synthetic oligonucleotide
  Target: LAMA2; (+) strand; PAM type: YTN; PAM sequence: TTA
cttcttcctttgcaatcttt

SEQ ID NO: 350906 - DNA, 20 bp, Artificial Sequence
  Description of Artificial Sequence: Synthetic oligonucleotide
  Target: LAMA2; (+) strand; PAM type: YTN; PAM sequence: CTT
cttcctttgcaatctttatg

SEQ ID NO: 350907 - DNA, 20 bp, Artificial Sequence
  Description of Artificial Sequence: Synthetic oligonucleotide
  Target: LAMA2; (+) strand; PAM type: YTN; PAM sequence: TTC
ttcctttgcaatctttatgc

SEQ ID NO: 350908 - DNA, 20 bp, Artificial Sequence
  Description of Artificial Sequence: Synthetic oligonucleotide
  Target: LAMA2; (+) strand; PAM type: YTN; PAM sequence: CTT
cctttgcaatctttatgcca

SEQ ID NO: 350909 - DNA, 20 bp, Artificial Sequence
  Description of Artificial Sequence: Synthetic oligonucleotide
  Target: LAMA2; (+) strand; PAM type: YTN; PAM sequence: TTC
ctttgcaatctttatgccaa

SEQ ID NO: 350910 - DNA, 20 bp, Artificial Sequence
  Description of Artificial Sequence: Synthetic oligonucleotide
  Target: LAMA2; (+) strand; PAM type: YTN; PAM sequence: CTT
tgcaatctttatgccaaggt

SEQ ID NO: 350911 - DNA, 20 bp, Artificial Sequence
  Description of Artificial Sequence: Synthetic oligonucleotide
  Target: LAMA2; (+) strand; PAM type: YTN; PAM sequence: TTT
gcaatctttatgccaaggtt

SEQ ID NO: 350912 - DNA, 20 bp, Artificial Sequence
  Description of Artificial Sequence: Synthetic oligonucleotide
  Target: LAMA2; (+) strand; PAM type: YTN; PAM sequence: TTG
caatctttatgccaaggtta

SEQ ID NO: 350913 - DNA, 20 bp, Artificial Sequence
  Description of Artificial Sequence: Synthetic oligonucleotide
  Target: LAMA2; (+) strand; PAM type: YTN; PAM sequence: CTT
tatgccaaggttaactaaaa

SEQ ID NO: 350914 - DNA, 20 bp, Artificial Sequence
  Description of Artificial Sequence: Synthetic oligonucleotide
  Target: LAMA2; (+) strand; PAM type: YTN; PAM sequence: TTT
atgccaaggttaactaaaaa

SEQ ID NO: 350915 - DNA, 20 bp, Artificial Sequence
  Description of Artificial Sequence: Synthetic oligonucleotide
  Target: LAMA2; (+) strand; PAM type: YTN; PAM sequence: TTA
tgccaaggttaactaaaaat

SEQ ID NO: 350916 - DNA, 20 bp, Artificial Sequence
  Description of Artificial Sequence: Synthetic oligonucleotide
  Target: LAMA2; (+) strand; PAM type: YTN; PAM sequence: TTA
actaaaaatggcgagagctg

SEQ ID NO: 350917 - DNA, 20 bp, Artificial Sequence
  Description of Artificial Sequence: Synthetic oligonucleotide
  Target: LAMA2; (+) strand; PAM type: YTN; PAM sequence: CTA
aaaatggcgagagctgacat

SEQ ID NO: 350918 - DNA, 20 bp, Artificial Sequence
  Description of Artificial Sequence: Synthetic oligonucleotide
  Target: LAMA2; (+) strand; PAM type: YTN; PAM sequence: CTG
acatcttcactttgttctga

SEQ ID NO: 350919 - DNA, 20 bp, Artificial Sequence
  Description of Artificial Sequence: Synthetic oligonucleotide
  Target: LAMA2; (+) strand; PAM type: YTN; PAM sequence: CTT
cactttgttctgaattttaa

SEQ ID NO: 350920 - DNA, 20 bp, Artificial Sequence
  Description of Artificial Sequence: Synthetic oligonucleotide
  Target: LAMA2; (+) strand; PAM type: YTN; PAM sequence: TTC
actttgttctgaattttaaa

SEQ ID NO: 350921 - DNA, 20 bp, Artificial Sequence
  Description of Artificial Sequence: Synthetic oligonucleotide
  Target: LAMA2; (+) strand; PAM type: YTN; PAM sequence: CTT
tgttctgaattttaaaggga

SEQ ID NO: 350922 - DNA, 20 bp, Artificial Sequence
  Description of Artificial Sequence: Synthetic oligonucleotide
  Target: LAMA2; (+) strand; PAM type: YTN; PAM sequence: TTT
gttctgaattttaaagggaa

SEQ ID NO: 350923 - DNA, 20 bp, Artificial Sequence
  Description of Artificial Sequence: Synthetic oligonucleotide
  Target: LAMA2; (+) strand; PAM type: YTN; PAM sequence: TTG
ttctgaattttaaagggaaa

SEQ ID NO: 350924 - DNA, 20 bp, Artificial Sequence
  Description of Artificial Sequence: Synthetic oligonucleotide
  Target: LAMA2; (+) strand; PAM type: YTN; PAM sequence: TTC
tgaattttaaagggaaacct

SEQ ID NO: 350925 - DNA, 20 bp, Artificial Sequence
  Description of Artificial Sequence: Synthetic oligonucleotide
  Target: LAMA2; (+) strand; PAM type: YTN; PAM sequence: CTG
aattttaaagggaaacctaa

SEQ ID NO: 350926 - DNA, 20 bp, Artificial Sequence
  Description of Artificial Sequence: Synthetic oligonucleotide
  Target: LAMA2; (+) strand; PAM type: YTN; PAM sequence: TTT
taaagggaaacctaatattt

SEQ ID NO: 350927 - DNA, 20 bp, Artificial Sequence
  Description of Artificial Sequence: Synthetic oligonucleotide
  Target: LAMA2; (+) strand; PAM type: YTN; PAM sequence: TTT
aaagggaaacctaatatttc

SEQ ID NO: 350928 - DNA, 20 bp, Artificial Sequence
  Description of Artificial Sequence: Synthetic oligonucleotide
  Target: LAMA2; (+) strand; PAM type: YTN; PAM sequence: TTA
aagggaaacctaatatttca

SEQ ID NO: 350929 - DNA, 20 bp, Artificial Sequence
  Description of Artificial Sequence: Synthetic oligonucleotide
  Target: LAMA2; (+) strand; PAM type: YTN; PAM sequence: CTA
atatttcactatggagtatg

SEQ ID NO: 350930 - DNA, 20 bp, Artificial Sequence
  Description of Artificial Sequence: Synthetic oligonucleotide
  Target: LAMA2; (+) strand; PAM type: YTN; PAM sequence: TTT
cactatggagtatgatgtga

SEQ ID NO: 350931 - DNA, 20 bp, Artificial Sequence
  Description of Artificial Sequence: Synthetic oligonucleotide
  Target: LAMA2; (+) strand; PAM type: YTN; PAM sequence: TTC
actatggagtatgatgtgaa

SEQ ID NO: 350932 - DNA, 20 bp, Artificial Sequence
  Description of Artificial Sequence: Synthetic oligonucleotide
  Target: LAMA2; (+) strand; PAM type: YTN; PAM sequence: CTA
tggagtatgatgtgaactgc

SEQ ID NO: 350933 - DNA, 20 bp, Artificial Sequence
  Description of Artificial Sequence: Synthetic oligonucleotide
  Target: LAMA2; (+) strand; PAM type: YTN; PAM sequence: CTG
catatttttttatggacacc

SEQ ID NO: 350934 - DNA, 20 bp, Artificial Sequence
  Description of Artificial Sequence: Synthetic oligonucleotide
  Target: LAMA2; (+) strand; PAM type: YTN; PAM sequence: TTT
ttttatggacaccctttatc

SEQ ID NO: 350935 - DNA, 20 bp, Artificial Sequence
  Description of Artificial Sequence: Synthetic oligonucleotide
  Target: LAMA2; (+) strand; PAM type: YTN; PAM sequence: TTT
tttatggacaccctttatca

SEQ ID NO: 350936 - DNA, 20 bp, Artificial Sequence
  Description of Artificial Sequence: Synthetic oligonucleotide
  Target: LAMA2; (+) strand; PAM type: YTN; PAM sequence: TTT
ttatggacaccctttatcag

SEQ ID NO: 350937 - DNA, 20 bp, Artificial Sequence
  Description of Artificial Sequence: Synthetic oligonucleotide
  Target: LAMA2; (+) strand; PAM type: YTN; PAM sequence: TTT
tatggacaccctttatcaga

SEQ ID NO: 350938 - DNA, 20 bp, Artificial Sequence
  Description of Artificial Sequence: Synthetic oligonucleotide
  Target: LAMA2; (+) strand; PAM type: YTN; PAM sequence: TTT
atggacaccctttatcagat

SEQ ID NO: 350939 - DNA, 20 bp, Artificial Sequence
  Description of Artificial Sequence: Synthetic oligonucleotide
  Target: LAMA2; (+) strand; PAM type: YTN; PAM sequence: TTA
tggacaccctttatcagatt

SEQ ID NO: 350940 - DNA, 20 bp, Artificial Sequence
  Description of Artificial Sequence: Synthetic oligonucleotide
  Target: LAMA2; (+) strand; PAM type: YTN; PAM sequence: CTT
tatcagattcagtaggtccc

SEQ ID NO: 350941 - DNA, 20 bp, Artificial Sequence
  Description of Artificial Sequence: Synthetic oligonucleotide
  Target: LAMA2; (+) strand; PAM type: YTN; PAM sequence: TTT
atcagattcagtaggtcccc

SEQ ID NO: 350942 - DNA, 20 bp, Artificial Sequence
  Description of Artificial Sequence: Synthetic oligonucleotide
  Target: LAMA2; (+) strand; PAM type: YTN; PAM sequence: TTA
tcagattcagtaggtcccct

SEQ ID NO: 350943 - DNA, 20 bp, Artificial Sequence
  Description of Artificial Sequence: Synthetic oligonucleotide
  Target: LAMA2; (+) strand; PAM type: YTN; PAM sequence: TTC
agtaggtcccctactattcc

SEQ ID NO: 350944 - DNA, 20 bp, Artificial Sequence
  Description of Artificial Sequence: Synthetic oligonucleotide
  Target: LAMA2; (+) strand; PAM type: YTN; PAM sequence: CTA
ctattcctaagttgcagaga

SEQ ID NO: 350945 - DNA, 20 bp, Artificial Sequence
  Description of Artificial Sequence: Synthetic oligonucleotide
  Target: LAMA2; (+) strand; PAM type: YTN; PAM sequence: CTA
ttcctaagttgcagagagtt

SEQ ID NO: 350946 - DNA, 20 bp, Artificial Sequence
  Description of Artificial Sequence: Synthetic oligonucleotide
  Target: LAMA2; (+) strand; PAM type: YTN; PAM sequence: TTC
ctaagttgcagagagttttt

SEQ ID NO: 350947 - DNA, 20 bp, Artificial Sequence
  Description of Artificial Sequence: Synthetic oligonucleotide
  Target: LAMA2; (+) strand; PAM type: YTN; PAM sequence: CTA
agttgcagagagtttttata

SEQ ID NO: 350948 - DNA, 20 bp, Artificial Sequence
  Description of Artificial Sequence: Synthetic oligonucleotide
  Target: LAMA2; (+) strand; PAM type: YTN; PAM sequence: TTG
cagagagtttttataacaaa

SEQ ID NO: 350949 - DNA, 20 bp, Artificial Sequence
  Description of Artificial Sequence: Synthetic oligonucleotide
  Target: LAMA2; (+) strand; PAM type: YTN; PAM sequence: TTT
ttataacaaaatggttttgc

SEQ ID NO: 350950 - DNA, 20 bp, Artificial Sequence
  Description of Artificial Sequence: Synthetic oligonucleotide
  Target: LAMA2; (+) strand; PAM type: YTN; PAM sequence: TTT
tataacaaaatggttttgca

SEQ ID NO: 350951 - DNA, 20 bp, Artificial Sequence
  Description of Artificial Sequence: Synthetic oligonucleotide
  Target: LAMA2; (+) strand; PAM type: YTN; PAM sequence: TTT
ataacaaaatggttttgcat

SEQ ID NO: 350952 - DNA, 20 bp, Artificial Sequence
  Description of Artificial Sequence: Synthetic oligonucleotide
  Target: LAMA2; (+) strand; PAM type: YTN; PAM sequence: TTA
taacaaaatggttttgcatt

SEQ ID NO: 350953 - DNA, 20 bp, Artificial Sequence
  Description of Artificial Sequence: Synthetic oligonucleotide
  Target: LAMA2; (+) strand; PAM type: YTN; PAM sequence: TTT
tgcattttgtcatatgcttt

SEQ ID NO: 350954 - DNA, 20 bp, Artificial Sequence
  Description of Artificial Sequence: Synthetic oligonucleotide
  Target: LAMA2; (+) strand; PAM type: YTN; PAM sequence: TTT
gcattttgtcatatgctttt

SEQ ID NO: 350955 - DNA, 20 bp, Artificial Sequence
  Description of Artificial Sequence: Synthetic oligonucleotide
  Target: LAMA2; (+) strand; PAM type: YTN; PAM sequence: TTG
cattttgtcatatgcttttc

SEQ ID NO: 350956 - DNA, 20 bp, Artificial Sequence
  Description of Artificial Sequence: Synthetic oligonucleotide
  Target: LAMA2; (+) strand; PAM type: YTN; PAM sequence: TTT
tgtcatatgcttttcgaaac

SEQ ID NO: 350957 - DNA, 20 bp, Artificial Sequence
  Description of Artificial Sequence: Synthetic oligonucleotide
  Target: LAMA2; (+) strand; PAM type: YTN; PAM sequence: TTT
gtcatatgcttttcgaaacc

SEQ ID NO: 350958 - DNA, 20 bp, Artificial Sequence
  Description of Artificial Sequence: Synthetic oligonucleotide
  Target: LAMA2; (+) strand; PAM type: YTN; PAM sequence: TTG
tcatatgcttttcgaaacct

SEQ ID NO: 350959 - DNA, 20 bp, Artificial Sequence
  Description of Artificial Sequence: Synthetic oligonucleotide
  Target: LAMA2; (+) strand; PAM type: YTN; PAM sequence: CTT
ttcgaaacctactgaaatga

SEQ ID NO: 350960 - DNA, 20 bp, Artificial Sequence
  Description of Artificial Sequence: Synthetic oligonucleotide
  Target: LAMA2; (+) strand; PAM type: YTN; PAM sequence: TTT
tcgaaacctactgaaatgaa

SEQ ID NO: 350961 - DNA, 20 bp, Artificial Sequence
  Description of Artificial Sequence: Synthetic oligonucleotide
  Target: LAMA2; (+) strand; PAM type: YTN; PAM sequence: TTT
cgaaacctactgaaatgaac

SEQ ID NO: 350962 - DNA, 20 bp, Artificial Sequence
  Description of Artificial Sequence: Synthetic oligonucleotide
  Target: LAMA2; (+) strand; PAM type: YTN; PAM sequence: TTC
gaaacctactgaaatgaaca

SEQ ID NO: 350963 - DNA, 20 bp, Artificial Sequence
  Description of Artificial Sequence: Synthetic oligonucleotide
  Target: LAMA2; (+) strand; PAM type: YTN; PAM sequence: CTA
ctgaaatgaacataaggatt

SEQ ID NO: 350964 - DNA, 20 bp, Artificial Sequence
  Description of Artificial Sequence: Synthetic oligonucleotide
  Target: LAMA2; (+) strand; PAM type: YTN; PAM sequence: CTG
aaatgaacataaggattttc

SEQ ID NO: 350965 - DNA, 20 bp, Artificial Sequence
  Description of Artificial Sequence: Synthetic oligonucleotide
  Target: LAMA2; (+) strand; PAM type: YTN; PAM sequence: TTT
tctcctttattctgttaacg

SEQ ID NO: 350966 - DNA, 20 bp, Artificial Sequence
  Description of Artificial Sequence: Synthetic oligonucleotide
  Target: LAMA2; (+) strand; PAM type: YTN; PAM sequence: TTT
ctcctttattctgttaacgg

SEQ ID NO: 350967 - DNA, 20 bp, Artificial Sequence
  Description of Artificial Sequence: Synthetic oligonucleotide
  Target: LAMA2; (+) strand; PAM type: YTN; PAM sequence: TTC
tcctttattctgttaacggg

SEQ ID NO: 350968 - DNA, 20 bp, Artificial Sequence
  Description of Artificial Sequence: Synthetic oligonucleotide
  Target: LAMA2; (+) strand; PAM type: YTN; PAM sequence: CTC
ctttattctgttaacgggga

SEQ ID NO: 350969 - DNA, 20 bp, Artificial Sequence
  Description of Artificial Sequence: Synthetic oligonucleotide
  Target: LAMA2; (+) strand; PAM type: YTN; PAM sequence: CTT
tattctgttaacggggacaa

SEQ ID NO: 350970 - DNA, 20 bp, Artificial Sequence
  Description of Artificial Sequence: Synthetic oligonucleotide
  Target: LAMA2; (+) strand; PAM type: YTN; PAM sequence: TTT
attctgttaacggggacaat

SEQ ID NO: 350971 - DNA, 20 bp, Artificial Sequence
  Description of Artificial Sequence: Synthetic oligonucleotide
  Target: LAMA2; (+) strand; PAM type: YTN; PAM sequence: TTA
ttctgttaacggggacaatt

SEQ ID NO: 350972 - DNA, 20 bp, Artificial Sequence
  Description of Artificial Sequence: Synthetic oligonucleotide
  Target: LAMA2; (+) strand; PAM type: YTN; PAM sequence: TTC
tgttaacggggacaatttat

SEQ ID NO: 350973 - DNA, 20 bp, Artificial Sequence
  Description of Artificial Sequence: Synthetic oligonucleotide
  Target: LAMA2; (+) strand; PAM type: YTN; PAM sequence: CTG
ttaacggggacaatttatgc

SEQ ID NO: 350974 - DNA, 20 bp, Artificial Sequence
  Description of Artificial Sequence: Synthetic oligonucleotide
  Target: LAMA2; (+) strand; PAM type: YTN; PAM sequence: TTA
acggggacaatttatgcaaa

SEQ ID NO: 350975 - DNA, 20 bp, Artificial Sequence
  Description of Artificial Sequence: Synthetic oligonucleotide
  Target: LAMA2; (+) strand; PAM type: YTN; PAM sequence: TTT
atgcaaattgaattttaaaa

SEQ ID NO: 350976 - DNA, 20 bp, Artificial Sequence
  Description of Artificial Sequence: Synthetic oligonucleotide
  Target: LAMA2; (+) strand; PAM type: YTN; PAM sequence: TTA
tgcaaattgaattttaaaat

SEQ ID NO: 350977 - DNA, 20 bp, Artificial Sequence
  Description of Artificial Sequence: Synthetic oligonucleotide
  Target: LAMA2; (+) strand; PAM type: YTN; PAM sequence: TTG
aattttaaaatatgaaggca

SEQ ID NO: 350978 - DNA, 20 bp, Artificial Sequence
  Description of Artificial Sequence: Synthetic oligonucleotide
  Target: LAMA2; (+) strand; PAM type: YTN; PAM sequence: TTT
taaaatatgaaggcagcttt

SEQ ID NO: 350979 - DNA, 20 bp, Artificial Sequence
  Description of Artificial Sequence: Synthetic oligonucleotide
  Target: LAMA2; (+) strand; PAM type: YTN; PAM sequence: TTT
aaaatatgaaggcagctttg

SEQ ID NO: 350980 - DNA, 20 bp, Artificial Sequence
  Description of Artificial Sequence: Synthetic oligonucleotide
  Target: LAMA2; (+) strand; PAM type: YTN; PAM sequence: TTA
aaatatgaaggcagctttgc

SEQ ID NO: 350981 - DNA, 20 bp, Artificial Sequence
  Description of Artificial Sequence: Synthetic oligonucleotide
  Target: LAMA2; (+) strand; PAM type: YTN; PAM sequence: CTT
tgcatttgtgaattaatctc

SEQ ID NO: 350982 - DNA, 20 bp, Artificial Sequence
  Description of Artificial Sequence: Synthetic oligonucleotide
  Target: LAMA2; (+) strand; PAM type: YTN; PAM sequence: TTT
gcatttgtgaattaatctcc

SEQ ID NO: 350983 - DNA, 20 bp, Artificial Sequence
  Description of Artificial Sequence: Synthetic oligonucleotide
  Target: LAMA2; (+) strand; PAM type: YTN; PAM sequence: TTG
catttgtgaattaatctcca

SEQ ID NO: 350984 - DNA, 20 bp, Artificial Sequence
  Description of Artificial Sequence: Synthetic oligonucleotide
  Target: LAMA2; (+) strand; PAM type: YTN; PAM sequence: TTT
gtgaattaatctccatttgg

SEQ ID NO: 350985 - DNA, 20 bp, Artificial Sequence
  Description of Artificial Sequence: Synthetic oligonucleotide
  Target: LAMA2; (+) strand; PAM type: YTN; PAM sequence: TTG
tgaattaatctccatttggt

SEQ ID NO: 350986 - DNA, 20 bp, Artificial Sequence
  Description of Artificial Sequence: Synthetic oligonucleotide
  Target: LAMA2; (+) strand; PAM type: YTN; PAM sequence: TTA
atctccatttggttatgata

SEQ ID NO: 350987 - DNA, 20 bp, Artificial Sequence
  Description of Artificial Sequence: Synthetic oligonucleotide
  Target: LAMA2; (+) strand; PAM type: YTN; PAM sequence: CTC
catttggttatgatatatta

SEQ ID NO: 350988 - DNA, 20 bp, Artificial Sequence
  Description of Artificial Sequence: Synthetic oligonucleotide
  Target: LAMA2; (+) strand; PAM type: YTN; PAM sequence: TTT
ggttatgatatattatcatt

SEQ ID NO: 350989 - DNA, 20 bp, Artificial Sequence
  Description of Artificial Sequence: Synthetic oligonucleotide
  Target: LAMA2; (+) strand; PAM type: YTN; PAM sequence: TTG
gttatgatatattatcattt

SEQ ID NO: 350990 - DNA, 20 bp, Artificial Sequence
  Description of Artificial Sequence: Synthetic oligonucleotide
  Target: LAMA2; (+) strand; PAM type: YTN; PAM sequence: TTA
tgatatattatcatttttat

SEQ ID NO: 350991 - DNA, 20 bp, Artificial Sequence
  Description of Artificial Sequence: Synthetic oligonucleotide
  Target: LAMA2; (+) strand; PAM type: YTN; PAM sequence: TTA
tcatttttatatattggatg

SEQ ID NO: 350992 - DNA, 20 bp, Artificial Sequence
  Description of Artificial Sequence: Synthetic oligonucleotide
  Target: LAMA2; (+) strand; PAM type: YTN; PAM sequence: TTT
ttatatattggatgattcaa

SEQ ID NO: 350993 - DNA, 20 bp, Artificial Sequence
  Description of Artificial Sequence: Synthetic oligonucleotide
  Target: LAMA2; (+) strand; PAM type: YTN; PAM sequence: TTT
tatatattggatgattcaat

SEQ ID NO: 350994 - DNA, 20 bp, Artificial Sequence
  Description of Artificial Sequence: Synthetic oligonucleotide
  Target: LAMA2; (+) strand; PAM type: YTN; PAM sequence: TTT
atatattggatgattcaatt

SEQ ID NO: 350995 - DNA, 20 bp, Artificial Sequence
  Description of Artificial Sequence: Synthetic oligonucleotide
  Target: LAMA2; (+) strand; PAM type: YTN; PAM sequence: TTA
tatattggatgattcaattg

SEQ ID NO: 350996 - DNA, 20 bp, Artificial Sequence
  Description of Artificial Sequence: Synthetic oligonucleotide
  Target: LAMA2; (+) strand; PAM type: YTN; PAM sequence: TTG
gatgattcaattgactaatg

SEQ ID NO: 350997 - DNA, 20 bp, Artificial Sequence
  Description of Artificial Sequence: Synthetic oligonucleotide
  Target: LAMA2; (+) strand; PAM type: YTN; PAM sequence: TTC
aattgactaatgtttggtta

SEQ ID NO: 350998 - DNA, 20 bp, Artificial Sequence
  Description of Artificial Sequence: Synthetic oligonucleotide
  Target: LAMA2; (+) strand; PAM type: YTN; PAM sequence: TTG
actaatgtttggttaagaat

SEQ ID NO: 350999 - DNA, 20 bp, Artificial Sequence
  Description of Artificial Sequence: Synthetic oligonucleotide
  Target: LAMA2; (+) strand; PAM type: YTN; PAM sequence: CTA
atgtttggttaagaattttg

SEQ ID NO: 351000 - DNA, 20 bp, Artificial Sequence
  Description of Artificial Sequence: Synthetic oligonucleotide
  Target: LAMA2; (+) strand; PAM type: YTN; PAM sequence: TTT
ggttaagaattttgacatcc

SEQ ID NO: 351001 - DNA, 20 bp, Artificial Sequence
  Description of Artificial Sequence: Synthetic oligonucleotide
  Target: LAMA2; (+) strand; PAM type: YTN; PAM sequence: TTG
gttaagaattttgacatcct

SEQ ID NO: 351002 - DNA, 20 bp, Artificial Sequence
  Description of Artificial Sequence: Synthetic oligonucleotide
  Target: LAMA2; (+) strand; PAM type: YTN; PAM sequence: TTA
agaattttgacatcctctca

SEQ ID NO: 351003 - DNA, 20 bp, Artificial Sequence
  Description of Artificial Sequence: Synthetic oligonucleotide
  Target: LAMA2; (+) strand; PAM type: YTN; PAM sequence: TTT
tgacatcctctcataaaata

SEQ ID NO: 351004 - DNA, 20 bp, Artificial Sequence
  Description of Artificial Sequence: Synthetic oligonucleotide
  Target: LAMA2; (+) strand; PAM type: YTN; PAM sequence: TTT
gacatcctctcataaaatat

SEQ ID NO: 351005 - DNA, 20 bp, Artificial Sequence
  Description of Artificial Sequence: Synthetic oligonucleotide
  Target: LAMA2; (+) strand; PAM type: YTN; PAM sequence: TTG
acatcctctcataaaatata

SEQ ID NO: 351006 - DNA, 20 bp, Artificial Sequence
  Description of Artificial Sequence: Synthetic oligonucleotide
  Target: LAMA2; (+) strand; PAM type: YTN; PAM sequence: CTC
tcataaaatatattggtcta

SEQ ID NO: 351007 - DNA, 20 bp, Artificial Sequence
  Description of Artificial Sequence: Synthetic oligonucleotide
  Target: LAMA2; (+) strand; PAM type: YTN; PAM sequence: CTC
ataaaatatattggtctata

SEQ ID NO: 351008 - DNA, 20 bp, Artificial Sequence
  Description of Artificial Sequence: Synthetic oligonucleotide
  Target: LAMA2; (+) strand; PAM type: YTN; PAM sequence: TTG
gtctataattttattttctt

SEQ ID NO: 351009 - DNA, 20 bp, Artificial Sequence
  Description of Artificial Sequence: Synthetic oligonucleotide
  Target: LAMA2; (+) strand; PAM type: YTN; PAM sequence: CTA
taattttattttcttataat

SEQ ID NO: 351010 - DNA, 20 bp, Artificial Sequence
  Description of Artificial Sequence: Synthetic oligonucleotide
  Target: LAMA2; (+) strand; PAM type: YTN; PAM sequence: TTT
tattttcttataatgttttt

SEQ ID NO: 351011 - DNA, 20 bp, Artificial Sequence
  Description of Artificial Sequence: Synthetic oligonucleotide
  Target: LAMA2; (+) strand; PAM type: YTN; PAM sequence: TTT
attttcttataatgtttttg

SEQ ID NO: 351012 - DNA, 20 bp, Artificial Sequence
  Description of Artificial Sequence: Synthetic oligonucleotide
  Target: LAMA2; (+) strand; PAM type: YTN; PAM sequence: TTA
ttttcttataatgtttttgt

SEQ ID NO: 351013 - DNA, 20 bp, Artificial Sequence
  Description of Artificial Sequence: Synthetic oligonucleotide
  Target: LAMA2; (+) strand; PAM type: YTN; PAM sequence: TTT
tcttataatgtttttgtcag

SEQ ID NO: 351014 - DNA, 20 bp, Artificial Sequence
  Description of Artificial Sequence: Synthetic oligonucleotide
  Target: LAMA2; (+) strand; PAM type: YTN; PAM sequence: TTT
cttataatgtttttgtcagg

SEQ ID NO: 351015 - DNA, 20 bp, Artificial Sequence
  Description of Artificial Sequence: Synthetic oligonucleotide
  Target: LAMA2; (+) strand; PAM type: YTN; PAM sequence: TTC
ttataatgtttttgtcaggt

SEQ ID NO: 351016 - DNA, 20 bp, Artificial Sequence
  Description of Artificial Sequence: Synthetic oligonucleotide
  Target: LAMA2; (+) strand; PAM type: YTN; PAM sequence: CTT
ataatgtttttgtcaggttt

SEQ ID NO: 351017 - DNA, 20 bp, Artificial Sequence
  Description of Artificial Sequence: Synthetic oligonucleotide
  Target: LAMA2; (+) strand; PAM type: YTN; PAM sequence: TTA
taatgtttttgtcaggtttt

SEQ ID NO: 351018 - DNA, 20 bp, Artificial Sequence
  Description of Artificial Sequence: Synthetic oligonucleotide
  Target: LAMA2; (+) strand; PAM type: YTN; PAM sequence: TTT
ttgtcaggttttttattggg

SEQ ID NO: 351019 - DNA, 20 bp, Artificial Sequence
  Description of Artificial Sequence: Synthetic oligonucleotide
  Target: LAMA2; (+) strand; PAM type: YTN; PAM sequence: TTT
tgtcaggttttttattgggg

SEQ ID NO: 351020 - DNA, 20 bp, Artificial Sequence
  Description of Artificial Sequence: Synthetic oligonucleotide
  Target: LAMA2; (+) strand; PAM type: YTN; PAM sequence: TTT
gtcaggttttttattggggt

SEQ ID NO: 351021 - DNA, 20 bp, Artificial Sequence
  Description of Artificial Sequence: Synthetic oligonucleotide
  Target: LAMA2; (+) strand; PAM type: YTN; PAM sequence: TTG
tcaggttttttattggggta

SEQ ID NO: 351022 - DNA, 20 bp, Artificial Sequence
  Description of Artificial Sequence: Synthetic oligonucleotide
  Target: LAMA2; (+) strand; PAM type: YTN; PAM sequence: TTT
tttattggggtatactggca

SEQ ID NO: 351023 - DNA, 20 bp, Artificial Sequence
  Description of Artificial Sequence: Synthetic oligonucleotide
  Target: LAMA2; (+) strand; PAM type: YTN; PAM sequence: TTT
ttattggggtatactggcat

SEQ ID NO: 351024 - DNA, 20 bp, Artificial Sequence
  Description of Artificial Sequence: Synthetic oligonucleotide
  Target: LAMA2; (+) strand; PAM type: YTN; PAM sequence: TTT
tattggggtatactggcatc

SEQ ID NO: 351025 - DNA, 20 bp, Artificial Sequence
  Description of Artificial Sequence: Synthetic oligonucleotide
  Target: LAMA2; (+) strand; PAM type: YTN; PAM sequence: TTT
attggggtatactggcatca

SEQ ID NO: 351026 - DNA, 20 bp, Artificial Sequence
  Description of Artificial Sequence: Synthetic oligonucleotide
  Target: LAMA2; (+) strand; PAM type: YTN; PAM sequence: TTA
ttggggtatactggcatcaa

SEQ ID NO: 351027 - DNA, 20 bp, Artificial Sequence
  Description of Artificial Sequence: Synthetic oligonucleotide
  Target: LAMA2; (+) strand; PAM type: YTN; PAM sequence: TTG
gggtatactggcatcaacaa

SEQ ID NO: 351028 - DNA, 20 bp, Artificial Sequence
  Description of Artificial Sequence: Synthetic oligonucleotide
  Target: LAMA2; (+) strand; PAM type: YTN; PAM sequence: CTG
gcatcaacaaatgatcgggg

SEQ ID NO: 351029 - DNA, 20 bp, Artificial Sequence
  Description of Artificial Sequence: Synthetic oligonucleotide
  Target: LAMA2; (+) strand; PAM type: YTN; PAM sequence: CTT
cctcttctgttttctaaagt

SEQ ID NO: 351030 - DNA, 20 bp, Artificial Sequence
  Description of Artificial Sequence: Synthetic oligonucleotide
  Target: LAMA2; (+) strand; PAM type: YTN; PAM sequence: TTC
ctcttctgttttctaaagta

SEQ ID NO: 351031 - DNA, 20 bp, Artificial Sequence
  Description of Artificial Sequence: Synthetic oligonucleotide
  Target: LAMA2; (+) strand; PAM type: YTN; PAM sequence: CTC
ttctgttttctaaagtaact

SEQ ID NO: 351032 - DNA, 20 bp, Artificial Sequence
  Description of Artificial Sequence: Synthetic oligonucleotide
  Target: LAMA2; (+) strand; PAM type: YTN; PAM sequence: CTT
ctgttttctaaagtaacttc

SEQ ID NO: 351033 - DNA, 20 bp, Artificial Sequence
  Description of Artificial Sequence: Synthetic oligonucleotide
  Target: LAMA2; (+) strand; PAM type: YTN; PAM sequence: TTC
tgttttctaaagtaacttca

SEQ ID NO: 351034 - DNA, 20 bp, Artificial Sequence
  Description of Artificial Sequence: Synthetic oligonucleotide
  Target: LAMA2; (+) strand; PAM type: YTN; PAM sequence: CTG
ttttctaaagtaacttcaga

SEQ ID NO: 351035 - DNA, 20 bp, Artificial Sequence
  Description of Artificial Sequence: Synthetic oligonucleotide
  Target: LAMA2; (+) strand; PAM type: YTN; PAM sequence: TTT
tctaaagtaacttcagatta

SEQ ID NO: 351036 - DNA, 20 bp, Artificial Sequence
  Description of Artificial Sequence: Synthetic oligonucleotide
  Target: LAMA2; (+) strand; PAM type: YTN; PAM sequence: TTT
ctaaagtaacttcagattaa

SEQ ID NO: 351037 - DNA, 20 bp, Artificial Sequence
  Description of Artificial Sequence: Synthetic oligonucleotide
  Target: LAMA2; (+) strand; PAM type: YTN; PAM sequence: TTC
taaagtaacttcagattaaa

SEQ ID NO: 351038 - DNA, 20 bp, Artificial Sequence
  Description of Artificial Sequence: Synthetic oligonucleotide
  Target: LAMA2; (+) strand; PAM type: YTN; PAM sequence: CTA
aagtaacttcagattaaaat

SEQ ID NO: 351039 - DNA, 20 bp, Artificial Sequence
  Description of Artificial Sequence: Synthetic oligonucleotide
  Target: LAMA2; (+) strand; PAM type: YTN; PAM sequence: CTT
cagattaaaattaattctct

SEQ ID NO: 351040 - DNA, 20 bp, Artificial Sequence
  Description of Artificial Sequence: Synthetic oligonucleotide
  Target: LAMA2; (+) strand; PAM type: YTN; PAM sequence: TTC
agattaaaattaattctctt

SEQ ID NO: 351041 - DNA, 20 bp, Artificial Sequence
  Description of Artificial Sequence: Synthetic oligonucleotide
  Target: LAMA2; (+) strand; PAM type: YTN; PAM sequence: TTA
aaattaattctctttaaaat

SEQ ID NO: 351042 - DNA, 20 bp, Artificial Sequence
  Description of Artificial Sequence: Synthetic oligonucleotide
  Target: LAMA2; (+) strand; PAM type: YTN; PAM sequence: TTA
attctctttaaaatgcttga

SEQ ID NO: 351043 - DNA, 20 bp, Artificial Sequence
  Description of Artificial Sequence: Synthetic oligonucleotide
  Target: LAMA2; (+) strand; PAM type: YTN; PAM sequence: TTC
tctttaaaatgcttgataaa

SEQ ID NO: 351044 - DNA, 20 bp, Artificial Sequence
  Description of Artificial Sequence: Synthetic oligonucleotide
  Target: LAMA2; (+) strand; PAM type: YTN; PAM sequence: CTC
tttaaaatgcttgataaaat

SEQ ID NO: 351045 - DNA, 20 bp, Artificial Sequence
  Description of Artificial Sequence: Synthetic oligonucleotide
  Target: LAMA2; (+) strand; PAM type: YTN; PAM sequence: CTT
taaaatgcttgataaaattt

SEQ ID NO: 351046 - DNA, 20 bp, Artificial Sequence
  Description of Artificial Sequence: Synthetic oligonucleotide
  Target: LAMA2; (+) strand; PAM type: YTN; PAM sequence: TTT
aaaatgcttgataaaatttc

SEQ ID NO: 351047 - DNA, 20 bp, Artificial Sequence
  Description of Artificial Sequence: Synthetic oligonucleotide
  Target: LAMA2; (+) strand; PAM type: YTN; PAM sequence: TTA
aaatgcttgataaaatttcc

SEQ ID NO: 351048 - DNA, 20 bp, Artificial Sequence
  Description of Artificial Sequence: Synthetic oligonucleotide
  Target: LAMA2; (+) strand; PAM type: YTN; PAM sequence: CTT
gataaaatttcctagtgaaa

SEQ ID NO: 351049 - DNA, 20 bp, Artificial Sequence
  Description of Artificial Sequence: Synthetic oligonucleotide
  Target: LAMA2; (+) strand; PAM type: YTN; PAM sequence: TTG
ataaaatttcctagtgaaac

SEQ ID NO: 351050 - DNA, 20 bp, Artificial Sequence
  Description of Artificial Sequence: Synthetic oligonucleotide
  Target: LAMA2; (+) strand; PAM type: YTN; PAM sequence: TTT
cctagtgaaactatctgagt

SEQ ID NO: 351051 - DNA, 20 bp, Artificial Sequence
  Description of Artificial Sequence: Synthetic oligonucleotide
  Target: LAMA2; (+) strand; PAM type: YTN; PAM sequence: TTC
ctagtgaaactatctgagtc

SEQ ID NO: 351052 - DNA, 20 bp, Artificial Sequence
  Description of Artificial Sequence: Synthetic oligonucleotide
  Target: LAMA2; (+) strand; PAM type: YTN; PAM sequence: CTA
gtgaaactatctgagtctct

SEQ ID NO: 351053 - DNA, 20 bp, Artificial Sequence
  Description of Artificial Sequence: Synthetic oligonucleotide
  Target: LAMA2; (+) strand; PAM type: YTN; PAM sequence: CTA
tctgagtctctagttttctt

SEQ ID NO: 351054 - DNA, 20 bp, Artificial Sequence
  Description of Artificial Sequence: Synthetic oligonucleotide
  Target: LAMA2; (+) strand; PAM type: YTN; PAM sequence: CTG
agtctctagttttcttcgtg

SEQ ID NO: 351055 - DNA, 20 bp, Artificial Sequence
  Description of Artificial Sequence: Synthetic oligonucleotide
  Target: LAMA2; (+) strand; PAM type: YTN; PAM sequence: CTC
tagttttcttcgtgcattgt

SEQ ID NO: 351056 - DNA, 20 bp, Artificial Sequence
  Description of Artificial Sequence: Synthetic oligonucleotide
  Target: LAMA2; (+) strand; PAM type: YTN; PAM sequence: CTA
gttttcttcgtgcattgtat

SEQ ID NO: 351057 - DNA, 20 bp, Artificial Sequence
  Description of Artificial Sequence: Synthetic oligonucleotide
  Target: LAMA2; (+) strand; PAM type: YTN; PAM sequence: TTT
tcttcgtgcattgtattggc

SEQ ID NO: 351058 - DNA, 20 bp, Artificial Sequence
  Description of Artificial Sequence: Synthetic oligonucleotide
  Target: LAMA2; (+) strand; PAM type: YTN; PAM sequence: TTT
cttcgtgcattgtattggct

SEQ ID NO: 351059 - DNA, 20 bp, Artificial Sequence
  Description of Artificial Sequence: Synthetic oligonucleotide
  Target: LAMA2; (+) strand; PAM type: YTN; PAM sequence: TTC
ttcgtgcattgtattggcta

SEQ ID NO: 351060 - DNA, 20 bp, Artificial Sequence
  Description of Artificial Sequence: Synthetic oligonucleotide
  Target: LAMA2; (+) strand; PAM type: YTN; PAM sequence: CTT
cgtgcattgtattggctatt

SEQ ID NO: 351061 - DNA, 20 bp, Artificial Sequence
  Description of Artificial Sequence: Synthetic oligonucleotide
  Target: LAMA2; (+) strand; PAM type: YTN; PAM sequence: TTC
gtgcattgtattggctattt

SEQ ID NO: 351062 - DNA, 20 bp, Artificial Sequence
  Description of Artificial Sequence: Synthetic oligonucleotide
  Target: LAMA2; (+) strand; PAM type: YTN; PAM sequence: TTG
tattggctattttttattag

SEQ ID NO: 351063 - DNA, 20 bp, Artificial Sequence
  Description of Artificial Sequence: Synthetic oligonucleotide
  Target: LAMA2; (+) strand; PAM type: YTN; PAM sequence: TTG
gctattttttattagacata

SEQ ID NO: 351064 - DNA, 20 bp, Artificial Sequence
  Description of Artificial Sequence: Synthetic oligonucleotide
  Target: LAMA2; (+) strand; PAM type: YTN; PAM sequence: CTA
ttttttattagacatagggt

SEQ ID NO: 351065 - DNA, 20 bp, Artificial Sequence
  Description of Artificial Sequence: Synthetic oligonucleotide
  Target: LAMA2; (+) strand; PAM type: YTN; PAM sequence: TTT
tttattagacatagggttag

SEQ ID NO: 351066 - DNA, 20 bp, Artificial Sequence
  Description of Artificial Sequence: Synthetic oligonucleotide
  Target: LAMA2; (+) strand; PAM type: YTN; PAM sequence: TTT
ttattagacatagggttaga

SEQ ID NO: 351067 - DNA, 20 bp, Artificial Sequence
  Description of Artificial Sequence: Synthetic oligonucleotide
  Target: LAMA2; (+) strand; PAM type: YTN; PAM sequence: TTT
tattagacatagggttagat

SEQ ID NO: 351068 - DNA, 20 bp, Artificial Sequence
  Description of Artificial Sequence: Synthetic oligonucleotide
  Target: LAMA2; (+) strand; PAM type: YTN; PAM sequence: TTT
attagacatagggttagata

SEQ ID NO: 351069 - DNA, 20 bp, Artificial Sequence
  Description of Artificial Sequence: Synthetic oligonucleotide
  Target: LAMA2; (+) strand; PAM type: YTN; PAM sequence: TTA
ttagacatagggttagatag

SEQ ID NO: 351070 - DNA, 20 bp, Artificial Sequence
  Description of Artificial Sequence: Synthetic oligonucleotide
  Target: LAMA2; (+) strand; PAM type: YTN; PAM sequence: TTA
gacatagggttagataggtt

SEQ ID NO: 351071 - DNA, 20 bp, Artificial Sequence
  Description of Artificial Sequence: Synthetic oligonucleotide
  Target: LAMA2; (+) strand; PAM type: YTN; PAM sequence: TTA
gataggttttgtattaatat

SEQ ID NO: 351072 - DNA, 20 bp, Artificial Sequence
  Description of Artificial Sequence: Synthetic oligonucleotide
  Target: LAMA2; (+) strand; PAM type: YTN; PAM sequence: TTT
tgtattaatatctttaggga

SEQ ID NO: 351073 - DNA, 20 bp, Artificial Sequence
  Description of Artificial Sequence: Synthetic oligonucleotide
  Target: LAMA2; (+) strand; PAM type: YTN; PAM sequence: TTT
gtattaatatctttagggag

SEQ ID NO: 351074 - DNA, 20 bp, Artificial Sequence
  Description of Artificial Sequence: Synthetic oligonucleotide
  Target: LAMA2; (+) strand; PAM type: YTN; PAM sequence: TTG
tattaatatctttagggagg

SEQ ID NO: 351075 - DNA, 20 bp, Artificial Sequence
  Description of Artificial Sequence: Synthetic oligonucleotide
  Target: LAMA2; (+) strand; PAM type: YTN; PAM sequence: TTA
atatctttagggagggtcaa

SEQ ID NO: 351076 - DNA, 20 bp, Artificial Sequence
  Description of Artificial Sequence: Synthetic oligonucleotide
  Target: LAMA2; (+) strand; PAM type: YTN; PAM sequence: CTT
tagggagggtcaatttttga

SEQ ID NO: 351077 - DNA, 20 bp, Artificial Sequence
  Description of Artificial Sequence: Synthetic oligonucleotide
  Target: LAMA2; (+) strand; PAM type: YTN; PAM sequence: TTT
agggagggtcaatttttgat

SEQ ID NO: 351078 - DNA, 20 bp, Artificial Sequence
  Description of Artificial Sequence: Synthetic oligonucleotide
  Target: LAMA2; (+) strand; PAM type: YTN; PAM sequence: TTA
gggagggtcaatttttgata

SEQ ID NO: 351079 - DNA, 20 bp, Artificial Sequence
  Description of Artificial Sequence: Synthetic oligonucleotide
  Target: LAMA2; (+) strand; PAM type: YTN; PAM sequence: TTT
ttgatatattgtatttttca

SEQ ID NO: 351080 - DNA, 20 bp, Artificial Sequence
  Description of Artificial Sequence: Synthetic oligonucleotide
  Target: LAMA2; (+) strand; PAM type: YTN; PAM sequence: TTT
tgatatattgtatttttcaa

SEQ ID NO: 351081 - DNA, 20 bp, Artificial Sequence
  Description of Artificial Sequence: Synthetic oligonucleotide
  Target: LAMA2; (+) strand; PAM type: YTN; PAM sequence: TTT
gatatattgtatttttcaag

SEQ ID NO: 351082 - DNA, 20 bp, Artificial Sequence
  Description of Artificial Sequence: Synthetic oligonucleotide
  Target: LAMA2; (+) strand; PAM type: YTN; PAM sequence: TTG
atatattgtatttttcaagt

SEQ ID NO: 351083 - DNA, 20 bp, Artificial Sequence
  Description of Artificial Sequence: Synthetic oligonucleotide
  Target: LAMA2; (+) strand; PAM type: YTN; PAM sequence: TTG
tatttttcaagtaatttgtt

SEQ ID NO: 351084 - DNA, 20 bp, Artificial Sequence
  Description of Artificial Sequence: Synthetic oligonucleotide
  Target: LAMA2; (+) strand; PAM type: YTN; PAM sequence: TTT
ttcaagtaatttgttcaatt

SEQ ID NO: 351085 - DNA, 20 bp, Artificial Sequence
  Description of Artificial Sequence: Synthetic oligonucleotide
  Target: LAMA2; (+) strand; PAM type: YTN; PAM sequence: TTT
tcaagtaatttgttcaattc

SEQ ID NO: 351086 - DNA, 20 bp, Artificial Sequence
  Description of Artificial Sequence: Synthetic oligonucleotide
  Target: LAMA2; (+) strand; PAM type: YTN; PAM sequence: TTT
caagtaatttgttcaattca

SEQ ID NO: 351087 - DNA, 20 bp, Artificial Sequence
  Description of Artificial Sequence: Synthetic oligonucleotide
  Target: LAMA2; (+) strand; PAM type: YTN; PAM sequence: TTC
aagtaatttgttcaattcat

SEQ ID NO: 351088 - DNA, 20 bp, Artificial Sequence
  Description of Artificial Sequence: Synthetic oligonucleotide
  Target: LAMA2; (+) strand; PAM type: YTN; PAM sequence: TTT
gttcaattcatctaaattgt

SEQ ID NO: 351089 - DNA, 20 bp, Artificial Sequence
  Description of Artificial Sequence: Synthetic oligonucleotide
  Target: LAMA2; (+) strand; PAM type: YTN; PAM sequence: TTG
ttcaattcatctaaattgtc

SEQ ID NO: 351090 - DNA, 20 bp, Artificial Sequence
  Description of Artificial Sequence: Synthetic oligonucleotide
  Target: LAMA2; (+) strand; PAM type: YTN; PAM sequence: TTC
aattcatctaaattgtcaaa

SEQ ID NO: 351091 - DNA, 20 bp, Artificial Sequence
  Description of Artificial Sequence: Synthetic oligonucleotide
  Target: LAMA2; (+) strand; PAM type: YTN; PAM sequence: TTC
atctaaattgtcaaatcatt

SEQ ID NO: 351092 - DNA, 20 bp, Artificial Sequence
  Description of Artificial Sequence: Synthetic oligonucleotide
  Target: LAMA2; (+) strand; PAM type: YTN; PAM sequence: CTA
aattgtcaaatcattggcaa

SEQ ID NO: 351093 - DNA, 20 bp, Artificial Sequence
  Description of Artificial Sequence: Synthetic oligonucleotide
  Target: LAMA2; (+) strand; PAM type: YTN; PAM sequence: TTG
tcaaatcattggcaattggc

SEQ ID NO: 351094 - DNA, 20 bp, Artificial Sequence
  Description of Artificial Sequence: Synthetic oligonucleotide
  Target: LAMA2; (+) strand; PAM type: YTN; PAM sequence: TTG
gcaattggcagttttaaaaa

SEQ ID NO: 351095 - DNA, 20 bp, Artificial Sequence
  Description of Artificial Sequence: Synthetic oligonucleotide
  Target: LAMA2; (+) strand; PAM type: YTN; PAM sequence: TTG
gcagttttaaaaattgcctt

SEQ ID NO: 351096 - DNA, 20 bp, Artificial Sequence
  Description of Artificial Sequence: Synthetic oligonucleotide
  Target: LAMA2; (+) strand; PAM type: YTN; PAM sequence: TTT
taaaaattgccttattatct

SEQ ID NO: 351097 - DNA, 20 bp, Artificial Sequence
  Description of Artificial Sequence: Synthetic oligonucleotide
  Target: LAMA2; (+) strand; PAM type: YTN; PAM sequence: TTT
aaaaattgccttattatctt

SEQ ID NO: 351098 - DNA, 20 bp, Artificial Sequence
  Description of Artificial Sequence: Synthetic oligonucleotide
  Target: LAMA2; (+) strand; PAM type: YTN; PAM sequence: TTA
aaaattgccttattatcttc

SEQ ID NO: 351099 - DNA, 20 bp, Artificial Sequence
  Description of Artificial Sequence: Synthetic oligonucleotide
  Target: LAMA2; (+) strand; PAM type: YTN; PAM sequence: TTG
ccttattatcttcttgaagt

SEQ ID NO: 351100 - DNA, 20 bp, Artificial Sequence
  Description of Artificial Sequence: Synthetic oligonucleotide
  Target: LAMA2; (+) strand; PAM type: YTN; PAM sequence: CTT
attatcttcttgaagtctat

SEQ ID NO: 351101 - DNA, 20 bp, Artificial Sequence
  Description of Artificial Sequence: Synthetic oligonucleotide
  Target: LAMA2; (+) strand; PAM type: YTN; PAM sequence: TTA
ttatcttcttgaagtctata

SEQ ID NO: 351102 - DNA, 20 bp, Artificial Sequence
  Description of Artificial Sequence: Synthetic oligonucleotide
  Target: LAMA2; (+) strand; PAM type: YTN; PAM sequence: TTA
tcttcttgaagtctatagca

SEQ ID NO: 351103 - DNA, 20 bp, Artificial Sequence
  Description of Artificial Sequence: Synthetic oligonucleotide
  Target: LAMA2; (+) strand; PAM type: YTN; PAM sequence: CTT
cttgaagtctatagcatcta

SEQ ID NO: 351104 - DNA, 20 bp, Artificial Sequence
  Description of Artificial Sequence: Synthetic oligonucleotide
  Target: LAMA2; (+) strand; PAM type: YTN; PAM sequence: TTC
ttgaagtctatagcatctat

SEQ ID NO: 351105 - DNA, 20 bp, Artificial Sequence
  Description of Artificial Sequence: Synthetic oligonucleotide
  Target: LAMA2; (+) strand; PAM type: YTN; PAM sequence: CTT
gaagtctatagcatctatat

SEQ ID NO: 351106 - DNA, 20 bp, Artificial Sequence
  Description of Artificial Sequence: Synthetic oligonucleotide
  Target: LAMA2; (+) strand; PAM type: YTN; PAM sequence: TTG
aagtctatagcatctatata

SEQ ID NO: 351107 - DNA, 20 bp, Artificial Sequence
  Description of Artificial Sequence: Synthetic oligonucleotide
  Target: LAMA2; (+) strand; PAM type: YTN; PAM sequence: CTA
tagcatctatatagatatcc

SEQ ID NO: 351108 - DNA, 20 bp, Artificial Sequence
  Description of Artificial Sequence: Synthetic oligonucleotide
  Target: LAMA2; (+) strand; PAM type: YTN; PAM sequence: CTA
tatagatatcccctgtgtaa

SEQ ID NO: 351109 - DNA, 20 bp, Artificial Sequence
  Description of Artificial Sequence: Synthetic oligonucleotide
  Target: LAMA2; (+) strand; PAM type: YTN; PAM sequence: CTG
tgtaatttttaaaatgatta

SEQ ID NO: 351110 - DNA, 20 bp, Artificial Sequence
  Description of Artificial Sequence: Synthetic oligonucleotide
  Target: LAMA2; (+) strand; PAM type: YTN; PAM sequence: TTT
ttaaaatgattaagttgtgc

SEQ ID NO: 351111 - DNA, 20 bp, Artificial Sequence
  Description of Artificial Sequence: Synthetic oligonucleotide
  Target: LAMA2; (+) strand; PAM type: YTN; PAM sequence: TTT
taaaatgattaagttgtgct

SEQ ID NO: 351112 - DNA, 20 bp, Artificial Sequence
  Description of Artificial Sequence: Synthetic oligonucleotide
  Target: LAMA2; (+) strand; PAM type: YTN; PAM sequence: TTT
aaaatgattaagttgtgctt

SEQ ID NO: 351113 - DNA, 20 bp, Artificial Sequence
  Description of Artificial Sequence: Synthetic oligonucleotide
  Target: LAMA2; (+) strand; PAM type: YTN; PAM sequence: TTA
aaatgattaagttgtgcttt

SEQ ID NO: 351114 - DNA, 20 bp, Artificial Sequence
  Description of Artificial Sequence: Synthetic oligonucleotide
  Target: LAMA2; (+) strand; PAM type: YTN; PAM sequence: TTA
agttgtgcttttctcctttt

SEQ ID NO: 351115 - DNA, 20 bp, Artificial Sequence
  Description of Artificial Sequence: Synthetic oligonucleotide
  Target: LAMA2; (+) strand; PAM type: YTN; PAM sequence: TTG
tgcttttctccttttattga

SEQ ID NO: 351116 - DNA, 20 bp, Artificial Sequence
  Description of Artificial Sequence: Synthetic oligonucleotide
  Target: LAMA2; (+) strand; PAM type: YTN; PAM sequence: CTT
ttctccttttattgatcact

SEQ ID NO: 351117 - DNA, 20 bp, Artificial Sequence
  Description of Artificial Sequence: Synthetic oligonucleotide
  Target: LAMA2; (+) strand; PAM type: YTN; PAM sequence: TTT
tctccttttattgatcactt

SEQ ID NO: 351118 - DNA, 20 bp, Artificial Sequence
  Description of Artificial Sequence: Synthetic oligonucleotide
  Target: LAMA2; (+) strand; PAM type: YTN; PAM sequence: TTT
ctccttttattgatcactta

SEQ ID NO: 351119 - DNA, 20 bp, Artificial Sequence
  Description of Artificial Sequence: Synthetic oligonucleotide
  Target: LAMA2; (+) strand; PAM type: YTN; PAM sequence: TTC
tccttttattgatcacttat

SEQ ID NO: 351120 - DNA, 20 bp, Artificial Sequence
  Description of Artificial Sequence: Synthetic oligonucleotide
  Target: LAMA2; (+) strand; PAM type: YTN; PAM sequence: CTC
cttttattgatcacttatgt

SEQ ID NO: 351121 - DNA, 20 bp, Artificial Sequence
  Description of Artificial Sequence: Synthetic oligonucleotide
  Target: LAMA2; (+) strand; PAM type: YTN; PAM sequence: CTT
ttattgatcacttatgttag

SEQ ID NO: 351122 - DNA, 20 bp, Artificial Sequence
  Description of Artificial Sequence: Synthetic oligonucleotide
  Target: LAMA2; (+) strand; PAM type: YTN; PAM sequence: TTT
tattgatcacttatgttagg

SEQ ID NO: 351123 - DNA, 20 bp, Artificial Sequence
  Description of Artificial Sequence: Synthetic oligonucleotide
  Target: LAMA2; (+) strand; PAM type: YTN; PAM sequence: TTT
attgatcacttatgttaggg

SEQ ID NO: 351124 - DNA, 20 bp, Artificial Sequence
  Description of Artificial Sequence: Synthetic oligonucleotide
  Target: LAMA2; (+) strand; PAM type: YTN; PAM sequence: TTA
ttgatcacttatgttagggg

SEQ ID NO: 351125 - DNA, 20 bp, Artificial Sequence
  Description of Artificial Sequence: Synthetic oligonucleotide
  Target: LAMA2; (+) strand; PAM type: YTN; PAM sequence: TTG
atcacttatgttaggggttt

SEQ ID NO: 351126 - DNA, 20 bp, Artificial Sequence
  Description of Artificial Sequence: Synthetic oligonucleotide
  Target: LAMA2; (+) strand; PAM type: YTN; PAM sequence: CTT
atgttaggggtttatcaatt

SEQ ID NO: 351127 - DNA, 20 bp, Artificial Sequence
  Description of Artificial Sequence: Synthetic oligonucleotide
  Target: LAMA2; (+) strand; PAM type: YTN; PAM sequence: TTA
tgttaggggtttatcaattt

SEQ ID NO: 351128 - DNA, 20 bp, Artificial Sequence
  Description of Artificial Sequence: Synthetic oligonucleotide
  Target: LAMA2; (+) strand; PAM type: YTN; PAM sequence: TTA
ggggtttatcaattttccta

SEQ ID NO: 351129 - DNA, 20 bp, Artificial Sequence
  Description of Artificial Sequence: Synthetic oligonucleotide
  Target: LAMA2; (+) strand; PAM type: YTN; PAM sequence: TTT
atcaattttcctaatctttt

SEQ ID NO: 351130 - DNA, 20 bp, Artificial Sequence
  Description of Artificial Sequence: Synthetic oligonucleotide
  Target: LAMA2; (+) strand; PAM type: YTN; PAM sequence: TTA
tcaattttcctaatcttttc

SEQ ID NO: 351131 - DNA, 20 bp, Artificial Sequence
  Description of Artificial Sequence: Synthetic oligonucleotide
  Target: LAMA2; (+) strand; PAM type: YTN; PAM sequence: TTT
tcctaatcttttccaaaaaa

SEQ ID NO: 351132 - DNA, 20 bp, Artificial Sequence
  Description of Artificial Sequence: Synthetic oligonucleotide
  Target: LAMA2; (+) strand; PAM type: YTN; PAM sequence: TTT
cctaatcttttccaaaaaaa

SEQ ID NO: 351133 - DNA, 20 bp, Artificial Sequence
  Description of Artificial Sequence: Synthetic oligonucleotide
  Target: LAMA2; (+) strand; PAM type: YTN; PAM sequence: TTC
ctaatcttttccaaaaaaac

SEQ ID NO: 351134 - DNA, 20 bp, Artificial Sequence
  Description of Artificial Sequence: Synthetic oligonucleotide
  Target: LAMA2; (+) strand; PAM type: YTN; PAM sequence: CTA
atcttttccaaaaaaacttc

SEQ ID NO: 351135 - DNA, 20 bp, Artificial Sequence
  Description of Artificial Sequence: Synthetic oligonucleotide
  Target: LAMA2; (+) strand; PAM type: YTN; PAM sequence: CTT
ttccaaaaaaacttctgcct

SEQ ID NO: 351136 - DNA, 20 bp, Artificial Sequence
  Description of Artificial Sequence: Synthetic oligonucleotide
  Target: LAMA2; (+) strand; PAM type: YTN; PAM sequence: TTT
tccaaaaaaacttctgcctt

SEQ ID NO: 351137 - DNA, 20 bp, Artificial Sequence
  Description of Artificial Sequence: Synthetic oligonucleotide
  Target: LAMA2; (+) strand; PAM type: YTN; PAM sequence: TTT
ccaaaaaaacttctgccttt

SEQ ID NO: 351138 - DNA, 20 bp, Artificial Sequence
  Description of Artificial Sequence: Synthetic oligonucleotide
  Target: LAMA2; (+) strand; PAM type: YTN; PAM sequence: TTC
caaaaaaacttctgcctttt

SEQ ID NO: 351139 - DNA, 20 bp, Artificial Sequence
  Description of Artificial Sequence: Synthetic oligonucleotide
  Target: LAMA2; (+) strand; PAM type: YTN; PAM sequence: CTT
ctgcctttttattttttgtg

SEQ ID NO: 351140 - DNA, 20 bp, Artificial Sequence
  Description of Artificial Sequence: Synthetic oligonucleotide
  Target: LAMA2; (+) strand; PAM type: YTN; PAM sequence: TTC
tgcctttttattttttgtgt

SEQ ID NO: 351141 - DNA, 20 bp, Artificial Sequence
  Description of Artificial Sequence: Synthetic oligonucleotide
  Target: LAMA2; (+) strand; PAM type: YTN; PAM sequence: CTG
cctttttattttttgtgttt

SEQ ID NO: 351142 - DNA, 20 bp, Artificial Sequence
  Description of Artificial Sequence: Synthetic oligonucleotide
  Target: LAMA2; (+) strand; PAM type: YTN; PAM sequence: CTT
tttattttttgtgtttttat

SEQ ID NO: 351143 - DNA, 20 bp, Artificial Sequence
  Description of Artificial Sequence: Synthetic oligonucleotide
  Target: LAMA2; (+) strand; PAM type: YTN; PAM sequence: TTT
ttattttttgtgtttttatt

SEQ ID NO: 351144 - DNA, 20 bp, Artificial Sequence
  Description of Artificial Sequence: Synthetic oligonucleotide
  Target: LAMA2; (+) strand; PAM type: YTN; PAM sequence: TTT
tattttttgtgtttttattg

SEQ ID NO: 351145 - DNA, 20 bp, Artificial Sequence
  Description of Artificial Sequence: Synthetic oligonucleotide
  Target: LAMA2; (+) strand; PAM type: YTN; PAM sequence: TTT
attttttgtgtttttattga

SEQ ID NO: 351146 - DNA, 20 bp, Artificial Sequence
  Description of Artificial Sequence: Synthetic oligonucleotide
  Target: LAMA2; (+) strand; PAM type: YTN; PAM sequence: TTA
ttttttgtgtttttattgat

SEQ ID NO: 351147 - DNA, 20 bp, Artificial Sequence
  Description of Artificial Sequence: Synthetic oligonucleotide
  Target: LAMA2; (+) strand; PAM type: YTN; PAM sequence: TTT
tttgtgtttttattgattct

SEQ ID NO: 351148 - DNA, 20 bp, Artificial Sequence
  Description of Artificial Sequence: Synthetic oligonucleotide
  Target: LAMA2; (+) strand; PAM type: YTN; PAM sequence: TTT
ttgtgtttttattgattctg

SEQ ID NO: 351149 - DNA, 20 bp, Artificial Sequence
  Description of Artificial Sequence: Synthetic oligonucleotide
  Target: LAMA2; (+) strand; PAM type: YTN; PAM sequence: TTT
tgtgtttttattgattctgt

SEQ ID NO: 351150 - DNA, 20 bp, Artificial Sequence
  Description of Artificial Sequence: Synthetic oligonucleotide
  Target: LAMA2; (+) strand; PAM type: YTN; PAM sequence: TTT
gtgtttttattgattctgtt

SEQ ID NO: 351151 - DNA, 20 bp, Artificial Sequence
  Description of Artificial Sequence: Synthetic oligonucleotide
  Target: LAMA2; (+) strand; PAM type: YTN; PAM sequence: TTG
tgtttttattgattctgttc

SEQ ID NO: 351152 - DNA, 20 bp, Artificial Sequence
  Description of Artificial Sequence: Synthetic oligonucleotide
  Target: LAMA2; (+) strand; PAM type: YTN; PAM sequence: TTT
ttattgattctgttctattt

SEQ ID NO: 351153 - DNA, 20 bp, Artificial Sequence
  Description of Artificial Sequence: Synthetic oligonucleotide
  Target: LAMA2; (+) strand; PAM type: YTN; PAM sequence: TTT
tattgattctgttctattta

SEQ ID NO: 351154 - DNA, 20 bp, Artificial Sequence
  Description of Artificial Sequence: Synthetic oligonucleotide
  Target: LAMA2; (+) strand; PAM type: YTN; PAM sequence: TTT
attgattctgttctatttat

SEQ ID NO: 351155 - DNA, 20 bp, Artificial Sequence
  Description of Artificial Sequence: Synthetic oligonucleotide
  Target: LAMA2; (+) strand; PAM type: YTN; PAM sequence: TTA
ttgattctgttctatttatt

SEQ ID NO: 351156 - DNA, 20 bp, Artificial Sequence
  Description of Artificial Sequence: Synthetic oligonucleotide
  Target: LAMA2; (+) strand; PAM type: YTN; PAM sequence: TTG
attctgttctatttattata

SEQ ID NO: 351157 - DNA, 20 bp, Artificial Sequence
  Description of Artificial Sequence: Synthetic oligonucleotide
  Target: LAMA2; (+) strand; PAM type: YTN; PAM sequence: TTC
tgttctatttattatattat

SEQ ID NO: 351158 - DNA, 20 bp, Artificial Sequence
  Description of Artificial Sequence: Synthetic oligonucleotide
  Target: LAMA2; (+) strand; PAM type: YTN; PAM sequence: CTG
ttctatttattatattattc

SEQ ID NO: 351159 - DNA, 20 bp, Artificial Sequence
  Description of Artificial Sequence: Synthetic oligonucleotide
  Target: LAMA2; (+) strand; PAM type: YTN; PAM sequence: TTC
tatttattatattattcatt

SEQ ID NO: 351160 - DNA, 20 bp, Artificial Sequence
  Description of Artificial Sequence: Synthetic oligonucleotide
  Target: LAMA2; (+) strand; PAM type: YTN; PAM sequence: CTA
tttattatattattcatttg

SEQ ID NO: 351161 - DNA, 20 bp, Artificial Sequence
  Description of Artificial Sequence: Synthetic oligonucleotide
  Target: LAMA2; (+) strand; PAM type: YTN; PAM sequence: TTT
attatattattcatttgacc

SEQ ID NO: 351162 - DNA, 20 bp, Artificial Sequence
  Description of Artificial Sequence: Synthetic oligonucleotide
  Target: LAMA2; (+) strand; PAM type: YTN; PAM sequence: TTA
ttatattattcatttgacct

SEQ ID NO: 351163 - DNA, 20 bp, Artificial Sequence
  Description of Artificial Sequence: Synthetic oligonucleotide
  Target: LAMA2; (+) strand; PAM type: YTN; PAM sequence: TTA
tattattcatttgacctgtt

SEQ ID NO: 351164 - DNA, 20 bp, Artificial Sequence
  Description of Artificial Sequence: Synthetic oligonucleotide
  Target: LAMA2; (+) strand; PAM type: YTN; PAM sequence: TTA
ttcatttgacctgttttggt

SEQ ID NO: 351165 - DNA, 20 bp, Artificial Sequence
  Description of Artificial Sequence: Synthetic oligonucleotide
  Target: LAMA2; (+) strand; PAM type: YTN; PAM sequence: TTC
atttgacctgttttggtttt

SEQ ID NO: 351166 - DNA, 20 bp, Artificial Sequence
  Description of Artificial Sequence: Synthetic oligonucleotide
  Target: LAMA2; (+) strand; PAM type: YTN; PAM sequence: TTT
gacctgttttggttttaaat

SEQ ID NO: 351167 - DNA, 20 bp, Artificial Sequence
  Description of Artificial Sequence: Synthetic oligonucleotide
  Target: LAMA2; (+) strand; PAM type: YTN; PAM sequence: TTG
acctgttttggttttaaatt

SEQ ID NO: 351168 - DNA, 20 bp, Artificial Sequence
  Description of Artificial Sequence: Synthetic oligonucleotide
  Target: LAMA2; (+) strand; PAM type: YTN; PAM sequence: CTG
ttttggttttaaatttcatt

SEQ ID NO: 351169 - DNA, 20 bp, Artificial Sequence
  Description of Artificial Sequence: Synthetic oligonucleotide
  Target: LAMA2; (+) strand; PAM type: YTN; PAM sequence: TTT
tggttttaaatttcattttc

SEQ ID NO: 351170 - DNA, 20 bp, Artificial Sequence
  Description of Artificial Sequence: Synthetic oligonucleotide
  Target: LAMA2; (+) strand; PAM type: YTN; PAM sequence: TTT
ggttttaaatttcattttct

SEQ ID NO: 351171 - DNA, 20 bp, Artificial Sequence
  Description of Artificial Sequence: Synthetic oligonucleotide
  Target: LAMA2; (+) strand; PAM type: YTN; PAM sequence: TTG
gttttaaatttcattttctt

SEQ ID NO: 351172 - DNA, 20 bp, Artificial Sequence
  Description of Artificial Sequence: Synthetic oligonucleotide
  Target: LAMA2; (+) strand; PAM type: YTN; PAM sequence: TTT
taaatttcattttctttttc

SEQ ID NO: 351173 - DNA, 20 bp, Artificial Sequence
  Description of Artificial Sequence: Synthetic oligonucleotide
  Target: LAMA2; (+) strand; PAM type: YTN; PAM sequence: TTT
aaatttcattttctttttct

SEQ ID NO: 351174 - DNA, 20 bp, Artificial Sequence
  Description of Artificial Sequence: Synthetic oligonucleotide
  Target: LAMA2; (+) strand; PAM type: YTN; PAM sequence: TTA
aatttcattttctttttcta

SEQ ID NO: 351175 - DNA, 20 bp, Artificial Sequence
  Description of Artificial Sequence: Synthetic oligonucleotide
  Target: LAMA2; (+) strand; PAM type: YTN; PAM sequence: TTT
cattttctttttctacctat

SEQ ID NO: 351176 - DNA, 20 bp, Artificial Sequence
  Description of Artificial Sequence: Synthetic oligonucleotide
  Target: LAMA2; (+) strand; PAM type: YTN; PAM sequence: TTC
attttctttttctacctatc

SEQ ID NO: 351177 - DNA, 20 bp, Artificial Sequence
  Description of Artificial Sequence: Synthetic oligonucleotide
  Target: LAMA2; (+) strand; PAM type: YTN; PAM sequence: TTT
tctttttctacctatcaatt

SEQ ID NO: 351178 - DNA, 20 bp, Artificial Sequence
  Description of Artificial Sequence: Synthetic oligonucleotide
  Target: LAMA2; (+) strand; PAM type: YTN; PAM sequence: TTT
ctttttctacctatcaattt

SEQ ID NO: 351179 - DNA, 20 bp, Artificial Sequence
  Description of Artificial Sequence: Synthetic oligonucleotide
  Target: LAMA2; (+) strand; PAM type: YTN; PAM sequence: TTC
tttttctacctatcaatttg

SEQ ID NO: 351180 - DNA, 20 bp, Artificial Sequence
  Description of Artificial Sequence: Synthetic oligonucleotide
  Target: LAMA2; (+) strand; PAM type: YTN; PAM sequence: CTT
tttctacctatcaatttgga

SEQ ID NO: 351181 - DNA, 20 bp, Artificial Sequence
  Description of Artificial Sequence: Synthetic oligonucleotide
  Target: LAMA2; (+) strand; PAM type: YTN; PAM sequence: TTT
ttctacctatcaatttggaa

SEQ ID NO: 351182 - DNA, 20 bp, Artificial Sequence
  Description of Artificial Sequence: Synthetic oligonucleotide
  Target: LAMA2; (+) strand; PAM type: YTN; PAM sequence: TTT
tctacctatcaatttggaaa

SEQ ID NO: 351183 - DNA, 20 bp, Artificial Sequence
  Description of Artificial Sequence: Synthetic oligonucleotide
  Target: LAMA2; (+) strand; PAM type: YTN; PAM sequence: TTT
ctacctatcaatttggaaag

SEQ ID NO: 351184 - DNA, 20 bp, Artificial Sequence
  Description of Artificial Sequence: Synthetic oligonucleotide
  Target: LAMA2; (+) strand; PAM type: YTN; PAM sequence: TTC
tacctatcaatttggaaagt

SEQ ID NO: 351185 - DNA, 20 bp, Artificial Sequence
  Description of Artificial Sequence: Synthetic oligonucleotide
  Target: LAMA2; (+) strand; PAM type: YTN; PAM sequence: CTA
cctatcaatttggaaagtta

SEQ ID NO: 351186 - DNA, 20 bp, Artificial Sequence
  Description of Artificial Sequence: Synthetic oligonucleotide
  Target: LAMA2; (+) strand; PAM type: YTN; PAM sequence: CTA
tcaatttggaaagttaaatt

SEQ ID NO: 351187 - DNA, 20 bp, Artificial Sequence
  Description of Artificial Sequence: Synthetic oligonucleotide
  Target: LAMA2; (+) strand; PAM type: YTN; PAM sequence: TTT
ggaaagttaaattatgattt

SEQ ID NO: 351188 - DNA, 20 bp, Artificial Sequence
  Description of Artificial Sequence: Synthetic oligonucleotide
  Target: LAMA2; (+) strand; PAM type: YTN; PAM sequence: TTG
gaaagttaaattatgatttt

SEQ ID NO: 351189 - DNA, 20 bp, Artificial Sequence
  Description of Artificial Sequence: Synthetic oligonucleotide
  Target: LAMA2; (+) strand; PAM type: YTN; PAM sequence: TTA
aattatgattttacaccttt

SEQ ID NO: 351190 - DNA, 20 bp, Artificial Sequence
  Description of Artificial Sequence: Synthetic oligonucleotide
  Target: LAMA2; (+) strand; PAM type: YTN; PAM sequence: TTA
tgattttacacctttcttct

SEQ ID NO: 351191 - DNA, 20 bp, Artificial Sequence
  Description of Artificial Sequence: Synthetic oligonucleotide
  Target: LAMA2; (+) strand; PAM type: YTN; PAM sequence: TTT
tacacctttcttcttttatc

SEQ ID NO: 351192 - DNA, 20 bp, Artificial Sequence
  Description of Artificial Sequence: Synthetic oligonucleotide
  Target: LAMA2; (+) strand; PAM type: YTN; PAM sequence: TTT
acacctttcttcttttatca

SEQ ID NO: 351193 - DNA, 20 bp, Artificial Sequence
  Description of Artificial Sequence: Synthetic oligonucleotide
  Target: LAMA2; (+) strand; PAM type: YTN; PAM sequence: TTA
cacctttcttcttttatcat

SEQ ID NO: 351194 - DNA, 20 bp, Artificial Sequence
  Description of Artificial Sequence: Synthetic oligonucleotide
  Target: LAMA2; (+) strand; PAM type: YTN; PAM sequence: CTT
tcttcttttatcatataaac

SEQ ID NO: 351195 - DNA, 20 bp, Artificial Sequence
  Description of Artificial Sequence: Synthetic oligonucleotide
  Target: LAMA2; (+) strand; PAM type: YTN; PAM sequence: TTT
cttcttttatcatataaact

SEQ ID NO: 351196 - DNA, 20 bp, Artificial Sequence
  Description of Artificial Sequence: Synthetic oligonucleotide
  Target: LAMA2; (+) strand; PAM type: YTN; PAM sequence: TTC
ttcttttatcatataaactt

SEQ ID NO: 351197 - DNA, 20 bp, Artificial Sequence
  Description of Artificial Sequence: Synthetic oligonucleotide
  Target: LAMA2; (+) strand; PAM type: YTN; PAM sequence: CTT
cttttatcatataaactttt

SEQ ID NO: 351198 - DNA, 20 bp, Artificial Sequence
  Description of Artificial Sequence: Synthetic oligonucleotide
  Target: LAMA2; (+) strand; PAM type: YTN; PAM sequence: TTC
ttttatcatataaactttta

SEQ ID NO: 351199 - DNA, 20 bp, Artificial Sequence
  Description of Artificial Sequence: Synthetic oligonucleotide
  Target: LAMA2; (+) strand; PAM type: YTN; PAM sequence: CTT
ttatcatataaacttttaaa

SEQ ID NO: 351200 - DNA, 20 bp, Artificial Sequence
  Description of Artificial Sequence: Synthetic oligonucleotide
  Target: LAMA2; (+) strand; PAM type: YTN; PAM sequence: TTT
tatcatataaacttttaaat

SEQ ID NO: 351201 - DNA, 20 bp, Artificial Sequence
  Description of Artificial Sequence: Synthetic oligonucleotide
  Target: LAMA2; (+) strand; PAM type: YTN; PAM sequence: TTT
atcatataaacttttaaata

SEQ ID NO: 351202 - DNA, 20 bp, Artificial Sequence
  Description of Artificial Sequence: Synthetic oligonucleotide
  Target: LAMA2; (+) strand; PAM type: YTN; PAM sequence: TTA
tcatataaacttttaaatat

SEQ ID NO: 351203 - DNA, 20 bp, Artificial Sequence
  Description of Artificial Sequence: Synthetic oligonucleotide
  Target: LAMA2; (+) strand; PAM type: YTN; PAM sequence: CTT
ttaaatatagatttccttct

SEQ ID NO: 351204 - DNA, 20 bp, Artificial Sequence
  Description of Artificial Sequence: Synthetic oligonucleotide
  Target: LAMA2; (+) strand; PAM type: YTN; PAM sequence: TTT
taaatatagatttccttcta

SEQ ID NO: 351205 - DNA, 20 bp, Artificial Sequence
  Description of Artificial Sequence: Synthetic oligonucleotide
  Target: LAMA2; (+) strand; PAM type: YTN; PAM sequence: TTT
aaatatagatttccttctag

SEQ ID NO: 351206 - DNA, 20 bp, Artificial Sequence
  Description of Artificial Sequence: Synthetic oligonucleotide
  Target: LAMA2; (+) strand; PAM type: YTN; PAM sequence: TTA
aatatagatttccttctagc

SEQ ID NO: 351207 - DNA, 20 bp, Artificial Sequence
  Description of Artificial Sequence: Synthetic oligonucleotide
  Target: LAMA2; (+) strand; PAM type: YTN; PAM sequence: TTT
ccttctagcagttctttagc

SEQ ID NO: 351208 - DNA, 20 bp, Artificial Sequence
  Description of Artificial Sequence: Synthetic oligonucleotide
  Target: LAMA2; (+) strand; PAM type: YTN; PAM sequence: TTC
cttctagcagttctttagct

SEQ ID NO: 351209 - DNA, 20 bp, Artificial Sequence
  Description of Artificial Sequence: Synthetic oligonucleotide
  Target: LAMA2; (+) strand; PAM type: YTN; PAM sequence: CTT
ctagcagttctttagctgtt

SEQ ID NO: 351210 - DNA, 20 bp, Artificial Sequence
  Description of Artificial Sequence: Synthetic oligonucleotide
  Target: LAMA2; (+) strand; PAM type: YTN; PAM sequence: TTC
tagcagttctttagctgttt

SEQ ID NO: 351211 - DNA, 20 bp, Artificial Sequence
  Description of Artificial Sequence: Synthetic oligonucleotide
  Target: LAMA2; (+) strand; PAM type: YTN; PAM sequence: CTA
gcagttctttagctgtttct

SEQ ID NO: 351212 - DNA, 20 bp, Artificial Sequence
  Description of Artificial Sequence: Synthetic oligonucleotide
  Target: LAMA2; (+) strand; PAM type: YTN; PAM sequence: TTC
tttagctgtttctcatgaat

SEQ ID NO: 351213 - DNA, 20 bp, Artificial Sequence
  Description of Artificial Sequence: Synthetic oligonucleotide
  Target: LAMA2; (+) strand; PAM type: YTN; PAM sequence: CTT
tagctgtttctcatgaattc

SEQ ID NO: 351214 - DNA, 20 bp, Artificial Sequence
  Description of Artificial Sequence: Synthetic oligonucleotide
  Target: LAMA2; (+) strand; PAM type: YTN; PAM sequence: TTT
agctgtttctcatgaattca

SEQ ID NO: 351215 - DNA, 20 bp, Artificial Sequence
  Description of Artificial Sequence: Synthetic oligonucleotide
  Target: LAMA2; (+) strand; PAM type: YTN; PAM sequence: TTA
gctgtttctcatgaattcag

SEQ ID NO: 351216 - DNA, 20 bp, Artificial Sequence
  Description of Artificial Sequence: Synthetic oligonucleotide
  Target: LAMA2; (+) strand; PAM type: YTN; PAM sequence: CTG
tttctcatgaattcaggaat

SEQ ID NO: 351217 - DNA, 20 bp, Artificial Sequence
  Description of Artificial Sequence: Synthetic oligonucleotide
  Target: LAMA2; (+) strand; PAM type: YTN; PAM sequence: TTT
ctcatgaattcaggaatgct

SEQ ID NO: 351218 - DNA, 20 bp, Artificial Sequence
  Description of Artificial Sequence: Synthetic oligonucleotide
  Target: LAMA2; (+) strand; PAM type: YTN; PAM sequence: TTC
tcatgaattcaggaatgctt

SEQ ID NO: 351219 - DNA, 20 bp, Artificial Sequence
  Description of Artificial Sequence: Synthetic oligonucleotide
  Target: LAMA2; (+) strand; PAM type: YTN; PAM sequence: CTC
atgaattcaggaatgcttta

SEQ ID NO: 351220 - DNA, 20 bp, Artificial Sequence
  Description of Artificial Sequence: Synthetic oligonucleotide
  Target: LAMA2; (+) strand; PAM type: YTN; PAM sequence: TTC
aggaatgctttatgttcatt

SEQ ID NO: 351221 - DNA, 20 bp, Artificial Sequence
  Description of Artificial Sequence: Synthetic oligonucleotide
  Target: LAMA2; (+) strand; PAM type: YTN; PAM sequence: CTT
tatgttcattgtcatttatt

SEQ ID NO: 351222 - DNA, 20 bp, Artificial Sequence
  Description of Artificial Sequence: Synthetic oligonucleotide
  Target: LAMA2; (+) strand; PAM type: YTN; PAM sequence: TTT
atgttcattgtcatttattt

SEQ ID NO: 351223 - DNA, 20 bp, Artificial Sequence
  Description of Artificial Sequence: Synthetic oligonucleotide
  Target: LAMA2; (+) strand; PAM type: YTN; PAM sequence: TTA
tgttcattgtcatttattta

SEQ ID NO: 351224 - DNA, 20 bp, Artificial Sequence
  Description of Artificial Sequence: Synthetic oligonucleotide
  Target: LAMA2; (+) strand; PAM type: YTN; PAM sequence: TTC
attgtcatttatttaacata

SEQ ID NO: 351225 - DNA, 20 bp, Artificial Sequence
  Description of Artificial Sequence: Synthetic oligonucleotide
  Target: LAMA2; (+) strand; PAM type: YTN; PAM sequence: TTG
tcatttatttaacataactt

SEQ ID NO: 351226 - DNA, 20 bp, Artificial Sequence
  Description of Artificial Sequence: Synthetic oligonucleotide
  Target: LAMA2; (+) strand; PAM type: YTN; PAM sequence: TTT
atttaacataacttctaatt

SEQ ID NO: 351227 - DNA, 20 bp, Artificial Sequence
  Description of Artificial Sequence: Synthetic oligonucleotide
  Target: LAMA2; (+) strand; PAM type: YTN; PAM sequence: TTA
tttaacataacttctaattt

SEQ ID NO: 351228 - DNA, 20 bp, Artificial Sequence
  Description of Artificial Sequence: Synthetic oligonucleotide
  Target: LAMA2; (+) strand; PAM type: YTN; PAM sequence: TTT
aacataacttctaatttctc

SEQ ID NO: 351229 - DNA, 20 bp, Artificial Sequence
  Description of Artificial Sequence: Synthetic oligonucleotide
  Target: LAMA2; (+) strand; PAM type: YTN; PAM sequence: TTA
acataacttctaatttctct

SEQ ID NO: 351230 - DNA, 20 bp, Artificial Sequence
  Description of Artificial Sequence: Synthetic oligonucleotide
  Target: LAMA2; (+) strand; PAM type: YTN; PAM sequence: CTT
ctaatttctcttgtgattta

SEQ ID NO: 351231 - DNA, 20 bp, Artificial Sequence
  Description of Artificial Sequence: Synthetic oligonucleotide
  Target: LAMA2; (+) strand; PAM type: YTN; PAM sequence: TTC
taatttctcttgtgatttat

SEQ ID NO: 351232 - DNA, 20 bp, Artificial Sequence
  Description of Artificial Sequence: Synthetic oligonucleotide
  Target: LAMA2; (+) strand; PAM type: YTN; PAM sequence: CTA
atttctcttgtgatttattt

SEQ ID NO: 351233 - DNA, 20 bp, Artificial Sequence
  Description of Artificial Sequence: Synthetic oligonucleotide
  Target: LAMA2; (+) strand; PAM type: YTN; PAM sequence: TTT
ctcttgtgatttattttttg

SEQ ID NO: 351234 - DNA, 20 bp, Artificial Sequence
  Description of Artificial Sequence: Synthetic oligonucleotide
  Target: LAMA2; (+) strand; PAM type: YTN; PAM sequence: TTC
tcttgtgatttattttttgt

SEQ ID NO: 351235 - DNA, 20 bp, Artificial Sequence
  Description of Artificial Sequence: Synthetic oligonucleotide
  Target: LAMA2; (+) strand; PAM type: YTN; PAM sequence: CTC
ttgtgatttattttttgtta

SEQ ID NO: 351236 - DNA, 20 bp, Artificial Sequence
  Description of Artificial Sequence: Synthetic oligonucleotide
  Target: LAMA2; (+) strand; PAM type: YTN; PAM sequence: CTT
gtgatttattttttgttaat

SEQ ID NO: 351237 - DNA, 20 bp, Artificial Sequence
  Description of Artificial Sequence: Synthetic oligonucleotide
  Target: LAMA2; (+) strand; PAM type: YTN; PAM sequence: TTG
tgatttattttttgttaatt

SEQ ID NO: 351238 - DNA, 20 bp, Artificial Sequence
  Description of Artificial Sequence: Synthetic oligonucleotide
  Target: LAMA2; (+) strand; PAM type: YTN; PAM sequence: TTT
attttttgttaatttccaaa

SEQ ID NO: 351239 - DNA, 20 bp, Artificial Sequence
  Description of Artificial Sequence: Synthetic oligonucleotide
  Target: LAMA2; (+) strand; PAM type: YTN; PAM sequence: TTA
ttttttgttaatttccaaat

SEQ ID NO: 351240 - DNA, 20 bp, Artificial Sequence
  Description of Artificial Sequence: Synthetic oligonucleotide
  Target: LAMA2; (+) strand; PAM type: YTN; PAM sequence: TTT
tttgttaatttccaaatatt

SEQ ID NO: 351241 - DNA, 20 bp, Artificial Sequence
  Description of Artificial Sequence: Synthetic oligonucleotide
  Target: LAMA2; (+) strand; PAM type: YTN; PAM sequence: TTT
ttgttaatttccaaatattt

SEQ ID NO: 351242 - DNA, 20 bp, Artificial Sequence
  Description of Artificial Sequence: Synthetic oligonucleotide
  Target: LAMA2; (+) strand; PAM type: YTN; PAM sequence: TTT
tgttaatttccaaatatttg

SEQ ID NO: 351243 - DNA, 20 bp, Artificial Sequence
  Description of Artificial Sequence: Synthetic oligonucleotide
  Target: LAMA2; (+) strand; PAM type: YTN; PAM sequence: TTT
gttaatttccaaatatttga

SEQ ID NO: 351244 - DNA, 20 bp, Artificial Sequence
  Description of Artificial Sequence: Synthetic oligonucleotide
  Target: LAMA2; (+) strand; PAM type: YTN; PAM sequence: TTG
ttaatttccaaatatttgag

SEQ ID NO: 351245 - DNA, 20 bp, Artificial Sequence
  Description of Artificial Sequence: Synthetic oligonucleotide
  Target: LAMA2; (+) strand; PAM type: YTN; PAM sequence: TTA
atttccaaatatttgagctt

SEQ ID NO: 351246 - DNA, 20 bp, Artificial Sequence
  Description of Artificial Sequence: Synthetic oligonucleotide
  Target: LAMA2; (+) strand; PAM type: YTN; PAM sequence: TTT
ccaaatatttgagctttatt

SEQ ID NO: 351247 - DNA, 20 bp, Artificial Sequence
  Description of Artificial Sequence: Synthetic oligonucleotide
  Target: LAMA2; (+) strand; PAM type: YTN; PAM sequence: TTC
caaatatttgagctttatta

SEQ ID NO: 351248 - DNA, 20 bp, Artificial Sequence
  Description of Artificial Sequence: Synthetic oligonucleotide
  Target: LAMA2; (+) strand; PAM type: YTN; PAM sequence: TTT
gagctttattaaatattata

SEQ ID NO: 351249 - DNA, 20 bp, Artificial Sequence
  Description of Artificial Sequence: Synthetic oligonucleotide
  Target: LAMA2; (+) strand; PAM type: YTN; PAM sequence: TTG
agctttattaaatattatat

SEQ ID NO: 351250 - DNA, 20 bp, Artificial Sequence
  Description of Artificial Sequence: Synthetic oligonucleotide
  Target: LAMA2; (+) strand; PAM type: YTN; PAM sequence: CTT
tattaaatattatatttttg

SEQ ID NO: 351251 - DNA, 20 bp, Artificial Sequence
  Description of Artificial Sequence: Synthetic oligonucleotide
  Target: LAMA2; (+) strand; PAM type: YTN; PAM sequence: TTT
attaaatattatatttttga

SEQ ID NO: 351252 - DNA, 20 bp, Artificial Sequence
  Description of Artificial Sequence: Synthetic oligonucleotide
  Target: LAMA2; (+) strand; PAM type: YTN; PAM sequence: TTA
ttaaatattatatttttgat

SEQ ID NO: 351253 - DNA, 20 bp, Artificial Sequence
  Description of Artificial Sequence: Synthetic oligonucleotide
  Target: LAMA2; (+) strand; PAM type: YTN; PAM sequence: TTA
aatattatatttttgatttc

SEQ ID NO: 351254 - DNA, 20 bp, Artificial Sequence
  Description of Artificial Sequence: Synthetic oligonucleotide
  Target: LAMA2; (+) strand; PAM type: YTN; PAM sequence: TTA
tatttttgatttctacactg

SEQ ID NO: 351255 - DNA, 20 bp, Artificial Sequence
  Description of Artificial Sequence: Synthetic oligonucleotide
  Target: LAMA2; (+) strand; PAM type: YTN; PAM sequence: TTT
ttgatttctacactggatgt

SEQ ID NO: 351256 - DNA, 20 bp, Artificial Sequence
  Description of Artificial Sequence: Synthetic oligonucleotide
  Target: LAMA2; (+) strand; PAM type: YTN; PAM sequence: TTT
tgatttctacactggatgtt

SEQ ID NO: 351257 - DNA, 20 bp, Artificial Sequence
  Description of Artificial Sequence: Synthetic oligonucleotide
  Target: LAMA2; (+) strand; PAM type: YTN; PAM sequence: TTT
gatttctacactggatgttt

SEQ ID NO: 351258 - DNA, 20 bp, Artificial Sequence
  Description of Artificial Sequence: Synthetic oligonucleotide
  Target: LAMA2; (+) strand; PAM type: YTN; PAM sequence: TTG
atttctacactggatgttta

SEQ ID NO: 351259 - DNA, 20 bp, Artificial Sequence
  Description of Artificial Sequence: Synthetic oligonucleotide
  Target: LAMA2; (+) strand; PAM type: YTN; PAM sequence: TTT
ctacactggatgtttatgat

SEQ ID NO: 351260 - DNA, 20 bp, Artificial Sequence
  Description of Artificial Sequence: Synthetic oligonucleotide
  Target: LAMA2; (+) strand; PAM type: YTN; PAM sequence: TTC
tacactggatgtttatgatc

SEQ ID NO: 351261 - DNA, 20 bp, Artificial Sequence
  Description of Artificial Sequence: Synthetic oligonucleotide
  Target: LAMA2; (+) strand; PAM type: YTN; PAM sequence: CTA
cactggatgtttatgatctg

SEQ ID NO: 351262 - DNA, 20 bp, Artificial Sequence
  Description of Artificial Sequence: Synthetic oligonucleotide
  Target: LAMA2; (+) strand; PAM type: YTN; PAM sequence: CTG
gatgtttatgatctgagaac

SEQ ID NO: 351263 - DNA, 20 bp, Artificial Sequence
  Description of Artificial Sequence: Synthetic oligonucleotide
  Target: LAMA2; (+) strand; PAM type: YTN; PAM sequence: TTT
atgatctgagaacatactct

SEQ ID NO: 351264 - DNA, 20 bp, Artificial Sequence
  Description of Artificial Sequence: Synthetic oligonucleotide
  Target: LAMA2; (+) strand; PAM type: YTN; PAM sequence: TTA
tgatctgagaacatactctc

SEQ ID NO: 351265 - DNA, 20 bp, Artificial Sequence
  Description of Artificial Sequence: Synthetic oligonucleotide
  Target: LAMA2; (+) strand; PAM type: YTN; PAM sequence: CTG
agaacatactctctaagatg

SEQ ID NO: 351266 - DNA, 20 bp, Artificial Sequence
  Description of Artificial Sequence: Synthetic oligonucleotide
  Target: LAMA2; (+) strand; PAM type: YTN; PAM sequence: CTC
tctaagatgtcaaactttag

SEQ ID NO: 351267 - DNA, 20 bp, Artificial Sequence
  Description of Artificial Sequence: Synthetic oligonucleotide
  Target: LAMA2; (+) strand; PAM type: YTN; PAM sequence: CTC
taagatgtcaaactttagaa

SEQ ID NO: 351268 - DNA, 20 bp, Artificial Sequence
  Description of Artificial Sequence: Synthetic oligonucleotide
  Target: LAMA2; (+) strand; PAM type: YTN; PAM sequence: CTA
agatgtcaaactttagaagt

SEQ ID NO: 351269 - DNA, 20 bp, Artificial Sequence
  Description of Artificial Sequence: Synthetic oligonucleotide
  Target: LAMA2; (+) strand; PAM type: YTN; PAM sequence: CTT
tagaagtttattgaaattta

SEQ ID NO: 351270 - DNA, 20 bp, Artificial Sequence
  Description of Artificial Sequence: Synthetic oligonucleotide
  Target: LAMA2; (+) strand; PAM type: YTN; PAM sequence: TTT
agaagtttattgaaatttaa

SEQ ID NO: 351271 - DNA, 20 bp, Artificial Sequence
  Description of Artificial Sequence: Synthetic oligonucleotide
  Target: LAMA2; (+) strand; PAM type: YTN; PAM sequence: TTA
gaagtttattgaaatttaac

SEQ ID NO: 351272 - DNA, 20 bp, Artificial Sequence
  Description of Artificial Sequence: Synthetic oligonucleotide
  Target: LAMA2; (+) strand; PAM type: YTN; PAM sequence: TTT
attgaaatttaacttatggc

SEQ ID NO: 351273 - DNA, 20 bp, Artificial Sequence
  Description of Artificial Sequence: Synthetic oligonucleotide
  Target: LAMA2; (+) strand; PAM type: YTN; PAM sequence: TTA
ttgaaatttaacttatggct

SEQ ID NO: 351274 - DNA, 20 bp, Artificial Sequence
  Description of Artificial Sequence: Synthetic oligonucleotide
  Target: LAMA2; (+) strand; PAM type: YTN; PAM sequence: TTG
aaatttaacttatggctcag

SEQ ID NO: 351275 - DNA, 20 bp, Artificial Sequence
  Description of Artificial Sequence: Synthetic oligonucleotide
  Target: LAMA2; (+) strand; PAM type: YTN; PAM sequence: TTT
aacttatggctcagtgcatg

SEQ ID NO: 351276 - DNA, 20 bp, Artificial Sequence
  Description of Artificial Sequence: Synthetic oligonucleotide
  Target: LAMA2; (+) strand; PAM type: YTN; PAM sequence: TTA
acttatggctcagtgcatgg

SEQ ID NO: 351277 - DNA, 20 bp, Artificial Sequence
  Description of Artificial Sequence: Synthetic oligonucleotide
  Target: LAMA2; (+) strand; PAM type: YTN; PAM sequence: CTT
atggctcagtgcatggtctc

SEQ ID NO: 351278 - DNA, 20 bp, Artificial Sequence
  Description of Artificial Sequence: Synthetic oligonucleotide
  Target: LAMA2; (+) strand; PAM type: YTN; PAM sequence: TTA
tggctcagtgcatggtctct

SEQ ID NO: 351279 - DNA, 20 bp, Artificial Sequence
  Description of Artificial Sequence: Synthetic oligonucleotide
  Target: LAMA2; (+) strand; PAM type: YTN; PAM sequence: CTC
agtgcatggtctctcttggc

SEQ ID NO: 351280 - DNA, 20 bp, Artificial Sequence
  Description of Artificial Sequence: Synthetic oligonucleotide
  Target: LAMA2; (+) strand; PAM type: YTN; PAM sequence: CTC
tcttggcaaacaaataaatg

SEQ ID NO: 351281 - DNA, 20 bp, Artificial Sequence
  Description of Artificial Sequence: Synthetic oligonucleotide
  Target: LAMA2; (+) strand; PAM type: YTN; PAM sequence: CTC
ttggcaaacaaataaatgtg

SEQ ID NO: 351282 - DNA, 20 bp, Artificial Sequence
  Description of Artificial Sequence: Synthetic oligonucleotide
  Target: LAMA2; (+) strand; PAM type: YTN; PAM sequence: CTT
ggcaaacaaataaatgtgga

SEQ ID NO: 351283 - DNA, 20 bp, Artificial Sequence
  Description of Artificial Sequence: Synthetic oligonucleotide
  Target: LAMA2; (+) strand; PAM type: YTN; PAM sequence: TTG
gcaaacaaataaatgtggat

SEQ ID NO: 351284 - DNA, 20 bp, Artificial Sequence
  Description of Artificial Sequence: Synthetic oligonucleotide
  Target: LAMA2; (+) strand; PAM type: YTN; PAM sequence: TTT
ttccaatctgcgattatgga

SEQ ID NO: 351285 - DNA, 20 bp, Artificial Sequence
  Description of Artificial Sequence: Synthetic oligonucleotide
  Target: LAMA2; (+) strand; PAM type: YTN; PAM sequence: TTT
tccaatctgcgattatggat

SEQ ID NO: 351286 - DNA, 20 bp, Artificial Sequence
  Description of Artificial Sequence: Synthetic oligonucleotide
  Target: LAMA2; (+) strand; PAM type: YTN; PAM sequence: TTT
ccaatctgcgattatggatt

SEQ ID NO: 351287 - DNA, 20 bp, Artificial Sequence
  Description of Artificial Sequence: Synthetic oligonucleotide
  Target: LAMA2; (+) strand; PAM type: YTN; PAM sequence: TTC
caatctgcgattatggattc

SEQ ID NO: 351288 - DNA, 20 bp, Artificial Sequence
  Description of Artificial Sequence: Synthetic oligonucleotide
  Target: LAMA2; (+) strand; PAM type: YTN; PAM sequence: CTG
cgattatggattcctacctt

SEQ ID NO: 351289 - DNA, 20 bp, Artificial Sequence
  Description of Artificial Sequence: Synthetic oligonucleotide
  Target: LAMA2; (+) strand; PAM type: YTN; PAM sequence: TTA
tggattcctacctttctttc

SEQ ID NO: 351290 - DNA, 20 bp, Artificial Sequence
  Description of Artificial Sequence: Synthetic oligonucleotide
  Target: LAMA2; (+) strand; PAM type: YTN; PAM sequence: TTC
ctacctttctttcatttttt

SEQ ID NO: 351291 - DNA, 20 bp, Artificial Sequence
  Description of Artificial Sequence: Synthetic oligonucleotide
  Target: LAMA2; (+) strand; PAM type: YTN; PAM sequence: CTA
cctttctttcatttttttca

SEQ ID NO: 351292 - DNA, 20 bp, Artificial Sequence
  Description of Artificial Sequence: Synthetic oligonucleotide
  Target: LAMA2; (+) strand; PAM type: YTN; PAM sequence: CTT
tctttcatttttttcagtat

SEQ ID NO: 351293 - DNA, 20 bp, Artificial Sequence
  Description of Artificial Sequence: Synthetic oligonucleotide
  Target: LAMA2; (+) strand; PAM type: YTN; PAM sequence: TTT
ctttcatttttttcagtatt

SEQ ID NO: 351294 - DNA, 20 bp, Artificial Sequence
  Description of Artificial Sequence: Synthetic oligonucleotide
  Target: LAMA2; (+) strand; PAM type: YTN; PAM sequence: TTC
tttcatttttttcagtattt

SEQ ID NO: 351295 - DNA, 20 bp, Artificial Sequence
  Description of Artificial Sequence: Synthetic oligonucleotide
  Target: LAMA2; (+) strand; PAM type: YTN; PAM sequence: CTT
tcatttttttcagtatttct

SEQ ID NO: 351296 - DNA, 20 bp, Artificial Sequence
  Description of Artificial Sequence: Synthetic oligonucleotide
  Target: LAMA2; (+) strand; PAM type: YTN; PAM sequence: TTT
catttttttcagtatttctt

SEQ ID NO: 351297 - DNA, 20 bp, Artificial Sequence
  Description of Artificial Sequence: Synthetic oligonucleotide
  Target: LAMA2; (+) strand; PAM type: YTN; PAM sequence: TTC
atttttttcagtatttcttc

SEQ ID NO: 351298 - DNA, 20 bp, Artificial Sequence
  Description of Artificial Sequence: Synthetic oligonucleotide
  Target: LAMA2; (+) strand; PAM type: YTN; PAM sequence: TTT
ttttcagtatttcttcctgt

SEQ ID NO: 351299 - DNA, 20 bp, Artificial Sequence
  Description of Artificial Sequence: Synthetic oligonucleotide
  Target: LAMA2; (+) strand; PAM type: YTN; PAM sequence: TTT
tttcagtatttcttcctgtt

SEQ ID NO: 351300 - DNA, 20 bp, Artificial Sequence
  Description of Artificial Sequence: Synthetic oligonucleotide
  Target: LAMA2; (+) strand; PAM type: YTN; PAM sequence: TTT
ttcagtatttcttcctgttc

SEQ ID NO: 351301 - DNA, 20 bp, Artificial Sequence
  Description of Artificial Sequence: Synthetic oligonucleotide
  Target: LAMA2; (+) strand; PAM type: YTN; PAM sequence: TTT
tcagtatttcttcctgttct

SEQ ID NO: 351302 - DNA, 20 bp, Artificial Sequence
  Description of Artificial Sequence: Synthetic oligonucleotide
  Target: LAMA2; (+) strand; PAM type: YTN; PAM sequence: TTT
cagtatttcttcctgttctt

SEQ ID NO: 351303 - DNA, 20 bp, Artificial Sequence
  Description of Artificial Sequence: Synthetic oligonucleotide
  Target: LAMA2; (+) strand; PAM type: YTN; PAM sequence: TTC
agtatttcttcctgttcttt

SEQ ID NO: 351304 - DNA, 20 bp, Artificial Sequence
  Description of Artificial Sequence: Synthetic oligonucleotide
  Target: LAMA2; (+) strand; PAM type: YTN; PAM sequence: TTT
cttcctgttctttgaagcac

SEQ ID NO: 351305 - DNA, 20 bp, Artificial Sequence
  Description of Artificial Sequence: Synthetic oligonucleotide
  Target: LAMA2; (+) strand; PAM type: YTN; PAM sequence: TTC
ttcctgttctttgaagcact

SEQ ID NO: 351306 - DNA, 20 bp, Artificial Sequence
  Description of Artificial Sequence: Synthetic oligonucleotide
  Target: LAMA2; (+) strand; PAM type: YTN; PAM sequence: CTT
cctgttctttgaagcactgt

SEQ ID NO: 351307 - DNA, 20 bp, Artificial Sequence
  Description of Artificial Sequence: Synthetic oligonucleotide
  Target: LAMA2; (+) strand; PAM type: YTN; PAM sequence: TTC
ctgttctttgaagcactgtt

SEQ ID NO: 351308 - DNA, 20 bp, Artificial Sequence
  Description of Artificial Sequence: Synthetic oligonucleotide
  Target: LAMA2; (+) strand; PAM type: YTN; PAM sequence: CTG
ttctttgaagcactgttatg

SEQ ID NO: 351309 - DNA, 20 bp, Artificial Sequence
  Description of Artificial Sequence: Synthetic oligonucleotide
  Target: LAMA2; (+) strand; PAM type: YTN; PAM sequence: TTC
tttgaagcactgttatgagg

SEQ ID NO: 351310 - DNA, 20 bp, Artificial Sequence
  Description of Artificial Sequence: Synthetic oligonucleotide
  Target: LAMA2; (+) strand; PAM type: YTN; PAM sequence: CTT
tgaagcactgttatgaggca

SEQ ID NO: 351311 - DNA, 20 bp, Artificial Sequence
  Description of Artificial Sequence: Synthetic oligonucleotide
  Target: LAMA2; (+) strand; PAM type: YTN; PAM sequence: TTT
gaagcactgttatgaggcac

SEQ ID NO: 351312 - DNA, 20 bp, Artificial Sequence
  Description of Artificial Sequence: Synthetic oligonucleotide
  Target: LAMA2; (+) strand; PAM type: YTN; PAM sequence: TTG
aagcactgttatgaggcaca

SEQ ID NO: 351313 - DNA, 20 bp, Artificial Sequence
  Description of Artificial Sequence: Synthetic oligonucleotide
  Target: LAMA2; (+) strand; PAM type: YTN; PAM sequence: CTG
ttatgaggcacatacatatt

SEQ ID NO: 351314 - DNA, 20 bp, Artificial Sequence
  Description of Artificial Sequence: Synthetic oligonucleotide
  Target: LAMA2; (+) strand; PAM type: YTN; PAM sequence: TTA
tgaggcacatacatatttag

SEQ ID NO: 351315 - DNA, 20 bp, Artificial Sequence
  Description of Artificial Sequence: Synthetic oligonucleotide
  Target: LAMA2; (+) strand; PAM type: YTN; PAM sequence: TTT
agaatattttgaatctttag

SEQ ID NO: 351316 - DNA, 20 bp, Artificial Sequence
  Description of Artificial Sequence: Synthetic oligonucleotide
  Target: LAMA2; (+) strand; PAM type: YTN; PAM sequence: TTA
gaatattttgaatctttaga

SEQ ID NO: 351317 - DNA, 20 bp, Artificial Sequence
  Description of Artificial Sequence: Synthetic oligonucleotide
  Target: LAMA2; (+) strand; PAM type: YTN; PAM sequence: TTT
tgaatctttagatttttata

SEQ ID NO: 351318 - DNA, 20 bp, Artificial Sequence
  Description of Artificial Sequence: Synthetic oligonucleotide
  Target: LAMA2; (+) strand; PAM type: YTN; PAM sequence: TTT
gaatctttagatttttatat

SEQ ID NO: 351319 - DNA, 20 bp, Artificial Sequence
  Description of Artificial Sequence: Synthetic oligonucleotide
  Target: LAMA2; (+) strand; PAM type: YTN; PAM sequence: TTG
aatctttagatttttatatc

SEQ ID NO: 351320 - DNA, 20 bp, Artificial Sequence
  Description of Artificial Sequence: Synthetic oligonucleotide
  Target: LAMA2; (+) strand; PAM type: YTN; PAM sequence: CTT
tagatttttatatcttataa

SEQ ID NO: 351321 - DNA, 20 bp, Artificial Sequence
  Description of Artificial Sequence: Synthetic oligonucleotide
  Target: LAMA2; (+) strand; PAM type: YTN; PAM sequence: TTT
agatttttatatcttataaa

SEQ ID NO: 351322 - DNA, 20 bp, Artificial Sequence
  Description of Artificial Sequence: Synthetic oligonucleotide
  Target: LAMA2; (+) strand; PAM type: YTN; PAM sequence: TTA
gatttttatatcttataaat

SEQ ID NO: 351323 - DNA, 20 bp, Artificial Sequence
  Description of Artificial Sequence: Synthetic oligonucleotide
  Target: LAMA2; (+) strand; PAM type: YTN; PAM sequence: TTT
ttatatcttataaattaata

SEQ ID NO: 351324 - DNA, 20 bp, Artificial Sequence
  Description of Artificial Sequence: Synthetic oligonucleotide
  Target: LAMA2; (+) strand; PAM type: YTN; PAM sequence: TTT
tatatcttataaattaatat

SEQ ID NO: 351325 - DNA, 20 bp, Artificial Sequence
  Description of Artificial Sequence: Synthetic oligonucleotide
  Target: LAMA2; (+) strand; PAM type: YTN; PAM sequence: TTT
atatcttataaattaatatt

SEQ ID NO: 351326 - DNA, 20 bp, Artificial Sequence
  Description of Artificial Sequence: Synthetic oligonucleotide
  Target: LAMA2; (+) strand; PAM type: YTN; PAM sequence: TTA
tatcttataaattaatattt

SEQ ID NO: 351327 - DNA, 20 bp, Artificial Sequence
  Description of Artificial Sequence: Synthetic oligonucleotide
  Target: LAMA2; (+) strand; PAM type: YTN; PAM sequence: CTT
ataaattaatattttgataa

SEQ ID NO: 351328 - DNA, 20 bp, Artificial Sequence
  Description of Artificial Sequence: Synthetic oligonucleotide
  Target: LAMA2; (+) strand; PAM type: YTN; PAM sequence: TTA
taaattaatattttgataac

SEQ ID NO: 351329 - DNA, 20 bp, Artificial Sequence
  Description of Artificial Sequence: Synthetic oligonucleotide
  Target: LAMA2; (+) strand; PAM type: YTN; PAM sequence: TTA
atattttgataactgtgaag

SEQ ID NO: 351330 - DNA, 20 bp, Artificial Sequence
  Description of Artificial Sequence: Synthetic oligonucleotide
  Target: LAMA2; (+) strand; PAM type: YTN; PAM sequence: TTT
tgataactgtgaagatctcc

SEQ ID NO: 351331 - DNA, 20 bp, Artificial Sequence
  Description of Artificial Sequence: Synthetic oligonucleotide
  Target: LAMA2; (+) strand; PAM type: YTN; PAM sequence: TTT
gataactgtgaagatctcca

SEQ ID NO: 351332 - DNA, 20 bp, Artificial Sequence
  Description of Artificial Sequence: Synthetic oligonucleotide
  Target: LAMA2; (+) strand; PAM type: YTN; PAM sequence: TTG
ataactgtgaagatctccac

SEQ ID NO: 351333 - DNA, 20 bp, Artificial Sequence
  Description of Artificial Sequence: Synthetic oligonucleotide
  Target: LAMA2; (+) strand; PAM type: YTN; PAM sequence: CTG
tgaagatctccacttaatct

SEQ ID NO: 351334 - DNA, 20 bp, Artificial Sequence
  Description of Artificial Sequence: Synthetic oligonucleotide
  Target: LAMA2; (+) strand; PAM type: YTN; PAM sequence: CTC
cacttaatctcagatatcac

SEQ ID NO: 351335 - DNA, 20 bp, Artificial Sequence
  Description of Artificial Sequence: Synthetic oligonucleotide
  Target: LAMA2; (+) strand; PAM type: YTN; PAM sequence: CTT
aatctcagatatcacttttt

SEQ ID NO: 351336 - DNA, 20 bp, Artificial Sequence
  Description of Artificial Sequence: Synthetic oligonucleotide
  Target: LAMA2; (+) strand; PAM type: YTN; PAM sequence: TTA
atctcagatatcactttttg

SEQ ID NO: 351337 - DNA, 20 bp, Artificial Sequence
  Description of Artificial Sequence: Synthetic oligonucleotide
  Target: LAMA2; (+) strand; PAM type: YTN; PAM sequence: CTC
agatatcactttttgtccta

SEQ ID NO: 351338 - DNA, 20 bp, Artificial Sequence
  Description of Artificial Sequence: Synthetic oligonucleotide
  Target: LAMA2; (+) strand; PAM type: YTN; PAM sequence: CTT
tttgtcctaaagtctacttt

SEQ ID NO: 351339 - DNA, 20 bp, Artificial Sequence
  Description of Artificial Sequence: Synthetic oligonucleotide
  Target: LAMA2; (+) strand; PAM type: YTN; PAM sequence: TTT
ttgtcctaaagtctacttta

SEQ ID NO: 351340 - DNA, 20 bp, Artificial Sequence
  Description of Artificial Sequence: Synthetic oligonucleotide
  Target: LAMA2; (+) strand; PAM type: YTN; PAM sequence: TTT
tgtcctaaagtctactttat

SEQ ID NO: 351341 - DNA, 20 bp, Artificial Sequence
  Description of Artificial Sequence: Synthetic oligonucleotide
  Target: LAMA2; (+) strand; PAM type: YTN; PAM sequence: TTT
gtcctaaagtctactttatt

SEQ ID NO: 351342 - DNA, 20 bp, Artificial Sequence
  Description of Artificial Sequence: Synthetic oligonucleotide
  Target: LAMA2; (+) strand; PAM type: YTN; PAM sequence: TTG
tcctaaagtctactttattt

SEQ ID NO: 351343 - DNA, 20 bp, Artificial Sequence
  Description of Artificial Sequence: Synthetic oligonucleotide
  Target: LAMA2; (+) strand; PAM type: YTN; PAM sequence: CTA
aagtctactttattttttat

SEQ ID NO: 351344 - DNA, 20 bp, Artificial Sequence
  Description of Artificial Sequence: Synthetic oligonucleotide
  Target: LAMA2; (+) strand; PAM type: YTN; PAM sequence: CTA
ctttattttttattaacatt

SEQ ID NO: 351345 - DNA, 20 bp, Artificial Sequence
  Description of Artificial Sequence: Synthetic oligonucleotide
  Target: LAMA2; (+) strand; PAM type: YTN; PAM sequence: CTT
tattttttattaacattgcc

SEQ ID NO: 351346 - DNA, 20 bp, Artificial Sequence
  Description of Artificial Sequence: Synthetic oligonucleotide
  Target: LAMA2; (+) strand; PAM type: YTN; PAM sequence: TTT
attttttattaacattgcca

SEQ ID NO: 351347 - DNA, 20 bp, Artificial Sequence
  Description of Artificial Sequence: Synthetic oligonucleotide
  Target: LAMA2; (+) strand; PAM type: YTN; PAM sequence: TTA
ttttttattaacattgccac

SEQ ID NO: 351348 - DNA, 20 bp, Artificial Sequence
  Description of Artificial Sequence: Synthetic oligonucleotide
  Target: LAMA2; (+) strand; PAM type: YTN; PAM sequence: TTT
tttattaacattgccacagc

SEQ ID NO: 351349 - DNA, 20 bp, Artificial Sequence
  Description of Artificial Sequence: Synthetic oligonucleotide
  Target: LAMA2; (+) strand; PAM type: YTN; PAM sequence: TTT
ttattaacattgccacagca

SEQ ID NO: 351350 - DNA, 20 bp, Artificial Sequence
  Description of Artificial Sequence: Synthetic oligonucleotide
  Target: LAMA2; (+) strand; PAM type: YTN; PAM sequence: TTT
tattaacattgccacagcag

SEQ ID NO: 351351 - DNA, 20 bp, Artificial Sequence
  Description of Artificial Sequence: Synthetic oligonucleotide
  Target: LAMA2; (+) strand; PAM type: YTN; PAM sequence: TTT
attaacattgccacagcagt

SEQ ID NO: 351352 - DNA, 20 bp, Artificial Sequence
  Description of Artificial Sequence: Synthetic oligonucleotide
  Target: LAMA2; (+) strand; PAM type: YTN; PAM sequence: TTA
ttaacattgccacagcagtt

SEQ ID NO: 351353 - DNA, 20 bp, Artificial Sequence
  Description of Artificial Sequence: Synthetic oligonucleotide
  Target: LAMA2; (+) strand; PAM type: YTN; PAM sequence: TTA
acattgccacagcagttttc

SEQ ID NO: 351354 - DNA, 20 bp, Artificial Sequence
  Description of Artificial Sequence: Synthetic oligonucleotide
  Target: LAMA2; (+) strand; PAM type: YTN; PAM sequence: TTG
ccacagcagttttcatatgc

SEQ ID NO: 351355 - DNA, 20 bp, Artificial Sequence
  Description of Artificial Sequence: Synthetic oligonucleotide
  Target: LAMA2; (+) strand; PAM type: YTN; PAM sequence: TTT
tcatatgcttactctgtatg

SEQ ID NO: 351356 - DNA, 20 bp, Artificial Sequence
  Description of Artificial Sequence: Synthetic oligonucleotide
  Target: LAMA2; (+) strand; PAM type: YTN; PAM sequence: TTT
catatgcttactctgtatgg

SEQ ID NO: 351357 - DNA, 20 bp, Artificial Sequence
  Description of Artificial Sequence: Synthetic oligonucleotide
  Target: LAMA2; (+) strand; PAM type: YTN; PAM sequence: TTC
atatgcttactctgtatggt

SEQ ID NO: 351358 - DNA, 20 bp, Artificial Sequence
  Description of Artificial Sequence: Synthetic oligonucleotide
  Target: LAMA2; (+) strand; PAM type: YTN; PAM sequence: CTT
actctgtatggtatgttttt

SEQ ID NO: 351359 - DNA, 20 bp, Artificial Sequence
  Description of Artificial Sequence: Synthetic oligonucleotide
  Target: LAMA2; (+) strand; PAM type: YTN; PAM sequence: TTA
ctctgtatggtatgtttttt

SEQ ID NO: 351360 - DNA, 20 bp, Artificial Sequence
  Description of Artificial Sequence: Synthetic oligonucleotide
  Target: LAMA2; (+) strand; PAM type: YTN; PAM sequence: CTC
tgtatggtatgttttttctg

SEQ ID NO: 351361 - DNA, 20 bp, Artificial Sequence
  Description of Artificial Sequence: Synthetic oligonucleotide
  Target: LAMA2; (+) strand; PAM type: YTN; PAM sequence: CTG
tatggtatgttttttctgat

SEQ ID NO: 351362 - DNA, 20 bp, Artificial Sequence
  Description of Artificial Sequence: Synthetic oligonucleotide
  Target: LAMA2; (+) strand; PAM type: YTN; PAM sequence: TTT
tttctgattttgtttaactt

SEQ ID NO: 351363 - DNA, 20 bp, Artificial Sequence
  Description of Artificial Sequence: Synthetic oligonucleotide
  Target: LAMA2; (+) strand; PAM type: YTN; PAM sequence: TTT
ttctgattttgtttaacttt

SEQ ID NO: 351364 - DNA, 20 bp, Artificial Sequence
  Description of Artificial Sequence: Synthetic oligonucleotide
  Target: LAMA2; (+) strand; PAM type: YTN; PAM sequence: TTT
tctgattttgtttaactttc

SEQ ID NO: 351365 - DNA, 20 bp, Artificial Sequence
  Description of Artificial Sequence: Synthetic oligonucleotide
  Target: LAMA2; (+) strand; PAM type: YTN; PAM sequence: TTT
ctgattttgtttaactttca

SEQ ID NO: 351366 - DNA, 20 bp, Artificial Sequence
  Description of Artificial Sequence: Synthetic oligonucleotide
  Target: LAMA2; (+) strand; PAM type: YTN; PAM sequence: TTC
tgattttgtttaactttcaa

SEQ ID NO: 351367 - DNA, 20 bp, Artificial Sequence
  Description of Artificial Sequence: Synthetic oligonucleotide
  Target: LAMA2; (+) strand; PAM type: YTN; PAM sequence: CTG
attttgtttaactttcaacc

SEQ ID NO: 351368 - DNA, 20 bp, Artificial Sequence
  Description of Artificial Sequence: Synthetic oligonucleotide
  Target: LAMA2; (+) strand; PAM type: YTN; PAM sequence: TTT
tgtttaactttcaacctatc

SEQ ID NO: 351369 - DNA, 20 bp, Artificial Sequence
  Description of Artificial Sequence: Synthetic oligonucleotide
  Target: LAMA2; (+) strand; PAM type: YTN; PAM sequence: TTT
gtttaactttcaacctatct

SEQ ID NO: 351370 - DNA, 20 bp, Artificial Sequence
  Description of Artificial Sequence: Synthetic oligonucleotide
  Target: LAMA2; (+) strand; PAM type: YTN; PAM sequence: TTG
tttaactttcaacctatctt

SEQ ID NO: 351371 - DNA, 20 bp, Artificial Sequence
  Description of Artificial Sequence: Synthetic oligonucleotide
  Target: LAMA2; (+) strand; PAM type: YTN; PAM sequence: TTT
aactttcaacctatctttat

SEQ ID NO: 351372 - DNA, 20 bp, Artificial Sequence
  Description of Artificial Sequence: Synthetic oligonucleotide
  Target: LAMA2; (+) strand; PAM type: YTN; PAM sequence: TTA
actttcaacctatctttatt

SEQ ID NO: 351373 - DNA, 20 bp, Artificial Sequence
  Description of Artificial Sequence: Synthetic oligonucleotide
  Target: LAMA2; (+) strand; PAM type: YTN; PAM sequence: CTT
tcaacctatctttattttca

SEQ ID NO: 351374 - DNA, 20 bp, Artificial Sequence
  Description of Artificial Sequence: Synthetic oligonucleotide
  Target: LAMA2; (+) strand; PAM type: YTN; PAM sequence: TTT
caacctatctttattttcat

SEQ ID NO: 351375 - DNA, 20 bp, Artificial Sequence
  Description of Artificial Sequence: Synthetic oligonucleotide
  Target: LAMA2; (+) strand; PAM type: YTN; PAM sequence: TTC
aacctatctttattttcatt

SEQ ID NO: 351376 - DNA, 20 bp, Artificial Sequence
  Description of Artificial Sequence: Synthetic oligonucleotide
  Target: LAMA2; (+) strand; PAM type: YTN; PAM sequence: CTA
tctttattttcatttaaaag

SEQ ID NO: 351377 - DNA, 20 bp, Artificial Sequence
  Description of Artificial Sequence: Synthetic oligonucleotide
  Target: LAMA2; (+) strand; PAM type: YTN; PAM sequence: CTT
tattttcatttaaaagattt

SEQ ID NO: 351378 - DNA, 20 bp, Artificial Sequence
  Description of Artificial Sequence: Synthetic oligonucleotide
  Target: LAMA2; (+) strand; PAM type: YTN; PAM sequence: TTT
attttcatttaaaagatttc

SEQ ID NO: 351379 - DNA, 20 bp, Artificial Sequence
  Description of Artificial Sequence: Synthetic oligonucleotide
  Target: LAMA2; (+) strand; PAM type: YTN; PAM sequence: TTA
ttttcatttaaaagatttct

SEQ ID NO: 351380 - DNA, 20 bp, Artificial Sequence
  Description of Artificial Sequence: Synthetic oligonucleotide
  Target: LAMA2; (+) strand; PAM type: YTN; PAM sequence: TTT
tcatttaaaagatttcttat

SEQ ID NO: 351381 - DNA, 20 bp, Artificial Sequence
  Description of Artificial Sequence: Synthetic oligonucleotide
  Target: LAMA2; (+) strand; PAM type: YTN; PAM sequence: TTT
catttaaaagatttcttata

SEQ ID NO: 351382 - DNA, 20 bp, Artificial Sequence
  Description of Artificial Sequence: Synthetic oligonucleotide
  Target: LAMA2; (+) strand; PAM type: YTN; PAM sequence: TTC
atttaaaagatttcttataa

SEQ ID NO: 351383 - DNA, 20 bp, Artificial Sequence
  Description of Artificial Sequence: Synthetic oligonucleotide
  Target: LAMA2; (+) strand; PAM type: YTN; PAM sequence: TTT
aaaagatttcttataaagag

SEQ ID NO: 351384 - DNA, 20 bp, Artificial Sequence
  Description of Artificial Sequence: Synthetic oligonucleotide
  Target: LAMA2; (+) strand; PAM type: YTN; PAM sequence: TTA
aaagatttcttataaagagt

SEQ ID NO: 351385 - DNA, 20 bp, Artificial Sequence
  Description of Artificial Sequence: Synthetic oligonucleotide
  Target: LAMA2; (+) strand; PAM type: YTN; PAM sequence: TTT
cttataaagagtaaaataga

SEQ ID NO: 351386 - DNA, 20 bp, Artificial Sequence
  Description of Artificial Sequence: Synthetic oligonucleotide
  Target: LAMA2; (+) strand; PAM type: YTN; PAM sequence: TTC
ttataaagagtaaaatagat

SEQ ID NO: 351387 - DNA, 20 bp, Artificial Sequence
  Description of Artificial Sequence: Synthetic oligonucleotide
  Target: LAMA2; (+) strand; PAM type: YTN; PAM sequence: CTT
ataaagagtaaaatagatgg

SEQ ID NO: 351388 - DNA, 20 bp, Artificial Sequence
  Description of Artificial Sequence: Synthetic oligonucleotide
  Target: LAMA2; (+) strand; PAM type: YTN; PAM sequence: TTA
taaagagtaaaatagatgga

SEQ ID NO: 351389 - DNA, 20 bp, Artificial Sequence
  Description of Artificial Sequence: Synthetic oligonucleotide
  Target: LAMA2; (+) strand; PAM type: YTN; PAM sequence: TTT
tttatcctgacaattactgt

SEQ ID NO: 351390 - DNA, 20 bp, Artificial Sequence
  Description of Artificial Sequence: Synthetic oligonucleotide
  Target: LAMA2; (+) strand; PAM type: YTN; PAM sequence: TTT
ttatcctgacaattactgtg

SEQ ID NO: 351391 - DNA, 20 bp, Artificial Sequence
  Description of Artificial Sequence: Synthetic oligonucleotide
  Target: LAMA2; (+) strand; PAM type: YTN; PAM sequence: TTT
tatcctgacaattactgtgt

SEQ ID NO: 351392 - DNA, 20 bp, Artificial Sequence
  Description of Artificial Sequence: Synthetic oligonucleotide
  Target: LAMA2; (+) strand; PAM type: YTN; PAM sequence: TTT
atcctgacaattactgtgtg

SEQ ID NO: 351393 - DNA, 20 bp, Artificial Sequence
  Description of Artificial Sequence: Synthetic oligonucleotide
  Target: LAMA2; (+) strand; PAM type: YTN; PAM sequence: TTA
tcctgacaattactgtgtgt

SEQ ID NO: 351394 - DNA, 20 bp, Artificial Sequence
  Description of Artificial Sequence: Synthetic oligonucleotide
  Target: LAMA2; (+) strand; PAM type: YTN; PAM sequence: CTG
acaattactgtgtgtttagt

SEQ ID NO: 351395 - DNA, 20 bp, Artificial Sequence
  Description of Artificial Sequence: Synthetic oligonucleotide
  Target: LAMA2; (+) strand; PAM type: YTN; PAM sequence: TTA
ctgtgtgtttagtccctaaa

SEQ ID NO: 351396 - DNA, 20 bp, Artificial Sequence
  Description of Artificial Sequence: Synthetic oligonucleotide
  Target: LAMA2; (+) strand; PAM type: YTN; PAM sequence: CTG
tgtgtttagtccctaaattt

SEQ ID NO: 351397 - DNA, 20 bp, Artificial Sequence
  Description of Artificial Sequence: Synthetic oligonucleotide
  Target: LAMA2; (+) strand; PAM type: YTN; PAM sequence: TTT
agtccctaaatttaatatag

SEQ ID NO: 351398 - DNA, 20 bp, Artificial Sequence
  Description of Artificial Sequence: Synthetic oligonucleotide
  Target: LAMA2; (+) strand; PAM type: YTN; PAM sequence: TTA
gtccctaaatttaatatagt

SEQ ID NO: 351399 - DNA, 20 bp, Artificial Sequence
  Description of Artificial Sequence: Synthetic oligonucleotide
  Target: LAMA2; (+) strand; PAM type: YTN; PAM sequence: CTA
aatttaatatagttaataat

SEQ ID NO: 351400 - DNA, 20 bp, Artificial Sequence
  Description of Artificial Sequence: Synthetic oligonucleotide
  Target: LAMA2; (+) strand; PAM type: YTN; PAM sequence: TTT
aatatagttaataatatgat

SEQ ID NO: 351401 - DNA, 20 bp, Artificial Sequence
  Description of Artificial Sequence: Synthetic oligonucleotide
  Target: LAMA2; (+) strand; PAM type: YTN; PAM sequence: TTA
atatagttaataatatgatt

SEQ ID NO: 351402 - DNA, 20 bp, Artificial Sequence
  Description of Artificial Sequence: Synthetic oligonucleotide
  Target: LAMA2; (+) strand; PAM type: YTN; PAM sequence: TTA
ataatatgattgggttttgc

SEQ ID NO: 351403 - DNA, 20 bp, Artificial Sequence
  Description of Artificial Sequence: Synthetic oligonucleotide
  Target: LAMA2; (+) strand; PAM type: YTN; PAM sequence: TTG
ggttttgctatttgtttccc

SEQ ID NO: 351404 - DNA, 20 bp, Artificial Sequence
  Description of Artificial Sequence: Synthetic oligonucleotide
  Target: LAMA2; (+) strand; PAM type: YTN; PAM sequence: TTT
tgctatttgtttcccatttg

SEQ ID NO: 351405 - DNA, 20 bp, Artificial Sequence
  Description of Artificial Sequence: Synthetic oligonucleotide
  Target: LAMA2; (+) strand; PAM type: YTN; PAM sequence: TTT
gctatttgtttcccatttgt

SEQ ID NO: 351406 - DNA, 20 bp, Artificial Sequence
  Description of Artificial Sequence: Synthetic oligonucleotide
  Target: LAMA2; (+) strand; PAM type: YTN; PAM sequence: TTG
ctatttgtttcccatttgtg

SEQ ID NO: 351407 - DNA, 20 bp, Artificial Sequence
  Description of Artificial Sequence: Synthetic oligonucleotide
  Target: LAMA2; (+) strand; PAM type: YTN; PAM sequence: CTA
tttgtttcccatttgtgtca

SEQ ID NO: 351408 - DNA, 20 bp, Artificial Sequence
  Description of Artificial Sequence: Synthetic oligonucleotide
  Target: LAMA2; (+) strand; PAM type: YTN; PAM sequence: TTT
gtttcccatttgtgtcacaa

SEQ ID NO: 351409 - DNA, 20 bp, Artificial Sequence
  Description of Artificial Sequence: Synthetic oligonucleotide
  Target: LAMA2; (+) strand; PAM type: YTN; PAM sequence: TTG
tttcccatttgtgtcacaaa

SEQ ID NO: 351410 - DNA, 20 bp, Artificial Sequence
  Description of Artificial Sequence: Synthetic oligonucleotide
  Target: LAMA2; (+) strand; PAM type: YTN; PAM sequence: TTT
cccatttgtgtcacaaaatt

SEQ ID NO: 351411 - DNA, 20 bp, Artificial Sequence
  Description of Artificial Sequence: Synthetic oligonucleotide
  Target: LAMA2; (+) strand; PAM type: YTN; PAM sequence: TTC
ccatttgtgtcacaaaattt

SEQ ID NO: 351412 - DNA, 20 bp, Artificial Sequence
  Description of Artificial Sequence: Synthetic oligonucleotide
  Target: LAMA2; (+) strand; PAM type: YTN; PAM sequence: TTT
gtgtcacaaaatttttgttc

SEQ ID NO: 351413 - DNA, 20 bp, Artificial Sequence
  Description of Artificial Sequence: Synthetic oligonucleotide
  Target: LAMA2; (+) strand; PAM type: YTN; PAM sequence: TTG
tgtcacaaaatttttgttcc

SEQ ID NO: 351414 - DNA, 20 bp, Artificial Sequence
  Description of Artificial Sequence: Synthetic oligonucleotide
  Target: LAMA2; (+) strand; PAM type: YTN; PAM sequence: TTT
ttgttcccattcttcctttt

SEQ ID NO: 351415 - DNA, 20 bp, Artificial Sequence
  Description of Artificial Sequence: Synthetic oligonucleotide
  Target: LAMA2; (+) strand; PAM type: YTN; PAM sequence: TTT
tgttcccattcttccttttc

SEQ ID NO: 351416 - DNA, 20 bp, Artificial Sequence
  Description of Artificial Sequence: Synthetic oligonucleotide
  Target: LAMA2; (+) strand; PAM type: YTN; PAM sequence: TTT
gttcccattcttccttttct

SEQ ID NO: 351417 - DNA, 20 bp, Artificial Sequence
  Description of Artificial Sequence: Synthetic oligonucleotide
  Target: LAMA2; (+) strand; PAM type: YTN; PAM sequence: TTG
ttcccattcttccttttctg

SEQ ID NO: 351418 - DNA, 20 bp, Artificial Sequence
  Description of Artificial Sequence: Synthetic oligonucleotide
  Target: LAMA2; (+) strand; PAM type: YTN; PAM sequence: TTC
ccattcttccttttctgtct

SEQ ID NO: 351419 - DNA, 20 bp, Artificial Sequence
  Description of Artificial Sequence: Synthetic oligonucleotide
  Target: LAMA2; (+) strand; PAM type: YTN; PAM sequence: TTC
ttccttttctgtctactttt

SEQ ID NO: 351420 - DNA, 20 bp, Artificial Sequence
  Description of Artificial Sequence: Synthetic oligonucleotide
  Target: LAMA2; (+) strand; PAM type: YTN; PAM sequence: CTT
ccttttctgtctacttttat

SEQ ID NO: 351421 - DNA, 20 bp, Artificial Sequence
  Description of Artificial Sequence: Synthetic oligonucleotide
  Target: LAMA2; (+) strand; PAM type: YTN; PAM sequence: TTC
cttttctgtctacttttatg

SEQ ID NO: 351422 - DNA, 20 bp, Artificial Sequence
  Description of Artificial Sequence: Synthetic oligonucleotide
  Target: LAMA2; (+) strand; PAM type: YTN; PAM sequence: CTT
ttctgtctacttttatgtta

SEQ ID NO: 351423 - DNA, 20 bp, Artificial Sequence
  Description of Artificial Sequence: Synthetic oligonucleotide
  Target: LAMA2; (+) strand; PAM type: YTN; PAM sequence: TTT
tctgtctacttttatgttaa

SEQ ID NO: 351424 - DNA, 20 bp, Artificial Sequence
  Description of Artificial Sequence: Synthetic oligonucleotide
  Target: LAMA2; (+) strand; PAM type: YTN; PAM sequence: TTT
ctgtctacttttatgttaaa

SEQ ID NO: 351425 - DNA, 20 bp, Artificial Sequence
  Description of Artificial Sequence: Synthetic oligonucleotide
  Target: LAMA2; (+) strand; PAM type: YTN; PAM sequence: TTC
tgtctacttttatgttaaac

SEQ ID NO: 351426 - DNA, 20 bp, Artificial Sequence
  Description of Artificial Sequence: Synthetic oligonucleotide
  Target: LAMA2; (+) strand; PAM type: YTN; PAM sequence: CTG
tctacttttatgttaaacaa

SEQ ID NO: 351427 - DNA, 20 bp, Artificial Sequence
  Description of Artificial Sequence: Synthetic oligonucleotide
  Target: LAMA2; (+) strand; PAM type: YTN; PAM sequence: CTA
cttttatgttaaacaaatat

SEQ ID NO: 351428 - DNA, 20 bp, Artificial Sequence
  Description of Artificial Sequence: Synthetic oligonucleotide
  Target: LAMA2; (+) strand; PAM type: YTN; PAM sequence: CTT
ttatgttaaacaaatatttt

SEQ ID NO: 351429 - DNA, 20 bp, Artificial Sequence
  Description of Artificial Sequence: Synthetic oligonucleotide
  Target: LAMA2; (+) strand; PAM type: YTN; PAM sequence: TTT
tatgttaaacaaatattttt

SEQ ID NO: 351430 - DNA, 20 bp, Artificial Sequence
  Description of Artificial Sequence: Synthetic oligonucleotide
  Target: LAMA2; (+) strand; PAM type: YTN; PAM sequence: TTT
atgttaaacaaatatttttc

SEQ ID NO: 351431 - DNA, 20 bp, Artificial Sequence
  Description of Artificial Sequence: Synthetic oligonucleotide
  Target: LAMA2; (+) strand; PAM type: YTN; PAM sequence: TTA
tgttaaacaaatatttttca

SEQ ID NO: 351432 - DNA, 20 bp, Artificial Sequence
  Description of Artificial Sequence: Synthetic oligonucleotide
  Target: LAMA2; (+) strand; PAM type: YTN; PAM sequence: TTA
aacaaatatttttcagtatt

SEQ ID NO: 351433 - DNA, 20 bp, Artificial Sequence
  Description of Artificial Sequence: Synthetic oligonucleotide
  Target: LAMA2; (+) strand; PAM type: YTN; PAM sequence: TTT
ttcagtattccattttattt

SEQ ID NO: 351434 - DNA, 20 bp, Artificial Sequence
  Description of Artificial Sequence: Synthetic oligonucleotide
  Target: LAMA2; (+) strand; PAM type: YTN; PAM sequence: TTT
tcagtattccattttatttc

SEQ ID NO: 351435 - DNA, 20 bp, Artificial Sequence
  Description of Artificial Sequence: Synthetic oligonucleotide
  Target: LAMA2; (+) strand; PAM type: YTN; PAM sequence: TTT
cagtattccattttatttcc

SEQ ID NO: 351436 - DNA, 20 bp, Artificial Sequence
  Description of Artificial Sequence: Synthetic oligonucleotide
  Target: LAMA2; (+) strand; PAM type: YTN; PAM sequence: TTC
agtattccattttatttcct

SEQ ID NO: 351437 - DNA, 20 bp, Artificial Sequence
  Description of Artificial Sequence: Synthetic oligonucleotide
  Target: LAMA2; (+) strand; PAM type: YTN; PAM sequence: TTC
cattttatttcctttattat

SEQ ID NO: 351438 - DNA, 20 bp, Artificial Sequence
  Description of Artificial Sequence: Synthetic oligonucleotide
  Target: LAMA2; (+) strand; PAM type: YTN; PAM sequence: TTT
tatttcctttattatctttt

SEQ ID NO: 351439 - DNA, 20 bp, Artificial Sequence
  Description of Artificial Sequence: Synthetic oligonucleotide
  Target: LAMA2; (+) strand; PAM type: YTN; PAM sequence: TTT
atttcctttattatcttttt

SEQ ID NO: 351440 - DNA, 20 bp, Artificial Sequence
  Description of Artificial Sequence: Synthetic oligonucleotide
  Target: LAMA2; (+) strand; PAM type: YTN; PAM sequence: TTA
tttcctttattatcttttta

SEQ ID NO: 351441 - DNA, 20 bp, Artificial Sequence
  Description of Artificial Sequence: Synthetic oligonucleotide
  Target: LAMA2; (+) strand; PAM type: YTN; PAM sequence: TTT
cctttattatctttttagca

SEQ ID NO: 351442 - DNA, 20 bp, Artificial Sequence
  Description of Artificial Sequence: Synthetic oligonucleotide
  Target: LAMA2; (+) strand; PAM type: YTN; PAM sequence: TTC
ctttattatctttttagcag

SEQ ID NO: 351443 - DNA, 20 bp, Artificial Sequence
  Description of Artificial Sequence: Synthetic oligonucleotide
  Target: LAMA2; (+) strand; PAM type: YTN; PAM sequence: CTT
tattatctttttagcagtac

SEQ ID NO: 351444 - DNA, 20 bp, Artificial Sequence
  Description of Artificial Sequence: Synthetic oligonucleotide
  Target: LAMA2; (+) strand; PAM type: YTN; PAM sequence: TTT
attatctttttagcagtacc

SEQ ID NO: 351445 - DNA, 20 bp, Artificial Sequence
  Description of Artificial Sequence: Synthetic oligonucleotide
  Target: LAMA2; (+) strand; PAM type: YTN; PAM sequence: TTA
ttatctttttagcagtacct

SEQ ID NO: 351446 - DNA, 20 bp, Artificial Sequence
  Description of Artificial Sequence: Synthetic oligonucleotide
  Target: LAMA2; (+) strand; PAM type: YTN; PAM sequence: TTA
tctttttagcagtacctctt

SEQ ID NO: 351447 - DNA, 20 bp, Artificial Sequence
  Description of Artificial Sequence: Synthetic oligonucleotide
  Target: LAMA2; (+) strand; PAM type: YTN; PAM sequence: CTT
tttagcagtacctctttgta

SEQ ID NO: 351448 - DNA, 20 bp, Artificial Sequence
  Description of Artificial Sequence: Synthetic oligonucleotide
  Target: LAMA2; (+) strand; PAM type: YTN; PAM sequence: TTT
ttagcagtacctctttgtat

SEQ ID NO: 351449 - DNA, 20 bp, Artificial Sequence
  Description of Artificial Sequence: Synthetic oligonucleotide
  Target: LAMA2; (+) strand; PAM type: YTN; PAM sequence: TTT
tagcagtacctctttgtata

SEQ ID NO: 351450 - DNA, 20 bp, Artificial Sequence
  Description of Artificial Sequence: Synthetic oligonucleotide
  Target: LAMA2; (+) strand; PAM type: YTN; PAM sequence: TTT
agcagtacctctttgtataa

SEQ ID NO: 351451 - DNA, 20 bp, Artificial Sequence
  Description of Artificial Sequence: Synthetic oligonucleotide
  Target: LAMA2; (+) strand; PAM type: YTN; PAM sequence: TTA
gcagtacctctttgtataat

SEQ ID NO: 351452 - DNA, 20 bp, Artificial Sequence
  Description of Artificial Sequence: Synthetic oligonucleotide
  Target: LAMA2; (+) strand; PAM type: YTN; PAM sequence: CTC
tttgtataattttccattcc

SEQ ID NO: 351453 - DNA, 20 bp, Artificial Sequence
  Description of Artificial Sequence: Synthetic oligonucleotide
  Target: LAMA2; (+) strand; PAM type: YTN; PAM sequence: CTT
tgtataattttccattccaa

SEQ ID NO: 351454 - DNA, 20 bp, Artificial Sequence
  Description of Artificial Sequence: Synthetic oligonucleotide
  Target: LAMA2; (+) strand; PAM type: YTN; PAM sequence: TTT
gtataattttccattccaac

SEQ ID NO: 351455 - DNA, 20 bp, Artificial Sequence
  Description of Artificial Sequence: Synthetic oligonucleotide
  Target: LAMA2; (+) strand; PAM type: YTN; PAM sequence: TTG
tataattttccattccaact

SEQ ID NO: 351456 - DNA, 20 bp, Artificial Sequence
  Description of Artificial Sequence: Synthetic oligonucleotide
  Target: LAMA2; (+) strand; PAM type: YTN; PAM sequence: TTT
tccattccaacttttatttt

SEQ ID NO: 351457 - DNA, 20 bp, Artificial Sequence
  Description of Artificial Sequence: Synthetic oligonucleotide
  Target: LAMA2; (+) strand; PAM type: YTN; PAM sequence: TTT
ccattccaacttttatttta

SEQ ID NO: 351458 - DNA, 20 bp, Artificial Sequence
  Description of Artificial Sequence: Synthetic oligonucleotide
  Target: LAMA2; (+) strand; PAM type: YTN; PAM sequence: TTC
cattccaacttttattttag

SEQ ID NO: 351459 - DNA, 20 bp, Artificial Sequence
  Description of Artificial Sequence: Synthetic oligonucleotide
  Target: LAMA2; (+) strand; PAM type: YTN; PAM sequence: TTC
caacttttattttaggttca

SEQ ID NO: 351460 - DNA, 20 bp, Artificial Sequence
  Description of Artificial Sequence: Synthetic oligonucleotide
  Target: LAMA2; (+) strand; PAM type: YTN; PAM sequence: CTT
ttattttaggttcaggtagt

SEQ ID NO: 351461 - DNA, 20 bp, Artificial Sequence
  Description of Artificial Sequence: Synthetic oligonucleotide
  Target: LAMA2; (+) strand; PAM type: YTN; PAM sequence: TTT
tattttaggttcaggtagta

SEQ ID NO: 351462 - DNA, 20 bp, Artificial Sequence
  Description of Artificial Sequence: Synthetic oligonucleotide
  Target: LAMA2; (+) strand; PAM type: YTN; PAM sequence: TTT
attttaggttcaggtagtac

SEQ ID NO: 351463 - DNA, 20 bp, Artificial Sequence
  Description of Artificial Sequence: Synthetic oligonucleotide
  Target: LAMA2; (+) strand; PAM type: YTN; PAM sequence: TTA
ttttaggttcaggtagtaca

SEQ ID NO: 351464 - DNA, 20 bp, Artificial Sequence
  Description of Artificial Sequence: Synthetic oligonucleotide
  Target: LAMA2; (+) strand; PAM type: YTN; PAM sequence: TTT
taggttcaggtagtacatgg

SEQ ID NO: 351465 - DNA, 20 bp, Artificial Sequence
  Description of Artificial Sequence: Synthetic oligonucleotide
  Target: LAMA2; (+) strand; PAM type: YTN; PAM sequence: TTT
aggttcaggtagtacatggg

SEQ ID NO: 351466 - DNA, 20 bp, Artificial Sequence
  Description of Artificial Sequence: Synthetic oligonucleotide
  Target: LAMA2; (+) strand; PAM type: YTN; PAM sequence: TTA
ggttcaggtagtacatgggt

SEQ ID NO: 351467 - DNA, 20 bp, Artificial Sequence
  Description of Artificial Sequence: Synthetic oligonucleotide
  Target: LAMA2; (+) strand; PAM type: YTN; PAM sequence: TTC
aggtagtacatgggtaaatt

SEQ ID NO: 351468 - DNA, 20 bp, Artificial Sequence
  Description of Artificial Sequence: Synthetic oligonucleotide
  Target: LAMA2; (+) strand; PAM type: YTN; PAM sequence: TTA
tgtgtcatgggatttggtgt

SEQ ID NO: 351469 - DNA, 20 bp, Artificial Sequence
  Description of Artificial Sequence: Synthetic oligonucleotide
  Target: LAMA2; (+) strand; PAM type: YTN; PAM sequence: TTT
ggtgtacagattattttgtc

SEQ ID NO: 351470 - DNA, 20 bp, Artificial Sequence
  Description of Artificial Sequence: Synthetic oligonucleotide
  Target: LAMA2; (+) strand; PAM type: YTN; PAM sequence: TTG
gtgtacagattattttgtca

SEQ ID NO: 351471 - DNA, 20 bp, Artificial Sequence
  Description of Artificial Sequence: Synthetic oligonucleotide
  Target: LAMA2; (+) strand; PAM type: YTN; PAM sequence: TTA
ttttgtcacccagataataa

SEQ ID NO: 351472 - DNA, 20 bp, Artificial Sequence
  Description of Artificial Sequence: Synthetic oligonucleotide
  Target: LAMA2; (+) strand; PAM type: YTN; PAM sequence: TTT
tgtcacccagataataagca

SEQ ID NO: 351473 - DNA, 20 bp, Artificial Sequence
  Description of Artificial Sequence: Synthetic oligonucleotide
  Target: LAMA2; (+) strand; PAM type: YTN; PAM sequence: TTT
gtcacccagataataagcat

SEQ ID NO: 351474 - DNA, 20 bp, Artificial Sequence
  Description of Artificial Sequence: Synthetic oligonucleotide
  Target: LAMA2; (+) strand; PAM type: YTN; PAM sequence: TTG
tcacccagataataagcata

SEQ ID NO: 351475 - DNA, 20 bp, Artificial Sequence
  Description of Artificial Sequence: Synthetic oligonucleotide
  Target: LAMA2; (+) strand; PAM type: YTN; PAM sequence: TTT
tcaatcttcacccccctccc

SEQ ID NO: 351476 - DNA, 20 bp, Artificial Sequence
  Description of Artificial Sequence: Synthetic oligonucleotide
  Target: LAMA2; (+) strand; PAM type: YTN; PAM sequence: TTT
caatcttcacccccctccca

SEQ ID NO: 351477 - DNA, 20 bp, Artificial Sequence
  Description of Artificial Sequence: Synthetic oligonucleotide
  Target: LAMA2; (+) strand; PAM type: YTN; PAM sequence: TTC
aatcttcacccccctcccac

SEQ ID NO: 351478 - DNA, 20 bp, Artificial Sequence
  Description of Artificial Sequence: Synthetic oligonucleotide
  Target: LAMA2; (+) strand; PAM type: YTN; PAM sequence: CTT
cacccccctcccaccctttt

SEQ ID NO: 351479 - DNA, 20 bp, Artificial Sequence
  Description of Artificial Sequence: Synthetic oligonucleotide
  Target: LAMA2; (+) strand; PAM type: YTN; PAM sequence: TTC
acccccctcccacccttttc

SEQ ID NO: 351480 - DNA, 20 bp, Artificial Sequence
  Description of Artificial Sequence: Synthetic oligonucleotide
  Target: LAMA2; (+) strand; PAM type: YTN; PAM sequence: CTC
ccacccttttcaagcaggcc

SEQ ID NO: 351481 - DNA, 20 bp, Artificial Sequence
  Description of Artificial Sequence: Synthetic oligonucleotide
  Target: LAMA2; (+) strand; PAM type: YTN; PAM sequence: CTT
ttcaagcaggccctggtgtc

SEQ ID NO: 351482 - DNA, 20 bp, Artificial Sequence
  Description of Artificial Sequence: Synthetic oligonucleotide
  Target: LAMA2; (+) strand; PAM type: YTN; PAM sequence: TTT
tcaagcaggccctggtgtct

SEQ ID NO: 351483 - DNA, 20 bp, Artificial Sequence
  Description of Artificial Sequence: Synthetic oligonucleotide
  Target: LAMA2; (+) strand; PAM type: YTN; PAM sequence: TTT
caagcaggccctggtgtcta

SEQ ID NO: 351484 - DNA, 20 bp, Artificial Sequence
  Description of Artificial Sequence: Synthetic oligonucleotide
  Target: LAMA2; (+) strand; PAM type: YTN; PAM sequence: TTC
aagcaggccctggtgtctat

SEQ ID NO: 351485 - DNA, 20 bp, Artificial Sequence
  Description of Artificial Sequence: Synthetic oligonucleotide
  Target: LAMA2; (+) strand; PAM type: YTN; PAM sequence: CTG
gtgtctattgttgccttctt

SEQ ID NO: 351486 - DNA, 20 bp, Artificial Sequence
  Description of Artificial Sequence: Synthetic oligonucleotide
  Target: LAMA2; (+) strand; PAM type: YTN; PAM sequence: CTA
ttgttgccttctttgtgtcc

SEQ ID NO: 351487 - DNA, 20 bp, Artificial Sequence
  Description of Artificial Sequence: Synthetic oligonucleotide
  Target: LAMA2; (+) strand; PAM type: YTN; PAM sequence: TTG
ttgccttctttgtgtccatg

SEQ ID NO: 351488 - DNA, 20 bp, Artificial Sequence
  Description of Artificial Sequence: Synthetic oligonucleotide
  Target: LAMA2; (+) strand; PAM type: YTN; PAM sequence: TTG
ccttctttgtgtccatgtgt

SEQ ID NO: 351489 - DNA, 20 bp, Artificial Sequence
  Description of Artificial Sequence: Synthetic oligonucleotide
  Target: LAMA2; (+) strand; PAM type: YTN; PAM sequence: CTT
ctttgtgtccatgtgtactc

SEQ ID NO: 351490 - DNA, 20 bp, Artificial Sequence
  Description of Artificial Sequence: Synthetic oligonucleotide
  Target: LAMA2; (+) strand; PAM type: YTN; PAM sequence: TTC
tttgtgtccatgtgtactca

SEQ ID NO: 351491 - DNA, 20 bp, Artificial Sequence
  Description of Artificial Sequence: Synthetic oligonucleotide
  Target: LAMA2; (+) strand; PAM type: YTN; PAM sequence: CTT
tgtgtccatgtgtactcaat

SEQ ID NO: 351492 - DNA, 20 bp, Artificial Sequence
  Description of Artificial Sequence: Synthetic oligonucleotide
  Target: LAMA2; (+) strand; PAM type: YTN; PAM sequence: TTT
gtgtccatgtgtactcaatg

SEQ ID NO: 351493 - DNA, 20 bp, Artificial Sequence
  Description of Artificial Sequence: Synthetic oligonucleotide
  Target: LAMA2; (+) strand; PAM type: YTN; PAM sequence: TTG
tgtccatgtgtactcaatgt

SEQ ID NO: 351494 - DNA, 20 bp, Artificial Sequence
  Description of Artificial Sequence: Synthetic oligonucleotide
  Target: LAMA2; (+) strand; PAM type: YTN; PAM sequence: CTC
aatgtttagctccactcata

SEQ ID NO: 351495 - DNA, 20 bp, Artificial Sequence
  Description of Artificial Sequence: Synthetic oligonucleotide
  Target: LAMA2; (+) strand; PAM type: YTN; PAM sequence: TTT
agctccactcataagagaga

SEQ ID NO: 351496 - DNA, 20 bp, Artificial Sequence
  Description of Artificial Sequence: Synthetic oligonucleotide
  Target: LAMA2; (+) strand; PAM type: YTN; PAM sequence: TTA
gctccactcataagagagaa

SEQ ID NO: 351497 - DNA, 20 bp, Artificial Sequence
  Description of Artificial Sequence: Synthetic oligonucleotide
  Target: LAMA2; (+) strand; PAM type: YTN; PAM sequence: CTC
cactcataagagagaacatg

SEQ ID NO: 351498 - DNA, 20 bp, Artificial Sequence
  Description of Artificial Sequence: Synthetic oligonucleotide
  Target: LAMA2; (+) strand; PAM type: YTN; PAM sequence: CTC
ataagagagaacatgcagta

SEQ ID NO: 351499 - DNA, 20 bp, Artificial Sequence
  Description of Artificial Sequence: Synthetic oligonucleotide
  Target: LAMA2; (+) strand; PAM type: YTN; PAM sequence: CTG
gttttctattcttgcattaa

SEQ ID NO: 351500 - DNA, 20 bp, Artificial Sequence
  Description of Artificial Sequence: Synthetic oligonucleotide
  Target: LAMA2; (+) strand; PAM type: YTN; PAM sequence: TTT
tctattcttgcattaattca

SEQ ID NO: 351501 - DNA, 20 bp, Artificial Sequence
  Description of Artificial Sequence: Synthetic oligonucleotide
  Target: LAMA2; (+) strand; PAM type: YTN; PAM sequence: TTT
ctattcttgcattaattcac

SEQ ID NO: 351502 - DNA, 20 bp, Artificial Sequence
  Description of Artificial Sequence: Synthetic oligonucleotide
  Target: LAMA2; (+) strand; PAM type: YTN; PAM sequence: TTC
tattcttgcattaattcact

SEQ ID NO: 351503 - DNA, 20 bp, Artificial Sequence
  Description of Artificial Sequence: Synthetic oligonucleotide
  Target: LAMA2; (+) strand; PAM type: YTN; PAM sequence: CTA
ttcttgcattaattcactta

SEQ ID NO: 351504 - DNA, 20 bp, Artificial Sequence
  Description of Artificial Sequence: Synthetic oligonucleotide
  Target: LAMA2; (+) strand; PAM type: YTN; PAM sequence: TTC
ttgcattaattcacttagga

SEQ ID NO: 351505 - DNA, 20 bp, Artificial Sequence
  Description of Artificial Sequence: Synthetic oligonucleotide
  Target: LAMA2; (+) strand; PAM type: YTN; PAM sequence: CTT
gcattaattcacttaggata

SEQ ID NO: 351506 - DNA, 20 bp, Artificial Sequence
  Description of Artificial Sequence: Synthetic oligonucleotide
  Target: LAMA2; (+) strand; PAM type: YTN; PAM sequence: TTG
cattaattcacttaggataa

SEQ ID NO: 351507 - DNA, 20 bp, Artificial Sequence
  Description of Artificial Sequence: Synthetic oligonucleotide
  Target: LAMA2; (+) strand; PAM type: YTN; PAM sequence: TTA
attcacttaggataatggcc

SEQ ID NO: 351508 - DNA, 20 bp, Artificial Sequence
  Description of Artificial Sequence: Synthetic oligonucleotide
  Target: LAMA2; (+) strand; PAM type: YTN; PAM sequence: TTC
acttaggataatggccttct

SEQ ID NO: 351509 - DNA, 20 bp, Artificial Sequence
  Description of Artificial Sequence: Synthetic oligonucleotide
  Target: LAMA2; (+) strand; PAM type: YTN; PAM sequence: CTT
aggataatggccttctgctc

SEQ ID NO: 351510 - DNA, 20 bp, Artificial Sequence
  Description of Artificial Sequence: Synthetic oligonucleotide
  Target: LAMA2; (+) strand; PAM type: YTN; PAM sequence: TTA
ggataatggccttctgctcc

SEQ ID NO: 351511 - DNA, 20 bp, Artificial Sequence
  Description of Artificial Sequence: Synthetic oligonucleotide
  Target: LAMA2; (+) strand; PAM type: YTN; PAM sequence: CTT
ctgctccatccatgttgctt

SEQ ID NO: 351512 - DNA, 20 bp, Artificial Sequence
  Description of Artificial Sequence: Synthetic oligonucleotide
  Target: LAMA2; (+) strand; PAM type: YTN; PAM sequence: TTC
tgctccatccatgttgcttc

SEQ ID NO: 351513 - DNA, 20 bp, Artificial Sequence
  Description of Artificial Sequence: Synthetic oligonucleotide
  Target: LAMA2; (+) strand; PAM type: YTN; PAM sequence: CTG
ctccatccatgttgcttcaa

SEQ ID NO: 351514 - DNA, 20 bp, Artificial Sequence
  Description of Artificial Sequence: Synthetic oligonucleotide
  Target: LAMA2; (+) strand; PAM type: YTN; PAM sequence: CTC
catccatgttgcttcaaagg

SEQ ID NO: 351515 - DNA, 20 bp, Artificial Sequence
  Description of Artificial Sequence: Synthetic oligonucleotide
  Target: LAMA2; (+) strand; PAM type: YTN; PAM sequence: TTG
cttcaaaggacatgatttta

SEQ ID NO: 351516 - DNA, 20 bp, Artificial Sequence
  Description of Artificial Sequence: Synthetic oligonucleotide
  Target: LAMA2; (+) strand; PAM type: YTN; PAM sequence: CTT
caaaggacatgattttattc

SEQ ID NO: 351517 - DNA, 20 bp, Artificial Sequence
  Description of Artificial Sequence: Synthetic oligonucleotide
  Target: LAMA2; (+) strand; PAM type: YTN; PAM sequence: TTC
aaaggacatgattttattct

SEQ ID NO: 351518 - DNA, 20 bp, Artificial Sequence
  Description of Artificial Sequence: Synthetic oligonucleotide
  Target: LAMA2; (+) strand; PAM type: YTN; PAM sequence: TTT
tattcttttttatggctgtg

SEQ ID NO: 351519 - DNA, 20 bp, Artificial Sequence
  Description of Artificial Sequence: Synthetic oligonucleotide
  Target: LAMA2; (+) strand; PAM type: YTN; PAM sequence: TTT
attcttttttatggctgtgt

SEQ ID NO: 351520 - DNA, 20 bp, Artificial Sequence
  Description of Artificial Sequence: Synthetic oligonucleotide
  Target: LAMA2; (+) strand; PAM type: YTN; PAM sequence: TTA
ttcttttttatggctgtgta

SEQ ID NO: 351521 - DNA, 20 bp, Artificial Sequence
  Description of Artificial Sequence: Synthetic oligonucleotide
  Target: LAMA2; (+) strand; PAM type: YTN; PAM sequence: TTC
ttttttatggctgtgtagta

SEQ ID NO: 351522 - DNA, 20 bp, Artificial Sequence
  Description of Artificial Sequence: Synthetic oligonucleotide
  Target: LAMA2; (+) strand; PAM type: YTN; PAM sequence: CTT
ttttatggctgtgtagtatt

SEQ ID NO: 351523 - DNA, 20 bp, Artificial Sequence
  Description of Artificial Sequence: Synthetic oligonucleotide
  Target: LAMA2; (+) strand; PAM type: YTN; PAM sequence: TTT
tttatggctgtgtagtattc

SEQ ID NO: 351524 - DNA, 20 bp, Artificial Sequence
  Description of Artificial Sequence: Synthetic oligonucleotide
  Target: LAMA2; (+) strand; PAM type: YTN; PAM sequence: TTT
ttatggctgtgtagtattcc

SEQ ID NO: 351525 - DNA, 20 bp, Artificial Sequence
  Description of Artificial Sequence: Synthetic oligonucleotide
  Target: LAMA2; (+) strand; PAM type: YTN; PAM sequence: TTT
tatggctgtgtagtattcca

SEQ ID NO: 351526 - DNA, 20 bp, Artificial Sequence
  Description of Artificial Sequence: Synthetic oligonucleotide
  Target: LAMA2; (+) strand; PAM type: YTN; PAM sequence: TTT
atggctgtgtagtattccat

SEQ ID NO: 351527 - DNA, 20 bp, Artificial Sequence
  Description of Artificial Sequence: Synthetic oligonucleotide
  Target: LAMA2; (+) strand; PAM type: YTN; PAM sequence: TTA
tggctgtgtagtattccatg

SEQ ID NO: 351528 - DNA, 20 bp, Artificial Sequence
  Description of Artificial Sequence: Synthetic oligonucleotide
  Target: LAMA2; (+) strand; PAM type: YTN; PAM sequence: CTG
tgtagtattccatggtgtat

SEQ ID NO: 351529 - DNA, 20 bp, Artificial Sequence
  Description of Artificial Sequence: Synthetic oligonucleotide
  Target: LAMA2; (+) strand; PAM type: YTN; PAM sequence: TTC
catggtgtatatgtactaca

SEQ ID NO: 351530 - DNA, 20 bp, Artificial Sequence
  Description of Artificial Sequence: Synthetic oligonucleotide
  Target: LAMA2; (+) strand; PAM type: YTN; PAM sequence: CTA
cattttctttattcagtcca

SEQ ID NO: 351531 - DNA, 20 bp, Artificial Sequence
  Description of Artificial Sequence: Synthetic oligonucleotide
  Target: LAMA2; (+) strand; PAM type: YTN; PAM sequence: TTT
tctttattcagtccaccaat

SEQ ID NO: 351532 - DNA, 20 bp, Artificial Sequence
  Description of Artificial Sequence: Synthetic oligonucleotide
  Target: LAMA2; (+) strand; PAM type: YTN; PAM sequence: TTT
ctttattcagtccaccaatg

SEQ ID NO: 351533 - DNA, 20 bp, Artificial Sequence
  Description of Artificial Sequence: Synthetic oligonucleotide
  Target: LAMA2; (+) strand; PAM type: YTN; PAM sequence: TTC
tttattcagtccaccaatga

SEQ ID NO: 351534 - DNA, 20 bp, Artificial Sequence
  Description of Artificial Sequence: Synthetic oligonucleotide
  Target: LAMA2; (+) strand; PAM type: YTN; PAM sequence: CTT
tattcagtccaccaatgatg

SEQ ID NO: 351535 - DNA, 20 bp, Artificial Sequence
  Description of Artificial Sequence: Synthetic oligonucleotide
  Target: LAMA2; (+) strand; PAM type: YTN; PAM sequence: TTT
attcagtccaccaatgatgg

SEQ ID NO: 351536 - DNA, 20 bp, Artificial Sequence
  Description of Artificial Sequence: Synthetic oligonucleotide
  Target: LAMA2; (+) strand; PAM type: YTN; PAM sequence: TTA
ttcagtccaccaatgatggt

SEQ ID NO: 351537 - DNA, 20 bp, Artificial Sequence
  Description of Artificial Sequence: Synthetic oligonucleotide
  Target: LAMA2; (+) strand; PAM type: YTN; PAM sequence: TTC
agtccaccaatgatggtacc

SEQ ID NO: 351538 - DNA, 20 bp, Artificial Sequence
  Description of Artificial Sequence: Synthetic oligonucleotide
  Target: LAMA2; (+) strand; PAM type: YTN; PAM sequence: CTA
ggttgattccatgtctttgt

SEQ ID NO: 351539 - DNA, 20 bp, Artificial Sequence
  Description of Artificial Sequence: Synthetic oligonucleotide
  Target: LAMA2; (+) strand; PAM type: YTN; PAM sequence: TTG
attccatgtctttgttattg

SEQ ID NO: 351540 - DNA, 20 bp, Artificial Sequence
  Description of Artificial Sequence: Synthetic oligonucleotide
  Target: LAMA2; (+) strand; PAM type: YTN; PAM sequence: TTC
catgtctttgttattgtgaa

SEQ ID NO: 351541 - DNA, 20 bp, Artificial Sequence
  Description of Artificial Sequence: Synthetic oligonucleotide
  Target: LAMA2; (+) strand; PAM type: YTN; PAM sequence: CTT
tgttattgtgaatagggctg

SEQ ID NO: 351542 - DNA, 20 bp, Artificial Sequence
  Description of Artificial Sequence: Synthetic oligonucleotide
  Target: LAMA2; (+) strand; PAM type: YTN; PAM sequence: TTT
gttattgtgaatagggctgc

SEQ ID NO: 351543 - DNA, 20 bp, Artificial Sequence
  Description of Artificial Sequence: Synthetic oligonucleotide
  Target: LAMA2; (+) strand; PAM type: YTN; PAM sequence: TTG
ttattgtgaatagggctgca

SEQ ID NO: 351544 - DNA, 20 bp, Artificial Sequence
  Description of Artificial Sequence: Synthetic oligonucleotide
  Target: LAMA2; (+) strand; PAM type: YTN; PAM sequence: TTA
ttgtgaatagggctgcaatg

SEQ ID NO: 351545 - DNA, 20 bp, Artificial Sequence
  Description of Artificial Sequence: Synthetic oligonucleotide
  Target: LAMA2; (+) strand; PAM type: YTN; PAM sequence: TTG
tgaatagggctgcaatgaac

SEQ ID NO: 351546 - DNA, 20 bp, Artificial Sequence
  Description of Artificial Sequence: Synthetic oligonucleotide
  Target: LAMA2; (+) strand; PAM type: YTN; PAM sequence: CTG
caatgaacataggcatgcat

SEQ ID NO: 351547 - DNA, 20 bp, Artificial Sequence
  Description of Artificial Sequence: Synthetic oligonucleotide
  Target: LAMA2; (+) strand; PAM type: YTN; PAM sequence: CTT
tatgatagaatgatatatat

SEQ ID NO: 351548 - DNA, 20 bp, Artificial Sequence
  Description of Artificial Sequence: Synthetic oligonucleotide
  Target: LAMA2; (+) strand; PAM type: YTN; PAM sequence: TTT
atgatagaatgatatatatt

SEQ ID NO: 351549 - DNA, 20 bp, Artificial Sequence
  Description of Artificial Sequence: Synthetic oligonucleotide
  Target: LAMA2; (+) strand; PAM type: YTN; PAM sequence: TTA
tgatagaatgatatatattc

SEQ ID NO: 351550 - DNA, 20 bp, Artificial Sequence
  Description of Artificial Sequence: Synthetic oligonucleotide
  Target: LAMA2; (+) strand; PAM type: YTN; PAM sequence: TTC
ctttgggcatatacgcagta

SEQ ID NO: 351551 - DNA, 20 bp, Artificial Sequence
  Description of Artificial Sequence: Synthetic oligonucleotide
  Target: LAMA2; (+) strand; PAM type: YTN; PAM sequence: CTT
tgggcatatacgcagtaatg

SEQ ID NO: 351552 - DNA, 20 bp, Artificial Sequence
  Description of Artificial Sequence: Synthetic oligonucleotide
  Target: LAMA2; (+) strand; PAM type: YTN; PAM sequence: TTT
gggcatatacgcagtaatgg

SEQ ID NO: 351553 - DNA, 20 bp, Artificial Sequence
  Description of Artificial Sequence: Synthetic oligonucleotide
  Target: LAMA2; (+) strand; PAM type: YTN; PAM sequence: TTG
ggcatatacgcagtaatggg

SEQ ID NO: 351554 - DNA, 20 bp, Artificial Sequence
  Description of Artificial Sequence: Synthetic oligonucleotide
  Target: LAMA2; (+) strand; PAM type: YTN; PAM sequence: TTG
ctgagttgagtgctagttct

SEQ ID NO: 351555 - DNA, 20 bp, Artificial Sequence
  Description of Artificial Sequence: Synthetic oligonucleotide
  Target: LAMA2; (+) strand; PAM type: YTN; PAM sequence: CTG
agttgagtgctagttctgtt

SEQ ID NO: 351556 - DNA, 20 bp, Artificial Sequence
  Description of Artificial Sequence: Synthetic oligonucleotide
  Target: LAMA2; (+) strand; PAM type: YTN; PAM sequence: TTG
agtgctagttctgttttaag

SEQ ID NO: 351557 - DNA, 20 bp, Artificial Sequence
  Description of Artificial Sequence: Synthetic oligonucleotide
  Target: LAMA2; (+) strand; PAM type: YTN; PAM sequence: CTA
gttctgttttaagttttttg

SEQ ID NO: 351558 - DNA, 20 bp, Artificial Sequence
  Description of Artificial Sequence: Synthetic oligonucleotide
  Target: LAMA2; (+) strand; PAM type: YTN; PAM sequence: TTC
tgttttaagttttttgagaa

SEQ ID NO: 351559 - DNA, 20 bp, Artificial Sequence
  Description of Artificial Sequence: Synthetic oligonucleotide
  Target: LAMA2; (+) strand; PAM type: YTN; PAM sequence: CTG
ttttaagttttttgagaaat

SEQ ID NO: 351560 - DNA, 20 bp, Artificial Sequence
  Description of Artificial Sequence: Synthetic oligonucleotide
  Target: LAMA2; (+) strand; PAM type: YTN; PAM sequence: TTT
taagttttttgagaaatctc

SEQ ID NO: 351561 - DNA, 20 bp, Artificial Sequence
  Description of Artificial Sequence: Synthetic oligonucleotide
  Target: LAMA2; (+) strand; PAM type: YTN; PAM sequence: TTT
aagttttttgagaaatctcc

SEQ ID NO: 351562 - DNA, 20 bp, Artificial Sequence
  Description of Artificial Sequence: Synthetic oligonucleotide
  Target: LAMA2; (+) strand; PAM type: YTN; PAM sequence: TTA
agttttttgagaaatctccc

SEQ ID NO: 351563 - DNA, 20 bp, Artificial Sequence
  Description of Artificial Sequence: Synthetic oligonucleotide
  Target: LAMA2; (+) strand; PAM type: YTN; PAM sequence: TTT
tttgagaaatctcccaacgg

SEQ ID NO: 351564 - DNA, 20 bp, Artificial Sequence
  Description of Artificial Sequence: Synthetic oligonucleotide
  Target: LAMA2; (+) strand; PAM type: YTN; PAM sequence: TTT
ttgagaaatctcccaacggc

SEQ ID NO: 351565 - DNA, 20 bp, Artificial Sequence
  Description of Artificial Sequence: Synthetic oligonucleotide
  Target: LAMA2; (+) strand; PAM type: YTN; PAM sequence: TTT
tgagaaatctcccaacggct

SEQ ID NO: 351566 - DNA, 20 bp, Artificial Sequence
  Description of Artificial Sequence: Synthetic oligonucleotide
  Target: LAMA2; (+) strand; PAM type: YTN; PAM sequence: TTT
gagaaatctcccaacggctt

SEQ ID NO: 351567 - DNA, 20 bp, Artificial Sequence
  Description of Artificial Sequence: Synthetic oligonucleotide
  Target: LAMA2; (+) strand; PAM type: YTN; PAM sequence: TTG
agaaatctcccaacggcttc

SEQ ID NO: 351568 - DNA, 20 bp, Artificial Sequence
  Description of Artificial Sequence: Synthetic oligonucleotide
  Target: LAMA2; (+) strand; PAM type: YTN; PAM sequence: CTC
ccaacggcttcccacagtgt

SEQ ID NO: 351569 - DNA, 20 bp, Artificial Sequence
  Description of Artificial Sequence: Synthetic oligonucleotide
  Target: LAMA2; (+) strand; PAM type: YTN; PAM sequence: CTT
cccacagtgtctgaactaat

SEQ ID NO: 351570 - DNA, 20 bp, Artificial Sequence
  Description of Artificial Sequence: Synthetic oligonucleotide
  Target: LAMA2; (+) strand; PAM type: YTN; PAM sequence: TTC
ccacagtgtctgaactaatt

SEQ ID NO: 351571 - DNA, 20 bp, Artificial Sequence
  Description of Artificial Sequence: Synthetic oligonucleotide
  Target: LAMA2; (+) strand; PAM type: YTN; PAM sequence: CTG
aactaatttactttcccacc

SEQ ID NO: 351572 - DNA, 20 bp, Artificial Sequence
  Description of Artificial Sequence: Synthetic oligonucleotide
  Target: LAMA2; (+) strand; PAM type: YTN; PAM sequence: CTA
atttactttcccaccagcag

SEQ ID NO: 351573 - DNA, 20 bp, Artificial Sequence
  Description of Artificial Sequence: Synthetic oligonucleotide
  Target: LAMA2; (+) strand; PAM type: YTN; PAM sequence: TTT
actttcccaccagcagtgta

SEQ ID NO: 351574 - DNA, 20 bp, Artificial Sequence
  Description of Artificial Sequence: Synthetic oligonucleotide
  Target: LAMA2; (+) strand; PAM type: YTN; PAM sequence: TTA
ctttcccaccagcagtgtat

SEQ ID NO: 351575 - DNA, 20 bp, Artificial Sequence
  Description of Artificial Sequence: Synthetic oligonucleotide
  Target: LAMA2; (+) strand; PAM type: YTN; PAM sequence: CTT
tcccaccagcagtgtataag

SEQ ID NO: 351576 - DNA, 20 bp, Artificial Sequence
  Description of Artificial Sequence: Synthetic oligonucleotide
  Target: LAMA2; (+) strand; PAM type: YTN; PAM sequence: TTT
cccaccagcagtgtataagt

SEQ ID NO: 351577 - DNA, 20 bp, Artificial Sequence
  Description of Artificial Sequence: Synthetic oligonucleotide
  Target: LAMA2; (+) strand; PAM type: YTN; PAM sequence: TTC
ccaccagcagtgtataagtg

SEQ ID NO: 351578 - DNA, 20 bp, Artificial Sequence
  Description of Artificial Sequence: Synthetic oligonucleotide
  Target: LAMA2; (+) strand; PAM type: YTN; PAM sequence: TTC
cctttctctgcaacctcacc

SEQ ID NO: 351579 - DNA, 20 bp, Artificial Sequence
  Description of Artificial Sequence: Synthetic oligonucleotide
  Target: LAMA2; (+) strand; PAM type: YTN; PAM sequence: CTT
tctctgcaacctcaccagta

SEQ ID NO: 351580 - DNA, 20 bp, Artificial Sequence
  Description of Artificial Sequence: Synthetic oligonucleotide
  Target: LAMA2; (+) strand; PAM type: YTN; PAM sequence: TTT
ctctgcaacctcaccagtat

SEQ ID NO: 351581 - DNA, 20 bp, Artificial Sequence
  Description of Artificial Sequence: Synthetic oligonucleotide
  Target: LAMA2; (+) strand; PAM type: YTN; PAM sequence: TTC
tctgcaacctcaccagtatc

SEQ ID NO: 351582 - DNA, 20 bp, Artificial Sequence
  Description of Artificial Sequence: Synthetic oligonucleotide
  Target: LAMA2; (+) strand; PAM type: YTN; PAM sequence: CTC
tgcaacctcaccagtatctg

SEQ ID NO: 351583 - DNA, 20 bp, Artificial Sequence
  Description of Artificial Sequence: Synthetic oligonucleotide
  Target: LAMA2; (+) strand; PAM type: YTN; PAM sequence: CTG
caacctcaccagtatctgtt

SEQ ID NO: 351584 - DNA, 20 bp, Artificial Sequence
  Description of Artificial Sequence: Synthetic oligonucleotide
  Target: LAMA2; (+) strand; PAM type: YTN; PAM sequence: CTC
accagtatctgttatttttg

SEQ ID NO: 351585 - DNA, 20 bp, Artificial Sequence
  Description of Artificial Sequence: Synthetic oligonucleotide
  Target: LAMA2; (+) strand; PAM type: YTN; PAM sequence: CTG
ttatttttgactttcagtaa

SEQ ID NO: 351586 - DNA, 20 bp, Artificial Sequence
  Description of Artificial Sequence: Synthetic oligonucleotide
  Target: LAMA2; (+) strand; PAM type: YTN; PAM sequence: TTA
tttttgactttcagtaatag

SEQ ID NO: 351587 - DNA, 20 bp, Artificial Sequence
  Description of Artificial Sequence: Synthetic oligonucleotide
  Target: LAMA2; (+) strand; PAM type: YTN; PAM sequence: TTT
ttgactttcagtaatagccg

SEQ ID NO: 351588 - DNA, 20 bp, Artificial Sequence
  Description of Artificial Sequence: Synthetic oligonucleotide
  Target: LAMA2; (+) strand; PAM type: YTN; PAM sequence: TTT
tgactttcagtaatagccgt

SEQ ID NO: 351589 - DNA, 20 bp, Artificial Sequence
  Description of Artificial Sequence: Synthetic oligonucleotide
  Target: LAMA2; (+) strand; PAM type: YTN; PAM sequence: TTT
gactttcagtaatagccgtt

SEQ ID NO: 351590 - DNA, 20 bp, Artificial Sequence
  Description of Artificial Sequence: Synthetic oligonucleotide
  Target: LAMA2; (+) strand; PAM type: YTN; PAM sequence: TTG
actttcagtaatagccgttc

SEQ ID NO: 351591 - DNA, 20 bp, Artificial Sequence
  Description of Artificial Sequence: Synthetic oligonucleotide
  Target: LAMA2; (+) strand; PAM type: YTN; PAM sequence: CTT
tcagtaatagccgttctgac

SEQ ID NO: 351592 - DNA, 20 bp, Artificial Sequence
  Description of Artificial Sequence: Synthetic oligonucleotide
  Target: LAMA2; (+) strand; PAM type: YTN; PAM sequence: TTT
cagtaatagccgttctgacc

SEQ ID NO: 351593 - DNA, 20 bp, Artificial Sequence
  Description of Artificial Sequence: Synthetic oligonucleotide
  Target: LAMA2; (+) strand; PAM type: YTN; PAM sequence: TTC
agtaatagccgttctgacca

SEQ ID NO: 351594 - DNA, 20 bp, Artificial Sequence
  Description of Artificial Sequence: Synthetic oligonucleotide
  Target: LAMA2; (+) strand; PAM type: YTN; PAM sequence: TTC
tgaccagtgtgagatggtag

SEQ ID NO: 351595 - DNA, 20 bp, Artificial Sequence
  Description of Artificial Sequence: Synthetic oligonucleotide
  Target: LAMA2; (+) strand; PAM type: YTN; PAM sequence: CTG
accagtgtgagatggtagta

SEQ ID NO: 351596 - DNA, 20 bp, Artificial Sequence
  Description of Artificial Sequence: Synthetic oligonucleotide
  Target: LAMA2; (+) strand; PAM type: YTN; PAM sequence: TTT
taagctcatgatatagtgat

SEQ ID NO: 351597 - DNA, 20 bp, Artificial Sequence
  Description of Artificial Sequence: Synthetic oligonucleotide
  Target: LAMA2; (+) strand; PAM type: YTN; PAM sequence: TTT
aagctcatgatatagtgata

SEQ ID NO: 351598 - DNA, 20 bp, Artificial Sequence
  Description of Artificial Sequence: Synthetic oligonucleotide
  Target: LAMA2; (+) strand; PAM type: YTN; PAM sequence: TTA
agctcatgatatagtgatat

SEQ ID NO: 351599 - DNA, 20 bp, Artificial Sequence
  Description of Artificial Sequence: Synthetic oligonucleotide
  Target: LAMA2; (+) strand; PAM type: YTN; PAM sequence: CTC
atgatatagtgatatagtcc

SEQ ID NO: 351600 - DNA, 20 bp, Artificial Sequence
  Description of Artificial Sequence: Synthetic oligonucleotide
  Target: LAMA2; (+) strand; PAM type: YTN; PAM sequence: CTA
tcttttggactattgttttc

SEQ ID NO: 351601 - DNA, 20 bp, Artificial Sequence
  Description of Artificial Sequence: Synthetic oligonucleotide
  Target: LAMA2; (+) strand; PAM type: YTN; PAM sequence: CTT
ttggactattgttttcatat

SEQ ID NO: 351602 - DNA, 20 bp, Artificial Sequence
  Description of Artificial Sequence: Synthetic oligonucleotide
  Target: LAMA2; (+) strand; PAM type: YTN; PAM sequence: TTT
tggactattgttttcatata

SEQ ID NO: 351603 - DNA, 20 bp, Artificial Sequence
  Description of Artificial Sequence: Synthetic oligonucleotide
  Target: LAMA2; (+) strand; PAM type: YTN; PAM sequence: TTT
ggactattgttttcatatat

SEQ ID NO: 351604 - DNA, 20 bp, Artificial Sequence
  Description of Artificial Sequence: Synthetic oligonucleotide
  Target: LAMA2; (+) strand; PAM type: YTN; PAM sequence: TTG
gactattgttttcatatatt

SEQ ID NO: 351605 - DNA, 20 bp, Artificial Sequence
  Description of Artificial Sequence: Synthetic oligonucleotide
  Target: LAMA2; (+) strand; PAM type: YTN; PAM sequence: CTA
ttgttttcatatattgcaca

SEQ ID NO: 351606 - DNA, 20 bp, Artificial Sequence
  Description of Artificial Sequence: Synthetic oligonucleotide
  Target: LAMA2; (+) strand; PAM type: YTN; PAM sequence: TTG
ttttcatatattgcacataa

SEQ ID NO: 351607 - DNA, 20 bp, Artificial Sequence
  Description of Artificial Sequence: Synthetic oligonucleotide
  Target: LAMA2; (+) strand; PAM type: YTN; PAM sequence: TTT
tcatatattgcacataattt

SEQ ID NO: 351608 - DNA, 20 bp, Artificial Sequence
  Description of Artificial Sequence: Synthetic oligonucleotide
  Target: LAMA2; (+) strand; PAM type: YTN; PAM sequence: TTT
catatattgcacataatttg

SEQ ID NO: 351609 - DNA, 20 bp, Artificial Sequence
  Description of Artificial Sequence: Synthetic oligonucleotide
  Target: LAMA2; (+) strand; PAM type: YTN; PAM sequence: TTC
atatattgcacataatttgt

SEQ ID NO: 351610 - DNA, 20 bp, Artificial Sequence
  Description of Artificial Sequence: Synthetic oligonucleotide
  Target: LAMA2; (+) strand; PAM type: YTN; PAM sequence: TTG
cacataatttgtaagccagc

SEQ ID NO: 351611 - DNA, 20 bp, Artificial Sequence
  Description of Artificial Sequence: Synthetic oligonucleotide
  Target: LAMA2; (+) strand; PAM type: YTN; PAM sequence: TTT
gtaagccagcaatacaatgt

SEQ ID NO: 351612 - DNA, 20 bp, Artificial Sequence
  Description of Artificial Sequence: Synthetic oligonucleotide
  Target: LAMA2; (+) strand; PAM type: YTN; PAM sequence: TTG
taagccagcaatacaatgtt

SEQ ID NO: 351613 - DNA, 20 bp, Artificial Sequence
  Description of Artificial Sequence: Synthetic oligonucleotide
  Target: LAMA2; (+) strand; PAM type: YTN; PAM sequence: TTG
tcatttttgtttgaagtcac

SEQ ID NO: 351614 - DNA, 20 bp, Artificial Sequence
  Description of Artificial Sequence: Synthetic oligonucleotide
  Target: LAMA2; (+) strand; PAM type: YTN; PAM sequence: TTT
ttgtttgaagtcacaaaact

SEQ ID NO: 351615 - DNA, 20 bp, Artificial Sequence
  Description of Artificial Sequence: Synthetic oligonucleotide
  Target: LAMA2; (+) strand; PAM type: YTN; PAM sequence: TTT
tgtttgaagtcacaaaacta

SEQ ID NO: 351616 - DNA, 20 bp, Artificial Sequence
  Description of Artificial Sequence: Synthetic oligonucleotide
  Target: LAMA2; (+) strand; PAM type: YTN; PAM sequence: TTT
gtttgaagtcacaaaactat

SEQ ID NO: 351617 - DNA, 20 bp, Artificial Sequence
  Description of Artificial Sequence: Synthetic oligonucleotide
  Target: LAMA2; (+) strand; PAM type: YTN; PAM sequence: TTG
tttgaagtcacaaaactatg

SEQ ID NO: 351618 - DNA, 20 bp, Artificial Sequence
  Description of Artificial Sequence: Synthetic oligonucleotide
  Target: LAMA2; (+) strand; PAM type: YTN; PAM sequence: TTT
gaagtcacaaaactatgaaa

SEQ ID NO: 351619 - DNA, 20 bp, Artificial Sequence
  Description of Artificial Sequence: Synthetic oligonucleotide
  Target: LAMA2; (+) strand; PAM type: YTN; PAM sequence: TTG
aagtcacaaaactatgaaaa

SEQ ID NO: 351620 - DNA, 20 bp, Artificial Sequence
  Description of Artificial Sequence: Synthetic oligonucleotide
  Target: LAMA2; (+) strand; PAM type: YTN; PAM sequence: CTA
tgaaaacaatcttaaagaaa

SEQ ID NO: 351621 - DNA, 20 bp, Artificial Sequence
  Description of Artificial Sequence: Synthetic oligonucleotide
  Target: LAMA2; (+) strand; PAM type: YTN; PAM sequence: CTT
aaagaaatgaaaagaaggaa

SEQ ID NO: 351622 - DNA, 20 bp, Artificial Sequence
  Description of Artificial Sequence: Synthetic oligonucleotide
  Target: LAMA2; (+) strand; PAM type: YTN; PAM sequence: TTA
aagaaatgaaaagaaggaaa

SEQ ID NO: 351623 - DNA, 20 bp, Artificial Sequence
  Description of Artificial Sequence: Synthetic oligonucleotide
  Target: LAMA2; (+) strand; PAM type: YTN; PAM sequence: TTT
acattaaccatacctttccc

SEQ ID NO: 351624 - DNA, 20 bp, Artificial Sequence
  Description of Artificial Sequence: Synthetic oligonucleotide
  Target: LAMA2; (+) strand; PAM type: YTN; PAM sequence: TTA
cattaaccatacctttccca

SEQ ID NO: 351625 - DNA, 20 bp, Artificial Sequence
  Description of Artificial Sequence: Synthetic oligonucleotide
  Target: LAMA2; (+) strand; PAM type: YTN; PAM sequence: TTA
accatacctttcccattttc

SEQ ID NO: 351626 - DNA, 20 bp, Artificial Sequence
  Description of Artificial Sequence: Synthetic oligonucleotide
  Target: LAMA2; (+) strand; PAM type: YTN; PAM sequence: CTT
tcccattttccatactctgt

SEQ ID NO: 351627 - DNA, 20 bp, Artificial Sequence
  Description of Artificial Sequence: Synthetic oligonucleotide
  Target: LAMA2; (+) strand; PAM type: YTN; PAM sequence: TTT
cccattttccatactctgtg

SEQ ID NO: 351628 - DNA, 20 bp, Artificial Sequence
  Description of Artificial Sequence: Synthetic oligonucleotide
  Target: LAMA2; (+) strand; PAM type: YTN; PAM sequence: TTC
ccattttccatactctgtgg

SEQ ID NO: 351629 - DNA, 20 bp, Artificial Sequence
  Description of Artificial Sequence: Synthetic oligonucleotide
  Target: LAMA2; (+) strand; PAM type: YTN; PAM sequence: TTT
tccatactctgtggttctag

SEQ ID NO: 351630 - DNA, 20 bp, Artificial Sequence
  Description of Artificial Sequence: Synthetic oligonucleotide
  Target: LAMA2; (+) strand; PAM type: YTN; PAM sequence: TTT
ccatactctgtggttctagc

SEQ ID NO: 351631 - DNA, 20 bp, Artificial Sequence
  Description of Artificial Sequence: Synthetic oligonucleotide
  Target: LAMA2; (+) strand; PAM type: YTN; PAM sequence: TTC
catactctgtggttctagct

SEQ ID NO: 351632 - DNA, 20 bp, Artificial Sequence
  Description of Artificial Sequence: Synthetic oligonucleotide
  Target: LAMA2; (+) strand; PAM type: YTN; PAM sequence: CTC
tgtggttctagcttatatat

SEQ ID NO: 351633 - DNA, 20 bp, Artificial Sequence
  Description of Artificial Sequence: Synthetic oligonucleotide
  Target: LAMA2; (+) strand; PAM type: YTN; PAM sequence: CTG
tggttctagcttatatatat

SEQ ID NO: 351634 - DNA, 20 bp, Artificial Sequence
  Description of Artificial Sequence: Synthetic oligonucleotide
  Target: LAMA2; (+) strand; PAM type: YTN; PAM sequence: TTC
tagcttatatatattgccct

SEQ ID NO: 351635 - DNA, 20 bp, Artificial Sequence
  Description of Artificial Sequence: Synthetic oligonucleotide
  Target: LAMA2; (+) strand; PAM type: YTN; PAM sequence: CTA
gcttatatatattgccctcc

SEQ ID NO: 351636 - DNA, 20 bp, Artificial Sequence
  Description of Artificial Sequence: Synthetic oligonucleotide
  Target: LAMA2; (+) strand; PAM type: YTN; PAM sequence: CTT
atatatattgccctcctgct

SEQ ID NO: 351637 - DNA, 20 bp, Artificial Sequence
  Description of Artificial Sequence: Synthetic oligonucleotide
  Target: LAMA2; (+) strand; PAM type: YTN; PAM sequence: TTA
tatatattgccctcctgctt

SEQ ID NO: 351638 - DNA, 20 bp, Artificial Sequence
  Description of Artificial Sequence: Synthetic oligonucleotide
  Target: LAMA2; (+) strand; PAM type: YTN; PAM sequence: TTG
ccctcctgcttgaaaaattt

SEQ ID NO: 351639 - DNA, 20 bp, Artificial Sequence
  Description of Artificial Sequence: Synthetic oligonucleotide
  Target: LAMA2; (+) strand; PAM type: YTN; PAM sequence: CTC
ctgcttgaaaaatttccttt

SEQ ID NO: 351640 - DNA, 20 bp, Artificial Sequence
  Description of Artificial Sequence: Synthetic oligonucleotide
  Target: LAMA2; (+) strand; PAM type: YTN; PAM sequence: CTG
cttgaaaaatttcctttaac

SEQ ID NO: 351641 - DNA, 20 bp, Artificial Sequence
  Description of Artificial Sequence: Synthetic oligonucleotide
  Target: LAMA2; (+) strand; PAM type: YTN; PAM sequence: CTT
gaaaaatttcctttaacatt

SEQ ID NO: 351642 - DNA, 20 bp, Artificial Sequence
  Description of Artificial Sequence: Synthetic oligonucleotide
  Target: LAMA2; (+) strand; PAM type: YTN; PAM sequence: TTG
aaaaatttcctttaacattt

SEQ ID NO: 351643 - DNA, 20 bp, Artificial Sequence
  Description of Artificial Sequence: Synthetic oligonucleotide
  Target: LAMA2; (+) strand; PAM type: YTN; PAM sequence: TTT
cctttaacattttttttttg

SEQ ID NO: 351644 - DNA, 20 bp, Artificial Sequence
  Description of Artificial Sequence: Synthetic oligonucleotide
  Target: LAMA2; (+) strand; PAM type: YTN; PAM sequence: TTC
ctttaacattttttttttgg

SEQ ID NO: 351645 - DNA, 20 bp, Artificial Sequence
  Description of Artificial Sequence: Synthetic oligonucleotide
  Target: LAMA2; (+) strand; PAM type: YTN; PAM sequence: CTT
taacattttttttttggtag

SEQ ID NO: 351646 - DNA, 20 bp, Artificial Sequence
  Description of Artificial Sequence: Synthetic oligonucleotide
  Target: LAMA2; (+) strand; PAM type: YTN; PAM sequence: TTT
aacattttttttttggtagt

SEQ ID NO: 351647 - DNA, 20 bp, Artificial Sequence
  Description of Artificial Sequence: Synthetic oligonucleotide
  Target: LAMA2; (+) strand; PAM type: YTN; PAM sequence: TTA
acattttttttttggtagtg

SEQ ID NO: 351648 - DNA, 20 bp, Artificial Sequence
  Description of Artificial Sequence: Synthetic oligonucleotide
  Target: LAMA2; (+) strand; PAM type: YTN; PAM sequence: TTT
tttttttggtagtgcagagc

SEQ ID NO: 351649 - DNA, 20 bp, Artificial Sequence
  Description of Artificial Sequence: Synthetic oligonucleotide
  Target: LAMA2; (+) strand; PAM type: YTN; PAM sequence: TTT
ttttttggtagtgcagagct

SEQ ID NO: 351650 - DNA, 20 bp, Artificial Sequence
  Description of Artificial Sequence: Synthetic oligonucleotide
  Target: LAMA2; (+) strand; PAM type: YTN; PAM sequence: TTT
tttttggtagtgcagagctg

SEQ ID NO: 351651 - DNA, 20 bp, Artificial Sequence
  Description of Artificial Sequence: Synthetic oligonucleotide
  Target: LAMA2; (+) strand; PAM type: YTN; PAM sequence: TTT
ttttggtagtgcagagctgc

SEQ ID NO: 351652 - DNA, 20 bp, Artificial Sequence
  Description of Artificial Sequence: Synthetic oligonucleotide
  Target: LAMA2; (+) strand; PAM type: YTN; PAM sequence: TTT
tttggtagtgcagagctgct

SEQ ID NO: 351653 - DNA, 20 bp, Artificial Sequence
  Description of Artificial Sequence: Synthetic oligonucleotide
  Target: LAMA2; (+) strand; PAM type: YTN; PAM sequence: TTT
ttggtagtgcagagctgctg

SEQ ID NO: 351654 - DNA, 20 bp, Artificial Sequence
  Description of Artificial Sequence: Synthetic oligonucleotide
  Target: LAMA2; (+) strand; PAM type: YTN; PAM sequence: TTT
tggtagtgcagagctgctgg

SEQ ID NO: 351655 - DNA, 20 bp, Artificial Sequence
  Description of Artificial Sequence: Synthetic oligonucleotide
  Target: LAMA2; (+) strand; PAM type: YTN; PAM sequence: TTT
ggtagtgcagagctgctggt

SEQ ID NO: 351656 - DNA, 20 bp, Artificial Sequence
  Description of Artificial Sequence: Synthetic oligonucleotide
  Target: LAMA2; (+) strand; PAM type: YTN; PAM sequence: TTG
gtagtgcagagctgctggtg

SEQ ID NO: 351657 - DNA, 20 bp, Artificial Sequence
  Description of Artificial Sequence: Synthetic oligonucleotide
  Target: LAMA2; (+) strand; PAM type: YTN; PAM sequence: CTG
ctggtgacaaattttctcaa

SEQ ID NO: 351658 - DNA, 20 bp, Artificial Sequence
  Description of Artificial Sequence: Synthetic oligonucleotide
  Target: LAMA2; (+) strand; PAM type: YTN; PAM sequence: CTG
gtgacaaattttctcaactt

SEQ ID NO: 351659 - DNA, 20 bp, Artificial Sequence
  Description of Artificial Sequence: Synthetic oligonucleotide
  Target: LAMA2; (+) strand; PAM type: YTN; PAM sequence: TTT
tctcaacttccctttatctg

SEQ ID NO: 351660 - DNA, 20 bp, Artificial Sequence
  Description of Artificial Sequence: Synthetic oligonucleotide
  Target: LAMA2; (+) strand; PAM type: YTN; PAM sequence: TTT
ctcaacttccctttatctga

SEQ ID NO: 351661 - DNA, 20 bp, Artificial Sequence
  Description of Artificial Sequence: Synthetic oligonucleotide
  Target: LAMA2; (+) strand; PAM type: YTN; PAM sequence: TTC
tcaacttccctttatctgaa

SEQ ID NO: 351662 - DNA, 20 bp, Artificial Sequence
  Description of Artificial Sequence: Synthetic oligonucleotide
  Target: LAMA2; (+) strand; PAM type: YTN; PAM sequence: CTC
aacttccctttatctgaaaa

SEQ ID NO: 351663 - DNA, 20 bp, Artificial Sequence
  Description of Artificial Sequence: Synthetic oligonucleotide
  Target: LAMA2; (+) strand; PAM type: YTN; PAM sequence: CTT
ccctttatctgaaaatgtct

SEQ ID NO: 351664 - DNA, 20 bp, Artificial Sequence
  Description of Artificial Sequence: Synthetic oligonucleotide
  Target: LAMA2; (+) strand; PAM type: YTN; PAM sequence: TTC
cctttatctgaaaatgtctt

SEQ ID NO: 351665 - DNA, 20 bp, Artificial Sequence
  Description of Artificial Sequence: Synthetic oligonucleotide
  Target: LAMA2; (+) strand; PAM type: YTN; PAM sequence: CTT
tatctgaaaatgtctttaat

SEQ ID NO: 351666 - DNA, 20 bp, Artificial Sequence
  Description of Artificial Sequence: Synthetic oligonucleotide
  Target: LAMA2; (+) strand; PAM type: YTN; PAM sequence: TTT
atctgaaaatgtctttaatc

SEQ ID NO: 351667 - DNA, 20 bp, Artificial Sequence
  Description of Artificial Sequence: Synthetic oligonucleotide
  Target: LAMA2; (+) strand; PAM type: YTN; PAM sequence: TTA
tctgaaaatgtctttaatct

SEQ ID NO: 351668 - DNA, 20 bp, Artificial Sequence
  Description of Artificial Sequence: Synthetic oligonucleotide
  Target: LAMA2; (+) strand; PAM type: YTN; PAM sequence: CTG
aaaatgtctttaatctactt

SEQ ID NO: 351669 - DNA, 20 bp, Artificial Sequence
  Description of Artificial Sequence: Synthetic oligonucleotide
  Target: LAMA2; (+) strand; PAM type: YTN; PAM sequence: CTT
taatctactttcattattga

SEQ ID NO: 351670 - DNA, 20 bp, Artificial Sequence
  Description of Artificial Sequence: Synthetic oligonucleotide
  Target: LAMA2; (+) strand; PAM type: YTN; PAM sequence: TTT
aatctactttcattattgaa

SEQ ID NO: 351671 - DNA, 20 bp, Artificial Sequence
  Description of Artificial Sequence: Synthetic oligonucleotide
  Target: LAMA2; (+) strand; PAM type: YTN; PAM sequence: TTA
atctactttcattattgaag

SEQ ID NO: 351672 - DNA, 20 bp, Artificial Sequence
  Description of Artificial Sequence: Synthetic oligonucleotide
  Target: LAMA2; (+) strand; PAM type: YTN; PAM sequence: CTA
ctttcattattgaaggatat

SEQ ID NO: 351673 - DNA, 20 bp, Artificial Sequence
  Description of Artificial Sequence: Synthetic oligonucleotide
  Target: LAMA2; (+) strand; PAM type: YTN; PAM sequence: CTT
tcattattgaaggatatttt

SEQ ID NO: 351674 - DNA, 20 bp, Artificial Sequence
  Description of Artificial Sequence: Synthetic oligonucleotide
  Target: LAMA2; (+) strand; PAM type: YTN; PAM sequence: TTT
cattattgaaggatattttc

SEQ ID NO: 351675 - DNA, 20 bp, Artificial Sequence
  Description of Artificial Sequence: Synthetic oligonucleotide
  Target: LAMA2; (+) strand; PAM type: YTN; PAM sequence: TTC
attattgaaggatattttcc

SEQ ID NO: 351676 - DNA, 20 bp, Artificial Sequence
  Description of Artificial Sequence: Synthetic oligonucleotide
  Target: LAMA2; (+) strand; PAM type: YTN; PAM sequence: TTA
ttgaaggatattttccacat

SEQ ID NO: 351677 - DNA, 20 bp, Artificial Sequence
  Description of Artificial Sequence: Synthetic oligonucleotide
  Target: LAMA2; (+) strand; PAM type: YTN; PAM sequence: TTG
aaggatattttccacatagt

SEQ ID NO: 351678 - DNA, 20 bp, Artificial Sequence
  Description of Artificial Sequence: Synthetic oligonucleotide
  Target: LAMA2; (+) strand; PAM type: YTN; PAM sequence: TTT
tccacatagttacagaggtg

SEQ ID NO: 351679 - DNA, 20 bp, Artificial Sequence
  Description of Artificial Sequence: Synthetic oligonucleotide
  Target: LAMA2; (+) strand; PAM type: YTN; PAM sequence: TTT
ccacatagttacagaggtgt

SEQ ID NO: 351680 - DNA, 20 bp, Artificial Sequence
  Description of Artificial Sequence: Synthetic oligonucleotide
  Target: LAMA2; (+) strand; PAM type: YTN; PAM sequence: TTC
cacatagttacagaggtgtg

SEQ ID NO: 351681 - DNA, 20 bp, Artificial Sequence
  Description of Artificial Sequence: Synthetic oligonucleotide
  Target: LAMA2; (+) strand; PAM type: YTN; PAM sequence: TTA
cagaggtgtgtgttttcttc

SEQ ID NO: 351682 - DNA, 20 bp, Artificial Sequence
  Description of Artificial Sequence: Synthetic oligonucleotide
  Target: LAMA2; (+) strand; PAM type: YTN; PAM sequence: TTT
tcttctttgtttagcacttt

SEQ ID NO: 351683 - DNA, 20 bp, Artificial Sequence
  Description of Artificial Sequence: Synthetic oligonucleotide
  Target: LAMA2; (+) strand; PAM type: YTN; PAM sequence: TTT
cttctttgtttagcacttta

SEQ ID NO: 351684 - DNA, 20 bp, Artificial Sequence
  Description of Artificial Sequence: Synthetic oligonucleotide
  Target: LAMA2; (+) strand; PAM type: YTN; PAM sequence: TTC
ttctttgtttagcactttaa

SEQ ID NO: 351685 - DNA, 20 bp, Artificial Sequence
  Description of Artificial Sequence: Synthetic oligonucleotide
  Target: LAMA2; (+) strand; PAM type: YTN; PAM sequence: CTT
ctttgtttagcactttaaag

SEQ ID NO: 351686 - DNA, 20 bp, Artificial Sequence
  Description of Artificial Sequence: Synthetic oligonucleotide
  Target: LAMA2; (+) strand; PAM type: YTN; PAM sequence: TTC
tttgtttagcactttaaaga

SEQ ID NO: 351687 - DNA, 20 bp, Artificial Sequence
  Description of Artificial Sequence: Synthetic oligonucleotide
  Target: LAMA2; (+) strand; PAM type: YTN; PAM sequence: CTT
tgtttagcactttaaagatg

SEQ ID NO: 351688 - DNA, 20 bp, Artificial Sequence
  Description of Artificial Sequence: Synthetic oligonucleotide
  Target: LAMA2; (+) strand; PAM type: YTN; PAM sequence: TTT
gtttagcactttaaagatgt

SEQ ID NO: 351689 - DNA, 20 bp, Artificial Sequence
  Description of Artificial Sequence: Synthetic oligonucleotide
  Target: LAMA2; (+) strand; PAM type: YTN; PAM sequence: TTG
tttagcactttaaagatgtg

SEQ ID NO: 351690 - DNA, 20 bp, Artificial Sequence
  Description of Artificial Sequence: Synthetic oligonucleotide
  Target: LAMA2; (+) strand; PAM type: YTN; PAM sequence: TTT
agcactttaaagatgtggca

SEQ ID NO: 351691 - DNA, 20 bp, Artificial Sequence
  Description of Artificial Sequence: Synthetic oligonucleotide
  Target: LAMA2; (+) strand; PAM type: YTN; PAM sequence: TTA
gcactttaaagatgtggcac

SEQ ID NO: 351692 - DNA, 20 bp, Artificial Sequence
  Description of Artificial Sequence: Synthetic oligonucleotide
  Target: LAMA2; (+) strand; PAM type: YTN; PAM sequence: CTT
taaagatgtggcaccattat

SEQ ID NO: 351693 - DNA, 20 bp, Artificial Sequence
  Description of Artificial Sequence: Synthetic oligonucleotide
  Target: LAMA2; (+) strand; PAM type: YTN; PAM sequence: TTT
aaagatgtggcaccattatt

SEQ ID NO: 351694 - DNA, 20 bp, Artificial Sequence
  Description of Artificial Sequence: Synthetic oligonucleotide
  Target: LAMA2; (+) strand; PAM type: YTN; PAM sequence: TTA
aagatgtggcaccattattt

SEQ ID NO: 351695 - DNA, 20 bp, Artificial Sequence
  Description of Artificial Sequence: Synthetic oligonucleotide
  Target: LAMA2; (+) strand; PAM type: YTN; PAM sequence: TTA
ttttctggatttcattcatc

SEQ ID NO: 351696 - DNA, 20 bp, Artificial Sequence
  Description of Artificial Sequence: Synthetic oligonucleotide
  Target: LAMA2; (+) strand; PAM type: YTN; PAM sequence: TTT
tctggatttcattcatcctt

SEQ ID NO: 351697 - DNA, 20 bp, Artificial Sequence
  Description of Artificial Sequence: Synthetic oligonucleotide
  Target: LAMA2; (+) strand; PAM type: YTN; PAM sequence: TTT
ctggatttcattcatcctta

SEQ ID NO: 351698 - DNA, 20 bp, Artificial Sequence
  Description of Artificial Sequence: Synthetic oligonucleotide
  Target: LAMA2; (+) strand; PAM type: YTN; PAM sequence: TTC
tggatttcattcatccttat

SEQ ID NO: 351699 - DNA, 20 bp, Artificial Sequence
  Description of Artificial Sequence: Synthetic oligonucleotide
  Target: LAMA2; (+) strand; PAM type: YTN; PAM sequence: CTG
gatttcattcatccttatga

SEQ ID NO: 351700 - DNA, 20 bp, Artificial Sequence
  Description of Artificial Sequence: Synthetic oligonucleotide
  Target: LAMA2; (+) strand; PAM type: YTN; PAM sequence: TTT
cattcatccttatgacaaca

SEQ ID NO: 351701 - DNA, 20 bp, Artificial Sequence
  Description of Artificial Sequence: Synthetic oligonucleotide
  Target: LAMA2; (+) strand; PAM type: YTN; PAM sequence: TTC
attcatccttatgacaacat

SEQ ID NO: 351702 - DNA, 20 bp, Artificial Sequence
  Description of Artificial Sequence: Synthetic oligonucleotide
  Target: LAMA2; (+) strand; PAM type: YTN; PAM sequence: TTC
atccttatgacaacatagcc

SEQ ID NO: 351703 - DNA, 20 bp, Artificial Sequence
  Description of Artificial Sequence: Synthetic oligonucleotide
  Target: LAMA2; (+) strand; PAM type: YTN; PAM sequence: CTT
atgacaacatagccattatt

SEQ ID NO: 351704 - DNA, 20 bp, Artificial Sequence
  Description of Artificial Sequence: Synthetic oligonucleotide
  Target: LAMA2; (+) strand; PAM type: YTN; PAM sequence: TTA
tgacaacatagccattattt

SEQ ID NO: 351705 - DNA, 20 bp, Artificial Sequence
  Description of Artificial Sequence: Synthetic oligonucleotide
  Target: LAMA2; (+) strand; PAM type: YTN; PAM sequence: TTA
tttgtttctttgttctatat

SEQ ID NO: 351706 - DNA, 20 bp, Artificial Sequence
  Description of Artificial Sequence: Synthetic oligonucleotide
  Target: LAMA2; (+) strand; PAM type: YTN; PAM sequence: TTT
gtttctttgttctatatata

SEQ ID NO: 351707 - DNA, 20 bp, Artificial Sequence
  Description of Artificial Sequence: Synthetic oligonucleotide
  Target: LAMA2; (+) strand; PAM type: YTN; PAM sequence: TTG
tttctttgttctatatatat

SEQ ID NO: 351708 - DNA, 20 bp, Artificial Sequence
  Description of Artificial Sequence: Synthetic oligonucleotide
  Target: LAMA2; (+) strand; PAM type: YTN; PAM sequence: TTT
ctttgttctatatatatata

SEQ ID NO: 351709 - DNA, 20 bp, Artificial Sequence
  Description of Artificial Sequence: Synthetic oligonucleotide
  Target: LAMA2; (+) strand; PAM type: YTN; PAM sequence: TTC
tttgttctatatatatatat

SEQ ID NO: 351710 - DNA, 20 bp, Artificial Sequence
  Description of Artificial Sequence: Synthetic oligonucleotide
  Target: LAMA2; (+) strand; PAM type: YTN; PAM sequence: CTT
tgttctatatatatatatct

SEQ ID NO: 351711 - DNA, 20 bp, Artificial Sequence
  Description of Artificial Sequence: Synthetic oligonucleotide
  Target: LAMA2; (+) strand; PAM type: YTN; PAM sequence: TTT
gttctatatatatatatctt

SEQ ID NO: 351712 - DNA, 20 bp, Artificial Sequence
  Description of Artificial Sequence: Synthetic oligonucleotide
  Target: LAMA2; (+) strand; PAM type: YTN; PAM sequence: TTG
ttctatatatatatatcttt

SEQ ID NO: 351713 - DNA, 20 bp, Artificial Sequence
  Description of Artificial Sequence: Synthetic oligonucleotide
  Target: LAMA2; (+) strand; PAM type: YTN; PAM sequence: TTC
tatatatatatatctttaat

SEQ ID NO: 351714 - DNA, 20 bp, Artificial Sequence
  Description of Artificial Sequence: Synthetic oligonucleotide
  Target: LAMA2; (+) strand; PAM type: YTN; PAM sequence: CTA
tatatatatatctttaattc

SEQ ID NO: 351715 - DNA, 20 bp, Artificial Sequence
  Description of Artificial Sequence: Synthetic oligonucleotide
  Target: LAMA2; (+) strand; PAM type: YTN; PAM sequence: CTT
taattcactagatgatttca

SEQ ID NO: 351716 - DNA, 20 bp, Artificial Sequence
  Description of Artificial Sequence: Synthetic oligonucleotide
  Target: LAMA2; (+) strand; PAM type: YTN; PAM sequence: TTT
aattcactagatgatttcaa

SEQ ID NO: 351717 - DNA, 20 bp, Artificial Sequence
  Description of Artificial Sequence: Synthetic oligonucleotide
  Target: LAMA2; (+) strand; PAM type: YTN; PAM sequence: TTA
attcactagatgatttcaaa

SEQ ID NO: 351718 - DNA, 20 bp, Artificial Sequence
  Description of Artificial Sequence: Synthetic oligonucleotide
  Target: LAMA2; (+) strand; PAM type: YTN; PAM sequence: TTC
actagatgatttcaaaaatt

SEQ ID NO: 351719 - DNA, 20 bp, Artificial Sequence
  Description of Artificial Sequence: Synthetic oligonucleotide
  Target: LAMA2; (+) strand; PAM type: YTN; PAM sequence: CTA
gatgatttcaaaaatttttt

SEQ ID NO: 351720 - DNA, 20 bp, Artificial Sequence
  Description of Artificial Sequence: Synthetic oligonucleotide
  Target: LAMA2; (+) strand; PAM type: YTN; PAM sequence: TTT
caaaaatttttttatatctg

SEQ ID NO: 351721 - DNA, 20 bp, Artificial Sequence
  Description of Artificial Sequence: Synthetic oligonucleotide
  Target: LAMA2; (+) strand; PAM type: YTN; PAM sequence: TTC
aaaaatttttttatatctgc

SEQ ID NO: 351722 - DNA, 20 bp, Artificial Sequence
  Description of Artificial Sequence: Synthetic oligonucleotide
  Target: LAMA2; (+) strand; PAM type: YTN; PAM sequence: TTT
ttttatatctgccttttgac

SEQ ID NO: 351723 - DNA, 20 bp, Artificial Sequence
  Description of Artificial Sequence: Synthetic oligonucleotide
  Target: LAMA2; (+) strand; PAM type: YTN; PAM sequence: TTT
tttatatctgccttttgaca

SEQ ID NO: 351724 - DNA, 20 bp, Artificial Sequence
  Description of Artificial Sequence: Synthetic oligonucleotide
  Target: LAMA2; (+) strand; PAM type: YTN; PAM sequence: TTT
ttatatctgccttttgacac

SEQ ID NO: 351725 - DNA, 20 bp, Artificial Sequence
  Description of Artificial Sequence: Synthetic oligonucleotide
  Target: LAMA2; (+) strand; PAM type: YTN; PAM sequence: TTT
tatatctgccttttgacact

SEQ ID NO: 351726 - DNA, 20 bp, Artificial Sequence
  Description of Artificial Sequence: Synthetic oligonucleotide
  Target: LAMA2; (+) strand; PAM type: YTN; PAM sequence: TTT
atatctgccttttgacactt

SEQ ID NO: 351727 - DNA, 20 bp, Artificial Sequence
  Description of Artificial Sequence: Synthetic oligonucleotide
  Target: LAMA2; (+) strand; PAM type: YTN; PAM sequence: TTA
tatctgccttttgacactta

SEQ ID NO: 351728 - DNA, 20 bp, Artificial Sequence
  Description of Artificial Sequence: Synthetic oligonucleotide
  Target: LAMA2; (+) strand; PAM type: YTN; PAM sequence: CTG
ccttttgacacttataccat

SEQ ID NO: 351729 - DNA, 20 bp, Artificial Sequence
  Description of Artificial Sequence: Synthetic oligonucleotide
  Target: LAMA2; (+) strand; PAM type: YTN; PAM sequence: CTT
ttgacacttataccatgtat

SEQ ID NO: 351730 - DNA, 20 bp, Artificial Sequence
  Description of Artificial Sequence: Synthetic oligonucleotide
  Target: LAMA2; (+) strand; PAM type: YTN; PAM sequence: TTT
tgacacttataccatgtatg

SEQ ID NO: 351731 - DNA, 20 bp, Artificial Sequence
  Description of Artificial Sequence: Synthetic oligonucleotide
  Target: LAMA2; (+) strand; PAM type: YTN; PAM sequence: TTT
gacacttataccatgtatga

SEQ ID NO: 351732 - DNA, 20 bp, Artificial Sequence
  Description of Artificial Sequence: Synthetic oligonucleotide
  Target: LAMA2; (+) strand; PAM type: YTN; PAM sequence: TTG
acacttataccatgtatgat

SEQ ID NO: 351733 - DNA, 20 bp, Artificial Sequence
  Description of Artificial Sequence: Synthetic oligonucleotide
  Target: LAMA2; (+) strand; PAM type: YTN; PAM sequence: CTT
ataccatgtatgataaaact

SEQ ID NO: 351734 - DNA, 20 bp, Artificial Sequence
  Description of Artificial Sequence: Synthetic oligonucleotide
  Target: LAMA2; (+) strand; PAM type: YTN; PAM sequence: TTA
taccatgtatgataaaactt

SEQ ID NO: 351735 - DNA, 20 bp, Artificial Sequence
  Description of Artificial Sequence: Synthetic oligonucleotide
  Target: LAMA2; (+) strand; PAM type: YTN; PAM sequence: CTT
tggcccgtagaccaaatctg

SEQ ID NO: 351736 - DNA, 20 bp, Artificial Sequence
  Description of Artificial Sequence: Synthetic oligonucleotide
  Target: LAMA2; (+) strand; PAM type: YTN; PAM sequence: TTT
ggcccgtagaccaaatctga

SEQ ID NO: 351737 - DNA, 20 bp, Artificial Sequence
  Description of Artificial Sequence: Synthetic oligonucleotide
  Target: LAMA2; (+) strand; PAM type: YTN; PAM sequence: TTG
gcccgtagaccaaatctgac

SEQ ID NO: 351738 - DNA, 20 bp, Artificial Sequence
  Description of Artificial Sequence: Synthetic oligonucleotide
  Target: LAMA2; (+) strand; PAM type: YTN; PAM sequence: CTG
actcatggcctatatttgta

SEQ ID NO: 351739 - DNA, 20 bp, Artificial Sequence
  Description of Artificial Sequence: Synthetic oligonucleotide
  Target: LAMA2; (+) strand; PAM type: YTN; PAM sequence: CTC
atggcctatatttgtatgat

SEQ ID NO: 351740 - DNA, 20 bp, Artificial Sequence
  Description of Artificial Sequence: Synthetic oligonucleotide
  Target: LAMA2; (+) strand; PAM type: YTN; PAM sequence: CTA
tatttgtatgatctgtaagc

SEQ ID NO: 351741 - DNA, 20 bp, Artificial Sequence
  Description of Artificial Sequence: Synthetic oligonucleotide
  Target: LAMA2; (+) strand; PAM type: YTN; PAM sequence: TTT
gtatgatctgtaagcaaagg

SEQ ID NO: 351742 - DNA, 20 bp, Artificial Sequence
  Description of Artificial Sequence: Synthetic oligonucleotide
  Target: LAMA2; (+) strand; PAM type: YTN; PAM sequence: TTG
tatgatctgtaagcaaagga

SEQ ID NO: 351743 - DNA, 20 bp, Artificial Sequence
  Description of Artificial Sequence: Synthetic oligonucleotide
  Target: LAMA2; (+) strand; PAM type: YTN; PAM sequence: CTG
taagcaaaggatgtttttac

SEQ ID NO: 351744 - DNA, 20 bp, Artificial Sequence
  Description of Artificial Sequence: Synthetic oligonucleotide
  Target: LAMA2; (+) strand; PAM type: YTN; PAM sequence: TTT
ttacatttgtaaaggtttgt

SEQ ID NO: 351745 - DNA, 20 bp, Artificial Sequence
  Description of Artificial Sequence: Synthetic oligonucleotide
  Target: LAMA2; (+) strand; PAM type: YTN; PAM sequence: TTT
tacatttgtaaaggtttgtt

SEQ ID NO: 351746 - DNA, 20 bp, Artificial Sequence
  Description of Artificial Sequence: Synthetic oligonucleotide
  Target: LAMA2; (+) strand; PAM type: YTN; PAM sequence: TTT
acatttgtaaaggtttgtta

SEQ ID NO: 351747 - DNA, 20 bp, Artificial Sequence
  Description of Artificial Sequence: Synthetic oligonucleotide
  Target: LAMA2; (+) strand; PAM type: YTN; PAM sequence: TTA
catttgtaaaggtttgttaa

SEQ ID NO: 351748 - DNA, 20 bp, Artificial Sequence
  Description of Artificial Sequence: Synthetic oligonucleotide
  Target: LAMA2; (+) strand; PAM type: YTN; PAM sequence: TTT
gtaaaggtttgttaaaagga

SEQ ID NO: 351749 - DNA, 20 bp, Artificial Sequence
  Description of Artificial Sequence: Synthetic oligonucleotide
  Target: LAMA2; (+) strand; PAM type: YTN; PAM sequence: TTG
taaaggtttgttaaaaggag

SEQ ID NO: 351750 - DNA, 20 bp, Artificial Sequence
  Description of Artificial Sequence: Synthetic oligonucleotide
  Target: LAMA2; (+) strand; PAM type: YTN; PAM sequence: TTT
gttaaaaggagaagtagaag

SEQ ID NO: 351751 - DNA, 20 bp, Artificial Sequence
  Description of Artificial Sequence: Synthetic oligonucleotide
  Target: LAMA2; (+) strand; PAM type: YTN; PAM sequence: TTG
ttaaaaggagaagtagaaga

SEQ ID NO: 351752 - DNA, 20 bp, Artificial Sequence
  Description of Artificial Sequence: Synthetic oligonucleotide
  Target: LAMA2; (+) strand; PAM type: YTN; PAM sequence: TTA
aaaggagaagtagaagaagg

SEQ ID NO: 351753 - DNA, 20 bp, Artificial Sequence
  Description of Artificial Sequence: Synthetic oligonucleotide
  Target: LAMA2; (+) strand; PAM type: YTN; PAM sequence: CTA
ggaggggggggaagaagagg

SEQ ID NO: 351754 - DNA, 20 bp, Artificial Sequence
  Description of Artificial Sequence: Synthetic oligonucleotide
  Target: LAMA2; (+) strand; PAM type: YTN; PAM sequence: CTT
tatatggcttattttactat

SEQ ID NO: 351755 - DNA, 20 bp, Artificial Sequence
  Description of Artificial Sequence: Synthetic oligonucleotide
  Target: LAMA2; (+) strand; PAM type: YTN; PAM sequence: TTT
atatggcttattttactatc

SEQ ID NO: 351756 - DNA, 20 bp, Artificial Sequence
  Description of Artificial Sequence: Synthetic oligonucleotide
  Target: LAMA2; (+) strand; PAM type: YTN; PAM sequence: TTA
tatggcttattttactatct

SEQ ID NO: 351757 - DNA, 20 bp, Artificial Sequence
  Description of Artificial Sequence: Synthetic oligonucleotide
  Target: LAMA2; (+) strand; PAM type: YTN; PAM sequence: CTT
attttactatctggcccttt

SEQ ID NO: 351758 - DNA, 20 bp, Artificial Sequence
  Description of Artificial Sequence: Synthetic oligonucleotide
  Target: LAMA2; (+) strand; PAM type: YTN; PAM sequence: TTA
ttttactatctggcccttta

SEQ ID NO: 351759 - DNA, 20 bp, Artificial Sequence
  Description of Artificial Sequence: Synthetic oligonucleotide
  Target: LAMA2; (+) strand; PAM type: YTN; PAM sequence: TTT
tactatctggccctttacag

SEQ ID NO: 351760 - DNA, 20 bp, Artificial Sequence
  Description of Artificial Sequence: Synthetic oligonucleotide
  Target: LAMA2; (+) strand; PAM type: YTN; PAM sequence: TTT
actatctggccctttacaga

SEQ ID NO: 351761 - DNA, 20 bp, Artificial Sequence
  Description of Artificial Sequence: Synthetic oligonucleotide
  Target: LAMA2; (+) strand; PAM type: YTN; PAM sequence: TTA
ctatctggccctttacagaa

SEQ ID NO: 351762 - DNA, 20 bp, Artificial Sequence
  Description of Artificial Sequence: Synthetic oligonucleotide
  Target: LAMA2; (+) strand; PAM type: YTN; PAM sequence: CTA
tctggccctttacagaaaag

SEQ ID NO: 351763 - DNA, 20 bp, Artificial Sequence
  Description of Artificial Sequence: Synthetic oligonucleotide
  Target: LAMA2; (+) strand; PAM type: YTN; PAM sequence: CTG
gccctttacagaaaagtttt

SEQ ID NO: 351764 - DNA, 20 bp, Artificial Sequence
  Description of Artificial Sequence: Synthetic oligonucleotide
  Target: LAMA2; (+) strand; PAM type: YTN; PAM sequence: CTT
tacagaaaagttttccaacc

SEQ ID NO: 351765 - DNA, 20 bp, Artificial Sequence
  Description of Artificial Sequence: Synthetic oligonucleotide
  Target: LAMA2; (+) strand; PAM type: YTN; PAM sequence: TTT
acagaaaagttttccaacct

SEQ ID NO: 351766 - DNA, 20 bp, Artificial Sequence
  Description of Artificial Sequence: Synthetic oligonucleotide
  Target: LAMA2; (+) strand; PAM type: YTN; PAM sequence: TTA
cagaaaagttttccaacctc

SEQ ID NO: 351767 - DNA, 20 bp, Artificial Sequence
  Description of Artificial Sequence: Synthetic oligonucleotide
  Target: LAMA2; (+) strand; PAM type: YTN; PAM sequence: TTT
tccaacctcagagttaaata

SEQ ID NO: 351768 - DNA, 20 bp, Artificial Sequence
  Description of Artificial Sequence: Synthetic oligonucleotide
  Target: LAMA2; (+) strand; PAM type: YTN; PAM sequence: TTT
ccaacctcagagttaaataa

SEQ ID NO: 351769 - DNA, 20 bp, Artificial Sequence
  Description of Artificial Sequence: Synthetic oligonucleotide
  Target: LAMA2; (+) strand; PAM type: YTN; PAM sequence: TTC
caacctcagagttaaataaa

SEQ ID NO: 351770 - DNA, 20 bp, Artificial Sequence
  Description of Artificial Sequence: Synthetic oligonucleotide
  Target: LAMA2; (+) strand; PAM type: YTN; PAM sequence: CTC
agagttaaataaactatgat

SEQ ID NO: 351771 - DNA, 20 bp, Artificial Sequence
  Description of Artificial Sequence: Synthetic oligonucleotide
  Target: LAMA2; (+) strand; PAM type: YTN; PAM sequence: TTA
aataaactatgatgtgtcta

SEQ ID NO: 351772 - DNA, 20 bp, Artificial Sequence
  Description of Artificial Sequence: Synthetic oligonucleotide
  Target: LAMA2; (+) strand; PAM type: YTN; PAM sequence: CTA
tgatgtgtctatgtttggct

SEQ ID NO: 351773 - DNA, 20 bp, Artificial Sequence
  Description of Artificial Sequence: Synthetic oligonucleotide
  Target: LAMA2; (+) strand; PAM type: YTN; PAM sequence: CTA
tgtttggctttcaagcttac

SEQ ID NO: 351774 - DNA, 20 bp, Artificial Sequence
  Description of Artificial Sequence: Synthetic oligonucleotide
  Target: LAMA2; (+) strand; PAM type: YTN; PAM sequence: TTT
ggctttcaagcttaccttgc

SEQ ID NO: 351775 - DNA, 20 bp, Artificial Sequence
  Description of Artificial Sequence: Synthetic oligonucleotide
  Target: LAMA2; (+) strand; PAM type: YTN; PAM sequence: TTG
gctttcaagcttaccttgct

SEQ ID NO: 351776 - DNA, 20 bp, Artificial Sequence
  Description of Artificial Sequence: Synthetic oligonucleotide
  Target: LAMA2; (+) strand; PAM type: YTN; PAM sequence: CTT
tcaagcttaccttgcttgat

SEQ ID NO: 351777 - DNA, 20 bp, Artificial Sequence
  Description of Artificial Sequence: Synthetic oligonucleotide
  Target: LAMA2; (+) strand; PAM type: YTN; PAM sequence: TTT
caagcttaccttgcttgatt

SEQ ID NO: 351778 - DNA, 20 bp, Artificial Sequence
  Description of Artificial Sequence: Synthetic oligonucleotide
  Target: LAMA2; (+) strand; PAM type: YTN; PAM sequence: TTC
aagcttaccttgcttgattc

SEQ ID NO: 351779 - DNA, 20 bp, Artificial Sequence
  Description of Artificial Sequence: Synthetic oligonucleotide
  Target: LAMA2; (+) strand; PAM type: YTN; PAM sequence: CTT
accttgcttgattcacaaag

SEQ ID NO: 351780 - DNA, 20 bp, Artificial Sequence
  Description of Artificial Sequence: Synthetic oligonucleotide
  Target: LAMA2; (+) strand; PAM type: YTN; PAM sequence: TTA
ccttgcttgattcacaaagc

SEQ ID NO: 351781 - DNA, 20 bp, Artificial Sequence
  Description of Artificial Sequence: Synthetic oligonucleotide
  Target: LAMA2; (+) strand; PAM type: YTN; PAM sequence: CTT
gcttgattcacaaagcttct

SEQ ID NO: 351782 - DNA, 20 bp, Artificial Sequence
  Description of Artificial Sequence: Synthetic oligonucleotide
  Target: LAMA2; (+) strand; PAM type: YTN; PAM sequence: TTG
cttgattcacaaagcttcta

SEQ ID NO: 351783 - DNA, 20 bp, Artificial Sequence
  Description of Artificial Sequence: Synthetic oligonucleotide
  Target: LAMA2; (+) strand; PAM type: YTN; PAM sequence: CTT
gattcacaaagcttctagga

SEQ ID NO: 351784 - DNA, 20 bp, Artificial Sequence
  Description of Artificial Sequence: Synthetic oligonucleotide
  Target: LAMA2; (+) strand; PAM type: YTN; PAM sequence: TTG
attcacaaagcttctaggaa

SEQ ID NO: 351785 - DNA, 20 bp, Artificial Sequence
  Description of Artificial Sequence: Synthetic oligonucleotide
  Target: LAMA2; (+) strand; PAM type: YTN; PAM sequence: TTC
acaaagcttctaggaactat

SEQ ID NO: 351786 - DNA, 20 bp, Artificial Sequence
  Description of Artificial Sequence: Synthetic oligonucleotide
  Target: LAMA2; (+) strand; PAM type: YTN; PAM sequence: CTT
ctaggaactataaattgaga

SEQ ID NO: 351787 - DNA, 20 bp, Artificial Sequence
  Description of Artificial Sequence: Synthetic oligonucleotide
  Target: LAMA2; (+) strand; PAM type: YTN; PAM sequence: TTC
taggaactataaattgagat

SEQ ID NO: 351788 - DNA, 20 bp, Artificial Sequence
  Description of Artificial Sequence: Synthetic oligonucleotide
  Target: LAMA2; (+) strand; PAM type: YTN; PAM sequence: CTA
ggaactataaattgagattt

SEQ ID NO: 351789 - DNA, 20 bp, Artificial Sequence
  Description of Artificial Sequence: Synthetic oligonucleotide
  Target: LAMA2; (+) strand; PAM type: YTN; PAM sequence: CTA
taaattgagattttattcca

SEQ ID NO: 351790 - DNA, 20 bp, Artificial Sequence
  Description of Artificial Sequence: Synthetic oligonucleotide
  Target: LAMA2; (+) strand; PAM type: YTN; PAM sequence: TTG
agattttattccacatttag

SEQ ID NO: 351791 - DNA, 20 bp, Artificial Sequence
  Description of Artificial Sequence: Synthetic oligonucleotide
  Target: LAMA2; (+) strand; PAM type: YTN; PAM sequence: TTT
tattccacatttaggaaatt

SEQ ID NO: 351792 - DNA, 20 bp, Artificial Sequence
  Description of Artificial Sequence: Synthetic oligonucleotide
  Target: LAMA2; (+) strand; PAM type: YTN; PAM sequence: TTT
attccacatttaggaaattt

SEQ ID NO: 351793 - DNA, 20 bp, Artificial Sequence
  Description of Artificial Sequence: Synthetic oligonucleotide
  Target: LAMA2; (+) strand; PAM type: YTN; PAM sequence: TTA
ttccacatttaggaaatttt

SEQ ID NO: 351794 - DNA, 20 bp, Artificial Sequence
  Description of Artificial Sequence: Synthetic oligonucleotide
  Target: LAMA2; (+) strand; PAM type: YTN; PAM sequence: TTC
cacatttaggaaattttagg

SEQ ID NO: 351795 - DNA, 20 bp, Artificial Sequence
  Description of Artificial Sequence: Synthetic oligonucleotide
  Target: LAMA2; (+) strand; PAM type: YTN; PAM sequence: TTT
aggaaattttaggctatttt

SEQ ID NO: 351796 - DNA, 20 bp, Artificial Sequence
  Description of Artificial Sequence: Synthetic oligonucleotide
  Target: LAMA2; (+) strand; PAM type: YTN; PAM sequence: TTA
ggaaattttaggctattttt

SEQ ID NO: 351797 - DNA, 20 bp, Artificial Sequence
  Description of Artificial Sequence: Synthetic oligonucleotide
  Target: LAMA2; (+) strand; PAM type: YTN; PAM sequence: TTT
taggctattttttttatttt

SEQ ID NO: 351798 - DNA, 20 bp, Artificial Sequence
  Description of Artificial Sequence: Synthetic oligonucleotide
  Target: LAMA2; (+) strand; PAM type: YTN; PAM sequence: TTT
aggctattttttttattttt

SEQ ID NO: 351799 - DNA, 20 bp, Artificial Sequence
  Description of Artificial Sequence: Synthetic oligonucleotide
  Target: LAMA2; (+) strand; PAM type: YTN; PAM sequence: TTA
ggctattttttttattttta

SEQ ID NO: 351800 - DNA, 20 bp, Artificial Sequence
  Description of Artificial Sequence: Synthetic oligonucleotide
  Target: LAMA2; (+) strand; PAM type: YTN; PAM sequence: CTA
ttttttttatttttacttat

SEQ ID NO: 351801 - DNA, 20 bp, Artificial Sequence
  Description of Artificial Sequence: Synthetic oligonucleotide
  Target: LAMA2; (+) strand; PAM type: YTN; PAM sequence: TTT
tttttatttttacttatttt

SEQ ID NO: 351802 - DNA, 20 bp, Artificial Sequence
  Description of Artificial Sequence: Synthetic oligonucleotide
  Target: LAMA2; (+) strand; PAM type: YTN; PAM sequence: TTT
ttttatttttacttattttt

SEQ ID NO: 351803 - DNA, 20 bp, Artificial Sequence
  Description of Artificial Sequence: Synthetic oligonucleotide
  Target: LAMA2; (+) strand; PAM type: YTN; PAM sequence: TTT
tttatttttacttatttttt

SEQ ID NO: 351804 - DNA, 20 bp, Artificial Sequence
  Description of Artificial Sequence: Synthetic oligonucleotide
  Target: LAMA2; (+) strand; PAM type: YTN; PAM sequence: TTT
ttatttttacttattttttt

SEQ ID NO: 351805 - DNA, 20 bp, Artificial Sequence
  Description of Artificial Sequence: Synthetic oligonucleotide
  Target: LAMA2; (+) strand; PAM type: YTN; PAM sequence: TTT
tatttttacttatttttttt

SEQ ID NO: 351806 - DNA, 20 bp, Artificial Sequence
  Description of Artificial Sequence: Synthetic oligonucleotide
  Target: LAMA2; (+) strand; PAM type: YTN; PAM sequence: TTT
atttttacttatttttttta

SEQ ID NO: 351807 - DNA, 20 bp, Artificial Sequence
  Description of Artificial Sequence: Synthetic oligonucleotide
  Target: LAMA2; (+) strand; PAM type: YTN; PAM sequence: TTA
tttttacttattttttttag

SEQ ID NO: 351808 - DNA, 20 bp, Artificial Sequence
  Description of Artificial Sequence: Synthetic oligonucleotide
  Target: LAMA2; (+) strand; PAM type: YTN; PAM sequence: TTT
ttacttattttttttaggct

SEQ ID NO: 351809 - DNA, 20 bp, Artificial Sequence
  Description of Artificial Sequence: Synthetic oligonucleotide
  Target: LAMA2; (+) strand; PAM type: YTN; PAM sequence: TTT
tacttattttttttaggctt

SEQ ID NO: 351810 - DNA, 20 bp, Artificial Sequence
  Description of Artificial Sequence: Synthetic oligonucleotide
  Target: LAMA2; (+) strand; PAM type: YTN; PAM sequence: TTT
acttattttttttaggcttt

SEQ ID NO: 351811 - DNA, 20 bp, Artificial Sequence
  Description of Artificial Sequence: Synthetic oligonucleotide
  Target: LAMA2; (+) strand; PAM type: YTN; PAM sequence: TTA
cttattttttttaggctttt

SEQ ID NO: 351812 - DNA, 20 bp, Artificial Sequence
  Description of Artificial Sequence: Synthetic oligonucleotide
  Target: LAMA2; (+) strand; PAM type: YTN; PAM sequence: CTT
attttttttaggcttttgtt

SEQ ID NO: 351813 - DNA, 20 bp, Artificial Sequence
  Description of Artificial Sequence: Synthetic oligonucleotide
  Target: LAMA2; (+) strand; PAM type: YTN; PAM sequence: TTA
ttttttttaggcttttgttt

SEQ ID NO: 351814 - DNA, 20 bp, Artificial Sequence
  Description of Artificial Sequence: Synthetic oligonucleotide
  Target: LAMA2; (+) strand; PAM type: YTN; PAM sequence: TTT
tttttaggcttttgtttaaa

SEQ ID NO: 351815 - DNA, 20 bp, Artificial Sequence
  Description of Artificial Sequence: Synthetic oligonucleotide
  Target: LAMA2; (+) strand; PAM type: YTN; PAM sequence: TTT
ttttaggcttttgtttaaaa

SEQ ID NO: 351816 - DNA, 20 bp, Artificial Sequence
  Description of Artificial Sequence: Synthetic oligonucleotide
  Target: LAMA2; (+) strand; PAM type: YTN; PAM sequence: TTT
tttaggcttttgtttaaaac

SEQ ID NO: 351817 - DNA, 20 bp, Artificial Sequence
  Description of Artificial Sequence: Synthetic oligonucleotide
  Target: LAMA2; (+) strand; PAM type: YTN; PAM sequence: TTT
ttaggcttttgtttaaaacc

SEQ ID NO: 351818 - DNA, 20 bp, Artificial Sequence
  Description of Artificial Sequence: Synthetic oligonucleotide
  Target: LAMA2; (+) strand; PAM type: YTN; PAM sequence: TTT
taggcttttgtttaaaacct

SEQ ID NO: 351819 - DNA, 20 bp, Artificial Sequence
  Description of Artificial Sequence: Synthetic oligonucleotide
  Target: LAMA2; (+) strand; PAM type: YTN; PAM sequence: TTT
aggcttttgtttaaaacctg

SEQ ID NO: 351820 - DNA, 20 bp, Artificial Sequence
  Description of Artificial Sequence: Synthetic oligonucleotide
  Target: LAMA2; (+) strand; PAM type: YTN; PAM sequence: TTA
ggcttttgtttaaaacctgt

SEQ ID NO: 351821 - DNA, 20 bp, Artificial Sequence
  Description of Artificial Sequence: Synthetic oligonucleotide
  Target: LAMA2; (+) strand; PAM type: YTN; PAM sequence: CTT
ttgtttaaaacctgtttttt

SEQ ID NO: 351822 - DNA, 20 bp, Artificial Sequence
  Description of Artificial Sequence: Synthetic oligonucleotide
  Target: LAMA2; (+) strand; PAM type: YTN; PAM sequence: TTT
tgtttaaaacctgttttttg

SEQ ID NO: 351823 - DNA, 20 bp, Artificial Sequence
  Description of Artificial Sequence: Synthetic oligonucleotide
  Target: LAMA2; (+) strand; PAM type: YTN; PAM sequence: TTT
gtttaaaacctgttttttga

SEQ ID NO: 351824 - DNA, 20 bp, Artificial Sequence
  Description of Artificial Sequence: Synthetic oligonucleotide
  Target: LAMA2; (+) strand; PAM type: YTN; PAM sequence: TTG
tttaaaacctgttttttgac

SEQ ID NO: 351825 - DNA, 20 bp, Artificial Sequence
  Description of Artificial Sequence: Synthetic oligonucleotide
  Target: LAMA2; (+) strand; PAM type: YTN; PAM sequence: TTT
aaaacctgttttttgaccag

SEQ ID NO: 351826 - DNA, 20 bp, Artificial Sequence
  Description of Artificial Sequence: Synthetic oligonucleotide
  Target: LAMA2; (+) strand; PAM type: YTN; PAM sequence: TTA
aaacctgttttttgaccagt

SEQ ID NO: 351827 - DNA, 20 bp, Artificial Sequence
  Description of Artificial Sequence: Synthetic oligonucleotide
  Target: LAMA2; (+) strand; PAM type: YTN; PAM sequence: CTG
ttttttgaccagtgtttttc

SEQ ID NO: 351828 - DNA, 20 bp, Artificial Sequence
  Description of Artificial Sequence: Synthetic oligonucleotide
  Target: LAMA2; (+) strand; PAM type: YTN; PAM sequence: TTT
tttgaccagtgtttttcctt

SEQ ID NO: 351829 - DNA, 20 bp, Artificial Sequence
  Description of Artificial Sequence: Synthetic oligonucleotide
  Target: LAMA2; (+) strand; PAM type: YTN; PAM sequence: TTT
ttgaccagtgtttttccttc

SEQ ID NO: 351830 - DNA, 20 bp, Artificial Sequence
  Description of Artificial Sequence: Synthetic oligonucleotide
  Target: LAMA2; (+) strand; PAM type: YTN; PAM sequence: TTT
tgaccagtgtttttccttct

SEQ ID NO: 351831 - DNA, 20 bp, Artificial Sequence
  Description of Artificial Sequence: Synthetic oligonucleotide
  Target: LAMA2; (+) strand; PAM type: YTN; PAM sequence: TTT
gaccagtgtttttccttctc

SEQ ID NO: 351832 - DNA, 20 bp, Artificial Sequence
  Description of Artificial Sequence: Synthetic oligonucleotide
  Target: LAMA2; (+) strand; PAM type: YTN; PAM sequence: TTG
accagtgtttttccttctct

SEQ ID NO: 351833 - DNA, 20 bp, Artificial Sequence
  Description of Artificial Sequence: Synthetic oligonucleotide
  Target: LAMA2; (+) strand; PAM type: YTN; PAM sequence: TTT
ttccttctctttctaggact

SEQ ID NO: 351834 - DNA, 20 bp, Artificial Sequence
  Description of Artificial Sequence: Synthetic oligonucleotide
  Target: LAMA2; (+) strand; PAM type: YTN; PAM sequence: TTT
tccttctctttctaggactc

SEQ ID NO: 351835 - DNA, 20 bp, Artificial Sequence
  Description of Artificial Sequence: Synthetic oligonucleotide
  Target: LAMA2; (+) strand; PAM type: YTN; PAM sequence: TTT
ccttctctttctaggactcc

SEQ ID NO: 351836 - DNA, 20 bp, Artificial Sequence
  Description of Artificial Sequence: Synthetic oligonucleotide
  Target: LAMA2; (+) strand; PAM type: YTN; PAM sequence: TTC
cttctctttctaggactcca

SEQ ID NO: 351837 - DNA, 20 bp, Artificial Sequence
  Description of Artificial Sequence: Synthetic oligonucleotide
  Target: LAMA2; (+) strand; PAM type: YTN; PAM sequence: CTT
ctctttctaggactccagct

SEQ ID NO: 351838 - DNA, 20 bp, Artificial Sequence
  Description of Artificial Sequence: Synthetic oligonucleotide
  Target: LAMA2; (+) strand; PAM type: YTN; PAM sequence: TTC
tctttctaggactccagctg

SEQ ID NO: 351839 - DNA, 20 bp, Artificial Sequence
  Description of Artificial Sequence: Synthetic oligonucleotide
  Target: LAMA2; (+) strand; PAM type: YTN; PAM sequence: CTC
tttctaggactccagctgca

SEQ ID NO: 351840 - DNA, 20 bp, Artificial Sequence
  Description of Artificial Sequence: Synthetic oligonucleotide
  Target: LAMA2; (+) strand; PAM type: YTN; PAM sequence: CTT
tctaggactccagctgcatg

SEQ ID NO: 351841 - DNA, 20 bp, Artificial Sequence
  Description of Artificial Sequence: Synthetic oligonucleotide
  Target: LAMA2; (+) strand; PAM type: YTN; PAM sequence: TTT
ctaggactccagctgcatgt

SEQ ID NO: 351842 - DNA, 20 bp, Artificial Sequence
  Description of Artificial Sequence: Synthetic oligonucleotide
  Target: LAMA2; (+) strand; PAM type: YTN; PAM sequence: TTC
taggactccagctgcatgtg

SEQ ID NO: 351843 - DNA, 20 bp, Artificial Sequence
  Description of Artificial Sequence: Synthetic oligonucleotide
  Target: LAMA2; (+) strand; PAM type: YTN; PAM sequence: CTA
ggactccagctgcatgtgtg

SEQ ID NO: 351844 - DNA, 20 bp, Artificial Sequence
  Description of Artificial Sequence: Synthetic oligonucleotide
  Target: LAMA2; (+) strand; PAM type: YTN; PAM sequence: CTC
cagctgcatgtgtgctaggg

SEQ ID NO: 351845 - DNA, 20 bp, Artificial Sequence
  Description of Artificial Sequence: Synthetic oligonucleotide
  Target: LAMA2; (+) strand; PAM type: YTN; PAM sequence: CTG
catgtgtgctagggcgttca

SEQ ID NO: 351846 - DNA, 20 bp, Artificial Sequence
  Description of Artificial Sequence: Synthetic oligonucleotide
  Target: LAMA2; (+) strand; PAM type: YTN; PAM sequence: CTA
gggcgttcattgtatctgag

SEQ ID NO: 351847 - DNA, 20 bp, Artificial Sequence
  Description of Artificial Sequence: Synthetic oligonucleotide
  Target: LAMA2; (+) strand; PAM type: YTN; PAM sequence: TTC
attgtatctgaggcagtgct

SEQ ID NO: 351848 - DNA, 20 bp, Artificial Sequence
  Description of Artificial Sequence: Synthetic oligonucleotide
  Target: LAMA2; (+) strand; PAM type: YTN; PAM sequence: TTG
tatctgaggcagtgctaagt

SEQ ID NO: 351849 - DNA, 20 bp, Artificial Sequence
  Description of Artificial Sequence: Synthetic oligonucleotide
  Target: LAMA2; (+) strand; PAM type: YTN; PAM sequence: CTG
aggcagtgctaagtaatttt

SEQ ID NO: 351850 - DNA, 20 bp, Artificial Sequence
  Description of Artificial Sequence: Synthetic oligonucleotide
  Target: LAMA2; (+) strand; PAM type: YTN; PAM sequence: CTA
agtaattttttttctttctc

SEQ ID NO: 351851 - DNA, 20 bp, Artificial Sequence
  Description of Artificial Sequence: Synthetic oligonucleotide
  Target: LAMA2; (+) strand; PAM type: YTN; PAM sequence: TTT
tttttctttctccgttcttt

SEQ ID NO: 351852 - DNA, 20 bp, Artificial Sequence
  Description of Artificial Sequence: Synthetic oligonucleotide
  Target: LAMA2; (+) strand; PAM type: YTN; PAM sequence: TTT
ttttctttctccgttcttta

SEQ ID NO: 351853 - DNA, 20 bp, Artificial Sequence
  Description of Artificial Sequence: Synthetic oligonucleotide
  Target: LAMA2; (+) strand; PAM type: YTN; PAM sequence: TTT
tttctttctccgttctttag

SEQ ID NO: 351854 - DNA, 20 bp, Artificial Sequence
  Description of Artificial Sequence: Synthetic oligonucleotide
  Target: LAMA2; (+) strand; PAM type: YTN; PAM sequence: TTT
ttctttctccgttctttaga

SEQ ID NO: 351855 - DNA, 20 bp, Artificial Sequence
  Description of Artificial Sequence: Synthetic oligonucleotide
  Target: LAMA2; (+) strand; PAM type: YTN; PAM sequence: TTT
tctttctccgttctttagat

SEQ ID NO: 351856 - DNA, 20 bp, Artificial Sequence
  Description of Artificial Sequence: Synthetic oligonucleotide
  Target: LAMA2; (+) strand; PAM type: YTN; PAM sequence: TTT
ctttctccgttctttagatt

SEQ ID NO: 351857 - DNA, 20 bp, Artificial Sequence
  Description of Artificial Sequence: Synthetic oligonucleotide
  Target: LAMA2; (+) strand; PAM type: YTN; PAM sequence: TTC
tttctccgttctttagattg

SEQ ID NO: 351858 - DNA, 20 bp, Artificial Sequence
  Description of Artificial Sequence: Synthetic oligonucleotide
  Target: LAMA2; (+) strand; PAM type: YTN; PAM sequence: CTT
tctccgttctttagattgga

SEQ ID NO: 351859 - DNA, 20 bp, Artificial Sequence
  Description of Artificial Sequence: Synthetic oligonucleotide
  Target: LAMA2; (+) strand; PAM type: YTN; PAM sequence: TTT
ctccgttctttagattggat

SEQ ID NO: 351860 - DNA, 20 bp, Artificial Sequence
  Description of Artificial Sequence: Synthetic oligonucleotide
  Target: LAMA2; (+) strand; PAM type: YTN; PAM sequence: TTC
tccgttctttagattggatc

SEQ ID NO: 351861 - DNA, 20 bp, Artificial Sequence
  Description of Artificial Sequence: Synthetic oligonucleotide
  Target: LAMA2; (+) strand; PAM type: YTN; PAM sequence: CTC
cgttctttagattggatcat

SEQ ID NO: 351862 - DNA, 20 bp, Artificial Sequence
  Description of Artificial Sequence: Synthetic oligonucleotide
  Target: LAMA2; (+) strand; PAM type: YTN; PAM sequence: TTC
tttagattggatcatttcca

SEQ ID NO: 351863 - DNA, 20 bp, Artificial Sequence
  Description of Artificial Sequence: Synthetic oligonucleotide
  Target: LAMA2; (+) strand; PAM type: YTN; PAM sequence: CTT
tagattggatcatttccatt

SEQ ID NO: 351864 - DNA, 20 bp, Artificial Sequence
  Description of Artificial Sequence: Synthetic oligonucleotide
  Target: LAMA2; (+) strand; PAM type: YTN; PAM sequence: TTT
agattggatcatttccattc

SEQ ID NO: 351865 - DNA, 20 bp, Artificial Sequence
  Description of Artificial Sequence: Synthetic oligonucleotide
  Target: LAMA2; (+) strand; PAM type: YTN; PAM sequence: TTA
gattggatcatttccattca

SEQ ID NO: 351866 - DNA, 20 bp, Artificial Sequence
  Description of Artificial Sequence: Synthetic oligonucleotide
  Target: LAMA2; (+) strand; PAM type: YTN; PAM sequence: TTG
gatcatttccattcatctgt

SEQ ID NO: 351867 - DNA, 20 bp, Artificial Sequence
  Description of Artificial Sequence: Synthetic oligonucleotide
  Target: LAMA2; (+) strand; PAM type: YTN; PAM sequence: TTT
ccattcatctgtcattatac

SEQ ID NO: 351868 - DNA, 20 bp, Artificial Sequence
  Description of Artificial Sequence: Synthetic oligonucleotide
  Target: LAMA2; (+) strand; PAM type: YTN; PAM sequence: TTC
cattcatctgtcattatact

SEQ ID NO: 351869 - DNA, 20 bp, Artificial Sequence
  Description of Artificial Sequence: Synthetic oligonucleotide
  Target: LAMA2; (+) strand; PAM type: YTN; PAM sequence: TTC
atctgtcattatactttggt

SEQ ID NO: 351870 - DNA, 20 bp, Artificial Sequence
  Description of Artificial Sequence: Synthetic oligonucleotide
  Target: LAMA2; (+) strand; PAM type: YTN; PAM sequence: CTG
tcattatactttggtctaca

SEQ ID NO: 351871 - DNA, 20 bp, Artificial Sequence
  Description of Artificial Sequence: Synthetic oligonucleotide
  Target: LAMA2; (+) strand; PAM type: YTN; PAM sequence: TTA
tactttggtctacatataat

SEQ ID NO: 351872 - DNA, 20 bp, Artificial Sequence
  Description of Artificial Sequence: Synthetic oligonucleotide
  Target: LAMA2; (+) strand; PAM type: YTN; PAM sequence: CTT
tggtctacatataatgtatc

SEQ ID NO: 351873 - DNA, 20 bp, Artificial Sequence
  Description of Artificial Sequence: Synthetic oligonucleotide
  Target: LAMA2; (+) strand; PAM type: YTN; PAM sequence: TTT
ggtctacatataatgtatct

SEQ ID NO: 351874 - DNA, 20 bp, Artificial Sequence
  Description of Artificial Sequence: Synthetic oligonucleotide
  Target: LAMA2; (+) strand; PAM type: YTN; PAM sequence: TTG
gtctacatataatgtatctt

SEQ ID NO: 351875 - DNA, 20 bp, Artificial Sequence
  Description of Artificial Sequence: Synthetic oligonucleotide
  Target: LAMA2; (+) strand; PAM type: YTN; PAM sequence: CTA
catataatgtatctttaatt

SEQ ID NO: 351876 - DNA, 20 bp, Artificial Sequence
  Description of Artificial Sequence: Synthetic oligonucleotide
  Target: LAMA2; (+) strand; PAM type: YTN; PAM sequence: CTT
taatttactagctgatttta

SEQ ID NO: 351877 - DNA, 20 bp, Artificial Sequence
  Description of Artificial Sequence: Synthetic oligonucleotide
  Target: LAMA2; (+) strand; PAM type: YTN; PAM sequence: TTT
aatttactagctgattttaa

SEQ ID NO: 351878 - DNA, 20 bp, Artificial Sequence
  Description of Artificial Sequence: Synthetic oligonucleotide
  Target: LAMA2; (+) strand; PAM type: YTN; PAM sequence: TTA
atttactagctgattttaaa

SEQ ID NO: 351879 - DNA, 20 bp, Artificial Sequence
  Description of Artificial Sequence: Synthetic oligonucleotide
  Target: LAMA2; (+) strand; PAM type: YTN; PAM sequence: TTT
actagctgattttaaaatat

SEQ ID NO: 351880 - DNA, 20 bp, Artificial Sequence
  Description of Artificial Sequence: Synthetic oligonucleotide
  Target: LAMA2; (+) strand; PAM type: YTN; PAM sequence: TTA
ctagctgattttaaaatatt

SEQ ID NO: 351881 - DNA, 20 bp, Artificial Sequence
  Description of Artificial Sequence: Synthetic oligonucleotide
  Target: LAMA2; (+) strand; PAM type: YTN; PAM sequence: CTA
gctgattttaaaatattctc

SEQ ID NO: 351882 - DNA, 20 bp, Artificial Sequence
  Description of Artificial Sequence: Synthetic oligonucleotide
  Target: LAMA2; (+) strand; PAM type: YTN; PAM sequence: CTG
attttaaaatattctcatta

SEQ ID NO: 351883 - DNA, 20 bp, Artificial Sequence
  Description of Artificial Sequence: Synthetic oligonucleotide
  Target: LAMA2; (+) strand; PAM type: YTN; PAM sequence: TTT
taaaatattctcattaggcc

SEQ ID NO: 351884 - DNA, 20 bp, Artificial Sequence
  Description of Artificial Sequence: Synthetic oligonucleotide
  Target: LAMA2; (+) strand; PAM type: YTN; PAM sequence: TTT
aaaatattctcattaggccg

SEQ ID NO: 351885 - DNA, 20 bp, Artificial Sequence
  Description of Artificial Sequence: Synthetic oligonucleotide
  Target: LAMA2; (+) strand; PAM type: YTN; PAM sequence: TTA
aaatattctcattaggccgg

SEQ ID NO: 351886 - DNA, 20 bp, Artificial Sequence
  Description of Artificial Sequence: Synthetic oligonucleotide
  Target: LAMA2; (+) strand; PAM type: YTN; PAM sequence: TTC
tcattaggccgggcacagtg

SEQ ID NO: 351887 - DNA, 20 bp, Artificial Sequence
  Description of Artificial Sequence: Synthetic oligonucleotide
  Target: LAMA2; (+) strand; PAM type: YTN; PAM sequence: CTC
attaggccgggcacagtggt

SEQ ID NO: 351888 - DNA, 20 bp, Artificial Sequence
  Description of Artificial Sequence: Synthetic oligonucleotide
  Target: LAMA2; (+) strand; PAM type: YTN; PAM sequence: TTA
ggccgggcacagtggttcac

SEQ ID NO: 351889 - DNA, 20 bp, Artificial Sequence
  Description of Artificial Sequence: Synthetic oligonucleotide
  Target: LAMA2; (+) strand; PAM type: YTN; PAM sequence: TTC
accccaggaatcccagtact

SEQ ID NO: 351890 - DNA, 20 bp, Artificial Sequence
  Description of Artificial Sequence: Synthetic oligonucleotide
  Target: LAMA2; (+) strand; PAM type: YTN; PAM sequence: CTT
tggaaggccgaagcaggcaa

SEQ ID NO: 351891 - DNA, 20 bp, Artificial Sequence
  Description of Artificial Sequence: Synthetic oligonucleotide
  Target: LAMA2; (+) strand; PAM type: YTN; PAM sequence: TTT
ggaaggccgaagcaggcaag

SEQ ID NO: 351892 - DNA, 20 bp, Artificial Sequence
  Description of Artificial Sequence: Synthetic oligonucleotide
  Target: LAMA2; (+) strand; PAM type: YTN; PAM sequence: TTG
gaaggccgaagcaggcaagt

SEQ ID NO: 351893 - DNA, 20 bp, Artificial Sequence
  Description of Artificial Sequence: Synthetic oligonucleotide
  Target: LAMA2; (+) strand; PAM type: YTN; PAM sequence: CTT
gcggtcaggagtttaagacc

SEQ ID NO: 351894 - DNA, 20 bp, Artificial Sequence
  Description of Artificial Sequence: Synthetic oligonucleotide
  Target: LAMA2; (+) strand; PAM type: YTN; PAM sequence: TTG
cggtcaggagtttaagacca

SEQ ID NO: 351895 - DNA, 20 bp, Artificial Sequence
  Description of Artificial Sequence: Synthetic oligonucleotide
  Target: LAMA2; (+) strand; PAM type: YTN; PAM sequence: TTT
aagaccaacctggccaacat

SEQ ID NO: 351896 - DNA, 20 bp, Artificial Sequence
  Description of Artificial Sequence: Synthetic oligonucleotide
  Target: LAMA2; (+) strand; PAM type: YTN; PAM sequence: TTA
agaccaacctggccaacatg

SEQ ID NO: 351897 - DNA, 20 bp, Artificial Sequence
  Description of Artificial Sequence: Synthetic oligonucleotide
  Target: LAMA2; (+) strand; PAM type: YTN; PAM sequence: CTG
gccaacatggtgaaaccctg

SEQ ID NO: 351898 - DNA, 20 bp, Artificial Sequence
  Description of Artificial Sequence: Synthetic oligonucleotide
  Target: LAMA2; (+) strand; PAM type: YTN; PAM sequence: CTG
tctctattaaaaatacaaaa

SEQ ID NO: 351899 - DNA, 20 bp, Artificial Sequence
  Description of Artificial Sequence: Synthetic oligonucleotide
  Target: LAMA2; (+) strand; PAM type: YTN; PAM sequence: CTC
tattaaaaatacaaaattta

SEQ ID NO: 351900 - DNA, 20 bp, Artificial Sequence
  Description of Artificial Sequence: Synthetic oligonucleotide
  Target: LAMA2; (+) strand; PAM type: YTN; PAM sequence: CTA
ttaaaaatacaaaatttagc

SEQ ID NO: 351901 - DNA, 20 bp, Artificial Sequence
  Description of Artificial Sequence: Synthetic oligonucleotide
  Target: LAMA2; (+) strand; PAM type: YTN; PAM sequence: TTA
aaaatacaaaatttagccag

SEQ ID NO: 351902 - DNA, 20 bp, Artificial Sequence
  Description of Artificial Sequence: Synthetic oligonucleotide
  Target: LAMA2; (+) strand; PAM type: YTN; PAM sequence: TTT
agccaggcatggtggcaggc

SEQ ID NO: 351903 - DNA, 20 bp, Artificial Sequence
  Description of Artificial Sequence: Synthetic oligonucleotide
  Target: LAMA2; (+) strand; PAM type: YTN; PAM sequence: TTA
gccaggcatggtggcaggca

SEQ ID NO: 351904 - DNA, 20 bp, Artificial Sequence
  Description of Artificial Sequence: Synthetic oligonucleotide
  Target: LAMA2; (+) strand; PAM type: YTN; PAM sequence: CTG
taatatcacctactcaggag

SEQ ID NO: 351905 - DNA, 20 bp, Artificial Sequence
  Description of Artificial Sequence: Synthetic oligonucleotide
  Target: LAMA2; (+) strand; PAM type: YTN; PAM sequence: CTA
ctcaggagactgaggcagga

SEQ ID NO: 351906 - DNA, 20 bp, Artificial Sequence
  Description of Artificial Sequence: Synthetic oligonucleotide
  Target: LAMA2; (+) strand; PAM type: YTN; PAM sequence: CTC
aggagactgaggcaggagaa

SEQ ID NO: 351907 - DNA, 20 bp, Artificial Sequence
  Description of Artificial Sequence: Synthetic oligonucleotide
  Target: LAMA2; (+) strand; PAM type: YTN; PAM sequence: CTG
aggcaggagaatagcttgaa

SEQ ID NO: 351908 - DNA, 20 bp, Artificial Sequence
  Description of Artificial Sequence: Synthetic oligonucleotide
  Target: LAMA2; (+) strand; PAM type: YTN; PAM sequence: CTT
gaacccaggaagtgaggttg

SEQ ID NO: 351909 - DNA, 20 bp, Artificial Sequence
  Description of Artificial Sequence: Synthetic oligonucleotide
  Target: LAMA2; (+) strand; PAM type: YTN; PAM sequence: TTG
aacccaggaagtgaggttgc

SEQ ID NO: 351910 - DNA, 20 bp, Artificial Sequence
  Description of Artificial Sequence: Synthetic oligonucleotide
  Target: LAMA2; (+) strand; PAM type: YTN; PAM sequence: TTG
cagtgggtcaagcttgcacc

SEQ ID NO: 351911 - DNA, 20 bp, Artificial Sequence
  Description of Artificial Sequence: Synthetic oligonucleotide
  Target: LAMA2; (+) strand; PAM type: YTN; PAM sequence: CTT
gcaccagtgcacttcagcct

SEQ ID NO: 351912 - DNA, 20 bp, Artificial Sequence
  Description of Artificial Sequence: Synthetic oligonucleotide
  Target: LAMA2; (+) strand; PAM type: YTN; PAM sequence: TTG
caccagtgcacttcagcctg

SEQ ID NO: 351913 - DNA, 20 bp, Artificial Sequence
  Description of Artificial Sequence: Synthetic oligonucleotide
  Target: LAMA2; (+) strand; PAM type: YTN; PAM sequence: CTT
cagcctgggcaagagagcga

SEQ ID NO: 351914 - DNA, 20 bp, Artificial Sequence
  Description of Artificial Sequence: Synthetic oligonucleotide
  Target: LAMA2; (+) strand; PAM type: YTN; PAM sequence: TTC
agcctgggcaagagagcgag

SEQ ID NO: 351915 - DNA, 20 bp, Artificial Sequence
  Description of Artificial Sequence: Synthetic oligonucleotide
  Target: LAMA2; (+) strand; PAM type: YTN; PAM sequence: CTG
ggcaagagagcgagacccta

SEQ ID NO: 351916 - DNA, 20 bp, Artificial Sequence
  Description of Artificial Sequence: Synthetic oligonucleotide
  Target: LAMA2; (+) strand; PAM type: YTN; PAM sequence: CTA
tctcaaaaataaatacaaat

SEQ ID NO: 351917 - DNA, 20 bp, Artificial Sequence
  Description of Artificial Sequence: Synthetic oligonucleotide
  Target: LAMA2; (+) strand; PAM type: YTN; PAM sequence: CTC
aaaaataaatacaaataaat

SEQ ID NO: 351918 - DNA, 20 bp, Artificial Sequence
  Description of Artificial Sequence: Synthetic oligonucleotide
  Target: LAMA2; (+) strand; PAM type: YTN; PAM sequence: TTC
tcattatatttacttttaac

SEQ ID NO: 351919 - DNA, 20 bp, Artificial Sequence
  Description of Artificial Sequence: Synthetic oligonucleotide
  Target: LAMA2; (+) strand; PAM type: YTN; PAM sequence: CTC
attatatttacttttaacaa

SEQ ID NO: 351920 - DNA, 20 bp, Artificial Sequence
  Description of Artificial Sequence: Synthetic oligonucleotide
  Target: LAMA2; (+) strand; PAM type: YTN; PAM sequence: TTA
tatttacttttaacaatagt

SEQ ID NO: 351921 - DNA, 20 bp, Artificial Sequence
  Description of Artificial Sequence: Synthetic oligonucleotide
  Target: LAMA2; (+) strand; PAM type: YTN; PAM sequence: TTT
acttttaacaatagtatcat

SEQ ID NO: 351922 - DNA, 20 bp, Artificial Sequence
  Description of Artificial Sequence: Synthetic oligonucleotide
  Target: LAMA2; (+) strand; PAM type: YTN; PAM sequence: TTA
cttttaacaatagtatcatg

SEQ ID NO: 351923 - DNA, 20 bp, Artificial Sequence
  Description of Artificial Sequence: Synthetic oligonucleotide
  Target: LAMA2; (+) strand; PAM type: YTN; PAM sequence: CTT
ttaacaatagtatcatgttt

SEQ ID NO: 351924 - DNA, 20 bp, Artificial Sequence
  Description of Artificial Sequence: Synthetic oligonucleotide
  Target: LAMA2; (+) strand; PAM type: YTN; PAM sequence: TTT
taacaatagtatcatgtttg

SEQ ID NO: 351925 - DNA, 20 bp, Artificial Sequence
  Description of Artificial Sequence: Synthetic oligonucleotide
  Target: LAMA2; (+) strand; PAM type: YTN; PAM sequence: TTT
aacaatagtatcatgtttga

SEQ ID NO: 351926 - DNA, 20 bp, Artificial Sequence
  Description of Artificial Sequence: Synthetic oligonucleotide
  Target: LAMA2; (+) strand; PAM type: YTN; PAM sequence: TTA
acaatagtatcatgtttgag

SEQ ID NO: 351927 - DNA, 20 bp, Artificial Sequence
  Description of Artificial Sequence: Synthetic oligonucleotide
  Target: LAMA2; (+) strand; PAM type: YTN; PAM sequence: TTT
gagaaaactttggcctgtag

SEQ ID NO: 351928 - DNA, 20 bp, Artificial Sequence
  Description of Artificial Sequence: Synthetic oligonucleotide
  Target: LAMA2; (+) strand; PAM type: YTN; PAM sequence: TTG
agaaaactttggcctgtaga

SEQ ID NO: 351929 - DNA, 20 bp, Artificial Sequence
  Description of Artificial Sequence: Synthetic oligonucleotide
  Target: LAMA2; (+) strand; PAM type: YTN; PAM sequence: CTT
tggcctgtagaccaaatcct

SEQ ID NO: 351930 - DNA, 20 bp, Artificial Sequence
  Description of Artificial Sequence: Synthetic oligonucleotide
  Target: LAMA2; (+) strand; PAM type: YTN; PAM sequence: TTT
ggcctgtagaccaaatcctg

SEQ ID NO: 351931 - DNA, 20 bp, Artificial Sequence
  Description of Artificial Sequence: Synthetic oligonucleotide
  Target: LAMA2; (+) strand; PAM type: YTN; PAM sequence: TTG
gcctgtagaccaaatcctgg

SEQ ID NO: 351932 - DNA, 20 bp, Artificial Sequence
  Description of Artificial Sequence: Synthetic oligonucleotide
  Target: LAMA2; (+) strand; PAM type: YTN; PAM sequence: CTG
tagaccaaatcctggcctat

SEQ ID NO: 351933 - DNA, 20 bp, Artificial Sequence
  Description of Artificial Sequence: Synthetic oligonucleotide
  Target: LAMA2; (+) strand; PAM type: YTN; PAM sequence: CTG
gcctatggccagatgactac

SEQ ID NO: 351934 - DNA, 20 bp, Artificial Sequence
  Description of Artificial Sequence: Synthetic oligonucleotide
  Target: LAMA2; (+) strand; PAM type: YTN; PAM sequence: CTA
tggccagatgactacaaaag

SEQ ID NO: 351935 - DNA, 20 bp, Artificial Sequence
  Description of Artificial Sequence: Synthetic oligonucleotide
  Target: LAMA2; (+) strand; PAM type: YTN; PAM sequence: CTA
caaaagtagtcattaggttg

SEQ ID NO: 351936 - DNA, 20 bp, Artificial Sequence
  Description of Artificial Sequence: Synthetic oligonucleotide
  Target: LAMA2; (+) strand; PAM type: YTN; PAM sequence: TTA
ggttgactactcttcctcct

SEQ ID NO: 351937 - DNA, 20 bp, Artificial Sequence
  Description of Artificial Sequence: Synthetic oligonucleotide
  Target: LAMA2; (+) strand; PAM type: YTN; PAM sequence: TTG
actactcttcctcctatcat

SEQ ID NO: 351938 - DNA, 20 bp, Artificial Sequence
  Description of Artificial Sequence: Synthetic oligonucleotide
  Target: LAMA2; (+) strand; PAM type: YTN; PAM sequence: CTA
ctcttcctcctatcatctct

SEQ ID NO: 351939 - DNA, 20 bp, Artificial Sequence
  Description of Artificial Sequence: Synthetic oligonucleotide
  Target: LAMA2; (+) strand; PAM type: YTN; PAM sequence: CTC
ttcctcctatcatctctacc

SEQ ID NO: 351940 - DNA, 20 bp, Artificial Sequence
  Description of Artificial Sequence: Synthetic oligonucleotide
  Target: LAMA2; (+) strand; PAM type: YTN; PAM sequence: CTT
cctcctatcatctctacctg

SEQ ID NO: 351941 - DNA, 20 bp, Artificial Sequence
  Description of Artificial Sequence: Synthetic oligonucleotide
  Target: LAMA2; (+) strand; PAM type: YTN; PAM sequence: TTC
ctcctatcatctctacctga

SEQ ID NO: 351942 - DNA, 20 bp, Artificial Sequence
  Description of Artificial Sequence: Synthetic oligonucleotide
  Target: LAMA2; (+) strand; PAM type: YTN; PAM sequence: CTC
ctatcatctctacctgatgt

SEQ ID NO: 351943 - DNA, 20 bp, Artificial Sequence
  Description of Artificial Sequence: Synthetic oligonucleotide
  Target: LAMA2; (+) strand; PAM type: YTN; PAM sequence: CTA
tcatctctacctgatgttaa

SEQ ID NO: 351944 - DNA, 20 bp, Artificial Sequence
  Description of Artificial Sequence: Synthetic oligonucleotide
  Target: LAMA2; (+) strand; PAM type: YTN; PAM sequence: CTC
tacctgatgttaagcatatc

SEQ ID NO: 351945 - DNA, 20 bp, Artificial Sequence
  Description of Artificial Sequence: Synthetic oligonucleotide
  Target: LAMA2; (+) strand; PAM type: YTN; PAM sequence: CTA
cctgatgttaagcatatcca

SEQ ID NO: 351946 - DNA, 20 bp, Artificial Sequence
  Description of Artificial Sequence: Synthetic oligonucleotide
  Target: LAMA2; (+) strand; PAM type: YTN; PAM sequence: CTG
atgttaagcatatccagtga

SEQ ID NO: 351947 - DNA, 20 bp, Artificial Sequence
  Description of Artificial Sequence: Synthetic oligonucleotide
  Target: LAMA2; (+) strand; PAM type: YTN; PAM sequence: TTA
agcatatccagtgaattatt

SEQ ID NO: 351948 - DNA, 20 bp, Artificial Sequence
  Description of Artificial Sequence: Synthetic oligonucleotide
  Target: LAMA2; (+) strand; PAM type: YTN; PAM sequence: TTA
ttaaattgaggtattttact

SEQ ID NO: 351949 - DNA, 20 bp, Artificial Sequence
  Description of Artificial Sequence: Synthetic oligonucleotide
  Target: LAMA2; (+) strand; PAM type: YTN; PAM sequence: TTA
aattgaggtattttactttt

SEQ ID NO: 351950 - DNA, 20 bp, Artificial Sequence
  Description of Artificial Sequence: Synthetic oligonucleotide
  Target: LAMA2; (+) strand; PAM type: YTN; PAM sequence: TTG
aggtattttacttttcagct

SEQ ID NO: 351951 - DNA, 20 bp, Artificial Sequence
  Description of Artificial Sequence: Synthetic oligonucleotide
  Target: LAMA2; (+) strand; PAM type: YTN; PAM sequence: TTT
tacttttcagctttctggag

SEQ ID NO: 351952 - DNA, 20 bp, Artificial Sequence
  Description of Artificial Sequence: Synthetic oligonucleotide
  Target: LAMA2; (+) strand; PAM type: YTN; PAM sequence: TTT
acttttcagctttctggagt

SEQ ID NO: 351953 - DNA, 20 bp, Artificial Sequence
  Description of Artificial Sequence: Synthetic oligonucleotide
  Target: LAMA2; (+) strand; PAM type: YTN; PAM sequence: TTA
cttttcagctttctggagtt

SEQ ID NO: 351954 - DNA, 20 bp, Artificial Sequence
  Description of Artificial Sequence: Synthetic oligonucleotide
  Target: LAMA2; (+) strand; PAM type: YTN; PAM sequence: CTT
ttcagctttctggagttctt

SEQ ID NO: 351955 - DNA, 20 bp, Artificial Sequence
  Description of Artificial Sequence: Synthetic oligonucleotide
  Target: LAMA2; (+) strand; PAM type: YTN; PAM sequence: TTT
tcagctttctggagttctta

SEQ ID NO: 351956 - DNA, 20 bp, Artificial Sequence
  Description of Artificial Sequence: Synthetic oligonucleotide
  Target: LAMA2; (+) strand; PAM type: YTN; PAM sequence: TTT
cagctttctggagttcttat

SEQ ID NO: 351957 - DNA, 20 bp, Artificial Sequence
  Description of Artificial Sequence: Synthetic oligonucleotide
  Target: LAMA2; (+) strand; PAM type: YTN; PAM sequence: TTC
agctttctggagttcttatg

SEQ ID NO: 351958 - DNA, 20 bp, Artificial Sequence
  Description of Artificial Sequence: Synthetic oligonucleotide
  Target: LAMA2; (+) strand; PAM type: YTN; PAM sequence: CTT
tctggagttcttatgttcct

SEQ ID NO: 351959 - DNA, 20 bp, Artificial Sequence
  Description of Artificial Sequence: Synthetic oligonucleotide
  Target: LAMA2; (+) strand; PAM type: YTN; PAM sequence: TTT
ctggagttcttatgttcctt

SEQ ID NO: 351960 - DNA, 20 bp, Artificial Sequence
  Description of Artificial Sequence: Synthetic oligonucleotide
  Target: LAMA2; (+) strand; PAM type: YTN; PAM sequence: TTC
tggagttcttatgttcctta

SEQ ID NO: 351961 - DNA, 20 bp, Artificial Sequence
  Description of Artificial Sequence: Synthetic oligonucleotide
  Target: LAMA2; (+) strand; PAM type: YTN; PAM sequence: CTG
gagttcttatgttccttaca

SEQ ID NO: 351962 - DNA, 20 bp, Artificial Sequence
  Description of Artificial Sequence: Synthetic oligonucleotide
  Target: LAMA2; (+) strand; PAM type: YTN; PAM sequence: TTC
ttatgttccttacagcttcc

SEQ ID NO: 351963 - DNA, 20 bp, Artificial Sequence
  Description of Artificial Sequence: Synthetic oligonucleotide
  Target: LAMA2; (+) strand; PAM type: YTN; PAM sequence: CTT
atgttccttacagcttccat

SEQ ID NO: 351964 - DNA, 20 bp, Artificial Sequence
  Description of Artificial Sequence: Synthetic oligonucleotide
  Target: LAMA2; (+) strand; PAM type: YTN; PAM sequence: TTA
tgttccttacagcttccatt

SEQ ID NO: 351965 - DNA, 20 bp, Artificial Sequence
  Description of Artificial Sequence: Synthetic oligonucleotide
  Target: LAMA2; (+) strand; PAM type: YTN; PAM sequence: TTC
cttacagcttccatttctct

SEQ ID NO: 351966 - DNA, 20 bp, Artificial Sequence
  Description of Artificial Sequence: Synthetic oligonucleotide
  Target: LAMA2; (+) strand; PAM type: YTN; PAM sequence: CTT
acagcttccatttctctgaa

SEQ ID NO: 351967 - DNA, 20 bp, Artificial Sequence
  Description of Artificial Sequence: Synthetic oligonucleotide
  Target: LAMA2; (+) strand; PAM type: YTN; PAM sequence: TTA
cagcttccatttctctgaaa

SEQ ID NO: 351968 - DNA, 20 bp, Artificial Sequence
  Description of Artificial Sequence: Synthetic oligonucleotide
  Target: LAMA2; (+) strand; PAM type: YTN; PAM sequence: CTT
ccatttctctgaaatactcc

SEQ ID NO: 351969 - DNA, 20 bp, Artificial Sequence
  Description of Artificial Sequence: Synthetic oligonucleotide
  Target: LAMA2; (+) strand; PAM type: YTN; PAM sequence: TTC
catttctctgaaatactcca

SEQ ID NO: 351970 - DNA, 20 bp, Artificial Sequence
  Description of Artificial Sequence: Synthetic oligonucleotide
  Target: LAMA2; (+) strand; PAM type: YTN; PAM sequence: TTT
ctctgaaatactccatacct

SEQ ID NO: 351971 - DNA, 20 bp, Artificial Sequence
  Description of Artificial Sequence: Synthetic oligonucleotide
  Target: LAMA2; (+) strand; PAM type: YTN; PAM sequence: TTC
tctgaaatactccatacctt

SEQ ID NO: 351972 - DNA, 20 bp, Artificial Sequence
  Description of Artificial Sequence: Synthetic oligonucleotide
  Target: LAMA2; (+) strand; PAM type: YTN; PAM sequence: CTC
tgaaatactccataccttca

SEQ ID NO: 351973 - DNA, 20 bp, Artificial Sequence
  Description of Artificial Sequence: Synthetic oligonucleotide
  Target: LAMA2; (+) strand; PAM type: YTN; PAM sequence: CTG
aaatactccataccttcact

SEQ ID NO: 351974 - DNA, 20 bp, Artificial Sequence
  Description of Artificial Sequence: Synthetic oligonucleotide
  Target: LAMA2; (+) strand; PAM type: YTN; PAM sequence: CTC
cataccttcactcattataa

SEQ ID NO: 351975 - DNA, 20 bp, Artificial Sequence
  Description of Artificial Sequence: Synthetic oligonucleotide
  Target: LAMA2; (+) strand; PAM type: YTN; PAM sequence: CTT
cactcattataaacattgtt

SEQ ID NO: 351976 - DNA, 20 bp, Artificial Sequence
  Description of Artificial Sequence: Synthetic oligonucleotide
  Target: LAMA2; (+) strand; PAM type: YTN; PAM sequence: TTC
actcattataaacattgttt

SEQ ID NO: 351977 - DNA, 20 bp, Artificial Sequence
  Description of Artificial Sequence: Synthetic oligonucleotide
  Target: LAMA2; (+) strand; PAM type: YTN; PAM sequence: CTC
attataaacattgtttcctt

SEQ ID NO: 351978 - DNA, 20 bp, Artificial Sequence
  Description of Artificial Sequence: Synthetic oligonucleotide
  Target: LAMA2; (+) strand; PAM type: YTN; PAM sequence: TTA
taaacattgtttcctttata

SEQ ID NO: 351979 - DNA, 20 bp, Artificial Sequence
  Description of Artificial Sequence: Synthetic oligonucleotide
  Target: LAMA2; (+) strand; PAM type: YTN; PAM sequence: TTG
tttcctttatattctcggac

SEQ ID NO: 351980 - DNA, 20 bp, Artificial Sequence
  Description of Artificial Sequence: Synthetic oligonucleotide
  Target: LAMA2; (+) strand; PAM type: YTN; PAM sequence: TTT
cctttatattctcggacata

SEQ ID NO: 351981 - DNA, 20 bp, Artificial Sequence
  Description of Artificial Sequence: Synthetic oligonucleotide
  Target: LAMA2; (+) strand; PAM type: YTN; PAM sequence: TTC
ctttatattctcggacatat

SEQ ID NO: 351982 - DNA, 20 bp, Artificial Sequence
  Description of Artificial Sequence: Synthetic oligonucleotide
  Target: LAMA2; (+) strand; PAM type: YTN; PAM sequence: CTT
tatattctcggacatattta

SEQ ID NO: 351983 - DNA, 20 bp, Artificial Sequence
  Description of Artificial Sequence: Synthetic oligonucleotide
  Target: LAMA2; (+) strand; PAM type: YTN; PAM sequence: TTT
atattctcggacatatttac

SEQ ID NO: 351984 - DNA, 20 bp, Artificial Sequence
  Description of Artificial Sequence: Synthetic oligonucleotide
  Target: LAMA2; (+) strand; PAM type: YTN; PAM sequence: TTA
tattctcggacatatttaca

SEQ ID NO: 351985 - DNA, 20 bp, Artificial Sequence
  Description of Artificial Sequence: Synthetic oligonucleotide
  Target: LAMA2; (+) strand; PAM type: YTN; PAM sequence: TTC
tcggacatatttacagaact

SEQ ID NO: 351986 - DNA, 20 bp, Artificial Sequence
  Description of Artificial Sequence: Synthetic oligonucleotide
  Target: LAMA2; (+) strand; PAM type: YTN; PAM sequence: CTC
ggacatatttacagaactta

SEQ ID NO: 351987 - DNA, 20 bp, Artificial Sequence
  Description of Artificial Sequence: Synthetic oligonucleotide
  Target: LAMA2; (+) strand; PAM type: YTN; PAM sequence: TTT
acagaacttacgttgacttc

SEQ ID NO: 351988 - DNA, 20 bp, Artificial Sequence
  Description of Artificial Sequence: Synthetic oligonucleotide
  Target: LAMA2; (+) strand; PAM type: YTN; PAM sequence: TTA
cagaacttacgttgacttcc

SEQ ID NO: 351989 - DNA, 20 bp, Artificial Sequence
  Description of Artificial Sequence: Synthetic oligonucleotide
  Target: LAMA2; (+) strand; PAM type: YTN; PAM sequence: CTT
acgttgacttccttgtatgc

SEQ ID NO: 351990 - DNA, 20 bp, Artificial Sequence
  Description of Artificial Sequence: Synthetic oligonucleotide
  Target: LAMA2; (+) strand; PAM type: YTN; PAM sequence: TTA
cgttgacttccttgtatgct

SEQ ID NO: 351991 - DNA, 20 bp, Artificial Sequence
  Description of Artificial Sequence: Synthetic oligonucleotide
  Target: LAMA2; (+) strand; PAM type: YTN; PAM sequence: TTG
acttccttgtatgctaattt

SEQ ID NO: 351992 - DNA, 20 bp, Artificial Sequence
  Description of Artificial Sequence: Synthetic oligonucleotide
  Target: LAMA2; (+) strand; PAM type: YTN; PAM sequence: CTT
ccttgtatgctaatttcaat

SEQ ID NO: 351993 - DNA, 20 bp, Artificial Sequence
  Description of Artificial Sequence: Synthetic oligonucleotide
  Target: LAMA2; (+) strand; PAM type: YTN; PAM sequence: TTC
cttgtatgctaatttcaata

SEQ ID NO: 351994 - DNA, 20 bp, Artificial Sequence
  Description of Artificial Sequence: Synthetic oligonucleotide
  Target: LAMA2; (+) strand; PAM type: YTN; PAM sequence: CTT
gtatgctaatttcaatatct

SEQ ID NO: 351995 - DNA, 20 bp, Artificial Sequence
  Description of Artificial Sequence: Synthetic oligonucleotide
  Target: LAMA2; (+) strand; PAM type: YTN; PAM sequence: TTG
tatgctaatttcaatatctg

SEQ ID NO: 351996 - DNA, 20 bp, Artificial Sequence
  Description of Artificial Sequence: Synthetic oligonucleotide
  Target: LAMA2; (+) strand; PAM type: YTN; PAM sequence: CTA
atttcaatatctgggtcacc

SEQ ID NO: 351997 - DNA, 20 bp, Artificial Sequence
  Description of Artificial Sequence: Synthetic oligonucleotide
  Target: LAMA2; (+) strand; PAM type: YTN; PAM sequence: TTT
caatatctgggtcacctcag

SEQ ID NO: 351998 - DNA, 20 bp, Artificial Sequence
  Description of Artificial Sequence: Synthetic oligonucleotide
  Target: LAMA2; (+) strand; PAM type: YTN; PAM sequence: TTC
aatatctgggtcacctcagg

SEQ ID NO: 351999 - DNA, 20 bp, Artificial Sequence
  Description of Artificial Sequence: Synthetic oligonucleotide
  Target: LAMA2; (+) strand; PAM type: YTN; PAM sequence: CTG
ggtcacctcaggatctgctt

SEQ ID NO: 352000 - DNA, 20 bp, Artificial Sequence
  Description of Artificial Sequence: Synthetic oligonucleotide
  Target: LAMA2; (+) strand; PAM type: YTN; PAM sequence: CTC
aggatctgcttttatcaact

SEQ ID NO: 352001 - DNA, 20 bp, Artificial Sequence
  Description of Artificial Sequence: Synthetic oligonucleotide
  Target: LAMA2; (+) strand; PAM type: YTN; PAM sequence: CTG
cttttatcaacttctttttt

SEQ ID NO: 352002 - DNA, 20 bp, Artificial Sequence
  Description of Artificial Sequence: Synthetic oligonucleotide
  Target: LAMA2; (+) strand; PAM type: YTN; PAM sequence: CTT
ttatcaacttctttttttaa

SEQ ID NO: 352003 - DNA, 20 bp, Artificial Sequence
  Description of Artificial Sequence: Synthetic oligonucleotide
  Target: LAMA2; (+) strand; PAM type: YTN; PAM sequence: TTT
tatcaacttctttttttaat

SEQ ID NO: 352004 - DNA, 20 bp, Artificial Sequence
  Description of Artificial Sequence: Synthetic oligonucleotide
  Target: LAMA2; (+) strand; PAM type: YTN; PAM sequence: TTT
atcaacttctttttttaata

SEQ ID NO: 352005 - DNA, 20 bp, Artificial Sequence
  Description of Artificial Sequence: Synthetic oligonucleotide
  Target: LAMA2; (+) strand; PAM type: YTN; PAM sequence: TTA
tcaacttctttttttaataa

SEQ ID NO: 352006 - DNA, 20 bp, Artificial Sequence
  Description of Artificial Sequence: Synthetic oligonucleotide
  Target: LAMA2; (+) strand; PAM type: YTN; PAM sequence: CTT
ctttttttaataaggtcaac

SEQ ID NO: 352007 - DNA, 20 bp, Artificial Sequence
  Description of Artificial Sequence: Synthetic oligonucleotide
  Target: LAMA2; (+) strand; PAM type: YTN; PAM sequence: TTC
tttttttaataaggtcaaca

SEQ ID NO: 352008 - DNA, 20 bp, Artificial Sequence
  Description of Artificial Sequence: Synthetic oligonucleotide
  Target: LAMA2; (+) strand; PAM type: YTN; PAM sequence: CTT
tttttaataaggtcaacatt

SEQ ID NO: 352009 - DNA, 20 bp, Artificial Sequence
  Description of Artificial Sequence: Synthetic oligonucleotide
  Target: LAMA2; (+) strand; PAM type: YTN; PAM sequence: TTT
ttttaataaggtcaacattt

SEQ ID NO: 352010 - DNA, 20 bp, Artificial Sequence
  Description of Artificial Sequence: Synthetic oligonucleotide
  Target: LAMA2; (+) strand; PAM type: YTN; PAM sequence: TTT
tttaataaggtcaacatttt

SEQ ID NO: 352011 - DNA, 20 bp, Artificial Sequence
  Description of Artificial Sequence: Synthetic oligonucleotide
  Target: LAMA2; (+) strand; PAM type: YTN; PAM sequence: TTT
ttaataaggtcaacattttc

SEQ ID NO: 352012 - DNA, 20 bp, Artificial Sequence
  Description of Artificial Sequence: Synthetic oligonucleotide
  Target: LAMA2; (+) strand; PAM type: YTN; PAM sequence: TTT
taataaggtcaacattttcc

SEQ ID NO: 352013 - DNA, 20 bp, Artificial Sequence
  Description of Artificial Sequence: Synthetic oligonucleotide
  Target: LAMA2; (+) strand; PAM type: YTN; PAM sequence: TTT
aataaggtcaacattttcct

SEQ ID NO: 352014 - DNA, 20 bp, Artificial Sequence
  Description of Artificial Sequence: Synthetic oligonucleotide
  Target: LAMA2; (+) strand; PAM type: YTN; PAM sequence: TTA
ataaggtcaacattttcctg

SEQ ID NO: 352015 - DNA, 20 bp, Artificial Sequence
  Description of Artificial Sequence: Synthetic oligonucleotide
  Target: LAMA2; (+) strand; PAM type: YTN; PAM sequence: TTT
tcctgtttctttcctgtata

SEQ ID NO: 352016 - DNA, 20 bp, Artificial Sequence
  Description of Artificial Sequence: Synthetic oligonucleotide
  Target: LAMA2; (+) strand; PAM type: YTN; PAM sequence: TTT
cctgtttctttcctgtatat

SEQ ID NO: 352017 - DNA, 20 bp, Artificial Sequence
  Description of Artificial Sequence: Synthetic oligonucleotide
  Target: LAMA2; (+) strand; PAM type: YTN; PAM sequence: TTC
ctgtttctttcctgtatatc

SEQ ID NO: 352018 - DNA, 20 bp, Artificial Sequence
  Description of Artificial Sequence: Synthetic oligonucleotide
  Target: LAMA2; (+) strand; PAM type: YTN; PAM sequence: CTG
tttctttcctgtatatctaa

SEQ ID NO: 352019 - DNA, 20 bp, Artificial Sequence
  Description of Artificial Sequence: Synthetic oligonucleotide
  Target: LAMA2; (+) strand; PAM type: YTN; PAM sequence: TTT
ctttcctgtatatctaatac

SEQ ID NO: 352020 - DNA, 20 bp, Artificial Sequence
  Description of Artificial Sequence: Synthetic oligonucleotide
  Target: LAMA2; (+) strand; PAM type: YTN; PAM sequence: TTC
tttcctgtatatctaataca

SEQ ID NO: 352021 - DNA, 20 bp, Artificial Sequence
  Description of Artificial Sequence: Synthetic oligonucleotide
  Target: LAMA2; (+) strand; PAM type: YTN; PAM sequence: CTT
tcctgtatatctaatacagt

SEQ ID NO: 352022 - DNA, 20 bp, Artificial Sequence
  Description of Artificial Sequence: Synthetic oligonucleotide
  Target: LAMA2; (+) strand; PAM type: YTN; PAM sequence: TTT
cctgtatatctaatacagta

SEQ ID NO: 352023 - DNA, 20 bp, Artificial Sequence
  Description of Artificial Sequence: Synthetic oligonucleotide
  Target: LAMA2; (+) strand; PAM type: YTN; PAM sequence: TTC
ctgtatatctaatacagtag

SEQ ID NO: 352024 - DNA, 20 bp, Artificial Sequence
  Description of Artificial Sequence: Synthetic oligonucleotide
  Target: LAMA2; (+) strand; PAM type: YTN; PAM sequence: CTG
tatatctaatacagtagtcc

SEQ ID NO: 352025 - DNA, 20 bp, Artificial Sequence
  Description of Artificial Sequence: Synthetic oligonucleotide
  Target: LAMA2; (+) strand; PAM type: YTN; PAM sequence: CTA
atacagtagtcctcctttat

SEQ ID NO: 352026 - DNA, 20 bp, Artificial Sequence
  Description of Artificial Sequence: Synthetic oligonucleotide
  Target: LAMA2; (+) strand; PAM type: YTN; PAM sequence: CTC
ctttattcacagaggatatg

SEQ ID NO: 352027 - DNA, 20 bp, Artificial Sequence
  Description of Artificial Sequence: Synthetic oligonucleotide
  Target: LAMA2; (+) strand; PAM type: YTN; PAM sequence: CTT
tattcacagaggatatgttc

SEQ ID NO: 352028 - DNA, 20 bp, Artificial Sequence
  Description of Artificial Sequence: Synthetic oligonucleotide
  Target: LAMA2; (+) strand; PAM type: YTN; PAM sequence: TTT
attcacagaggatatgttcc

SEQ ID NO: 352029 - DNA, 20 bp, Artificial Sequence
  Description of Artificial Sequence: Synthetic oligonucleotide
  Target: LAMA2; (+) strand; PAM type: YTN; PAM sequence: TTA
ttcacagaggatatgttcca

SEQ ID NO: 352030 - DNA, 20 bp, Artificial Sequence
  Description of Artificial Sequence: Synthetic oligonucleotide
  Target: LAMA2; (+) strand; PAM type: YTN; PAM sequence: TTC
acagaggatatgttccagga

SEQ ID NO: 352031 - DNA, 20 bp, Artificial Sequence
  Description of Artificial Sequence: Synthetic oligonucleotide
  Target: LAMA2; (+) strand; PAM type: YTN; PAM sequence: TTC
caggaaccccagttgatacc

SEQ ID NO: 352032 - DNA, 20 bp, Artificial Sequence
  Description of Artificial Sequence: Synthetic oligonucleotide
  Target: LAMA2; (+) strand; PAM type: YTN; PAM sequence: TTG
atacctgaaatcacagatag

SEQ ID NO: 352033 - DNA, 20 bp, Artificial Sequence
  Description of Artificial Sequence: Synthetic oligonucleotide
  Target: LAMA2; (+) strand; PAM type: YTN; PAM sequence: CTG
aaatcacagatagtaccaaa

SEQ ID NO: 352034 - DNA, 20 bp, Artificial Sequence
  Description of Artificial Sequence: Synthetic oligonucleotide
  Target: LAMA2; (+) strand; PAM type: YTN; PAM sequence: CTA
tatatactatgttttttcta

SEQ ID NO: 352035 - DNA, 20 bp, Artificial Sequence
  Description of Artificial Sequence: Synthetic oligonucleotide
  Target: LAMA2; (+) strand; PAM type: YTN; PAM sequence: CTA
tgttttttctatctgatacc

SEQ ID NO: 352036 - DNA, 20 bp, Artificial Sequence
  Description of Artificial Sequence: Synthetic oligonucleotide
  Target: LAMA2; (+) strand; PAM type: YTN; PAM sequence: TTT
tttctatctgatacctgtga

SEQ ID NO: 352037 - DNA, 20 bp, Artificial Sequence
  Description of Artificial Sequence: Synthetic oligonucleotide
  Target: LAMA2; (+) strand; PAM type: YTN; PAM sequence: TTT
ttctatctgatacctgtgat

SEQ ID NO: 352038 - DNA, 20 bp, Artificial Sequence
  Description of Artificial Sequence: Synthetic oligonucleotide
  Target: LAMA2; (+) strand; PAM type: YTN; PAM sequence: TTT
tctatctgatacctgtgatg

SEQ ID NO: 352039 - DNA, 20 bp, Artificial Sequence
  Description of Artificial Sequence: Synthetic oligonucleotide
  Target: LAMA2; (+) strand; PAM type: YTN; PAM sequence: TTT
ctatctgatacctgtgatgg

SEQ ID NO: 352040 - DNA, 20 bp, Artificial Sequence
  Description of Artificial Sequence: Synthetic oligonucleotide
  Target: LAMA2; (+) strand; PAM type: YTN; PAM sequence: TTC
tatctgatacctgtgatggg

SEQ ID NO: 352041 - DNA, 20 bp, Artificial Sequence
  Description of Artificial Sequence: Synthetic oligonucleotide
  Target: LAMA2; (+) strand; PAM type: YTN; PAM sequence: CTA
tctgatacctgtgatgggac

SEQ ID NO: 352042 - DNA, 20 bp, Artificial Sequence
  Description of Artificial Sequence: Synthetic oligonucleotide
  Target: LAMA2; (+) strand; PAM type: YTN; PAM sequence: CTG
atacctgtgatgggactaag

SEQ ID NO: 352043 - DNA, 20 bp, Artificial Sequence
  Description of Artificial Sequence: Synthetic oligonucleotide
  Target: LAMA2; (+) strand; PAM type: YTN; PAM sequence: CTG
tgatgggactaagtgactaa

SEQ ID NO: 352044 - DNA, 20 bp, Artificial Sequence
  Description of Artificial Sequence: Synthetic oligonucleotide
  Target: LAMA2; (+) strand; PAM type: YTN; PAM sequence: CTA
agtgactaacaggagggtag

SEQ ID NO: 352045 - DNA, 20 bp, Artificial Sequence
  Description of Artificial Sequence: Synthetic oligonucleotide
  Target: LAMA2; (+) strand; PAM type: YTN; PAM sequence: CTA
acaggagggtagtgtctata

SEQ ID NO: 352046 - DNA, 20 bp, Artificial Sequence
  Description of Artificial Sequence: Synthetic oligonucleotide
  Target: LAMA2; (+) strand; PAM type: YTN; PAM sequence: CTA
tacagcatagatatgctgga

SEQ ID NO: 352047 - DNA, 20 bp, Artificial Sequence
  Description of Artificial Sequence: Synthetic oligonucleotide
  Target: LAMA2; (+) strand; PAM type: YTN; PAM sequence: CTG
gacaaggggatgattcatat

SEQ ID NO: 352048 - DNA, 20 bp, Artificial Sequence
  Description of Artificial Sequence: Synthetic oligonucleotide
  Target: LAMA2; (+) strand; PAM type: YTN; PAM sequence: TTC
atatccctggtgcgacagag

SEQ ID NO: 352049 - DNA, 20 bp, Artificial Sequence
  Description of Artificial Sequence: Synthetic oligonucleotide
  Target: LAMA2; (+) strand; PAM type: YTN; PAM sequence: CTG
gtgcgacagagcaagatggc

SEQ ID NO: 352050 - DNA, 20 bp, Artificial Sequence
  Description of Artificial Sequence: Synthetic oligonucleotide
  Target: LAMA2; (+) strand; PAM type: YTN; PAM sequence: TTT
caccacactattcaaaatga

SEQ ID NO: 352051 - DNA, 20 bp, Artificial Sequence
  Description of Artificial Sequence: Synthetic oligonucleotide
  Target: LAMA2; (+) strand; PAM type: YTN; PAM sequence: TTC
accacactattcaaaatgac

SEQ ID NO: 352052 - DNA, 20 bp, Artificial Sequence
  Description of Artificial Sequence: Synthetic oligonucleotide
  Target: LAMA2; (+) strand; PAM type: YTN; PAM sequence: CTA
ttcaaaatgacatgcaaatt

SEQ ID NO: 352053 - DNA, 20 bp, Artificial Sequence
  Description of Artificial Sequence: Synthetic oligonucleotide
  Target: LAMA2; (+) strand; PAM type: YTN; PAM sequence: TTC
aaaatgacatgcaaattaaa

SEQ ID NO: 352054 - DNA, 20 bp, Artificial Sequence
  Description of Artificial Sequence: Synthetic oligonucleotide
  Target: LAMA2; (+) strand; PAM type: YTN; PAM sequence: TTA
aaacttttcaattatttatt

SEQ ID NO: 352055 - DNA, 20 bp, Artificial Sequence
  Description of Artificial Sequence: Synthetic oligonucleotide
  Target: LAMA2; (+) strand; PAM type: YTN; PAM sequence: CTT
ttcaattatttatttctgga

SEQ ID NO: 352056 - DNA, 20 bp, Artificial Sequence
  Description of Artificial Sequence: Synthetic oligonucleotide
  Target: LAMA2; (+) strand; PAM type: YTN; PAM sequence: TTT
tcaattatttatttctggag

SEQ ID NO: 352057 - DNA, 20 bp, Artificial Sequence
  Description of Artificial Sequence: Synthetic oligonucleotide
  Target: LAMA2; (+) strand; PAM type: YTN; PAM sequence: TTT
caattatttatttctggagt

SEQ ID NO: 352058 - DNA, 20 bp, Artificial Sequence
  Description of Artificial Sequence: Synthetic oligonucleotide
  Target: LAMA2; (+) strand; PAM type: YTN; PAM sequence: TTC
aattatttatttctggagtt

SEQ ID NO: 352059 - DNA, 20 bp, Artificial Sequence
  Description of Artificial Sequence: Synthetic oligonucleotide
  Target: LAMA2; (+) strand; PAM type: YTN; PAM sequence: TTA
tttatttctggagttttcca

SEQ ID NO: 352060 - DNA, 20 bp, Artificial Sequence
  Description of Artificial Sequence: Synthetic oligonucleotide
  Target: LAMA2; (+) strand; PAM type: YTN; PAM sequence: TTT
atttctggagttttccattt

SEQ ID NO: 352061 - DNA, 20 bp, Artificial Sequence
  Description of Artificial Sequence: Synthetic oligonucleotide
  Target: LAMA2; (+) strand; PAM type: YTN; PAM sequence: TTA
tttctggagttttccattta

SEQ ID NO: 352062 - DNA, 20 bp, Artificial Sequence
  Description of Artificial Sequence: Synthetic oligonucleotide
  Target: LAMA2; (+) strand; PAM type: YTN; PAM sequence: TTT
ctggagttttccatttaata

SEQ ID NO: 352063 - DNA, 20 bp, Artificial Sequence
  Description of Artificial Sequence: Synthetic oligonucleotide
  Target: LAMA2; (+) strand; PAM type: YTN; PAM sequence: TTC
tggagttttccatttaatat

SEQ ID NO: 352064 - DNA, 20 bp, Artificial Sequence
  Description of Artificial Sequence: Synthetic oligonucleotide
  Target: LAMA2; (+) strand; PAM type: YTN; PAM sequence: CTG
gagttttccatttaatattt

SEQ ID NO: 352065 - DNA, 20 bp, Artificial Sequence
  Description of Artificial Sequence: Synthetic oligonucleotide
  Target: LAMA2; (+) strand; PAM type: YTN; PAM sequence: TTT
tccatttaatattttcgaac

SEQ ID NO: 352066 - DNA, 20 bp, Artificial Sequence
  Description of Artificial Sequence: Synthetic oligonucleotide
  Target: LAMA2; (+) strand; PAM type: YTN; PAM sequence: TTT
ccatttaatattttcgaact

SEQ ID NO: 352067 - DNA, 20 bp, Artificial Sequence
  Description of Artificial Sequence: Synthetic oligonucleotide
  Target: LAMA2; (+) strand; PAM type: YTN; PAM sequence: TTC
catttaatattttcgaactg

SEQ ID NO: 352068 - DNA, 20 bp, Artificial Sequence
  Description of Artificial Sequence: Synthetic oligonucleotide
  Target: LAMA2; (+) strand; PAM type: YTN; PAM sequence: TTT
aatattttcgaactgtggtt

SEQ ID NO: 352069 - DNA, 20 bp, Artificial Sequence
  Description of Artificial Sequence: Synthetic oligonucleotide
  Target: LAMA2; (+) strand; PAM type: YTN; PAM sequence: TTA
atattttcgaactgtggtta

SEQ ID NO: 352070 - DNA, 20 bp, Artificial Sequence
  Description of Artificial Sequence: Synthetic oligonucleotide
  Target: LAMA2; (+) strand; PAM type: YTN; PAM sequence: TTT
tcgaactgtggttaaccatg

SEQ ID NO: 352071 - DNA, 20 bp, Artificial Sequence
  Description of Artificial Sequence: Synthetic oligonucleotide
  Target: LAMA2; (+) strand; PAM type: YTN; PAM sequence: TTT
cgaactgtggttaaccatga

SEQ ID NO: 352072 - DNA, 20 bp, Artificial Sequence
  Description of Artificial Sequence: Synthetic oligonucleotide
  Target: LAMA2; (+) strand; PAM type: YTN; PAM sequence: TTC
gaactgtggttaaccatgat

SEQ ID NO: 352073 - DNA, 20 bp, Artificial Sequence
  Description of Artificial Sequence: Synthetic oligonucleotide
  Target: LAMA2; (+) strand; PAM type: YTN; PAM sequence: CTG
tggttaaccatgataactga

SEQ ID NO: 352074 - DNA, 20 bp, Artificial Sequence
  Description of Artificial Sequence: Synthetic oligonucleotide
  Target: LAMA2; (+) strand; PAM type: YTN; PAM sequence: TTA
accatgataactgaaacctc

SEQ ID NO: 352075 - DNA, 20 bp, Artificial Sequence
  Description of Artificial Sequence: Synthetic oligonucleotide
  Target: LAMA2; (+) strand; PAM type: YTN; PAM sequence: CTG
aaacctcagacagcaaaact

SEQ ID NO: 352076 - DNA, 20 bp, Artificial Sequence
  Description of Artificial Sequence: Synthetic oligonucleotide
  Target: LAMA2; (+) strand; PAM type: YTN; PAM sequence: CTC
agacagcaaaactacagatg

SEQ ID NO: 352077 - DNA, 20 bp, Artificial Sequence
  Description of Artificial Sequence: Synthetic oligonucleotide
  Target: LAMA2; (+) strand; PAM type: YTN; PAM sequence: CTA
cagatgaggtgaggactact

SEQ ID NO: 352078 - DNA, 20 bp, Artificial Sequence
  Description of Artificial Sequence: Synthetic oligonucleotide
  Target: LAMA2; (+) strand; PAM type: YTN; PAM sequence: CTA
ctgtaatttatcatctctac

SEQ ID NO: 352079 - DNA, 20 bp, Artificial Sequence
  Description of Artificial Sequence: Synthetic oligonucleotide
  Target: LAMA2; (+) strand; PAM type: YTN; PAM sequence: CTG
taatttatcatctctacagg

SEQ ID NO: 352080 - DNA, 20 bp, Artificial Sequence
  Description of Artificial Sequence: Synthetic oligonucleotide
  Target: LAMA2; (+) strand; PAM type: YTN; PAM sequence: TTT
atcatctctacaggacattt

SEQ ID NO: 352081 - DNA, 20 bp, Artificial Sequence
  Description of Artificial Sequence: Synthetic oligonucleotide
  Target: LAMA2; (+) strand; PAM type: YTN; PAM sequence: TTA
tcatctctacaggacatttc

SEQ ID NO: 352082 - DNA, 20 bp, Artificial Sequence
  Description of Artificial Sequence: Synthetic oligonucleotide
  Target: LAMA2; (+) strand; PAM type: YTN; PAM sequence: CTC
tacaggacatttcggagaat

SEQ ID NO: 352083 - DNA, 20 bp, Artificial Sequence
  Description of Artificial Sequence: Synthetic oligonucleotide
  Target: LAMA2; (+) strand; PAM type: YTN; PAM sequence: CTA
caggacatttcggagaatac

SEQ ID NO: 352084 - DNA, 20 bp, Artificial Sequence
  Description of Artificial Sequence: Synthetic oligonucleotide
  Target: LAMA2; (+) strand; PAM type: YTN; PAM sequence: TTT
cggagaatacaatgcagaca

SEQ ID NO: 352085 - DNA, 20 bp, Artificial Sequence
  Description of Artificial Sequence: Synthetic oligonucleotide
  Target: LAMA2; (+) strand; PAM type: YTN; PAM sequence: TTC
ggagaatacaatgcagacac

SEQ ID NO: 352086 - DNA, 20 bp, Artificial Sequence
  Description of Artificial Sequence: Synthetic oligonucleotide
  Target: LAMA2; (+) strand; PAM type: YTN; PAM sequence: CTG
gtttctgttatgttcctctg

SEQ ID NO: 352087 - DNA, 20 bp, Artificial Sequence
  Description of Artificial Sequence: Synthetic oligonucleotide
  Target: LAMA2; (+) strand; PAM type: YTN; PAM sequence: TTT
ctgttatgttcctctgaaga

SEQ ID NO: 352088 - DNA, 20 bp, Artificial Sequence
  Description of Artificial Sequence: Synthetic oligonucleotide
  Target: LAMA2; (+) strand; PAM type: YTN; PAM sequence: TTC
tgttatgttcctctgaagag

SEQ ID NO: 352089 - DNA, 20 bp, Artificial Sequence
  Description of Artificial Sequence: Synthetic oligonucleotide
  Target: LAMA2; (+) strand; PAM type: YTN; PAM sequence: CTG
ttatgttcctctgaagagtt

SEQ ID NO: 352090 - DNA, 20 bp, Artificial Sequence
  Description of Artificial Sequence: Synthetic oligonucleotide
  Target: LAMA2; (+) strand; PAM type: YTN; PAM sequence: TTA
tgttcctctgaagagtttga

SEQ ID NO: 352091 - DNA, 20 bp, Artificial Sequence
  Description of Artificial Sequence: Synthetic oligonucleotide
  Target: LAMA2; (+) strand; PAM type: YTN; PAM sequence: TTC
ctctgaagagtttgaattgg

SEQ ID NO: 352092 - DNA, 20 bp, Artificial Sequence
  Description of Artificial Sequence: Synthetic oligonucleotide
  Target: LAMA2; (+) strand; PAM type: YTN; PAM sequence: CTC
tgaagagtttgaattggttc

SEQ ID NO: 352093 - DNA, 20 bp, Artificial Sequence
  Description of Artificial Sequence: Synthetic oligonucleotide
  Target: LAMA2; (+) strand; PAM type: YTN; PAM sequence: CTG
aagagtttgaattggttcta

SEQ ID NO: 352094 - DNA, 20 bp, Artificial Sequence
  Description of Artificial Sequence: Synthetic oligonucleotide
  Target: LAMA2; (+) strand; PAM type: YTN; PAM sequence: TTT
gaattggttctaattagtaa

SEQ ID NO: 352095 - DNA, 20 bp, Artificial Sequence
  Description of Artificial Sequence: Synthetic oligonucleotide
  Target: LAMA2; (+) strand; PAM type: YTN; PAM sequence: TTG
aattggttctaattagtaat

SEQ ID NO: 352096 - DNA, 20 bp, Artificial Sequence
  Description of Artificial Sequence: Synthetic oligonucleotide
  Target: LAMA2; (+) strand; PAM type: YTN; PAM sequence: TTG
gttctaattagtaataaact

SEQ ID NO: 352097 - DNA, 20 bp, Artificial Sequence
  Description of Artificial Sequence: Synthetic oligonucleotide
  Target: LAMA2; (+) strand; PAM type: YTN; PAM sequence: TTC
taattagtaataaacttgct

SEQ ID NO: 352098 - DNA, 20 bp, Artificial Sequence
  Description of Artificial Sequence: Synthetic oligonucleotide
  Target: LAMA2; (+) strand; PAM type: YTN; PAM sequence: CTA
attagtaataaacttgctga

SEQ ID NO: 352099 - DNA, 20 bp, Artificial Sequence
  Description of Artificial Sequence: Synthetic oligonucleotide
  Target: LAMA2; (+) strand; PAM type: YTN; PAM sequence: TTA
gtaataaacttgctgagtga

SEQ ID NO: 352100 - DNA, 20 bp, Artificial Sequence
  Description of Artificial Sequence: Synthetic oligonucleotide
  Target: LAMA2; (+) strand; PAM type: YTN; PAM sequence: CTT
gctgagtgatcaccatgaag

SEQ ID NO: 352101 - DNA, 20 bp, Artificial Sequence
  Description of Artificial Sequence: Synthetic oligonucleotide
  Target: LAMA2; (+) strand; PAM type: YTN; PAM sequence: TTG
ctgagtgatcaccatgaagt

SEQ ID NO: 352102 - DNA, 20 bp, Artificial Sequence
  Description of Artificial Sequence: Synthetic oligonucleotide
  Target: LAMA2; (+) strand; PAM type: YTN; PAM sequence: CTG
agtgatcaccatgaagtcat

SEQ ID NO: 352103 - DNA, 20 bp, Artificial Sequence
  Description of Artificial Sequence: Synthetic oligonucleotide
  Target: LAMA2; (+) strand; PAM type: YTN; PAM sequence: TTT
actttcatactttgttagga

SEQ ID NO: 352104 - DNA, 20 bp, Artificial Sequence
  Description of Artificial Sequence: Synthetic oligonucleotide
  Target: LAMA2; (+) strand; PAM type: YTN; PAM sequence: TTA
ctttcatactttgttaggac

SEQ ID NO: 352105 - DNA, 20 bp, Artificial Sequence
  Description of Artificial Sequence: Synthetic oligonucleotide
  Target: LAMA2; (+) strand; PAM type: YTN; PAM sequence: CTT
tcatactttgttaggacaga

SEQ ID NO: 352106 - DNA, 20 bp, Artificial Sequence
  Description of Artificial Sequence: Synthetic oligonucleotide
  Target: LAMA2; (+) strand; PAM type: YTN; PAM sequence: TTT
catactttgttaggacagat

SEQ ID NO: 352107 - DNA, 20 bp, Artificial Sequence
  Description of Artificial Sequence: Synthetic oligonucleotide
  Target: LAMA2; (+) strand; PAM type: YTN; PAM sequence: TTC
atactttgttaggacagatt

SEQ ID NO: 352108 - DNA, 20 bp, Artificial Sequence
  Description of Artificial Sequence: Synthetic oligonucleotide
  Target: LAMA2; (+) strand; PAM type: YTN; PAM sequence: CTT
tgttaggacagattagtgga

SEQ ID NO: 352109 - DNA, 20 bp, Artificial Sequence
  Description of Artificial Sequence: Synthetic oligonucleotide
  Target: LAMA2; (+) strand; PAM type: YTN; PAM sequence: TTT
gttaggacagattagtggaa

SEQ ID NO: 352110 - DNA, 20 bp, Artificial Sequence
  Description of Artificial Sequence: Synthetic oligonucleotide
  Target: LAMA2; (+) strand; PAM type: YTN; PAM sequence: TTG
ttaggacagattagtggaaa

SEQ ID NO: 352111 - DNA, 20 bp, Artificial Sequence
  Description of Artificial Sequence: Synthetic oligonucleotide
  Target: LAMA2; (+) strand; PAM type: YTN; PAM sequence: TTA
ggacagattagtggaaaact

SEQ ID NO: 352112 - DNA, 20 bp, Artificial Sequence
  Description of Artificial Sequence: Synthetic oligonucleotide
  Target: LAMA2; (+) strand; PAM type: YTN; PAM sequence: TTA
gtggaaaactccaggtattc

SEQ ID NO: 352113 - DNA, 20 bp, Artificial Sequence
  Description of Artificial Sequence: Synthetic oligonucleotide
  Target: LAMA2; (+) strand; PAM type: YTN; PAM sequence: CTC
caggtattcatcaaacattt

SEQ ID NO: 352114 - DNA, 20 bp, Artificial Sequence
  Description of Artificial Sequence: Synthetic oligonucleotide
  Target: LAMA2; (+) strand; PAM type: YTN; PAM sequence: TTC
atcaaacatttctaatgtag

SEQ ID NO: 352115 - DNA, 20 bp, Artificial Sequence
  Description of Artificial Sequence: Synthetic oligonucleotide
  Target: LAMA2; (+) strand; PAM type: YTN; PAM sequence: TTT
ctaatgtagttaacttaaag

SEQ ID NO: 352116 - DNA, 20 bp, Artificial Sequence
  Description of Artificial Sequence: Synthetic oligonucleotide
  Target: LAMA2; (+) strand; PAM type: YTN; PAM sequence: TTC
taatgtagttaacttaaagt

SEQ ID NO: 352117 - DNA, 20 bp, Artificial Sequence
  Description of Artificial Sequence: Synthetic oligonucleotide
  Target: LAMA2; (+) strand; PAM type: YTN; PAM sequence: CTA
atgtagttaacttaaagtct

SEQ ID NO: 352118 - DNA, 20 bp, Artificial Sequence
  Description of Artificial Sequence: Synthetic oligonucleotide
  Target: LAMA2; (+) strand; PAM type: YTN; PAM sequence: TTA
acttaaagtctgaattctct

SEQ ID NO: 352119 - DNA, 20 bp, Artificial Sequence
  Description of Artificial Sequence: Synthetic oligonucleotide
  Target: LAMA2; (+) strand; PAM type: YTN; PAM sequence: CTT
aaagtctgaattctctttac

SEQ ID NO: 352120 - DNA, 20 bp, Artificial Sequence
  Description of Artificial Sequence: Synthetic oligonucleotide
  Target: LAMA2; (+) strand; PAM type: YTN; PAM sequence: TTA
aagtctgaattctctttact

SEQ ID NO: 352121 - DNA, 20 bp, Artificial Sequence
  Description of Artificial Sequence: Synthetic oligonucleotide
  Target: LAMA2; (+) strand; PAM type: YTN; PAM sequence: CTG
aattctctttactttatggt

SEQ ID NO: 352122 - DNA, 20 bp, Artificial Sequence
  Description of Artificial Sequence: Synthetic oligonucleotide
  Target: LAMA2; (+) strand; PAM type: YTN; PAM sequence: TTC
tctttactttatggttggta

SEQ ID NO: 352123 - DNA, 20 bp, Artificial Sequence
  Description of Artificial Sequence: Synthetic oligonucleotide
  Target: LAMA2; (+) strand; PAM type: YTN; PAM sequence: CTC
tttactttatggttggtagc

SEQ ID NO: 352124 - DNA, 20 bp, Artificial Sequence
  Description of Artificial Sequence: Synthetic oligonucleotide
  Target: LAMA2; (+) strand; PAM type: YTN; PAM sequence: CTT
tactttatggttggtagcac

SEQ ID NO: 352125 - DNA, 20 bp, Artificial Sequence
  Description of Artificial Sequence: Synthetic oligonucleotide
  Target: LAMA2; (+) strand; PAM type: YTN; PAM sequence: TTT
actttatggttggtagcacc

SEQ ID NO: 352126 - DNA, 20 bp, Artificial Sequence
  Description of Artificial Sequence: Synthetic oligonucleotide
  Target: LAMA2; (+) strand; PAM type: YTN; PAM sequence: TTA
ctttatggttggtagcacct

SEQ ID NO: 352127 - DNA, 20 bp, Artificial Sequence
  Description of Artificial Sequence: Synthetic oligonucleotide
  Target: LAMA2; (+) strand; PAM type: YTN; PAM sequence: CTT
tatggttggtagcacctgaa

SEQ ID NO: 352128 - DNA, 20 bp, Artificial Sequence
  Description of Artificial Sequence: Synthetic oligonucleotide
  Target: LAMA2; (+) strand; PAM type: YTN; PAM sequence: TTT
atggttggtagcacctgaaa

SEQ ID NO: 352129 - DNA, 20 bp, Artificial Sequence
  Description of Artificial Sequence: Synthetic oligonucleotide
  Target: LAMA2; (+) strand; PAM type: YTN; PAM sequence: TTA
tggttggtagcacctgaaaa

SEQ ID NO: 352130 - DNA, 20 bp, Artificial Sequence
  Description of Artificial Sequence: Synthetic oligonucleotide
  Target: LAMA2; (+) strand; PAM type: YTN; PAM sequence: TTG
gtagcacctgaaaactcttc

SEQ ID NO: 352131 - DNA, 20 bp, Artificial Sequence
  Description of Artificial Sequence: Synthetic oligonucleotide
  Target: LAMA2; (+) strand; PAM type: YTN; PAM sequence: CTG
aaaactcttctcaccttgtt

SEQ ID NO: 352132 - DNA, 20 bp, Artificial Sequence
  Description of Artificial Sequence: Synthetic oligonucleotide
  Target: LAMA2; (+) strand; PAM type: YTN; PAM sequence: CTC
ttctcaccttgttcagtttc

SEQ ID NO: 352133 - DNA, 20 bp, Artificial Sequence
  Description of Artificial Sequence: Synthetic oligonucleotide
  Target: LAMA2; (+) strand; PAM type: YTN; PAM sequence: CTT
ctcaccttgttcagtttcca

SEQ ID NO: 352134 - DNA, 20 bp, Artificial Sequence
  Description of Artificial Sequence: Synthetic oligonucleotide
  Target: LAMA2; (+) strand; PAM type: YTN; PAM sequence: TTC
tcaccttgttcagtttccag

SEQ ID NO: 352135 - DNA, 20 bp, Artificial Sequence
  Description of Artificial Sequence: Synthetic oligonucleotide
  Target: LAMA2; (+) strand; PAM type: YTN; PAM sequence: CTC
accttgttcagtttccagcg

SEQ ID NO: 352136 - DNA, 20 bp, Artificial Sequence
  Description of Artificial Sequence: Synthetic oligonucleotide
  Target: LAMA2; (+) strand; PAM type: YTN; PAM sequence: CTT
gttcagtttccagcggttgc

SEQ ID NO: 352137 - DNA, 20 bp, Artificial Sequence
  Description of Artificial Sequence: Synthetic oligonucleotide
  Target: LAMA2; (+) strand; PAM type: YTN; PAM sequence: TTG
ttcagtttccagcggttgct

SEQ ID NO: 352138 - DNA, 20 bp, Artificial Sequence
  Description of Artificial Sequence: Synthetic oligonucleotide
  Target: LAMA2; (+) strand; PAM type: YTN; PAM sequence: TTC
agtttccagcggttgctttc

SEQ ID NO: 352139 - DNA, 20 bp, Artificial Sequence
  Description of Artificial Sequence: Synthetic oligonucleotide
  Target: LAMA2; (+) strand; PAM type: YTN; PAM sequence: TTT
ccagcggttgctttccactg

SEQ ID NO: 352140 - DNA, 20 bp, Artificial Sequence
  Description of Artificial Sequence: Synthetic oligonucleotide
  Target: LAMA2; (+) strand; PAM type: YTN; PAM sequence: TTC
cagcggttgctttccactga

SEQ ID NO: 352141 - DNA, 20 bp, Artificial Sequence
  Description of Artificial Sequence: Synthetic oligonucleotide
  Target: LAMA2; (+) strand; PAM type: YTN; PAM sequence: TTG
ctttccactgaatttcctag

SEQ ID NO: 352142 - DNA, 20 bp, Artificial Sequence
  Description of Artificial Sequence: Synthetic oligonucleotide
  Target: LAMA2; (+) strand; PAM type: YTN; PAM sequence: CTT
tccactgaatttcctagaat

SEQ ID NO: 352143 - DNA, 20 bp, Artificial Sequence
  Description of Artificial Sequence: Synthetic oligonucleotide
  Target: LAMA2; (+) strand; PAM type: YTN; PAM sequence: TTT
ccactgaatttcctagaatc

SEQ ID NO: 352144 - DNA, 20 bp, Artificial Sequence
  Description of Artificial Sequence: Synthetic oligonucleotide
  Target: LAMA2; (+) strand; PAM type: YTN; PAM sequence: TTC
cactgaatttcctagaatct

SEQ ID NO: 352145 - DNA, 20 bp, Artificial Sequence
  Description of Artificial Sequence: Synthetic oligonucleotide
  Target: LAMA2; (+) strand; PAM type: YTN; PAM sequence: CTG
aatttcctagaatctcctga

SEQ ID NO: 352146 - DNA, 20 bp, Artificial Sequence
  Description of Artificial Sequence: Synthetic oligonucleotide
  Target: LAMA2; (+) strand; PAM type: YTN; PAM sequence: TTT
cctagaatctcctgagtgaa

SEQ ID NO: 352147 - DNA, 20 bp, Artificial Sequence
  Description of Artificial Sequence: Synthetic oligonucleotide
  Target: LAMA2; (+) strand; PAM type: YTN; PAM sequence: TTC
ctagaatctcctgagtgaat

SEQ ID NO: 352148 - DNA, 20 bp, Artificial Sequence
  Description of Artificial Sequence: Synthetic oligonucleotide
  Target: LAMA2; (+) strand; PAM type: YTN; PAM sequence: CTA
gaatctcctgagtgaatata

SEQ ID NO: 352149 - DNA, 20 bp, Artificial Sequence
  Description of Artificial Sequence: Synthetic oligonucleotide
  Target: LAMA2; (+) strand; PAM type: YTN; PAM sequence: CTC
ctgagtgaatatacaataaa

SEQ ID NO: 352150 - DNA, 20 bp, Artificial Sequence
  Description of Artificial Sequence: Synthetic oligonucleotide
  Target: LAMA2; (+) strand; PAM type: YTN; PAM sequence: CTG
agtgaatatacaataaaggg

SEQ ID NO: 352151 - DNA, 20 bp, Artificial Sequence
  Description of Artificial Sequence: Synthetic oligonucleotide
  Target: LAMA2; (+) strand; PAM type: YTN; PAM sequence: TTA
aggctgggaagggtattgtt

SEQ ID NO: 352152 - DNA, 20 bp, Artificial Sequence
  Description of Artificial Sequence: Synthetic oligonucleotide
  Target: LAMA2; (+) strand; PAM type: YTN; PAM sequence: CTG
ggaagggtattgttatgcaa

SEQ ID NO: 352153 - DNA, 20 bp, Artificial Sequence
  Description of Artificial Sequence: Synthetic oligonucleotide
  Target: LAMA2; (+) strand; PAM type: YTN; PAM sequence: TTG
ttatgcaaattttgtgaatt

SEQ ID NO: 352154 - DNA, 20 bp, Artificial Sequence
  Description of Artificial Sequence: Synthetic oligonucleotide
  Target: LAMA2; (+) strand; PAM type: YTN; PAM sequence: TTA
tgcaaattttgtgaattgca

SEQ ID NO: 352155 - DNA, 20 bp, Artificial Sequence
  Description of Artificial Sequence: Synthetic oligonucleotide
  Target: LAMA2; (+) strand; PAM type: YTN; PAM sequence: TTT
tgtgaattgcagtttaacag

SEQ ID NO: 352156 - DNA, 20 bp, Artificial Sequence
  Description of Artificial Sequence: Synthetic oligonucleotide
  Target: LAMA2; (+) strand; PAM type: YTN; PAM sequence: TTT
gtgaattgcagtttaacagc

SEQ ID NO: 352157 - DNA, 20 bp, Artificial Sequence
  Description of Artificial Sequence: Synthetic oligonucleotide
  Target: LAMA2; (+) strand; PAM type: YTN; PAM sequence: TTG
tgaattgcagtttaacagct

SEQ ID NO: 352158 - DNA, 20 bp, Artificial Sequence
  Description of Artificial Sequence: Synthetic oligonucleotide
  Target: LAMA2; (+) strand; PAM type: YTN; PAM sequence: TTG
cagtttaacagctaaagaat

SEQ ID NO: 352159 - DNA, 20 bp, Artificial Sequence
  Description of Artificial Sequence: Synthetic oligonucleotide
  Target: LAMA2; (+) strand; PAM type: YTN; PAM sequence: TTT
aacagctaaagaatttatct

SEQ ID NO: 352160 - DNA, 20 bp, Artificial Sequence
  Description of Artificial Sequence: Synthetic oligonucleotide
  Target: LAMA2; (+) strand; PAM type: YTN; PAM sequence: TTA
acagctaaagaatttatctc

SEQ ID NO: 352161 - DNA, 20 bp, Artificial Sequence
  Description of Artificial Sequence: Synthetic oligonucleotide
  Target: LAMA2; (+) strand; PAM type: YTN; PAM sequence: CTA
aagaatttatctctatgatg

SEQ ID NO: 352162 - DNA, 20 bp, Artificial Sequence
  Description of Artificial Sequence: Synthetic oligonucleotide
  Target: LAMA2; (+) strand; PAM type: YTN; PAM sequence: TTT
atctctatgatgttcataaa

SEQ ID NO: 352163 - DNA, 20 bp, Artificial Sequence
  Description of Artificial Sequence: Synthetic oligonucleotide
  Target: LAMA2; (+) strand; PAM type: YTN; PAM sequence: TTA
tctctatgatgttcataaaa

SEQ ID NO: 352164 - DNA, 20 bp, Artificial Sequence
  Description of Artificial Sequence: Synthetic oligonucleotide
  Target: LAMA2; (+) strand; PAM type: YTN; PAM sequence: CTC
tatgatgttcataaaattat

SEQ ID NO: 352165 - DNA, 20 bp, Artificial Sequence
  Description of Artificial Sequence: Synthetic oligonucleotide
  Target: LAMA2; (+) strand; PAM type: YTN; PAM sequence: CTA
tgatgttcataaaattattg

SEQ ID NO: 352166 - DNA, 20 bp, Artificial Sequence
  Description of Artificial Sequence: Synthetic oligonucleotide
  Target: LAMA2; (+) strand; PAM type: YTN; PAM sequence: TTC
ataaaattattgtcttaaaa

SEQ ID NO: 352167 - DNA, 20 bp, Artificial Sequence
  Description of Artificial Sequence: Synthetic oligonucleotide
  Target: LAMA2; (+) strand; PAM type: YTN; PAM sequence: TTA
ttgtcttaaaatttgatttt

SEQ ID NO: 352168 - DNA, 20 bp, Artificial Sequence
  Description of Artificial Sequence: Synthetic oligonucleotide
  Target: LAMA2; (+) strand; PAM type: YTN; PAM sequence: TTG
tcttaaaatttgattttaga

SEQ ID NO: 352169 - DNA, 20 bp, Artificial Sequence
  Description of Artificial Sequence: Synthetic oligonucleotide
  Target: LAMA2; (+) strand; PAM type: YTN; PAM sequence: CTT
aaaatttgattttagatttt

SEQ ID NO: 352170 - DNA, 20 bp, Artificial Sequence
  Description of Artificial Sequence: Synthetic oligonucleotide
  Target: LAMA2; (+) strand; PAM type: YTN; PAM sequence: TTA
aaatttgattttagattttt

SEQ ID NO: 352171 - DNA, 20 bp, Artificial Sequence
  Description of Artificial Sequence: Synthetic oligonucleotide
  Target: LAMA2; (+) strand; PAM type: YTN; PAM sequence: TTT
gattttagatttttccactt

SEQ ID NO: 352172 - DNA, 20 bp, Artificial Sequence
  Description of Artificial Sequence: Synthetic oligonucleotide
  Target: LAMA2; (+) strand; PAM type: YTN; PAM sequence: TTG
attttagatttttccactta

SEQ ID NO: 352173 - DNA, 20 bp, Artificial Sequence
  Description of Artificial Sequence: Synthetic oligonucleotide
  Target: LAMA2; (+) strand; PAM type: YTN; PAM sequence: TTT
tagatttttccacttaatga

SEQ ID NO: 352174 - DNA, 20 bp, Artificial Sequence
  Description of Artificial Sequence: Synthetic oligonucleotide
  Target: LAMA2; (+) strand; PAM type: YTN; PAM sequence: TTT
agatttttccacttaatgac

SEQ ID NO: 352175 - DNA, 20 bp, Artificial Sequence
  Description of Artificial Sequence: Synthetic oligonucleotide
  Target: LAMA2; (+) strand; PAM type: YTN; PAM sequence: TTA
gatttttccacttaatgaca

SEQ ID NO: 352176 - DNA, 20 bp, Artificial Sequence
  Description of Artificial Sequence: Synthetic oligonucleotide
  Target: LAMA2; (+) strand; PAM type: YTN; PAM sequence: TTT
ttccacttaatgacatttaa

SEQ ID NO: 352177 - DNA, 20 bp, Artificial Sequence
  Description of Artificial Sequence: Synthetic oligonucleotide
  Target: LAMA2; (+) strand; PAM type: YTN; PAM sequence: TTT
tccacttaatgacatttaat

SEQ ID NO: 352178 - DNA, 20 bp, Artificial Sequence
  Description of Artificial Sequence: Synthetic oligonucleotide
  Target: LAMA2; (+) strand; PAM type: YTN; PAM sequence: TTT
ccacttaatgacatttaatt

SEQ ID NO: 352179 - DNA, 20 bp, Artificial Sequence
  Description of Artificial Sequence: Synthetic oligonucleotide
  Target: LAMA2; (+) strand; PAM type: YTN; PAM sequence: TTC
cacttaatgacatttaattt

SEQ ID NO: 352180 - DNA, 20 bp, Artificial Sequence
  Description of Artificial Sequence: Synthetic oligonucleotide
  Target: LAMA2; (+) strand; PAM type: YTN; PAM sequence: CTT
aatgacatttaatttatatg

SEQ ID NO: 352181 - DNA, 20 bp, Artificial Sequence
  Description of Artificial Sequence: Synthetic oligonucleotide
  Target: LAMA2; (+) strand; PAM type: YTN; PAM sequence: TTA
atgacatttaatttatatgt

SEQ ID NO: 352182 - DNA, 20 bp, Artificial Sequence
  Description of Artificial Sequence: Synthetic oligonucleotide
  Target: LAMA2; (+) strand; PAM type: YTN; PAM sequence: TTT
aatttatatgtgtatataaa

SEQ ID NO: 352183 - DNA, 20 bp, Artificial Sequence
  Description of Artificial Sequence: Synthetic oligonucleotide
  Target: LAMA2; (+) strand; PAM type: YTN; PAM sequence: TTA
atttatatgtgtatataaaa

SEQ ID NO: 352184 - DNA, 20 bp, Artificial Sequence
  Description of Artificial Sequence: Synthetic oligonucleotide
  Target: LAMA2; (+) strand; PAM type: YTN; PAM sequence: TTT
atatgtgtatataaaatatg

SEQ ID NO: 352185 - DNA, 20 bp, Artificial Sequence
  Description of Artificial Sequence: Synthetic oligonucleotide
  Target: LAMA2; (+) strand; PAM type: YTN; PAM sequence: TTA
tatgtgtatataaaatatgc

SEQ ID NO: 352186 - DNA, 20 bp, Artificial Sequence
  Description of Artificial Sequence: Synthetic oligonucleotide
  Target: LAMA2; (+) strand; PAM type: YTN; PAM sequence: CTT
acctattctgtgcacagtcc

SEQ ID NO: 352187 - DNA, 20 bp, Artificial Sequence
  Description of Artificial Sequence: Synthetic oligonucleotide
  Target: LAMA2; (+) strand; PAM type: YTN; PAM sequence: TTA
cctattctgtgcacagtccc

SEQ ID NO: 352188 - DNA, 20 bp, Artificial Sequence
  Description of Artificial Sequence: Synthetic oligonucleotide
  Target: LAMA2; (+) strand; PAM type: YTN; PAM sequence: CTA
ttctgtgcacagtcccaact

SEQ ID NO: 352189 - DNA, 20 bp, Artificial Sequence
  Description of Artificial Sequence: Synthetic oligonucleotide
  Target: LAMA2; (+) strand; PAM type: YTN; PAM sequence: TTC
tgtgcacagtcccaacttca

SEQ ID NO: 352190 - DNA, 20 bp, Artificial Sequence
  Description of Artificial Sequence: Synthetic oligonucleotide
  Target: LAMA2; (+) strand; PAM type: YTN; PAM sequence: CTG
tgcacagtcccaacttcata

SEQ ID NO: 352191 - DNA, 20 bp, Artificial Sequence
  Description of Artificial Sequence: Synthetic oligonucleotide
  Target: LAMA2; (+) strand; PAM type: YTN; PAM sequence: CTT
cataatgggggaatgaatga

SEQ ID NO: 352192 - DNA, 20 bp, Artificial Sequence
  Description of Artificial Sequence: Synthetic oligonucleotide
  Target: LAMA2; (+) strand; PAM type: YTN; PAM sequence: TTC
ataatgggggaatgaatgaa

SEQ ID NO: 352193 - DNA, 20 bp, Artificial Sequence
  Description of Artificial Sequence: Synthetic oligonucleotide
  Target: LAMA2; (+) strand; PAM type: YTN; PAM sequence: CTT
aaacaaatgatgattttgaa

SEQ ID NO: 352194 - DNA, 20 bp, Artificial Sequence
  Description of Artificial Sequence: Synthetic oligonucleotide
  Target: LAMA2; (+) strand; PAM type: YTN; PAM sequence: TTA
aacaaatgatgattttgaaa

SEQ ID NO: 352195 - DNA, 20 bp, Artificial Sequence
  Description of Artificial Sequence: Synthetic oligonucleotide
  Target: LAMA2; (+) strand; PAM type: YTN; PAM sequence: TTT
tgaaactgacctgtgaactt

SEQ ID NO: 352196 - DNA, 20 bp, Artificial Sequence
  Description of Artificial Sequence: Synthetic oligonucleotide
  Target: LAMA2; (+) strand; PAM type: YTN; PAM sequence: TTT
gaaactgacctgtgaactta

SEQ ID NO: 352197 - DNA, 20 bp, Artificial Sequence
  Description of Artificial Sequence: Synthetic oligonucleotide
  Target: LAMA2; (+) strand; PAM type: YTN; PAM sequence: TTG
aaactgacctgtgaacttag

SEQ ID NO: 352198 - DNA, 20 bp, Artificial Sequence
  Description of Artificial Sequence: Synthetic oligonucleotide
  Target: LAMA2; (+) strand; PAM type: YTN; PAM sequence: CTG
acctgtgaacttagttaatt

SEQ ID NO: 352199 - DNA, 20 bp, Artificial Sequence
  Description of Artificial Sequence: Synthetic oligonucleotide
  Target: LAMA2; (+) strand; PAM type: YTN; PAM sequence: CTG
tgaacttagttaattgagat

SEQ ID NO: 352200 - DNA, 20 bp, Artificial Sequence
  Description of Artificial Sequence: Synthetic oligonucleotide
  Target: LAMA2; (+) strand; PAM type: YTN; PAM sequence: CTT
agttaattgagattcagtga

SEQ ID NO: 352201 - DNA, 20 bp, Artificial Sequence
  Description of Artificial Sequence: Synthetic oligonucleotide
  Target: LAMA2; (+) strand; PAM type: YTN; PAM sequence: TTA
gttaattgagattcagtgag

SEQ ID NO: 352202 - DNA, 20 bp, Artificial Sequence
  Description of Artificial Sequence: Synthetic oligonucleotide
  Target: LAMA2; (+) strand; PAM type: YTN; PAM sequence: TTA
attgagattcagtgaggtat

SEQ ID NO: 352203 - DNA, 20 bp, Artificial Sequence
  Description of Artificial Sequence: Synthetic oligonucleotide
  Target: LAMA2; (+) strand; PAM type: YTN; PAM sequence: TTG
agattcagtgaggtatataa

SEQ ID NO: 352204 - DNA, 20 bp, Artificial Sequence
  Description of Artificial Sequence: Synthetic oligonucleotide
  Target: LAMA2; (+) strand; PAM type: YTN; PAM sequence: TTC
agtgaggtatataaataagt

SEQ ID NO: 352205 - DNA, 20 bp, Artificial Sequence
  Description of Artificial Sequence: Synthetic oligonucleotide
  Target: LAMA2; (+) strand; PAM type: YTN; PAM sequence: CTA
attttaacactctgatttat

SEQ ID NO: 352206 - DNA, 20 bp, Artificial Sequence
  Description of Artificial Sequence: Synthetic oligonucleotide
  Target: LAMA2; (+) strand; PAM type: YTN; PAM sequence: TTT
taacactctgatttatagta

SEQ ID NO: 352207 - DNA, 20 bp, Artificial Sequence
  Description of Artificial Sequence: Synthetic oligonucleotide
  Target: LAMA2; (+) strand; PAM type: YTN; PAM sequence: TTT
aacactctgatttatagtag

SEQ ID NO: 352208 - DNA, 20 bp, Artificial Sequence
  Description of Artificial Sequence: Synthetic oligonucleotide
  Target: LAMA2; (+) strand; PAM type: YTN; PAM sequence: TTA
acactctgatttatagtagc

SEQ ID NO: 352209 - DNA, 20 bp, Artificial Sequence
  Description of Artificial Sequence: Synthetic oligonucleotide
  Target: LAMA2; (+) strand; PAM type: YTN; PAM sequence: CTC
tgatttatagtagcaaacaa

SEQ ID NO: 352210 - DNA, 20 bp, Artificial Sequence
  Description of Artificial Sequence: Synthetic oligonucleotide
  Target: LAMA2; (+) strand; PAM type: YTN; PAM sequence: CTG
atttatagtagcaaacaagt

SEQ ID NO: 352211 - DNA, 20 bp, Artificial Sequence
  Description of Artificial Sequence: Synthetic oligonucleotide
  Target: LAMA2; (+) strand; PAM type: YTN; PAM sequence: TTT
atagtagcaaacaagttttc

SEQ ID NO: 352212 - DNA, 20 bp, Artificial Sequence
  Description of Artificial Sequence: Synthetic oligonucleotide
  Target: LAMA2; (+) strand; PAM type: YTN; PAM sequence: TTA
tagtagcaaacaagttttca

SEQ ID NO: 352213 - DNA, 20 bp, Artificial Sequence
  Description of Artificial Sequence: Synthetic oligonucleotide
  Target: LAMA2; (+) strand; PAM type: YTN; PAM sequence: TTT
tcatttgtaaattaagccta

SEQ ID NO: 352214 - DNA, 20 bp, Artificial Sequence
  Description of Artificial Sequence: Synthetic oligonucleotide
  Target: LAMA2; (+) strand; PAM type: YTN; PAM sequence: TTT
catttgtaaattaagcctag

SEQ ID NO: 352215 - DNA, 20 bp, Artificial Sequence
  Description of Artificial Sequence: Synthetic oligonucleotide
  Target: LAMA2; (+) strand; PAM type: YTN; PAM sequence: TTC
atttgtaaattaagcctaga

SEQ ID NO: 352216 - DNA, 20 bp, Artificial Sequence
  Description of Artificial Sequence: Synthetic oligonucleotide
  Target: LAMA2; (+) strand; PAM type: YTN; PAM sequence: TTT
gtaaattaagcctagatata

SEQ ID NO: 352217 - DNA, 20 bp, Artificial Sequence
  Description of Artificial Sequence: Synthetic oligonucleotide
  Target: LAMA2; (+) strand; PAM type: YTN; PAM sequence: TTG
taaattaagcctagatatat

SEQ ID NO: 352218 - DNA, 20 bp, Artificial Sequence
  Description of Artificial Sequence: Synthetic oligonucleotide
  Target: LAMA2; (+) strand; PAM type: YTN; PAM sequence: TTA
agcctagatatatatacata

SEQ ID NO: 352219 - DNA, 20 bp, Artificial Sequence
  Description of Artificial Sequence: Synthetic oligonucleotide
  Target: LAMA2; (+) strand; PAM type: YTN; PAM sequence: CTA
gatatatatacatatgaact

SEQ ID NO: 352220 - DNA, 20 bp, Artificial Sequence
  Description of Artificial Sequence: Synthetic oligonucleotide
  Target: LAMA2; (+) strand; PAM type: YTN; PAM sequence: CTA
tattgaataggtgggcattt

SEQ ID NO: 352221 - DNA, 20 bp, Artificial Sequence
  Description of Artificial Sequence: Synthetic oligonucleotide
  Target: LAMA2; (+) strand; PAM type: YTN; PAM sequence: TTG
aataggtgggcatttcttgg

SEQ ID NO: 352222 - DNA, 20 bp, Artificial Sequence
  Description of Artificial Sequence: Synthetic oligonucleotide
  Target: LAMA2; (+) strand; PAM type: YTN; PAM sequence: TTT
cttgggcaaataatttagtt

SEQ ID NO: 352223 - DNA, 20 bp, Artificial Sequence
  Description of Artificial Sequence: Synthetic oligonucleotide
  Target: LAMA2; (+) strand; PAM type: YTN; PAM sequence: TTC
ttgggcaaataatttagttt

SEQ ID NO: 352224 - DNA, 20 bp, Artificial Sequence
  Description of Artificial Sequence: Synthetic oligonucleotide
  Target: LAMA2; (+) strand; PAM type: YTN; PAM sequence: CTT
gggcaaataatttagttttt

SEQ ID NO: 352225 - DNA, 20 bp, Artificial Sequence
  Description of Artificial Sequence: Synthetic oligonucleotide
  Target: LAMA2; (+) strand; PAM type: YTN; PAM sequence: TTG
ggcaaataatttagtttttt

SEQ ID NO: 352226 - DNA, 20 bp, Artificial Sequence
  Description of Artificial Sequence: Synthetic oligonucleotide
  Target: LAMA2; (+) strand; PAM type: YTN; PAM sequence: TTT
agttttttttttttttccta

SEQ ID NO: 352227 - DNA, 20 bp, Artificial Sequence
  Description of Artificial Sequence: Synthetic oligonucleotide
  Target: LAMA2; (+) strand; PAM type: YTN; PAM sequence: TTA
gttttttttttttttcctat

SEQ ID NO: 352228 - DNA, 20 bp, Artificial Sequence
  Description of Artificial Sequence: Synthetic oligonucleotide
  Target: LAMA2; (+) strand; PAM type: YTN; PAM sequence: TTT
tttttttttttcctattaca

SEQ ID NO: 352229 - DNA, 20 bp, Artificial Sequence
  Description of Artificial Sequence: Synthetic oligonucleotide
  Target: LAMA2; (+) strand; PAM type: YTN; PAM sequence: TTT
ttttttttttcctattacat

SEQ ID NO: 352230 - DNA, 20 bp, Artificial Sequence
  Description of Artificial Sequence: Synthetic oligonucleotide
  Target: LAMA2; (+) strand; PAM type: YTN; PAM sequence: TTT
tttttttttcctattacatc

SEQ ID NO: 352231 - DNA, 20 bp, Artificial Sequence
  Description of Artificial Sequence: Synthetic oligonucleotide
  Target: LAMA2; (+) strand; PAM type: YTN; PAM sequence: TTT
ttttttttcctattacatct

SEQ ID NO: 352232 - DNA, 20 bp, Artificial Sequence
  Description of Artificial Sequence: Synthetic oligonucleotide
  Target: LAMA2; (+) strand; PAM type: YTN; PAM sequence: TTT
tttttttcctattacatctg

SEQ ID NO: 352233 - DNA, 20 bp, Artificial Sequence
  Description of Artificial Sequence: Synthetic oligonucleotide
  Target: LAMA2; (+) strand; PAM type: YTN; PAM sequence: TTT
ttttttcctattacatctgg

SEQ ID NO: 352234 - DNA, 20 bp, Artificial Sequence
  Description of Artificial Sequence: Synthetic oligonucleotide
  Target: LAMA2; (+) strand; PAM type: YTN; PAM sequence: TTT
tttttcctattacatctgga

SEQ ID NO: 352235 - DNA, 20 bp, Artificial Sequence
  Description of Artificial Sequence: Synthetic oligonucleotide
  Target: LAMA2; (+) strand; PAM type: YTN; PAM sequence: TTT
ttttcctattacatctggaa

SEQ ID NO: 352236 - DNA, 20 bp, Artificial Sequence
  Description of Artificial Sequence: Synthetic oligonucleotide
  Target: LAMA2; (+) strand; PAM type: YTN; PAM sequence: TTT
tttcctattacatctggaaa

SEQ ID NO: 352237 - DNA, 20 bp, Artificial Sequence
  Description of Artificial Sequence: Synthetic oligonucleotide
  Target: LAMA2; (+) strand; PAM type: YTN; PAM sequence: TTT
ttcctattacatctggaaaa

SEQ ID NO: 352238 - DNA, 20 bp, Artificial Sequence
  Description of Artificial Sequence: Synthetic oligonucleotide
  Target: LAMA2; (+) strand; PAM type: YTN; PAM sequence: TTT
tcctattacatctggaaaat

SEQ ID NO: 352239 - DNA, 20 bp, Artificial Sequence
  Description of Artificial Sequence: Synthetic oligonucleotide
  Target: LAMA2; (+) strand; PAM type: YTN; PAM sequence: TTT
cctattacatctggaaaata

SEQ ID NO: 352240 - DNA, 20 bp, Artificial Sequence
  Description of Artificial Sequence: Synthetic oligonucleotide
  Target: LAMA2; (+) strand; PAM type: YTN; PAM sequence: TTC
ctattacatctggaaaataa

SEQ ID NO: 352241 - DNA, 20 bp, Artificial Sequence
  Description of Artificial Sequence: Synthetic oligonucleotide
  Target: LAMA2; (+) strand; PAM type: YTN; PAM sequence: CTA
ttacatctggaaaataaatc

SEQ ID NO: 352242 - DNA, 20 bp, Artificial Sequence
  Description of Artificial Sequence: Synthetic oligonucleotide
  Target: LAMA2; (+) strand; PAM type: YTN; PAM sequence: TTA
catctggaaaataaatcttg

SEQ ID NO: 352243 - DNA, 20 bp, Artificial Sequence
  Description of Artificial Sequence: Synthetic oligonucleotide
  Target: LAMA2; (+) strand; PAM type: YTN; PAM sequence: CTG
gaaaataaatcttgtatata

SEQ ID NO: 352244 - DNA, 20 bp, Artificial Sequence
  Description of Artificial Sequence: Synthetic oligonucleotide
  Target: LAMA2; (+) strand; PAM type: YTN; PAM sequence: CTT
gtatatacagtatatgaaca

SEQ ID NO: 352245 - DNA, 20 bp, Artificial Sequence
  Description of Artificial Sequence: Synthetic oligonucleotide
  Target: LAMA2; (+) strand; PAM type: YTN; PAM sequence: TTG
tatatacagtatatgaacac

SEQ ID NO: 352246 - DNA, 20 bp, Artificial Sequence
  Description of Artificial Sequence: Synthetic oligonucleotide
  Target: LAMA2; (+) strand; PAM type: YTN; PAM sequence: TTT
tgtttaagtaaactagcttt

SEQ ID NO: 352247 - DNA, 20 bp, Artificial Sequence
  Description of Artificial Sequence: Synthetic oligonucleotide
  Target: LAMA2; (+) strand; PAM type: YTN; PAM sequence: TTT
gtttaagtaaactagctttg

SEQ ID NO: 352248 - DNA, 20 bp, Artificial Sequence
  Description of Artificial Sequence: Synthetic oligonucleotide
  Target: LAMA2; (+) strand; PAM type: YTN; PAM sequence: TTG
tttaagtaaactagctttgt

SEQ ID NO: 352249 - DNA, 20 bp, Artificial Sequence
  Description of Artificial Sequence: Synthetic oligonucleotide
  Target: LAMA2; (+) strand; PAM type: YTN; PAM sequence: TTT
aagtaaactagctttgttga

SEQ ID NO: 352250 - DNA, 20 bp, Artificial Sequence
  Description of Artificial Sequence: Synthetic oligonucleotide
  Target: LAMA2; (+) strand; PAM type: YTN; PAM sequence: TTA
agtaaactagctttgttgat

SEQ ID NO: 352251 - DNA, 20 bp, Artificial Sequence
  Description of Artificial Sequence: Synthetic oligonucleotide
  Target: LAMA2; (+) strand; PAM type: YTN; PAM sequence: CTA
gctttgttgatatactatgt

SEQ ID NO: 352252 - DNA, 20 bp, Artificial Sequence
  Description of Artificial Sequence: Synthetic oligonucleotide
  Target: LAMA2; (+) strand; PAM type: YTN; PAM sequence: CTT
tgttgatatactatgtatac

SEQ ID NO: 352253 - DNA, 20 bp, Artificial Sequence
  Description of Artificial Sequence: Synthetic oligonucleotide
  Target: LAMA2; (+) strand; PAM type: YTN; PAM sequence: TTT
gttgatatactatgtataca

SEQ ID NO: 352254 - DNA, 20 bp, Artificial Sequence
  Description of Artificial Sequence: Synthetic oligonucleotide
  Target: LAMA2; (+) strand; PAM type: YTN; PAM sequence: TTG
ttgatatactatgtatacaa

SEQ ID NO: 352255 - DNA, 20 bp, Artificial Sequence
  Description of Artificial Sequence: Synthetic oligonucleotide
  Target: LAMA2; (+) strand; PAM type: YTN; PAM sequence: TTG
atatactatgtatacaagat

SEQ ID NO: 352256 - DNA, 20 bp, Artificial Sequence
  Description of Artificial Sequence: Synthetic oligonucleotide
  Target: LAMA2; (+) strand; PAM type: YTN; PAM sequence: CTA
tgtatacaagataaaaagga

SEQ ID NO: 352257 - DNA, 20 bp, Artificial Sequence
  Description of Artificial Sequence: Synthetic oligonucleotide
  Target: LAMA2; (+) strand; PAM type: YTN; PAM sequence: TTG
aatctaagtaacaaatatat

SEQ ID NO: 352258 - DNA, 20 bp, Artificial Sequence
  Description of Artificial Sequence: Synthetic oligonucleotide
  Target: LAMA2; (+) strand; PAM type: YTN; PAM sequence: CTA
agtaacaaatatataggaat

SEQ ID NO: 352259 - DNA, 20 bp, Artificial Sequence
  Description of Artificial Sequence: Synthetic oligonucleotide
  Target: LAMA2; (+) strand; PAM type: YTN; PAM sequence: TTT
attattctattatctttact

SEQ ID NO: 352260 - DNA, 20 bp, Artificial Sequence
  Description of Artificial Sequence: Synthetic oligonucleotide
  Target: LAMA2; (+) strand; PAM type: YTN; PAM sequence: TTA
ttattctattatctttactt

SEQ ID NO: 352261 - DNA, 20 bp, Artificial Sequence
  Description of Artificial Sequence: Synthetic oligonucleotide
  Target: LAMA2; (+) strand; PAM type: YTN; PAM sequence: TTA
ttctattatctttacttttg

SEQ ID NO: 352262 - DNA, 20 bp, Artificial Sequence
  Description of Artificial Sequence: Synthetic oligonucleotide
  Target: LAMA2; (+) strand; PAM type: YTN; PAM sequence: TTC
tattatctttacttttgtgt

SEQ ID NO: 352263 - DNA, 20 bp, Artificial Sequence
  Description of Artificial Sequence: Synthetic oligonucleotide
  Target: LAMA2; (+) strand; PAM type: YTN; PAM sequence: CTA
ttatctttacttttgtgtaa

SEQ ID NO: 352264 - DNA, 20 bp, Artificial Sequence
  Description of Artificial Sequence: Synthetic oligonucleotide
  Target: LAMA2; (+) strand; PAM type: YTN; PAM sequence: TTA
tctttacttttgtgtaagca

SEQ ID NO: 352265 - DNA, 20 bp, Artificial Sequence
  Description of Artificial Sequence: Synthetic oligonucleotide
  Target: LAMA2; (+) strand; PAM type: YTN; PAM sequence: CTT
tacttttgtgtaagcatgta

SEQ ID NO: 352266 - DNA, 20 bp, Artificial Sequence
  Description of Artificial Sequence: Synthetic oligonucleotide
  Target: LAMA2; (+) strand; PAM type: YTN; PAM sequence: TTT
acttttgtgtaagcatgtaa

SEQ ID NO: 352267 - DNA, 20 bp, Artificial Sequence
  Description of Artificial Sequence: Synthetic oligonucleotide
  Target: LAMA2; (+) strand; PAM type: YTN; PAM sequence: TTA
cttttgtgtaagcatgtaaa

SEQ ID NO: 352268 - DNA, 20 bp, Artificial Sequence
  Description of Artificial Sequence: Synthetic oligonucleotide
  Target: LAMA2; (+) strand; PAM type: YTN; PAM sequence: CTT
ttgtgtaagcatgtaaaaga

SEQ ID NO: 352269 - DNA, 20 bp, Artificial Sequence
  Description of Artificial Sequence: Synthetic oligonucleotide
  Target: LAMA2; (+) strand; PAM type: YTN; PAM sequence: TTT
tgtgtaagcatgtaaaagaa

SEQ ID NO: 352270 - DNA, 20 bp, Artificial Sequence
  Description of Artificial Sequence: Synthetic oligonucleotide
  Target: LAMA2; (+) strand; PAM type: YTN; PAM sequence: TTT
gtgtaagcatgtaaaagaac

SEQ ID NO: 352271 - DNA, 20 bp, Artificial Sequence
  Description of Artificial Sequence: Synthetic oligonucleotide
  Target: LAMA2; (+) strand; PAM type: YTN; PAM sequence: TTG
tgtaagcatgtaaaagaact

SEQ ID NO: 352272 - DNA, 20 bp, Artificial Sequence
  Description of Artificial Sequence: Synthetic oligonucleotide
  Target: LAMA2; (+) strand; PAM type: YTN; PAM sequence: CTG
gattttagaaattataaaca

SEQ ID NO: 352273 - DNA, 20 bp, Artificial Sequence
  Description of Artificial Sequence: Synthetic oligonucleotide
  Target: LAMA2; (+) strand; PAM type: YTN; PAM sequence: TTT
tagaaattataaacatgtat

SEQ ID NO: 352274 - DNA, 20 bp, Artificial Sequence
  Description of Artificial Sequence: Synthetic oligonucleotide
  Target: LAMA2; (+) strand; PAM type: YTN; PAM sequence: TTT
agaaattataaacatgtatt

SEQ ID NO: 352275 - DNA, 20 bp, Artificial Sequence
  Description of Artificial Sequence: Synthetic oligonucleotide
  Target: LAMA2; (+) strand; PAM type: YTN; PAM sequence: TTA
gaaattataaacatgtatta

SEQ ID NO: 352276 - DNA, 20 bp, Artificial Sequence
  Description of Artificial Sequence: Synthetic oligonucleotide
  Target: LAMA2; (+) strand; PAM type: YTN; PAM sequence: TTA
taaacatgtattaaaggtaa

SEQ ID NO: 352277 - DNA, 20 bp, Artificial Sequence
  Description of Artificial Sequence: Synthetic oligonucleotide
  Target: LAMA2; (+) strand; PAM type: YTN; PAM sequence: TTA
aaggtaattcttatagtttt

SEQ ID NO: 352278 - DNA, 20 bp, Artificial Sequence
  Description of Artificial Sequence: Synthetic oligonucleotide
  Target: LAMA2; (+) strand; PAM type: YTN; PAM sequence: TTC
ttatagttttctcaataatt

SEQ ID NO: 352279 - DNA, 20 bp, Artificial Sequence
  Description of Artificial Sequence: Synthetic oligonucleotide
  Target: LAMA2; (+) strand; PAM type: YTN; PAM sequence: CTT
atagttttctcaataatttg

SEQ ID NO: 352280 - DNA, 20 bp, Artificial Sequence
  Description of Artificial Sequence: Synthetic oligonucleotide
  Target: LAMA2; (+) strand; PAM type: YTN; PAM sequence: TTA
tagttttctcaataatttgc

SEQ ID NO: 352281 - DNA, 20 bp, Artificial Sequence
  Description of Artificial Sequence: Synthetic oligonucleotide
  Target: LAMA2; (+) strand; PAM type: YTN; PAM sequence: TTT
tctcaataatttgctgctct

SEQ ID NO: 352282 - DNA, 20 bp, Artificial Sequence
  Description of Artificial Sequence: Synthetic oligonucleotide
  Target: LAMA2; (+) strand; PAM type: YTN; PAM sequence: TTT
ctcaataatttgctgctctg

SEQ ID NO: 352283 - DNA, 20 bp, Artificial Sequence
  Description of Artificial Sequence: Synthetic oligonucleotide
  Target: LAMA2; (+) strand; PAM type: YTN; PAM sequence: TTC
tcaataatttgctgctctgt

SEQ ID NO: 352284 - DNA, 20 bp, Artificial Sequence
  Description of Artificial Sequence: Synthetic oligonucleotide
  Target: LAMA2; (+) strand; PAM type: YTN; PAM sequence: CTC
aataatttgctgctctgtat

SEQ ID NO: 352285 - DNA, 20 bp, Artificial Sequence
  Description of Artificial Sequence: Synthetic oligonucleotide
  Target: LAMA2; (+) strand; PAM type: YTN; PAM sequence: TTT
gctgctctgtattattaaaa

SEQ ID NO: 352286 - DNA, 20 bp, Artificial Sequence
  Description of Artificial Sequence: Synthetic oligonucleotide
  Target: LAMA2; (+) strand; PAM type: YTN; PAM sequence: TTG
ctgctctgtattattaaaac

SEQ ID NO: 352287 - DNA, 20 bp, Artificial Sequence
  Description of Artificial Sequence: Synthetic oligonucleotide
  Target: LAMA2; (+) strand; PAM type: YTN; PAM sequence: CTG
ctctgtattattaaaactac

SEQ ID NO: 352288 - DNA, 20 bp, Artificial Sequence
  Description of Artificial Sequence: Synthetic oligonucleotide
  Target: LAMA2; (+) strand; PAM type: YTN; PAM sequence: CTC
tgtattattaaaactacttt

SEQ ID NO: 352289 - DNA, 20 bp, Artificial Sequence
  Description of Artificial Sequence: Synthetic oligonucleotide
  Target: LAMA2; (+) strand; PAM type: YTN; PAM sequence: CTG
tattattaaaactactttgt

SEQ ID NO: 352290 - DNA, 20 bp, Artificial Sequence
  Description of Artificial Sequence: Synthetic oligonucleotide
  Target: LAMA2; (+) strand; PAM type: YTN; PAM sequence: TTA
ttaaaactactttgtctata

SEQ ID NO: 352291 - DNA, 20 bp, Artificial Sequence
  Description of Artificial Sequence: Synthetic oligonucleotide
  Target: LAMA2; (+) strand; PAM type: YTN; PAM sequence: TTA
aaactactttgtctataaaa

SEQ ID NO: 352292 - DNA, 20 bp, Artificial Sequence
  Description of Artificial Sequence: Synthetic oligonucleotide
  Target: LAMA2; (+) strand; PAM type: YTN; PAM sequence: CTA
ctttgtctataaaagtttgc

SEQ ID NO: 352293 - DNA, 20 bp, Artificial Sequence
  Description of Artificial Sequence: Synthetic oligonucleotide
  Target: LAMA2; (+) strand; PAM type: YTN; PAM sequence: CTT
tgtctataaaagtttgctga

SEQ ID NO: 352294 - DNA, 20 bp, Artificial Sequence
  Description of Artificial Sequence: Synthetic oligonucleotide
  Target: LAMA2; (+) strand; PAM type: YTN; PAM sequence: TTT
gtctataaaagtttgctgaa

SEQ ID NO: 352295 - DNA, 20 bp, Artificial Sequence
  Description of Artificial Sequence: Synthetic oligonucleotide
  Target: LAMA2; (+) strand; PAM type: YTN; PAM sequence: TTG
tctataaaagtttgctgaag

SEQ ID NO: 352296 - DNA, 20 bp, Artificial Sequence
  Description of Artificial Sequence: Synthetic oligonucleotide
  Target: LAMA2; (+) strand; PAM type: YTN; PAM sequence: CTA
taaaagtttgctgaagtgaa

SEQ ID NO: 352297 - DNA, 20 bp, Artificial Sequence
  Description of Artificial Sequence: Synthetic oligonucleotide
  Target: LAMA2; (+) strand; PAM type: YTN; PAM sequence: TTT
gctgaagtgaaaaatattgc

SEQ ID NO: 352298 - DNA, 20 bp, Artificial Sequence
  Description of Artificial Sequence: Synthetic oligonucleotide
  Target: LAMA2; (+) strand; PAM type: YTN; PAM sequence: TTG
ctgaagtgaaaaatattgct

SEQ ID NO: 352299 - DNA, 20 bp, Artificial Sequence
  Description of Artificial Sequence: Synthetic oligonucleotide
  Target: LAMA2; (+) strand; PAM type: YTN; PAM sequence: CTG
aagtgaaaaatattgctgtt

SEQ ID NO: 352300 - DNA, 20 bp, Artificial Sequence
  Description of Artificial Sequence: Synthetic oligonucleotide
  Target: LAMA2; (+) strand; PAM type: YTN; PAM sequence: TTG
ctgtttctattacacttcgt

SEQ ID NO: 352301 - DNA, 20 bp, Artificial Sequence
  Description of Artificial Sequence: Synthetic oligonucleotide
  Target: LAMA2; (+) strand; PAM type: YTN; PAM sequence: CTG
tttctattacacttcgttaa

SEQ ID NO: 352302 - DNA, 20 bp, Artificial Sequence
  Description of Artificial Sequence: Synthetic oligonucleotide
  Target: LAMA2; (+) strand; PAM type: YTN; PAM sequence: TTT
ctattacacttcgttaaatt

SEQ ID NO: 352303 - DNA, 20 bp, Artificial Sequence
  Description of Artificial Sequence: Synthetic oligonucleotide
  Target: LAMA2; (+) strand; PAM type: YTN; PAM sequence: TTC
tattacacttcgttaaattc

SEQ ID NO: 352304 - DNA, 20 bp, Artificial Sequence
  Description of Artificial Sequence: Synthetic oligonucleotide
  Target: LAMA2; (+) strand; PAM type: YTN; PAM sequence: CTA
ttacacttcgttaaattcat

SEQ ID NO: 352305 - DNA, 20 bp, Artificial Sequence
  Description of Artificial Sequence: Synthetic oligonucleotide
  Target: LAMA2; (+) strand; PAM type: YTN; PAM sequence: TTA
cacttcgttaaattcatttt

SEQ ID NO: 352306 - DNA, 20 bp, Artificial Sequence
  Description of Artificial Sequence: Synthetic oligonucleotide
  Target: LAMA2; (+) strand; PAM type: YTN; PAM sequence: CTT
cgttaaattcattttaatat

SEQ ID NO: 352307 - DNA, 20 bp, Artificial Sequence
  Description of Artificial Sequence: Synthetic oligonucleotide
  Target: LAMA2; (+) strand; PAM type: YTN; PAM sequence: TTC
gttaaattcattttaatatt

SEQ ID NO: 352308 - DNA, 20 bp, Artificial Sequence
  Description of Artificial Sequence: Synthetic oligonucleotide
  Target: LAMA2; (+) strand; PAM type: YTN; PAM sequence: TTA
aattcattttaatatttttg

SEQ ID NO: 352309 - DNA, 20 bp, Artificial Sequence
  Description of Artificial Sequence: Synthetic oligonucleotide
  Target: LAMA2; (+) strand; PAM type: YTN; PAM sequence: TTC
attttaatatttttgttagg

SEQ ID NO: 352310 - DNA, 20 bp, Artificial Sequence
  Description of Artificial Sequence: Synthetic oligonucleotide
  Target: LAMA2; (+) strand; PAM type: YTN; PAM sequence: TTT
taatatttttgttaggtatc

SEQ ID NO: 352311 - DNA, 20 bp, Artificial Sequence
  Description of Artificial Sequence: Synthetic oligonucleotide
  Target: LAMA2; (+) strand; PAM type: YTN; PAM sequence: TTT
aatatttttgttaggtatct

SEQ ID NO: 352312 - DNA, 20 bp, Artificial Sequence
  Description of Artificial Sequence: Synthetic oligonucleotide
  Target: LAMA2; (+) strand; PAM type: YTN; PAM sequence: TTA
atatttttgttaggtatctc

SEQ ID NO: 352313 - DNA, 20 bp, Artificial Sequence
  Description of Artificial Sequence: Synthetic oligonucleotide
  Target: LAMA2; (+) strand; PAM type: YTN; PAM sequence: TTT
ttgttaggtatctccaaatt

SEQ ID NO: 352314 - DNA, 20 bp, Artificial Sequence
  Description of Artificial Sequence: Synthetic oligonucleotide
  Target: LAMA2; (+) strand; PAM type: YTN; PAM sequence: TTT
tgttaggtatctccaaatta

SEQ ID NO: 352315 - DNA, 20 bp, Artificial Sequence
  Description of Artificial Sequence: Synthetic oligonucleotide
  Target: LAMA2; (+) strand; PAM type: YTN; PAM sequence: TTT
gttaggtatctccaaattat

SEQ ID NO: 352316 - DNA, 20 bp, Artificial Sequence
  Description of Artificial Sequence: Synthetic oligonucleotide
  Target: LAMA2; (+) strand; PAM type: YTN; PAM sequence: TTG
ttaggtatctccaaattatc

SEQ ID NO: 352317 - DNA, 20 bp, Artificial Sequence
  Description of Artificial Sequence: Synthetic oligonucleotide
  Target: LAMA2; (+) strand; PAM type: YTN; PAM sequence: TTA
ggtatctccaaattatccaa

SEQ ID NO: 352318 - DNA, 20 bp, Artificial Sequence
  Description of Artificial Sequence: Synthetic oligonucleotide
  Target: LAMA2; (+) strand; PAM type: YTN; PAM sequence: CTC
caaattatccaaggccatgc

SEQ ID NO: 352319 - DNA, 20 bp, Artificial Sequence
  Description of Artificial Sequence: Synthetic oligonucleotide
  Target: LAMA2; (+) strand; PAM type: YTN; PAM sequence: TTA
tccaaggccatgccagccat

SEQ ID NO: 352320 - DNA, 20 bp, Artificial Sequence
  Description of Artificial Sequence: Synthetic oligonucleotide
  Target: LAMA2; (+) strand; PAM type: YTN; PAM sequence: TTG
cgatccaattggttccttaa

SEQ ID NO: 352321 - DNA, 20 bp, Artificial Sequence
  Description of Artificial Sequence: Synthetic oligonucleotide
  Target: LAMA2; (+) strand; PAM type: YTN; PAM sequence: TTG
gttccttaaatgaagtctgt

SEQ ID NO: 352322 - DNA, 20 bp, Artificial Sequence
  Description of Artificial Sequence: Synthetic oligonucleotide
  Target: LAMA2; (+) strand; PAM type: YTN; PAM sequence: TTC
cttaaatgaagtctgtgtca

SEQ ID NO: 352323 - DNA, 20 bp, Artificial Sequence
  Description of Artificial Sequence: Synthetic oligonucleotide
  Target: LAMA2; (+) strand; PAM type: YTN; PAM sequence: CTT
aaatgaagtctgtgtcaagg

SEQ ID NO: 352324 - DNA, 20 bp, Artificial Sequence
  Description of Artificial Sequence: Synthetic oligonucleotide
  Target: LAMA2; (+) strand; PAM type: YTN; PAM sequence: TTA
aatgaagtctgtgtcaagga

SEQ ID NO: 352325 - DNA, 20 bp, Artificial Sequence
  Description of Artificial Sequence: Synthetic oligonucleotide
  Target: LAMA2; (+) strand; PAM type: YTN; PAM sequence: CTG
tgtcaaggatgagaaacatg

SEQ ID NO: 352326 - DNA, 20 bp, Artificial Sequence
  Description of Artificial Sequence: Synthetic oligonucleotide
  Target: LAMA2; (+) strand; PAM type: YTN; PAM sequence: CTC
gacgaggtgagagctgcagc

SEQ ID NO: 352327 - DNA, 20 bp, Artificial Sequence
  Description of Artificial Sequence: Synthetic oligonucleotide
  Target: LAMA2; (+) strand; PAM type: YTN; PAM sequence: CTG
cagcagaatgtcactgctct

SEQ ID NO: 352328 - DNA, 20 bp, Artificial Sequence
  Description of Artificial Sequence: Synthetic oligonucleotide
  Target: LAMA2; (+) strand; PAM type: YTN; PAM sequence: CTG
ctctgataaaaggacaacta

SEQ ID NO: 352329 - DNA, 20 bp, Artificial Sequence
  Description of Artificial Sequence: Synthetic oligonucleotide
  Target: LAMA2; (+) strand; PAM type: YTN; PAM sequence: CTC
tgataaaaggacaactaaaa

SEQ ID NO: 352330 - DNA, 20 bp, Artificial Sequence
  Description of Artificial Sequence: Synthetic oligonucleotide
  Target: LAMA2; (+) strand; PAM type: YTN; PAM sequence: CTG
ataaaaggacaactaaaagc

SEQ ID NO: 352331 - DNA, 20 bp, Artificial Sequence
  Description of Artificial Sequence: Synthetic oligonucleotide
  Target: LAMA2; (+) strand; PAM type: YTN; PAM sequence: CTA
aaagccaaatatgattattt

SEQ ID NO: 352332 - DNA, 20 bp, Artificial Sequence
  Description of Artificial Sequence: Synthetic oligonucleotide
  Target: LAMA2; (+) strand; PAM type: YTN; PAM sequence: TTA
ttttcagaagaatattttgc

SEQ ID NO: 352333 - DNA, 20 bp, Artificial Sequence
  Description of Artificial Sequence: Synthetic oligonucleotide
  Target: LAMA2; (+) strand; PAM type: YTN; PAM sequence: TTT
tcagaagaatattttgcagt

SEQ ID NO: 352334 - DNA, 20 bp, Artificial Sequence
  Description of Artificial Sequence: Synthetic oligonucleotide
  Target: LAMA2; (+) strand; PAM type: YTN; PAM sequence: TTT
cagaagaatattttgcagta

SEQ ID NO: 352335 - DNA, 20 bp, Artificial Sequence
  Description of Artificial Sequence: Synthetic oligonucleotide
  Target: LAMA2; (+) strand; PAM type: YTN; PAM sequence: TTC
agaagaatattttgcagtaa

SEQ ID NO: 352336 - DNA, 20 bp, Artificial Sequence
  Description of Artificial Sequence: Synthetic oligonucleotide
  Target: LAMA2; (+) strand; PAM type: YTN; PAM sequence: TTT
tgcagtaaatgttattcatg

SEQ ID NO: 352337 - DNA, 20 bp, Artificial Sequence
  Description of Artificial Sequence: Synthetic oligonucleotide
  Target: LAMA2; (+) strand; PAM type: YTN; PAM sequence: TTT
gcagtaaatgttattcatgt

SEQ ID NO: 352338 - DNA, 20 bp, Artificial Sequence
  Description of Artificial Sequence: Synthetic oligonucleotide
  Target: LAMA2; (+) strand; PAM type: YTN; PAM sequence: TTG
cagtaaatgttattcatgta

SEQ ID NO: 352339 - DNA, 20 bp, Artificial Sequence
  Description of Artificial Sequence: Synthetic oligonucleotide
  Target: LAMA2; (+) strand; PAM type: YTN; PAM sequence: TTA
ttcatgtaataaatttattc

SEQ ID NO: 352340 - DNA, 20 bp, Artificial Sequence
  Description of Artificial Sequence: Synthetic oligonucleotide
  Target: LAMA2; (+) strand; PAM type: YTN; PAM sequence: TTC
atgtaataaatttattcttt

SEQ ID NO: 352341 - DNA, 20 bp, Artificial Sequence
  Description of Artificial Sequence: Synthetic oligonucleotide
  Target: LAMA2; (+) strand; PAM type: YTN; PAM sequence: TTT
attctttaatctatcagtgt

SEQ ID NO: 352342 - DNA, 20 bp, Artificial Sequence
  Description of Artificial Sequence: Synthetic oligonucleotide
  Target: LAMA2; (+) strand; PAM type: YTN; PAM sequence: TTA
ttctttaatctatcagtgta

SEQ ID NO: 352343 - DNA, 20 bp, Artificial Sequence
  Description of Artificial Sequence: Synthetic oligonucleotide
  Target: LAMA2; (+) strand; PAM type: YTN; PAM sequence: TTC
tttaatctatcagtgtatta

SEQ ID NO: 352344 - DNA, 20 bp, Artificial Sequence
  Description of Artificial Sequence: Synthetic oligonucleotide
  Target: LAMA2; (+) strand; PAM type: YTN; PAM sequence: CTT
taatctatcagtgtattagc

SEQ ID NO: 352345 - DNA, 20 bp, Artificial Sequence
  Description of Artificial Sequence: Synthetic oligonucleotide
  Target: LAMA2; (+) strand; PAM type: YTN; PAM sequence: TTT
aatctatcagtgtattagcg

SEQ ID NO: 352346 - DNA, 20 bp, Artificial Sequence
  Description of Artificial Sequence: Synthetic oligonucleotide
  Target: LAMA2; (+) strand; PAM type: YTN; PAM sequence: TTA
atctatcagtgtattagcgt

SEQ ID NO: 352347 - DNA, 20 bp, Artificial Sequence
  Description of Artificial Sequence: Synthetic oligonucleotide
  Target: LAMA2; (+) strand; PAM type: YTN; PAM sequence: CTA
tcagtgtattagcgttccct

SEQ ID NO: 352348 - DNA, 20 bp, Artificial Sequence
  Description of Artificial Sequence: Synthetic oligonucleotide
  Target: LAMA2; (+) strand; PAM type: YTN; PAM sequence: TTA
gcgttccctccaggaagtag

SEQ ID NO: 352349 - DNA, 20 bp, Artificial Sequence
  Description of Artificial Sequence: Synthetic oligonucleotide
  Target: LAMA2; (+) strand; PAM type: YTN; PAM sequence: TTC
cctccaggaagtagttttta

SEQ ID NO: 352350 - DNA, 20 bp, Artificial Sequence
  Description of Artificial Sequence: Synthetic oligonucleotide
  Target: LAMA2; (+) strand; PAM type: YTN; PAM sequence: CTC
caggaagtagtttttaaact

SEQ ID NO: 352351 - DNA, 20 bp, Artificial Sequence
  Description of Artificial Sequence: Synthetic oligonucleotide
  Target: LAMA2; (+) strand; PAM type: YTN; PAM sequence: TTT
ttaaactcatctcaataatt

SEQ ID NO: 352352 - DNA, 20 bp, Artificial Sequence
  Description of Artificial Sequence: Synthetic oligonucleotide
  Target: LAMA2; (+) strand; PAM type: YTN; PAM sequence: TTT
taaactcatctcaataatta

SEQ ID NO: 352353 - DNA, 20 bp, Artificial Sequence
  Description of Artificial Sequence: Synthetic oligonucleotide
  Target: LAMA2; (+) strand; PAM type: YTN; PAM sequence: TTT
aaactcatctcaataattac

SEQ ID NO: 352354 - DNA, 20 bp, Artificial Sequence
  Description of Artificial Sequence: Synthetic oligonucleotide
  Target: LAMA2; (+) strand; PAM type: YTN; PAM sequence: TTA
aactcatctcaataattact

SEQ ID NO: 352355 - DNA, 20 bp, Artificial Sequence
  Description of Artificial Sequence: Synthetic oligonucleotide
  Target: LAMA2; (+) strand; PAM type: YTN; PAM sequence: CTC
atctcaataattactttcat

SEQ ID NO: 352356 - DNA, 20 bp, Artificial Sequence
  Description of Artificial Sequence: Synthetic oligonucleotide
  Target: LAMA2; (+) strand; PAM type: YTN; PAM sequence: CTC
aataattactttcatgttta

SEQ ID NO: 352357 - DNA, 20 bp, Artificial Sequence
  Description of Artificial Sequence: Synthetic oligonucleotide
  Target: LAMA2; (+) strand; PAM type: YTN; PAM sequence: TTA
ctttcatgtttaattataat

SEQ ID NO: 352358 - DNA, 20 bp, Artificial Sequence
  Description of Artificial Sequence: Synthetic oligonucleotide
  Target: LAMA2; (+) strand; PAM type: YTN; PAM sequence: CTT
tcatgtttaattataatgtt

SEQ ID NO: 352359 - DNA, 20 bp, Artificial Sequence
  Description of Artificial Sequence: Synthetic oligonucleotide
  Target: LAMA2; (+) strand; PAM type: YTN; PAM sequence: TTT
catgtttaattataatgttt

SEQ ID NO: 352360 - DNA, 20 bp, Artificial Sequence
  Description of Artificial Sequence: Synthetic oligonucleotide
  Target: LAMA2; (+) strand; PAM type: YTN; PAM sequence: TTC
atgtttaattataatgtttt

SEQ ID NO: 352361 - DNA, 20 bp, Artificial Sequence
  Description of Artificial Sequence: Synthetic oligonucleotide
  Target: LAMA2; (+) strand; PAM type: YTN; PAM sequence: TTT
aattataatgttttcatagc

SEQ ID NO: 352362 - DNA, 20 bp, Artificial Sequence
  Description of Artificial Sequence: Synthetic oligonucleotide
  Target: LAMA2; (+) strand; PAM type: YTN; PAM sequence: TTA
attataatgttttcatagca

SEQ ID NO: 352363 - DNA, 20 bp, Artificial Sequence
  Description of Artificial Sequence: Synthetic oligonucleotide
  Target: LAMA2; (+) strand; PAM type: YTN; PAM sequence: TTA
taatgttttcatagcaagaa

SEQ ID NO: 352364 - DNA, 20 bp, Artificial Sequence
  Description of Artificial Sequence: Synthetic oligonucleotide
  Target: LAMA2; (+) strand; PAM type: YTN; PAM sequence: TTT
tcatagcaagaagagttgaa

SEQ ID NO: 352365 - DNA, 20 bp, Artificial Sequence
  Description of Artificial Sequence: Synthetic oligonucleotide
  Target: LAMA2; (+) strand; PAM type: YTN; PAM sequence: TTT
catagcaagaagagttgaat

SEQ ID NO: 352366 - DNA, 20 bp, Artificial Sequence
  Description of Artificial Sequence: Synthetic oligonucleotide
  Target: LAMA2; (+) strand; PAM type: YTN; PAM sequence: TTC
atagcaagaagagttgaatt

SEQ ID NO: 352367 - DNA, 20 bp, Artificial Sequence
  Description of Artificial Sequence: Synthetic oligonucleotide
  Target: LAMA2; (+) strand; PAM type: YTN; PAM sequence: TTG
aattatgtattttgagatac

SEQ ID NO: 352368 - DNA, 20 bp, Artificial Sequence
  Description of Artificial Sequence: Synthetic oligonucleotide
  Target: LAMA2; (+) strand; PAM type: YTN; PAM sequence: TTA
tgtattttgagatacacaca

SEQ ID NO: 352369 - DNA, 20 bp, Artificial Sequence
  Description of Artificial Sequence: Synthetic oligonucleotide
  Target: LAMA2; (+) strand; PAM type: YTN; PAM sequence: TTT
tgagatacacacacacacat

SEQ ID NO: 352370 - DNA, 20 bp, Artificial Sequence
  Description of Artificial Sequence: Synthetic oligonucleotide
  Target: LAMA2; (+) strand; PAM type: YTN; PAM sequence: TTT
gagatacacacacacacata

SEQ ID NO: 352371 - DNA, 20 bp, Artificial Sequence
  Description of Artificial Sequence: Synthetic oligonucleotide
  Target: LAMA2; (+) strand; PAM type: YTN; PAM sequence: TTG
agatacacacacacacatac

SEQ ID NO: 352372 - DNA, 20 bp, Artificial Sequence
  Description of Artificial Sequence: Synthetic oligonucleotide
  Target: LAMA2; (+) strand; PAM type: YTN; PAM sequence: CTG
tggtatatgtaattttttca

SEQ ID NO: 352373 - DNA, 20 bp, Artificial Sequence
  Description of Artificial Sequence: Synthetic oligonucleotide
  Target: LAMA2; (+) strand; PAM type: YTN; PAM sequence: TTT
tttcatatcgtgttatttat

SEQ ID NO: 352374 - DNA, 20 bp, Artificial Sequence
  Description of Artificial Sequence: Synthetic oligonucleotide
  Target: LAMA2; (+) strand; PAM type: YTN; PAM sequence: TTT
ttcatatcgtgttatttatt

SEQ ID NO: 352375 - DNA, 20 bp, Artificial Sequence
  Description of Artificial Sequence: Synthetic oligonucleotide
  Target: LAMA2; (+) strand; PAM type: YTN; PAM sequence: TTT
tcatatcgtgttatttatta

SEQ ID NO: 352376 - DNA, 20 bp, Artificial Sequence
  Description of Artificial Sequence: Synthetic oligonucleotide
  Target: LAMA2; (+) strand; PAM type: YTN; PAM sequence: TTT
catatcgtgttatttattag

SEQ ID NO: 352377 - DNA, 20 bp, Artificial Sequence
  Description of Artificial Sequence: Synthetic oligonucleotide
  Target: LAMA2; (+) strand; PAM type: YTN; PAM sequence: TTC
atatcgtgttatttattaga

SEQ ID NO: 352378 - DNA, 20 bp, Artificial Sequence
  Description of Artificial Sequence: Synthetic oligonucleotide
  Target: LAMA2; (+) strand; PAM type: YTN; PAM sequence: TTA
tttattagattgtttgtagc

SEQ ID NO: 352379 - DNA, 20 bp, Artificial Sequence
  Description of Artificial Sequence: Synthetic oligonucleotide
  Target: LAMA2; (+) strand; PAM type: YTN; PAM sequence: TTT
attagattgtttgtagcttc

SEQ ID NO: 352380 - DNA, 20 bp, Artificial Sequence
  Description of Artificial Sequence: Synthetic oligonucleotide
  Target: LAMA2; (+) strand; PAM type: YTN; PAM sequence: TTA
ttagattgtttgtagcttct

SEQ ID NO: 352381 - DNA, 20 bp, Artificial Sequence
  Description of Artificial Sequence: Synthetic oligonucleotide
  Target: LAMA2; (+) strand; PAM type: YTN; PAM sequence: TTA
gattgtttgtagcttctatg

SEQ ID NO: 352382 - DNA, 20 bp, Artificial Sequence
  Description of Artificial Sequence: Synthetic oligonucleotide
  Target: LAMA2; (+) strand; PAM type: YTN; PAM sequence: TTG
tttgtagcttctatgagttc

SEQ ID NO: 352383 - DNA, 20 bp, Artificial Sequence
  Description of Artificial Sequence: Synthetic oligonucleotide
  Target: LAMA2; (+) strand; PAM type: YTN; PAM sequence: TTT
gtagcttctatgagttctag

SEQ ID NO: 352384 - DNA, 20 bp, Artificial Sequence
  Description of Artificial Sequence: Synthetic oligonucleotide
  Target: LAMA2; (+) strand; PAM type: YTN; PAM sequence: TTG
tagcttctatgagttctagc

SEQ ID NO: 352385 - DNA, 20 bp, Artificial Sequence
  Description of Artificial Sequence: Synthetic oligonucleotide
  Target: LAMA2; (+) strand; PAM type: YTN; PAM sequence: CTT
ctatgagttctagcatgaaa

SEQ ID NO: 352386 - DNA, 20 bp, Artificial Sequence
  Description of Artificial Sequence: Synthetic oligonucleotide
  Target: LAMA2; (+) strand; PAM type: YTN; PAM sequence: TTC
tatgagttctagcatgaaat

SEQ ID NO: 352387 - DNA, 20 bp, Artificial Sequence
  Description of Artificial Sequence: Synthetic oligonucleotide
  Target: LAMA2; (+) strand; PAM type: YTN; PAM sequence: CTA
tgagttctagcatgaaatgc

SEQ ID NO: 352388 - DNA, 20 bp, Artificial Sequence
  Description of Artificial Sequence: Synthetic oligonucleotide
  Target: LAMA2; (+) strand; PAM type: YTN; PAM sequence: TTC
tagcatgaaatgccagcgtt

SEQ ID NO: 352389 - DNA, 20 bp, Artificial Sequence
  Description of Artificial Sequence: Synthetic oligonucleotide
  Target: LAMA2; (+) strand; PAM type: YTN; PAM sequence: CTA
gcatgaaatgccagcgttca

SEQ ID NO: 352390 - DNA, 20 bp, Artificial Sequence
  Description of Artificial Sequence: Synthetic oligonucleotide
  Target: LAMA2; (+) strand; PAM type: YTN; PAM sequence: TTC
actgaggaatgtgtgtgctg

SEQ ID NO: 352391 - DNA, 20 bp, Artificial Sequence
  Description of Artificial Sequence: Synthetic oligonucleotide
  Target: LAMA2; (+) strand; PAM type: YTN; PAM sequence: CTG
aggaatgtgtgtgctgtagt

SEQ ID NO: 352392 - DNA, 20 bp, Artificial Sequence
  Description of Artificial Sequence: Synthetic oligonucleotide
  Target: LAMA2; (+) strand; PAM type: YTN; PAM sequence: CTG
tagtgggaaaagcaaataga

SEQ ID NO: 352393 - DNA, 20 bp, Artificial Sequence
  Description of Artificial Sequence: Synthetic oligonucleotide
  Target: LAMA2; (+) strand; PAM type: YTN; PAM sequence: CTC
acacactgagatgtaggcaa

SEQ ID NO: 352394 - DNA, 20 bp, Artificial Sequence
  Description of Artificial Sequence: Synthetic oligonucleotide
  Target: LAMA2; (+) strand; PAM type: YTN; PAM sequence: CTG
agatgtaggcaataatatag

SEQ ID NO: 352395 - DNA, 20 bp, Artificial Sequence
  Description of Artificial Sequence: Synthetic oligonucleotide
  Target: LAMA2; (+) strand; PAM type: YTN; PAM sequence: TTC
ataaaggactaagaaggtag

SEQ ID NO: 352396 - DNA, 20 bp, Artificial Sequence
  Description of Artificial Sequence: Synthetic oligonucleotide
  Target: LAMA2; (+) strand; PAM type: YTN; PAM sequence: CTA
agaaggtagtagtcatgaat

SEQ ID NO: 352397 - DNA, 20 bp, Artificial Sequence
  Description of Artificial Sequence: Synthetic oligonucleotide
  Target: LAMA2; (+) strand; PAM type: YTN; PAM sequence: TTA
atgaacagaaagaggctgac

SEQ ID NO: 352398 - DNA, 20 bp, Artificial Sequence
  Description of Artificial Sequence: Synthetic oligonucleotide
  Target: LAMA2; (+) strand; PAM type: YTN; PAM sequence: CTG
acactaatttaagctaaagc

SEQ ID NO: 352399 - DNA, 20 bp, Artificial Sequence
  Description of Artificial Sequence: Synthetic oligonucleotide
  Target: LAMA2; (+) strand; PAM type: YTN; PAM sequence: CTA
atttaagctaaagccttcct

SEQ ID NO: 352400 - DNA, 20 bp, Artificial Sequence
  Description of Artificial Sequence: Synthetic oligonucleotide
  Target: LAMA2; (+) strand; PAM type: YTN; PAM sequence: TTT
aagctaaagccttcctttga

SEQ ID NO: 352401 - DNA, 20 bp, Artificial Sequence
  Description of Artificial Sequence: Synthetic oligonucleotide
  Target: LAMA2; (+) strand; PAM type: YTN; PAM sequence: TTA
agctaaagccttcctttgag

SEQ ID NO: 352402 - DNA, 20 bp, Artificial Sequence
  Description of Artificial Sequence: Synthetic oligonucleotide
  Target: LAMA2; (+) strand; PAM type: YTN; PAM sequence: CTA
aagccttcctttgaggaatg

SEQ ID NO: 352403 - DNA, 20 bp, Artificial Sequence
  Description of Artificial Sequence: Synthetic oligonucleotide
  Target: LAMA2; (+) strand; PAM type: YTN; PAM sequence: CTT
cctttgaggaatgaaattca

SEQ ID NO: 352404 - DNA, 20 bp, Artificial Sequence
  Description of Artificial Sequence: Synthetic oligonucleotide
  Target: LAMA2; (+) strand; PAM type: YTN; PAM sequence: TTC
ctttgaggaatgaaattcat

SEQ ID NO: 352405 - DNA, 20 bp, Artificial Sequence
  Description of Artificial Sequence: Synthetic oligonucleotide
  Target: LAMA2; (+) strand; PAM type: YTN; PAM sequence: CTT
tgaggaatgaaattcatgaa

SEQ ID NO: 352406 - DNA, 20 bp, Artificial Sequence
  Description of Artificial Sequence: Synthetic oligonucleotide
  Target: LAMA2; (+) strand; PAM type: YTN; PAM sequence: TTT
gaggaatgaaattcatgaac

SEQ ID NO: 352407 - DNA, 20 bp, Artificial Sequence
  Description of Artificial Sequence: Synthetic oligonucleotide
  Target: LAMA2; (+) strand; PAM type: YTN; PAM sequence: TTG
aggaatgaaattcatgaact

SEQ ID NO: 352408 - DNA, 20 bp, Artificial Sequence
  Description of Artificial Sequence: Synthetic oligonucleotide
  Target: LAMA2; (+) strand; PAM type: YTN; PAM sequence: TTC
atgaactccaaacattaaga

SEQ ID NO: 352409 - DNA, 20 bp, Artificial Sequence
  Description of Artificial Sequence: Synthetic oligonucleotide
  Target: LAMA2; (+) strand; PAM type: YTN; PAM sequence: CTC
caaacattaagaaatcaaat

SEQ ID NO: 352410 - DNA, 20 bp, Artificial Sequence
  Description of Artificial Sequence: Synthetic oligonucleotide
  Target: LAMA2; (+) strand; PAM type: YTN; PAM sequence: TTA
agaaatcaaatgccaacata

SEQ ID NO: 352411 - DNA, 20 bp, Artificial Sequence
  Description of Artificial Sequence: Synthetic oligonucleotide
  Target: LAMA2; (+) strand; PAM type: YTN; PAM sequence: CTC
cttgatataaaagcgtttgg

SEQ ID NO: 352412 - DNA, 20 bp, Artificial Sequence
  Description of Artificial Sequence: Synthetic oligonucleotide
  Target: LAMA2; (+) strand; PAM type: YTN; PAM sequence: CTT
gatataaaagcgtttgggag

SEQ ID NO: 352413 - DNA, 20 bp, Artificial Sequence
  Description of Artificial Sequence: Synthetic oligonucleotide
  Target: LAMA2; (+) strand; PAM type: YTN; PAM sequence: TTG
atataaaagcgtttgggagc

SEQ ID NO: 352414 - DNA, 20 bp, Artificial Sequence
  Description of Artificial Sequence: Synthetic oligonucleotide
  Target: LAMA2; (+) strand; PAM type: YTN; PAM sequence: TTT
gggagctacttccagggcag

SEQ ID NO: 352415 - DNA, 20 bp, Artificial Sequence
  Description of Artificial Sequence: Synthetic oligonucleotide
  Target: LAMA2; (+) strand; PAM type: YTN; PAM sequence: TTG
ggagctacttccagggcagt

SEQ ID NO: 352416 - DNA, 20 bp, Artificial Sequence
  Description of Artificial Sequence: Synthetic oligonucleotide
  Target: LAMA2; (+) strand; PAM type: YTN; PAM sequence: CTA
cttccagggcagttgctcgc

SEQ ID NO: 352417 - DNA, 20 bp, Artificial Sequence
  Description of Artificial Sequence: Synthetic oligonucleotide
  Target: LAMA2; (+) strand; PAM type: YTN; PAM sequence: CTT
ccagggcagttgctcgccaa

SEQ ID NO: 352418 - DNA, 20 bp, Artificial Sequence
  Description of Artificial Sequence: Synthetic oligonucleotide
  Target: LAMA2; (+) strand; PAM type: YTN; PAM sequence: TTC
cagggcagttgctcgccaag

SEQ ID NO: 352419 - DNA, 20 bp, Artificial Sequence
  Description of Artificial Sequence: Synthetic oligonucleotide
  Target: LAMA2; (+) strand; PAM type: YTN; PAM sequence: TTG
ctcgccaagtttaagtagga

SEQ ID NO: 352420 - DNA, 20 bp, Artificial Sequence
  Description of Artificial Sequence: Synthetic oligonucleotide
  Target: LAMA2; (+) strand; PAM type: YTN; PAM sequence: CTC
gccaagtttaagtaggaaat

SEQ ID NO: 352421 - DNA, 20 bp, Artificial Sequence
  Description of Artificial Sequence: Synthetic oligonucleotide
  Target: LAMA2; (+) strand; PAM type: YTN; PAM sequence: TTT
aagtaggaaattcatagaat

SEQ ID NO: 352422 - DNA, 20 bp, Artificial Sequence
  Description of Artificial Sequence: Synthetic oligonucleotide
  Target: LAMA2; (+) strand; PAM type: YTN; PAM sequence: TTA
agtaggaaattcatagaatg

SEQ ID NO: 352423 - DNA, 20 bp, Artificial Sequence
  Description of Artificial Sequence: Synthetic oligonucleotide
  Target: LAMA2; (+) strand; PAM type: YTN; PAM sequence: TTC
atagaatgcactgggacgct

SEQ ID NO: 352424 - DNA, 20 bp, Artificial Sequence
  Description of Artificial Sequence: Synthetic oligonucleotide
  Target: LAMA2; (+) strand; PAM type: YTN; PAM sequence: CTG
ggacgcttcttctctagaaa

SEQ ID NO: 352425 - DNA, 20 bp, Artificial Sequence
  Description of Artificial Sequence: Synthetic oligonucleotide
  Target: LAMA2; (+) strand; PAM type: YTN; PAM sequence: CTT
cttctctagaaagactaaaa

SEQ ID NO: 352426 - DNA, 20 bp, Artificial Sequence
  Description of Artificial Sequence: Synthetic oligonucleotide
  Target: LAMA2; (+) strand; PAM type: YTN; PAM sequence: TTC
ttctctagaaagactaaaat

SEQ ID NO: 352427 - DNA, 20 bp, Artificial Sequence
  Description of Artificial Sequence: Synthetic oligonucleotide
  Target: LAMA2; (+) strand; PAM type: YTN; PAM sequence: CTT
ctctagaaagactaaaatta

SEQ ID NO: 352428 - DNA, 20 bp, Artificial Sequence
  Description of Artificial Sequence: Synthetic oligonucleotide
  Target: LAMA2; (+) strand; PAM type: YTN; PAM sequence: TTC
tctagaaagactaaaattaa

SEQ ID NO: 352429 - DNA, 20 bp, Artificial Sequence
  Description of Artificial Sequence: Synthetic oligonucleotide
  Target: LAMA2; (+) strand; PAM type: YTN; PAM sequence: CTC
tagaaagactaaaattaatc

SEQ ID NO: 352430 - DNA, 20 bp, Artificial Sequence
  Description of Artificial Sequence: Synthetic oligonucleotide
  Target: LAMA2; (+) strand; PAM type: YTN; PAM sequence: CTA
gaaagactaaaattaatcaa

SEQ ID NO: 352431 - DNA, 20 bp, Artificial Sequence
  Description of Artificial Sequence: Synthetic oligonucleotide
  Target: LAMA2; (+) strand; PAM type: YTN; PAM sequence: CTA
aaattaatcaaggctacaat

SEQ ID NO: 352432 - DNA, 20 bp, Artificial Sequence
  Description of Artificial Sequence: Synthetic oligonucleotide
  Target: LAMA2; (+) strand; PAM type: YTN; PAM sequence: TTA
atcaaggctacaatgtagtg

SEQ ID NO: 352433 - DNA, 20 bp, Artificial Sequence
  Description of Artificial Sequence: Synthetic oligonucleotide
  Target: LAMA2; (+) strand; PAM type: YTN; PAM sequence: CTA
caatgtagtgtttttttccc

SEQ ID NO: 352434 - DNA, 20 bp, Artificial Sequence
  Description of Artificial Sequence: Synthetic oligonucleotide
  Target: LAMA2; (+) strand; PAM type: YTN; PAM sequence: TTT
ttttccctaatgactttagc

SEQ ID NO: 352435 - DNA, 20 bp, Artificial Sequence
  Description of Artificial Sequence: Synthetic oligonucleotide
  Target: LAMA2; (+) strand; PAM type: YTN; PAM sequence: TTT
tttccctaatgactttagcg

SEQ ID NO: 352436 - DNA, 20 bp, Artificial Sequence
  Description of Artificial Sequence: Synthetic oligonucleotide
  Target: LAMA2; (+) strand; PAM type: YTN; PAM sequence: TTT
ttccctaatgactttagcgt

SEQ ID NO: 352437 - DNA, 20 bp, Artificial Sequence
  Description of Artificial Sequence: Synthetic oligonucleotide
  Target: LAMA2; (+) strand; PAM type: YTN; PAM sequence: TTT
tccctaatgactttagcgtt

SEQ ID NO: 352438 - DNA, 20 bp, Artificial Sequence
  Description of Artificial Sequence: Synthetic oligonucleotide
  Target: LAMA2; (+) strand; PAM type: YTN; PAM sequence: TTT
ccctaatgactttagcgtta

SEQ ID NO: 352439 - DNA, 20 bp, Artificial Sequence
  Description of Artificial Sequence: Synthetic oligonucleotide
  Target: LAMA2; (+) strand; PAM type: YTN; PAM sequence: TTC
cctaatgactttagcgttaa

SEQ ID NO: 352440 - DNA, 20 bp, Artificial Sequence
  Description of Artificial Sequence: Synthetic oligonucleotide
  Target: LAMA2; (+) strand; PAM type: YTN; PAM sequence: CTA
atgactttagcgttaaaaga

SEQ ID NO: 352441 - DNA, 20 bp, Artificial Sequence
  Description of Artificial Sequence: Synthetic oligonucleotide
  Target: LAMA2; (+) strand; PAM type: YTN; PAM sequence: CTT
tagcgttaaaagaccagcaa

SEQ ID NO: 352442 - DNA, 20 bp, Artificial Sequence
  Description of Artificial Sequence: Synthetic oligonucleotide
  Target: LAMA2; (+) strand; PAM type: YTN; PAM sequence: TTT
agcgttaaaagaccagcaat

SEQ ID NO: 352443 - DNA, 20 bp, Artificial Sequence
  Description of Artificial Sequence: Synthetic oligonucleotide
  Target: LAMA2; (+) strand; PAM type: YTN; PAM sequence: TTA
gcgttaaaagaccagcaatg

SEQ ID NO: 352444 - DNA, 20 bp, Artificial Sequence
  Description of Artificial Sequence: Synthetic oligonucleotide
  Target: LAMA2; (+) strand; PAM type: YTN; PAM sequence: TTA
aaagaccagcaatgtttctt

SEQ ID NO: 352445 - DNA, 20 bp, Artificial Sequence
  Description of Artificial Sequence: Synthetic oligonucleotide
  Target: LAMA2; (+) strand; PAM type: YTN; PAM sequence: TTT
cttaggtacaattcttgtta

SEQ ID NO: 352446 - DNA, 20 bp, Artificial Sequence
  Description of Artificial Sequence: Synthetic oligonucleotide
  Target: LAMA2; (+) strand; PAM type: YTN; PAM sequence: TTC
ttaggtacaattcttgttac

SEQ ID NO: 352447 - DNA, 20 bp, Artificial Sequence
  Description of Artificial Sequence: Synthetic oligonucleotide
  Target: LAMA2; (+) strand; PAM type: YTN; PAM sequence: CTT
aggtacaattcttgttacct

SEQ ID NO: 352448 - DNA, 20 bp, Artificial Sequence
  Description of Artificial Sequence: Synthetic oligonucleotide
  Target: LAMA2; (+) strand; PAM type: YTN; PAM sequence: TTA
ggtacaattcttgttacctg

SEQ ID NO: 352449 - DNA, 20 bp, Artificial Sequence
  Description of Artificial Sequence: Synthetic oligonucleotide
  Target: LAMA2; (+) strand; PAM type: YTN; PAM sequence: TTC
ttgttacctgctttctttat

SEQ ID NO: 352450 - DNA, 20 bp, Artificial Sequence
  Description of Artificial Sequence: Synthetic oligonucleotide
  Target: LAMA2; (+) strand; PAM type: YTN; PAM sequence: CTT
gttacctgctttctttataa

SEQ ID NO: 352451 - DNA, 20 bp, Artificial Sequence
  Description of Artificial Sequence: Synthetic oligonucleotide
  Target: LAMA2; (+) strand; PAM type: YTN; PAM sequence: TTG
ttacctgctttctttataaa

SEQ ID NO: 352452 - DNA, 20 bp, Artificial Sequence
  Description of Artificial Sequence: Synthetic oligonucleotide
  Target: LAMA2; (+) strand; PAM type: YTN; PAM sequence: TTA
cctgctttctttataaaact

SEQ ID NO: 352453 - DNA, 20 bp, Artificial Sequence
  Description of Artificial Sequence: Synthetic oligonucleotide
  Target: LAMA2; (+) strand; PAM type: YTN; PAM sequence: CTG
ctttctttataaaactgtag

SEQ ID NO: 352454 - DNA, 20 bp, Artificial Sequence
  Description of Artificial Sequence: Synthetic oligonucleotide
  Target: LAMA2; (+) strand; PAM type: YTN; PAM sequence: CTT
tctttataaaactgtaggat

SEQ ID NO: 352455 - DNA, 20 bp, Artificial Sequence
  Description of Artificial Sequence: Synthetic oligonucleotide
  Target: LAMA2; (+) strand; PAM type: YTN; PAM sequence: TTT
ctttataaaactgtaggatt

SEQ ID NO: 352456 - DNA, 20 bp, Artificial Sequence
  Description of Artificial Sequence: Synthetic oligonucleotide
  Target: LAMA2; (+) strand; PAM type: YTN; PAM sequence: TTC
tttataaaactgtaggatta

SEQ ID NO: 352457 - DNA, 20 bp, Artificial Sequence
  Description of Artificial Sequence: Synthetic oligonucleotide
  Target: LAMA2; (+) strand; PAM type: YTN; PAM sequence: CTT
tataaaactgtaggattatc

SEQ ID NO: 352458 - DNA, 20 bp, Artificial Sequence
  Description of Artificial Sequence: Synthetic oligonucleotide
  Target: LAMA2; (+) strand; PAM type: YTN; PAM sequence: TTT
ataaaactgtaggattatca

SEQ ID NO: 352459 - DNA, 20 bp, Artificial Sequence
  Description of Artificial Sequence: Synthetic oligonucleotide
  Target: LAMA2; (+) strand; PAM type: YTN; PAM sequence: TTA
taaaactgtaggattatcaa

SEQ ID NO: 352460 - DNA, 20 bp, Artificial Sequence
  Description of Artificial Sequence: Synthetic oligonucleotide
  Target: LAMA2; (+) strand; PAM type: YTN; PAM sequence: CTG
taggattatcaatctgagca

SEQ ID NO: 352461 - DNA, 20 bp, Artificial Sequence
  Description of Artificial Sequence: Synthetic oligonucleotide
  Target: LAMA2; (+) strand; PAM type: YTN; PAM sequence: TTA
tcaatctgagcattacatgt

SEQ ID NO: 352462 - DNA, 20 bp, Artificial Sequence
  Description of Artificial Sequence: Synthetic oligonucleotide
  Target: LAMA2; (+) strand; PAM type: YTN; PAM sequence: CTG
agcattacatgtagactaaa

SEQ ID NO: 352463 - DNA, 20 bp, Artificial Sequence
  Description of Artificial Sequence: Synthetic oligonucleotide
  Target: LAMA2; (+) strand; PAM type: YTN; PAM sequence: TTA
catgtagactaaattttgaa

SEQ ID NO: 352464 - DNA, 20 bp, Artificial Sequence
  Description of Artificial Sequence: Synthetic oligonucleotide
  Target: LAMA2; (+) strand; PAM type: YTN; PAM sequence: CTA
aattttgaaatattaaaaaa

SEQ ID NO: 352465 - DNA, 20 bp, Artificial Sequence
  Description of Artificial Sequence: Synthetic oligonucleotide
  Target: LAMA2; (+) strand; PAM type: YTN; PAM sequence: TTT
tgaaatattaaaaaacggat

SEQ ID NO: 352466 - DNA, 20 bp, Artificial Sequence
  Description of Artificial Sequence: Synthetic oligonucleotide
  Target: LAMA2; (+) strand; PAM type: YTN; PAM sequence: TTT
gaaatattaaaaaacggata

SEQ ID NO: 352467 - DNA, 20 bp, Artificial Sequence
  Description of Artificial Sequence: Synthetic oligonucleotide
  Target: LAMA2; (+) strand; PAM type: YTN; PAM sequence: TTG
aaatattaaaaaacggatac

SEQ ID NO: 352468 - DNA, 20 bp, Artificial Sequence
  Description of Artificial Sequence: Synthetic oligonucleotide
  Target: LAMA2; (+) strand; PAM type: YTN; PAM sequence: TTA
aaaaacggatacgttttgat

SEQ ID NO: 352469 - DNA, 20 bp, Artificial Sequence
  Description of Artificial Sequence: Synthetic oligonucleotide
  Target: LAMA2; (+) strand; PAM type: YTN; PAM sequence: TTT
tgatagtcgaatgatgaatt

SEQ ID NO: 352470 - DNA, 20 bp, Artificial Sequence
  Description of Artificial Sequence: Synthetic oligonucleotide
  Target: LAMA2; (+) strand; PAM type: YTN; PAM sequence: TTT
gatagtcgaatgatgaatta

SEQ ID NO: 352471 - DNA, 20 bp, Artificial Sequence
  Description of Artificial Sequence: Synthetic oligonucleotide
  Target: LAMA2; (+) strand; PAM type: YTN; PAM sequence: TTG
atagtcgaatgatgaattac

SEQ ID NO: 352472 - DNA, 20 bp, Artificial Sequence
  Description of Artificial Sequence: Synthetic oligonucleotide
  Target: LAMA2; (+) strand; PAM type: YTN; PAM sequence: TTA
ctgagctcacttttcgtttt

SEQ ID NO: 352473 - DNA, 20 bp, Artificial Sequence
  Description of Artificial Sequence: Synthetic oligonucleotide
  Target: LAMA2; (+) strand; PAM type: YTN; PAM sequence: CTG
agctcacttttcgttttaag

SEQ ID NO: 352474 - DNA, 20 bp, Artificial Sequence
  Description of Artificial Sequence: Synthetic oligonucleotide
  Target: LAMA2; (+) strand; PAM type: YTN; PAM sequence: CTC
acttttcgttttaagccttt

SEQ ID NO: 352475 - DNA, 20 bp, Artificial Sequence
  Description of Artificial Sequence: Synthetic oligonucleotide
  Target: LAMA2; (+) strand; PAM type: YTN; PAM sequence: CTT
ttcgttttaagccttttctc

SEQ ID NO: 352476 - DNA, 20 bp, Artificial Sequence
  Description of Artificial Sequence: Synthetic oligonucleotide
  Target: LAMA2; (+) strand; PAM type: YTN; PAM sequence: TTT
tcgttttaagccttttctct

SEQ ID NO: 352477 - DNA, 20 bp, Artificial Sequence
  Description of Artificial Sequence: Synthetic oligonucleotide
  Target: LAMA2; (+) strand; PAM type: YTN; PAM sequence: TTT
cgttttaagccttttctctt

SEQ ID NO: 352478 - DNA, 20 bp, Artificial Sequence
  Description of Artificial Sequence: Synthetic oligonucleotide
  Target: LAMA2; (+) strand; PAM type: YTN; PAM sequence: TTC
gttttaagccttttctcttt

SEQ ID NO: 352479 - DNA, 20 bp, Artificial Sequence
  Description of Artificial Sequence: Synthetic oligonucleotide
  Target: LAMA2; (+) strand; PAM type: YTN; PAM sequence: TTT
taagccttttctctttgtgt

SEQ ID NO: 352480 - DNA, 20 bp, Artificial Sequence
  Description of Artificial Sequence: Synthetic oligonucleotide
  Target: LAMA2; (+) strand; PAM type: YTN; PAM sequence: TTT
aagccttttctctttgtgtt

SEQ ID NO: 352481 - DNA, 20 bp, Artificial Sequence
  Description of Artificial Sequence: Synthetic oligonucleotide
  Target: LAMA2; (+) strand; PAM type: YTN; PAM sequence: TTA
agccttttctctttgtgttt

SEQ ID NO: 352482 - DNA, 20 bp, Artificial Sequence
  Description of Artificial Sequence: Synthetic oligonucleotide
  Target: LAMA2; (+) strand; PAM type: YTN; PAM sequence: CTT
ttctctttgtgtttacaagt

SEQ ID NO: 352483 - DNA, 20 bp, Artificial Sequence
  Description of Artificial Sequence: Synthetic oligonucleotide
  Target: LAMA2; (+) strand; PAM type: YTN; PAM sequence: TTT
tctctttgtgtttacaagta

SEQ ID NO: 352484 - DNA, 20 bp, Artificial Sequence
  Description of Artificial Sequence: Synthetic oligonucleotide
  Target: LAMA2; (+) strand; PAM type: YTN; PAM sequence: TTT
ctctttgtgtttacaagtaa

SEQ ID NO: 352485 - DNA, 20 bp, Artificial Sequence
  Description of Artificial Sequence: Synthetic oligonucleotide
  Target: LAMA2; (+) strand; PAM type: YTN; PAM sequence: TTC
tctttgtgtttacaagtaaa

SEQ ID NO: 352486 - DNA, 20 bp, Artificial Sequence
  Description of Artificial Sequence: Synthetic oligonucleotide
  Target: LAMA2; (+) strand; PAM type: YTN; PAM sequence: CTC
tttgtgtttacaagtaaatc

SEQ ID NO: 352487 - DNA, 20 bp, Artificial Sequence
  Description of Artificial Sequence: Synthetic oligonucleotide
  Target: LAMA2; (+) strand; PAM type: YTN; PAM sequence: CTT
tgtgtttacaagtaaatcac

SEQ ID NO: 352488 - DNA, 20 bp, Artificial Sequence
  Description of Artificial Sequence: Synthetic oligonucleotide
  Target: LAMA2; (+) strand; PAM type: YTN; PAM sequence: TTT
gtgtttacaagtaaatcaca

SEQ ID NO: 352489 - DNA, 20 bp, Artificial Sequence
  Description of Artificial Sequence: Synthetic oligonucleotide
  Target: LAMA2; (+) strand; PAM type: YTN; PAM sequence: TTG
tgtttacaagtaaatcacaa

SEQ ID NO: 352490 - DNA, 20 bp, Artificial Sequence
  Description of Artificial Sequence: Synthetic oligonucleotide
  Target: LAMA2; (+) strand; PAM type: YTN; PAM sequence: TTT
acaagtaaatcacaatgttg

SEQ ID NO: 352491 - DNA, 20 bp, Artificial Sequence
  Description of Artificial Sequence: Synthetic oligonucleotide
  Target: LAMA2; (+) strand; PAM type: YTN; PAM sequence: TTA
caagtaaatcacaatgttgt

SEQ ID NO: 352492 - DNA, 20 bp, Artificial Sequence
  Description of Artificial Sequence: Synthetic oligonucleotide
  Target: LAMA2; (+) strand; PAM type: YTN; PAM sequence: TTG
ttttcattaatatcatttaa

SEQ ID NO: 352493 - DNA, 20 bp, Artificial Sequence
  Description of Artificial Sequence: Synthetic oligonucleotide
  Target: LAMA2; (+) strand; PAM type: YTN; PAM sequence: TTT
tcattaatatcatttaactc

SEQ ID NO: 352494 - DNA, 20 bp, Artificial Sequence
  Description of Artificial Sequence: Synthetic oligonucleotide
  Target: LAMA2; (+) strand; PAM type: YTN; PAM sequence: TTT
cattaatatcatttaactct

SEQ ID NO: 352495 - DNA, 20 bp, Artificial Sequence
  Description of Artificial Sequence: Synthetic oligonucleotide
  Target: LAMA2; (+) strand; PAM type: YTN; PAM sequence: TTC
attaatatcatttaactctt

SEQ ID NO: 352496 - DNA, 20 bp, Artificial Sequence
  Description of Artificial Sequence: Synthetic oligonucleotide
  Target: LAMA2; (+) strand; PAM type: YTN; PAM sequence: TTA
atatcatttaactcttccct

SEQ ID NO: 352497 - DNA, 20 bp, Artificial Sequence
  Description of Artificial Sequence: Synthetic oligonucleotide
  Target: LAMA2; (+) strand; PAM type: YTN; PAM sequence: TTT
aactcttccctacccctttt

SEQ ID NO: 352498 - DNA, 20 bp, Artificial Sequence
  Description of Artificial Sequence: Synthetic oligonucleotide
  Target: LAMA2; (+) strand; PAM type: YTN; PAM sequence: TTA
actcttccctaccccttttt

SEQ ID NO: 352499 - DNA, 20 bp, Artificial Sequence
  Description of Artificial Sequence: Synthetic oligonucleotide
  Target: LAMA2; (+) strand; PAM type: YTN; PAM sequence: CTC
ttccctacccctttttgagt

SEQ ID NO: 352500 - DNA, 20 bp, Artificial Sequence
  Description of Artificial Sequence: Synthetic oligonucleotide
  Target: LAMA2; (+) strand; PAM type: YTN; PAM sequence: CTT
ccctacccctttttgagtaa

SEQ ID NO: 352501 - DNA, 20 bp, Artificial Sequence
  Description of Artificial Sequence: Synthetic oligonucleotide
  Target: LAMA2; (+) strand; PAM type: YTN; PAM sequence: TTC
cctacccctttttgagtaat

SEQ ID NO: 352502 - DNA, 20 bp, Artificial Sequence
  Description of Artificial Sequence: Synthetic oligonucleotide
  Target: LAMA2; (+) strand; PAM type: YTN; PAM sequence: CTA
cccctttttgagtaatgagt

SEQ ID NO: 352503 - DNA, 20 bp, Artificial Sequence
  Description of Artificial Sequence: Synthetic oligonucleotide
  Target: LAMA2; (+) strand; PAM type: YTN; PAM sequence: CTT
tttgagtaatgagtatatga

SEQ ID NO: 352504 - DNA, 20 bp, Artificial Sequence
  Description of Artificial Sequence: Synthetic oligonucleotide
  Target: LAMA2; (+) strand; PAM type: YTN; PAM sequence: TTT
ttgagtaatgagtatatgat

SEQ ID NO: 352505 - DNA, 20 bp, Artificial Sequence
  Description of Artificial Sequence: Synthetic oligonucleotide
  Target: LAMA2; (+) strand; PAM type: YTN; PAM sequence: TTT
tgagtaatgagtatatgatc

SEQ ID NO: 352506 - DNA, 20 bp, Artificial Sequence
  Description of Artificial Sequence: Synthetic oligonucleotide
  Target: LAMA2; (+) strand; PAM type: YTN; PAM sequence: TTT
gagtaatgagtatatgatca

SEQ ID NO: 352507 - DNA, 20 bp, Artificial Sequence
  Description of Artificial Sequence: Synthetic oligonucleotide
  Target: LAMA2; (+) strand; PAM type: YTN; PAM sequence: TTG
agtaatgagtatatgatcac

SEQ ID NO: 352508 - DNA, 20 bp, Artificial Sequence
  Description of Artificial Sequence: Synthetic oligonucleotide
  Target: LAMA2; (+) strand; PAM type: YTN; PAM sequence: TTC
agtggtaattcaggagagat

SEQ ID NO: 352509 - DNA, 20 bp, Artificial Sequence
  Description of Artificial Sequence: Synthetic oligonucleotide
  Target: LAMA2; (+) strand; PAM type: YTN; PAM sequence: TTC
aggagagataccactattaa

SEQ ID NO: 352510 - DNA, 20 bp, Artificial Sequence
  Description of Artificial Sequence: Synthetic oligonucleotide
  Target: LAMA2; (+) strand; PAM type: YTN; PAM sequence: CTA
ttaacattttcatatatttc

SEQ ID NO: 352511 - DNA, 20 bp, Artificial Sequence
  Description of Artificial Sequence: Synthetic oligonucleotide
  Target: LAMA2; (+) strand; PAM type: YTN; PAM sequence: TTA
acattttcatatatttctgt

SEQ ID NO: 352512 - DNA, 20 bp, Artificial Sequence
  Description of Artificial Sequence: Synthetic oligonucleotide
  Target: LAMA2; (+) strand; PAM type: YTN; PAM sequence: TTT
tcatatatttctgtcataat

SEQ ID NO: 352513 - DNA, 20 bp, Artificial Sequence
  Description of Artificial Sequence: Synthetic oligonucleotide
  Target: LAMA2; (+) strand; PAM type: YTN; PAM sequence: TTT
catatatttctgtcataatg

SEQ ID NO: 352514 - DNA, 20 bp, Artificial Sequence
  Description of Artificial Sequence: Synthetic oligonucleotide
  Target: LAMA2; (+) strand; PAM type: YTN; PAM sequence: TTC
atatatttctgtcataatgc

SEQ ID NO: 352515 - DNA, 20 bp, Artificial Sequence
  Description of Artificial Sequence: Synthetic oligonucleotide
  Target: LAMA2; (+) strand; PAM type: YTN; PAM sequence: TTT
ctgtcataatgcatacaaaa

SEQ ID NO: 352516 - DNA, 20 bp, Artificial Sequence
  Description of Artificial Sequence: Synthetic oligonucleotide
  Target: LAMA2; (+) strand; PAM type: YTN; PAM sequence: TTC
tgtcataatgcatacaaaaa

SEQ ID NO: 352517 - DNA, 20 bp, Artificial Sequence
  Description of Artificial Sequence: Synthetic oligonucleotide
  Target: LAMA2; (+) strand; PAM type: YTN; PAM sequence: CTG
tcataatgcatacaaaaatt

SEQ ID NO: 352518 - DNA, 20 bp, Artificial Sequence
  Description of Artificial Sequence: Synthetic oligonucleotide
  Target: LAMA2; (+) strand; PAM type: YTN; PAM sequence: TTT
ctgatattgctcctcttaac

SEQ ID NO: 352519 - DNA, 20 bp, Artificial Sequence
  Description of Artificial Sequence: Synthetic oligonucleotide
  Target: LAMA2; (+) strand; PAM type: YTN; PAM sequence: TTC
tgatattgctcctcttaact

SEQ ID NO: 352520 - DNA, 20 bp, Artificial Sequence
  Description of Artificial Sequence: Synthetic oligonucleotide
  Target: LAMA2; (+) strand; PAM type: YTN; PAM sequence: CTG
atattgctcctcttaacttt

SEQ ID NO: 352521 - DNA, 20 bp, Artificial Sequence
  Description of Artificial Sequence: Synthetic oligonucleotide
  Target: LAMA2; (+) strand; PAM type: YTN; PAM sequence: TTG
ctcctcttaactttatgtga

SEQ ID NO: 352522 - DNA, 20 bp, Artificial Sequence
  Description of Artificial Sequence: Synthetic oligonucleotide
  Target: LAMA2; (+) strand; PAM type: YTN; PAM sequence: CTC
ctcttaactttatgtgatga

SEQ ID NO: 352523 - DNA, 20 bp, Artificial Sequence
  Description of Artificial Sequence: Synthetic oligonucleotide
  Target: LAMA2; (+) strand; PAM type: YTN; PAM sequence: CTC
ttaactttatgtgatgagtt

SEQ ID NO: 352524 - DNA, 20 bp, Artificial Sequence
  Description of Artificial Sequence: Synthetic oligonucleotide
  Target: LAMA2; (+) strand; PAM type: YTN; PAM sequence: CTT
aactttatgtgatgagtttc

SEQ ID NO: 352525 - DNA, 20 bp, Artificial Sequence
  Description of Artificial Sequence: Synthetic oligonucleotide
  Target: LAMA2; (+) strand; PAM type: YTN; PAM sequence: TTA
actttatgtgatgagtttcc

SEQ ID NO: 352526 - DNA, 20 bp, Artificial Sequence
  Description of Artificial Sequence: Synthetic oligonucleotide
  Target: LAMA2; (+) strand; PAM type: YTN; PAM sequence: CTT
tatgtgatgagtttccccaa

SEQ ID NO: 352527 - DNA, 20 bp, Artificial Sequence
  Description of Artificial Sequence: Synthetic oligonucleotide
  Target: LAMA2; (+) strand; PAM type: YTN; PAM sequence: TTT
atgtgatgagtttccccaaa

SEQ ID NO: 352528 - DNA, 20 bp, Artificial Sequence
  Description of Artificial Sequence: Synthetic oligonucleotide
  Target: LAMA2; (+) strand; PAM type: YTN; PAM sequence: TTA
tgtgatgagtttccccaaaa

SEQ ID NO: 352529 - DNA, 20 bp, Artificial Sequence
  Description of Artificial Sequence: Synthetic oligonucleotide
  Target: LAMA2; (+) strand; PAM type: YTN; PAM sequence: TTT
ccccaaaaatctatgaaaac

SEQ ID NO: 352530 - DNA, 20 bp, Artificial Sequence
  Description of Artificial Sequence: Synthetic oligonucleotide
  Target: LAMA2; (+) strand; PAM type: YTN; PAM sequence: TTC
cccaaaaatctatgaaaact

SEQ ID NO: 352531 - DNA, 20 bp, Artificial Sequence
  Description of Artificial Sequence: Synthetic oligonucleotide
  Target: LAMA2; (+) strand; PAM type: YTN; PAM sequence: CTA
tgaaaactttctctgaagtc

SEQ ID NO: 352532 - DNA, 20 bp, Artificial Sequence
  Description of Artificial Sequence: Synthetic oligonucleotide
  Target: LAMA2; (+) strand; PAM type: YTN; PAM sequence: CTT
tctctgaagtctggcttcag

SEQ ID NO: 352533 - DNA, 20 bp, Artificial Sequence
  Description of Artificial Sequence: Synthetic oligonucleotide
  Target: LAMA2; (+) strand; PAM type: YTN; PAM sequence: TTT
ctctgaagtctggcttcagc

SEQ ID NO: 352534 - DNA, 20 bp, Artificial Sequence
  Description of Artificial Sequence: Synthetic oligonucleotide
  Target: LAMA2; (+) strand; PAM type: YTN; PAM sequence: TTC
tctgaagtctggcttcagca

SEQ ID NO: 352535 - DNA, 20 bp, Artificial Sequence
  Description of Artificial Sequence: Synthetic oligonucleotide
  Target: LAMA2; (+) strand; PAM type: YTN; PAM sequence: CTC
tgaagtctggcttcagcacc

SEQ ID NO: 352536 - DNA, 20 bp, Artificial Sequence
  Description of Artificial Sequence: Synthetic oligonucleotide
  Target: LAMA2; (+) strand; PAM type: YTN; PAM sequence: CTG
aagtctggcttcagcaccta

SEQ ID NO: 352537 - DNA, 20 bp, Artificial Sequence
  Description of Artificial Sequence: Synthetic oligonucleotide
  Target: LAMA2; (+) strand; PAM type: YTN; PAM sequence: CTG
gcttcagcacctaaataaca

SEQ ID NO: 352538 - DNA, 20 bp, Artificial Sequence
  Description of Artificial Sequence: Synthetic oligonucleotide
  Target: LAMA2; (+) strand; PAM type: YTN; PAM sequence: CTT
cagcacctaaataacacatt

SEQ ID NO: 352539 - DNA, 20 bp, Artificial Sequence
  Description of Artificial Sequence: Synthetic oligonucleotide
  Target: LAMA2; (+) strand; PAM type: YTN; PAM sequence: TTC
agcacctaaataacacatta

SEQ ID NO: 352540 - DNA, 20 bp, Artificial Sequence
  Description of Artificial Sequence: Synthetic oligonucleotide
  Target: LAMA2; (+) strand; PAM type: YTN; PAM sequence: CTA
aataacacattattatatgg

SEQ ID NO: 352541 - DNA, 20 bp, Artificial Sequence
  Description of Artificial Sequence: Synthetic oligonucleotide
  Target: LAMA2; (+) strand; PAM type: YTN; PAM sequence: TTA
ttatatggtcgtgccataat

SEQ ID NO: 352542 - DNA, 20 bp, Artificial Sequence
  Description of Artificial Sequence: Synthetic oligonucleotide
  Target: LAMA2; (+) strand; PAM type: YTN; PAM sequence: TTA
tatggtcgtgccataattat

SEQ ID NO: 352543 - DNA, 20 bp, Artificial Sequence
  Description of Artificial Sequence: Synthetic oligonucleotide
  Target: LAMA2; (+) strand; PAM type: YTN; PAM sequence: TTA
tttaccctctcaactttata

SEQ ID NO: 352544 - DNA, 20 bp, Artificial Sequence
  Description of Artificial Sequence: Synthetic oligonucleotide
  Target: LAMA2; (+) strand; PAM type: YTN; PAM sequence: TTT
accctctcaactttatatgg

SEQ ID NO: 352545 - DNA, 20 bp, Artificial Sequence
  Description of Artificial Sequence: Synthetic oligonucleotide
  Target: LAMA2; (+) strand; PAM type: YTN; PAM sequence: TTA
ccctctcaactttatatgga

SEQ ID NO: 352546 - DNA, 20 bp, Artificial Sequence
  Description of Artificial Sequence: Synthetic oligonucleotide
  Target: LAMA2; (+) strand; PAM type: YTN; PAM sequence: CTC
tcaactttatatggacatta

SEQ ID NO: 352547 - DNA, 20 bp, Artificial Sequence
  Description of Artificial Sequence: Synthetic oligonucleotide
  Target: LAMA2; (+) strand; PAM type: YTN; PAM sequence: CTC
aactttatatggacattaag

SEQ ID NO: 352548 - DNA, 20 bp, Artificial Sequence
  Description of Artificial Sequence: Synthetic oligonucleotide
  Target: LAMA2; (+) strand; PAM type: YTN; PAM sequence: CTT
tatatggacattaagattgt

SEQ ID NO: 352549 - DNA, 20 bp, Artificial Sequence
  Description of Artificial Sequence: Synthetic oligonucleotide
  Target: LAMA2; (+) strand; PAM type: YTN; PAM sequence: TTT
atatggacattaagattgtt

SEQ ID NO: 352550 - DNA, 20 bp, Artificial Sequence
  Description of Artificial Sequence: Synthetic oligonucleotide
  Target: LAMA2; (+) strand; PAM type: YTN; PAM sequence: TTA
tatggacattaagattgttt

SEQ ID NO: 352551 - DNA, 20 bp, Artificial Sequence
  Description of Artificial Sequence: Synthetic oligonucleotide
  Target: LAMA2; (+) strand; PAM type: YTN; PAM sequence: TTA
agattgtttcaaatttttgt

SEQ ID NO: 352552 - DNA, 20 bp, Artificial Sequence
  Description of Artificial Sequence: Synthetic oligonucleotide
  Target: LAMA2; (+) strand; PAM type: YTN; PAM sequence: TTG
tttcaaatttttgtttattt

SEQ ID NO: 352553 - DNA, 20 bp, Artificial Sequence
  Description of Artificial Sequence: Synthetic oligonucleotide
  Target: LAMA2; (+) strand; PAM type: YTN; PAM sequence: TTT
caaatttttgtttattttaa

SEQ ID NO: 352554 - DNA, 20 bp, Artificial Sequence
  Description of Artificial Sequence: Synthetic oligonucleotide
  Target: LAMA2; (+) strand; PAM type: YTN; PAM sequence: TTC
aaatttttgtttattttaac

SEQ ID NO: 352555 - DNA, 20 bp, Artificial Sequence
  Description of Artificial Sequence: Synthetic oligonucleotide
  Target: LAMA2; (+) strand; PAM type: YTN; PAM sequence: TTT
ttgtttattttaaccaatcc

SEQ ID NO: 352556 - DNA, 20 bp, Artificial Sequence
  Description of Artificial Sequence: Synthetic oligonucleotide
  Target: LAMA2; (+) strand; PAM type: YTN; PAM sequence: TTT
tgtttattttaaccaatcct

SEQ ID NO: 352557 - DNA, 20 bp, Artificial Sequence
  Description of Artificial Sequence: Synthetic oligonucleotide
  Target: LAMA2; (+) strand; PAM type: YTN; PAM sequence: TTT
gtttattttaaccaatcctt

SEQ ID NO: 352558 - DNA, 20 bp, Artificial Sequence
  Description of Artificial Sequence: Synthetic oligonucleotide
  Target: LAMA2; (+) strand; PAM type: YTN; PAM sequence: TTG
tttattttaaccaatccttt

SEQ ID NO: 352559 - DNA, 20 bp, Artificial Sequence
  Description of Artificial Sequence: Synthetic oligonucleotide
  Target: LAMA2; (+) strand; PAM type: YTN; PAM sequence: TTT
attttaaccaatcctttaat

SEQ ID NO: 352560 - DNA, 20 bp, Artificial Sequence
  Description of Artificial Sequence: Synthetic oligonucleotide
  Target: LAMA2; (+) strand; PAM type: YTN; PAM sequence: TTA
ttttaaccaatcctttaata

SEQ ID NO: 352561 - DNA, 20 bp, Artificial Sequence
  Description of Artificial Sequence: Synthetic oligonucleotide
  Target: LAMA2; (+) strand; PAM type: YTN; PAM sequence: TTT
taaccaatcctttaataata

SEQ ID NO: 352562 - DNA, 20 bp, Artificial Sequence
  Description of Artificial Sequence: Synthetic oligonucleotide
  Target: LAMA2; (+) strand; PAM type: YTN; PAM sequence: TTT
aaccaatcctttaataatac

SEQ ID NO: 352563 - DNA, 20 bp, Artificial Sequence
  Description of Artificial Sequence: Synthetic oligonucleotide
  Target: LAMA2; (+) strand; PAM type: YTN; PAM sequence: TTA
accaatcctttaataatact

SEQ ID NO: 352564 - DNA, 20 bp, Artificial Sequence
  Description of Artificial Sequence: Synthetic oligonucleotide
  Target: LAMA2; (+) strand; PAM type: YTN; PAM sequence: CTT
taataatacttattccatat

SEQ ID NO: 352565 - DNA, 20 bp, Artificial Sequence
  Description of Artificial Sequence: Synthetic oligonucleotide
  Target: LAMA2; (+) strand; PAM type: YTN; PAM sequence: TTT
aataatacttattccatata

SEQ ID NO: 352566 - DNA, 20 bp, Artificial Sequence
  Description of Artificial Sequence: Synthetic oligonucleotide
  Target: LAMA2; (+) strand; PAM type: YTN; PAM sequence: TTA
ataatacttattccatataa

SEQ ID NO: 352567 - DNA, 20 bp, Artificial Sequence
  Description of Artificial Sequence: Synthetic oligonucleotide
  Target: LAMA2; (+) strand; PAM type: YTN; PAM sequence: CTT
attccatataattacttttc

SEQ ID NO: 352568 - DNA, 20 bp, Artificial Sequence
  Description of Artificial Sequence: Synthetic oligonucleotide
  Target: LAMA2; (+) strand; PAM type: YTN; PAM sequence: TTA
ttccatataattacttttca

SEQ ID NO: 352569 - DNA, 20 bp, Artificial Sequence
  Description of Artificial Sequence: Synthetic oligonucleotide
  Target: LAMA2; (+) strand; PAM type: YTN; PAM sequence: TTC
catataattacttttcaatt

SEQ ID NO: 352570 - DNA, 20 bp, Artificial Sequence
  Description of Artificial Sequence: Synthetic oligonucleotide
  Target: LAMA2; (+) strand; PAM type: YTN; PAM sequence: TTA
cttttcaattattgtaaaaa

SEQ ID NO: 352571 - DNA, 20 bp, Artificial Sequence
  Description of Artificial Sequence: Synthetic oligonucleotide
  Target: LAMA2; (+) strand; PAM type: YTN; PAM sequence: CTT
ttcaattattgtaaaaacaa

SEQ ID NO: 352572 - DNA, 20 bp, Artificial Sequence
  Description of Artificial Sequence: Synthetic oligonucleotide
  Target: LAMA2; (+) strand; PAM type: YTN; PAM sequence: TTT
tcaattattgtaaaaacaat

SEQ ID NO: 352573 - DNA, 20 bp, Artificial Sequence
  Description of Artificial Sequence: Synthetic oligonucleotide
  Target: LAMA2; (+) strand; PAM type: YTN; PAM sequence: TTT
caattattgtaaaaacaata

SEQ ID NO: 352574 - DNA, 20 bp, Artificial Sequence
  Description of Artificial Sequence: Synthetic oligonucleotide
  Target: LAMA2; (+) strand; PAM type: YTN; PAM sequence: TTC
aattattgtaaaaacaatac

SEQ ID NO: 352575 - DNA, 20 bp, Artificial Sequence
  Description of Artificial Sequence: Synthetic oligonucleotide
  Target: LAMA2; (+) strand; PAM type: YTN; PAM sequence: TTA
ttgtaaaaacaatacatagt

SEQ ID NO: 352576 - DNA, 20 bp, Artificial Sequence
  Description of Artificial Sequence: Synthetic oligonucleotide
  Target: LAMA2; (+) strand; PAM type: YTN; PAM sequence: TTG
taaaaacaatacatagtaaa

SEQ ID NO: 352577 - DNA, 20 bp, Artificial Sequence
  Description of Artificial Sequence: Synthetic oligonucleotide
  Target: LAMA2; (+) strand; PAM type: YTN; PAM sequence: TTC
ttaatagtaaagaaataaaa

SEQ ID NO: 352578 - DNA, 20 bp, Artificial Sequence
  Description of Artificial Sequence: Synthetic oligonucleotide
  Target: LAMA2; (+) strand; PAM type: YTN; PAM sequence: CTT
aatagtaaagaaataaaata

SEQ ID NO: 352579 - DNA, 20 bp, Artificial Sequence
  Description of Artificial Sequence: Synthetic oligonucleotide
  Target: LAMA2; (+) strand; PAM type: YTN; PAM sequence: TTA
atagtaaagaaataaaataa

SEQ ID NO: 352580 - DNA, 20 bp, Artificial Sequence
  Description of Artificial Sequence: Synthetic oligonucleotide
  Target: LAMA2; (+) strand; PAM type: YTN; PAM sequence: CTC
ttcaacctatttatcccagt

SEQ ID NO: 352581 - DNA, 20 bp, Artificial Sequence
  Description of Artificial Sequence: Synthetic oligonucleotide
  Target: LAMA2; (+) strand; PAM type: YTN; PAM sequence: CTT
caacctatttatcccagtct

SEQ ID NO: 352582 - DNA, 20 bp, Artificial Sequence
  Description of Artificial Sequence: Synthetic oligonucleotide
  Target: LAMA2; (+) strand; PAM type: YTN; PAM sequence: TTC
aacctatttatcccagtctt

SEQ ID NO: 352583 - DNA, 20 bp, Artificial Sequence
  Description of Artificial Sequence: Synthetic oligonucleotide
  Target: LAMA2; (+) strand; PAM type: YTN; PAM sequence: CTA
tttatcccagtcttacttcc

SEQ ID NO: 352584 - DNA, 20 bp, Artificial Sequence
  Description of Artificial Sequence: Synthetic oligonucleotide
  Target: LAMA2; (+) strand; PAM type: YTN; PAM sequence: TTT
atcccagtcttacttccaaa

SEQ ID NO: 352585 - DNA, 20 bp, Artificial Sequence
  Description of Artificial Sequence: Synthetic oligonucleotide
  Target: LAMA2; (+) strand; PAM type: YTN; PAM sequence: TTA
tcccagtcttacttccaaat

SEQ ID NO: 352586 - DNA, 20 bp, Artificial Sequence
  Description of Artificial Sequence: Synthetic oligonucleotide
  Target: LAMA2; (+) strand; PAM type: YTN; PAM sequence: CTT
acttccaaatttaaaaatat

SEQ ID NO: 352587 - DNA, 20 bp, Artificial Sequence
  Description of Artificial Sequence: Synthetic oligonucleotide
  Target: LAMA2; (+) strand; PAM type: YTN; PAM sequence: TTA
cttccaaatttaaaaatatt

SEQ ID NO: 352588 - DNA, 20 bp, Artificial Sequence
  Description of Artificial Sequence: Synthetic oligonucleotide
  Target: LAMA2; (+) strand; PAM type: YTN; PAM sequence: CTT
ccaaatttaaaaatattgag

SEQ ID NO: 352589 - DNA, 20 bp, Artificial Sequence
  Description of Artificial Sequence: Synthetic oligonucleotide
  Target: LAMA2; (+) strand; PAM type: YTN; PAM sequence: TTC
caaatttaaaaatattgagc

SEQ ID NO: 352590 - DNA, 20 bp, Artificial Sequence
  Description of Artificial Sequence: Synthetic oligonucleotide
  Target: LAMA2; (+) strand; PAM type: YTN; PAM sequence: TTT
aaaaatattgagcctttttt

SEQ ID NO: 352591 - DNA, 20 bp, Artificial Sequence
  Description of Artificial Sequence: Synthetic oligonucleotide
  Target: LAMA2; (+) strand; PAM type: YTN; PAM sequence: TTA
aaaatattgagccttttttc

SEQ ID NO: 352592 - DNA, 20 bp, Artificial Sequence
  Description of Artificial Sequence: Synthetic oligonucleotide
  Target: LAMA2; (+) strand; PAM type: YTN; PAM sequence: TTG
agccttttttccgattcagt

SEQ ID NO: 352593 - DNA, 20 bp, Artificial Sequence
  Description of Artificial Sequence: Synthetic oligonucleotide
  Target: LAMA2; (+) strand; PAM type: YTN; PAM sequence: CTT
ttttccgattcagtttttat

SEQ ID NO: 352594 - DNA, 20 bp, Artificial Sequence
  Description of Artificial Sequence: Synthetic oligonucleotide
  Target: LAMA2; (+) strand; PAM type: YTN; PAM sequence: TTT
tttccgattcagtttttatt

SEQ ID NO: 352595 - DNA, 20 bp, Artificial Sequence
  Description of Artificial Sequence: Synthetic oligonucleotide
  Target: LAMA2; (+) strand; PAM type: YTN; PAM sequence: TTT
ttccgattcagtttttattt

SEQ ID NO: 352596 - DNA, 20 bp, Artificial Sequence
  Description of Artificial Sequence: Synthetic oligonucleotide
  Target: LAMA2; (+) strand; PAM type: YTN; PAM sequence: TTT
tccgattcagtttttatttt

SEQ ID NO: 352597 - DNA, 20 bp, Artificial Sequence
  Description of Artificial Sequence: Synthetic oligonucleotide
  Target: LAMA2; (+) strand; PAM type: YTN; PAM sequence: TTT
ccgattcagtttttattttt

SEQ ID NO: 352598 - DNA, 20 bp, Artificial Sequence
  Description of Artificial Sequence: Synthetic oligonucleotide
  Target: LAMA2; (+) strand; PAM type: YTN; PAM sequence: TTC
cgattcagtttttatttttt

SEQ ID NO: 352599 - DNA, 20 bp, Artificial Sequence
  Description of Artificial Sequence: Synthetic oligonucleotide
  Target: LAMA2; (+) strand; PAM type: YTN; PAM sequence: TTC
agtttttattttttttaatt

SEQ ID NO: 352600 - DNA, 20 bp, Artificial Sequence
  Description of Artificial Sequence: Synthetic oligonucleotide
  Target: LAMA2; (+) strand; PAM type: YTN; PAM sequence: TTT
ttattttttttaattatact

SEQ ID NO: 352601 - DNA, 20 bp, Artificial Sequence
  Description of Artificial Sequence: Synthetic oligonucleotide
  Target: LAMA2; (+) strand; PAM type: YTN; PAM sequence: TTT
tattttttttaattatactt

SEQ ID NO: 352602 - DNA, 20 bp, Artificial Sequence
  Description of Artificial Sequence: Synthetic oligonucleotide
  Target: LAMA2; (+) strand; PAM type: YTN; PAM sequence: TTT
attttttttaattatacttt

SEQ ID NO: 352603 - DNA, 20 bp, Artificial Sequence
  Description of Artificial Sequence: Synthetic oligonucleotide
  Target: LAMA2; (+) strand; PAM type: YTN; PAM sequence: TTA
ttttttttaattatacttta

SEQ ID NO: 352604 - DNA, 20 bp, Artificial Sequence
  Description of Artificial Sequence: Synthetic oligonucleotide
  Target: LAMA2; (+) strand; PAM type: YTN; PAM sequence: TTT
tttttaattatactttaagt

SEQ ID NO: 352605 - DNA, 20 bp, Artificial Sequence
  Description of Artificial Sequence: Synthetic oligonucleotide
  Target: LAMA2; (+) strand; PAM type: YTN; PAM sequence: TTT
ttttaattatactttaagtt

SEQ ID NO: 352606 - DNA, 20 bp, Artificial Sequence
  Description of Artificial Sequence: Synthetic oligonucleotide
  Target: LAMA2; (+) strand; PAM type: YTN; PAM sequence: TTT
tttaattatactttaagttt

SEQ ID NO: 352607 - DNA, 20 bp, Artificial Sequence
  Description of Artificial Sequence: Synthetic oligonucleotide
  Target: LAMA2; (+) strand; PAM type: YTN; PAM sequence: TTT
ttaattatactttaagtttt

SEQ ID NO: 352608 - DNA, 20 bp, Artificial Sequence
  Description of Artificial Sequence: Synthetic oligonucleotide
  Target: LAMA2; (+) strand; PAM type: YTN; PAM sequence: TTT
taattatactttaagtttta

SEQ ID NO: 352609 - DNA, 20 bp, Artificial Sequence
  Description of Artificial Sequence: Synthetic oligonucleotide
  Target: LAMA2; (+) strand; PAM type: YTN; PAM sequence: TTT
aattatactttaagttttag

SEQ ID NO: 352610 - DNA, 20 bp, Artificial Sequence
  Description of Artificial Sequence: Synthetic oligonucleotide
  Target: LAMA2; (+) strand; PAM type: YTN; PAM sequence: TTA
attatactttaagttttagg

SEQ ID NO: 352611 - DNA, 20 bp, Artificial Sequence
  Description of Artificial Sequence: Synthetic oligonucleotide
  Target: LAMA2; (+) strand; PAM type: YTN; PAM sequence: TTA
tactttaagttttagggtac

SEQ ID NO: 352612 - DNA, 20 bp, Artificial Sequence
  Description of Artificial Sequence: Synthetic oligonucleotide
  Target: LAMA2; (+) strand; PAM type: YTN; PAM sequence: CTT
taagttttagggtacatgtg

SEQ ID NO: 352613 - DNA, 20 bp, Artificial Sequence
  Description of Artificial Sequence: Synthetic oligonucleotide
  Target: LAMA2; (+) strand; PAM type: YTN; PAM sequence: TTT
aagttttagggtacatgtgc

SEQ ID NO: 352614 - DNA, 20 bp, Artificial Sequence
  Description of Artificial Sequence: Synthetic oligonucleotide
  Target: LAMA2; (+) strand; PAM type: YTN; PAM sequence: TTA
agttttagggtacatgtgca

SEQ ID NO: 352615 - DNA, 20 bp, Artificial Sequence
  Description of Artificial Sequence: Synthetic oligonucleotide
  Target: LAMA2; (+) strand; PAM type: YTN; PAM sequence: TTT
tagggtacatgtgcacaatg

SEQ ID NO: 352616 - DNA, 20 bp, Artificial Sequence
  Description of Artificial Sequence: Synthetic oligonucleotide
  Target: LAMA2; (+) strand; PAM type: YTN; PAM sequence: TTT
agggtacatgtgcacaatgt

SEQ ID NO: 352617 - DNA, 20 bp, Artificial Sequence
  Description of Artificial Sequence: Synthetic oligonucleotide
  Target: LAMA2; (+) strand; PAM type: YTN; PAM sequence: TTA
gggtacatgtgcacaatgtg

SEQ ID NO: 352618 - DNA, 20 bp, Artificial Sequence
  Description of Artificial Sequence: Synthetic oligonucleotide
  Target: LAMA2; (+) strand; PAM type: YTN; PAM sequence: TTA
gttacatatgtatacatgtg

SEQ ID NO: 352619 - DNA, 20 bp, Artificial Sequence
  Description of Artificial Sequence: Synthetic oligonucleotide
  Target: LAMA2; (+) strand; PAM type: YTN; PAM sequence: TTA
catatgtatacatgtgccat

SEQ ID NO: 352620 - DNA, 20 bp, Artificial Sequence
  Description of Artificial Sequence: Synthetic oligonucleotide
  Target: LAMA2; (+) strand; PAM type: YTN; PAM sequence: CTG
gtgcactgcacccactaact

SEQ ID NO: 352621 - DNA, 20 bp, Artificial Sequence
  Description of Artificial Sequence: Synthetic oligonucleotide
  Target: LAMA2; (+) strand; PAM type: YTN; PAM sequence: CTG
cacccactaactcgtcatct

SEQ ID NO: 352622 - DNA, 20 bp, Artificial Sequence
  Description of Artificial Sequence: Synthetic oligonucleotide
  Target: LAMA2; (+) strand; PAM type: YTN; PAM sequence: CTA
actcgtcatctagcattagg

SEQ ID NO: 352623 - DNA, 20 bp, Artificial Sequence
  Description of Artificial Sequence: Synthetic oligonucleotide
  Target: LAMA2; (+) strand; PAM type: YTN; PAM sequence: CTC
gtcatctagcattaggtata

SEQ ID NO: 352624 - DNA, 20 bp, Artificial Sequence
  Description of Artificial Sequence: Synthetic oligonucleotide
  Target: LAMA2; (+) strand; PAM type: YTN; PAM sequence: CTA
gcattaggtatatctcccaa

SEQ ID NO: 352625 - DNA, 20 bp, Artificial Sequence
  Description of Artificial Sequence: Synthetic oligonucleotide
  Target: LAMA2; (+) strand; PAM type: YTN; PAM sequence: TTA
ggtatatctcccaatgctat

SEQ ID NO: 352626 - DNA, 20 bp, Artificial Sequence
  Description of Artificial Sequence: Synthetic oligonucleotide
  Target: LAMA2; (+) strand; PAM type: YTN; PAM sequence: CTC
ccaatgctatccctcccccc

SEQ ID NO: 352627 - DNA, 20 bp, Artificial Sequence
  Description of Artificial Sequence: Synthetic oligonucleotide
  Target: LAMA2; (+) strand; PAM type: YTN; PAM sequence: CTA
tccctcccccctccccccac

SEQ ID NO: 352628 - DNA, 20 bp, Artificial Sequence
  Description of Artificial Sequence: Synthetic oligonucleotide
  Target: LAMA2; (+) strand; PAM type: YTN; PAM sequence: CTC
ccccctccccccaccccaca

SEQ ID NO: 352629 - DNA, 20 bp, Artificial Sequence
  Description of Artificial Sequence: Synthetic oligonucleotide
  Target: LAMA2; (+) strand; PAM type: YTN; PAM sequence: CTC
cccccaccccacaacagtcc

SEQ ID NO: 352630 - DNA, 20 bp, Artificial Sequence
  Description of Artificial Sequence: Synthetic oligonucleotide
  Target: LAMA2; (+) strand; PAM type: YTN; PAM sequence: TTC
cccttcctgtgtccatgtga

SEQ ID NO: 352631 - DNA, 20 bp, Artificial Sequence
  Description of Artificial Sequence: Synthetic oligonucleotide
  Target: LAMA2; (+) strand; PAM type: YTN; PAM sequence: CTT
cctgtgtccatgtgatagca

SEQ ID NO: 352632 - DNA, 20 bp, Artificial Sequence
  Description of Artificial Sequence: Synthetic oligonucleotide
  Target: LAMA2; (+) strand; PAM type: YTN; PAM sequence: TTC
ctgtgtccatgtgatagcat

SEQ ID NO: 352633 - DNA, 20 bp, Artificial Sequence
  Description of Artificial Sequence: Synthetic oligonucleotide
  Target: LAMA2; (+) strand; PAM type: YTN; PAM sequence: CTG
tgtccatgtgatagcattgt

SEQ ID NO: 352634 - DNA, 20 bp, Artificial Sequence
  Description of Artificial Sequence: Synthetic oligonucleotide
  Target: LAMA2; (+) strand; PAM type: YTN; PAM sequence: TTG
ttcaattcccacctatgagt

SEQ ID NO: 352635 - DNA, 20 bp, Artificial Sequence
  Description of Artificial Sequence: Synthetic oligonucleotide
  Target: LAMA2; (+) strand; PAM type: YTN; PAM sequence: TTC
aattcccacctatgagtgag

SEQ ID NO: 352636 - DNA, 20 bp, Artificial Sequence
  Description of Artificial Sequence: Synthetic oligonucleotide
  Target: LAMA2; (+) strand; PAM type: YTN; PAM sequence: TTC
ccacctatgagtgagaatat

SEQ ID NO: 352637 - DNA, 20 bp, Artificial Sequence
  Description of Artificial Sequence: Synthetic oligonucleotide
  Target: LAMA2; (+) strand; PAM type: YTN; PAM sequence: CTA
tgagtgagaatatgtggtgt

SEQ ID NO: 352638 - DNA, 20 bp, Artificial Sequence
  Description of Artificial Sequence: Synthetic oligonucleotide
  Target: LAMA2; (+) strand; PAM type: YTN; PAM sequence: TTT
ggttttttgttcttgcaatc

SEQ ID NO: 352639 - DNA, 20 bp, Artificial Sequence
  Description of Artificial Sequence: Synthetic oligonucleotide
  Target: LAMA2; (+) strand; PAM type: YTN; PAM sequence: TTG
gttttttgttcttgcaatcg

SEQ ID NO: 352640 - DNA, 20 bp, Artificial Sequence
  Description of Artificial Sequence: Synthetic oligonucleotide
  Target: LAMA2; (+) strand; PAM type: YTN; PAM sequence: TTT
tttgttcttgcaatcgttta

SEQ ID NO: 352641 - DNA, 20 bp, Artificial Sequence
  Description of Artificial Sequence: Synthetic oligonucleotide
  Target: LAMA2; (+) strand; PAM type: YTN; PAM sequence: TTT
ttgttcttgcaatcgtttac

SEQ ID NO: 352642 - DNA, 20 bp, Artificial Sequence
  Description of Artificial Sequence: Synthetic oligonucleotide
  Target: LAMA2; (+) strand; PAM type: YTN; PAM sequence: TTT
tgttcttgcaatcgtttact

SEQ ID NO: 352643 - DNA, 20 bp, Artificial Sequence
  Description of Artificial Sequence: Synthetic oligonucleotide
  Target: LAMA2; (+) strand; PAM type: YTN; PAM sequence: TTT
gttcttgcaatcgtttactg

SEQ ID NO: 352644 - DNA, 20 bp, Artificial Sequence
  Description of Artificial Sequence: Synthetic oligonucleotide
  Target: LAMA2; (+) strand; PAM type: YTN; PAM sequence: TTG
ttcttgcaatcgtttactga

SEQ ID NO: 352645 - DNA, 20 bp, Artificial Sequence
  Description of Artificial Sequence: Synthetic oligonucleotide
  Target: LAMA2; (+) strand; PAM type: YTN; PAM sequence: TTC
ttgcaatcgtttactgagaa

SEQ ID NO: 352646 - DNA, 20 bp, Artificial Sequence
  Description of Artificial Sequence: Synthetic oligonucleotide
  Target: LAMA2; (+) strand; PAM type: YTN; PAM sequence: CTT
gcaatcgtttactgagaatg

SEQ ID NO: 352647 - DNA, 20 bp, Artificial Sequence
  Description of Artificial Sequence: Synthetic oligonucleotide
  Target: LAMA2; (+) strand; PAM type: YTN; PAM sequence: TTG
caatcgtttactgagaatga

SEQ ID NO: 352648 - DNA, 20 bp, Artificial Sequence
  Description of Artificial Sequence: Synthetic oligonucleotide
  Target: LAMA2; (+) strand; PAM type: YTN; PAM sequence: TTT
actgagaatgatgttttcca

SEQ ID NO: 352649 - DNA, 20 bp, Artificial Sequence
  Description of Artificial Sequence: Synthetic oligonucleotide
  Target: LAMA2; (+) strand; PAM type: YTN; PAM sequence: TTA
ctgagaatgatgttttccaa

SEQ ID NO: 352650 - DNA, 20 bp, Artificial Sequence
  Description of Artificial Sequence: Synthetic oligonucleotide
  Target: LAMA2; (+) strand; PAM type: YTN; PAM sequence: CTG
agaatgatgttttccaattt

SEQ ID NO: 352651 - DNA, 20 bp, Artificial Sequence
  Description of Artificial Sequence: Synthetic oligonucleotide
  Target: LAMA2; (+) strand; PAM type: YTN; PAM sequence: TTT
tccaatttcatccatgtccc

SEQ ID NO: 352652 - DNA, 20 bp, Artificial Sequence
  Description of Artificial Sequence: Synthetic oligonucleotide
  Target: LAMA2; (+) strand; PAM type: YTN; PAM sequence: TTT
ccaatttcatccatgtccct

SEQ ID NO: 352653 - DNA, 20 bp, Artificial Sequence
  Description of Artificial Sequence: Synthetic oligonucleotide
  Target: LAMA2; (+) strand; PAM type: YTN; PAM sequence: TTC
caatttcatccatgtcccta

SEQ ID NO: 352654 - DNA, 20 bp, Artificial Sequence
  Description of Artificial Sequence: Synthetic oligonucleotide
  Target: LAMA2; (+) strand; PAM type: YTN; PAM sequence: TTT
catccatgtccctacaaagg

SEQ ID NO: 352655 - DNA, 20 bp, Artificial Sequence
  Description of Artificial Sequence: Synthetic oligonucleotide
  Target: LAMA2; (+) strand; PAM type: YTN; PAM sequence: TTC
atccatgtccctacaaagga

SEQ ID NO: 352656 - DNA, 20 bp, Artificial Sequence
  Description of Artificial Sequence: Synthetic oligonucleotide
  Target: LAMA2; (+) strand; PAM type: YTN; PAM sequence: CTA
caaaggacatgaactcatca

SEQ ID NO: 352657 - DNA, 20 bp, Artificial Sequence
  Description of Artificial Sequence: Synthetic oligonucleotide
  Target: LAMA2; (+) strand; PAM type: YTN; PAM sequence: CTC
atcattttttatggctgcat

SEQ ID NO: 352658 - DNA, 20 bp, Artificial Sequence
  Description of Artificial Sequence: Synthetic oligonucleotide
  Target: LAMA2; (+) strand; PAM type: YTN; PAM sequence: TTT
tttatggctgcatagtattc

SEQ ID NO: 352659 - DNA, 20 bp, Artificial Sequence
  Description of Artificial Sequence: Synthetic oligonucleotide
  Target: LAMA2; (+) strand; PAM type: YTN; PAM sequence: TTT
ttatggctgcatagtattcc

SEQ ID NO: 352660 - DNA, 20 bp, Artificial Sequence
  Description of Artificial Sequence: Synthetic oligonucleotide
  Target: LAMA2; (+) strand; PAM type: YTN; PAM sequence: TTT
tatggctgcatagtattcca

SEQ ID NO: 352661 - DNA, 20 bp, Artificial Sequence
  Description of Artificial Sequence: Synthetic oligonucleotide
  Target: LAMA2; (+) strand; PAM type: YTN; PAM sequence: TTT
atggctgcatagtattccat

SEQ ID NO: 352662 - DNA, 20 bp, Artificial Sequence
  Description of Artificial Sequence: Synthetic oligonucleotide
  Target: LAMA2; (+) strand; PAM type: YTN; PAM sequence: TTA
tggctgcatagtattccatg

SEQ ID NO: 352663 - DNA, 20 bp, Artificial Sequence
  Description of Artificial Sequence: Synthetic oligonucleotide
  Target: LAMA2; (+) strand; PAM type: YTN; PAM sequence: CTG
catagtattccatggtgtat

SEQ ID NO: 352664 - DNA, 20 bp, Artificial Sequence
  Description of Artificial Sequence: Synthetic oligonucleotide
  Target: LAMA2; (+) strand; PAM type: YTN; PAM sequence: TTC
catggtgtataagtgccaca

SEQ ID NO: 352665 - DNA, 20 bp, Artificial Sequence
  Description of Artificial Sequence: Synthetic oligonucleotide
  Target: LAMA2; (+) strand; PAM type: YTN; PAM sequence: TTT
tcttaatccagtctatcatt

SEQ ID NO: 352666 - DNA, 20 bp, Artificial Sequence
  Description of Artificial Sequence: Synthetic oligonucleotide
  Target: LAMA2; (+) strand; PAM type: YTN; PAM sequence: TTT
cttaatccagtctatcattg

SEQ ID NO: 352667 - DNA, 20 bp, Artificial Sequence
  Description of Artificial Sequence: Synthetic oligonucleotide
  Target: LAMA2; (+) strand; PAM type: YTN; PAM sequence: TTC
ttaatccagtctatcattgt

SEQ ID NO: 352668 - DNA, 20 bp, Artificial Sequence
  Description of Artificial Sequence: Synthetic oligonucleotide
  Target: LAMA2; (+) strand; PAM type: YTN; PAM sequence: CTT
aatccagtctatcattgttg

SEQ ID NO: 352669 - DNA, 20 bp, Artificial Sequence
  Description of Artificial Sequence: Synthetic oligonucleotide
  Target: LAMA2; (+) strand; PAM type: YTN; PAM sequence: TTA
atccagtctatcattgttgg

SEQ ID NO: 352670 - DNA, 20 bp, Artificial Sequence
  Description of Artificial Sequence: Synthetic oligonucleotide
  Target: LAMA2; (+) strand; PAM type: YTN; PAM sequence: CTA
tcattgttggacatttgggt

SEQ ID NO: 352671 - DNA, 20 bp, Artificial Sequence
  Description of Artificial Sequence: Synthetic oligonucleotide
  Target: LAMA2; (+) strand; PAM type: YTN; PAM sequence: TTG
ttggacatttgggttggttc

SEQ ID NO: 352672 - DNA, 20 bp, Artificial Sequence
  Description of Artificial Sequence: Synthetic oligonucleotide
  Target: LAMA2; (+) strand; PAM type: YTN; PAM sequence: TTG
gacatttgggttggttccaa

SEQ ID NO: 352673 - DNA, 20 bp, Artificial Sequence
  Description of Artificial Sequence: Synthetic oligonucleotide
  Target: LAMA2; (+) strand; PAM type: YTN; PAM sequence: TTT
gggttggttccaagtctttg

SEQ ID NO: 352674 - DNA, 20 bp, Artificial Sequence
  Description of Artificial Sequence: Synthetic oligonucleotide
  Target: LAMA2; (+) strand; PAM type: YTN; PAM sequence: TTG
ggttggttccaagtctttgc

SEQ ID NO: 352675 - DNA, 20 bp, Artificial Sequence
  Description of Artificial Sequence: Synthetic oligonucleotide
  Target: LAMA2; (+) strand; PAM type: YTN; PAM sequence: TTG
gttccaagtctttgctattg

SEQ ID NO: 352676 - DNA, 20 bp, Artificial Sequence
  Description of Artificial Sequence: Synthetic oligonucleotide
  Target: LAMA2; (+) strand; PAM type: YTN; PAM sequence: TTC
caagtctttgctattgtgga

SEQ ID NO: 352677 - DNA, 20 bp, Artificial Sequence
  Description of Artificial Sequence: Synthetic oligonucleotide
  Target: LAMA2; (+) strand; PAM type: YTN; PAM sequence: CTT
tgctattgtggataatgccg

SEQ ID NO: 352678 - DNA, 20 bp, Artificial Sequence
  Description of Artificial Sequence: Synthetic oligonucleotide
  Target: LAMA2; (+) strand; PAM type: YTN; PAM sequence: TTT
gctattgtggataatgccgc

SEQ ID NO: 352679 - DNA, 20 bp, Artificial Sequence
  Description of Artificial Sequence: Synthetic oligonucleotide
  Target: LAMA2; (+) strand; PAM type: YTN; PAM sequence: TTG
ctattgtggataatgccgca

SEQ ID NO: 352680 - DNA, 20 bp, Artificial Sequence
  Description of Artificial Sequence: Synthetic oligonucleotide
  Target: LAMA2; (+) strand; PAM type: YTN; PAM sequence: CTA
ttgtggataatgccgcaata

SEQ ID NO: 352681 - DNA, 20 bp, Artificial Sequence
  Description of Artificial Sequence: Synthetic oligonucleotide
  Target: LAMA2; (+) strand; PAM type: YTN; PAM sequence: TTG
tggataatgccgcaataaac

SEQ ID NO: 352682 - DNA, 20 bp, Artificial Sequence
  Description of Artificial Sequence: Synthetic oligonucleotide
  Target: LAMA2; (+) strand; PAM type: YTN; PAM sequence: CTT
catagcagcatgatttacag

SEQ ID NO: 352683 - DNA, 20 bp, Artificial Sequence
  Description of Artificial Sequence: Synthetic oligonucleotide
  Target: LAMA2; (+) strand; PAM type: YTN; PAM sequence: TTC
atagcagcatgatttacagt

SEQ ID NO: 352684 - DNA, 20 bp, Artificial Sequence
  Description of Artificial Sequence: Synthetic oligonucleotide
  Target: LAMA2; (+) strand; PAM type: YTN; PAM sequence: TTT
acagtcctttgggtatatac

SEQ ID NO: 352685 - DNA, 20 bp, Artificial Sequence
  Description of Artificial Sequence: Synthetic oligonucleotide
  Target: LAMA2; (+) strand; PAM type: YTN; PAM sequence: TTA
cagtcctttgggtatatacc

SEQ ID NO: 352686 - DNA, 20 bp, Artificial Sequence
  Description of Artificial Sequence: Synthetic oligonucleotide
  Target: LAMA2; (+) strand; PAM type: YTN; PAM sequence: CTT
tgggtatatacccagtaatg

SEQ ID NO: 352687 - DNA, 20 bp, Artificial Sequence
  Description of Artificial Sequence: Synthetic oligonucleotide
  Target: LAMA2; (+) strand; PAM type: YTN; PAM sequence: TTT
gggtatatacccagtaatgg

SEQ ID NO: 352688 - DNA, 20 bp, Artificial Sequence
  Description of Artificial Sequence: Synthetic oligonucleotide
  Target: LAMA2; (+) strand; PAM type: YTN; PAM sequence: TTG
ggtatatacccagtaatggg

SEQ ID NO: 352689 - DNA, 20 bp, Artificial Sequence
  Description of Artificial Sequence: Synthetic oligonucleotide
  Target: LAMA2; (+) strand; PAM type: YTN; PAM sequence: CTG
ggtcaaagggtatttccagt

SEQ ID NO: 352690 - DNA, 20 bp, Artificial Sequence
  Description of Artificial Sequence: Synthetic oligonucleotide
  Target: LAMA2; (+) strand; PAM type: YTN; PAM sequence: TTT
ccagttctagatccctgagg

SEQ ID NO: 352691 - DNA, 20 bp, Artificial Sequence
  Description of Artificial Sequence: Synthetic oligonucleotide
  Target: LAMA2; (+) strand; PAM type: YTN; PAM sequence: TTC
cagttctagatccctgagga

SEQ ID NO: 352692 - DNA, 20 bp, Artificial Sequence
  Description of Artificial Sequence: Synthetic oligonucleotide
  Target: LAMA2; (+) strand; PAM type: YTN; PAM sequence: TTC
tagatccctgaggaatggcc

SEQ ID NO: 352693 - DNA, 20 bp, Artificial Sequence
  Description of Artificial Sequence: Synthetic oligonucleotide
  Target: LAMA2; (+) strand; PAM type: YTN; PAM sequence: CTA
gatccctgaggaatggccac

SEQ ID NO: 352694 - DNA, 20 bp, Artificial Sequence
  Description of Artificial Sequence: Synthetic oligonucleotide
  Target: LAMA2; (+) strand; PAM type: YTN; PAM sequence: CTG
aggaatggccacactgactt

SEQ ID NO: 352695 - DNA, 20 bp, Artificial Sequence
  Description of Artificial Sequence: Synthetic oligonucleotide
  Target: LAMA2; (+) strand; PAM type: YTN; PAM sequence: CTG
acttccacaatggttgaact

SEQ ID NO: 352696 - DNA, 20 bp, Artificial Sequence
  Description of Artificial Sequence: Synthetic oligonucleotide
  Target: LAMA2; (+) strand; PAM type: YTN; PAM sequence: CTT
ccacaatggttgaactagtt

SEQ ID NO: 352697 - DNA, 20 bp, Artificial Sequence
  Description of Artificial Sequence: Synthetic oligonucleotide
  Target: LAMA2; (+) strand; PAM type: YTN; PAM sequence: TTC
cacaatggttgaactagttt

SEQ ID NO: 352698 - DNA, 20 bp, Artificial Sequence
  Description of Artificial Sequence: Synthetic oligonucleotide
  Target: LAMA2; (+) strand; PAM type: YTN; PAM sequence: TTG
aactagtttacagtcccacc

SEQ ID NO: 352699 - DNA, 20 bp, Artificial Sequence
  Description of Artificial Sequence: Synthetic oligonucleotide
  Target: LAMA2; (+) strand; PAM type: YTN; PAM sequence: CTA
gtttacagtcccaccaacag

SEQ ID NO: 352700 - DNA, 20 bp, Artificial Sequence
  Description of Artificial Sequence: Synthetic oligonucleotide
  Target: LAMA2; (+) strand; PAM type: YTN; PAM sequence: TTT
acagtcccaccaacagtgtg

SEQ ID NO: 352701 - DNA, 20 bp, Artificial Sequence
  Description of Artificial Sequence: Synthetic oligonucleotide
  Target: LAMA2; (+) strand; PAM type: YTN; PAM sequence: TTA
cagtcccaccaacagtgtgt

SEQ ID NO: 352702 - DNA, 20 bp, Artificial Sequence
  Description of Artificial Sequence: Synthetic oligonucleotide
  Target: LAMA2; (+) strand; PAM type: YTN; PAM sequence: TTC
ctatttctccacatcctctc

SEQ ID NO: 352703 - DNA, 20 bp, Artificial Sequence
  Description of Artificial Sequence: Synthetic oligonucleotide
  Target: LAMA2; (+) strand; PAM type: YTN; PAM sequence: CTA
tttctccacatcctctccag

SEQ ID NO: 352704 - DNA, 20 bp, Artificial Sequence
  Description of Artificial Sequence: Synthetic oligonucleotide
  Target: LAMA2; (+) strand; PAM type: YTN; PAM sequence: TTT
ctccacatcctctccagcac

SEQ ID NO: 352705 - DNA, 20 bp, Artificial Sequence
  Description of Artificial Sequence: Synthetic oligonucleotide
  Target: LAMA2; (+) strand; PAM type: YTN; PAM sequence: TTC
tccacatcctctccagcacc

SEQ ID NO: 352706 - DNA, 20 bp, Artificial Sequence
  Description of Artificial Sequence: Synthetic oligonucleotide
  Target: LAMA2; (+) strand; PAM type: YTN; PAM sequence: CTC
cacatcctctccagcacctg

SEQ ID NO: 352707 - DNA, 20 bp, Artificial Sequence
  Description of Artificial Sequence: Synthetic oligonucleotide
  Target: LAMA2; (+) strand; PAM type: YTN; PAM sequence: CTC
tccagcacctgttgtttcct

SEQ ID NO: 352708 - DNA, 20 bp, Artificial Sequence
  Description of Artificial Sequence: Synthetic oligonucleotide
  Target: LAMA2; (+) strand; PAM type: YTN; PAM sequence: CTC
cagcacctgttgtttcctga

SEQ ID NO: 352709 - DNA, 20 bp, Artificial Sequence
  Description of Artificial Sequence: Synthetic oligonucleotide
  Target: LAMA2; (+) strand; PAM type: YTN; PAM sequence: CTG
ttgtttcctgactttttaat

SEQ ID NO: 352710 - DNA, 20 bp, Artificial Sequence
  Description of Artificial Sequence: Synthetic oligonucleotide
  Target: LAMA2; (+) strand; PAM type: YTN; PAM sequence: TTG
tttcctgactttttaatgat

SEQ ID NO: 352711 - DNA, 20 bp, Artificial Sequence
  Description of Artificial Sequence: Synthetic oligonucleotide
  Target: LAMA2; (+) strand; PAM type: YTN; PAM sequence: TTT
cctgactttttaatgattgc

SEQ ID NO: 352712 - DNA, 20 bp, Artificial Sequence
  Description of Artificial Sequence: Synthetic oligonucleotide
  Target: LAMA2; (+) strand; PAM type: YTN; PAM sequence: TTC
ctgactttttaatgattgcc

SEQ ID NO: 352713 - DNA, 20 bp, Artificial Sequence
  Description of Artificial Sequence: Synthetic oligonucleotide
  Target: LAMA2; (+) strand; PAM type: YTN; PAM sequence: CTG
actttttaatgattgccatt

SEQ ID NO: 352714 - DNA, 20 bp, Artificial Sequence
  Description of Artificial Sequence: Synthetic oligonucleotide
  Target: LAMA2; (+) strand; PAM type: YTN; PAM sequence: CTT
tttaatgattgccattctaa

SEQ ID NO: 352715 - DNA, 20 bp, Artificial Sequence
  Description of Artificial Sequence: Synthetic oligonucleotide
  Target: LAMA2; (+) strand; PAM type: YTN; PAM sequence: TTT
ttaatgattgccattctaac

SEQ ID NO: 352716 - DNA, 20 bp, Artificial Sequence
  Description of Artificial Sequence: Synthetic oligonucleotide
  Target: LAMA2; (+) strand; PAM type: YTN; PAM sequence: TTT
taatgattgccattctaact

SEQ ID NO: 352717 - DNA, 20 bp, Artificial Sequence
  Description of Artificial Sequence: Synthetic oligonucleotide
  Target: LAMA2; (+) strand; PAM type: YTN; PAM sequence: TTT
aatgattgccattctaactg

SEQ ID NO: 352718 - DNA, 20 bp, Artificial Sequence
  Description of Artificial Sequence: Synthetic oligonucleotide
  Target: LAMA2; (+) strand; PAM type: YTN; PAM sequence: TTA
atgattgccattctaactgg

SEQ ID NO: 352719 - DNA, 20 bp, Artificial Sequence
  Description of Artificial Sequence: Synthetic oligonucleotide
  Target: LAMA2; (+) strand; PAM type: YTN; PAM sequence: TTG
ccattctaactggtgtgaga

SEQ ID NO: 352720 - DNA, 20 bp, Artificial Sequence
  Description of Artificial Sequence: Synthetic oligonucleotide
  Target: LAMA2; (+) strand; PAM type: YTN; PAM sequence: TTC
taactggtgtgagatggtat

SEQ ID NO: 352721 - DNA, 20 bp, Artificial Sequence
  Description of Artificial Sequence: Synthetic oligonucleotide
  Target: LAMA2; (+) strand; PAM type: YTN; PAM sequence: CTA
actggtgtgagatggtatct

SEQ ID NO: 352722 - DNA, 20 bp, Artificial Sequence
  Description of Artificial Sequence: Synthetic oligonucleotide
  Target: LAMA2; (+) strand; PAM type: YTN; PAM sequence: CTG
gtgtgagatggtatctcatt

SEQ ID NO: 352723 - DNA, 20 bp, Artificial Sequence
  Description of Artificial Sequence: Synthetic oligonucleotide
  Target: LAMA2; (+) strand; PAM type: YTN; PAM sequence: CTC
attgtggttttgatttgcat

SEQ ID NO: 352724 - DNA, 20 bp, Artificial Sequence
  Description of Artificial Sequence: Synthetic oligonucleotide
  Target: LAMA2; (+) strand; PAM type: YTN; PAM sequence: TTG
tggttttgatttgcatttct

SEQ ID NO: 352725 - DNA, 20 bp, Artificial Sequence
  Description of Artificial Sequence: Synthetic oligonucleotide
  Target: LAMA2; (+) strand; PAM type: YTN; PAM sequence: TTT
tgatttgcatttctctgatg

SEQ ID NO: 352726 - DNA, 20 bp, Artificial Sequence
  Description of Artificial Sequence: Synthetic oligonucleotide
  Target: LAMA2; (+) strand; PAM type: YTN; PAM sequence: TTT
gatttgcatttctctgatgg

SEQ ID NO: 352727 - DNA, 20 bp, Artificial Sequence
  Description of Artificial Sequence: Synthetic oligonucleotide
  Target: LAMA2; (+) strand; PAM type: YTN; PAM sequence: TTG
atttgcatttctctgatggc

SEQ ID NO: 352728 - DNA, 20 bp, Artificial Sequence
  Description of Artificial Sequence: Synthetic oligonucleotide
  Target: LAMA2; (+) strand; PAM type: YTN; PAM sequence: TTT
gcatttctctgatggccagt

SEQ ID NO: 352729 - DNA, 20 bp, Artificial Sequence
  Description of Artificial Sequence: Synthetic oligonucleotide
  Target: LAMA2; (+) strand; PAM type: YTN; PAM sequence: TTG
catttctctgatggccagtg

SEQ ID NO: 352730 - DNA, 20 bp, Artificial Sequence
  Description of Artificial Sequence: Synthetic oligonucleotide
  Target: LAMA2; (+) strand; PAM type: YTN; PAM sequence: TTT
ctctgatggccagtgatgat

SEQ ID NO: 352731 - DNA, 20 bp, Artificial Sequence
  Description of Artificial Sequence: Synthetic oligonucleotide
  Target: LAMA2; (+) strand; PAM type: YTN; PAM sequence: TTC
tctgatggccagtgatgatg

SEQ ID NO: 352732 - DNA, 20 bp, Artificial Sequence
  Description of Artificial Sequence: Synthetic oligonucleotide
  Target: LAMA2; (+) strand; PAM type: YTN; PAM sequence: CTC
tgatggccagtgatgatgag

SEQ ID NO: 352733 - DNA, 20 bp, Artificial Sequence
  Description of Artificial Sequence: Synthetic oligonucleotide
  Target: LAMA2; (+) strand; PAM type: YTN; PAM sequence: CTG
atggccagtgatgatgagca

SEQ ID NO: 352734 - DNA, 20 bp, Artificial Sequence
  Description of Artificial Sequence: Synthetic oligonucleotide
  Target: LAMA2; (+) strand; PAM type: YTN; PAM sequence: TTT
tttcatgtgttttttggctg

SEQ ID NO: 352735 - DNA, 20 bp, Artificial Sequence
  Description of Artificial Sequence: Synthetic oligonucleotide
  Target: LAMA2; (+) strand; PAM type: YTN; PAM sequence: TTT
ttcatgtgttttttggctgc

SEQ ID NO: 352736 - DNA, 20 bp, Artificial Sequence
  Description of Artificial Sequence: Synthetic oligonucleotide
  Target: LAMA2; (+) strand; PAM type: YTN; PAM sequence: TTT
tcatgtgttttttggctgca

SEQ ID NO: 352737 - DNA, 20 bp, Artificial Sequence
  Description of Artificial Sequence: Synthetic oligonucleotide
  Target: LAMA2; (+) strand; PAM type: YTN; PAM sequence: TTT
catgtgttttttggctgcat

SEQ ID NO: 352738 - DNA, 20 bp, Artificial Sequence
  Description of Artificial Sequence: Synthetic oligonucleotide
  Target: LAMA2; (+) strand; PAM type: YTN; PAM sequence: TTC
atgtgttttttggctgcata

SEQ ID NO: 352739 - DNA, 20 bp, Artificial Sequence
  Description of Artificial Sequence: Synthetic oligonucleotide
  Target: LAMA2; (+) strand; PAM type: YTN; PAM sequence: TTT
tttggctgcataaatgtctt

SEQ ID NO: 352740 - DNA, 20 bp, Artificial Sequence
  Description of Artificial Sequence: Synthetic oligonucleotide
  Target: LAMA2; (+) strand; PAM type: YTN; PAM sequence: TTT
ttggctgcataaatgtcttc

SEQ ID NO: 352741 - DNA, 20 bp, Artificial Sequence
  Description of Artificial Sequence: Synthetic oligonucleotide
  Target: LAMA2; (+) strand; PAM type: YTN; PAM sequence: TTT
tggctgcataaatgtcttct

SEQ ID NO: 352742 - DNA, 20 bp, Artificial Sequence
  Description of Artificial Sequence: Synthetic oligonucleotide
  Target: LAMA2; (+) strand; PAM type: YTN; PAM sequence: TTT
ggctgcataaatgtcttctt

SEQ ID NO: 352743 - DNA, 20 bp, Artificial Sequence
  Description of Artificial Sequence: Synthetic oligonucleotide
  Target: LAMA2; (+) strand; PAM type: YTN; PAM sequence: TTG
gctgcataaatgtcttcttt

SEQ ID NO: 352744 - DNA, 20 bp, Artificial Sequence
  Description of Artificial Sequence: Synthetic oligonucleotide
  Target: LAMA2; (+) strand; PAM type: YTN; PAM sequence: CTG
cataaatgtcttcttttgag

SEQ ID NO: 352745 - DNA, 20 bp, Artificial Sequence
  Description of Artificial Sequence: Synthetic oligonucleotide
  Target: LAMA2; (+) strand; PAM type: YTN; PAM sequence: CTT
cttttgagaagtgtctgttc

SEQ ID NO: 352746 - DNA, 20 bp, Artificial Sequence
  Description of Artificial Sequence: Synthetic oligonucleotide
  Target: LAMA2; (+) strand; PAM type: YTN; PAM sequence: TTC
ttttgagaagtgtctgttca

SEQ ID NO: 352747 - DNA, 20 bp, Artificial Sequence
  Description of Artificial Sequence: Synthetic oligonucleotide
  Target: LAMA2; (+) strand; PAM type: YTN; PAM sequence: CTT
ttgagaagtgtctgttcatg

SEQ ID NO: 352748 - DNA, 20 bp, Artificial Sequence
  Description of Artificial Sequence: Synthetic oligonucleotide
  Target: LAMA2; (+) strand; PAM type: YTN; PAM sequence: TTT
tgagaagtgtctgttcatgt

SEQ ID NO: 352749 - DNA, 20 bp, Artificial Sequence
  Description of Artificial Sequence: Synthetic oligonucleotide
  Target: LAMA2; (+) strand; PAM type: YTN; PAM sequence: TTT
gagaagtgtctgttcatgtc

SEQ ID NO: 352750 - DNA, 20 bp, Artificial Sequence
  Description of Artificial Sequence: Synthetic oligonucleotide
  Target: LAMA2; (+) strand; PAM type: YTN; PAM sequence: TTG
agaagtgtctgttcatgtcc

SEQ ID NO: 352751 - DNA, 20 bp, Artificial Sequence
  Description of Artificial Sequence: Synthetic oligonucleotide
  Target: LAMA2; (+) strand; PAM type: YTN; PAM sequence: CTG
ttcatgtccttcgcccactt

SEQ ID NO: 352752 - DNA, 20 bp, Artificial Sequence
  Description of Artificial Sequence: Synthetic oligonucleotide
  Target: LAMA2; (+) strand; PAM type: YTN; PAM sequence: TTC
atgtccttcgcccacttgtt

SEQ ID NO: 352753 - DNA, 20 bp, Artificial Sequence
  Description of Artificial Sequence: Synthetic oligonucleotide
  Target: LAMA2; (+) strand; PAM type: YTN; PAM sequence: CTT
cgcccacttgttgatggggt

SEQ ID NO: 352754 - DNA, 20 bp, Artificial Sequence
  Description of Artificial Sequence: Synthetic oligonucleotide
  Target: LAMA2; (+) strand; PAM type: YTN; PAM sequence: TTC
gcccacttgttgatggggtt

SEQ ID NO: 352755 - DNA, 20 bp, Artificial Sequence
  Description of Artificial Sequence: Synthetic oligonucleotide
  Target: LAMA2; (+) strand; PAM type: YTN; PAM sequence: CTT
gttgatggggttgtttgttt

SEQ ID NO: 352756 - DNA, 20 bp, Artificial Sequence
  Description of Artificial Sequence: Synthetic oligonucleotide
  Target: LAMA2; (+) strand; PAM type: YTN; PAM sequence: TTG
ttgatggggttgtttgtttt

SEQ ID NO: 352757 - DNA, 20 bp, Artificial Sequence
  Description of Artificial Sequence: Synthetic oligonucleotide
  Target: LAMA2; (+) strand; PAM type: YTN; PAM sequence: TTG
atggggttgtttgttttttt

SEQ ID NO: 352758 - DNA, 20 bp, Artificial Sequence
  Description of Artificial Sequence: Synthetic oligonucleotide
  Target: LAMA2; (+) strand; PAM type: YTN; PAM sequence: TTG
tttgtttttttcttgtaaat

SEQ ID NO: 352759 - DNA, 20 bp, Artificial Sequence
  Description of Artificial Sequence: Synthetic oligonucleotide
  Target: LAMA2; (+) strand; PAM type: YTN; PAM sequence: TTT
gtttttttcttgtaaatttg

SEQ ID NO: 352760 - DNA, 20 bp, Artificial Sequence
  Description of Artificial Sequence: Synthetic oligonucleotide
  Target: LAMA2; (+) strand; PAM type: YTN; PAM sequence: TTG
tttttttcttgtaaatttgt

SEQ ID NO: 352761 - DNA, 20 bp, Artificial Sequence
  Description of Artificial Sequence: Synthetic oligonucleotide
  Target: LAMA2; (+) strand; PAM type: YTN; PAM sequence: TTT
ttttcttgtaaatttgtttg

SEQ ID NO: 352762 - DNA, 20 bp, Artificial Sequence
  Description of Artificial Sequence: Synthetic oligonucleotide
  Target: LAMA2; (+) strand; PAM type: YTN; PAM sequence: TTT
tttcttgtaaatttgtttga

SEQ ID NO: 352763 - DNA, 20 bp, Artificial Sequence
  Description of Artificial Sequence: Synthetic oligonucleotide
  Target: LAMA2; (+) strand; PAM type: YTN; PAM sequence: TTT
ttcttgtaaatttgtttgag

SEQ ID NO: 352764 - DNA, 20 bp, Artificial Sequence
  Description of Artificial Sequence: Synthetic oligonucleotide
  Target: LAMA2; (+) strand; PAM type: YTN; PAM sequence: TTT
tcttgtaaatttgtttgagt

SEQ ID NO: 352765 - DNA, 20 bp, Artificial Sequence
  Description of Artificial Sequence: Synthetic oligonucleotide
  Target: LAMA2; (+) strand; PAM type: YTN; PAM sequence: TTT
cttgtaaatttgtttgagtt

SEQ ID NO: 352766 - DNA, 20 bp, Artificial Sequence
  Description of Artificial Sequence: Synthetic oligonucleotide
  Target: LAMA2; (+) strand; PAM type: YTN; PAM sequence: TTC
ttgtaaatttgtttgagttc

SEQ ID NO: 352767 - DNA, 20 bp, Artificial Sequence
  Description of Artificial Sequence: Synthetic oligonucleotide
  Target: LAMA2; (+) strand; PAM type: YTN; PAM sequence: CTT
gtaaatttgtttgagttcat

SEQ ID NO: 352768 - DNA, 20 bp, Artificial Sequence
  Description of Artificial Sequence: Synthetic oligonucleotide
  Target: LAMA2; (+) strand; PAM type: YTN; PAM sequence: TTG
taaatttgtttgagttcatt

SEQ ID NO: 352769 - DNA, 20 bp, Artificial Sequence
  Description of Artificial Sequence: Synthetic oligonucleotide
  Target: LAMA2; (+) strand; PAM type: YTN; PAM sequence: TTT
gtttgagttcattgtagatt

SEQ ID NO: 352770 - DNA, 20 bp, Artificial Sequence
  Description of Artificial Sequence: Synthetic oligonucleotide
  Target: LAMA2; (+) strand; PAM type: YTN; PAM sequence: TTG
tttgagttcattgtagattc

SEQ ID NO: 352771 - DNA, 20 bp, Artificial Sequence
  Description of Artificial Sequence: Synthetic oligonucleotide
  Target: LAMA2; (+) strand; PAM type: YTN; PAM sequence: TTT
gagttcattgtagattctgg

SEQ ID NO: 352772 - DNA, 20 bp, Artificial Sequence
  Description of Artificial Sequence: Synthetic oligonucleotide
  Target: LAMA2; (+) strand; PAM type: YTN; PAM sequence: TTG
agttcattgtagattctgga

SEQ ID NO: 352773 - DNA, 20 bp, Artificial Sequence
  Description of Artificial Sequence: Synthetic oligonucleotide
  Target: LAMA2; (+) strand; PAM type: YTN; PAM sequence: TTC
attgtagattctggatatta

SEQ ID NO: 352774 - DNA, 20 bp, Artificial Sequence
  Description of Artificial Sequence: Synthetic oligonucleotide
  Target: LAMA2; (+) strand; PAM type: YTN; PAM sequence: TTG
tagattctggatattagccc

SEQ ID NO: 352775 - DNA, 20 bp, Artificial Sequence
  Description of Artificial Sequence: Synthetic oligonucleotide
  Target: LAMA2; (+) strand; PAM type: YTN; PAM sequence: TTC
tggatattagccctttgtca

SEQ ID NO: 352776 - DNA, 20 bp, Artificial Sequence
  Description of Artificial Sequence: Synthetic oligonucleotide
  Target: LAMA2; (+) strand; PAM type: YTN; PAM sequence: CTG
gatattagccctttgtcaga

SEQ ID NO: 352777 - DNA, 20 bp, Artificial Sequence
  Description of Artificial Sequence: Synthetic oligonucleotide
  Target: LAMA2; (+) strand; PAM type: YTN; PAM sequence: TTA
gccctttgtcagatgagtag

SEQ ID NO: 352778 - DNA, 20 bp, Artificial Sequence
  Description of Artificial Sequence: Synthetic oligonucleotide
  Target: LAMA2; (+) strand; PAM type: YTN; PAM sequence: CTT
tgtcagatgagtaggttgca

SEQ ID NO: 352779 - DNA, 20 bp, Artificial Sequence
  Description of Artificial Sequence: Synthetic oligonucleotide
  Target: LAMA2; (+) strand; PAM type: YTN; PAM sequence: TTT
gtcagatgagtaggttgcaa

SEQ ID NO: 352780 - DNA, 20 bp, Artificial Sequence
  Description of Artificial Sequence: Synthetic oligonucleotide
  Target: LAMA2; (+) strand; PAM type: YTN; PAM sequence: TTG
tcagatgagtaggttgcaaa

SEQ ID NO: 352781 - DNA, 20 bp, Artificial Sequence
  Description of Artificial Sequence: Synthetic oligonucleotide
  Target: LAMA2; (+) strand; PAM type: YTN; PAM sequence: TTG
caaaaattttctcccatttt

SEQ ID NO: 352782 - DNA, 20 bp, Artificial Sequence
  Description of Artificial Sequence: Synthetic oligonucleotide
  Target: LAMA2; (+) strand; PAM type: YTN; PAM sequence: TTT
tctcccattttgtaggttgc

SEQ ID NO: 352783 - DNA, 20 bp, Artificial Sequence
  Description of Artificial Sequence: Synthetic oligonucleotide
  Target: LAMA2; (+) strand; PAM type: YTN; PAM sequence: TTT
ctcccattttgtaggttgcc

SEQ ID NO: 352784 - DNA, 20 bp, Artificial Sequence
  Description of Artificial Sequence: Synthetic oligonucleotide
  Target: LAMA2; (+) strand; PAM type: YTN; PAM sequence: TTC
tcccattttgtaggttgcct

SEQ ID NO: 352785 - DNA, 20 bp, Artificial Sequence
  Description of Artificial Sequence: Synthetic oligonucleotide
  Target: LAMA2; (+) strand; PAM type: YTN; PAM sequence: CTC
ccattttgtaggttgcctgt

SEQ ID NO: 352786 - DNA, 20 bp, Artificial Sequence
  Description of Artificial Sequence: Synthetic oligonucleotide
  Target: LAMA2; (+) strand; PAM type: YTN; PAM sequence: TTT
tgtaggttgcctgttcactc

SEQ ID NO: 352787 - DNA, 20 bp, Artificial Sequence
  Description of Artificial Sequence: Synthetic oligonucleotide
  Target: LAMA2; (+) strand; PAM type: YTN; PAM sequence: TTT
gtaggttgcctgttcactct

SEQ ID NO: 352788 - DNA, 20 bp, Artificial Sequence
  Description of Artificial Sequence: Synthetic oligonucleotide
  Target: LAMA2; (+) strand; PAM type: YTN; PAM sequence: TTG
taggttgcctgttcactctg

SEQ ID NO: 352789 - DNA, 20 bp, Artificial Sequence
  Description of Artificial Sequence: Synthetic oligonucleotide
  Target: LAMA2; (+) strand; PAM type: YTN; PAM sequence: TTG
cctgttcactctgatggtag

SEQ ID NO: 352790 - DNA, 20 bp, Artificial Sequence
  Description of Artificial Sequence: Synthetic oligonucleotide
  Target: LAMA2; (+) strand; PAM type: YTN; PAM sequence: CTG
ttcactctgatggtagtttc

SEQ ID NO: 352791 - DNA, 20 bp, Artificial Sequence
  Description of Artificial Sequence: Synthetic oligonucleotide
  Target: LAMA2; (+) strand; PAM type: YTN; PAM sequence: TTC
actctgatggtagtttcttt

SEQ ID NO: 352792 - DNA, 20 bp, Artificial Sequence
  Description of Artificial Sequence: Synthetic oligonucleotide
  Target: LAMA2; (+) strand; PAM type: YTN; PAM sequence: CTC
tgatggtagtttcttttgct

SEQ ID NO: 352793 - DNA, 20 bp, Artificial Sequence
  Description of Artificial Sequence: Synthetic oligonucleotide
  Target: LAMA2; (+) strand; PAM type: YTN; PAM sequence: CTG
atggtagtttcttttgctgt

SEQ ID NO: 352794 - DNA, 20 bp, Artificial Sequence
  Description of Artificial Sequence: Synthetic oligonucleotide
  Target: LAMA2; (+) strand; PAM type: YTN; PAM sequence: TTT
cttttgctgtgcagaagctc

SEQ ID NO: 352795 - DNA, 20 bp, Artificial Sequence
  Description of Artificial Sequence: Synthetic oligonucleotide
  Target: LAMA2; (+) strand; PAM type: YTN; PAM sequence: TTC
ttttgctgtgcagaagctct

SEQ ID NO: 352796 - DNA, 20 bp, Artificial Sequence
  Description of Artificial Sequence: Synthetic oligonucleotide
  Target: LAMA2; (+) strand; PAM type: YTN; PAM sequence: CTT
ttgctgtgcagaagctcttt

SEQ ID NO: 352797 - DNA, 20 bp, Artificial Sequence
  Description of Artificial Sequence: Synthetic oligonucleotide
  Target: LAMA2; (+) strand; PAM type: YTN; PAM sequence: TTT
tgctgtgcagaagctcttta

SEQ ID NO: 352798 - DNA, 20 bp, Artificial Sequence
  Description of Artificial Sequence: Synthetic oligonucleotide
  Target: LAMA2; (+) strand; PAM type: YTN; PAM sequence: TTT
gctgtgcagaagctctttag

SEQ ID NO: 352799 - DNA, 20 bp, Artificial Sequence
  Description of Artificial Sequence: Synthetic oligonucleotide
  Target: LAMA2; (+) strand; PAM type: YTN; PAM sequence: TTG
ctgtgcagaagctctttagt

SEQ ID NO: 352800 - DNA, 20 bp, Artificial Sequence
  Description of Artificial Sequence: Synthetic oligonucleotide
  Target: LAMA2; (+) strand; PAM type: YTN; PAM sequence: CTG
tgcagaagctctttagttta

SEQ ID NO: 352801 - DNA, 20 bp, Artificial Sequence
  Description of Artificial Sequence: Synthetic oligonucleotide
  Target: LAMA2; (+) strand; PAM type: YTN; PAM sequence: CTC
tttagtttaattagatccca

SEQ ID NO: 352802 - DNA, 20 bp, Artificial Sequence
  Description of Artificial Sequence: Synthetic oligonucleotide
  Target: LAMA2; (+) strand; PAM type: YTN; PAM sequence: CTT
tagtttaattagatcccatt

SEQ ID NO: 352803 - DNA, 20 bp, Artificial Sequence
  Description of Artificial Sequence: Synthetic oligonucleotide
  Target: LAMA2; (+) strand; PAM type: YTN; PAM sequence: TTT
agtttaattagatcccattt

SEQ ID NO: 352804 - DNA, 20 bp, Artificial Sequence
  Description of Artificial Sequence: Synthetic oligonucleotide
  Target: LAMA2; (+) strand; PAM type: YTN; PAM sequence: TTA
gtttaattagatcccatttg

SEQ ID NO: 352805 - DNA, 20 bp, Artificial Sequence
  Description of Artificial Sequence: Synthetic oligonucleotide
  Target: LAMA2; (+) strand; PAM type: YTN; PAM sequence: TTT
aattagatcccatttgtcaa

SEQ ID NO: 352806 - DNA, 20 bp, Artificial Sequence
  Description of Artificial Sequence: Synthetic oligonucleotide
  Target: LAMA2; (+) strand; PAM type: YTN; PAM sequence: TTA
attagatcccatttgtcaat

SEQ ID NO: 352807 - DNA, 20 bp, Artificial Sequence
  Description of Artificial Sequence: Synthetic oligonucleotide
  Target: LAMA2; (+) strand; PAM type: YTN; PAM sequence: TTA
gatcccatttgtcaattttg

SEQ ID NO: 352808 - DNA, 20 bp, Artificial Sequence
  Description of Artificial Sequence: Synthetic oligonucleotide
  Target: LAMA2; (+) strand; PAM type: YTN; PAM sequence: TTT
gtcaattttgtcttttgttg

SEQ ID NO: 352809 - DNA, 20 bp, Artificial Sequence
  Description of Artificial Sequence: Synthetic oligonucleotide
  Target: LAMA2; (+) strand; PAM type: YTN; PAM sequence: TTG
tcaattttgtcttttgttgc

SEQ ID NO: 352810 - DNA, 20 bp, Artificial Sequence
  Description of Artificial Sequence: Synthetic oligonucleotide
  Target: LAMA2; (+) strand; PAM type: YTN; PAM sequence: TTT
tgtcttttgttgccattgct

SEQ ID NO: 352811 - DNA, 20 bp, Artificial Sequence
  Description of Artificial Sequence: Synthetic oligonucleotide
  Target: LAMA2; (+) strand; PAM type: YTN; PAM sequence: TTT
gtcttttgttgccattgctt

SEQ ID NO: 352812 - DNA, 20 bp, Artificial Sequence
  Description of Artificial Sequence: Synthetic oligonucleotide
  Target: LAMA2; (+) strand; PAM type: YTN; PAM sequence: TTG
tcttttgttgccattgcttt

SEQ ID NO: 352813 - DNA, 20 bp, Artificial Sequence
  Description of Artificial Sequence: Synthetic oligonucleotide
  Target: LAMA2; (+) strand; PAM type: YTN; PAM sequence: CTT
ttgttgccattgcttttggt

SEQ ID NO: 352814 - DNA, 20 bp, Artificial Sequence
  Description of Artificial Sequence: Synthetic oligonucleotide
  Target: LAMA2; (+) strand; PAM type: YTN; PAM sequence: TTT
tgttgccattgcttttggtg

SEQ ID NO: 352815 - DNA, 20 bp, Artificial Sequence
  Description of Artificial Sequence: Synthetic oligonucleotide
  Target: LAMA2; (+) strand; PAM type: YTN; PAM sequence: TTT
gttgccattgcttttggtgt

SEQ ID NO: 352816 - DNA, 20 bp, Artificial Sequence
  Description of Artificial Sequence: Synthetic oligonucleotide
  Target: LAMA2; (+) strand; PAM type: YTN; PAM sequence: TTG
ttgccattgcttttggtgtt

SEQ ID NO: 352817 - DNA, 20 bp, Artificial Sequence
  Description of Artificial Sequence: Synthetic oligonucleotide
  Target: LAMA2; (+) strand; PAM type: YTN; PAM sequence: TTG
ccattgcttttggtgtttta

SEQ ID NO: 352818 - DNA, 20 bp, Artificial Sequence
  Description of Artificial Sequence: Synthetic oligonucleotide
  Target: LAMA2; (+) strand; PAM type: YTN; PAM sequence: TTG
cttttggtgttttagacatg

SEQ ID NO: 352819 - DNA, 20 bp, Artificial Sequence
  Description of Artificial Sequence: Synthetic oligonucleotide
  Target: LAMA2; (+) strand; PAM type: YTN; PAM sequence: CTT
ttggtgttttagacatgaag

SEQ ID NO: 352820 - DNA, 20 bp, Artificial Sequence
  Description of Artificial Sequence: Synthetic oligonucleotide
  Target: LAMA2; (+) strand; PAM type: YTN; PAM sequence: TTT
tggtgttttagacatgaagt

SEQ ID NO: 352821 - DNA, 20 bp, Artificial Sequence
  Description of Artificial Sequence: Synthetic oligonucleotide
  Target: LAMA2; (+) strand; PAM type: YTN; PAM sequence: TTT
ggtgttttagacatgaagtc

SEQ ID NO: 352822 - DNA, 20 bp, Artificial Sequence
  Description of Artificial Sequence: Synthetic oligonucleotide
  Target: LAMA2; (+) strand; PAM type: YTN; PAM sequence: TTG
gtgttttagacatgaagtcc

SEQ ID NO: 352823 - DNA, 20 bp, Artificial Sequence
  Description of Artificial Sequence: Synthetic oligonucleotide
  Target: LAMA2; (+) strand; PAM type: YTN; PAM sequence: TTT
tagacatgaagtccttgccc

SEQ ID NO: 352824 - DNA, 20 bp, Artificial Sequence
  Description of Artificial Sequence: Synthetic oligonucleotide
  Target: LAMA2; (+) strand; PAM type: YTN; PAM sequence: TTT
agacatgaagtccttgccca

SEQ ID NO: 352825 - DNA, 20 bp, Artificial Sequence
  Description of Artificial Sequence: Synthetic oligonucleotide
  Target: LAMA2; (+) strand; PAM type: YTN; PAM sequence: TTA
gacatgaagtccttgcccat

SEQ ID NO: 352826 - DNA, 20 bp, Artificial Sequence
  Description of Artificial Sequence: Synthetic oligonucleotide
  Target: LAMA2; (+) strand; PAM type: YTN; PAM sequence: CTT
gcccatgcctatgtcctgaa

SEQ ID NO: 352827 - DNA, 20 bp, Artificial Sequence
  Description of Artificial Sequence: Synthetic oligonucleotide
  Target: LAMA2; (+) strand; PAM type: YTN; PAM sequence: TTG
cccatgcctatgtcctgaat

SEQ ID NO: 352828 - DNA, 20 bp, Artificial Sequence
  Description of Artificial Sequence: Synthetic oligonucleotide
  Target: LAMA2; (+) strand; PAM type: YTN; PAM sequence: CTA
tgtcctgaatggtactgcct

SEQ ID NO: 352829 - DNA, 20 bp, Artificial Sequence
  Description of Artificial Sequence: Synthetic oligonucleotide
  Target: LAMA2; (+) strand; PAM type: YTN; PAM sequence: CTG
aatggtactgcctaggtttt

SEQ ID NO: 352830 - DNA, 20 bp, Artificial Sequence
  Description of Artificial Sequence: Synthetic oligonucleotide
  Target: LAMA2; (+) strand; PAM type: YTN; PAM sequence: CTG
cctaggttttcttctagggt

SEQ ID NO: 352831 - DNA, 20 bp, Artificial Sequence
  Description of Artificial Sequence: Synthetic oligonucleotide
  Target: LAMA2; (+) strand; PAM type: YTN; PAM sequence: CTA
ggttttcttctagggttttt

SEQ ID NO: 352832 - DNA, 20 bp, Artificial Sequence
  Description of Artificial Sequence: Synthetic oligonucleotide
  Target: LAMA2; (+) strand; PAM type: YTN; PAM sequence: TTT
tcttctagggtttttatggt

SEQ ID NO: 352833 - DNA, 20 bp, Artificial Sequence
  Description of Artificial Sequence: Synthetic oligonucleotide
  Target: LAMA2; (+) strand; PAM type: YTN; PAM sequence: TTT
cttctagggtttttatggtt

SEQ ID NO: 352834 - DNA, 20 bp, Artificial Sequence
  Description of Artificial Sequence: Synthetic oligonucleotide
  Target: LAMA2; (+) strand; PAM type: YTN; PAM sequence: TTC
ttctagggtttttatggttt

SEQ ID NO: 352835 - DNA, 20 bp, Artificial Sequence
  Description of Artificial Sequence: Synthetic oligonucleotide
  Target: LAMA2; (+) strand; PAM type: YTN; PAM sequence: CTT
ctagggtttttatggtttta

SEQ ID NO: 352836 - DNA, 20 bp, Artificial Sequence
  Description of Artificial Sequence: Synthetic oligonucleotide
  Target: LAMA2; (+) strand; PAM type: YTN; PAM sequence: TTC
tagggtttttatggttttag

SEQ ID NO: 352837 - DNA, 20 bp, Artificial Sequence
  Description of Artificial Sequence: Synthetic oligonucleotide
  Target: LAMA2; (+) strand; PAM type: YTN; PAM sequence: CTA
gggtttttatggttttaggt

SEQ ID NO: 352838 - DNA, 20 bp, Artificial Sequence
  Description of Artificial Sequence: Synthetic oligonucleotide
  Target: LAMA2; (+) strand; PAM type: YTN; PAM sequence: TTT
ttatggttttaggtctaacg

SEQ ID NO: 352839 - DNA, 20 bp, Artificial Sequence
  Description of Artificial Sequence: Synthetic oligonucleotide
  Target: LAMA2; (+) strand; PAM type: YTN; PAM sequence: TTT
tatggttttaggtctaacgt

SEQ ID NO: 352840 - DNA, 20 bp, Artificial Sequence
  Description of Artificial Sequence: Synthetic oligonucleotide
  Target: LAMA2; (+) strand; PAM type: YTN; PAM sequence: TTT
atggttttaggtctaacgtt

SEQ ID NO: 352841 - DNA, 20 bp, Artificial Sequence
  Description of Artificial Sequence: Synthetic oligonucleotide
  Target: LAMA2; (+) strand; PAM type: YTN; PAM sequence: TTA
tggttttaggtctaacgttt

SEQ ID NO: 352842 - DNA, 20 bp, Artificial Sequence
  Description of Artificial Sequence: Synthetic oligonucleotide
  Target: LAMA2; (+) strand; PAM type: YTN; PAM sequence: TTT
taggtctaacgtttaagtct

SEQ ID NO: 352843 - DNA, 20 bp, Artificial Sequence
  Description of Artificial Sequence: Synthetic oligonucleotide
  Target: LAMA2; (+) strand; PAM type: YTN; PAM sequence: TTT
aggtctaacgtttaagtctt

SEQ ID NO: 352844 - DNA, 20 bp, Artificial Sequence
  Description of Artificial Sequence: Synthetic oligonucleotide
  Target: LAMA2; (+) strand; PAM type: YTN; PAM sequence: TTA
ggtctaacgtttaagtcttt

SEQ ID NO: 352845 - DNA, 20 bp, Artificial Sequence
  Description of Artificial Sequence: Synthetic oligonucleotide
  Target: LAMA2; (+) strand; PAM type: YTN; PAM sequence: CTA
acgtttaagtctttaatcca

SEQ ID NO: 352846 - DNA, 20 bp, Artificial Sequence
  Description of Artificial Sequence: Synthetic oligonucleotide
  Target: LAMA2; (+) strand; PAM type: YTN; PAM sequence: TTT
aagtctttaatccatcttga

SEQ ID NO: 352847 - DNA, 20 bp, Artificial Sequence
  Description of Artificial Sequence: Synthetic oligonucleotide
  Target: LAMA2; (+) strand; PAM type: YTN; PAM sequence: TTA
agtctttaatccatcttgaa

SEQ ID NO: 352848 - DNA, 20 bp, Artificial Sequence
  Description of Artificial Sequence: Synthetic oligonucleotide
  Target: LAMA2; (+) strand; PAM type: YTN; PAM sequence: CTT
taatccatcttgaattgatt

SEQ ID NO: 352849 - DNA, 20 bp, Artificial Sequence
  Description of Artificial Sequence: Synthetic oligonucleotide
  Target: LAMA2; (+) strand; PAM type: YTN; PAM sequence: TTT
aatccatcttgaattgattt

SEQ ID NO: 352850 - DNA, 20 bp, Artificial Sequence
  Description of Artificial Sequence: Synthetic oligonucleotide
  Target: LAMA2; (+) strand; PAM type: YTN; PAM sequence: TTA
atccatcttgaattgatttt

SEQ ID NO: 352851 - DNA, 20 bp, Artificial Sequence
  Description of Artificial Sequence: Synthetic oligonucleotide
  Target: LAMA2; (+) strand; PAM type: YTN; PAM sequence: CTT
gaattgatttttgtataagg

SEQ ID NO: 352852 - DNA, 20 bp, Artificial Sequence
  Description of Artificial Sequence: Synthetic oligonucleotide
  Target: LAMA2; (+) strand; PAM type: YTN; PAM sequence: TTG
aattgatttttgtataaggt

SEQ ID NO: 352853 - DNA, 20 bp, Artificial Sequence
  Description of Artificial Sequence: Synthetic oligonucleotide
  Target: LAMA2; (+) strand; PAM type: YTN; PAM sequence: TTG
atttttgtataaggtgtaag

SEQ ID NO: 352854 - DNA, 20 bp, Artificial Sequence
  Description of Artificial Sequence: Synthetic oligonucleotide
  Target: LAMA2; (+) strand; PAM type: YTN; PAM sequence: TTT
ttgtataaggtgtaaggaag

SEQ ID NO: 352855 - DNA, 20 bp, Artificial Sequence
  Description of Artificial Sequence: Synthetic oligonucleotide
  Target: LAMA2; (+) strand; PAM type: YTN; PAM sequence: TTT
tgtataaggtgtaaggaagg

SEQ ID NO: 352856 - DNA, 20 bp, Artificial Sequence
  Description of Artificial Sequence: Synthetic oligonucleotide
  Target: LAMA2; (+) strand; PAM type: YTN; PAM sequence: TTT
gtataaggtgtaaggaaggg

SEQ ID NO: 352857 - DNA, 20 bp, Artificial Sequence
  Description of Artificial Sequence: Synthetic oligonucleotide
  Target: LAMA2; (+) strand; PAM type: YTN; PAM sequence: TTG
tataaggtgtaaggaaggga

SEQ ID NO: 352858 - DNA, 20 bp, Artificial Sequence
  Description of Artificial Sequence: Synthetic oligonucleotide
  Target: LAMA2; (+) strand; PAM type: YTN; PAM sequence: TTT
cagctttctacatatggcta

SEQ ID NO: 352859 - DNA, 20 bp, Artificial Sequence
  Description of Artificial Sequence: Synthetic oligonucleotide
  Target: LAMA2; (+) strand; PAM type: YTN; PAM sequence: TTC
agctttctacatatggctag

SEQ ID NO: 352860 - DNA, 20 bp, Artificial Sequence
  Description of Artificial Sequence: Synthetic oligonucleotide
  Target: LAMA2; (+) strand; PAM type: YTN; PAM sequence: CTT
tctacatatggctagccagt

SEQ ID NO: 352861 - DNA, 20 bp, Artificial Sequence
  Description of Artificial Sequence: Synthetic oligonucleotide
  Target: LAMA2; (+) strand; PAM type: YTN; PAM sequence: TTT
ctacatatggctagccagtt

SEQ ID NO: 352862 - DNA, 20 bp, Artificial Sequence
  Description of Artificial Sequence: Synthetic oligonucleotide
  Target: LAMA2; (+) strand; PAM type: YTN; PAM sequence: TTC
tacatatggctagccagttc

SEQ ID NO: 352863 - DNA, 20 bp, Artificial Sequence
  Description of Artificial Sequence: Synthetic oligonucleotide
  Target: LAMA2; (+) strand; PAM type: YTN; PAM sequence: CTA
catatggctagccagttctc

SEQ ID NO: 352864 - DNA, 20 bp, Artificial Sequence
  Description of Artificial Sequence: Synthetic oligonucleotide
  Target: LAMA2; (+) strand; PAM type: YTN; PAM sequence: CTA
gccagttctcccagcaccat

SEQ ID NO: 352865 - DNA, 20 bp, Artificial Sequence
  Description of Artificial Sequence: Synthetic oligonucleotide
  Target: LAMA2; (+) strand; PAM type: YTN; PAM sequence: TTC
tcccagcaccatttattaaa

SEQ ID NO: 352866 - DNA, 20 bp, Artificial Sequence
  Description of Artificial Sequence: Synthetic oligonucleotide
  Target: LAMA2; (+) strand; PAM type: YTN; PAM sequence: CTC
ccagcaccatttattaaaca

SEQ ID NO: 352867 - DNA, 20 bp, Artificial Sequence
  Description of Artificial Sequence: Synthetic oligonucleotide
  Target: LAMA2; (+) strand; PAM type: YTN; PAM sequence: TTT
attaaacagggaatcctttc

SEQ ID NO: 352868 - DNA, 20 bp, Artificial Sequence
  Description of Artificial Sequence: Synthetic oligonucleotide
  Target: LAMA2; (+) strand; PAM type: YTN; PAM sequence: TTA
ttaaacagggaatcctttcc

SEQ ID NO: 352869 - DNA, 20 bp, Artificial Sequence
  Description of Artificial Sequence: Synthetic oligonucleotide
  Target: LAMA2; (+) strand; PAM type: YTN; PAM sequence: TTA
aacagggaatcctttcccca

SEQ ID NO: 352870 - DNA, 20 bp, Artificial Sequence
  Description of Artificial Sequence: Synthetic oligonucleotide
  Target: LAMA2; (+) strand; PAM type: YTN; PAM sequence: CTT
tccccattgcttgtttttct

SEQ ID NO: 352871 - DNA, 20 bp, Artificial Sequence
  Description of Artificial Sequence: Synthetic oligonucleotide
  Target: LAMA2; (+) strand; PAM type: YTN; PAM sequence: TTT
ccccattgcttgtttttctc

SEQ ID NO: 352872 - DNA, 20 bp, Artificial Sequence
  Description of Artificial Sequence: Synthetic oligonucleotide
  Target: LAMA2; (+) strand; PAM type: YTN; PAM sequence: TTC
cccattgcttgtttttctca

SEQ ID NO: 352873 - DNA, 20 bp, Artificial Sequence
  Description of Artificial Sequence: Synthetic oligonucleotide
  Target: LAMA2; (+) strand; PAM type: YTN; PAM sequence: TTG
cttgtttttctcaggtttgt

SEQ ID NO: 352874 - DNA, 20 bp, Artificial Sequence
  Description of Artificial Sequence: Synthetic oligonucleotide
  Target: LAMA2; (+) strand; PAM type: YTN; PAM sequence: CTT
gtttttctcaggtttgtcaa

SEQ ID NO: 352875 - DNA, 20 bp, Artificial Sequence
  Description of Artificial Sequence: Synthetic oligonucleotide
  Target: LAMA2; (+) strand; PAM type: YTN; PAM sequence: TTG
tttttctcaggtttgtcaaa

SEQ ID NO: 352876 - DNA, 20 bp, Artificial Sequence
  Description of Artificial Sequence: Synthetic oligonucleotide
  Target: LAMA2; (+) strand; PAM type: YTN; PAM sequence: TTT
ttctcaggtttgtcaaagat

SEQ ID NO: 352877 - DNA, 20 bp, Artificial Sequence
  Description of Artificial Sequence: Synthetic oligonucleotide
  Target: LAMA2; (+) strand; PAM type: YTN; PAM sequence: TTT
tctcaggtttgtcaaagatc

SEQ ID NO: 352878 - DNA, 20 bp, Artificial Sequence
  Description of Artificial Sequence: Synthetic oligonucleotide
  Target: LAMA2; (+) strand; PAM type: YTN; PAM sequence: TTT
ctcaggtttgtcaaagatca

SEQ ID NO: 352879 - DNA, 20 bp, Artificial Sequence
  Description of Artificial Sequence: Synthetic oligonucleotide
  Target: LAMA2; (+) strand; PAM type: YTN; PAM sequence: TTC
tcaggtttgtcaaagatcag

SEQ ID NO: 352880 - DNA, 20 bp, Artificial Sequence
  Description of Artificial Sequence: Synthetic oligonucleotide
  Target: LAMA2; (+) strand; PAM type: YTN; PAM sequence: CTC
aggtttgtcaaagatcaggt

SEQ ID NO: 352881 - DNA, 20 bp, Artificial Sequence
  Description of Artificial Sequence: Synthetic oligonucleotide
  Target: LAMA2; (+) strand; PAM type: YTN; PAM sequence: TTT
gtcaaagatcaggtagttgt

SEQ ID NO: 352882 - DNA, 20 bp, Artificial Sequence
  Description of Artificial Sequence: Synthetic oligonucleotide
  Target: LAMA2; (+) strand; PAM type: YTN; PAM sequence: TTG
tcaaagatcaggtagttgta

SEQ ID NO: 352883 - DNA, 20 bp, Artificial Sequence
  Description of Artificial Sequence: Synthetic oligonucleotide
  Target: LAMA2; (+) strand; PAM type: YTN; PAM sequence: TTG
tacatatgcggcgttatttc

SEQ ID NO: 352884 - DNA, 20 bp, Artificial Sequence
  Description of Artificial Sequence: Synthetic oligonucleotide
  Target: LAMA2; (+) strand; PAM type: YTN; PAM sequence: TTA
tttctgagggctctgttctg

SEQ ID NO: 352885 - DNA, 20 bp, Artificial Sequence
  Description of Artificial Sequence: Synthetic oligonucleotide
  Target: LAMA2; (+) strand; PAM type: YTN; PAM sequence: TTT
ctgagggctctgttctgttc

SEQ ID NO: 352886 - DNA, 20 bp, Artificial Sequence
  Description of Artificial Sequence: Synthetic oligonucleotide
  Target: LAMA2; (+) strand; PAM type: YTN; PAM sequence: TTC
tgagggctctgttctgttcc

SEQ ID NO: 352887 - DNA, 20 bp, Artificial Sequence
  Description of Artificial Sequence: Synthetic oligonucleotide
  Target: LAMA2; (+) strand; PAM type: YTN; PAM sequence: CTG
agggctctgttctgttccat

SEQ ID NO: 352888 - DNA, 20 bp, Artificial Sequence
  Description of Artificial Sequence: Synthetic oligonucleotide
  Target: LAMA2; (+) strand; PAM type: YTN; PAM sequence: CTC
tgttctgttccattgatcta

SEQ ID NO: 352889 - DNA, 20 bp, Artificial Sequence
  Description of Artificial Sequence: Synthetic oligonucleotide
  Target: LAMA2; (+) strand; PAM type: YTN; PAM sequence: CTG
ttctgttccattgatctata

SEQ ID NO: 352890 - DNA, 20 bp, Artificial Sequence
  Description of Artificial Sequence: Synthetic oligonucleotide
  Target: LAMA2; (+) strand; PAM type: YTN; PAM sequence: TTC
tgttccattgatctatatct

SEQ ID NO: 352891 - DNA, 20 bp, Artificial Sequence
  Description of Artificial Sequence: Synthetic oligonucleotide
  Target: LAMA2; (+) strand; PAM type: YTN; PAM sequence: CTG
ttccattgatctatatctct

SEQ ID NO: 352892 - DNA, 20 bp, Artificial Sequence
  Description of Artificial Sequence: Synthetic oligonucleotide
  Target: LAMA2; (+) strand; PAM type: YTN; PAM sequence: TTC
cattgatctatatctctgtt

SEQ ID NO: 352893 - DNA, 20 bp, Artificial Sequence
  Description of Artificial Sequence: Synthetic oligonucleotide
  Target: LAMA2; (+) strand; PAM type: YTN; PAM sequence: TTG
atctatatctctgttttggt

SEQ ID NO: 352894 - DNA, 20 bp, Artificial Sequence
  Description of Artificial Sequence: Synthetic oligonucleotide
  Target: LAMA2; (+) strand; PAM type: YTN; PAM sequence: CTA
tatctctgttttggtaccag

SEQ ID NO: 352895 - DNA, 20 bp, Artificial Sequence
  Description of Artificial Sequence: Synthetic oligonucleotide
  Target: LAMA2; (+) strand; PAM type: YTN; PAM sequence: CTC
tgttttggtaccagtaccat

SEQ ID NO: 352896 - DNA, 20 bp, Artificial Sequence
  Description of Artificial Sequence: Synthetic oligonucleotide
  Target: LAMA2; (+) strand; PAM type: YTN; PAM sequence: CTG
ttttggtaccagtaccatgc

SEQ ID NO: 352897 - DNA, 20 bp, Artificial Sequence
  Description of Artificial Sequence: Synthetic oligonucleotide
  Target: LAMA2; (+) strand; PAM type: YTN; PAM sequence: TTT
tggtaccagtaccatgctgt

SEQ ID NO: 352898 - DNA, 20 bp, Artificial Sequence
  Description of Artificial Sequence: Synthetic oligonucleotide
  Target: LAMA2; (+) strand; PAM type: YTN; PAM sequence: TTT
ggtaccagtaccatgctgtt

SEQ ID NO: 352899 - DNA, 20 bp, Artificial Sequence
  Description of Artificial Sequence: Synthetic oligonucleotide
  Target: LAMA2; (+) strand; PAM type: YTN; PAM sequence: TTG
gtaccagtaccatgctgttt

SEQ ID NO: 352900 - DNA, 20 bp, Artificial Sequence
  Description of Artificial Sequence: Synthetic oligonucleotide
  Target: LAMA2; (+) strand; PAM type: YTN; PAM sequence: CTG
ttttggttactgtagacttg

SEQ ID NO: 352901 - DNA, 20 bp, Artificial Sequence
  Description of Artificial Sequence: Synthetic oligonucleotide
  Target: LAMA2; (+) strand; PAM type: YTN; PAM sequence: TTT
tggttactgtagacttgtag

SEQ ID NO: 352902 - DNA, 20 bp, Artificial Sequence
  Description of Artificial Sequence: Synthetic oligonucleotide
  Target: LAMA2; (+) strand; PAM type: YTN; PAM sequence: TTT
ggttactgtagacttgtagt

SEQ ID NO: 352903 - DNA, 20 bp, Artificial Sequence
  Description of Artificial Sequence: Synthetic oligonucleotide
  Target: LAMA2; (+) strand; PAM type: YTN; PAM sequence: TTG
gttactgtagacttgtagta

SEQ ID NO: 352904 - DNA, 20 bp, Artificial Sequence
  Description of Artificial Sequence: Synthetic oligonucleotide
  Target: LAMA2; (+) strand; PAM type: YTN; PAM sequence: TTA
ctgtagacttgtagtatagt

SEQ ID NO: 352905 - DNA, 20 bp, Artificial Sequence
  Description of Artificial Sequence: Synthetic oligonucleotide
  Target: LAMA2; (+) strand; PAM type: YTN; PAM sequence: CTG
tagacttgtagtatagtttg

SEQ ID NO: 352906 - DNA, 20 bp, Artificial Sequence
  Description of Artificial Sequence: Synthetic oligonucleotide
  Target: LAMA2; (+) strand; PAM type: YTN; PAM sequence: CTT
gtagtatagtttgaagtcag

SEQ ID NO: 352907 - DNA, 20 bp, Artificial Sequence
  Description of Artificial Sequence: Synthetic oligonucleotide
  Target: LAMA2; (+) strand; PAM type: YTN; PAM sequence: TTG
tagtatagtttgaagtcagg

SEQ ID NO: 352908 - DNA, 20 bp, Artificial Sequence
  Description of Artificial Sequence: Synthetic oligonucleotide
  Target: LAMA2; (+) strand; PAM type: YTN; PAM sequence: TTT
gaagtcaggtagtgtgatgc

SEQ ID NO: 352909 - DNA, 20 bp, Artificial Sequence
  Description of Artificial Sequence: Synthetic oligonucleotide
  Target: LAMA2; (+) strand; PAM type: YTN; PAM sequence: TTG
aagtcaggtagtgtgatgcc

SEQ ID NO: 352910 - DNA, 20 bp, Artificial Sequence
  Description of Artificial Sequence: Synthetic oligonucleotide
  Target: LAMA2; (+) strand; PAM type: YTN; PAM sequence: CTC
cagctttgttcttttggctt

SEQ ID NO: 352911 - DNA, 20 bp, Artificial Sequence
  Description of Artificial Sequence: Synthetic oligonucleotide
  Target: LAMA2; (+) strand; PAM type: YTN; PAM sequence: CTT
tgttcttttggcttaggatt

SEQ ID NO: 352912 - DNA, 20 bp, Artificial Sequence
  Description of Artificial Sequence: Synthetic oligonucleotide
  Target: LAMA2; (+) strand; PAM type: YTN; PAM sequence: TTT
gttcttttggcttaggattg

SEQ ID NO: 352913 - DNA, 20 bp, Artificial Sequence
  Description of Artificial Sequence: Synthetic oligonucleotide
  Target: LAMA2; (+) strand; PAM type: YTN; PAM sequence: TTG
ttcttttggcttaggattga

SEQ ID NO: 352914 - DNA, 20 bp, Artificial Sequence
  Description of Artificial Sequence: Synthetic oligonucleotide
  Target: LAMA2; (+) strand; PAM type: YTN; PAM sequence: TTC
ttttggcttaggattgactt

SEQ ID NO: 352915 - DNA, 20 bp, Artificial Sequence
  Description of Artificial Sequence: Synthetic oligonucleotide
  Target: LAMA2; (+) strand; PAM type: YTN; PAM sequence: CTT
ttggcttaggattgacttgg

SEQ ID NO: 352916 - DNA, 20 bp, Artificial Sequence
  Description of Artificial Sequence: Synthetic oligonucleotide
  Target: LAMA2; (+) strand; PAM type: YTN; PAM sequence: TTT
tggcttaggattgacttggc

SEQ ID NO: 352917 - DNA, 20 bp, Artificial Sequence
  Description of Artificial Sequence: Synthetic oligonucleotide
  Target: LAMA2; (+) strand; PAM type: YTN; PAM sequence: TTT
ggcttaggattgacttggcg

SEQ ID NO: 352918 - DNA, 20 bp, Artificial Sequence
  Description of Artificial Sequence: Synthetic oligonucleotide
  Target: LAMA2; (+) strand; PAM type: YTN; PAM sequence: TTG
gcttaggattgacttggcga

SEQ ID NO: 352919 - DNA, 20 bp, Artificial Sequence
  Description of Artificial Sequence: Synthetic oligonucleotide
  Target: LAMA2; (+) strand; PAM type: YTN; PAM sequence: CTT
aggattgacttggcgatgcg

SEQ ID NO: 352920 - DNA, 20 bp, Artificial Sequence
  Description of Artificial Sequence: Synthetic oligonucleotide
  Target: LAMA2; (+) strand; PAM type: YTN; PAM sequence: TTA
ggattgacttggcgatgcgg

SEQ ID NO: 352921 - DNA, 20 bp, Artificial Sequence
  Description of Artificial Sequence: Synthetic oligonucleotide
  Target: LAMA2; (+) strand; PAM type: YTN; PAM sequence: TTG
acttggcgatgcgggctctt

SEQ ID NO: 352922 - DNA, 20 bp, Artificial Sequence
  Description of Artificial Sequence: Synthetic oligonucleotide
  Target: LAMA2; (+) strand; PAM type: YTN; PAM sequence: CTT
ggcgatgcgggctctttttt

SEQ ID NO: 352923 - DNA, 20 bp, Artificial Sequence
  Description of Artificial Sequence: Synthetic oligonucleotide
  Target: LAMA2; (+) strand; PAM type: YTN; PAM sequence: TTG
gcgatgcgggctcttttttg

SEQ ID NO: 352924 - DNA, 20 bp, Artificial Sequence
  Description of Artificial Sequence: Synthetic oligonucleotide
  Target: LAMA2; (+) strand; PAM type: YTN; PAM sequence: CTC
ttttttggttccatatgaac

SEQ ID NO: 352925 - DNA, 20 bp, Artificial Sequence
  Description of Artificial Sequence: Synthetic oligonucleotide
  Target: LAMA2; (+) strand; PAM type: YTN; PAM sequence: CTT
ttttggttccatatgaactt

SEQ ID NO: 352926 - DNA, 20 bp, Artificial Sequence
  Description of Artificial Sequence: Synthetic oligonucleotide
  Target: LAMA2; (+) strand; PAM type: YTN; PAM sequence: TTT
tttggttccatatgaacttt

SEQ ID NO: 352927 - DNA, 20 bp, Artificial Sequence
  Description of Artificial Sequence: Synthetic oligonucleotide
  Target: LAMA2; (+) strand; PAM type: YTN; PAM sequence: TTT
ttggttccatatgaacttta

SEQ ID NO: 352928 - DNA, 20 bp, Artificial Sequence
  Description of Artificial Sequence: Synthetic oligonucleotide
  Target: LAMA2; (+) strand; PAM type: YTN; PAM sequence: TTT
tggttccatatgaactttaa

SEQ ID NO: 352929 - DNA, 20 bp, Artificial Sequence
  Description of Artificial Sequence: Synthetic oligonucleotide
  Target: LAMA2; (+) strand; PAM type: YTN; PAM sequence: TTT
ggttccatatgaactttaaa

SEQ ID NO: 352930 - DNA, 20 bp, Artificial Sequence
  Description of Artificial Sequence: Synthetic oligonucleotide
  Target: LAMA2; (+) strand; PAM type: YTN; PAM sequence: TTG
gttccatatgaactttaaag

SEQ ID NO: 352931 - DNA, 20 bp, Artificial Sequence
  Description of Artificial Sequence: Synthetic oligonucleotide
  Target: LAMA2; (+) strand; PAM type: YTN; PAM sequence: TTC
catatgaactttaaagtagt

SEQ ID NO: 352932 - DNA, 20 bp, Artificial Sequence
  Description of Artificial Sequence: Synthetic oligonucleotide
  Target: LAMA2; (+) strand; PAM type: YTN; PAM sequence: CTT
taaagtagttttttccaatt

SEQ ID NO: 352933 - DNA, 20 bp, Artificial Sequence
  Description of Artificial Sequence: Synthetic oligonucleotide
  Target: LAMA2; (+) strand; PAM type: YTN; PAM sequence: TTT
aaagtagttttttccaattc

SEQ ID NO: 352934 - DNA, 20 bp, Artificial Sequence
  Description of Artificial Sequence: Synthetic oligonucleotide
  Target: LAMA2; (+) strand; PAM type: YTN; PAM sequence: TTA
aagtagttttttccaattct

SEQ ID NO: 352935 - DNA, 20 bp, Artificial Sequence
  Description of Artificial Sequence: Synthetic oligonucleotide
  Target: LAMA2; (+) strand; PAM type: YTN; PAM sequence: TTT
tttccaattctgtgaagaaa

SEQ ID NO: 352936 - DNA, 20 bp, Artificial Sequence
  Description of Artificial Sequence: Synthetic oligonucleotide
  Target: LAMA2; (+) strand; PAM type: YTN; PAM sequence: TTT
ttccaattctgtgaagaaag

SEQ ID NO: 352937 - DNA, 20 bp, Artificial Sequence
  Description of Artificial Sequence: Synthetic oligonucleotide
  Target: LAMA2; (+) strand; PAM type: YTN; PAM sequence: TTT
tccaattctgtgaagaaagg

SEQ ID NO: 352938 - DNA, 20 bp, Artificial Sequence
  Description of Artificial Sequence: Synthetic oligonucleotide
  Target: LAMA2; (+) strand; PAM type: YTN; PAM sequence: TTT
ccaattctgtgaagaaaggc

SEQ ID NO: 352939 - DNA, 20 bp, Artificial Sequence
  Description of Artificial Sequence: Synthetic oligonucleotide
  Target: LAMA2; (+) strand; PAM type: YTN; PAM sequence: TTC
caattctgtgaagaaaggca

SEQ ID NO: 352940 - DNA, 20 bp, Artificial Sequence
  Description of Artificial Sequence: Synthetic oligonucleotide
  Target: LAMA2; (+) strand; PAM type: YTN; PAM sequence: TTC
tgtgaagaaaggcattggta

SEQ ID NO: 352941 - DNA, 20 bp, Artificial Sequence
  Description of Artificial Sequence: Synthetic oligonucleotide
  Target: LAMA2; (+) strand; PAM type: YTN; PAM sequence: CTG
tgaagaaaggcattggtagc

SEQ ID NO: 352942 - DNA, 20 bp, Artificial Sequence
  Description of Artificial Sequence: Synthetic oligonucleotide
  Target: LAMA2; (+) strand; PAM type: YTN; PAM sequence: TTG
gtagcttgatggggatggca

SEQ ID NO: 352943 - DNA, 20 bp, Artificial Sequence
  Description of Artificial Sequence: Synthetic oligonucleotide
  Target: LAMA2; (+) strand; PAM type: YTN; PAM sequence: CTT
gatggggatggcattgaatc

SEQ ID NO: 352944 - DNA, 20 bp, Artificial Sequence
  Description of Artificial Sequence: Synthetic oligonucleotide
  Target: LAMA2; (+) strand; PAM type: YTN; PAM sequence: TTG
atggggatggcattgaatct

SEQ ID NO: 352945 - DNA, 20 bp, Artificial Sequence
  Description of Artificial Sequence: Synthetic oligonucleotide
  Target: LAMA2; (+) strand; PAM type: YTN; PAM sequence: TTG
aatctgtaaattaccttggg

SEQ ID NO: 352946 - DNA, 20 bp, Artificial Sequence
  Description of Artificial Sequence: Synthetic oligonucleotide
  Target: LAMA2; (+) strand; PAM type: YTN; PAM sequence: CTG
taaattaccttgggcagtat

SEQ ID NO: 352947 - DNA, 20 bp, Artificial Sequence
  Description of Artificial Sequence: Synthetic oligonucleotide
  Target: LAMA2; (+) strand; PAM type: YTN; PAM sequence: TTA
ccttgggcagtatggccatt

SEQ ID NO: 352948 - DNA, 20 bp, Artificial Sequence
  Description of Artificial Sequence: Synthetic oligonucleotide
  Target: LAMA2; (+) strand; PAM type: YTN; PAM sequence: CTT
gggcagtatggccattttca

SEQ ID NO: 352949 - DNA, 20 bp, Artificial Sequence
  Description of Artificial Sequence: Synthetic oligonucleotide
  Target: LAMA2; (+) strand; PAM type: YTN; PAM sequence: TTG
ggcagtatggccattttcac

SEQ ID NO: 352950 - DNA, 20 bp, Artificial Sequence
  Description of Artificial Sequence: Synthetic oligonucleotide
  Target: LAMA2; (+) strand; PAM type: YTN; PAM sequence: TTT
tcacgatattgattcttcct

SEQ ID NO: 352951 - DNA, 20 bp, Artificial Sequence
  Description of Artificial Sequence: Synthetic oligonucleotide
  Target: LAMA2; (+) strand; PAM type: YTN; PAM sequence: TTT
cacgatattgattcttccta

SEQ ID NO: 352952 - DNA, 20 bp, Artificial Sequence
  Description of Artificial Sequence: Synthetic oligonucleotide
  Target: LAMA2; (+) strand; PAM type: YTN; PAM sequence: TTC
acgatattgattcttcctac

SEQ ID NO: 352953 - DNA, 20 bp, Artificial Sequence
  Description of Artificial Sequence: Synthetic oligonucleotide
  Target: LAMA2; (+) strand; PAM type: YTN; PAM sequence: TTG
attcttcctacccatgagca

SEQ ID NO: 352954 - DNA, 20 bp, Artificial Sequence
  Description of Artificial Sequence: Synthetic oligonucleotide
  Target: LAMA2; (+) strand; PAM type: YTN; PAM sequence: TTC
ttcctacccatgagcatgga

SEQ ID NO: 352955 - DNA, 20 bp, Artificial Sequence
  Description of Artificial Sequence: Synthetic oligonucleotide
  Target: LAMA2; (+) strand; PAM type: YTN; PAM sequence: CTT
cctacccatgagcatggaat

SEQ ID NO: 352956 - DNA, 20 bp, Artificial Sequence
  Description of Artificial Sequence: Synthetic oligonucleotide
  Target: LAMA2; (+) strand; PAM type: YTN; PAM sequence: TTC
ctacccatgagcatggaatg

SEQ ID NO: 352957 - DNA, 20 bp, Artificial Sequence
  Description of Artificial Sequence: Synthetic oligonucleotide
  Target: LAMA2; (+) strand; PAM type: YTN; PAM sequence: CTA
cccatgagcatggaatgttc

SEQ ID NO: 352958 - DNA, 20 bp, Artificial Sequence
  Description of Artificial Sequence: Synthetic oligonucleotide
  Target: LAMA2; (+) strand; PAM type: YTN; PAM sequence: TTC
ttccatttgtttgtatcctc

SEQ ID NO: 352959 - DNA, 20 bp, Artificial Sequence
  Description of Artificial Sequence: Synthetic oligonucleotide
  Target: LAMA2; (+) strand; PAM type: YTN; PAM sequence: CTT
ccatttgtttgtatcctctt

SEQ ID NO: 352960 - DNA, 20 bp, Artificial Sequence
  Description of Artificial Sequence: Synthetic oligonucleotide
  Target: LAMA2; (+) strand; PAM type: YTN; PAM sequence: TTC
catttgtttgtatcctcttt

SEQ ID NO: 352961 - DNA, 20 bp, Artificial Sequence
  Description of Artificial Sequence: Synthetic oligonucleotide
  Target: LAMA2; (+) strand; PAM type: YTN; PAM sequence: TTT
gtttgtatcctcttttattt

SEQ ID NO: 352962 - DNA, 20 bp, Artificial Sequence
  Description of Artificial Sequence: Synthetic oligonucleotide
  Target: LAMA2; (+) strand; PAM type: YTN; PAM sequence: TTG
tttgtatcctcttttatttc

SEQ ID NO: 352963 - DNA, 20 bp, Artificial Sequence
  Description of Artificial Sequence: Synthetic oligonucleotide
  Target: LAMA2; (+) strand; PAM type: YTN; PAM sequence: TTT
gtatcctcttttatttcctt

SEQ ID NO: 352964 - DNA, 20 bp, Artificial Sequence
  Description of Artificial Sequence: Synthetic oligonucleotide
  Target: LAMA2; (+) strand; PAM type: YTN; PAM sequence: TTG
tatcctcttttatttccttg

SEQ ID NO: 352965 - DNA, 20 bp, Artificial Sequence
  Description of Artificial Sequence: Synthetic oligonucleotide
  Target: LAMA2; (+) strand; PAM type: YTN; PAM sequence: CTC
ttttatttccttgagcagtg

SEQ ID NO: 352966 - DNA, 20 bp, Artificial Sequence
  Description of Artificial Sequence: Synthetic oligonucleotide
  Target: LAMA2; (+) strand; PAM type: YTN; PAM sequence: CTT
ttatttccttgagcagtggt

SEQ ID NO: 352967 - DNA, 20 bp, Artificial Sequence
  Description of Artificial Sequence: Synthetic oligonucleotide
  Target: LAMA2; (+) strand; PAM type: YTN; PAM sequence: TTT
tatttccttgagcagtggtt

SEQ ID NO: 352968 - DNA, 20 bp, Artificial Sequence
  Description of Artificial Sequence: Synthetic oligonucleotide
  Target: LAMA2; (+) strand; PAM type: YTN; PAM sequence: TTT
atttccttgagcagtggttt

SEQ ID NO: 352969 - DNA, 20 bp, Artificial Sequence
  Description of Artificial Sequence: Synthetic oligonucleotide
  Target: LAMA2; (+) strand; PAM type: YTN; PAM sequence: TTA
tttccttgagcagtggtttg

SEQ ID NO: 352970 - DNA, 20 bp, Artificial Sequence
  Description of Artificial Sequence: Synthetic oligonucleotide
  Target: LAMA2; (+) strand; PAM type: YTN; PAM sequence: TTT
ccttgagcagtggtttgtag

SEQ ID NO: 352971 - DNA, 20 bp, Artificial Sequence
  Description of Artificial Sequence: Synthetic oligonucleotide
  Target: LAMA2; (+) strand; PAM type: YTN; PAM sequence: TTC
cttgagcagtggtttgtagt

SEQ ID NO: 352972 - DNA, 20 bp, Artificial Sequence
  Description of Artificial Sequence: Synthetic oligonucleotide
  Target: LAMA2; (+) strand; PAM type: YTN; PAM sequence: CTT
gagcagtggtttgtagttct

SEQ ID NO: 352973 - DNA, 20 bp, Artificial Sequence
  Description of Artificial Sequence: Synthetic oligonucleotide
  Target: LAMA2; (+) strand; PAM type: YTN; PAM sequence: TTG
agcagtggtttgtagttctc

SEQ ID NO: 352974 - DNA, 20 bp, Artificial Sequence
  Description of Artificial Sequence: Synthetic oligonucleotide
  Target: LAMA2; (+) strand; PAM type: YTN; PAM sequence: TTT
gtagttctccttgaagaggt

SEQ ID NO: 352975 - DNA, 20 bp, Artificial Sequence
  Description of Artificial Sequence: Synthetic oligonucleotide
  Target: LAMA2; (+) strand; PAM type: YTN; PAM sequence: TTG
tagttctccttgaagaggtc

SEQ ID NO: 352976 - DNA, 20 bp, Artificial Sequence
  Description of Artificial Sequence: Synthetic oligonucleotide
  Target: LAMA2; (+) strand; PAM type: YTN; PAM sequence: TTC
tccttgaagaggtccttcac

SEQ ID NO: 352977 - DNA, 20 bp, Artificial Sequence
  Description of Artificial Sequence: Synthetic oligonucleotide
  Target: LAMA2; (+) strand; PAM type: YTN; PAM sequence: CTC
cttgaagaggtccttcacat

SEQ ID NO: 352978 - DNA, 20 bp, Artificial Sequence
  Description of Artificial Sequence: Synthetic oligonucleotide
  Target: LAMA2; (+) strand; PAM type: YTN; PAM sequence: CTT
gaagaggtccttcacatccc

SEQ ID NO: 352979 - DNA, 20 bp, Artificial Sequence
  Description of Artificial Sequence: Synthetic oligonucleotide
  Target: LAMA2; (+) strand; PAM type: YTN; PAM sequence: TTG
aagaggtccttcacatccct

SEQ ID NO: 352980 - DNA, 20 bp, Artificial Sequence
  Description of Artificial Sequence: Synthetic oligonucleotide
  Target: LAMA2; (+) strand; PAM type: YTN; PAM sequence: CTT
cacatcccttgtaagttgga

SEQ ID NO: 352981 - DNA, 20 bp, Artificial Sequence
  Description of Artificial Sequence: Synthetic oligonucleotide
  Target: LAMA2; (+) strand; PAM type: YTN; PAM sequence: TTC
acatcccttgtaagttggat

SEQ ID NO: 352982 - DNA, 20 bp, Artificial Sequence
  Description of Artificial Sequence: Synthetic oligonucleotide
  Target: LAMA2; (+) strand; PAM type: YTN; PAM sequence: CTT
gtaagttggattcctaggta

SEQ ID NO: 352983 - DNA, 20 bp, Artificial Sequence
  Description of Artificial Sequence: Synthetic oligonucleotide
  Target: LAMA2; (+) strand; PAM type: YTN; PAM sequence: TTG
taagttggattcctaggtat

SEQ ID NO: 352984 - DNA, 20 bp, Artificial Sequence
  Description of Artificial Sequence: Synthetic oligonucleotide
  Target: LAMA2; (+) strand; PAM type: YTN; PAM sequence: TTG
gattcctaggtattttattc

SEQ ID NO: 352985 - DNA, 20 bp, Artificial Sequence
  Description of Artificial Sequence: Synthetic oligonucleotide
  Target: LAMA2; (+) strand; PAM type: YTN; PAM sequence: TTC
ctaggtattttattctcttt

SEQ ID NO: 352986 - DNA, 20 bp, Artificial Sequence
  Description of Artificial Sequence: Synthetic oligonucleotide
  Target: LAMA2; (+) strand; PAM type: YTN; PAM sequence: CTA
ggtattttattctctttgaa

SEQ ID NO: 352987 - DNA, 20 bp, Artificial Sequence
  Description of Artificial Sequence: Synthetic oligonucleotide
  Target: LAMA2; (+) strand; PAM type: YTN; PAM sequence: TTT
tattctctttgaagcaattg

SEQ ID NO: 352988 - DNA, 20 bp, Artificial Sequence
  Description of Artificial Sequence: Synthetic oligonucleotide
  Target: LAMA2; (+) strand; PAM type: YTN; PAM sequence: TTT
attctctttgaagcaattgt

SEQ ID NO: 352989 - DNA, 20 bp, Artificial Sequence
  Description of Artificial Sequence: Synthetic oligonucleotide
  Target: LAMA2; (+) strand; PAM type: YTN; PAM sequence: TTA
ttctctttgaagcaattgtg

SEQ ID NO: 352990 - DNA, 20 bp, Artificial Sequence
  Description of Artificial Sequence: Synthetic oligonucleotide
  Target: LAMA2; (+) strand; PAM type: YTN; PAM sequence: TTC
tctttgaagcaattgtgaat

SEQ ID NO: 352991 - DNA, 20 bp, Artificial Sequence
  Description of Artificial Sequence: Synthetic oligonucleotide
  Target: LAMA2; (+) strand; PAM type: YTN; PAM sequence: CTC
tttgaagcaattgtgaatgg

SEQ ID NO: 352992 - DNA, 20 bp, Artificial Sequence
  Description of Artificial Sequence: Synthetic oligonucleotide
  Target: LAMA2; (+) strand; PAM type: YTN; PAM sequence: CTT
tgaagcaattgtgaatggga

SEQ ID NO: 352993 - DNA, 20 bp, Artificial Sequence
  Description of Artificial Sequence: Synthetic oligonucleotide
  Target: LAMA2; (+) strand; PAM type: YTN; PAM sequence: TTT
gaagcaattgtgaatgggag

SEQ ID NO: 352994 - DNA, 20 bp, Artificial Sequence
  Description of Artificial Sequence: Synthetic oligonucleotide
  Target: LAMA2; (+) strand; PAM type: YTN; PAM sequence: TTG
aagcaattgtgaatgggagt

SEQ ID NO: 352995 - DNA, 20 bp, Artificial Sequence
  Description of Artificial Sequence: Synthetic oligonucleotide
  Target: LAMA2; (+) strand; PAM type: YTN; PAM sequence: TTG
tgaatgggagttcactcatg

SEQ ID NO: 352996 - DNA, 20 bp, Artificial Sequence
  Description of Artificial Sequence: Synthetic oligonucleotide
  Target: LAMA2; (+) strand; PAM type: YTN; PAM sequence: TTC
actcatgatttggctctctg

SEQ ID NO: 352997 - DNA, 20 bp, Artificial Sequence
  Description of Artificial Sequence: Synthetic oligonucleotide
  Target: LAMA2; (+) strand; PAM type: YTN; PAM sequence: CTC
atgatttggctctctgtttg

SEQ ID NO: 352998 - DNA, 20 bp, Artificial Sequence
  Description of Artificial Sequence: Synthetic oligonucleotide
  Target: LAMA2; (+) strand; PAM type: YTN; PAM sequence: TTT
ggctctctgtttgttgttgt

SEQ ID NO: 352999 - DNA, 20 bp, Artificial Sequence
  Description of Artificial Sequence: Synthetic oligonucleotide
  Target: LAMA2; (+) strand; PAM type: YTN; PAM sequence: TTG
gctctctgtttgttgttgtt

SEQ ID NO: 353000 - DNA, 20 bp, Artificial Sequence
  Description of Artificial Sequence: Synthetic oligonucleotide
  Target: LAMA2; (+) strand; PAM type: YTN; PAM sequence: CTC
tctgtttgttgttgttgtat

SEQ ID NO: 353001 - DNA, 20 bp, Artificial Sequence
  Description of Artificial Sequence: Synthetic oligonucleotide
  Target: LAMA2; (+) strand; PAM type: YTN; PAM sequence: CTC
tgtttgttgttgttgtataa

SEQ ID NO: 353002 - DNA, 20 bp, Artificial Sequence
  Description of Artificial Sequence: Synthetic oligonucleotide
  Target: LAMA2; (+) strand; PAM type: YTN; PAM sequence: CTG
tttgttgttgttgtataaga

SEQ ID NO: 353003 - DNA, 20 bp, Artificial Sequence
  Description of Artificial Sequence: Synthetic oligonucleotide
  Target: LAMA2; (+) strand; PAM type: YTN; PAM sequence: TTT
gttgttgttgtataagaatg

SEQ ID NO: 353004 - DNA, 20 bp, Artificial Sequence
  Description of Artificial Sequence: Synthetic oligonucleotide
  Target: LAMA2; (+) strand; PAM type: YTN; PAM sequence: TTG
ttgttgttgtataagaatgc

SEQ ID NO: 353005 - DNA, 20 bp, Artificial Sequence
  Description of Artificial Sequence: Synthetic oligonucleotide
  Target: LAMA2; (+) strand; PAM type: YTN; PAM sequence: TTG
ttgttgtataagaatgcttg

SEQ ID NO: 353006 - DNA, 20 bp, Artificial Sequence
  Description of Artificial Sequence: Synthetic oligonucleotide
  Target: LAMA2; (+) strand; PAM type: YTN; PAM sequence: TTG
ttgtataagaatgcttgtga

SEQ ID NO: 353007 - DNA, 20 bp, Artificial Sequence
  Description of Artificial Sequence: Synthetic oligonucleotide
  Target: LAMA2; (+) strand; PAM type: YTN; PAM sequence: TTG
tataagaatgcttgtgactt

SEQ ID NO: 353008 - DNA, 20 bp, Artificial Sequence
  Description of Artificial Sequence: Synthetic oligonucleotide
  Target: LAMA2; (+) strand; PAM type: YTN; PAM sequence: CTT
gtgacttttgtacattgatt

SEQ ID NO: 353009 - DNA, 20 bp, Artificial Sequence
  Description of Artificial Sequence: Synthetic oligonucleotide
  Target: LAMA2; (+) strand; PAM type: YTN; PAM sequence: TTG
tgacttttgtacattgattt

SEQ ID NO: 353010 - DNA, 20 bp, Artificial Sequence
  Description of Artificial Sequence: Synthetic oligonucleotide
  Target: LAMA2; (+) strand; PAM type: YTN; PAM sequence: CTT
ttgtacattgattttgtatc

SEQ ID NO: 353011 - DNA, 20 bp, Artificial Sequence
  Description of Artificial Sequence: Synthetic oligonucleotide
  Target: LAMA2; (+) strand; PAM type: YTN; PAM sequence: TTT
tgtacattgattttgtatcc

SEQ ID NO: 353012 - DNA, 20 bp, Artificial Sequence
  Description of Artificial Sequence: Synthetic oligonucleotide
  Target: LAMA2; (+) strand; PAM type: YTN; PAM sequence: TTT
gtacattgattttgtatcct

SEQ ID NO: 353013 - DNA, 20 bp, Artificial Sequence
  Description of Artificial Sequence: Synthetic oligonucleotide
  Target: LAMA2; (+) strand; PAM type: YTN; PAM sequence: TTG
tacattgattttgtatcctg

SEQ ID NO: 353014 - DNA, 20 bp, Artificial Sequence
  Description of Artificial Sequence: Synthetic oligonucleotide
  Target: LAMA2; (+) strand; PAM type: YTN; PAM sequence: TTG
attttgtatcctgagacttt

SEQ ID NO: 353015 - DNA, 20 bp, Artificial Sequence
  Description of Artificial Sequence: Synthetic oligonucleotide
  Target: LAMA2; (+) strand; PAM type: YTN; PAM sequence: TTT
tgtatcctgagactttgctg

SEQ ID NO: 353016 - DNA, 20 bp, Artificial Sequence
  Description of Artificial Sequence: Synthetic oligonucleotide
  Target: LAMA2; (+) strand; PAM type: YTN; PAM sequence: TTT
gtatcctgagactttgctga

SEQ ID NO: 353017 - DNA, 20 bp, Artificial Sequence
  Description of Artificial Sequence: Synthetic oligonucleotide
  Target: LAMA2; (+) strand; PAM type: YTN; PAM sequence: TTG
tatcctgagactttgctgaa

SEQ ID NO: 353018 - DNA, 20 bp, Artificial Sequence
  Description of Artificial Sequence: Synthetic oligonucleotide
  Target: LAMA2; (+) strand; PAM type: YTN; PAM sequence: CTG
agactttgctgaagttgctt

SEQ ID NO: 353019 - DNA, 20 bp, Artificial Sequence
  Description of Artificial Sequence: Synthetic oligonucleotide
  Target: LAMA2; (+) strand; PAM type: YTN; PAM sequence: CTT
tgctgaagttgcttatcagc

SEQ ID NO: 353020 - DNA, 20 bp, Artificial Sequence
  Description of Artificial Sequence: Synthetic oligonucleotide
  Target: LAMA2; (+) strand; PAM type: YTN; PAM sequence: TTT
gctgaagttgcttatcagct

SEQ ID NO: 353021 - DNA, 20 bp, Artificial Sequence
  Description of Artificial Sequence: Synthetic oligonucleotide
  Target: LAMA2; (+) strand; PAM type: YTN; PAM sequence: TTG
ctgaagttgcttatcagctt

SEQ ID NO: 353022 - DNA, 20 bp, Artificial Sequence
  Description of Artificial Sequence: Synthetic oligonucleotide
  Target: LAMA2; (+) strand; PAM type: YTN; PAM sequence: CTG
aagttgcttatcagcttaag

SEQ ID NO: 353023 - DNA, 20 bp, Artificial Sequence
  Description of Artificial Sequence: Synthetic oligonucleotide
  Target: LAMA2; (+) strand; PAM type: YTN; PAM sequence: TTG
cttatcagcttaaggagatt

SEQ ID NO: 353024 - DNA, 20 bp, Artificial Sequence
  Description of Artificial Sequence: Synthetic oligonucleotide
  Target: LAMA2; (+) strand; PAM type: YTN; PAM sequence: CTT
atcagcttaaggagattttg

SEQ ID NO: 353025 - DNA, 20 bp, Artificial Sequence
  Description of Artificial Sequence: Synthetic oligonucleotide
  Target: LAMA2; (+) strand; PAM type: YTN; PAM sequence: TTA
tcagcttaaggagattttgg

SEQ ID NO: 353026 - DNA, 20 bp, Artificial Sequence
  Description of Artificial Sequence: Synthetic oligonucleotide
  Target: LAMA2; (+) strand; PAM type: YTN; PAM sequence: CTT
aaggagattttggactgaga

SEQ ID NO: 353027 - DNA, 20 bp, Artificial Sequence
  Description of Artificial Sequence: Synthetic oligonucleotide
  Target: LAMA2; (+) strand; PAM type: YTN; PAM sequence: TTA
aggagattttggactgagac

SEQ ID NO: 353028 - DNA, 20 bp, Artificial Sequence
  Description of Artificial Sequence: Synthetic oligonucleotide
  Target: LAMA2; (+) strand; PAM type: YTN; PAM sequence: TTT
tggactgagacaatggggtt

SEQ ID NO: 353029 - DNA, 20 bp, Artificial Sequence
  Description of Artificial Sequence: Synthetic oligonucleotide
  Target: LAMA2; (+) strand; PAM type: YTN; PAM sequence: TTT
ggactgagacaatggggttt

SEQ ID NO: 353030 - DNA, 20 bp, Artificial Sequence
  Description of Artificial Sequence: Synthetic oligonucleotide
  Target: LAMA2; (+) strand; PAM type: YTN; PAM sequence: TTG
gactgagacaatggggtttt

SEQ ID NO: 353031 - DNA, 20 bp, Artificial Sequence
  Description of Artificial Sequence: Synthetic oligonucleotide
  Target: LAMA2; (+) strand; PAM type: YTN; PAM sequence: CTG
agacaatggggttttctaga

SEQ ID NO: 353032 - DNA, 20 bp, Artificial Sequence
  Description of Artificial Sequence: Synthetic oligonucleotide
  Target: LAMA2; (+) strand; PAM type: YTN; PAM sequence: TTT
tctagatatacaatcatgtc

SEQ ID NO: 353033 - DNA, 20 bp, Artificial Sequence
  Description of Artificial Sequence: Synthetic oligonucleotide
  Target: LAMA2; (+) strand; PAM type: YTN; PAM sequence: TTT
ctagatatacaatcatgtcg

SEQ ID NO: 353034 - DNA, 20 bp, Artificial Sequence
  Description of Artificial Sequence: Synthetic oligonucleotide
  Target: LAMA2; (+) strand; PAM type: YTN; PAM sequence: TTC
tagatatacaatcatgtcgt

SEQ ID NO: 353035 - DNA, 20 bp, Artificial Sequence
  Description of Artificial Sequence: Synthetic oligonucleotide
  Target: LAMA2; (+) strand; PAM type: YTN; PAM sequence: CTA
gatatacaatcatgtcgtct

SEQ ID NO: 353036 - DNA, 20 bp, Artificial Sequence
  Description of Artificial Sequence: Synthetic oligonucleotide
  Target: LAMA2; (+) strand; PAM type: YTN; PAM sequence: CTG
caaacggggacaatttgact

SEQ ID NO: 353037 - DNA, 20 bp, Artificial Sequence
  Description of Artificial Sequence: Synthetic oligonucleotide
  Target: LAMA2; (+) strand; PAM type: YTN; PAM sequence: TTT
gacttcctcttttcctaatt

SEQ ID NO: 353038 - DNA, 20 bp, Artificial Sequence
  Description of Artificial Sequence: Synthetic oligonucleotide
  Target: LAMA2; (+) strand; PAM type: YTN; PAM sequence: TTG
acttcctcttttcctaattg

SEQ ID NO: 353039 - DNA, 20 bp, Artificial Sequence
  Description of Artificial Sequence: Synthetic oligonucleotide
  Target: LAMA2; (+) strand; PAM type: YTN; PAM sequence: CTT
cctcttttcctaattgaata

SEQ ID NO: 353040 - DNA, 20 bp, Artificial Sequence
  Description of Artificial Sequence: Synthetic oligonucleotide
  Target: LAMA2; (+) strand; PAM type: YTN; PAM sequence: TTC
ctcttttcctaattgaatac

SEQ ID NO: 353041 - DNA, 20 bp, Artificial Sequence
  Description of Artificial Sequence: Synthetic oligonucleotide
  Target: LAMA2; (+) strand; PAM type: YTN; PAM sequence: CTC
ttttcctaattgaataccct

SEQ ID NO: 353042 - DNA, 20 bp, Artificial Sequence
  Description of Artificial Sequence: Synthetic oligonucleotide
  Target: LAMA2; (+) strand; PAM type: YTN; PAM sequence: CTT
ttcctaattgaatacccttt

SEQ ID NO: 353043 - DNA, 20 bp, Artificial Sequence
  Description of Artificial Sequence: Synthetic oligonucleotide
  Target: LAMA2; (+) strand; PAM type: YTN; PAM sequence: TTT
tcctaattgaatacccttta

SEQ ID NO: 353044 - DNA, 20 bp, Artificial Sequence
  Description of Artificial Sequence: Synthetic oligonucleotide
  Target: LAMA2; (+) strand; PAM type: YTN; PAM sequence: TTT
cctaattgaataccctttat

SEQ ID NO: 353045 - DNA, 20 bp, Artificial Sequence
  Description of Artificial Sequence: Synthetic oligonucleotide
  Target: LAMA2; (+) strand; PAM type: YTN; PAM sequence: TTC
ctaattgaataccctttatt

SEQ ID NO: 353046 - DNA, 20 bp, Artificial Sequence
  Description of Artificial Sequence: Synthetic oligonucleotide
  Target: LAMA2; (+) strand; PAM type: YTN; PAM sequence: CTA
attgaataccctttatttcc

SEQ ID NO: 353047 - DNA, 20 bp, Artificial Sequence
  Description of Artificial Sequence: Synthetic oligonucleotide
  Target: LAMA2; (+) strand; PAM type: YTN; PAM sequence: TTG
aataccctttatttccttct

SEQ ID NO: 353048 - DNA, 20 bp, Artificial Sequence
  Description of Artificial Sequence: Synthetic oligonucleotide
  Target: LAMA2; (+) strand; PAM type: YTN; PAM sequence: CTT
tatttccttctcctgcctaa

SEQ ID NO: 353049 - DNA, 20 bp, Artificial Sequence
  Description of Artificial Sequence: Synthetic oligonucleotide
  Target: LAMA2; (+) strand; PAM type: YTN; PAM sequence: TTT
atttccttctcctgcctaat

SEQ ID NO: 353050 - DNA, 20 bp, Artificial Sequence
  Description of Artificial Sequence: Synthetic oligonucleotide
  Target: LAMA2; (+) strand; PAM type: YTN; PAM sequence: TTA
tttccttctcctgcctaatt

SEQ ID NO: 353051 - DNA, 20 bp, Artificial Sequence
  Description of Artificial Sequence: Synthetic oligonucleotide
  Target: LAMA2; (+) strand; PAM type: YTN; PAM sequence: TTT
ccttctcctgcctaattgcc

SEQ ID NO: 353052 - DNA, 20 bp, Artificial Sequence
  Description of Artificial Sequence: Synthetic oligonucleotide
  Target: LAMA2; (+) strand; PAM type: YTN; PAM sequence: TTC
cttctcctgcctaattgccc

SEQ ID NO: 353053 - DNA, 20 bp, Artificial Sequence
  Description of Artificial Sequence: Synthetic oligonucleotide
  Target: LAMA2; (+) strand; PAM type: YTN; PAM sequence: CTT
ctcctgcctaattgccctgg

SEQ ID NO: 353054 - DNA, 20 bp, Artificial Sequence
  Description of Artificial Sequence: Synthetic oligonucleotide
  Target: LAMA2; (+) strand; PAM type: YTN; PAM sequence: TTC
tcctgcctaattgccctggc

SEQ ID NO: 353055 - DNA, 20 bp, Artificial Sequence
  Description of Artificial Sequence: Synthetic oligonucleotide
  Target: LAMA2; (+) strand; PAM type: YTN; PAM sequence: CTC
ctgcctaattgccctggcca

SEQ ID NO: 353056 - DNA, 20 bp, Artificial Sequence
  Description of Artificial Sequence: Synthetic oligonucleotide
  Target: LAMA2; (+) strand; PAM type: YTN; PAM sequence: CTG
cctaattgccctggccagaa

SEQ ID NO: 353057 - DNA, 20 bp, Artificial Sequence
  Description of Artificial Sequence: Synthetic oligonucleotide
  Target: LAMA2; (+) strand; PAM type: YTN; PAM sequence: CTA
attgccctggccagaacttc

SEQ ID NO: 353058 - DNA, 20 bp, Artificial Sequence
  Description of Artificial Sequence: Synthetic oligonucleotide
  Target: LAMA2; (+) strand; PAM type: YTN; PAM sequence: TTG
ccctggccagaacttccaac

SEQ ID NO: 353059 - DNA, 20 bp, Artificial Sequence
  Description of Artificial Sequence: Synthetic oligonucleotide
  Target: LAMA2; (+) strand; PAM type: YTN; PAM sequence: CTG
gccagaacttccaacactat

SEQ ID NO: 353060 - DNA, 20 bp, Artificial Sequence
  Description of Artificial Sequence: Synthetic oligonucleotide
  Target: LAMA2; (+) strand; PAM type: YTN; PAM sequence: CTT
ccaacactatgttgaatagg

SEQ ID NO: 353061 - DNA, 20 bp, Artificial Sequence
  Description of Artificial Sequence: Synthetic oligonucleotide
  Target: LAMA2; (+) strand; PAM type: YTN; PAM sequence: TTC
caacactatgttgaatagga

SEQ ID NO: 353062 - DNA, 20 bp, Artificial Sequence
  Description of Artificial Sequence: Synthetic oligonucleotide
  Target: LAMA2; (+) strand; PAM type: YTN; PAM sequence: CTA
tgttgaataggagcggtgag

SEQ ID NO: 353063 - DNA, 20 bp, Artificial Sequence
  Description of Artificial Sequence: Synthetic oligonucleotide
  Target: LAMA2; (+) strand; PAM type: YTN; PAM sequence: TTG
aataggagcggtgagagagg

SEQ ID NO: 353064 - DNA, 20 bp, Artificial Sequence
  Description of Artificial Sequence: Synthetic oligonucleotide
  Target: LAMA2; (+) strand; PAM type: YTN; PAM sequence: CTG
tcttgtgccagttttcaaag

SEQ ID NO: 353065 - DNA, 20 bp, Artificial Sequence
  Description of Artificial Sequence: Synthetic oligonucleotide
  Target: LAMA2; (+) strand; PAM type: YTN; PAM sequence: CTT
gtgccagttttcaaagggaa

SEQ ID NO: 353066 - DNA, 20 bp, Artificial Sequence
  Description of Artificial Sequence: Synthetic oligonucleotide
  Target: LAMA2; (+) strand; PAM type: YTN; PAM sequence: TTG
tgccagttttcaaagggaat

SEQ ID NO: 353067 - DNA, 20 bp, Artificial Sequence
  Description of Artificial Sequence: Synthetic oligonucleotide
  Target: LAMA2; (+) strand; PAM type: YTN; PAM sequence: TTT
tcaaagggaatgcttccagt

SEQ ID NO: 353068 - DNA, 20 bp, Artificial Sequence
  Description of Artificial Sequence: Synthetic oligonucleotide
  Target: LAMA2; (+) strand; PAM type: YTN; PAM sequence: TTT
caaagggaatgcttccagtt

SEQ ID NO: 353069 - DNA, 20 bp, Artificial Sequence
  Description of Artificial Sequence: Synthetic oligonucleotide
  Target: LAMA2; (+) strand; PAM type: YTN; PAM sequence: TTC
aaagggaatgcttccagttt

SEQ ID NO: 353070 - DNA, 20 bp, Artificial Sequence
  Description of Artificial Sequence: Synthetic oligonucleotide
  Target: LAMA2; (+) strand; PAM type: YTN; PAM sequence: CTT
ccagtttttgcccattctgt

SEQ ID NO: 353071 - DNA, 20 bp, Artificial Sequence
  Description of Artificial Sequence: Synthetic oligonucleotide
  Target: LAMA2; (+) strand; PAM type: YTN; PAM sequence: TTC
cagtttttgcccattctgta

SEQ ID NO: 353072 - DNA, 20 bp, Artificial Sequence
  Description of Artificial Sequence: Synthetic oligonucleotide
  Target: LAMA2; (+) strand; PAM type: YTN; PAM sequence: TTT
ttgcccattctgtatgatac

SEQ ID NO: 353073 - DNA, 20 bp, Artificial Sequence
  Description of Artificial Sequence: Synthetic oligonucleotide
  Target: LAMA2; (+) strand; PAM type: YTN; PAM sequence: TTT
tgcccattctgtatgatact

SEQ ID NO: 353074 - DNA, 20 bp, Artificial Sequence
  Description of Artificial Sequence: Synthetic oligonucleotide
  Target: LAMA2; (+) strand; PAM type: YTN; PAM sequence: TTT
gcccattctgtatgatactg

SEQ ID NO: 353075 - DNA, 20 bp, Artificial Sequence
  Description of Artificial Sequence: Synthetic oligonucleotide
  Target: LAMA2; (+) strand; PAM type: YTN; PAM sequence: TTG
cccattctgtatgatactgg

SEQ ID NO: 353076 - DNA, 20 bp, Artificial Sequence
  Description of Artificial Sequence: Synthetic oligonucleotide
  Target: LAMA2; (+) strand; PAM type: YTN; PAM sequence: TTC
tgtatgatactggctgtggg

SEQ ID NO: 353077 - DNA, 20 bp, Artificial Sequence
  Description of Artificial Sequence: Synthetic oligonucleotide
  Target: LAMA2; (+) strand; PAM type: YTN; PAM sequence: CTG
tatgatactggctgtgggtt

SEQ ID NO: 353078 - DNA, 20 bp, Artificial Sequence
  Description of Artificial Sequence: Synthetic oligonucleotide
  Target: LAMA2; (+) strand; PAM type: YTN; PAM sequence: CTG
gctgtgggtttgtcatagat

SEQ ID NO: 353079 - DNA, 20 bp, Artificial Sequence
  Description of Artificial Sequence: Synthetic oligonucleotide
  Target: LAMA2; (+) strand; PAM type: YTN; PAM sequence: CTG
tgggtttgtcatagatagct

SEQ ID NO: 353080 - DNA, 20 bp, Artificial Sequence
  Description of Artificial Sequence: Synthetic oligonucleotide
  Target: LAMA2; (+) strand; PAM type: YTN; PAM sequence: TTT
gtcatagatagctcttaata

SEQ ID NO: 353081 - DNA, 20 bp, Artificial Sequence
  Description of Artificial Sequence: Synthetic oligonucleotide
  Target: LAMA2; (+) strand; PAM type: YTN; PAM sequence: TTG
tcatagatagctcttaatat

SEQ ID NO: 353082 - DNA, 20 bp, Artificial Sequence
  Description of Artificial Sequence: Synthetic oligonucleotide
  Target: LAMA2; (+) strand; PAM type: YTN; PAM sequence: CTC
ttaatattttgaattacgtc

SEQ ID NO: 353083 - DNA, 20 bp, Artificial Sequence
  Description of Artificial Sequence: Synthetic oligonucleotide
  Target: LAMA2; (+) strand; PAM type: YTN; PAM sequence: CTT
aatattttgaattacgtccc

SEQ ID NO: 353084 - DNA, 20 bp, Artificial Sequence
  Description of Artificial Sequence: Synthetic oligonucleotide
  Target: LAMA2; (+) strand; PAM type: YTN; PAM sequence: TTA
atattttgaattacgtccca

SEQ ID NO: 353085 - DNA, 20 bp, Artificial Sequence
  Description of Artificial Sequence: Synthetic oligonucleotide
  Target: LAMA2; (+) strand; PAM type: YTN; PAM sequence: TTT
tgaattacgtcccatcaata

SEQ ID NO: 353086 - DNA, 20 bp, Artificial Sequence
  Description of Artificial Sequence: Synthetic oligonucleotide
  Target: LAMA2; (+) strand; PAM type: YTN; PAM sequence: TTT
gaattacgtcccatcaatac

SEQ ID NO: 353087 - DNA, 20 bp, Artificial Sequence
  Description of Artificial Sequence: Synthetic oligonucleotide
  Target: LAMA2; (+) strand; PAM type: YTN; PAM sequence: TTG
aattacgtcccatcaatacc

SEQ ID NO: 353088 - DNA, 20 bp, Artificial Sequence
  Description of Artificial Sequence: Synthetic oligonucleotide
  Target: LAMA2; (+) strand; PAM type: YTN; PAM sequence: TTA
cgtcccatcaatacctaatt

SEQ ID NO: 353089 - DNA, 20 bp, Artificial Sequence
  Description of Artificial Sequence: Synthetic oligonucleotide
  Target: LAMA2; (+) strand; PAM type: YTN; PAM sequence: CTA
atttattgagagtttttagc

SEQ ID NO: 353090 - DNA, 20 bp, Artificial Sequence
  Description of Artificial Sequence: Synthetic oligonucleotide
  Target: LAMA2; (+) strand; PAM type: YTN; PAM sequence: TTT
attgagagtttttagcatga

SEQ ID NO: 353091 - DNA, 20 bp, Artificial Sequence
  Description of Artificial Sequence: Synthetic oligonucleotide
  Target: LAMA2; (+) strand; PAM type: YTN; PAM sequence: TTA
ttgagagtttttagcatgaa

SEQ ID NO: 353092 - DNA, 20 bp, Artificial Sequence
  Description of Artificial Sequence: Synthetic oligonucleotide
  Target: LAMA2; (+) strand; PAM type: YTN; PAM sequence: TTG
agagtttttagcatgaaggg

SEQ ID NO: 353093 - DNA, 20 bp, Artificial Sequence
  Description of Artificial Sequence: Synthetic oligonucleotide
  Target: LAMA2; (+) strand; PAM type: YTN; PAM sequence: TTT
ttagcatgaagggttgttga

SEQ ID NO: 353094 - DNA, 20 bp, Artificial Sequence
  Description of Artificial Sequence: Synthetic oligonucleotide
  Target: LAMA2; (+) strand; PAM type: YTN; PAM sequence: TTT
tagcatgaagggttgttgaa

SEQ ID NO: 353095 - DNA, 20 bp, Artificial Sequence
  Description of Artificial Sequence: Synthetic oligonucleotide
  Target: LAMA2; (+) strand; PAM type: YTN; PAM sequence: TTT
agcatgaagggttgttgaat

SEQ ID NO: 353096 - DNA, 20 bp, Artificial Sequence
  Description of Artificial Sequence: Synthetic oligonucleotide
  Target: LAMA2; (+) strand; PAM type: YTN; PAM sequence: TTA
gcatgaagggttgttgaatt

SEQ ID NO: 353097 - DNA, 20 bp, Artificial Sequence
  Description of Artificial Sequence: Synthetic oligonucleotide
  Target: LAMA2; (+) strand; PAM type: YTN; PAM sequence: TTG
ttgaattttgtcaaaggctt

SEQ ID NO: 353098 - DNA, 20 bp, Artificial Sequence
  Description of Artificial Sequence: Synthetic oligonucleotide
  Target: LAMA2; (+) strand; PAM type: YTN; PAM sequence: TTG
aattttgtcaaaggcttttt

SEQ ID NO: 353099 - DNA, 20 bp, Artificial Sequence
  Description of Artificial Sequence: Synthetic oligonucleotide
  Target: LAMA2; (+) strand; PAM type: YTN; PAM sequence: TTT
tgtcaaaggctttttctgca

SEQ ID NO: 353100 - DNA, 20 bp, Artificial Sequence
  Description of Artificial Sequence: Synthetic oligonucleotide
  Target: LAMA2; (+) strand; PAM type: YTN; PAM sequence: TTT
gtcaaaggctttttctgcat

SEQ ID NO: 353101 - DNA, 20 bp, Artificial Sequence
  Description of Artificial Sequence: Synthetic oligonucleotide
  Target: LAMA2; (+) strand; PAM type: YTN; PAM sequence: TTG
tcaaaggctttttctgcatc

SEQ ID NO: 353102 - DNA, 20 bp, Artificial Sequence
  Description of Artificial Sequence: Synthetic oligonucleotide
  Target: LAMA2; (+) strand; PAM type: YTN; PAM sequence: CTT
tttctgcatctattgagata

SEQ ID NO: 353103 - DNA, 20 bp, Artificial Sequence
  Description of Artificial Sequence: Synthetic oligonucleotide
  Target: LAMA2; (+) strand; PAM type: YTN; PAM sequence: TTT
ttctgcatctattgagataa

SEQ ID NO: 353104 - DNA, 20 bp, Artificial Sequence
  Description of Artificial Sequence: Synthetic oligonucleotide
  Target: LAMA2; (+) strand; PAM type: YTN; PAM sequence: TTT
tctgcatctattgagataat

SEQ ID NO: 353105 - DNA, 20 bp, Artificial Sequence
  Description of Artificial Sequence: Synthetic oligonucleotide
  Target: LAMA2; (+) strand; PAM type: YTN; PAM sequence: TTT
ctgcatctattgagataatc

SEQ ID NO: 353106 - DNA, 20 bp, Artificial Sequence
  Description of Artificial Sequence: Synthetic oligonucleotide
  Target: LAMA2; (+) strand; PAM type: YTN; PAM sequence: TTC
tgcatctattgagataatca

SEQ ID NO: 353107 - DNA, 20 bp, Artificial Sequence
  Description of Artificial Sequence: Synthetic oligonucleotide
  Target: LAMA2; (+) strand; PAM type: YTN; PAM sequence: CTG
catctattgagataatcatg

SEQ ID NO: 353108 - DNA, 20 bp, Artificial Sequence
  Description of Artificial Sequence: Synthetic oligonucleotide
  Target: LAMA2; (+) strand; PAM type: YTN; PAM sequence: CTA
ttgagataatcatgtggttt

SEQ ID NO: 353109 - DNA, 20 bp, Artificial Sequence
  Description of Artificial Sequence: Synthetic oligonucleotide
  Target: LAMA2; (+) strand; PAM type: YTN; PAM sequence: TTG
agataatcatgtggtttttg

SEQ ID NO: 353110 - DNA, 20 bp, Artificial Sequence
  Description of Artificial Sequence: Synthetic oligonucleotide
  Target: LAMA2; (+) strand; PAM type: YTN; PAM sequence: TTT
ttgtctttggctctgtttat

SEQ ID NO: 353111 - DNA, 20 bp, Artificial Sequence
  Description of Artificial Sequence: Synthetic oligonucleotide
  Target: LAMA2; (+) strand; PAM type: YTN; PAM sequence: TTT
tgtctttggctctgtttata

SEQ ID NO: 353112 - DNA, 20 bp, Artificial Sequence
  Description of Artificial Sequence: Synthetic oligonucleotide
  Target: LAMA2; (+) strand; PAM type: YTN; PAM sequence: TTT
gtctttggctctgtttatat

SEQ ID NO: 353113 - DNA, 20 bp, Artificial Sequence
  Description of Artificial Sequence: Synthetic oligonucleotide
  Target: LAMA2; (+) strand; PAM type: YTN; PAM sequence: TTG
tctttggctctgtttatatg

SEQ ID NO: 353114 - DNA, 20 bp, Artificial Sequence
  Description of Artificial Sequence: Synthetic oligonucleotide
  Target: LAMA2; (+) strand; PAM type: YTN; PAM sequence: CTT
tggctctgtttatatgctgg

SEQ ID NO: 353115 - DNA, 20 bp, Artificial Sequence
  Description of Artificial Sequence: Synthetic oligonucleotide
  Target: LAMA2; (+) strand; PAM type: YTN; PAM sequence: TTT
ggctctgtttatatgctgga

SEQ ID NO: 353116 - DNA, 20 bp, Artificial Sequence
  Description of Artificial Sequence: Synthetic oligonucleotide
  Target: LAMA2; (+) strand; PAM type: YTN; PAM sequence: TTG
gctctgtttatatgctggat

SEQ ID NO: 353117 - DNA, 20 bp, Artificial Sequence
  Description of Artificial Sequence: Synthetic oligonucleotide
  Target: LAMA2; (+) strand; PAM type: YTN; PAM sequence: CTC
tgtttatatgctggattaca

SEQ ID NO: 353118 - DNA, 20 bp, Artificial Sequence
  Description of Artificial Sequence: Synthetic oligonucleotide
  Target: LAMA2; (+) strand; PAM type: YTN; PAM sequence: CTG
tttatatgctggattacatt

SEQ ID NO: 353119 - DNA, 20 bp, Artificial Sequence
  Description of Artificial Sequence: Synthetic oligonucleotide
  Target: LAMA2; (+) strand; PAM type: YTN; PAM sequence: TTT
atatgctggattacatttat

SEQ ID NO: 353120 - DNA, 20 bp, Artificial Sequence
  Description of Artificial Sequence: Synthetic oligonucleotide
  Target: LAMA2; (+) strand; PAM type: YTN; PAM sequence: TTA
tatgctggattacatttatt

SEQ ID NO: 353121 - DNA, 20 bp, Artificial Sequence
  Description of Artificial Sequence: Synthetic oligonucleotide
  Target: LAMA2; (+) strand; PAM type: YTN; PAM sequence: CTG
gattacatttattgatttgt

SEQ ID NO: 353122 - DNA, 20 bp, Artificial Sequence
  Description of Artificial Sequence: Synthetic oligonucleotide
  Target: LAMA2; (+) strand; PAM type: YTN; PAM sequence: TTA
catttattgatttgtgtata

SEQ ID NO: 353123 - DNA, 20 bp, Artificial Sequence
  Description of Artificial Sequence: Synthetic oligonucleotide
  Target: LAMA2; (+) strand; PAM type: YTN; PAM sequence: TTT
attgatttgtgtatattgaa

SEQ ID NO: 353124 - DNA, 20 bp, Artificial Sequence
  Description of Artificial Sequence: Synthetic oligonucleotide
  Target: LAMA2; (+) strand; PAM type: YTN; PAM sequence: TTA
ttgatttgtgtatattgaac

SEQ ID NO: 353125 - DNA, 20 bp, Artificial Sequence
  Description of Artificial Sequence: Synthetic oligonucleotide
  Target: LAMA2; (+) strand; PAM type: YTN; PAM sequence: TTG
atttgtgtatattgaaccag

SEQ ID NO: 353126 - DNA, 20 bp, Artificial Sequence
  Description of Artificial Sequence: Synthetic oligonucleotide
  Target: LAMA2; (+) strand; PAM type: YTN; PAM sequence: TTT
gtgtatattgaaccagcctt

SEQ ID NO: 353127 - DNA, 20 bp, Artificial Sequence
  Description of Artificial Sequence: Synthetic oligonucleotide
  Target: LAMA2; (+) strand; PAM type: YTN; PAM sequence: TTG
tgtatattgaaccagccttg

SEQ ID NO: 353128 - DNA, 20 bp, Artificial Sequence
  Description of Artificial Sequence: Synthetic oligonucleotide
  Target: LAMA2; (+) strand; PAM type: YTN; PAM sequence: TTG
aaccagccttgcatcccagg

SEQ ID NO: 353129 - DNA, 20 bp, Artificial Sequence
  Description of Artificial Sequence: Synthetic oligonucleotide
  Target: LAMA2; (+) strand; PAM type: YTN; PAM sequence: CTT
gcatcccagggatgaagcct

SEQ ID NO: 353130 - DNA, 20 bp, Artificial Sequence
  Description of Artificial Sequence: Synthetic oligonucleotide
  Target: LAMA2; (+) strand; PAM type: YTN; PAM sequence: TTG
catcccagggatgaagccta

SEQ ID NO: 353131 - DNA, 20 bp, Artificial Sequence
  Description of Artificial Sequence: Synthetic oligonucleotide
  Target: LAMA2; (+) strand; PAM type: YTN; PAM sequence: CTA
cttgatcatggtggataagc

SEQ ID NO: 353132 - DNA, 20 bp, Artificial Sequence
  Description of Artificial Sequence: Synthetic oligonucleotide
  Target: LAMA2; (+) strand; PAM type: YTN; PAM sequence: CTT
gatcatggtggataagcttt

SEQ ID NO: 353133 - DNA, 20 bp, Artificial Sequence
  Description of Artificial Sequence: Synthetic oligonucleotide
  Target: LAMA2; (+) strand; PAM type: YTN; PAM sequence: TTG
atcatggtggataagctttt

SEQ ID NO: 353134 - DNA, 20 bp, Artificial Sequence
  Description of Artificial Sequence: Synthetic oligonucleotide
  Target: LAMA2; (+) strand; PAM type: YTN; PAM sequence: CTT
tttgatgtgctgctggattc

SEQ ID NO: 353135 - DNA, 20 bp, Artificial Sequence
  Description of Artificial Sequence: Synthetic oligonucleotide
  Target: LAMA2; (+) strand; PAM type: YTN; PAM sequence: TTT
ttgatgtgctgctggattcg

SEQ ID NO: 353136 - DNA, 20 bp, Artificial Sequence
  Description of Artificial Sequence: Synthetic oligonucleotide
  Target: LAMA2; (+) strand; PAM type: YTN; PAM sequence: TTT
tgatgtgctgctggattcgt

SEQ ID NO: 353137 - DNA, 20 bp, Artificial Sequence
  Description of Artificial Sequence: Synthetic oligonucleotide
  Target: LAMA2; (+) strand; PAM type: YTN; PAM sequence: TTT
gatgtgctgctggattcgtt

SEQ ID NO: 353138 - DNA, 20 bp, Artificial Sequence
  Description of Artificial Sequence: Synthetic oligonucleotide
  Target: LAMA2; (+) strand; PAM type: YTN; PAM sequence: TTG
atgtgctgctggattcgttt

SEQ ID NO: 353139 - DNA, 20 bp, Artificial Sequence
  Description of Artificial Sequence: Synthetic oligonucleotide
  Target: LAMA2; (+) strand; PAM type: YTN; PAM sequence: CTG
ctggattcgttttgccagta

SEQ ID NO: 353140 - DNA, 20 bp, Artificial Sequence
  Description of Artificial Sequence: Synthetic oligonucleotide
  Target: LAMA2; (+) strand; PAM type: YTN; PAM sequence: CTG
gattcgttttgccagtattt

SEQ ID NO: 353141 - DNA, 20 bp, Artificial Sequence
  Description of Artificial Sequence: Synthetic oligonucleotide
  Target: LAMA2; (+) strand; PAM type: YTN; PAM sequence: TTC
gttttgccagtattttactg

SEQ ID NO: 353142 - DNA, 20 bp, Artificial Sequence
  Description of Artificial Sequence: Synthetic oligonucleotide
  Target: LAMA2; (+) strand; PAM type: YTN; PAM sequence: TTT
tgccagtattttactgagga

SEQ ID NO: 353143 - DNA, 20 bp, Artificial Sequence
  Description of Artificial Sequence: Synthetic oligonucleotide
  Target: LAMA2; (+) strand; PAM type: YTN; PAM sequence: TTT
gccagtattttactgaggat

SEQ ID NO: 353144 - DNA, 20 bp, Artificial Sequence
  Description of Artificial Sequence: Synthetic oligonucleotide
  Target: LAMA2; (+) strand; PAM type: YTN; PAM sequence: TTG
ccagtattttactgaggatt

SEQ ID NO: 353145 - DNA, 20 bp, Artificial Sequence
  Description of Artificial Sequence: Synthetic oligonucleotide
  Target: LAMA2; (+) strand; PAM type: YTN; PAM sequence: TTT
tactgaggatttttgcatca

SEQ ID NO: 353146 - DNA, 20 bp, Artificial Sequence
  Description of Artificial Sequence: Synthetic oligonucleotide
  Target: LAMA2; (+) strand; PAM type: YTN; PAM sequence: TTT
actgaggatttttgcatcaa

SEQ ID NO: 353147 - DNA, 20 bp, Artificial Sequence
  Description of Artificial Sequence: Synthetic oligonucleotide
  Target: LAMA2; (+) strand; PAM type: YTN; PAM sequence: TTA
ctgaggatttttgcatcaat

SEQ ID NO: 353148 - DNA, 20 bp, Artificial Sequence
  Description of Artificial Sequence: Synthetic oligonucleotide
  Target: LAMA2; (+) strand; PAM type: YTN; PAM sequence: CTG
aggatttttgcatcaatgtt

SEQ ID NO: 353149 - DNA, 20 bp, Artificial Sequence
  Description of Artificial Sequence: Synthetic oligonucleotide
  Target: LAMA2; (+) strand; PAM type: YTN; PAM sequence: TTT
ttgcatcaatgttcatcaag

SEQ ID NO: 353150 - DNA, 20 bp, Artificial Sequence
  Description of Artificial Sequence: Synthetic oligonucleotide
  Target: LAMA2; (+) strand; PAM type: YTN; PAM sequence: TTT
tgcatcaatgttcatcaagg

SEQ ID NO: 353151 - DNA, 20 bp, Artificial Sequence
  Description of Artificial Sequence: Synthetic oligonucleotide
  Target: LAMA2; (+) strand; PAM type: YTN; PAM sequence: TTT
gcatcaatgttcatcaagga

SEQ ID NO: 353152 - DNA, 20 bp, Artificial Sequence
  Description of Artificial Sequence: Synthetic oligonucleotide
  Target: LAMA2; (+) strand; PAM type: YTN; PAM sequence: TTG
catcaatgttcatcaaggat

SEQ ID NO: 353153 - DNA, 20 bp, Artificial Sequence
  Description of Artificial Sequence: Synthetic oligonucleotide
  Target: LAMA2; (+) strand; PAM type: YTN; PAM sequence: TTC
atcaaggatattggtctaaa

SEQ ID NO: 353154 - DNA, 20 bp, Artificial Sequence
  Description of Artificial Sequence: Synthetic oligonucleotide
  Target: LAMA2; (+) strand; PAM type: YTN; PAM sequence: TTG
gtctaaaattctcttttttg

SEQ ID NO: 353155 - DNA, 20 bp, Artificial Sequence
  Description of Artificial Sequence: Synthetic oligonucleotide
  Target: LAMA2; (+) strand; PAM type: YTN; PAM sequence: CTA
aaattctcttttttggttgt

SEQ ID NO: 353156 - DNA, 20 bp, Artificial Sequence
  Description of Artificial Sequence: Synthetic oligonucleotide
  Target: LAMA2; (+) strand; PAM type: YTN; PAM sequence: TTC
tcttttttggttgtgtctct

SEQ ID NO: 353157 - DNA, 20 bp, Artificial Sequence
  Description of Artificial Sequence: Synthetic oligonucleotide
  Target: LAMA2; (+) strand; PAM type: YTN; PAM sequence: CTC
ttttttggttgtgtctctgc

SEQ ID NO: 353158 - DNA, 20 bp, Artificial Sequence
  Description of Artificial Sequence: Synthetic oligonucleotide
  Target: LAMA2; (+) strand; PAM type: YTN; PAM sequence: CTT
ttttggttgtgtctctgcct

SEQ ID NO: 353159 - DNA, 20 bp, Artificial Sequence
  Description of Artificial Sequence: Synthetic oligonucleotide
  Target: LAMA2; (+) strand; PAM type: YTN; PAM sequence: TTT
tttggttgtgtctctgcctg

SEQ ID NO: 353160 - DNA, 20 bp, Artificial Sequence
  Description of Artificial Sequence: Synthetic oligonucleotide
  Target: LAMA2; (+) strand; PAM type: YTN; PAM sequence: TTT
ttggttgtgtctctgcctgg

SEQ ID NO: 353161 - DNA, 20 bp, Artificial Sequence
  Description of Artificial Sequence: Synthetic oligonucleotide
  Target: LAMA2; (+) strand; PAM type: YTN; PAM sequence: TTT
tggttgtgtctctgcctggc

SEQ ID NO: 353162 - DNA, 20 bp, Artificial Sequence
  Description of Artificial Sequence: Synthetic oligonucleotide
  Target: LAMA2; (+) strand; PAM type: YTN; PAM sequence: TTT
ggttgtgtctctgcctggct

SEQ ID NO: 353163 - DNA, 20 bp, Artificial Sequence
  Description of Artificial Sequence: Synthetic oligonucleotide
  Target: LAMA2; (+) strand; PAM type: YTN; PAM sequence: TTG
gttgtgtctctgcctggctt

SEQ ID NO: 353164 - DNA, 20 bp, Artificial Sequence
  Description of Artificial Sequence: Synthetic oligonucleotide
  Target: LAMA2; (+) strand; PAM type: YTN; PAM sequence: TTG
tgtctctgcctggctttggt

SEQ ID NO: 353165 - DNA, 20 bp, Artificial Sequence
  Description of Artificial Sequence: Synthetic oligonucleotide
  Target: LAMA2; (+) strand; PAM type: YTN; PAM sequence: CTC
tgcctggctttggtatcaga

SEQ ID NO: 353166 - DNA, 20 bp, Artificial Sequence
  Description of Artificial Sequence: Synthetic oligonucleotide
  Target: LAMA2; (+) strand; PAM type: YTN; PAM sequence: CTG
cctggctttggtatcagaat

SEQ ID NO: 353167 - DNA, 20 bp, Artificial Sequence
  Description of Artificial Sequence: Synthetic oligonucleotide
  Target: LAMA2; (+) strand; PAM type: YTN; PAM sequence: CTG
gctttggtatcagaatgatg

SEQ ID NO: 353168 - DNA, 20 bp, Artificial Sequence
  Description of Artificial Sequence: Synthetic oligonucleotide
  Target: LAMA2; (+) strand; PAM type: YTN; PAM sequence: CTT
tggtatcagaatgatgctgg

SEQ ID NO: 353169 - DNA, 20 bp, Artificial Sequence
  Description of Artificial Sequence: Synthetic oligonucleotide
  Target: LAMA2; (+) strand; PAM type: YTN; PAM sequence: TTT
ggtatcagaatgatgctggc

SEQ ID NO: 353170 - DNA, 20 bp, Artificial Sequence
  Description of Artificial Sequence: Synthetic oligonucleotide
  Target: LAMA2; (+) strand; PAM type: YTN; PAM sequence: TTG
gtatcagaatgatgctggcc

SEQ ID NO: 353171 - DNA, 20 bp, Artificial Sequence
  Description of Artificial Sequence: Synthetic oligonucleotide
  Target: LAMA2; (+) strand; PAM type: YTN; PAM sequence: CTG
gcctcataaaatgagttagg

SEQ ID NO: 353172 - DNA, 20 bp, Artificial Sequence
  Description of Artificial Sequence: Synthetic oligonucleotide
  Target: LAMA2; (+) strand; PAM type: YTN; PAM sequence: CTC
ataaaatgagttagggagga

SEQ ID NO: 353173 - DNA, 20 bp, Artificial Sequence
  Description of Artificial Sequence: Synthetic oligonucleotide
  Target: LAMA2; (+) strand; PAM type: YTN; PAM sequence: TTA
gggaggattccctctttttc

SEQ ID NO: 353174 - DNA, 20 bp, Artificial Sequence
  Description of Artificial Sequence: Synthetic oligonucleotide
  Target: LAMA2; (+) strand; PAM type: YTN; PAM sequence: TTC
cctctttttctattgattgg

SEQ ID NO: 353175 - DNA, 20 bp, Artificial Sequence
  Description of Artificial Sequence: Synthetic oligonucleotide
  Target: LAMA2; (+) strand; PAM type: YTN; PAM sequence: CTC
tttttctattgattggaata

SEQ ID NO: 353176 - DNA, 20 bp, Artificial Sequence
  Description of Artificial Sequence: Synthetic oligonucleotide
  Target: LAMA2; (+) strand; PAM type: YTN; PAM sequence: CTT
tttctattgattggaatagt

SEQ ID NO: 353177 - DNA, 20 bp, Artificial Sequence
  Description of Artificial Sequence: Synthetic oligonucleotide
  Target: LAMA2; (+) strand; PAM type: YTN; PAM sequence: TTT
ttctattgattggaatagtt

SEQ ID NO: 353178 - DNA, 20 bp, Artificial Sequence
  Description of Artificial Sequence: Synthetic oligonucleotide
  Target: LAMA2; (+) strand; PAM type: YTN; PAM sequence: TTT
tctattgattggaatagttt

SEQ ID NO: 353179 - DNA, 20 bp, Artificial Sequence
  Description of Artificial Sequence: Synthetic oligonucleotide
  Target: LAMA2; (+) strand; PAM type: YTN; PAM sequence: TTT
ctattgattggaatagtttc

SEQ ID NO: 353180 - DNA, 20 bp, Artificial Sequence
  Description of Artificial Sequence: Synthetic oligonucleotide
  Target: LAMA2; (+) strand; PAM type: YTN; PAM sequence: TTC
tattgattggaatagtttca

SEQ ID NO: 353181 - DNA, 20 bp, Artificial Sequence
  Description of Artificial Sequence: Synthetic oligonucleotide
  Target: LAMA2; (+) strand; PAM type: YTN; PAM sequence: CTA
ttgattggaatagtttcaga

SEQ ID NO: 353182 - DNA, 20 bp, Artificial Sequence
  Description of Artificial Sequence: Synthetic oligonucleotide
  Target: LAMA2; (+) strand; PAM type: YTN; PAM sequence: TTG
attggaatagtttcagaagg

SEQ ID NO: 353183 - DNA, 20 bp, Artificial Sequence
  Description of Artificial Sequence: Synthetic oligonucleotide
  Target: LAMA2; (+) strand; PAM type: YTN; PAM sequence: TTG
gaatagtttcagaaggaatg

SEQ ID NO: 353184 - DNA, 20 bp, Artificial Sequence
  Description of Artificial Sequence: Synthetic oligonucleotide
  Target: LAMA2; (+) strand; PAM type: YTN; PAM sequence: TTT
cagaaggaatggtaccagtt

SEQ ID NO: 353185 - DNA, 20 bp, Artificial Sequence
  Description of Artificial Sequence: Synthetic oligonucleotide
  Target: LAMA2; (+) strand; PAM type: YTN; PAM sequence: TTC
agaaggaatggtaccagttc

SEQ ID NO: 353186 - DNA, 20 bp, Artificial Sequence
  Description of Artificial Sequence: Synthetic oligonucleotide
  Target: LAMA2; (+) strand; PAM type: YTN; PAM sequence: TTC
ctccttgtacctctggtaga

SEQ ID NO: 353187 - DNA, 20 bp, Artificial Sequence
  Description of Artificial Sequence: Synthetic oligonucleotide
  Target: LAMA2; (+) strand; PAM type: YTN; PAM sequence: CTC
cttgtacctctggtagaatt

SEQ ID NO: 353188 - DNA, 20 bp, Artificial Sequence
  Description of Artificial Sequence: Synthetic oligonucleotide
  Target: LAMA2; (+) strand; PAM type: YTN; PAM sequence: CTT
gtacctctggtagaattcgg

SEQ ID NO: 353189 - DNA, 20 bp, Artificial Sequence
  Description of Artificial Sequence: Synthetic oligonucleotide
  Target: LAMA2; (+) strand; PAM type: YTN; PAM sequence: TTG
tacctctggtagaattcggc

SEQ ID NO: 353190 - DNA, 20 bp, Artificial Sequence
  Description of Artificial Sequence: Synthetic oligonucleotide
  Target: LAMA2; (+) strand; PAM type: YTN; PAM sequence: CTC
tggtagaattcggctgtgaa

SEQ ID NO: 353191 - DNA, 20 bp, Artificial Sequence
  Description of Artificial Sequence: Synthetic oligonucleotide
  Target: LAMA2; (+) strand; PAM type: YTN; PAM sequence: CTG
gtagaattcggctgtgaatc

SEQ ID NO: 353192 - DNA, 20 bp, Artificial Sequence
  Description of Artificial Sequence: Synthetic oligonucleotide
  Target: LAMA2; (+) strand; PAM type: YTN; PAM sequence: TTC
ggctgtgaatccatctggtc

SEQ ID NO: 353193 - DNA, 20 bp, Artificial Sequence
  Description of Artificial Sequence: Synthetic oligonucleotide
  Target: LAMA2; (+) strand; PAM type: YTN; PAM sequence: CTG
tgaatccatctggtcctgga

SEQ ID NO: 353194 - DNA, 20 bp, Artificial Sequence
  Description of Artificial Sequence: Synthetic oligonucleotide
  Target: LAMA2; (+) strand; PAM type: YTN; PAM sequence: CTG
gtcctggactctttttggtt

SEQ ID NO: 353195 - DNA, 20 bp, Artificial Sequence
  Description of Artificial Sequence: Synthetic oligonucleotide
  Target: LAMA2; (+) strand; PAM type: YTN; PAM sequence: CTG
gactctttttggttggtaag

SEQ ID NO: 353196 - DNA, 20 bp, Artificial Sequence
  Description of Artificial Sequence: Synthetic oligonucleotide
  Target: LAMA2; (+) strand; PAM type: YTN; PAM sequence: CTC
tttttggttggtaagctatt

SEQ ID NO: 353197 - DNA, 20 bp, Artificial Sequence
  Description of Artificial Sequence: Synthetic oligonucleotide
  Target: LAMA2; (+) strand; PAM type: YTN; PAM sequence: CTT
tttggttggtaagctattga

SEQ ID NO: 353198 - DNA, 20 bp, Artificial Sequence
  Description of Artificial Sequence: Synthetic oligonucleotide
  Target: LAMA2; (+) strand; PAM type: YTN; PAM sequence: TTT
ttggttggtaagctattgat

SEQ ID NO: 353199 - DNA, 20 bp, Artificial Sequence
  Description of Artificial Sequence: Synthetic oligonucleotide
  Target: LAMA2; (+) strand; PAM type: YTN; PAM sequence: TTT
tggttggtaagctattgatt

SEQ ID NO: 353200 - DNA, 20 bp, Artificial Sequence
  Description of Artificial Sequence: Synthetic oligonucleotide
  Target: LAMA2; (+) strand; PAM type: YTN; PAM sequence: TTT
ggttggtaagctattgatta

SEQ ID NO: 353201 - DNA, 20 bp, Artificial Sequence
  Description of Artificial Sequence: Synthetic oligonucleotide
  Target: LAMA2; (+) strand; PAM type: YTN; PAM sequence: TTG
gttggtaagctattgattat

SEQ ID NO: 353202 - DNA, 20 bp, Artificial Sequence
  Description of Artificial Sequence: Synthetic oligonucleotide
  Target: LAMA2; (+) strand; PAM type: YTN; PAM sequence: TTG
gtaagctattgattattgcc

SEQ ID NO: 353203 - DNA, 20 bp, Artificial Sequence
  Description of Artificial Sequence: Synthetic oligonucleotide
  Target: LAMA2; (+) strand; PAM type: YTN; PAM sequence: CTA
ttgattattgccacaatttc

SEQ ID NO: 353204 - DNA, 20 bp, Artificial Sequence
  Description of Artificial Sequence: Synthetic oligonucleotide
  Target: LAMA2; (+) strand; PAM type: YTN; PAM sequence: TTG
attattgccacaatttcaga

SEQ ID NO: 353205 - DNA, 20 bp, Artificial Sequence
  Description of Artificial Sequence: Synthetic oligonucleotide
  Target: LAMA2; (+) strand; PAM type: YTN; PAM sequence: TTA
ttgccacaatttcagatcct

SEQ ID NO: 353206 - DNA, 20 bp, Artificial Sequence
  Description of Artificial Sequence: Synthetic oligonucleotide
  Target: LAMA2; (+) strand; PAM type: YTN; PAM sequence: TTG
ccacaatttcagatcctgtt

SEQ ID NO: 353207 - DNA, 20 bp, Artificial Sequence
  Description of Artificial Sequence: Synthetic oligonucleotide
  Target: LAMA2; (+) strand; PAM type: YTN; PAM sequence: TTT
cagatcctgttattggtcta

SEQ ID NO: 353208 - DNA, 20 bp, Artificial Sequence
  Description of Artificial Sequence: Synthetic oligonucleotide
  Target: LAMA2; (+) strand; PAM type: YTN; PAM sequence: TTC
agatcctgttattggtctat

SEQ ID NO: 353209 - DNA, 20 bp, Artificial Sequence
  Description of Artificial Sequence: Synthetic oligonucleotide
  Target: LAMA2; (+) strand; PAM type: YTN; PAM sequence: CTG
ttattggtctattcagagat

SEQ ID NO: 353210 - DNA, 20 bp, Artificial Sequence
  Description of Artificial Sequence: Synthetic oligonucleotide
  Target: LAMA2; (+) strand; PAM type: YTN; PAM sequence: TTA
ttggtctattcagagattca

SEQ ID NO: 353211 - DNA, 20 bp, Artificial Sequence
  Description of Artificial Sequence: Synthetic oligonucleotide
  Target: LAMA2; (+) strand; PAM type: YTN; PAM sequence: TTG
gtctattcagagattcaact

SEQ ID NO: 353212 - DNA, 20 bp, Artificial Sequence
  Description of Artificial Sequence: Synthetic oligonucleotide
  Target: LAMA2; (+) strand; PAM type: YTN; PAM sequence: CTA
ttcagagattcaacttcttc

SEQ ID NO: 353213 - DNA, 20 bp, Artificial Sequence
  Description of Artificial Sequence: Synthetic oligonucleotide
  Target: LAMA2; (+) strand; PAM type: YTN; PAM sequence: TTC
agagattcaacttcttcctg

SEQ ID NO: 353214 - DNA, 20 bp, Artificial Sequence
  Description of Artificial Sequence: Synthetic oligonucleotide
  Target: LAMA2; (+) strand; PAM type: YTN; PAM sequence: TTC
aacttcttcctggtttagtc

SEQ ID NO: 353215 - DNA, 20 bp, Artificial Sequence
  Description of Artificial Sequence: Synthetic oligonucleotide
  Target: LAMA2; (+) strand; PAM type: YTN; PAM sequence: CTT
cttcctggtttagtcttggg

SEQ ID NO: 353216 - DNA, 20 bp, Artificial Sequence
  Description of Artificial Sequence: Synthetic oligonucleotide
  Target: LAMA2; (+) strand; PAM type: YTN; PAM sequence: TTC
ttcctggtttagtcttggga

SEQ ID NO: 353217 - DNA, 20 bp, Artificial Sequence
  Description of Artificial Sequence: Synthetic oligonucleotide
  Target: LAMA2; (+) strand; PAM type: YTN; PAM sequence: CTT
cctggtttagtcttgggaga

SEQ ID NO: 353218 - DNA, 20 bp, Artificial Sequence
  Description of Artificial Sequence: Synthetic oligonucleotide
  Target: LAMA2; (+) strand; PAM type: YTN; PAM sequence: TTC
ctggtttagtcttgggagag

SEQ ID NO: 353219 - DNA, 20 bp, Artificial Sequence
  Description of Artificial Sequence: Synthetic oligonucleotide
  Target: LAMA2; (+) strand; PAM type: YTN; PAM sequence: CTG
gtttagtcttgggagagtgt

SEQ ID NO: 353220 - DNA, 20 bp, Artificial Sequence
  Description of Artificial Sequence: Synthetic oligonucleotide
  Target: LAMA2; (+) strand; PAM type: YTN; PAM sequence: TTT
agtcttgggagagtgtatgt

SEQ ID NO: 353221 - DNA, 20 bp, Artificial Sequence
  Description of Artificial Sequence: Synthetic oligonucleotide
  Target: LAMA2; (+) strand; PAM type: YTN; PAM sequence: TTA
gtcttgggagagtgtatgtg

SEQ ID NO: 353222 - DNA, 20 bp, Artificial Sequence
  Description of Artificial Sequence: Synthetic oligonucleotide
  Target: LAMA2; (+) strand; PAM type: YTN; PAM sequence: CTT
gggagagtgtatgtgtcgag

SEQ ID NO: 353223 - DNA, 20 bp, Artificial Sequence
  Description of Artificial Sequence: Synthetic oligonucleotide
  Target: LAMA2; (+) strand; PAM type: YTN; PAM sequence: TTG
ggagagtgtatgtgtcgagg

SEQ ID NO: 353224 - DNA, 20 bp, Artificial Sequence
  Description of Artificial Sequence: Synthetic oligonucleotide
  Target: LAMA2; (+) strand; PAM type: YTN; PAM sequence: TTT
atccatttcttctagatttt

SEQ ID NO: 353225 - DNA, 20 bp, Artificial Sequence
  Description of Artificial Sequence: Synthetic oligonucleotide
  Target: LAMA2; (+) strand; PAM type: YTN; PAM sequence: TTA
tccatttcttctagattttc

SEQ ID NO: 353226 - DNA, 20 bp, Artificial Sequence
  Description of Artificial Sequence: Synthetic oligonucleotide
  Target: LAMA2; (+) strand; PAM type: YTN; PAM sequence: TTT
cttctagattttctagttta

SEQ ID NO: 353227 - DNA, 20 bp, Artificial Sequence
  Description of Artificial Sequence: Synthetic oligonucleotide
  Target: LAMA2; (+) strand; PAM type: YTN; PAM sequence: TTC
ttctagattttctagtttat

SEQ ID NO: 353228 - DNA, 20 bp, Artificial Sequence
  Description of Artificial Sequence: Synthetic oligonucleotide
  Target: LAMA2; (+) strand; PAM type: YTN; PAM sequence: CTT
ctagattttctagtttattt

SEQ ID NO: 353229 - DNA, 20 bp, Artificial Sequence
  Description of Artificial Sequence: Synthetic oligonucleotide
  Target: LAMA2; (+) strand; PAM type: YTN; PAM sequence: TTC
tagattttctagtttatttg

SEQ ID NO: 353230 - DNA, 20 bp, Artificial Sequence
  Description of Artificial Sequence: Synthetic oligonucleotide
  Target: LAMA2; (+) strand; PAM type: YTN; PAM sequence: CTA
gattttctagtttatttgca

SEQ ID NO: 353231 - DNA, 20 bp, Artificial Sequence
  Description of Artificial Sequence: Synthetic oligonucleotide
  Target: LAMA2; (+) strand; PAM type: YTN; PAM sequence: TTT
tctagtttatttgcatagag

SEQ ID NO: 353232 - DNA, 20 bp, Artificial Sequence
  Description of Artificial Sequence: Synthetic oligonucleotide
  Target: LAMA2; (+) strand; PAM type: YTN; PAM sequence: TTT
ctagtttatttgcatagagg

SEQ ID NO: 353233 - DNA, 20 bp, Artificial Sequence
  Description of Artificial Sequence: Synthetic oligonucleotide
  Target: LAMA2; (+) strand; PAM type: YTN; PAM sequence: TTC
tagtttatttgcatagaggt

SEQ ID NO: 353234 - DNA, 20 bp, Artificial Sequence
  Description of Artificial Sequence: Synthetic oligonucleotide
  Target: LAMA2; (+) strand; PAM type: YTN; PAM sequence: CTA
gtttatttgcatagaggtgt

SEQ ID NO: 353235 - DNA, 20 bp, Artificial Sequence
  Description of Artificial Sequence: Synthetic oligonucleotide
  Target: LAMA2; (+) strand; PAM type: YTN; PAM sequence: TTT
atttgcatagaggtgtttgt

SEQ ID NO: 353236 - DNA, 20 bp, Artificial Sequence
  Description of Artificial Sequence: Synthetic oligonucleotide
  Target: LAMA2; (+) strand; PAM type: YTN; PAM sequence: TTA
tttgcatagaggtgtttgta

SEQ ID NO: 353237 - DNA, 20 bp, Artificial Sequence
  Description of Artificial Sequence: Synthetic oligonucleotide
  Target: LAMA2; (+) strand; PAM type: YTN; PAM sequence: TTT
gcatagaggtgtttgtagta

SEQ ID NO: 353238 - DNA, 20 bp, Artificial Sequence
  Description of Artificial Sequence: Synthetic oligonucleotide
  Target: LAMA2; (+) strand; PAM type: YTN; PAM sequence: TTG
catagaggtgtttgtagtat

SEQ ID NO: 353239 - DNA, 20 bp, Artificial Sequence
  Description of Artificial Sequence: Synthetic oligonucleotide
  Target: LAMA2; (+) strand; PAM type: YTN; PAM sequence: TTT
gtagtattctctgattttag

SEQ ID NO: 353240 - DNA, 20 bp, Artificial Sequence
  Description of Artificial Sequence: Synthetic oligonucleotide
  Target: LAMA2; (+) strand; PAM type: YTN; PAM sequence: TTG
tagtattctctgattttagt

SEQ ID NO: 353241 - DNA, 20 bp, Artificial Sequence
  Description of Artificial Sequence: Synthetic oligonucleotide
  Target: LAMA2; (+) strand; PAM type: YTN; PAM sequence: TTC
tctgattttagtttgtattt

SEQ ID NO: 353242 - DNA, 20 bp, Artificial Sequence
  Description of Artificial Sequence: Synthetic oligonucleotide
  Target: LAMA2; (+) strand; PAM type: YTN; PAM sequence: CTC
tgattttagtttgtatttct

SEQ ID NO: 353243 - DNA, 20 bp, Artificial Sequence
  Description of Artificial Sequence: Synthetic oligonucleotide
  Target: LAMA2; (+) strand; PAM type: YTN; PAM sequence: CTG
attttagtttgtatttctgt

SEQ ID NO: 353244 - DNA, 20 bp, Artificial Sequence
  Description of Artificial Sequence: Synthetic oligonucleotide
  Target: LAMA2; (+) strand; PAM type: YTN; PAM sequence: TTT
tagtttgtatttctgtggga

SEQ ID NO: 353245 - DNA, 20 bp, Artificial Sequence
  Description of Artificial Sequence: Synthetic oligonucleotide
  Target: LAMA2; (+) strand; PAM type: YTN; PAM sequence: TTT
agtttgtatttctgtgggat

SEQ ID NO: 353246 - DNA, 20 bp, Artificial Sequence
  Description of Artificial Sequence: Synthetic oligonucleotide
  Target: LAMA2; (+) strand; PAM type: YTN; PAM sequence: TTA
gtttgtatttctgtgggatc

SEQ ID NO: 353247 - DNA, 20 bp, Artificial Sequence
  Description of Artificial Sequence: Synthetic oligonucleotide
  Target: LAMA2; (+) strand; PAM type: YTN; PAM sequence: TTT
gtatttctgtgggatccgtg

SEQ ID NO: 353248 - DNA, 20 bp, Artificial Sequence
  Description of Artificial Sequence: Synthetic oligonucleotide
  Target: LAMA2; (+) strand; PAM type: YTN; PAM sequence: TTG
tatttctgtgggatccgtgg

SEQ ID NO: 353249 - DNA, 20 bp, Artificial Sequence
  Description of Artificial Sequence: Synthetic oligonucleotide
  Target: LAMA2; (+) strand; PAM type: YTN; PAM sequence: TTT
ctgtgggatccgtggtgata

SEQ ID NO: 353250 - DNA, 20 bp, Artificial Sequence
  Description of Artificial Sequence: Synthetic oligonucleotide
  Target: LAMA2; (+) strand; PAM type: YTN; PAM sequence: TTC
tgtgggatccgtggtgatat

SEQ ID NO: 353251 - DNA, 20 bp, Artificial Sequence
  Description of Artificial Sequence: Synthetic oligonucleotide
  Target: LAMA2; (+) strand; PAM type: YTN; PAM sequence: CTG
tgggatccgtggtgatatcc

SEQ ID NO: 353252 - DNA, 20 bp, Artificial Sequence
  Description of Artificial Sequence: Synthetic oligonucleotide
  Target: LAMA2; (+) strand; PAM type: YTN; PAM sequence: CTT
tatcattttttattgcatct

SEQ ID NO: 353253 - DNA, 20 bp, Artificial Sequence
  Description of Artificial Sequence: Synthetic oligonucleotide
  Target: LAMA2; (+) strand; PAM type: YTN; PAM sequence: TTT
atcattttttattgcatcta

SEQ ID NO: 353254 - DNA, 20 bp, Artificial Sequence
  Description of Artificial Sequence: Synthetic oligonucleotide
  Target: LAMA2; (+) strand; PAM type: YTN; PAM sequence: TTA
tcattttttattgcatctat

SEQ ID NO: 353255 - DNA, 20 bp, Artificial Sequence
  Description of Artificial Sequence: Synthetic oligonucleotide
  Target: LAMA2; (+) strand; PAM type: YTN; PAM sequence: TTT
tttattgcatctattagatt

SEQ ID NO: 353256 - DNA, 20 bp, Artificial Sequence
  Description of Artificial Sequence: Synthetic oligonucleotide
  Target: LAMA2; (+) strand; PAM type: YTN; PAM sequence: TTT
ttattgcatctattagattc

SEQ ID NO: 353257 - DNA, 20 bp, Artificial Sequence
  Description of Artificial Sequence: Synthetic oligonucleotide
  Target: LAMA2; (+) strand; PAM type: YTN; PAM sequence: TTT
tattgcatctattagattct

SEQ ID NO: 353258 - DNA, 20 bp, Artificial Sequence
  Description of Artificial Sequence: Synthetic oligonucleotide
  Target: LAMA2; (+) strand; PAM type: YTN; PAM sequence: TTT
attgcatctattagattctt

SEQ ID NO: 353259 - DNA, 20 bp, Artificial Sequence
  Description of Artificial Sequence: Synthetic oligonucleotide
  Target: LAMA2; (+) strand; PAM type: YTN; PAM sequence: TTA
ttgcatctattagattcttc

SEQ ID NO: 353260 - DNA, 20 bp, Artificial Sequence
  Description of Artificial Sequence: Synthetic oligonucleotide
  Target: LAMA2; (+) strand; PAM type: YTN; PAM sequence: TTG
catctattagattcttctct

SEQ ID NO: 353261 - DNA, 20 bp, Artificial Sequence
  Description of Artificial Sequence: Synthetic oligonucleotide
  Target: LAMA2; (+) strand; PAM type: YTN; PAM sequence: CTA
ttagattcttctctcttttt

SEQ ID NO: 353262 - DNA, 20 bp, Artificial Sequence
  Description of Artificial Sequence: Synthetic oligonucleotide
  Target: LAMA2; (+) strand; PAM type: YTN; PAM sequence: TTA
gattcttctctctttttttc

SEQ ID NO: 353263 - DNA, 20 bp, Artificial Sequence
  Description of Artificial Sequence: Synthetic oligonucleotide
  Target: LAMA2; (+) strand; PAM type: YTN; PAM sequence: TTC
ttctctctttttttctttat

SEQ ID NO: 353264 - DNA, 20 bp, Artificial Sequence
  Description of Artificial Sequence: Synthetic oligonucleotide
  Target: LAMA2; (+) strand; PAM type: YTN; PAM sequence: CTT
ctctctttttttctttatta

SEQ ID NO: 353265 - DNA, 20 bp, Artificial Sequence
  Description of Artificial Sequence: Synthetic oligonucleotide
  Target: LAMA2; (+) strand; PAM type: YTN; PAM sequence: TTC
tctctttttttctttattag

SEQ ID NO: 353266 - DNA, 20 bp, Artificial Sequence
  Description of Artificial Sequence: Synthetic oligonucleotide
  Target: LAMA2; (+) strand; PAM type: YTN; PAM sequence: CTC
tctttttttctttattagtc

SEQ ID NO: 353267 - DNA, 20 bp, Artificial Sequence
  Description of Artificial Sequence: Synthetic oligonucleotide
  Target: LAMA2; (+) strand; PAM type: YTN; PAM sequence: CTC
tttttttctttattagtctt

SEQ ID NO: 353268 - DNA, 20 bp, Artificial Sequence
  Description of Artificial Sequence: Synthetic oligonucleotide
  Target: LAMA2; (+) strand; PAM type: YTN; PAM sequence: CTT
tttttctttattagtcttgc

SEQ ID NO: 353269 - DNA, 20 bp, Artificial Sequence
  Description of Artificial Sequence: Synthetic oligonucleotide
  Target: LAMA2; (+) strand; PAM type: YTN; PAM sequence: TTT
ttttctttattagtcttgct

SEQ ID NO: 353270 - DNA, 20 bp, Artificial Sequence
  Description of Artificial Sequence: Synthetic oligonucleotide
  Target: LAMA2; (+) strand; PAM type: YTN; PAM sequence: TTT
tttctttattagtcttgcta

SEQ ID NO: 353271 - DNA, 20 bp, Artificial Sequence
  Description of Artificial Sequence: Synthetic oligonucleotide
  Target: LAMA2; (+) strand; PAM type: YTN; PAM sequence: TTT
ttctttattagtcttgctag

SEQ ID NO: 353272 - DNA, 20 bp, Artificial Sequence
  Description of Artificial Sequence: Synthetic oligonucleotide
  Target: LAMA2; (+) strand; PAM type: YTN; PAM sequence: TTT
tctttattagtcttgctagc

SEQ ID NO: 353273 - DNA, 20 bp, Artificial Sequence
  Description of Artificial Sequence: Synthetic oligonucleotide
  Target: LAMA2; (+) strand; PAM type: YTN; PAM sequence: TTT
ctttattagtcttgctagcg

SEQ ID NO: 353274 - DNA, 20 bp, Artificial Sequence
  Description of Artificial Sequence: Synthetic oligonucleotide
  Target: LAMA2; (+) strand; PAM type: YTN; PAM sequence: TTC
tttattagtcttgctagcgg

SEQ ID NO: 353275 - DNA, 20 bp, Artificial Sequence
  Description of Artificial Sequence: Synthetic oligonucleotide
  Target: LAMA2; (+) strand; PAM type: YTN; PAM sequence: CTT
tattagtcttgctagcggtc

SEQ ID NO: 353276 - DNA, 20 bp, Artificial Sequence
  Description of Artificial Sequence: Synthetic oligonucleotide
  Target: LAMA2; (+) strand; PAM type: YTN; PAM sequence: TTT
attagtcttgctagcggtct

SEQ ID NO: 353277 - DNA, 20 bp, Artificial Sequence
  Description of Artificial Sequence: Synthetic oligonucleotide
  Target: LAMA2; (+) strand; PAM type: YTN; PAM sequence: TTA
ttagtcttgctagcggtcta

SEQ ID NO: 353278 - DNA, 20 bp, Artificial Sequence
  Description of Artificial Sequence: Synthetic oligonucleotide
  Target: LAMA2; (+) strand; PAM type: YTN; PAM sequence: TTA
gtcttgctagcggtctatca

SEQ ID NO: 353279 - DNA, 20 bp, Artificial Sequence
  Description of Artificial Sequence: Synthetic oligonucleotide
  Target: LAMA2; (+) strand; PAM type: YTN; PAM sequence: CTT
gctagcggtctatcaatttt

SEQ ID NO: 353280 - DNA, 20 bp, Artificial Sequence
  Description of Artificial Sequence: Synthetic oligonucleotide
  Target: LAMA2; (+) strand; PAM type: YTN; PAM sequence: TTG
ctagcggtctatcaattttg

SEQ ID NO: 353281 - DNA, 20 bp, Artificial Sequence
  Description of Artificial Sequence: Synthetic oligonucleotide
  Target: LAMA2; (+) strand; PAM type: YTN; PAM sequence: CTA
gcggtctatcaattttgttg

SEQ ID NO: 353282 - DNA, 20 bp, Artificial Sequence
  Description of Artificial Sequence: Synthetic oligonucleotide
  Target: LAMA2; (+) strand; PAM type: YTN; PAM sequence: CTA
tcaattttgttgaccctttc

SEQ ID NO: 353283 - DNA, 20 bp, Artificial Sequence
  Description of Artificial Sequence: Synthetic oligonucleotide
  Target: LAMA2; (+) strand; PAM type: YTN; PAM sequence: TTT
tgttgaccctttcaaaaaac

SEQ ID NO: 353284 - DNA, 20 bp, Artificial Sequence
  Description of Artificial Sequence: Synthetic oligonucleotide
  Target: LAMA2; (+) strand; PAM type: YTN; PAM sequence: TTT
gttgaccctttcaaaaaacc

SEQ ID NO: 353285 - DNA, 20 bp, Artificial Sequence
  Description of Artificial Sequence: Synthetic oligonucleotide
  Target: LAMA2; (+) strand; PAM type: YTN; PAM sequence: TTG
ttgaccctttcaaaaaacca

SEQ ID NO: 353286 - DNA, 20 bp, Artificial Sequence
  Description of Artificial Sequence: Synthetic oligonucleotide
  Target: LAMA2; (+) strand; PAM type: YTN; PAM sequence: TTG
accctttcaaaaaaccagct

SEQ ID NO: 353287 - DNA, 20 bp, Artificial Sequence
  Description of Artificial Sequence: Synthetic oligonucleotide
  Target: LAMA2; (+) strand; PAM type: YTN; PAM sequence: CTT
tcaaaaaaccagctcctgga

SEQ ID NO: 353288 - DNA, 20 bp, Artificial Sequence
  Description of Artificial Sequence: Synthetic oligonucleotide
  Target: LAMA2; (+) strand; PAM type: YTN; PAM sequence: TTT
caaaaaaccagctcctggat

SEQ ID NO: 353289 - DNA, 20 bp, Artificial Sequence
  Description of Artificial Sequence: Synthetic oligonucleotide
  Target: LAMA2; (+) strand; PAM type: YTN; PAM sequence: TTC
aaaaaaccagctcctggatt

SEQ ID NO: 353290 - DNA, 20 bp, Artificial Sequence
  Description of Artificial Sequence: Synthetic oligonucleotide
  Target: LAMA2; (+) strand; PAM type: YTN; PAM sequence: CTC
ctggattcattaattttttg

SEQ ID NO: 353291 - DNA, 20 bp, Artificial Sequence
  Description of Artificial Sequence: Synthetic oligonucleotide
  Target: LAMA2; (+) strand; PAM type: YTN; PAM sequence: CTG
gattcattaattttttgaag

SEQ ID NO: 353292 - DNA, 20 bp, Artificial Sequence
  Description of Artificial Sequence: Synthetic oligonucleotide
  Target: LAMA2; (+) strand; PAM type: YTN; PAM sequence: TTC
attaattttttgaagggttt

SEQ ID NO: 353293 - DNA, 20 bp, Artificial Sequence
  Description of Artificial Sequence: Synthetic oligonucleotide
  Target: LAMA2; (+) strand; PAM type: YTN; PAM sequence: TTA
attttttgaagggttttttg

SEQ ID NO: 353294 - DNA, 20 bp, Artificial Sequence
  Description of Artificial Sequence: Synthetic oligonucleotide
  Target: LAMA2; (+) strand; PAM type: YTN; PAM sequence: TTT
tttgaagggttttttgtgtc

SEQ ID NO: 353295 - DNA, 20 bp, Artificial Sequence
  Description of Artificial Sequence: Synthetic oligonucleotide
  Target: LAMA2; (+) strand; PAM type: YTN; PAM sequence: TTT
ttgaagggttttttgtgtct

SEQ ID NO: 353296 - DNA, 20 bp, Artificial Sequence
  Description of Artificial Sequence: Synthetic oligonucleotide
  Target: LAMA2; (+) strand; PAM type: YTN; PAM sequence: TTT
tgaagggttttttgtgtctc

SEQ ID NO: 353297 - DNA, 20 bp, Artificial Sequence
  Description of Artificial Sequence: Synthetic oligonucleotide
  Target: LAMA2; (+) strand; PAM type: YTN; PAM sequence: TTT
gaagggttttttgtgtctct

SEQ ID NO: 353298 - DNA, 20 bp, Artificial Sequence
  Description of Artificial Sequence: Synthetic oligonucleotide
  Target: LAMA2; (+) strand; PAM type: YTN; PAM sequence: TTG
aagggttttttgtgtctcta

SEQ ID NO: 353299 - DNA, 20 bp, Artificial Sequence
  Description of Artificial Sequence: Synthetic oligonucleotide
  Target: LAMA2; (+) strand; PAM type: YTN; PAM sequence: TTT
tttgtgtctctatttccttc

SEQ ID NO: 353300 - DNA, 20 bp, Artificial Sequence
  Description of Artificial Sequence: Synthetic oligonucleotide
  Target: LAMA2; (+) strand; PAM type: YTN; PAM sequence: TTT
ttgtgtctctatttccttca

SEQ ID NO: 353301 - DNA, 20 bp, Artificial Sequence
  Description of Artificial Sequence: Synthetic oligonucleotide
  Target: LAMA2; (+) strand; PAM type: YTN; PAM sequence: TTT
tgtgtctctatttccttcag

SEQ ID NO: 353302 - DNA, 20 bp, Artificial Sequence
  Description of Artificial Sequence: Synthetic oligonucleotide
  Target: LAMA2; (+) strand; PAM type: YTN; PAM sequence: TTT
gtgtctctatttccttcagt

SEQ ID NO: 353303 - DNA, 20 bp, Artificial Sequence
  Description of Artificial Sequence: Synthetic oligonucleotide
  Target: LAMA2; (+) strand; PAM type: YTN; PAM sequence: TTG
tgtctctatttccttcagtt

SEQ ID NO: 353304 - DNA, 20 bp, Artificial Sequence
  Description of Artificial Sequence: Synthetic oligonucleotide
  Target: LAMA2; (+) strand; PAM type: YTN; PAM sequence: CTC
tatttccttcagttctgctc

SEQ ID NO: 353305 - DNA, 20 bp, Artificial Sequence
  Description of Artificial Sequence: Synthetic oligonucleotide
  Target: LAMA2; (+) strand; PAM type: YTN; PAM sequence: CTA
tttccttcagttctgctctg

SEQ ID NO: 353306 - DNA, 20 bp, Artificial Sequence
  Description of Artificial Sequence: Synthetic oligonucleotide
  Target: LAMA2; (+) strand; PAM type: YTN; PAM sequence: TTT
ccttcagttctgctctgatt

SEQ ID NO: 353307 - DNA, 20 bp, Artificial Sequence
  Description of Artificial Sequence: Synthetic oligonucleotide
  Target: LAMA2; (+) strand; PAM type: YTN; PAM sequence: TTC
cttcagttctgctctgattt

SEQ ID NO: 353308 - DNA, 20 bp, Artificial Sequence
  Description of Artificial Sequence: Synthetic oligonucleotide
  Target: LAMA2; (+) strand; PAM type: YTN; PAM sequence: CTT
cagttctgctctgattttag

SEQ ID NO: 353309 - DNA, 20 bp, Artificial Sequence
  Description of Artificial Sequence: Synthetic oligonucleotide
  Target: LAMA2; (+) strand; PAM type: YTN; PAM sequence: TTC
agttctgctctgattttagt

SEQ ID NO: 353310 - DNA, 20 bp, Artificial Sequence
  Description of Artificial Sequence: Synthetic oligonucleotide
  Target: LAMA2; (+) strand; PAM type: YTN; PAM sequence: TTC
tgctctgattttagttattt

SEQ ID NO: 353311 - DNA, 20 bp, Artificial Sequence
  Description of Artificial Sequence: Synthetic oligonucleotide
  Target: LAMA2; (+) strand; PAM type: YTN; PAM sequence: CTG
ctctgattttagttatttct

SEQ ID NO: 353312 - DNA, 20 bp, Artificial Sequence
  Description of Artificial Sequence: Synthetic oligonucleotide
  Target: LAMA2; (+) strand; PAM type: YTN; PAM sequence: CTC
tgattttagttatttcttgc

SEQ ID NO: 353313 - DNA, 20 bp, Artificial Sequence
  Description of Artificial Sequence: Synthetic oligonucleotide
  Target: LAMA2; (+) strand; PAM type: YTN; PAM sequence: CTG
attttagttatttcttgcct

SEQ ID NO: 353314 - DNA, 20 bp, Artificial Sequence
  Description of Artificial Sequence: Synthetic oligonucleotide
  Target: LAMA2; (+) strand; PAM type: YTN; PAM sequence: TTT
tagttatttcttgccttctg

SEQ ID NO: 353315 - DNA, 20 bp, Artificial Sequence
  Description of Artificial Sequence: Synthetic oligonucleotide
  Target: LAMA2; (+) strand; PAM type: YTN; PAM sequence: TTT
agttatttcttgccttctgc

SEQ ID NO: 353316 - DNA, 20 bp, Artificial Sequence
  Description of Artificial Sequence: Synthetic oligonucleotide
  Target: LAMA2; (+) strand; PAM type: YTN; PAM sequence: TTA
gttatttcttgccttctgct

SEQ ID NO: 353317 - DNA, 20 bp, Artificial Sequence
  Description of Artificial Sequence: Synthetic oligonucleotide
  Target: LAMA2; (+) strand; PAM type: YTN; PAM sequence: TTA
tttcttgccttctgctagct

SEQ ID NO: 353318 - DNA, 20 bp, Artificial Sequence
  Description of Artificial Sequence: Synthetic oligonucleotide
  Target: LAMA2; (+) strand; PAM type: YTN; PAM sequence: TTT
cttgccttctgctagctttt

SEQ ID NO: 353319 - DNA, 20 bp, Artificial Sequence
  Description of Artificial Sequence: Synthetic oligonucleotide
  Target: LAMA2; (+) strand; PAM type: YTN; PAM sequence: TTC
ttgccttctgctagcttttg

SEQ ID NO: 353320 - DNA, 20 bp, Artificial Sequence
  Description of Artificial Sequence: Synthetic oligonucleotide
  Target: LAMA2; (+) strand; PAM type: YTN; PAM sequence: CTT
gccttctgctagcttttgaa

SEQ ID NO: 353321 - DNA, 20 bp, Artificial Sequence
  Description of Artificial Sequence: Synthetic oligonucleotide
  Target: LAMA2; (+) strand; PAM type: YTN; PAM sequence: TTG
ccttctgctagcttttgaat

SEQ ID NO: 353322 - DNA, 20 bp, Artificial Sequence
  Description of Artificial Sequence: Synthetic oligonucleotide
  Target: LAMA2; (+) strand; PAM type: YTN; PAM sequence: CTT
ctgctagcttttgaatgtgt

SEQ ID NO: 353323 - DNA, 20 bp, Artificial Sequence
  Description of Artificial Sequence: Synthetic oligonucleotide
  Target: LAMA2; (+) strand; PAM type: YTN; PAM sequence: TTC
tgctagcttttgaatgtgtt

SEQ ID NO: 353324 - DNA, 20 bp, Artificial Sequence
  Description of Artificial Sequence: Synthetic oligonucleotide
  Target: LAMA2; (+) strand; PAM type: YTN; PAM sequence: CTG
ctagcttttgaatgtgtttg

SEQ ID NO: 353325 - DNA, 20 bp, Artificial Sequence
  Description of Artificial Sequence: Synthetic oligonucleotide
  Target: LAMA2; (+) strand; PAM type: YTN; PAM sequence: CTA
gcttttgaatgtgtttgctc

SEQ ID NO: 353326 - DNA, 20 bp, Artificial Sequence
  Description of Artificial Sequence: Synthetic oligonucleotide
  Target: LAMA2; (+) strand; PAM type: YTN; PAM sequence: CTT
ttgaatgtgtttgctcctgc

SEQ ID NO: 353327 - DNA, 20 bp, Artificial Sequence
  Description of Artificial Sequence: Synthetic oligonucleotide
  Target: LAMA2; (+) strand; PAM type: YTN; PAM sequence: TTT
tgaatgtgtttgctcctgct

SEQ ID NO: 353328 - DNA, 20 bp, Artificial Sequence
  Description of Artificial Sequence: Synthetic oligonucleotide
  Target: LAMA2; (+) strand; PAM type: YTN; PAM sequence: TTT
gaatgtgtttgctcctgctt

SEQ ID NO: 353329 - DNA, 20 bp, Artificial Sequence
  Description of Artificial Sequence: Synthetic oligonucleotide
  Target: LAMA2; (+) strand; PAM type: YTN; PAM sequence: TTG
aatgtgtttgctcctgcttt

SEQ ID NO: 353330 - DNA, 20 bp, Artificial Sequence
  Description of Artificial Sequence: Synthetic oligonucleotide
  Target: LAMA2; (+) strand; PAM type: YTN; PAM sequence: TTT
gctcctgcttttctagttct

SEQ ID NO: 353331 - DNA, 20 bp, Artificial Sequence
  Description of Artificial Sequence: Synthetic oligonucleotide
  Target: LAMA2; (+) strand; PAM type: YTN; PAM sequence: TTG
ctcctgcttttctagttctt

SEQ ID NO: 353332 - DNA, 20 bp, Artificial Sequence
  Description of Artificial Sequence: Synthetic oligonucleotide
  Target: LAMA2; (+) strand; PAM type: YTN; PAM sequence: CTC
ctgcttttctagttctttta

SEQ ID NO: 353333 - DNA, 20 bp, Artificial Sequence
  Description of Artificial Sequence: Synthetic oligonucleotide
  Target: LAMA2; (+) strand; PAM type: YTN; PAM sequence: CTG
cttttctagttcttttaatt

SEQ ID NO: 353334 - DNA, 20 bp, Artificial Sequence
  Description of Artificial Sequence: Synthetic oligonucleotide
  Target: LAMA2; (+) strand; PAM type: YTN; PAM sequence: CTT
ttctagttcttttaattgtg

SEQ ID NO: 353335 - DNA, 20 bp, Artificial Sequence
  Description of Artificial Sequence: Synthetic oligonucleotide
  Target: LAMA2; (+) strand; PAM type: YTN; PAM sequence: TTT
tctagttcttttaattgtga

SEQ ID NO: 353336 - DNA, 20 bp, Artificial Sequence
  Description of Artificial Sequence: Synthetic oligonucleotide
  Target: LAMA2; (+) strand; PAM type: YTN; PAM sequence: TTT
ctagttcttttaattgtgat

SEQ ID NO: 353337 - DNA, 20 bp, Artificial Sequence
  Description of Artificial Sequence: Synthetic oligonucleotide
  Target: LAMA2; (+) strand; PAM type: YTN; PAM sequence: TTC
tagttcttttaattgtgatg

SEQ ID NO: 353338 - DNA, 20 bp, Artificial Sequence
  Description of Artificial Sequence: Synthetic oligonucleotide
  Target: LAMA2; (+) strand; PAM type: YTN; PAM sequence: CTA
gttcttttaattgtgatgtt

SEQ ID NO: 353339 - DNA, 20 bp, Artificial Sequence
  Description of Artificial Sequence: Synthetic oligonucleotide
  Target: LAMA2; (+) strand; PAM type: YTN; PAM sequence: TTC
ttttaattgtgatgttaggg

SEQ ID NO: 353340 - DNA, 20 bp, Artificial Sequence
  Description of Artificial Sequence: Synthetic oligonucleotide
  Target: LAMA2; (+) strand; PAM type: YTN; PAM sequence: CTT
ttaattgtgatgttagggtg

SEQ ID NO: 353341 - DNA, 20 bp, Artificial Sequence
  Description of Artificial Sequence: Synthetic oligonucleotide
  Target: LAMA2; (+) strand; PAM type: YTN; PAM sequence: TTT
taattgtgatgttagggtgt

SEQ ID NO: 353342 - DNA, 20 bp, Artificial Sequence
  Description of Artificial Sequence: Synthetic oligonucleotide
  Target: LAMA2; (+) strand; PAM type: YTN; PAM sequence: TTT
aattgtgatgttagggtgtc

SEQ ID NO: 353343 - DNA, 20 bp, Artificial Sequence
  Description of Artificial Sequence: Synthetic oligonucleotide
  Target: LAMA2; (+) strand; PAM type: YTN; PAM sequence: TTA
attgtgatgttagggtgtca

SEQ ID NO: 353344 - DNA, 20 bp, Artificial Sequence
  Description of Artificial Sequence: Synthetic oligonucleotide
  Target: LAMA2; (+) strand; PAM type: YTN; PAM sequence: TTG
tgatgttagggtgtcaattt

SEQ ID NO: 353345 - DNA, 20 bp, Artificial Sequence
  Description of Artificial Sequence: Synthetic oligonucleotide
  Target: LAMA2; (+) strand; PAM type: YTN; PAM sequence: TTA
gggtgtcaattttggatctt

SEQ ID NO: 353346 - DNA, 20 bp, Artificial Sequence
  Description of Artificial Sequence: Synthetic oligonucleotide
  Target: LAMA2; (+) strand; PAM type: YTN; PAM sequence: TTT
tggatctttcctgctttctc

SEQ ID NO: 353347 - DNA, 20 bp, Artificial Sequence
  Description of Artificial Sequence: Synthetic oligonucleotide
  Target: LAMA2; (+) strand; PAM type: YTN; PAM sequence: TTT
ggatctttcctgctttctct

SEQ ID NO: 353348 - DNA, 20 bp, Artificial Sequence
  Description of Artificial Sequence: Synthetic oligonucleotide
  Target: LAMA2; (+) strand; PAM type: YTN; PAM sequence: TTG
gatctttcctgctttctctt

SEQ ID NO: 353349 - DNA, 20 bp, Artificial Sequence
  Description of Artificial Sequence: Synthetic oligonucleotide
  Target: LAMA2; (+) strand; PAM type: YTN; PAM sequence: CTT
tcctgctttctcttgtgggc

SEQ ID NO: 353350 - DNA, 20 bp, Artificial Sequence
  Description of Artificial Sequence: Synthetic oligonucleotide
  Target: LAMA2; (+) strand; PAM type: YTN; PAM sequence: TTT
cctgctttctcttgtgggca

SEQ ID NO: 353351 - DNA, 20 bp, Artificial Sequence
  Description of Artificial Sequence: Synthetic oligonucleotide
  Target: LAMA2; (+) strand; PAM type: YTN; PAM sequence: TTC
ctgctttctcttgtgggcat

SEQ ID NO: 353352 - DNA, 20 bp, Artificial Sequence
  Description of Artificial Sequence: Synthetic oligonucleotide
  Target: LAMA2; (+) strand; PAM type: YTN; PAM sequence: CTG
ctttctcttgtgggcattta

SEQ ID NO: 353353 - DNA, 20 bp, Artificial Sequence
  Description of Artificial Sequence: Synthetic oligonucleotide
  Target: LAMA2; (+) strand; PAM type: YTN; PAM sequence: CTT
tctcttgtgggcatttagtg

SEQ ID NO: 353354 - DNA, 20 bp, Artificial Sequence
  Description of Artificial Sequence: Synthetic oligonucleotide
  Target: LAMA2; (+) strand; PAM type: YTN; PAM sequence: TTT
ctcttgtgggcatttagtgc

SEQ ID NO: 353355 - DNA, 20 bp, Artificial Sequence
  Description of Artificial Sequence: Synthetic oligonucleotide
  Target: LAMA2; (+) strand; PAM type: YTN; PAM sequence: TTC
tcttgtgggcatttagtgct

SEQ ID NO: 353356 - DNA, 20 bp, Artificial Sequence
  Description of Artificial Sequence: Synthetic oligonucleotide
  Target: LAMA2; (+) strand; PAM type: YTN; PAM sequence: CTC
ttgtgggcatttagtgctat

SEQ ID NO: 353357 - DNA, 20 bp, Artificial Sequence
  Description of Artificial Sequence: Synthetic oligonucleotide
  Target: LAMA2; (+) strand; PAM type: YTN; PAM sequence: CTT
gtgggcatttagtgctataa

SEQ ID NO: 353358 - DNA, 20 bp, Artificial Sequence
  Description of Artificial Sequence: Synthetic oligonucleotide
  Target: LAMA2; (+) strand; PAM type: YTN; PAM sequence: TTG
tgggcatttagtgctataaa

SEQ ID NO: 353359 - DNA, 20 bp, Artificial Sequence
  Description of Artificial Sequence: Synthetic oligonucleotide
  Target: LAMA2; (+) strand; PAM type: YTN; PAM sequence: TTT
agtgctataaatttccctct

SEQ ID NO: 353360 - DNA, 20 bp, Artificial Sequence
  Description of Artificial Sequence: Synthetic oligonucleotide
  Target: LAMA2; (+) strand; PAM type: YTN; PAM sequence: TTA
gtgctataaatttccctcta

SEQ ID NO: 353361 - DNA, 20 bp, Artificial Sequence
  Description of Artificial Sequence: Synthetic oligonucleotide
  Target: LAMA2; (+) strand; PAM type: YTN; PAM sequence: CTA
taaatttccctctacacact

SEQ ID NO: 353362 - DNA, 20 bp, Artificial Sequence
  Description of Artificial Sequence: Synthetic oligonucleotide
  Target: LAMA2; (+) strand; PAM type: YTN; PAM sequence: TTT
ccctctacacactgctttga

SEQ ID NO: 353363 - DNA, 20 bp, Artificial Sequence
  Description of Artificial Sequence: Synthetic oligonucleotide
  Target: LAMA2; (+) strand; PAM type: YTN; PAM sequence: TTC
cctctacacactgctttgaa

SEQ ID NO: 353364 - DNA, 20 bp, Artificial Sequence
  Description of Artificial Sequence: Synthetic oligonucleotide
  Target: LAMA2; (+) strand; PAM type: YTN; PAM sequence: CTC
tacacactgctttgaatgcg

SEQ ID NO: 353365 - DNA, 20 bp, Artificial Sequence
  Description of Artificial Sequence: Synthetic oligonucleotide
  Target: LAMA2; (+) strand; PAM type: YTN; PAM sequence: CTA
cacactgctttgaatgcgtc

SEQ ID NO: 353366 - DNA, 20 bp, Artificial Sequence
  Description of Artificial Sequence: Synthetic oligonucleotide
  Target: LAMA2; (+) strand; PAM type: YTN; PAM sequence: CTG
ctttgaatgcgtcccagaga

SEQ ID NO: 353367 - DNA, 20 bp, Artificial Sequence
  Description of Artificial Sequence: Synthetic oligonucleotide
  Target: LAMA2; (+) strand; PAM type: YTN; PAM sequence: CTT
tgaatgcgtcccagagattc

SEQ ID NO: 353368 - DNA, 20 bp, Artificial Sequence
  Description of Artificial Sequence: Synthetic oligonucleotide
  Target: LAMA2; (+) strand; PAM type: YTN; PAM sequence: TTT
gaatgcgtcccagagattct

SEQ ID NO: 353369 - DNA, 20 bp, Artificial Sequence
  Description of Artificial Sequence: Synthetic oligonucleotide
  Target: LAMA2; (+) strand; PAM type: YTN; PAM sequence: TTG
aatgcgtcccagagattctg

SEQ ID NO: 353370 - DNA, 20 bp, Artificial Sequence
  Description of Artificial Sequence: Synthetic oligonucleotide
  Target: LAMA2; (+) strand; PAM type: YTN; PAM sequence: TTC
tggtatgttgtgtctttgtt

SEQ ID NO: 353371 - DNA, 20 bp, Artificial Sequence
  Description of Artificial Sequence: Synthetic oligonucleotide
  Target: LAMA2; (+) strand; PAM type: YTN; PAM sequence: CTG
gtatgttgtgtctttgttct

SEQ ID NO: 353372 - DNA, 20 bp, Artificial Sequence
  Description of Artificial Sequence: Synthetic oligonucleotide
  Target: LAMA2; (+) strand; PAM type: YTN; PAM sequence: TTG
tgtctttgttctcatgggtt

SEQ ID NO: 353373 - DNA, 20 bp, Artificial Sequence
  Description of Artificial Sequence: Synthetic oligonucleotide
  Target: LAMA2; (+) strand; PAM type: YTN; PAM sequence: CTT
tgttctcatgggtttcaaag

SEQ ID NO: 353374 - DNA, 20 bp, Artificial Sequence
  Description of Artificial Sequence: Synthetic oligonucleotide
  Target: LAMA2; (+) strand; PAM type: YTN; PAM sequence: TTT
gttctcatgggtttcaaaga

SEQ ID NO: 353375 - DNA, 20 bp, Artificial Sequence
  Description of Artificial Sequence: Synthetic oligonucleotide
  Target: LAMA2; (+) strand; PAM type: YTN; PAM sequence: TTG
ttctcatgggtttcaaagaa

SEQ ID NO: 353376 - DNA, 20 bp, Artificial Sequence
  Description of Artificial Sequence: Synthetic oligonucleotide
  Target: LAMA2; (+) strand; PAM type: YTN; PAM sequence: TTC
tcatgggtttcaaagaacat

SEQ ID NO: 353377 - DNA, 20 bp, Artificial Sequence
  Description of Artificial Sequence: Synthetic oligonucleotide
  Target: LAMA2; (+) strand; PAM type: YTN; PAM sequence: CTC
atgggtttcaaagaacatct

SEQ ID NO: 353378 - DNA, 20 bp, Artificial Sequence
  Description of Artificial Sequence: Synthetic oligonucleotide
  Target: LAMA2; (+) strand; PAM type: YTN; PAM sequence: TTT
caaagaacatctttatttct

SEQ ID NO: 353379 - DNA, 20 bp, Artificial Sequence
  Description of Artificial Sequence: Synthetic oligonucleotide
  Target: LAMA2; (+) strand; PAM type: YTN; PAM sequence: TTC
aaagaacatctttatttctg

SEQ ID NO: 353380 - DNA, 20 bp, Artificial Sequence
  Description of Artificial Sequence: Synthetic oligonucleotide
  Target: LAMA2; (+) strand; PAM type: YTN; PAM sequence: CTT
tatttctgccttcatttcgt

SEQ ID NO: 353381 - DNA, 20 bp, Artificial Sequence
  Description of Artificial Sequence: Synthetic oligonucleotide
  Target: LAMA2; (+) strand; PAM type: YTN; PAM sequence: TTT
atttctgccttcatttcgtt

SEQ ID NO: 353382 - DNA, 20 bp, Artificial Sequence
  Description of Artificial Sequence: Synthetic oligonucleotide
  Target: LAMA2; (+) strand; PAM type: YTN; PAM sequence: TTA
tttctgccttcatttcgtta

SEQ ID NO: 353383 - DNA, 20 bp, Artificial Sequence
  Description of Artificial Sequence: Synthetic oligonucleotide
  Target: LAMA2; (+) strand; PAM type: YTN; PAM sequence: TTT
ctgccttcatttcgttatgt

SEQ ID NO: 353384 - DNA, 20 bp, Artificial Sequence
  Description of Artificial Sequence: Synthetic oligonucleotide
  Target: LAMA2; (+) strand; PAM type: YTN; PAM sequence: TTC
tgccttcatttcgttatgta

SEQ ID NO: 353385 - DNA, 20 bp, Artificial Sequence
  Description of Artificial Sequence: Synthetic oligonucleotide
  Target: LAMA2; (+) strand; PAM type: YTN; PAM sequence: CTG
ccttcatttcgttatgtacc

SEQ ID NO: 353386 - DNA, 20 bp, Artificial Sequence
  Description of Artificial Sequence: Synthetic oligonucleotide
  Target: LAMA2; (+) strand; PAM type: YTN; PAM sequence: CTT
catttcgttatgtacccagt

SEQ ID NO: 353387 - DNA, 20 bp, Artificial Sequence
  Description of Artificial Sequence: Synthetic oligonucleotide
  Target: LAMA2; (+) strand; PAM type: YTN; PAM sequence: TTC
atttcgttatgtacccagta

SEQ ID NO: 353388 - DNA, 20 bp, Artificial Sequence
  Description of Artificial Sequence: Synthetic oligonucleotide
  Target: LAMA2; (+) strand; PAM type: YTN; PAM sequence: TTT
cgttatgtacccagtagtca

SEQ ID NO: 353389 - DNA, 20 bp, Artificial Sequence
  Description of Artificial Sequence: Synthetic oligonucleotide
  Target: LAMA2; (+) strand; PAM type: YTN; PAM sequence: TTC
gttatgtacccagtagtcat

SEQ ID NO: 353390 - DNA, 20 bp, Artificial Sequence
  Description of Artificial Sequence: Synthetic oligonucleotide
  Target: LAMA2; (+) strand; PAM type: YTN; PAM sequence: TTA
tgtacccagtagtcattcag

SEQ ID NO: 353391 - DNA, 20 bp, Artificial Sequence
  Description of Artificial Sequence: Synthetic oligonucleotide
  Target: LAMA2; (+) strand; PAM type: YTN; PAM sequence: TTC
aggagcaggttgttcagttt

SEQ ID NO: 353392 - DNA, 20 bp, Artificial Sequence
  Description of Artificial Sequence: Synthetic oligonucleotide
  Target: LAMA2; (+) strand; PAM type: YTN; PAM sequence: TTG
ttcagtttccatgtagttga

SEQ ID NO: 353393 - DNA, 20 bp, Artificial Sequence
  Description of Artificial Sequence: Synthetic oligonucleotide
  Target: LAMA2; (+) strand; PAM type: YTN; PAM sequence: TTC
agtttccatgtagttgagca

SEQ ID NO: 353394 - DNA, 20 bp, Artificial Sequence
  Description of Artificial Sequence: Synthetic oligonucleotide
  Target: LAMA2; (+) strand; PAM type: YTN; PAM sequence: TTT
ccatgtagttgagcagtttt

SEQ ID NO: 353395 - DNA, 20 bp, Artificial Sequence
  Description of Artificial Sequence: Synthetic oligonucleotide
  Target: LAMA2; (+) strand; PAM type: YTN; PAM sequence: TTC
catgtagttgagcagttttg

SEQ ID NO: 353396 - DNA, 20 bp, Artificial Sequence
  Description of Artificial Sequence: Synthetic oligonucleotide
  Target: LAMA2; (+) strand; PAM type: YTN; PAM sequence: TTG
agcagttttgagtgagattc

SEQ ID NO: 353397 - DNA, 20 bp, Artificial Sequence
  Description of Artificial Sequence: Synthetic oligonucleotide
  Target: LAMA2; (+) strand; PAM type: YTN; PAM sequence: TTT
tgagtgagattcttaatcct

SEQ ID NO: 353398 - DNA, 20 bp, Artificial Sequence
  Description of Artificial Sequence: Synthetic oligonucleotide
  Target: LAMA2; (+) strand; PAM type: YTN; PAM sequence: TTT
gagtgagattcttaatcctg

SEQ ID NO: 353399 - DNA, 20 bp, Artificial Sequence
  Description of Artificial Sequence: Synthetic oligonucleotide
  Target: LAMA2; (+) strand; PAM type: YTN; PAM sequence: TTG
agtgagattcttaatcctga

SEQ ID NO: 353400 - DNA, 20 bp, Artificial Sequence
  Description of Artificial Sequence: Synthetic oligonucleotide
  Target: LAMA2; (+) strand; PAM type: YTN; PAM sequence: TTC
ttaatcctgagttctagttt

SEQ ID NO: 353401 - DNA, 20 bp, Artificial Sequence
  Description of Artificial Sequence: Synthetic oligonucleotide
  Target: LAMA2; (+) strand; PAM type: YTN; PAM sequence: CTT
aatcctgagttctagtttga

SEQ ID NO: 353402 - DNA, 20 bp, Artificial Sequence
  Description of Artificial Sequence: Synthetic oligonucleotide
  Target: LAMA2; (+) strand; PAM type: YTN; PAM sequence: TTA
atcctgagttctagtttgat

SEQ ID NO: 353403 - DNA, 20 bp, Artificial Sequence
  Description of Artificial Sequence: Synthetic oligonucleotide
  Target: LAMA2; (+) strand; PAM type: YTN; PAM sequence: CTG
agttctagtttgattgcact

SEQ ID NO: 353404 - DNA, 20 bp, Artificial Sequence
  Description of Artificial Sequence: Synthetic oligonucleotide
  Target: LAMA2; (+) strand; PAM type: YTN; PAM sequence: TTC
tagtttgattgcactgtggt

SEQ ID NO: 353405 - DNA, 20 bp, Artificial Sequence
  Description of Artificial Sequence: Synthetic oligonucleotide
  Target: LAMA2; (+) strand; PAM type: YTN; PAM sequence: CTA
gtttgattgcactgtggtct

SEQ ID NO: 353406 - DNA, 20 bp, Artificial Sequence
  Description of Artificial Sequence: Synthetic oligonucleotide
  Target: LAMA2; (+) strand; PAM type: YTN; PAM sequence: TTT
gattgcactgtggtctgaga

SEQ ID NO: 353407 - DNA, 20 bp, Artificial Sequence
  Description of Artificial Sequence: Synthetic oligonucleotide
  Target: LAMA2; (+) strand; PAM type: YTN; PAM sequence: TTG
attgcactgtggtctgagag

SEQ ID NO: 353408 - DNA, 20 bp, Artificial Sequence
  Description of Artificial Sequence: Synthetic oligonucleotide
  Target: LAMA2; (+) strand; PAM type: YTN; PAM sequence: TTG
cactgtggtctgagagatag

SEQ ID NO: 353409 - DNA, 20 bp, Artificial Sequence
  Description of Artificial Sequence: Synthetic oligonucleotide
  Target: LAMA2; (+) strand; PAM type: YTN; PAM sequence: CTG
tggtctgagagatagtttgt

SEQ ID NO: 353410 - DNA, 20 bp, Artificial Sequence
  Description of Artificial Sequence: Synthetic oligonucleotide
  Target: LAMA2; (+) strand; PAM type: YTN; PAM sequence: CTG
agagatagtttgttataatt

SEQ ID NO: 353411 - DNA, 20 bp, Artificial Sequence
  Description of Artificial Sequence: Synthetic oligonucleotide
  Target: LAMA2; (+) strand; PAM type: YTN; PAM sequence: TTT
gttataatttctgttctttt

SEQ ID NO: 353412 - DNA, 20 bp, Artificial Sequence
  Description of Artificial Sequence: Synthetic oligonucleotide
  Target: LAMA2; (+) strand; PAM type: YTN; PAM sequence: TTG
ttataatttctgttctttta

SEQ ID NO: 353413 - DNA, 20 bp, Artificial Sequence
  Description of Artificial Sequence: Synthetic oligonucleotide
  Target: LAMA2; (+) strand; PAM type: YTN; PAM sequence: TTA
taatttctgttcttttacat

SEQ ID NO: 353414 - DNA, 20 bp, Artificial Sequence
  Description of Artificial Sequence: Synthetic oligonucleotide
  Target: LAMA2; (+) strand; PAM type: YTN; PAM sequence: TTT
ctgttcttttacatttgctg

SEQ ID NO: 353415 - DNA, 20 bp, Artificial Sequence
  Description of Artificial Sequence: Synthetic oligonucleotide
  Target: LAMA2; (+) strand; PAM type: YTN; PAM sequence: TTC
tgttcttttacatttgctga

SEQ ID NO: 353416 - DNA, 20 bp, Artificial Sequence
  Description of Artificial Sequence: Synthetic oligonucleotide
  Target: LAMA2; (+) strand; PAM type: YTN; PAM sequence: CTG
ttcttttacatttgctgagg

SEQ ID NO: 353417 - DNA, 20 bp, Artificial Sequence
  Description of Artificial Sequence: Synthetic oligonucleotide
  Target: LAMA2; (+) strand; PAM type: YTN; PAM sequence: TTC
ttttacatttgctgaggaga

SEQ ID NO: 353418 - DNA, 20 bp, Artificial Sequence
  Description of Artificial Sequence: Synthetic oligonucleotide
  Target: LAMA2; (+) strand; PAM type: YTN; PAM sequence: CTT
ttacatttgctgaggagagc

SEQ ID NO: 353419 - DNA, 20 bp, Artificial Sequence
  Description of Artificial Sequence: Synthetic oligonucleotide
  Target: LAMA2; (+) strand; PAM type: YTN; PAM sequence: TTT
tacatttgctgaggagagct

SEQ ID NO: 353420 - DNA, 20 bp, Artificial Sequence
  Description of Artificial Sequence: Synthetic oligonucleotide
  Target: LAMA2; (+) strand; PAM type: YTN; PAM sequence: TTT
acatttgctgaggagagctt

SEQ ID NO: 353421 - DNA, 20 bp, Artificial Sequence
  Description of Artificial Sequence: Synthetic oligonucleotide
  Target: LAMA2; (+) strand; PAM type: YTN; PAM sequence: TTA
catttgctgaggagagcttt

SEQ ID NO: 353422 - DNA, 20 bp, Artificial Sequence
  Description of Artificial Sequence: Synthetic oligonucleotide
  Target: LAMA2; (+) strand; PAM type: YTN; PAM sequence: TTT
gctgaggagagctttacttc

SEQ ID NO: 353423 - DNA, 20 bp, Artificial Sequence
  Description of Artificial Sequence: Synthetic oligonucleotide
  Target: LAMA2; (+) strand; PAM type: YTN; PAM sequence: TTG
ctgaggagagctttacttcc

SEQ ID NO: 353424 - DNA, 20 bp, Artificial Sequence
  Description of Artificial Sequence: Synthetic oligonucleotide
  Target: LAMA2; (+) strand; PAM type: YTN; PAM sequence: CTG
aggagagctttacttccaag

SEQ ID NO: 353425 - DNA, 20 bp, Artificial Sequence
  Description of Artificial Sequence: Synthetic oligonucleotide
  Target: LAMA2; (+) strand; PAM type: YTN; PAM sequence: CTT
tacttccaagtatgtggtca

SEQ ID NO: 353426 - DNA, 20 bp, Artificial Sequence
  Description of Artificial Sequence: Synthetic oligonucleotide
  Target: LAMA2; (+) strand; PAM type: YTN; PAM sequence: TTT
acttccaagtatgtggtcaa

SEQ ID NO: 353427 - DNA, 20 bp, Artificial Sequence
  Description of Artificial Sequence: Synthetic oligonucleotide
  Target: LAMA2; (+) strand; PAM type: YTN; PAM sequence: TTA
cttccaagtatgtggtcaat

SEQ ID NO: 353428 - DNA, 20 bp, Artificial Sequence
  Description of Artificial Sequence: Synthetic oligonucleotide
  Target: LAMA2; (+) strand; PAM type: YTN; PAM sequence: CTT
ccaagtatgtggtcaatttt

SEQ ID NO: 353429 - DNA, 20 bp, Artificial Sequence
  Description of Artificial Sequence: Synthetic oligonucleotide
  Target: LAMA2; (+) strand; PAM type: YTN; PAM sequence: TTC
caagtatgtggtcaattttg

SEQ ID NO: 353430 - DNA, 20 bp, Artificial Sequence
  Description of Artificial Sequence: Synthetic oligonucleotide
  Target: LAMA2; (+) strand; PAM type: YTN; PAM sequence: TTT
tggaataggtgtggtgtggt

SEQ ID NO: 353431 - DNA, 20 bp, Artificial Sequence
  Description of Artificial Sequence: Synthetic oligonucleotide
  Target: LAMA2; (+) strand; PAM type: YTN; PAM sequence: TTT
ggaataggtgtggtgtggtg

SEQ ID NO: 353432 - DNA, 20 bp, Artificial Sequence
  Description of Artificial Sequence: Synthetic oligonucleotide
  Target: LAMA2; (+) strand; PAM type: YTN; PAM sequence: TTG
gaataggtgtggtgtggtgc

SEQ ID NO: 353433 - DNA, 20 bp, Artificial Sequence
  Description of Artificial Sequence: Synthetic oligonucleotide
  Target: LAMA2; (+) strand; PAM type: YTN; PAM sequence: CTG
aaaaaaatgtatattctgtt

SEQ ID NO: 353434 - DNA, 20 bp, Artificial Sequence
  Description of Artificial Sequence: Synthetic oligonucleotide
  Target: LAMA2; (+) strand; PAM type: YTN; PAM sequence: TTC
tgttgatttggggtggagag

SEQ ID NO: 353435 - DNA, 20 bp, Artificial Sequence
  Description of Artificial Sequence: Synthetic oligonucleotide
  Target: LAMA2; (+) strand; PAM type: YTN; PAM sequence: CTG
ttgatttggggtggagagtt

SEQ ID NO: 353436 - DNA, 20 bp, Artificial Sequence
  Description of Artificial Sequence: Synthetic oligonucleotide
  Target: LAMA2; (+) strand; PAM type: YTN; PAM sequence: TTG
atttggggtggagagttctg

SEQ ID NO: 353437 - DNA, 20 bp, Artificial Sequence
  Description of Artificial Sequence: Synthetic oligonucleotide
  Target: LAMA2; (+) strand; PAM type: YTN; PAM sequence: TTT
ggggtggagagttctgtaga

SEQ ID NO: 353438 - DNA, 20 bp, Artificial Sequence
  Description of Artificial Sequence: Synthetic oligonucleotide
  Target: LAMA2; (+) strand; PAM type: YTN; PAM sequence: TTG
gggtggagagttctgtagat

SEQ ID NO: 353439 - DNA, 20 bp, Artificial Sequence
  Description of Artificial Sequence: Synthetic oligonucleotide
  Target: LAMA2; (+) strand; PAM type: YTN; PAM sequence: TTC
tgtagatgtttattaggtcc

SEQ ID NO: 353440 - DNA, 20 bp, Artificial Sequence
  Description of Artificial Sequence: Synthetic oligonucleotide
  Target: LAMA2; (+) strand; PAM type: YTN; PAM sequence: CTG
tagatgtttattaggtccgc

SEQ ID NO: 353441 - DNA, 20 bp, Artificial Sequence
  Description of Artificial Sequence: Synthetic oligonucleotide
  Target: LAMA2; (+) strand; PAM type: YTN; PAM sequence: TTT
attaggtccgcttggtgcag

SEQ ID NO: 353442 - DNA, 20 bp, Artificial Sequence
  Description of Artificial Sequence: Synthetic oligonucleotide
  Target: LAMA2; (+) strand; PAM type: YTN; PAM sequence: TTA
ttaggtccgcttggtgcaga

SEQ ID NO: 353443 - DNA, 20 bp, Artificial Sequence
  Description of Artificial Sequence: Synthetic oligonucleotide
  Target: LAMA2; (+) strand; PAM type: YTN; PAM sequence: TTA
ggtccgcttggtgcagagct

SEQ ID NO: 353444 - DNA, 20 bp, Artificial Sequence
  Description of Artificial Sequence: Synthetic oligonucleotide
  Target: LAMA2; (+) strand; PAM type: YTN; PAM sequence: CTT
ggtgcagagctgtgttcaat

SEQ ID NO: 353445 - DNA, 20 bp, Artificial Sequence
  Description of Artificial Sequence: Synthetic oligonucleotide
  Target: LAMA2; (+) strand; PAM type: YTN; PAM sequence: TTG
gtgcagagctgtgttcaatt

SEQ ID NO: 353446 - DNA, 20 bp, Artificial Sequence
  Description of Artificial Sequence: Synthetic oligonucleotide
  Target: LAMA2; (+) strand; PAM type: YTN; PAM sequence: CTG
tgttcaattcctgggtatcc

SEQ ID NO: 353447 - DNA, 20 bp, Artificial Sequence
  Description of Artificial Sequence: Synthetic oligonucleotide
  Target: LAMA2; (+) strand; PAM type: YTN; PAM sequence: TTC
aattcctgggtatccttgtt

SEQ ID NO: 353448 - DNA, 20 bp, Artificial Sequence
  Description of Artificial Sequence: Synthetic oligonucleotide
  Target: LAMA2; (+) strand; PAM type: YTN; PAM sequence: TTC
ctgggtatccttgttgactt

SEQ ID NO: 353449 - DNA, 20 bp, Artificial Sequence
  Description of Artificial Sequence: Synthetic oligonucleotide
  Target: LAMA2; (+) strand; PAM type: YTN; PAM sequence: CTG
ggtatccttgttgacttctt

SEQ ID NO: 353450 - DNA, 20 bp, Artificial Sequence
  Description of Artificial Sequence: Synthetic oligonucleotide
  Target: LAMA2; (+) strand; PAM type: YTN; PAM sequence: CTT
gttgacttcttgttgacttt

SEQ ID NO: 353451 - DNA, 20 bp, Artificial Sequence
  Description of Artificial Sequence: Synthetic oligonucleotide
  Target: LAMA2; (+) strand; PAM type: YTN; PAM sequence: TTG
ttgacttcttgttgactttc

SEQ ID NO: 353452 - DNA, 20 bp, Artificial Sequence
  Description of Artificial Sequence: Synthetic oligonucleotide
  Target: LAMA2; (+) strand; PAM type: YTN; PAM sequence: TTG
acttcttgttgactttctgt

SEQ ID NO: 353453 - DNA, 20 bp, Artificial Sequence
  Description of Artificial Sequence: Synthetic oligonucleotide
  Target: LAMA2; (+) strand; PAM type: YTN; PAM sequence: CTT
cttgttgactttctgtctcg

SEQ ID NO: 353454 - DNA, 20 bp, Artificial Sequence
  Description of Artificial Sequence: Synthetic oligonucleotide
  Target: LAMA2; (+) strand; PAM type: YTN; PAM sequence: TTC
ttgttgactttctgtctcgt

SEQ ID NO: 353455 - DNA, 20 bp, Artificial Sequence
  Description of Artificial Sequence: Synthetic oligonucleotide
  Target: LAMA2; (+) strand; PAM type: YTN; PAM sequence: CTT
gttgactttctgtctcgttg

SEQ ID NO: 353456 - DNA, 20 bp, Artificial Sequence
  Description of Artificial Sequence: Synthetic oligonucleotide
  Target: LAMA2; (+) strand; PAM type: YTN; PAM sequence: TTG
ttgactttctgtctcgttga

SEQ ID NO: 353457 - DNA, 20 bp, Artificial Sequence
  Description of Artificial Sequence: Synthetic oligonucleotide
  Target: LAMA2; (+) strand; PAM type: YTN; PAM sequence: TTG
actttctgtctcgttgatct

SEQ ID NO: 353458 - DNA, 20 bp, Artificial Sequence
  Description of Artificial Sequence: Synthetic oligonucleotide
  Target: LAMA2; (+) strand; PAM type: YTN; PAM sequence: CTT
tctgtctcgttgatctgtct

SEQ ID NO: 353459 - DNA, 20 bp, Artificial Sequence
  Description of Artificial Sequence: Synthetic oligonucleotide
  Target: LAMA2; (+) strand; PAM type: YTN; PAM sequence: TTT
ctgtctcgttgatctgtcta

SEQ ID NO: 353460 - DNA, 20 bp, Artificial Sequence
  Description of Artificial Sequence: Synthetic oligonucleotide
  Target: LAMA2; (+) strand; PAM type: YTN; PAM sequence: TTC
tgtctcgttgatctgtctaa

SEQ ID NO: 353461 - DNA, 20 bp, Artificial Sequence
  Description of Artificial Sequence: Synthetic oligonucleotide
  Target: LAMA2; (+) strand; PAM type: YTN; PAM sequence: CTG
tctcgttgatctgtctaatg

SEQ ID NO: 353462 - DNA, 20 bp, Artificial Sequence
  Description of Artificial Sequence: Synthetic oligonucleotide
  Target: LAMA2; (+) strand; PAM type: YTN; PAM sequence: CTC
gttgatctgtctaatgttga

SEQ ID NO: 353463 - DNA, 20 bp, Artificial Sequence
  Description of Artificial Sequence: Synthetic oligonucleotide
  Target: LAMA2; (+) strand; PAM type: YTN; PAM sequence: TTG
atctgtctaatgttgacagt

SEQ ID NO: 353464 - DNA, 20 bp, Artificial Sequence
  Description of Artificial Sequence: Synthetic oligonucleotide
  Target: LAMA2; (+) strand; PAM type: YTN; PAM sequence: CTG
tctaatgttgacagtggggt

SEQ ID NO: 353465 - DNA, 20 bp, Artificial Sequence
  Description of Artificial Sequence: Synthetic oligonucleotide
  Target: LAMA2; (+) strand; PAM type: YTN; PAM sequence: CTA
atgttgacagtggggtgtta

SEQ ID NO: 353466 - DNA, 20 bp, Artificial Sequence
  Description of Artificial Sequence: Synthetic oligonucleotide
  Target: LAMA2; (+) strand; PAM type: YTN; PAM sequence: TTG
acagtggggtgttaaagtct

SEQ ID NO: 353467 - DNA, 20 bp, Artificial Sequence
  Description of Artificial Sequence: Synthetic oligonucleotide
  Target: LAMA2; (+) strand; PAM type: YTN; PAM sequence: TTA
aagtctcccattattaatgt

SEQ ID NO: 353468 - DNA, 20 bp, Artificial Sequence
  Description of Artificial Sequence: Synthetic oligonucleotide
  Target: LAMA2; (+) strand; PAM type: YTN; PAM sequence: CTC
ccattattaatgtgtgggag

SEQ ID NO: 353469 - DNA, 20 bp, Artificial Sequence
  Description of Artificial Sequence: Synthetic oligonucleotide
  Target: LAMA2; (+) strand; PAM type: YTN; PAM sequence: TTA
ttaatgtgtgggagtctaag

SEQ ID NO: 353470 - DNA, 20 bp, Artificial Sequence
  Description of Artificial Sequence: Synthetic oligonucleotide
  Target: LAMA2; (+) strand; PAM type: YTN; PAM sequence: TTA
atgtgtgggagtctaagtct

SEQ ID NO: 353471 - DNA, 20 bp, Artificial Sequence
  Description of Artificial Sequence: Synthetic oligonucleotide
  Target: LAMA2; (+) strand; PAM type: YTN; PAM sequence: CTA
agtctctttgtaggtcactc

SEQ ID NO: 353472 - DNA, 20 bp, Artificial Sequence
  Description of Artificial Sequence: Synthetic oligonucleotide
  Target: LAMA2; (+) strand; PAM type: YTN; PAM sequence: CTC
tttgtaggtcactcaggact

SEQ ID NO: 353473 - DNA, 20 bp, Artificial Sequence
  Description of Artificial Sequence: Synthetic oligonucleotide
  Target: LAMA2; (+) strand; PAM type: YTN; PAM sequence: CTT
tgtaggtcactcaggacttg

SEQ ID NO: 353474 - DNA, 20 bp, Artificial Sequence
  Description of Artificial Sequence: Synthetic oligonucleotide
  Target: LAMA2; (+) strand; PAM type: YTN; PAM sequence: TTT
gtaggtcactcaggacttgc

SEQ ID NO: 353475 - DNA, 20 bp, Artificial Sequence
  Description of Artificial Sequence: Synthetic oligonucleotide
  Target: LAMA2; (+) strand; PAM type: YTN; PAM sequence: TTG
taggtcactcaggacttgct

SEQ ID NO: 353476 - DNA, 20 bp, Artificial Sequence
  Description of Artificial Sequence: Synthetic oligonucleotide
  Target: LAMA2; (+) strand; PAM type: YTN; PAM sequence: CTC
aggacttgctttatgaatct

SEQ ID NO: 353477 - DNA, 20 bp, Artificial Sequence
  Description of Artificial Sequence: Synthetic oligonucleotide
  Target: LAMA2; (+) strand; PAM type: YTN; PAM sequence: CTT
gctttatgaatctgggtgct

SEQ ID NO: 353478 - DNA, 20 bp, Artificial Sequence
  Description of Artificial Sequence: Synthetic oligonucleotide
  Target: LAMA2; (+) strand; PAM type: YTN; PAM sequence: TTG
ctttatgaatctgggtgctc

SEQ ID NO: 353479 - DNA, 20 bp, Artificial Sequence
  Description of Artificial Sequence: Synthetic oligonucleotide
  Target: LAMA2; (+) strand; PAM type: YTN; PAM sequence: CTT
tatgaatctgggtgctcctg

SEQ ID NO: 353480 - DNA, 20 bp, Artificial Sequence
  Description of Artificial Sequence: Synthetic oligonucleotide
  Target: LAMA2; (+) strand; PAM type: YTN; PAM sequence: TTT
atgaatctgggtgctcctgt

SEQ ID NO: 353481 - DNA, 20 bp, Artificial Sequence
  Description of Artificial Sequence: Synthetic oligonucleotide
  Target: LAMA2; (+) strand; PAM type: YTN; PAM sequence: TTA
tgaatctgggtgctcctgta

SEQ ID NO: 353482 - DNA, 20 bp, Artificial Sequence
  Description of Artificial Sequence: Synthetic oligonucleotide
  Target: LAMA2; (+) strand; PAM type: YTN; PAM sequence: CTG
ggtgctcctgtattgggtgc

SEQ ID NO: 353483 - DNA, 20 bp, Artificial Sequence
  Description of Artificial Sequence: Synthetic oligonucleotide
  Target: LAMA2; (+) strand; PAM type: YTN; PAM sequence: CTC
ctgtattgggtgcatatata

SEQ ID NO: 353484 - DNA, 20 bp, Artificial Sequence
  Description of Artificial Sequence: Synthetic oligonucleotide
  Target: LAMA2; (+) strand; PAM type: YTN; PAM sequence: CTG
tattgggtgcatatatattt

SEQ ID NO: 353485 - DNA, 20 bp, Artificial Sequence
  Description of Artificial Sequence: Synthetic oligonucleotide
  Target: LAMA2; (+) strand; PAM type: YTN; PAM sequence: TTG
ggtgcatatatatttaggat

SEQ ID NO: 353486 - DNA, 20 bp, Artificial Sequence
  Description of Artificial Sequence: Synthetic oligonucleotide
  Target: LAMA2; (+) strand; PAM type: YTN; PAM sequence: TTT
aggatagttagctcttcttg

SEQ ID NO: 353487 - DNA, 20 bp, Artificial Sequence
  Description of Artificial Sequence: Synthetic oligonucleotide
  Target: LAMA2; (+) strand; PAM type: YTN; PAM sequence: TTA
ggatagttagctcttcttgt

SEQ ID NO: 353488 - DNA, 20 bp, Artificial Sequence
  Description of Artificial Sequence: Synthetic oligonucleotide
  Target: LAMA2; (+) strand; PAM type: YTN; PAM sequence: TTA
gctcttcttgttgaattgat

SEQ ID NO: 353489 - DNA, 20 bp, Artificial Sequence
  Description of Artificial Sequence: Synthetic oligonucleotide
  Target: LAMA2; (+) strand; PAM type: YTN; PAM sequence: CTC
ttcttgttgaattgatccct

SEQ ID NO: 353490 - DNA, 20 bp, Artificial Sequence
  Description of Artificial Sequence: Synthetic oligonucleotide
  Target: LAMA2; (+) strand; PAM type: YTN; PAM sequence: CTT
cttgttgaattgatcccttt

SEQ ID NO: 353491 - DNA, 20 bp, Artificial Sequence
  Description of Artificial Sequence: Synthetic oligonucleotide
  Target: LAMA2; (+) strand; PAM type: YTN; PAM sequence: TTC
ttgttgaattgatcccttta

SEQ ID NO: 353492 - DNA, 20 bp, Artificial Sequence
  Description of Artificial Sequence: Synthetic oligonucleotide
  Target: LAMA2; (+) strand; PAM type: YTN; PAM sequence: CTT
gttgaattgatccctttacc

SEQ ID NO: 353493 - DNA, 20 bp, Artificial Sequence
  Description of Artificial Sequence: Synthetic oligonucleotide
  Target: LAMA2; (+) strand; PAM type: YTN; PAM sequence: TTG
ttgaattgatccctttacca

SEQ ID NO: 353494 - DNA, 20 bp, Artificial Sequence
  Description of Artificial Sequence: Synthetic oligonucleotide
  Target: LAMA2; (+) strand; PAM type: YTN; PAM sequence: TTG
aattgatccctttaccatta

SEQ ID NO: 353495 - DNA, 20 bp, Artificial Sequence
  Description of Artificial Sequence: Synthetic oligonucleotide
  Target: LAMA2; (+) strand; PAM type: YTN; PAM sequence: TTG
atccctttaccattatgtaa

SEQ ID NO: 353496 - DNA, 20 bp, Artificial Sequence
  Description of Artificial Sequence: Synthetic oligonucleotide
  Target: LAMA2; (+) strand; PAM type: YTN; PAM sequence: CTT
taccattatgtaatggcctt

SEQ ID NO: 353497 - DNA, 20 bp, Artificial Sequence
  Description of Artificial Sequence: Synthetic oligonucleotide
  Target: LAMA2; (+) strand; PAM type: YTN; PAM sequence: TTT
accattatgtaatggccttc

SEQ ID NO: 353498 - DNA, 20 bp, Artificial Sequence
  Description of Artificial Sequence: Synthetic oligonucleotide
  Target: LAMA2; (+) strand; PAM type: YTN; PAM sequence: TTA
ccattatgtaatggccttct

SEQ ID NO: 353499 - DNA, 20 bp, Artificial Sequence
  Description of Artificial Sequence: Synthetic oligonucleotide
  Target: LAMA2; (+) strand; PAM type: YTN; PAM sequence: TTA
tgtaatggccttctttgtct

SEQ ID NO: 353500 - DNA, 20 bp, Artificial Sequence
  Description of Artificial Sequence: Synthetic oligonucleotide
  Target: LAMA2; (+) strand; PAM type: YTN; PAM sequence: CTT
ctttgtctcttttgatgttt

SEQ ID NO: 353501 - DNA, 20 bp, Artificial Sequence
  Description of Artificial Sequence: Synthetic oligonucleotide
  Target: LAMA2; (+) strand; PAM type: YTN; PAM sequence: TTC
tttgtctcttttgatgtttg

SEQ ID NO: 353502 - DNA, 20 bp, Artificial Sequence
  Description of Artificial Sequence: Synthetic oligonucleotide
  Target: LAMA2; (+) strand; PAM type: YTN; PAM sequence: CTT
tgtctcttttgatgtttgtt

SEQ ID NO: 353503 - DNA, 20 bp, Artificial Sequence
  Description of Artificial Sequence: Synthetic oligonucleotide
  Target: LAMA2; (+) strand; PAM type: YTN; PAM sequence: TTT
gtctcttttgatgtttgttg

SEQ ID NO: 353504 - DNA, 20 bp, Artificial Sequence
  Description of Artificial Sequence: Synthetic oligonucleotide
  Target: LAMA2; (+) strand; PAM type: YTN; PAM sequence: TTG
tctcttttgatgtttgttgg

SEQ ID NO: 353505 - DNA, 20 bp, Artificial Sequence
  Description of Artificial Sequence: Synthetic oligonucleotide
  Target: LAMA2; (+) strand; PAM type: YTN; PAM sequence: CTC
ttttgatgtttgttggttta

SEQ ID NO: 353506 - DNA, 20 bp, Artificial Sequence
  Description of Artificial Sequence: Synthetic oligonucleotide
  Target: LAMA2; (+) strand; PAM type: YTN; PAM sequence: CTT
ttgatgtttgttggtttaaa

SEQ ID NO: 353507 - DNA, 20 bp, Artificial Sequence
  Description of Artificial Sequence: Synthetic oligonucleotide
  Target: LAMA2; (+) strand; PAM type: YTN; PAM sequence: TTT
tgatgtttgttggtttaaag

SEQ ID NO: 353508 - DNA, 20 bp, Artificial Sequence
  Description of Artificial Sequence: Synthetic oligonucleotide
  Target: LAMA2; (+) strand; PAM type: YTN; PAM sequence: TTT
gatgtttgttggtttaaagt

SEQ ID NO: 353509 - DNA, 20 bp, Artificial Sequence
  Description of Artificial Sequence: Synthetic oligonucleotide
  Target: LAMA2; (+) strand; PAM type: YTN; PAM sequence: TTG
atgtttgttggtttaaagtc

SEQ ID NO: 353510 - DNA, 20 bp, Artificial Sequence
  Description of Artificial Sequence: Synthetic oligonucleotide
  Target: LAMA2; (+) strand; PAM type: YTN; PAM sequence: TTT
gttggtttaaagtctgtttt

SEQ ID NO: 353511 - DNA, 20 bp, Artificial Sequence
  Description of Artificial Sequence: Synthetic oligonucleotide
  Target: LAMA2; (+) strand; PAM type: YTN; PAM sequence: TTG
ttggtttaaagtctgtttta

SEQ ID NO: 353512 - DNA, 20 bp, Artificial Sequence
  Description of Artificial Sequence: Synthetic oligonucleotide
  Target: LAMA2; (+) strand; PAM type: YTN; PAM sequence: TTG
gtttaaagtctgttttatca

SEQ ID NO: 353513 - DNA, 20 bp, Artificial Sequence
  Description of Artificial Sequence: Synthetic oligonucleotide
  Target: LAMA2; (+) strand; PAM type: YTN; PAM sequence: TTT
aaagtctgttttatcagaga

SEQ ID NO: 353514 - DNA, 20 bp, Artificial Sequence
  Description of Artificial Sequence: Synthetic oligonucleotide
  Target: LAMA2; (+) strand; PAM type: YTN; PAM sequence: TTA
aagtctgttttatcagagac

SEQ ID NO: 353515 - DNA, 20 bp, Artificial Sequence
  Description of Artificial Sequence: Synthetic oligonucleotide
  Target: LAMA2; (+) strand; PAM type: YTN; PAM sequence: CTG
ttttatcagagactaggatt

SEQ ID NO: 353516 - DNA, 20 bp, Artificial Sequence
  Description of Artificial Sequence: Synthetic oligonucleotide
  Target: LAMA2; (+) strand; PAM type: YTN; PAM sequence: TTT
tatcagagactaggattgca

SEQ ID NO: 353517 - DNA, 20 bp, Artificial Sequence
  Description of Artificial Sequence: Synthetic oligonucleotide
  Target: LAMA2; (+) strand; PAM type: YTN; PAM sequence: TTT
atcagagactaggattgcaa

SEQ ID NO: 353518 - DNA, 20 bp, Artificial Sequence
  Description of Artificial Sequence: Synthetic oligonucleotide
  Target: LAMA2; (+) strand; PAM type: YTN; PAM sequence: TTA
tcagagactaggattgcaac

SEQ ID NO: 353519 - DNA, 20 bp, Artificial Sequence
  Description of Artificial Sequence: Synthetic oligonucleotide
  Target: LAMA2; (+) strand; PAM type: YTN; PAM sequence: CTA
ggattgcaacccctgccttt

SEQ ID NO: 353520 - DNA, 20 bp, Artificial Sequence
  Description of Artificial Sequence: Synthetic oligonucleotide
  Target: LAMA2; (+) strand; PAM type: YTN; PAM sequence: TTG
caacccctgcctttttttgt

SEQ ID NO: 353521 - DNA, 20 bp, Artificial Sequence
  Description of Artificial Sequence: Synthetic oligonucleotide
  Target: LAMA2; (+) strand; PAM type: YTN; PAM sequence: CTG
cctttttttgttttccattt

SEQ ID NO: 353522 - DNA, 20 bp, Artificial Sequence
  Description of Artificial Sequence: Synthetic oligonucleotide
  Target: LAMA2; (+) strand; PAM type: YTN; PAM sequence: CTT
tttttgttttccatttgctt

SEQ ID NO: 353523 - DNA, 20 bp, Artificial Sequence
  Description of Artificial Sequence: Synthetic oligonucleotide
  Target: LAMA2; (+) strand; PAM type: YTN; PAM sequence: TTT
ttttgttttccatttgcttg

SEQ ID NO: 353524 - DNA, 20 bp, Artificial Sequence
  Description of Artificial Sequence: Synthetic oligonucleotide
  Target: LAMA2; (+) strand; PAM type: YTN; PAM sequence: TTT
tttgttttccatttgcttgg

SEQ ID NO: 353525 - DNA, 20 bp, Artificial Sequence
  Description of Artificial Sequence: Synthetic oligonucleotide
  Target: LAMA2; (+) strand; PAM type: YTN; PAM sequence: TTT
ttgttttccatttgcttggt

SEQ ID NO: 353526 - DNA, 20 bp, Artificial Sequence
  Description of Artificial Sequence: Synthetic oligonucleotide
  Target: LAMA2; (+) strand; PAM type: YTN; PAM sequence: TTT
tgttttccatttgcttggta

SEQ ID NO: 353527 - DNA, 20 bp, Artificial Sequence
  Description of Artificial Sequence: Synthetic oligonucleotide
  Target: LAMA2; (+) strand; PAM type: YTN; PAM sequence: TTT
gttttccatttgcttggtag

SEQ ID NO: 353528 - DNA, 20 bp, Artificial Sequence
  Description of Artificial Sequence: Synthetic oligonucleotide
  Target: LAMA2; (+) strand; PAM type: YTN; PAM sequence: TTG
ttttccatttgcttggtaga

SEQ ID NO: 353529 - DNA, 20 bp, Artificial Sequence
  Description of Artificial Sequence: Synthetic oligonucleotide
  Target: LAMA2; (+) strand; PAM type: YTN; PAM sequence: TTT
tccatttgcttggtagatct

SEQ ID NO: 353530 - DNA, 20 bp, Artificial Sequence
  Description of Artificial Sequence: Synthetic oligonucleotide
  Target: LAMA2; (+) strand; PAM type: YTN; PAM sequence: TTT
ccatttgcttggtagatctt

SEQ ID NO: 353531 - DNA, 20 bp, Artificial Sequence
  Description of Artificial Sequence: Synthetic oligonucleotide
  Target: LAMA2; (+) strand; PAM type: YTN; PAM sequence: TTC
catttgcttggtagatcttc

SEQ ID NO: 353532 - DNA, 20 bp, Artificial Sequence
  Description of Artificial Sequence: Synthetic oligonucleotide
  Target: LAMA2; (+) strand; PAM type: YTN; PAM sequence: TTT
gcttggtagatcttcctcca

SEQ ID NO: 353533 - DNA, 20 bp, Artificial Sequence
  Description of Artificial Sequence: Synthetic oligonucleotide
  Target: LAMA2; (+) strand; PAM type: YTN; PAM sequence: TTG
cttggtagatcttcctccat

SEQ ID NO: 353534 - DNA, 20 bp, Artificial Sequence
  Description of Artificial Sequence: Synthetic oligonucleotide
  Target: LAMA2; (+) strand; PAM type: YTN; PAM sequence: CTT
ggtagatcttcctccatcct

SEQ ID NO: 353535 - DNA, 20 bp, Artificial Sequence
  Description of Artificial Sequence: Synthetic oligonucleotide
  Target: LAMA2; (+) strand; PAM type: YTN; PAM sequence: TTG
gtagatcttcctccatcctt

SEQ ID NO: 353536 - DNA, 20 bp, Artificial Sequence
  Description of Artificial Sequence: Synthetic oligonucleotide
  Target: LAMA2; (+) strand; PAM type: YTN; PAM sequence: CTT
cctccatccttttattttga

SEQ ID NO: 353537 - DNA, 20 bp, Artificial Sequence
  Description of Artificial Sequence: Synthetic oligonucleotide
  Target: LAMA2; (+) strand; PAM type: YTN; PAM sequence: TTC
ctccatccttttattttgag

SEQ ID NO: 353538 - DNA, 20 bp, Artificial Sequence
  Description of Artificial Sequence: Synthetic oligonucleotide
  Target: LAMA2; (+) strand; PAM type: YTN; PAM sequence: CTC
catccttttattttgagcct

SEQ ID NO: 353539 - DNA, 20 bp, Artificial Sequence
  Description of Artificial Sequence: Synthetic oligonucleotide
  Target: LAMA2; (+) strand; PAM type: YTN; PAM sequence: CTT
ttattttgagcctatgtgtg

SEQ ID NO: 353540 - DNA, 20 bp, Artificial Sequence
  Description of Artificial Sequence: Synthetic oligonucleotide
  Target: LAMA2; (+) strand; PAM type: YTN; PAM sequence: TTT
tattttgagcctatgtgtgt

SEQ ID NO: 353541 - DNA, 20 bp, Artificial Sequence
  Description of Artificial Sequence: Synthetic oligonucleotide
  Target: LAMA2; (+) strand; PAM type: YTN; PAM sequence: TTT
attttgagcctatgtgtgtc

SEQ ID NO: 353542 - DNA, 20 bp, Artificial Sequence
  Description of Artificial Sequence: Synthetic oligonucleotide
  Target: LAMA2; (+) strand; PAM type: YTN; PAM sequence: TTA
ttttgagcctatgtgtgtct

SEQ ID NO: 353543 - DNA, 20 bp, Artificial Sequence
  Description of Artificial Sequence: Synthetic oligonucleotide
  Target: LAMA2; (+) strand; PAM type: YTN; PAM sequence: TTT
tgagcctatgtgtgtctctg

SEQ ID NO: 353544 - DNA, 20 bp, Artificial Sequence
  Description of Artificial Sequence: Synthetic oligonucleotide
  Target: LAMA2; (+) strand; PAM type: YTN; PAM sequence: TTT
gagcctatgtgtgtctctgc

SEQ ID NO: 353545 - DNA, 20 bp, Artificial Sequence
  Description of Artificial Sequence: Synthetic oligonucleotide
  Target: LAMA2; (+) strand; PAM type: YTN; PAM sequence: TTG
agcctatgtgtgtctctgca

SEQ ID NO: 353546 - DNA, 20 bp, Artificial Sequence
  Description of Artificial Sequence: Synthetic oligonucleotide
  Target: LAMA2; (+) strand; PAM type: YTN; PAM sequence: CTA
tgtgtgtctctgcacatgag

SEQ ID NO: 353547 - DNA, 20 bp, Artificial Sequence
  Description of Artificial Sequence: Synthetic oligonucleotide
  Target: LAMA2; (+) strand; PAM type: YTN; PAM sequence: CTC
tgcacatgagatgggtttcc

SEQ ID NO: 353548 - DNA, 20 bp, Artificial Sequence
  Description of Artificial Sequence: Synthetic oligonucleotide
  Target: LAMA2; (+) strand; PAM type: YTN; PAM sequence: CTG
cacatgagatgggtttcctg

SEQ ID NO: 353549 - DNA, 20 bp, Artificial Sequence
  Description of Artificial Sequence: Synthetic oligonucleotide
  Target: LAMA2; (+) strand; PAM type: YTN; PAM sequence: TTT
cctgaatacggaacactgat

SEQ ID NO: 353550 - DNA, 20 bp, Artificial Sequence
  Description of Artificial Sequence: Synthetic oligonucleotide
  Target: LAMA2; (+) strand; PAM type: YTN; PAM sequence: TTC
ctgaatacggaacactgatg

SEQ ID NO: 353551 - DNA, 20 bp, Artificial Sequence
  Description of Artificial Sequence: Synthetic oligonucleotide
  Target: LAMA2; (+) strand; PAM type: YTN; PAM sequence: CTG
aatacggaacactgatgggt

SEQ ID NO: 353552 - DNA, 20 bp, Artificial Sequence
  Description of Artificial Sequence: Synthetic oligonucleotide
  Target: LAMA2; (+) strand; PAM type: YTN; PAM sequence: CTG
atgggtcttgactctttatc

SEQ ID NO: 353553 - DNA, 20 bp, Artificial Sequence
  Description of Artificial Sequence: Synthetic oligonucleotide
  Target: LAMA2; (+) strand; PAM type: YTN; PAM sequence: CTT
gactctttatccaatttgcc

SEQ ID NO: 353554 - DNA, 20 bp, Artificial Sequence
  Description of Artificial Sequence: Synthetic oligonucleotide
  Target: LAMA2; (+) strand; PAM type: YTN; PAM sequence: TTG
actctttatccaatttgcca

SEQ ID NO: 353555 - DNA, 20 bp, Artificial Sequence
  Description of Artificial Sequence: Synthetic oligonucleotide
  Target: LAMA2; (+) strand; PAM type: YTN; PAM sequence: CTC
tttatccaatttgccagtct

SEQ ID NO: 353556 - DNA, 20 bp, Artificial Sequence
  Description of Artificial Sequence: Synthetic oligonucleotide
  Target: LAMA2; (+) strand; PAM type: YTN; PAM sequence: CTT
tatccaatttgccagtctgt

SEQ ID NO: 353557 - DNA, 20 bp, Artificial Sequence
  Description of Artificial Sequence: Synthetic oligonucleotide
  Target: LAMA2; (+) strand; PAM type: YTN; PAM sequence: TTT
atccaatttgccagtctgtg

SEQ ID NO: 353558 - DNA, 20 bp, Artificial Sequence
  Description of Artificial Sequence: Synthetic oligonucleotide
  Target: LAMA2; (+) strand; PAM type: YTN; PAM sequence: TTA
tccaatttgccagtctgtgt

SEQ ID NO: 353559 - DNA, 20 bp, Artificial Sequence
  Description of Artificial Sequence: Synthetic oligonucleotide
  Target: LAMA2; (+) strand; PAM type: YTN; PAM sequence: TTT
gccagtctgtgtcttttaat

SEQ ID NO: 353560 - DNA, 20 bp, Artificial Sequence
  Description of Artificial Sequence: Synthetic oligonucleotide
  Target: LAMA2; (+) strand; PAM type: YTN; PAM sequence: TTG
ccagtctgtgtcttttaatt

SEQ ID NO: 353561 - DNA, 20 bp, Artificial Sequence
  Description of Artificial Sequence: Synthetic oligonucleotide
  Target: LAMA2; (+) strand; PAM type: YTN; PAM sequence: CTG
tgtcttttaattggagcatt

SEQ ID NO: 353562 - DNA, 20 bp, Artificial Sequence
  Description of Artificial Sequence: Synthetic oligonucleotide
  Target: LAMA2; (+) strand; PAM type: YTN; PAM sequence: CTT
ttaattggagcatttagtcc

SEQ ID NO: 353563 - DNA, 20 bp, Artificial Sequence
  Description of Artificial Sequence: Synthetic oligonucleotide
  Target: LAMA2; (+) strand; PAM type: YTN; PAM sequence: TTT
taattggagcatttagtcca

SEQ ID NO: 353564 - DNA, 20 bp, Artificial Sequence
  Description of Artificial Sequence: Synthetic oligonucleotide
  Target: LAMA2; (+) strand; PAM type: YTN; PAM sequence: TTT
aattggagcatttagtccat

SEQ ID NO: 353565 - DNA, 20 bp, Artificial Sequence
  Description of Artificial Sequence: Synthetic oligonucleotide
  Target: LAMA2; (+) strand; PAM type: YTN; PAM sequence: TTA
attggagcatttagtccatt

SEQ ID NO: 353566 - DNA, 20 bp, Artificial Sequence
  Description of Artificial Sequence: Synthetic oligonucleotide
  Target: LAMA2; (+) strand; PAM type: YTN; PAM sequence: TTG
gagcatttagtccatttaca

SEQ ID NO: 353567 - DNA, 20 bp, Artificial Sequence
  Description of Artificial Sequence: Synthetic oligonucleotide
  Target: LAMA2; (+) strand; PAM type: YTN; PAM sequence: TTT
agtccatttacatttaaagt

SEQ ID NO: 353568 - DNA, 20 bp, Artificial Sequence
  Description of Artificial Sequence: Synthetic oligonucleotide
  Target: LAMA2; (+) strand; PAM type: YTN; PAM sequence: TTA
gtccatttacatttaaagtt

SEQ ID NO: 353569 - DNA, 20 bp, Artificial Sequence
  Description of Artificial Sequence: Synthetic oligonucleotide
  Target: LAMA2; (+) strand; PAM type: YTN; PAM sequence: TTT
acatttaaagttaatattgt

SEQ ID NO: 353570 - DNA, 20 bp, Artificial Sequence
  Description of Artificial Sequence: Synthetic oligonucleotide
  Target: LAMA2; (+) strand; PAM type: YTN; PAM sequence: TTA
catttaaagttaatattgtt

SEQ ID NO: 353571 - DNA, 20 bp, Artificial Sequence
  Description of Artificial Sequence: Synthetic oligonucleotide
  Target: LAMA2; (+) strand; PAM type: YTN; PAM sequence: TTT
aaagttaatattgttatgtg

SEQ ID NO: 353572 - DNA, 20 bp, Artificial Sequence
  Description of Artificial Sequence: Synthetic oligonucleotide
  Target: LAMA2; (+) strand; PAM type: YTN; PAM sequence: TTA
aagttaatattgttatgtgt

SEQ ID NO: 353573 - DNA, 20 bp, Artificial Sequence
  Description of Artificial Sequence: Synthetic oligonucleotide
  Target: LAMA2; (+) strand; PAM type: YTN; PAM sequence: TTA
atattgttatgtgtgaattt

SEQ ID NO: 353574 - DNA, 20 bp, Artificial Sequence
  Description of Artificial Sequence: Synthetic oligonucleotide
  Target: LAMA2; (+) strand; PAM type: YTN; PAM sequence: TTG
ttatgtgtgaatttgatcct

SEQ ID NO: 353575 - DNA, 20 bp, Artificial Sequence
  Description of Artificial Sequence: Synthetic oligonucleotide
  Target: LAMA2; (+) strand; PAM type: YTN; PAM sequence: TTA
tgtgtgaatttgatcctgtc

SEQ ID NO: 353576 - DNA, 20 bp, Artificial Sequence
  Description of Artificial Sequence: Synthetic oligonucleotide
  Target: LAMA2; (+) strand; PAM type: YTN; PAM sequence: TTT
gatcctgtcatgatgatgtt

SEQ ID NO: 353577 - DNA, 20 bp, Artificial Sequence
  Description of Artificial Sequence: Synthetic oligonucleotide
  Target: LAMA2; (+) strand; PAM type: YTN; PAM sequence: TTG
atcctgtcatgatgatgtta

SEQ ID NO: 353578 - DNA, 20 bp, Artificial Sequence
  Description of Artificial Sequence: Synthetic oligonucleotide
  Target: LAMA2; (+) strand; PAM type: YTN; PAM sequence: CTG
tcatgatgatgttagctggt

SEQ ID NO: 353579 - DNA, 20 bp, Artificial Sequence
  Description of Artificial Sequence: Synthetic oligonucleotide
  Target: LAMA2; (+) strand; PAM type: YTN; PAM sequence: TTA
gctggttattttgctcgtta

SEQ ID NO: 353580 - DNA, 20 bp, Artificial Sequence
  Description of Artificial Sequence: Synthetic oligonucleotide
  Target: LAMA2; (+) strand; PAM type: YTN; PAM sequence: CTG
gttattttgctcgttagttg

SEQ ID NO: 353581 - DNA, 20 bp, Artificial Sequence
  Description of Artificial Sequence: Synthetic oligonucleotide
  Target: LAMA2; (+) strand; PAM type: YTN; PAM sequence: TTA
ttttgctcgttagttgatgc

SEQ ID NO: 353582 - DNA, 20 bp, Artificial Sequence
  Description of Artificial Sequence: Synthetic oligonucleotide
  Target: LAMA2; (+) strand; PAM type: YTN; PAM sequence: TTT
tgctcgttagttgatgcagt

SEQ ID NO: 353583 - DNA, 20 bp, Artificial Sequence
  Description of Artificial Sequence: Synthetic oligonucleotide
  Target: LAMA2; (+) strand; PAM type: YTN; PAM sequence: TTT
gctcgttagttgatgcagtt

SEQ ID NO: 353584 - DNA, 20 bp, Artificial Sequence
  Description of Artificial Sequence: Synthetic oligonucleotide
  Target: LAMA2; (+) strand; PAM type: YTN; PAM sequence: TTG
ctcgttagttgatgcagttt

SEQ ID NO: 353585 - DNA, 20 bp, Artificial Sequence
  Description of Artificial Sequence: Synthetic oligonucleotide
  Target: LAMA2; (+) strand; PAM type: YTN; PAM sequence: CTC
gttagttgatgcagtttctt

SEQ ID NO: 353586 - DNA, 20 bp, Artificial Sequence
  Description of Artificial Sequence: Synthetic oligonucleotide
  Target: LAMA2; (+) strand; PAM type: YTN; PAM sequence: TTA
gttgatgcagtttcttccta

SEQ ID NO: 353587 - DNA, 20 bp, Artificial Sequence
  Description of Artificial Sequence: Synthetic oligonucleotide
  Target: LAMA2; (+) strand; PAM type: YTN; PAM sequence: TTG
atgcagtttcttcctagcat

SEQ ID NO: 353588 - DNA, 20 bp, Artificial Sequence
  Description of Artificial Sequence: Synthetic oligonucleotide
  Target: LAMA2; (+) strand; PAM type: YTN; PAM sequence: TTT
cttcctagcatcgatggtct

SEQ ID NO: 353589 - DNA, 20 bp, Artificial Sequence
  Description of Artificial Sequence: Synthetic oligonucleotide
  Target: LAMA2; (+) strand; PAM type: YTN; PAM sequence: TTC
ttcctagcatcgatggtctt

SEQ ID NO: 353590 - DNA, 20 bp, Artificial Sequence
  Description of Artificial Sequence: Synthetic oligonucleotide
  Target: LAMA2; (+) strand; PAM type: YTN; PAM sequence: CTT
cctagcatcgatggtcttta

SEQ ID NO: 353591 - DNA, 20 bp, Artificial Sequence
  Description of Artificial Sequence: Synthetic oligonucleotide
  Target: LAMA2; (+) strand; PAM type: YTN; PAM sequence: TTC
ctagcatcgatggtctttac

SEQ ID NO: 353592 - DNA, 20 bp, Artificial Sequence
  Description of Artificial Sequence: Synthetic oligonucleotide
  Target: LAMA2; (+) strand; PAM type: YTN; PAM sequence: CTA
gcatcgatggtctttacaat

SEQ ID NO: 353593 - DNA, 20 bp, Artificial Sequence
  Description of Artificial Sequence: Synthetic oligonucleotide
  Target: LAMA2; (+) strand; PAM type: YTN; PAM sequence: CTT
tacaatttggcatgcttttg

SEQ ID NO: 353594 - DNA, 20 bp, Artificial Sequence
  Description of Artificial Sequence: Synthetic oligonucleotide
  Target: LAMA2; (+) strand; PAM type: YTN; PAM sequence: TTT
acaatttggcatgcttttgc

SEQ ID NO: 353595 - DNA, 20 bp, Artificial Sequence
  Description of Artificial Sequence: Synthetic oligonucleotide
  Target: LAMA2; (+) strand; PAM type: YTN; PAM sequence: TTA
caatttggcatgcttttgca

SEQ ID NO: 353596 - DNA, 20 bp, Artificial Sequence
  Description of Artificial Sequence: Synthetic oligonucleotide
  Target: LAMA2; (+) strand; PAM type: YTN; PAM sequence: TTT
ggcatgcttttgcagtggct

SEQ ID NO: 353597 - DNA, 20 bp, Artificial Sequence
  Description of Artificial Sequence: Synthetic oligonucleotide
  Target: LAMA2; (+) strand; PAM type: YTN; PAM sequence: TTG
gcatgcttttgcagtggctg

SEQ ID NO: 353598 - DNA, 20 bp, Artificial Sequence
  Description of Artificial Sequence: Synthetic oligonucleotide
  Target: LAMA2; (+) strand; PAM type: YTN; PAM sequence: CTT
ttgcagtggctggtactggt

SEQ ID NO: 353599 - DNA, 20 bp, Artificial Sequence
  Description of Artificial Sequence: Synthetic oligonucleotide
  Target: LAMA2; (+) strand; PAM type: YTN; PAM sequence: TTT
tgcagtggctggtactggtt

SEQ ID NO: 353600 - DNA, 20 bp, Artificial Sequence
  Description of Artificial Sequence: Synthetic oligonucleotide
  Target: LAMA2; (+) strand; PAM type: YTN; PAM sequence: TTT
gcagtggctggtactggttg

SEQ ID NO: 353601 - DNA, 20 bp, Artificial Sequence
  Description of Artificial Sequence: Synthetic oligonucleotide
  Target: LAMA2; (+) strand; PAM type: YTN; PAM sequence: TTG
cagtggctggtactggttgt

SEQ ID NO: 353602 - DNA, 20 bp, Artificial Sequence
  Description of Artificial Sequence: Synthetic oligonucleotide
  Target: LAMA2; (+) strand; PAM type: YTN; PAM sequence: CTG
gtactggttgttcctttcca

SEQ ID NO: 353603 - DNA, 20 bp, Artificial Sequence
  Description of Artificial Sequence: Synthetic oligonucleotide
  Target: LAMA2; (+) strand; PAM type: YTN; PAM sequence: CTG
gttgttcctttccatgttta

SEQ ID NO: 353604 - DNA, 20 bp, Artificial Sequence
  Description of Artificial Sequence: Synthetic oligonucleotide
  Target: LAMA2; (+) strand; PAM type: YTN; PAM sequence: TTG
ttcctttccatgtttagtgc

SEQ ID NO: 353605 - DNA, 20 bp, Artificial Sequence
  Description of Artificial Sequence: Synthetic oligonucleotide
  Target: LAMA2; (+) strand; PAM type: YTN; PAM sequence: TTC
ctttccatgtttagtgcttc

SEQ ID NO: 353606 - DNA, 20 bp, Artificial Sequence
  Description of Artificial Sequence: Synthetic oligonucleotide
  Target: LAMA2; (+) strand; PAM type: YTN; PAM sequence: CTT
tccatgtttagtgcttcctt

SEQ ID NO: 353607 - DNA, 20 bp, Artificial Sequence
  Description of Artificial Sequence: Synthetic oligonucleotide
  Target: LAMA2; (+) strand; PAM type: YTN; PAM sequence: TTT
ccatgtttagtgcttccttc

SEQ ID NO: 353608 - DNA, 20 bp, Artificial Sequence
  Description of Artificial Sequence: Synthetic oligonucleotide
  Target: LAMA2; (+) strand; PAM type: YTN; PAM sequence: TTC
catgtttagtgcttccttca

SEQ ID NO: 353609 - DNA, 20 bp, Artificial Sequence
  Description of Artificial Sequence: Synthetic oligonucleotide
  Target: LAMA2; (+) strand; PAM type: YTN; PAM sequence: TTT
agtgcttccttcaggagctc

SEQ ID NO: 353610 - DNA, 20 bp, Artificial Sequence
  Description of Artificial Sequence: Synthetic oligonucleotide
  Target: LAMA2; (+) strand; PAM type: YTN; PAM sequence: TTA
gtgcttccttcaggagctct

SEQ ID NO: 353611 - DNA, 20 bp, Artificial Sequence
  Description of Artificial Sequence: Synthetic oligonucleotide
  Target: LAMA2; (+) strand; PAM type: YTN; PAM sequence: CTT
ccttcaggagctcttttagg

SEQ ID NO: 353612 - DNA, 20 bp, Artificial Sequence
  Description of Artificial Sequence: Synthetic oligonucleotide
  Target: LAMA2; (+) strand; PAM type: YTN; PAM sequence: TTC
cttcaggagctcttttaggg

SEQ ID NO: 353613 - DNA, 20 bp, Artificial Sequence
  Description of Artificial Sequence: Synthetic oligonucleotide
  Target: LAMA2; (+) strand; PAM type: YTN; PAM sequence: CTT
caggagctcttttagggcag

SEQ ID NO: 353614 - DNA, 20 bp, Artificial Sequence
  Description of Artificial Sequence: Synthetic oligonucleotide
  Target: LAMA2; (+) strand; PAM type: YTN; PAM sequence: TTC
aggagctcttttagggcagg

SEQ ID NO: 353615 - DNA, 20 bp, Artificial Sequence
  Description of Artificial Sequence: Synthetic oligonucleotide
  Target: LAMA2; (+) strand; PAM type: YTN; PAM sequence: CTC
ttttagggcaggactggtgg

SEQ ID NO: 353616 - DNA, 20 bp, Artificial Sequence
  Description of Artificial Sequence: Synthetic oligonucleotide
  Target: LAMA2; (+) strand; PAM type: YTN; PAM sequence: CTT
ttagggcaggactggtggtg

SEQ ID NO: 353617 - DNA, 20 bp, Artificial Sequence
  Description of Artificial Sequence: Synthetic oligonucleotide
  Target: LAMA2; (+) strand; PAM type: YTN; PAM sequence: TTT
tagggcaggactggtggtga

SEQ ID NO: 353618 - DNA, 20 bp, Artificial Sequence
  Description of Artificial Sequence: Synthetic oligonucleotide
  Target: LAMA2; (+) strand; PAM type: YTN; PAM sequence: TTT
agggcaggactggtggtgac

SEQ ID NO: 353619 - DNA, 20 bp, Artificial Sequence
  Description of Artificial Sequence: Synthetic oligonucleotide
  Target: LAMA2; (+) strand; PAM type: YTN; PAM sequence: TTA
gggcaggactggtggtgaca

SEQ ID NO: 353620 - DNA, 20 bp, Artificial Sequence
  Description of Artificial Sequence: Synthetic oligonucleotide
  Target: LAMA2; (+) strand; PAM type: YTN; PAM sequence: CTG
gtggtgacaaaatctctcag

SEQ ID NO: 353621 - DNA, 20 bp, Artificial Sequence
  Description of Artificial Sequence: Synthetic oligonucleotide
  Target: LAMA2; (+) strand; PAM type: YTN; PAM sequence: CTC
tcagcatttgcttgtctgta

SEQ ID NO: 353622 - DNA, 20 bp, Artificial Sequence
  Description of Artificial Sequence: Synthetic oligonucleotide
  Target: LAMA2; (+) strand; PAM type: YTN; PAM sequence: CTC
agcatttgcttgtctgtaaa

SEQ ID NO: 353623 - DNA, 20 bp, Artificial Sequence
  Description of Artificial Sequence: Synthetic oligonucleotide
  Target: LAMA2; (+) strand; PAM type: YTN; PAM sequence: TTT
gcttgtctgtaaagtatttt

SEQ ID NO: 353624 - DNA, 20 bp, Artificial Sequence
  Description of Artificial Sequence: Synthetic oligonucleotide
  Target: LAMA2; (+) strand; PAM type: YTN; PAM sequence: TTG
cttgtctgtaaagtatttta

SEQ ID NO: 353625 - DNA, 20 bp, Artificial Sequence
  Description of Artificial Sequence: Synthetic oligonucleotide
  Target: LAMA2; (+) strand; PAM type: YTN; PAM sequence: CTT
gtctgtaaagtattttattt

SEQ ID NO: 353626 - DNA, 20 bp, Artificial Sequence
  Description of Artificial Sequence: Synthetic oligonucleotide
  Target: LAMA2; (+) strand; PAM type: YTN; PAM sequence: TTG
tctgtaaagtattttatttc

SEQ ID NO: 353627 - DNA, 20 bp, Artificial Sequence
  Description of Artificial Sequence: Synthetic oligonucleotide
  Target: LAMA2; (+) strand; PAM type: YTN; PAM sequence: CTG
taaagtattttatttctcct

SEQ ID NO: 353628 - DNA, 20 bp, Artificial Sequence
  Description of Artificial Sequence: Synthetic oligonucleotide
  Target: LAMA2; (+) strand; PAM type: YTN; PAM sequence: TTT
tatttctccttcgcttatga

SEQ ID NO: 353629 - DNA, 20 bp, Artificial Sequence
  Description of Artificial Sequence: Synthetic oligonucleotide
  Target: LAMA2; (+) strand; PAM type: YTN; PAM sequence: TTT
atttctccttcgcttatgaa

SEQ ID NO: 353630 - DNA, 20 bp, Artificial Sequence
  Description of Artificial Sequence: Synthetic oligonucleotide
  Target: LAMA2; (+) strand; PAM type: YTN; PAM sequence: TTA
tttctccttcgcttatgaag

SEQ ID NO: 353631 - DNA, 20 bp, Artificial Sequence
  Description of Artificial Sequence: Synthetic oligonucleotide
  Target: LAMA2; (+) strand; PAM type: YTN; PAM sequence: TTT
ctccttcgcttatgaagctt

SEQ ID NO: 353632 - DNA, 20 bp, Artificial Sequence
  Description of Artificial Sequence: Synthetic oligonucleotide
  Target: LAMA2; (+) strand; PAM type: YTN; PAM sequence: TTC
tccttcgcttatgaagctta

SEQ ID NO: 353633 - DNA, 20 bp, Artificial Sequence
  Description of Artificial Sequence: Synthetic oligonucleotide
  Target: LAMA2; (+) strand; PAM type: YTN; PAM sequence: CTC
cttcgcttatgaagcttagt

SEQ ID NO: 353634 - DNA, 20 bp, Artificial Sequence
  Description of Artificial Sequence: Synthetic oligonucleotide
  Target: LAMA2; (+) strand; PAM type: YTN; PAM sequence: CTT
cgcttatgaagcttagtttg

SEQ ID NO: 353635 - DNA, 20 bp, Artificial Sequence
  Description of Artificial Sequence: Synthetic oligonucleotide
  Target: LAMA2; (+) strand; PAM type: YTN; PAM sequence: TTC
gcttatgaagcttagtttgg

SEQ ID NO: 353636 - DNA, 20 bp, Artificial Sequence
  Description of Artificial Sequence: Synthetic oligonucleotide
  Target: LAMA2; (+) strand; PAM type: YTN; PAM sequence: CTT
atgaagcttagtttggctgg

SEQ ID NO: 353637 - DNA, 20 bp, Artificial Sequence
  Description of Artificial Sequence: Synthetic oligonucleotide
  Target: LAMA2; (+) strand; PAM type: YTN; PAM sequence: TTA
tgaagcttagtttggctgga

SEQ ID NO: 353638 - DNA, 20 bp, Artificial Sequence
  Description of Artificial Sequence: Synthetic oligonucleotide
  Target: LAMA2; (+) strand; PAM type: YTN; PAM sequence: CTT
agtttggctggatatgaaat

SEQ ID NO: 353639 - DNA, 20 bp, Artificial Sequence
  Description of Artificial Sequence: Synthetic oligonucleotide
  Target: LAMA2; (+) strand; PAM type: YTN; PAM sequence: TTA
gtttggctggatatgaaatt

SEQ ID NO: 353640 - DNA, 20 bp, Artificial Sequence
  Description of Artificial Sequence: Synthetic oligonucleotide
  Target: LAMA2; (+) strand; PAM type: YTN; PAM sequence: TTT
ggctggatatgaaattctgg

SEQ ID NO: 353641 - DNA, 20 bp, Artificial Sequence
  Description of Artificial Sequence: Synthetic oligonucleotide
  Target: LAMA2; (+) strand; PAM type: YTN; PAM sequence: TTG
gctggatatgaaattctggg

SEQ ID NO: 353642 - DNA, 20 bp, Artificial Sequence
  Description of Artificial Sequence: Synthetic oligonucleotide
  Target: LAMA2; (+) strand; PAM type: YTN; PAM sequence: CTG
gatatgaaattctgggttga

SEQ ID NO: 353643 - DNA, 20 bp, Artificial Sequence
  Description of Artificial Sequence: Synthetic oligonucleotide
  Target: LAMA2; (+) strand; PAM type: YTN; PAM sequence: TTC
tgggttgaaaattcttttct

SEQ ID NO: 353644 - DNA, 20 bp, Artificial Sequence
  Description of Artificial Sequence: Synthetic oligonucleotide
  Target: LAMA2; (+) strand; PAM type: YTN; PAM sequence: CTG
ggttgaaaattcttttcttt

SEQ ID NO: 353645 - DNA, 20 bp, Artificial Sequence
  Description of Artificial Sequence: Synthetic oligonucleotide
  Target: LAMA2; (+) strand; PAM type: YTN; PAM sequence: TTG
aaaattcttttctttaagaa

SEQ ID NO: 353646 - DNA, 20 bp, Artificial Sequence
  Description of Artificial Sequence: Synthetic oligonucleotide
  Target: LAMA2; (+) strand; PAM type: YTN; PAM sequence: TTC
ttttctttaagaatgttgaa

SEQ ID NO: 353647 - DNA, 20 bp, Artificial Sequence
  Description of Artificial Sequence: Synthetic oligonucleotide
  Target: LAMA2; (+) strand; PAM type: YTN; PAM sequence: CTT
ttctttaagaatgttgaata

SEQ ID NO: 353648 - DNA, 20 bp, Artificial Sequence
  Description of Artificial Sequence: Synthetic oligonucleotide
  Target: LAMA2; (+) strand; PAM type: YTN; PAM sequence: TTT
tctttaagaatgttgaatat

SEQ ID NO: 353649 - DNA, 20 bp, Artificial Sequence
  Description of Artificial Sequence: Synthetic oligonucleotide
  Target: LAMA2; (+) strand; PAM type: YTN; PAM sequence: TTT
ctttaagaatgttgaatatt

SEQ ID NO: 353650 - DNA, 20 bp, Artificial Sequence
  Description of Artificial Sequence: Synthetic oligonucleotide
  Target: LAMA2; (+) strand; PAM type: YTN; PAM sequence: TTC
tttaagaatgttgaatattg

SEQ ID NO: 353651 - DNA, 20 bp, Artificial Sequence
  Description of Artificial Sequence: Synthetic oligonucleotide
  Target: LAMA2; (+) strand; PAM type: YTN; PAM sequence: CTT
taagaatgttgaatattggc

SEQ ID NO: 353652 - DNA, 20 bp, Artificial Sequence
  Description of Artificial Sequence: Synthetic oligonucleotide
  Target: LAMA2; (+) strand; PAM type: YTN; PAM sequence: TTT
aagaatgttgaatattggcc

SEQ ID NO: 353653 - DNA, 20 bp, Artificial Sequence
  Description of Artificial Sequence: Synthetic oligonucleotide
  Target: LAMA2; (+) strand; PAM type: YTN; PAM sequence: TTA
agaatgttgaatattggccc

SEQ ID NO: 353654 - DNA, 20 bp, Artificial Sequence
  Description of Artificial Sequence: Synthetic oligonucleotide
  Target: LAMA2; (+) strand; PAM type: YTN; PAM sequence: TTG
aatattggcccccactctct

SEQ ID NO: 353655 - DNA, 20 bp, Artificial Sequence
  Description of Artificial Sequence: Synthetic oligonucleotide
  Target: LAMA2; (+) strand; PAM type: YTN; PAM sequence: TTG
gcccccactctcttccggct

SEQ ID NO: 353656 - DNA, 20 bp, Artificial Sequence
  Description of Artificial Sequence: Synthetic oligonucleotide
  Target: LAMA2; (+) strand; PAM type: YTN; PAM sequence: CTC
tcttccggcttgtagagttt

SEQ ID NO: 353657 - DNA, 20 bp, Artificial Sequence
  Description of Artificial Sequence: Synthetic oligonucleotide
  Target: LAMA2; (+) strand; PAM type: YTN; PAM sequence: CTC
ttccggcttgtagagtttct

SEQ ID NO: 353658 - DNA, 20 bp, Artificial Sequence
  Description of Artificial Sequence: Synthetic oligonucleotide
  Target: LAMA2; (+) strand; PAM type: YTN; PAM sequence: CTT
ccggcttgtagagtttctgc

SEQ ID NO: 353659 - DNA, 20 bp, Artificial Sequence
  Description of Artificial Sequence: Synthetic oligonucleotide
  Target: LAMA2; (+) strand; PAM type: YTN; PAM sequence: TTC
cggcttgtagagtttctgcc

SEQ ID NO: 353660 - DNA, 20 bp, Artificial Sequence
  Description of Artificial Sequence: Synthetic oligonucleotide
  Target: LAMA2; (+) strand; PAM type: YTN; PAM sequence: CTT
gtagagtttctgccgagcga

SEQ ID NO: 353661 - DNA, 20 bp, Artificial Sequence
  Description of Artificial Sequence: Synthetic oligonucleotide
  Target: LAMA2; (+) strand; PAM type: YTN; PAM sequence: TTG
tagagtttctgccgagcgat

SEQ ID NO: 353662 - DNA, 20 bp, Artificial Sequence
  Description of Artificial Sequence: Synthetic oligonucleotide
  Target: LAMA2; (+) strand; PAM type: YTN; PAM sequence: TTT
ctgccgagcgatctgctgtt

SEQ ID NO: 353663 - DNA, 20 bp, Artificial Sequence
  Description of Artificial Sequence: Synthetic oligonucleotide
  Target: LAMA2; (+) strand; PAM type: YTN; PAM sequence: TTC
tgccgagcgatctgctgtta

SEQ ID NO: 353664 - DNA, 20 bp, Artificial Sequence
  Description of Artificial Sequence: Synthetic oligonucleotide
  Target: LAMA2; (+) strand; PAM type: YTN; PAM sequence: CTG
ccgagcgatctgctgttagt

SEQ ID NO: 353665 - DNA, 20 bp, Artificial Sequence
  Description of Artificial Sequence: Synthetic oligonucleotide
  Target: LAMA2; (+) strand; PAM type: YTN; PAM sequence: CTG
ctgttagtctgatgggcttc

SEQ ID NO: 353666 - DNA, 20 bp, Artificial Sequence
  Description of Artificial Sequence: Synthetic oligonucleotide
  Target: LAMA2; (+) strand; PAM type: YTN; PAM sequence: CTG
ttagtctgatgggcttccct

SEQ ID NO: 353667 - DNA, 20 bp, Artificial Sequence
  Description of Artificial Sequence: Synthetic oligonucleotide
  Target: LAMA2; (+) strand; PAM type: YTN; PAM sequence: TTA
gtctgatgggcttccctttg

SEQ ID NO: 353668 - DNA, 20 bp, Artificial Sequence
  Description of Artificial Sequence: Synthetic oligonucleotide
  Target: LAMA2; (+) strand; PAM type: YTN; PAM sequence: CTG
atgggcttccctttgagggt

SEQ ID NO: 353669 - DNA, 20 bp, Artificial Sequence
  Description of Artificial Sequence: Synthetic oligonucleotide
  Target: LAMA2; (+) strand; PAM type: YTN; PAM sequence: CTT
ccctttgagggtaacccgac

SEQ ID NO: 353670 - DNA, 20 bp, Artificial Sequence
  Description of Artificial Sequence: Synthetic oligonucleotide
  Target: LAMA2; (+) strand; PAM type: YTN; PAM sequence: TTC
cctttgagggtaacccgacc

SEQ ID NO: 353671 - DNA, 20 bp, Artificial Sequence
  Description of Artificial Sequence: Synthetic oligonucleotide
  Target: LAMA2; (+) strand; PAM type: YTN; PAM sequence: CTT
tgagggtaacccgacctttc

SEQ ID NO: 353672 - DNA, 20 bp, Artificial Sequence
  Description of Artificial Sequence: Synthetic oligonucleotide
  Target: LAMA2; (+) strand; PAM type: YTN; PAM sequence: TTT
gagggtaacccgacctttct

SEQ ID NO: 353673 - DNA, 20 bp, Artificial Sequence
  Description of Artificial Sequence: Synthetic oligonucleotide
  Target: LAMA2; (+) strand; PAM type: YTN; PAM sequence: TTG
agggtaacccgacctttctc

SEQ ID NO: 353674 - DNA, 20 bp, Artificial Sequence
  Description of Artificial Sequence: Synthetic oligonucleotide
  Target: LAMA2; (+) strand; PAM type: YTN; PAM sequence: CTT
tctctctggctgcccttaac

SEQ ID NO: 353675 - DNA, 20 bp, Artificial Sequence
  Description of Artificial Sequence: Synthetic oligonucleotide
  Target: LAMA2; (+) strand; PAM type: YTN; PAM sequence: TTT
ctctctggctgcccttaaca

SEQ ID NO: 353676 - DNA, 20 bp, Artificial Sequence
  Description of Artificial Sequence: Synthetic oligonucleotide
  Target: LAMA2; (+) strand; PAM type: YTN; PAM sequence: TTC
tctctggctgcccttaacat

SEQ ID NO: 353677 - DNA, 20 bp, Artificial Sequence
  Description of Artificial Sequence: Synthetic oligonucleotide
  Target: LAMA2; (+) strand; PAM type: YTN; PAM sequence: CTC
tctggctgcccttaacattt

SEQ ID NO: 353678 - DNA, 20 bp, Artificial Sequence
  Description of Artificial Sequence: Synthetic oligonucleotide
  Target: LAMA2; (+) strand; PAM type: YTN; PAM sequence: CTC
tggctgcccttaacattttt

SEQ ID NO: 353679 - DNA, 20 bp, Artificial Sequence
  Description of Artificial Sequence: Synthetic oligonucleotide
  Target: LAMA2; (+) strand; PAM type: YTN; PAM sequence: CTG
gctgcccttaacattttttc

SEQ ID NO: 353680 - DNA, 20 bp, Artificial Sequence
  Description of Artificial Sequence: Synthetic oligonucleotide
  Target: LAMA2; (+) strand; PAM type: YTN; PAM sequence: CTG
cccttaacattttttccttc

SEQ ID NO: 353681 - DNA, 20 bp, Artificial Sequence
  Description of Artificial Sequence: Synthetic oligonucleotide
  Target: LAMA2; (+) strand; PAM type: YTN; PAM sequence: CTT
aacattttttccttcatttc

SEQ ID NO: 353682 - DNA, 20 bp, Artificial Sequence
  Description of Artificial Sequence: Synthetic oligonucleotide
  Target: LAMA2; (+) strand; PAM type: YTN; PAM sequence: TTA
acattttttccttcatttca

SEQ ID NO: 353683 - DNA, 20 bp, Artificial Sequence
  Description of Artificial Sequence: Synthetic oligonucleotide
  Target: LAMA2; (+) strand; PAM type: YTN; PAM sequence: TTT
tttccttcatttcagctttg

SEQ ID NO: 353684 - DNA, 20 bp, Artificial Sequence
  Description of Artificial Sequence: Synthetic oligonucleotide
  Target: LAMA2; (+) strand; PAM type: YTN; PAM sequence: TTT
ttccttcatttcagctttgg

SEQ ID NO: 353685 - DNA, 20 bp, Artificial Sequence
  Description of Artificial Sequence: Synthetic oligonucleotide
  Target: LAMA2; (+) strand; PAM type: YTN; PAM sequence: TTT
tccttcatttcagctttggt

SEQ ID NO: 353686 - DNA, 20 bp, Artificial Sequence
  Description of Artificial Sequence: Synthetic oligonucleotide
  Target: LAMA2; (+) strand; PAM type: YTN; PAM sequence: TTT
ccttcatttcagctttggtg

SEQ ID NO: 353687 - DNA, 20 bp, Artificial Sequence
  Description of Artificial Sequence: Synthetic oligonucleotide
  Target: LAMA2; (+) strand; PAM type: YTN; PAM sequence: TTC
cttcatttcagctttggtga

SEQ ID NO: 353688 - DNA, 20 bp, Artificial Sequence
  Description of Artificial Sequence: Synthetic oligonucleotide
  Target: LAMA2; (+) strand; PAM type: YTN; PAM sequence: CTT
catttcagctttggtgaatc

SEQ ID NO: 353689 - DNA, 20 bp, Artificial Sequence
  Description of Artificial Sequence: Synthetic oligonucleotide
  Target: LAMA2; (+) strand; PAM type: YTN; PAM sequence: TTC
atttcagctttggtgaatct

SEQ ID NO: 353690 - DNA, 20 bp, Artificial Sequence
  Description of Artificial Sequence: Synthetic oligonucleotide
  Target: LAMA2; (+) strand; PAM type: YTN; PAM sequence: TTT
cagctttggtgaatctgaca

SEQ ID NO: 353691 - DNA, 20 bp, Artificial Sequence
  Description of Artificial Sequence: Synthetic oligonucleotide
  Target: LAMA2; (+) strand; PAM type: YTN; PAM sequence: TTC
agctttggtgaatctgacaa

SEQ ID NO: 353692 - DNA, 20 bp, Artificial Sequence
  Description of Artificial Sequence: Synthetic oligonucleotide
  Target: LAMA2; (+) strand; PAM type: YTN; PAM sequence: CTT
tggtgaatctgacaattatg

SEQ ID NO: 353693 - DNA, 20 bp, Artificial Sequence
  Description of Artificial Sequence: Synthetic oligonucleotide
  Target: LAMA2; (+) strand; PAM type: YTN; PAM sequence: TTT
ggtgaatctgacaattatgt

SEQ ID NO: 353694 - DNA, 20 bp, Artificial Sequence
  Description of Artificial Sequence: Synthetic oligonucleotide
  Target: LAMA2; (+) strand; PAM type: YTN; PAM sequence: TTG
gtgaatctgacaattatgtg

SEQ ID NO: 353695 - DNA, 20 bp, Artificial Sequence
  Description of Artificial Sequence: Synthetic oligonucleotide
  Target: LAMA2; (+) strand; PAM type: YTN; PAM sequence: CTG
acaattatgtgtcttggagt

SEQ ID NO: 353696 - DNA, 20 bp, Artificial Sequence
  Description of Artificial Sequence: Synthetic oligonucleotide
  Target: LAMA2; (+) strand; PAM type: YTN; PAM sequence: TTA
tgtgtcttggagttgctctt

SEQ ID NO: 353697 - DNA, 20 bp, Artificial Sequence
  Description of Artificial Sequence: Synthetic oligonucleotide
  Target: LAMA2; (+) strand; PAM type: YTN; PAM sequence: CTT
ggagttgctcttctcgagga

SEQ ID NO: 353698 - DNA, 20 bp, Artificial Sequence
  Description of Artificial Sequence: Synthetic oligonucleotide
  Target: LAMA2; (+) strand; PAM type: YTN; PAM sequence: TTG
gagttgctcttctcgaggag

SEQ ID NO: 353699 - DNA, 20 bp, Artificial Sequence
  Description of Artificial Sequence: Synthetic oligonucleotide
  Target: LAMA2; (+) strand; PAM type: YTN; PAM sequence: TTG
ctcttctcgaggagtatctt

SEQ ID NO: 353700 - DNA, 20 bp, Artificial Sequence
  Description of Artificial Sequence: Synthetic oligonucleotide
  Target: LAMA2; (+) strand; PAM type: YTN; PAM sequence: CTC
ttctcgaggagtatctttgt

SEQ ID NO: 353701 - DNA, 20 bp, Artificial Sequence
  Description of Artificial Sequence: Synthetic oligonucleotide
  Target: LAMA2; (+) strand; PAM type: YTN; PAM sequence: CTT
ctcgaggagtatctttgtgg

SEQ ID NO: 353702 - DNA, 20 bp, Artificial Sequence
  Description of Artificial Sequence: Synthetic oligonucleotide
  Target: LAMA2; (+) strand; PAM type: YTN; PAM sequence: TTC
tcgaggagtatctttgtggc

SEQ ID NO: 353703 - DNA, 20 bp, Artificial Sequence
  Description of Artificial Sequence: Synthetic oligonucleotide
  Target: LAMA2; (+) strand; PAM type: YTN; PAM sequence: CTC
gaggagtatctttgtggcgt

SEQ ID NO: 353704 - DNA, 20 bp, Artificial Sequence
  Description of Artificial Sequence: Synthetic oligonucleotide
  Target: LAMA2; (+) strand; PAM type: YTN; PAM sequence: CTT
tgtggcgttctctgtatttc

SEQ ID NO: 353705 - DNA, 20 bp, Artificial Sequence
  Description of Artificial Sequence: Synthetic oligonucleotide
  Target: LAMA2; (+) strand; PAM type: YTN; PAM sequence: TTT
gtggcgttctctgtatttcc

SEQ ID NO: 353706 - DNA, 20 bp, Artificial Sequence
  Description of Artificial Sequence: Synthetic oligonucleotide
  Target: LAMA2; (+) strand; PAM type: YTN; PAM sequence: TTG
tggcgttctctgtatttcct

SEQ ID NO: 353707 - DNA, 20 bp, Artificial Sequence
  Description of Artificial Sequence: Synthetic oligonucleotide
  Target: LAMA2; (+) strand; PAM type: YTN; PAM sequence: TTC
tctgtatttcctgaatctga

SEQ ID NO: 353708 - DNA, 20 bp, Artificial Sequence
  Description of Artificial Sequence: Synthetic oligonucleotide
  Target: LAMA2; (+) strand; PAM type: YTN; PAM sequence: CTC
tgtatttcctgaatctgaac

SEQ ID NO: 353709 - DNA, 20 bp, Artificial Sequence
  Description of Artificial Sequence: Synthetic oligonucleotide
  Target: LAMA2; (+) strand; PAM type: YTN; PAM sequence: CTG
tatttcctgaatctgaacgt

SEQ ID NO: 353710 - DNA, 20 bp, Artificial Sequence
  Description of Artificial Sequence: Synthetic oligonucleotide
  Target: LAMA2; (+) strand; PAM type: YTN; PAM sequence: TTT
cctgaatctgaacgttggcc

SEQ ID NO: 353711 - DNA, 20 bp, Artificial Sequence
  Description of Artificial Sequence: Synthetic oligonucleotide
  Target: LAMA2; (+) strand; PAM type: YTN; PAM sequence: TTC
ctgaatctgaacgttggcct

SEQ ID NO: 353712 - DNA, 20 bp, Artificial Sequence
  Description of Artificial Sequence: Synthetic oligonucleotide
  Target: LAMA2; (+) strand; PAM type: YTN; PAM sequence: CTG
aatctgaacgttggcctgcc

SEQ ID NO: 353713 - DNA, 20 bp, Artificial Sequence
  Description of Artificial Sequence: Synthetic oligonucleotide
  Target: LAMA2; (+) strand; PAM type: YTN; PAM sequence: CTG
aacgttggcctgccttgcta

SEQ ID NO: 353714 - DNA, 20 bp, Artificial Sequence
  Description of Artificial Sequence: Synthetic oligonucleotide
  Target: LAMA2; (+) strand; PAM type: YTN; PAM sequence: TTG
gcctgccttgctagattggg

SEQ ID NO: 353715 - DNA, 20 bp, Artificial Sequence
  Description of Artificial Sequence: Synthetic oligonucleotide
  Target: LAMA2; (+) strand; PAM type: YTN; PAM sequence: CTG
ccttgctagattggggaagt

SEQ ID NO: 353716 - DNA, 20 bp, Artificial Sequence
  Description of Artificial Sequence: Synthetic oligonucleotide
  Target: LAMA2; (+) strand; PAM type: YTN; PAM sequence: CTT
gctagattggggaagttctc

SEQ ID NO: 353717 - DNA, 20 bp, Artificial Sequence
  Description of Artificial Sequence: Synthetic oligonucleotide
  Target: LAMA2; (+) strand; PAM type: YTN; PAM sequence: TTG
ctagattggggaagttctcc

SEQ ID NO: 353718 - DNA, 20 bp, Artificial Sequence
  Description of Artificial Sequence: Synthetic oligonucleotide
  Target: LAMA2; (+) strand; PAM type: YTN; PAM sequence: CTA
gattggggaagttctcctgg

SEQ ID NO: 353719 - DNA, 20 bp, Artificial Sequence
  Description of Artificial Sequence: Synthetic oligonucleotide
  Target: LAMA2; (+) strand; PAM type: YTN; PAM sequence: TTG
gggaagttctcctggataat

SEQ ID NO: 353720 - DNA, 20 bp, Artificial Sequence
  Description of Artificial Sequence: Synthetic oligonucleotide
  Target: LAMA2; (+) strand; PAM type: YTN; PAM sequence: TTC
tcctggataatatcctgcag

SEQ ID NO: 353721 - DNA, 20 bp, Artificial Sequence
  Description of Artificial Sequence: Synthetic oligonucleotide
  Target: LAMA2; (+) strand; PAM type: YTN; PAM sequence: CTC
ctggataatatcctgcagag

SEQ ID NO: 353722 - DNA, 20 bp, Artificial Sequence
  Description of Artificial Sequence: Synthetic oligonucleotide
  Target: LAMA2; (+) strand; PAM type: YTN; PAM sequence: CTG
gataatatcctgcagagtgt

SEQ ID NO: 353723 - DNA, 20 bp, Artificial Sequence
  Description of Artificial Sequence: Synthetic oligonucleotide
  Target: LAMA2; (+) strand; PAM type: YTN; PAM sequence: CTG
cagagtgttttccaacttgg

SEQ ID NO: 353724 - DNA, 20 bp, Artificial Sequence
  Description of Artificial Sequence: Synthetic oligonucleotide
  Target: LAMA2; (+) strand; PAM type: YTN; PAM sequence: TTT
tccaacttggttccattctc

SEQ ID NO: 353725 - DNA, 20 bp, Artificial Sequence
  Description of Artificial Sequence: Synthetic oligonucleotide
  Target: LAMA2; (+) strand; PAM type: YTN; PAM sequence: TTT
ccaacttggttccattctcc

SEQ ID NO: 353726 - DNA, 20 bp, Artificial Sequence
  Description of Artificial Sequence: Synthetic oligonucleotide
  Target: LAMA2; (+) strand; PAM type: YTN; PAM sequence: TTC
caacttggttccattctccc

SEQ ID NO: 353727 - DNA, 20 bp, Artificial Sequence
  Description of Artificial Sequence: Synthetic oligonucleotide
  Target: LAMA2; (+) strand; PAM type: YTN; PAM sequence: CTT
ggttccattctccccatcac

SEQ ID NO: 353728 - DNA, 20 bp, Artificial Sequence
  Description of Artificial Sequence: Synthetic oligonucleotide
  Target: LAMA2; (+) strand; PAM type: YTN; PAM sequence: TTG
gttccattctccccatcact

SEQ ID NO: 353729 - DNA, 20 bp, Artificial Sequence
  Description of Artificial Sequence: Synthetic oligonucleotide
  Target: LAMA2; (+) strand; PAM type: YTN; PAM sequence: TTC
cattctccccatcactttca

SEQ ID NO: 353730 - DNA, 20 bp, Artificial Sequence
  Description of Artificial Sequence: Synthetic oligonucleotide
  Target: LAMA2; (+) strand; PAM type: YTN; PAM sequence: TTC
tccccatcactttcaggtac

SEQ ID NO: 353731 - DNA, 20 bp, Artificial Sequence
  Description of Artificial Sequence: Synthetic oligonucleotide
  Target: LAMA2; (+) strand; PAM type: YTN; PAM sequence: CTC
cccatcactttcaggtacac

SEQ ID NO: 353732 - DNA, 20 bp, Artificial Sequence
  Description of Artificial Sequence: Synthetic oligonucleotide
  Target: LAMA2; (+) strand; PAM type: YTN; PAM sequence: CTT
tcaggtacaccaatcagacg

SEQ ID NO: 353733 - DNA, 20 bp, Artificial Sequence
  Description of Artificial Sequence: Synthetic oligonucleotide
  Target: LAMA2; (+) strand; PAM type: YTN; PAM sequence: TTT
caggtacaccaatcagacgt

SEQ ID NO: 353734 - DNA, 20 bp, Artificial Sequence
  Description of Artificial Sequence: Synthetic oligonucleotide
  Target: LAMA2; (+) strand; PAM type: YTN; PAM sequence: TTC
aggtacaccaatcagacgta

SEQ ID NO: 353735 - DNA, 20 bp, Artificial Sequence
  Description of Artificial Sequence: Synthetic oligonucleotide
  Target: LAMA2; (+) strand; PAM type: YTN; PAM sequence: TTT
ggtcttttcacatagtccca

SEQ ID NO: 353736 - DNA, 20 bp, Artificial Sequence
  Description of Artificial Sequence: Synthetic oligonucleotide
  Target: LAMA2; (+) strand; PAM type: YTN; PAM sequence: TTG
gtcttttcacatagtcccat

SEQ ID NO: 353737 - DNA, 20 bp, Artificial Sequence
  Description of Artificial Sequence: Synthetic oligonucleotide
  Target: LAMA2; (+) strand; PAM type: YTN; PAM sequence: CTT
ttcacatagtcccatatttc

SEQ ID NO: 353738 - DNA, 20 bp, Artificial Sequence
  Description of Artificial Sequence: Synthetic oligonucleotide
  Target: LAMA2; (+) strand; PAM type: YTN; PAM sequence: TTT
tcacatagtcccatatttct

SEQ ID NO: 353739 - DNA, 20 bp, Artificial Sequence
  Description of Artificial Sequence: Synthetic oligonucleotide
  Target: LAMA2; (+) strand; PAM type: YTN; PAM sequence: TTT
cacatagtcccatatttctt

SEQ ID NO: 353740 - DNA, 20 bp, Artificial Sequence
  Description of Artificial Sequence: Synthetic oligonucleotide
  Target: LAMA2; (+) strand; PAM type: YTN; PAM sequence: TTC
acatagtcccatatttcttg

SEQ ID NO: 353741 - DNA, 20 bp, Artificial Sequence
  Description of Artificial Sequence: Synthetic oligonucleotide
  Target: LAMA2; (+) strand; PAM type: YTN; PAM sequence: TTT
cttggaggctttgctcattt

SEQ ID NO: 353742 - DNA, 20 bp, Artificial Sequence
  Description of Artificial Sequence: Synthetic oligonucleotide
  Target: LAMA2; (+) strand; PAM type: YTN; PAM sequence: TTC
ttggaggctttgctcatttc

SEQ ID NO: 353743 - DNA, 20 bp, Artificial Sequence
  Description of Artificial Sequence: Synthetic oligonucleotide
  Target: LAMA2; (+) strand; PAM type: YTN; PAM sequence: CTT
ggaggctttgctcatttctt

SEQ ID NO: 353744 - DNA, 20 bp, Artificial Sequence
  Description of Artificial Sequence: Synthetic oligonucleotide
  Target: LAMA2; (+) strand; PAM type: YTN; PAM sequence: TTG
gaggctttgctcatttcttt

SEQ ID NO: 353745 - DNA, 20 bp, Artificial Sequence
  Description of Artificial Sequence: Synthetic oligonucleotide
  Target: LAMA2; (+) strand; PAM type: YTN; PAM sequence: CTT
tgctcatttctttttattct

SEQ ID NO: 353746 - DNA, 20 bp, Artificial Sequence
  Description of Artificial Sequence: Synthetic oligonucleotide
  Target: LAMA2; (+) strand; PAM type: YTN; PAM sequence: TTT
gctcatttctttttattctt

SEQ ID NO: 353747 - DNA, 20 bp, Artificial Sequence
  Description of Artificial Sequence: Synthetic oligonucleotide
  Target: LAMA2; (+) strand; PAM type: YTN; PAM sequence: TTG
ctcatttctttttattcttt

SEQ ID NO: 353748 - DNA, 20 bp, Artificial Sequence
  Description of Artificial Sequence: Synthetic oligonucleotide
  Target: LAMA2; (+) strand; PAM type: YTN; PAM sequence: CTC
atttctttttattctttttt

SEQ ID NO: 353749 - DNA, 20 bp, Artificial Sequence
  Description of Artificial Sequence: Synthetic oligonucleotide
  Target: LAMA2; (+) strand; PAM type: YTN; PAM sequence: TTT
ctttttattcttttttctct

SEQ ID NO: 353750 - DNA, 20 bp, Artificial Sequence
  Description of Artificial Sequence: Synthetic oligonucleotide
  Target: LAMA2; (+) strand; PAM type: YTN; PAM sequence: TTC
tttttattcttttttctcta

SEQ ID NO: 353751 - DNA, 20 bp, Artificial Sequence
  Description of Artificial Sequence: Synthetic oligonucleotide
  Target: LAMA2; (+) strand; PAM type: YTN; PAM sequence: CTT
tttattcttttttctctaaa

SEQ ID NO: 353752 - DNA, 20 bp, Artificial Sequence
  Description of Artificial Sequence: Synthetic oligonucleotide
  Target: LAMA2; (+) strand; PAM type: YTN; PAM sequence: TTT
ttattcttttttctctaaac

SEQ ID NO: 353753 - DNA, 20 bp, Artificial Sequence
  Description of Artificial Sequence: Synthetic oligonucleotide
  Target: LAMA2; (+) strand; PAM type: YTN; PAM sequence: TTT
tattcttttttctctaaact

SEQ ID NO: 353754 - DNA, 20 bp, Artificial Sequence
  Description of Artificial Sequence: Synthetic oligonucleotide
  Target: LAMA2; (+) strand; PAM type: YTN; PAM sequence: TTT
attcttttttctctaaactt

SEQ ID NO: 353755 - DNA, 20 bp, Artificial Sequence
  Description of Artificial Sequence: Synthetic oligonucleotide
  Target: LAMA2; (+) strand; PAM type: YTN; PAM sequence: TTA
ttcttttttctctaaacttc

SEQ ID NO: 353756 - DNA, 20 bp, Artificial Sequence
  Description of Artificial Sequence: Synthetic oligonucleotide
  Target: LAMA2; (+) strand; PAM type: YTN; PAM sequence: TTC
ttttttctctaaacttccct

SEQ ID NO: 353757 - DNA, 20 bp, Artificial Sequence
  Description of Artificial Sequence: Synthetic oligonucleotide
  Target: LAMA2; (+) strand; PAM type: YTN; PAM sequence: CTT
ttttctctaaacttcccttc

SEQ ID NO: 353758 - DNA, 20 bp, Artificial Sequence
  Description of Artificial Sequence: Synthetic oligonucleotide
  Target: LAMA2; (+) strand; PAM type: YTN; PAM sequence: TTT
tttctctaaacttcccttct

SEQ ID NO: 353759 - DNA, 20 bp, Artificial Sequence
  Description of Artificial Sequence: Synthetic oligonucleotide
  Target: LAMA2; (+) strand; PAM type: YTN; PAM sequence: TTT
ttctctaaacttcccttctc

SEQ ID NO: 353760 - DNA, 20 bp, Artificial Sequence
  Description of Artificial Sequence: Synthetic oligonucleotide
  Target: LAMA2; (+) strand; PAM type: YTN; PAM sequence: TTT
tctctaaacttcccttctca

SEQ ID NO: 353761 - DNA, 20 bp, Artificial Sequence
  Description of Artificial Sequence: Synthetic oligonucleotide
  Target: LAMA2; (+) strand; PAM type: YTN; PAM sequence: TTT
ctctaaacttcccttctcac

SEQ ID NO: 353762 - DNA, 20 bp, Artificial Sequence
  Description of Artificial Sequence: Synthetic oligonucleotide
  Target: LAMA2; (+) strand; PAM type: YTN; PAM sequence: TTC
tctaaacttcccttctcact

SEQ ID NO: 353763 - DNA, 20 bp, Artificial Sequence
  Description of Artificial Sequence: Synthetic oligonucleotide
  Target: LAMA2; (+) strand; PAM type: YTN; PAM sequence: CTC
taaacttcccttctcacttc

SEQ ID NO: 353764 - DNA, 20 bp, Artificial Sequence
  Description of Artificial Sequence: Synthetic oligonucleotide
  Target: LAMA2; (+) strand; PAM type: YTN; PAM sequence: CTA
aacttcccttctcacttcat

SEQ ID NO: 353765 - DNA, 20 bp, Artificial Sequence
  Description of Artificial Sequence: Synthetic oligonucleotide
  Target: LAMA2; (+) strand; PAM type: YTN; PAM sequence: CTT
cccttctcacttcatttcat

SEQ ID NO: 353766 - DNA, 20 bp, Artificial Sequence
  Description of Artificial Sequence: Synthetic oligonucleotide
  Target: LAMA2; (+) strand; PAM type: YTN; PAM sequence: TTC
ccttctcacttcatttcatt

SEQ ID NO: 353767 - DNA, 20 bp, Artificial Sequence
  Description of Artificial Sequence: Synthetic oligonucleotide
  Target: LAMA2; (+) strand; PAM type: YTN; PAM sequence: CTT
ctcacttcatttcattcatt

SEQ ID NO: 353768 - DNA, 20 bp, Artificial Sequence
  Description of Artificial Sequence: Synthetic oligonucleotide
  Target: LAMA2; (+) strand; PAM type: YTN; PAM sequence: TTC
tcacttcatttcattcattt

SEQ ID NO: 353769 - DNA, 20 bp, Artificial Sequence
  Description of Artificial Sequence: Synthetic oligonucleotide
  Target: LAMA2; (+) strand; PAM type: YTN; PAM sequence: CTC
acttcatttcattcatttca

SEQ ID NO: 353770 - DNA, 20 bp, Artificial Sequence
  Description of Artificial Sequence: Synthetic oligonucleotide
  Target: LAMA2; (+) strand; PAM type: YTN; PAM sequence: CTT
catttcattcatttcatctt

SEQ ID NO: 353771 - DNA, 20 bp, Artificial Sequence
  Description of Artificial Sequence: Synthetic oligonucleotide
  Target: LAMA2; (+) strand; PAM type: YTN; PAM sequence: TTC
atttcattcatttcatcttc

SEQ ID NO: 353772 - DNA, 20 bp, Artificial Sequence
  Description of Artificial Sequence: Synthetic oligonucleotide
  Target: LAMA2; (+) strand; PAM type: YTN; PAM sequence: TTT
cattcatttcatcttccatt

SEQ ID NO: 353773 - DNA, 20 bp, Artificial Sequence
  Description of Artificial Sequence: Synthetic oligonucleotide
  Target: LAMA2; (+) strand; PAM type: YTN; PAM sequence: TTC
attcatttcatcttccattg

SEQ ID NO: 353774 - DNA, 20 bp, Artificial Sequence
  Description of Artificial Sequence: Synthetic oligonucleotide
  Target: LAMA2; (+) strand; PAM type: YTN; PAM sequence: TTC
atttcatcttccattgctga

SEQ ID NO: 353775 - DNA, 20 bp, Artificial Sequence
  Description of Artificial Sequence: Synthetic oligonucleotide
  Target: LAMA2; (+) strand; PAM type: YTN; PAM sequence: TTT
catcttccattgctgatacc

SEQ ID NO: 353776 - DNA, 20 bp, Artificial Sequence
  Description of Artificial Sequence: Synthetic oligonucleotide
  Target: LAMA2; (+) strand; PAM type: YTN; PAM sequence: TTC
atcttccattgctgataccc

SEQ ID NO: 353777 - DNA, 20 bp, Artificial Sequence
  Description of Artificial Sequence: Synthetic oligonucleotide
  Target: LAMA2; (+) strand; PAM type: YTN; PAM sequence: CTT
ccattgctgataccctttct

SEQ ID NO: 353778 - DNA, 20 bp, Artificial Sequence
  Description of Artificial Sequence: Synthetic oligonucleotide
  Target: LAMA2; (+) strand; PAM type: YTN; PAM sequence: TTC
cattgctgataccctttctt

SEQ ID NO: 353779 - DNA, 20 bp, Artificial Sequence
  Description of Artificial Sequence: Synthetic oligonucleotide
  Target: LAMA2; (+) strand; PAM type: YTN; PAM sequence: TTG
ctgataccctttcttccagt

SEQ ID NO: 353780 - DNA, 20 bp, Artificial Sequence
  Description of Artificial Sequence: Synthetic oligonucleotide
  Target: LAMA2; (+) strand; PAM type: YTN; PAM sequence: CTG
ataccctttcttccagttga

SEQ ID NO: 353781 - DNA, 20 bp, Artificial Sequence
  Description of Artificial Sequence: Synthetic oligonucleotide
  Target: LAMA2; (+) strand; PAM type: YTN; PAM sequence: CTT
tcttccagttgatcgcatcg

SEQ ID NO: 353782 - DNA, 20 bp, Artificial Sequence
  Description of Artificial Sequence: Synthetic oligonucleotide
  Target: LAMA2; (+) strand; PAM type: YTN; PAM sequence: TTT
cttccagttgatcgcatcgg

SEQ ID NO: 353783 - DNA, 20 bp, Artificial Sequence
  Description of Artificial Sequence: Synthetic oligonucleotide
  Target: LAMA2; (+) strand; PAM type: YTN; PAM sequence: TTC
ttccagttgatcgcatcggc

SEQ ID NO: 353784 - DNA, 20 bp, Artificial Sequence
  Description of Artificial Sequence: Synthetic oligonucleotide
  Target: LAMA2; (+) strand; PAM type: YTN; PAM sequence: CTT
ccagttgatcgcatcggctc

SEQ ID NO: 353785 - DNA, 20 bp, Artificial Sequence
  Description of Artificial Sequence: Synthetic oligonucleotide
  Target: LAMA2; (+) strand; PAM type: YTN; PAM sequence: TTC
cagttgatcgcatcggctcc

SEQ ID NO: 353786 - DNA, 20 bp, Artificial Sequence
  Description of Artificial Sequence: Synthetic oligonucleotide
  Target: LAMA2; (+) strand; PAM type: YTN; PAM sequence: TTG
atcgcatcggctcctgaggc

SEQ ID NO: 353787 - DNA, 20 bp, Artificial Sequence
  Description of Artificial Sequence: Synthetic oligonucleotide
  Target: LAMA2; (+) strand; PAM type: YTN; PAM sequence: CTC
ctgaggcttctgcattcttc

SEQ ID NO: 353788 - DNA, 20 bp, Artificial Sequence
  Description of Artificial Sequence: Synthetic oligonucleotide
  Target: LAMA2; (+) strand; PAM type: YTN; PAM sequence: CTG
aggcttctgcattcttcacg

SEQ ID NO: 353789 - DNA, 20 bp, Artificial Sequence
  Description of Artificial Sequence: Synthetic oligonucleotide
  Target: LAMA2; (+) strand; PAM type: YTN; PAM sequence: CTT
ctgcattcttcacgtagttc

SEQ ID NO: 353790 - DNA, 20 bp, Artificial Sequence
  Description of Artificial Sequence: Synthetic oligonucleotide
  Target: LAMA2; (+) strand; PAM type: YTN; PAM sequence: TTC
tgcattcttcacgtagttct

SEQ ID NO: 353791 - DNA, 20 bp, Artificial Sequence
  Description of Artificial Sequence: Synthetic oligonucleotide
  Target: LAMA2; (+) strand; PAM type: YTN; PAM sequence: CTG
cattcttcacgtagttctcg

SEQ ID NO: 353792 - DNA, 20 bp, Artificial Sequence
  Description of Artificial Sequence: Synthetic oligonucleotide
  Target: LAMA2; (+) strand; PAM type: YTN; PAM sequence: TTC
ttcacgtagttctcgagcct

SEQ ID NO: 353793 - DNA, 20 bp, Artificial Sequence
  Description of Artificial Sequence: Synthetic oligonucleotide
  Target: LAMA2; (+) strand; PAM type: YTN; PAM sequence: CTT
cacgtagttctcgagccttg

SEQ ID NO: 353794 - DNA, 20 bp, Artificial Sequence
  Description of Artificial Sequence: Synthetic oligonucleotide
  Target: LAMA2; (+) strand; PAM type: YTN; PAM sequence: TTC
acgtagttctcgagccttgg

SEQ ID NO: 353795 - DNA, 20 bp, Artificial Sequence
  Description of Artificial Sequence: Synthetic oligonucleotide
  Target: LAMA2; (+) strand; PAM type: YTN; PAM sequence: TTC
tcgagccttggttttcagct

SEQ ID NO: 353796 - DNA, 20 bp, Artificial Sequence
  Description of Artificial Sequence: Synthetic oligonucleotide
  Target: LAMA2; (+) strand; PAM type: YTN; PAM sequence: CTC
gagccttggttttcagctcc

SEQ ID NO: 353797 - DNA, 20 bp, Artificial Sequence
  Description of Artificial Sequence: Synthetic oligonucleotide
  Target: LAMA2; (+) strand; PAM type: YTN; PAM sequence: CTT
ggttttcagctccatcagct

SEQ ID NO: 353798 - DNA, 20 bp, Artificial Sequence
  Description of Artificial Sequence: Synthetic oligonucleotide
  Target: LAMA2; (+) strand; PAM type: YTN; PAM sequence: TTG
gttttcagctccatcagctc

SEQ ID NO: 353799 - DNA, 20 bp, Artificial Sequence
  Description of Artificial Sequence: Synthetic oligonucleotide
  Target: LAMA2; (+) strand; PAM type: YTN; PAM sequence: TTT
tcagctccatcagctccttt

SEQ ID NO: 353800 - DNA, 20 bp, Artificial Sequence
  Description of Artificial Sequence: Synthetic oligonucleotide
  Target: LAMA2; (+) strand; PAM type: YTN; PAM sequence: TTT
cagctccatcagctccttta

SEQ ID NO: 353801 - DNA, 20 bp, Artificial Sequence
  Description of Artificial Sequence: Synthetic oligonucleotide
  Target: LAMA2; (+) strand; PAM type: YTN; PAM sequence: TTC
agctccatcagctcctttaa

SEQ ID NO: 353802 - DNA, 20 bp, Artificial Sequence
  Description of Artificial Sequence: Synthetic oligonucleotide
  Target: LAMA2; (+) strand; PAM type: YTN; PAM sequence: CTC
catcagctcctttaagcact

SEQ ID NO: 353803 - DNA, 20 bp, Artificial Sequence
  Description of Artificial Sequence: Synthetic oligonucleotide
  Target: LAMA2; (+) strand; PAM type: YTN; PAM sequence: CTC
ctttaagcacttctctgtat

SEQ ID NO: 353804 - DNA, 20 bp, Artificial Sequence
  Description of Artificial Sequence: Synthetic oligonucleotide
  Target: LAMA2; (+) strand; PAM type: YTN; PAM sequence: CTT
taagcacttctctgtattgg

SEQ ID NO: 353805 - DNA, 20 bp, Artificial Sequence
  Description of Artificial Sequence: Synthetic oligonucleotide
  Target: LAMA2; (+) strand; PAM type: YTN; PAM sequence: TTT
aagcacttctctgtattggt

SEQ ID NO: 353806 - DNA, 20 bp, Artificial Sequence
  Description of Artificial Sequence: Synthetic oligonucleotide
  Target: LAMA2; (+) strand; PAM type: YTN; PAM sequence: TTA
agcacttctctgtattggtt

SEQ ID NO: 353807 - DNA, 20 bp, Artificial Sequence
  Description of Artificial Sequence: Synthetic oligonucleotide
  Target: LAMA2; (+) strand; PAM type: YTN; PAM sequence: CTT
ctctgtattggttattctag

SEQ ID NO: 353808 - DNA, 20 bp, Artificial Sequence
  Description of Artificial Sequence: Synthetic oligonucleotide
  Target: LAMA2; (+) strand; PAM type: YTN; PAM sequence: TTC
tctgtattggttattctagt

SEQ ID NO: 353809 - DNA, 20 bp, Artificial Sequence
  Description of Artificial Sequence: Synthetic oligonucleotide
  Target: LAMA2; (+) strand; PAM type: YTN; PAM sequence: CTC
tgtattggttattctagtta

SEQ ID NO: 353810 - DNA, 20 bp, Artificial Sequence
  Description of Artificial Sequence: Synthetic oligonucleotide
  Target: LAMA2; (+) strand; PAM type: YTN; PAM sequence: CTG
tattggttattctagttata

SEQ ID NO: 353811 - DNA, 20 bp, Artificial Sequence
  Description of Artificial Sequence: Synthetic oligonucleotide
  Target: LAMA2; (+) strand; PAM type: YTN; PAM sequence: TTG
gttattctagttatacattc

SEQ ID NO: 353812 - DNA, 20 bp, Artificial Sequence
  Description of Artificial Sequence: Synthetic oligonucleotide
  Target: LAMA2; (+) strand; PAM type: YTN; PAM sequence: TTA
ttctagttatacattcttct

SEQ ID NO: 353813 - DNA, 20 bp, Artificial Sequence
  Description of Artificial Sequence: Synthetic oligonucleotide
  Target: LAMA2; (+) strand; PAM type: YTN; PAM sequence: TTC
tagttatacattcttctaca

SEQ ID NO: 353814 - DNA, 20 bp, Artificial Sequence
  Description of Artificial Sequence: Synthetic oligonucleotide
  Target: LAMA2; (+) strand; PAM type: YTN; PAM sequence: CTA
gttatacattcttctacatt

SEQ ID NO: 353815 - DNA, 20 bp, Artificial Sequence
  Description of Artificial Sequence: Synthetic oligonucleotide
  Target: LAMA2; (+) strand; PAM type: YTN; PAM sequence: TTA
tacattcttctacatttttt

SEQ ID NO: 353816 - DNA, 20 bp, Artificial Sequence
  Description of Artificial Sequence: Synthetic oligonucleotide
  Target: LAMA2; (+) strand; PAM type: YTN; PAM sequence: TTC
ttctacatttttttcaaagt

SEQ ID NO: 353817 - DNA, 20 bp, Artificial Sequence
  Description of Artificial Sequence: Synthetic oligonucleotide
  Target: LAMA2; (+) strand; PAM type: YTN; PAM sequence: CTT
ctacatttttttcaaagttt

SEQ ID NO: 353818 - DNA, 20 bp, Artificial Sequence
  Description of Artificial Sequence: Synthetic oligonucleotide
  Target: LAMA2; (+) strand; PAM type: YTN; PAM sequence: TTC
tacatttttttcaaagtttt

SEQ ID NO: 353819 - DNA, 20 bp, Artificial Sequence
  Description of Artificial Sequence: Synthetic oligonucleotide
  Target: LAMA2; (+) strand; PAM type: YTN; PAM sequence: CTA
catttttttcaaagttttca

SEQ ID NO: 353820 - DNA, 20 bp, Artificial Sequence
  Description of Artificial Sequence: Synthetic oligonucleotide
  Target: LAMA2; (+) strand; PAM type: YTN; PAM sequence: TTT
ttttcaaagttttcaacttc

SEQ ID NO: 353821 - DNA, 20 bp, Artificial Sequence
  Description of Artificial Sequence: Synthetic oligonucleotide
  Target: LAMA2; (+) strand; PAM type: YTN; PAM sequence: TTT
tttcaaagttttcaacttct

SEQ ID NO: 353822 - DNA, 20 bp, Artificial Sequence
  Description of Artificial Sequence: Synthetic oligonucleotide
  Target: LAMA2; (+) strand; PAM type: YTN; PAM sequence: TTT
ttcaaagttttcaacttctt

SEQ ID NO: 353823 - DNA, 20 bp, Artificial Sequence
  Description of Artificial Sequence: Synthetic oligonucleotide
  Target: LAMA2; (+) strand; PAM type: YTN; PAM sequence: TTT
tcaaagttttcaacttcttt

SEQ ID NO: 353824 - DNA, 20 bp, Artificial Sequence
  Description of Artificial Sequence: Synthetic oligonucleotide
  Target: LAMA2; (+) strand; PAM type: YTN; PAM sequence: TTT
caaagttttcaacttctttg

SEQ ID NO: 353825 - DNA, 20 bp, Artificial Sequence
  Description of Artificial Sequence: Synthetic oligonucleotide
  Target: LAMA2; (+) strand; PAM type: YTN; PAM sequence: TTC
aaagttttcaacttctttgc

SEQ ID NO: 353826 - DNA, 20 bp, Artificial Sequence
  Description of Artificial Sequence: Synthetic oligonucleotide
  Target: LAMA2; (+) strand; PAM type: YTN; PAM sequence: TTT
tcaacttctttgcctttggt

SEQ ID NO: 353827 - DNA, 20 bp, Artificial Sequence
  Description of Artificial Sequence: Synthetic oligonucleotide
  Target: LAMA2; (+) strand; PAM type: YTN; PAM sequence: TTT
caacttctttgcctttggtt

SEQ ID NO: 353828 - DNA, 20 bp, Artificial Sequence
  Description of Artificial Sequence: Synthetic oligonucleotide
  Target: LAMA2; (+) strand; PAM type: YTN; PAM sequence: TTC
aacttctttgcctttggttt

SEQ ID NO: 353829 - DNA, 20 bp, Artificial Sequence
  Description of Artificial Sequence: Synthetic oligonucleotide
  Target: LAMA2; (+) strand; PAM type: YTN; PAM sequence: CTT
ctttgcctttggtttgaatg

SEQ ID NO: 353830 - DNA, 20 bp, Artificial Sequence
  Description of Artificial Sequence: Synthetic oligonucleotide
  Target: LAMA2; (+) strand; PAM type: YTN; PAM sequence: TTC
tttgcctttggtttgaatgt

SEQ ID NO: 353831 - DNA, 20 bp, Artificial Sequence
  Description of Artificial Sequence: Synthetic oligonucleotide
  Target: LAMA2; (+) strand; PAM type: YTN; PAM sequence: CTT
tgcctttggtttgaatgtcc

SEQ ID NO: 353832 - DNA, 20 bp, Artificial Sequence
  Description of Artificial Sequence: Synthetic oligonucleotide
  Target: LAMA2; (+) strand; PAM type: YTN; PAM sequence: TTT
gcctttggtttgaatgtcct

SEQ ID NO: 353833 - DNA, 20 bp, Artificial Sequence
  Description of Artificial Sequence: Synthetic oligonucleotide
  Target: LAMA2; (+) strand; PAM type: YTN; PAM sequence: TTG
cctttggtttgaatgtcctc

SEQ ID NO: 353834 - DNA, 20 bp, Artificial Sequence
  Description of Artificial Sequence: Synthetic oligonucleotide
  Target: LAMA2; (+) strand; PAM type: YTN; PAM sequence: CTT
tggtttgaatgtcctcccgt

SEQ ID NO: 353835 - DNA, 20 bp, Artificial Sequence
  Description of Artificial Sequence: Synthetic oligonucleotide
  Target: LAMA2; (+) strand; PAM type: YTN; PAM sequence: TTT
ggtttgaatgtcctcccgta

SEQ ID NO: 353836 - DNA, 20 bp, Artificial Sequence
  Description of Artificial Sequence: Synthetic oligonucleotide
  Target: LAMA2; (+) strand; PAM type: YTN; PAM sequence: TTG
gtttgaatgtcctcccgtag

SEQ ID NO: 353837 - DNA, 20 bp, Artificial Sequence
  Description of Artificial Sequence: Synthetic oligonucleotide
  Target: LAMA2; (+) strand; PAM type: YTN; PAM sequence: TTT
gaatgtcctcccgtagctca

SEQ ID NO: 353838 - DNA, 20 bp, Artificial Sequence
  Description of Artificial Sequence: Synthetic oligonucleotide
  Target: LAMA2; (+) strand; PAM type: YTN; PAM sequence: TTG
aatgtcctcccgtagctcag

SEQ ID NO: 353839 - DNA, 20 bp, Artificial Sequence
  Description of Artificial Sequence: Synthetic oligonucleotide
  Target: LAMA2; (+) strand; PAM type: YTN; PAM sequence: CTC
ccgtagctcagagtaatttg

SEQ ID NO: 353840 - DNA, 20 bp, Artificial Sequence
  Description of Artificial Sequence: Synthetic oligonucleotide
  Target: LAMA2; (+) strand; PAM type: YTN; PAM sequence: CTC
agagtaatttgatcgtctga

SEQ ID NO: 353841 - DNA, 20 bp, Artificial Sequence
  Description of Artificial Sequence: Synthetic oligonucleotide
  Target: LAMA2; (+) strand; PAM type: YTN; PAM sequence: TTT
gatcgtctgaagccttcttc

SEQ ID NO: 353842 - DNA, 20 bp, Artificial Sequence
  Description of Artificial Sequence: Synthetic oligonucleotide
  Target: LAMA2; (+) strand; PAM type: YTN; PAM sequence: TTG
atcgtctgaagccttcttct

SEQ ID NO: 353843 - DNA, 20 bp, Artificial Sequence
  Description of Artificial Sequence: Synthetic oligonucleotide
  Target: LAMA2; (+) strand; PAM type: YTN; PAM sequence: CTG
aagccttcttctctcagctc

SEQ ID NO: 353844 - DNA, 20 bp, Artificial Sequence
  Description of Artificial Sequence: Synthetic oligonucleotide
  Target: LAMA2; (+) strand; PAM type: YTN; PAM sequence: CTT
cttctctcagctcgtcaaag

SEQ ID NO: 353845 - DNA, 20 bp, Artificial Sequence
  Description of Artificial Sequence: Synthetic oligonucleotide
  Target: LAMA2; (+) strand; PAM type: YTN; PAM sequence: TTC
ttctctcagctcgtcaaagt

SEQ ID NO: 353846 - DNA, 20 bp, Artificial Sequence
  Description of Artificial Sequence: Synthetic oligonucleotide
  Target: LAMA2; (+) strand; PAM type: YTN; PAM sequence: CTT
ctctcagctcgtcaaagtcg

SEQ ID NO: 353847 - DNA, 20 bp, Artificial Sequence
  Description of Artificial Sequence: Synthetic oligonucleotide
  Target: LAMA2; (+) strand; PAM type: YTN; PAM sequence: TTC
tctcagctcgtcaaagtcgt

SEQ ID NO: 353848 - DNA, 20 bp, Artificial Sequence
  Description of Artificial Sequence: Synthetic oligonucleotide
  Target: LAMA2; (+) strand; PAM type: YTN; PAM sequence: CTC
tcagctcgtcaaagtcgttc

SEQ ID NO: 353849 - DNA, 20 bp, Artificial Sequence
  Description of Artificial Sequence: Synthetic oligonucleotide
  Target: LAMA2; (+) strand; PAM type: YTN; PAM sequence: CTC
agctcgtcaaagtcgttctc

SEQ ID NO: 353850 - DNA, 20 bp, Artificial Sequence
  Description of Artificial Sequence: Synthetic oligonucleotide
  Target: LAMA2; (+) strand; PAM type: YTN; PAM sequence: CTC
gtcaaagtcgttctccatcc

SEQ ID NO: 353851 - DNA, 20 bp, Artificial Sequence
  Description of Artificial Sequence: Synthetic oligonucleotide
  Target: LAMA2; (+) strand; PAM type: YTN; PAM sequence: TTC
tccatccagctttgttccgt

SEQ ID NO: 353852 - DNA, 20 bp, Artificial Sequence
  Description of Artificial Sequence: Synthetic oligonucleotide
  Target: LAMA2; (+) strand; PAM type: YTN; PAM sequence: CTC
catccagctttgttccgttg

SEQ ID NO: 353853 - DNA, 20 bp, Artificial Sequence
  Description of Artificial Sequence: Synthetic oligonucleotide
  Target: LAMA2; (+) strand; PAM type: YTN; PAM sequence: CTT
tgttccgttgctggtgagga

SEQ ID NO: 353854 - DNA, 20 bp, Artificial Sequence
  Description of Artificial Sequence: Synthetic oligonucleotide
  Target: LAMA2; (+) strand; PAM type: YTN; PAM sequence: TTT
gttccgttgctggtgaggaa

SEQ ID NO: 353855 - DNA, 20 bp, Artificial Sequence
  Description of Artificial Sequence: Synthetic oligonucleotide
  Target: LAMA2; (+) strand; PAM type: YTN; PAM sequence: TTG
ttccgttgctggtgaggaac

SEQ ID NO: 353856 - DNA, 20 bp, Artificial Sequence
  Description of Artificial Sequence: Synthetic oligonucleotide
  Target: LAMA2; (+) strand; PAM type: YTN; PAM sequence: TTC
cgttgctggtgaggaactgc

SEQ ID NO: 353857 - DNA, 20 bp, Artificial Sequence
  Description of Artificial Sequence: Synthetic oligonucleotide
  Target: LAMA2; (+) strand; PAM type: YTN; PAM sequence: TTG
ctggtgaggaactgcgttcc

SEQ ID NO: 353858 - DNA, 20 bp, Artificial Sequence
  Description of Artificial Sequence: Synthetic oligonucleotide
  Target: LAMA2; (+) strand; PAM type: YTN; PAM sequence: CTG
gtgaggaactgcgttccttt

SEQ ID NO: 353859 - DNA, 20 bp, Artificial Sequence
  Description of Artificial Sequence: Synthetic oligonucleotide
  Target: LAMA2; (+) strand; PAM type: YTN; PAM sequence: CTG
cgttcctttggaggaggaga

SEQ ID NO: 353860 - DNA, 20 bp, Artificial Sequence
  Description of Artificial Sequence: Synthetic oligonucleotide
  Target: LAMA2; (+) strand; PAM type: YTN; PAM sequence: TTC
ctttggaggaggagaggcac

SEQ ID NO: 353861 - DNA, 20 bp, Artificial Sequence
  Description of Artificial Sequence: Synthetic oligonucleotide
  Target: LAMA2; (+) strand; PAM type: YTN; PAM sequence: CTT
tggaggaggagaggcactct

SEQ ID NO: 353862 - DNA, 20 bp, Artificial Sequence
  Description of Artificial Sequence: Synthetic oligonucleotide
  Target: LAMA2; (+) strand; PAM type: YTN; PAM sequence: TTT
ggaggaggagaggcactctg

SEQ ID NO: 353863 - DNA, 20 bp, Artificial Sequence
  Description of Artificial Sequence: Synthetic oligonucleotide
  Target: LAMA2; (+) strand; PAM type: YTN; PAM sequence: TTG
gaggaggagaggcactctgc

SEQ ID NO: 353864 - DNA, 20 bp, Artificial Sequence
  Description of Artificial Sequence: Synthetic oligonucleotide
  Target: LAMA2; (+) strand; PAM type: YTN; PAM sequence: CTC
tgctttttagagtttccagt

SEQ ID NO: 353865 - DNA, 20 bp, Artificial Sequence
  Description of Artificial Sequence: Synthetic oligonucleotide
  Target: LAMA2; (+) strand; PAM type: YTN; PAM sequence: CTG
ctttttagagtttccagttt

SEQ ID NO: 353866 - DNA, 20 bp, Artificial Sequence
  Description of Artificial Sequence: Synthetic oligonucleotide
  Target: LAMA2; (+) strand; PAM type: YTN; PAM sequence: CTT
tttagagtttccagtttttc

SEQ ID NO: 353867 - DNA, 20 bp, Artificial Sequence
  Description of Artificial Sequence: Synthetic oligonucleotide
  Target: LAMA2; (+) strand; PAM type: YTN; PAM sequence: TTT
ttagagtttccagtttttct

SEQ ID NO: 353868 - DNA, 20 bp, Artificial Sequence
  Description of Artificial Sequence: Synthetic oligonucleotide
  Target: LAMA2; (+) strand; PAM type: YTN; PAM sequence: TTT
tagagtttccagtttttctg

SEQ ID NO: 353869 - DNA, 20 bp, Artificial Sequence
  Description of Artificial Sequence: Synthetic oligonucleotide
  Target: LAMA2; (+) strand; PAM type: YTN; PAM sequence: TTT
agagtttccagtttttctgt

SEQ ID NO: 353870 - DNA, 20 bp, Artificial Sequence
  Description of Artificial Sequence: Synthetic oligonucleotide
  Target: LAMA2; (+) strand; PAM type: YTN; PAM sequence: TTA
gagtttccagtttttctgtt

SEQ ID NO: 353871 - DNA, 20 bp, Artificial Sequence
  Description of Artificial Sequence: Synthetic oligonucleotide
  Target: LAMA2; (+) strand; PAM type: YTN; PAM sequence: TTT
ccagtttttctgttctgttt

SEQ ID NO: 353872 - DNA, 20 bp, Artificial Sequence
  Description of Artificial Sequence: Synthetic oligonucleotide
  Target: LAMA2; (+) strand; PAM type: YTN; PAM sequence: TTC
cagtttttctgttctgtttt

SEQ ID NO: 353873 - DNA, 20 bp, Artificial Sequence
  Description of Artificial Sequence: Synthetic oligonucleotide
  Target: LAMA2; (+) strand; PAM type: YTN; PAM sequence: TTT
ttctgttctgttttttcccc

SEQ ID NO: 353874 - DNA, 20 bp, Artificial Sequence
  Description of Artificial Sequence: Synthetic oligonucleotide
  Target: LAMA2; (+) strand; PAM type: YTN; PAM sequence: TTT
tctgttctgttttttcccca

SEQ ID NO: 353875 - DNA, 20 bp, Artificial Sequence
  Description of Artificial Sequence: Synthetic oligonucleotide
  Target: LAMA2; (+) strand; PAM type: YTN; PAM sequence: TTT
ctgttctgttttttccccat

SEQ ID NO: 353876 - DNA, 20 bp, Artificial Sequence
  Description of Artificial Sequence: Synthetic oligonucleotide
  Target: LAMA2; (+) strand; PAM type: YTN; PAM sequence: TTC
tgttctgttttttccccatc

SEQ ID NO: 353877 - DNA, 20 bp, Artificial Sequence
  Description of Artificial Sequence: Synthetic oligonucleotide
  Target: LAMA2; (+) strand; PAM type: YTN; PAM sequence: CTG
ttctgttttttccccatctt

SEQ ID NO: 353878 - DNA, 20 bp, Artificial Sequence
  Description of Artificial Sequence: Synthetic oligonucleotide
  Target: LAMA2; (+) strand; PAM type: YTN; PAM sequence: TTC
tgttttttccccatctttgt

SEQ ID NO: 353879 - DNA, 20 bp, Artificial Sequence
  Description of Artificial Sequence: Synthetic oligonucleotide
  Target: LAMA2; (+) strand; PAM type: YTN; PAM sequence: CTG
ttttttccccatctttgtgg

SEQ ID NO: 353880 - DNA, 20 bp, Artificial Sequence
  Description of Artificial Sequence: Synthetic oligonucleotide
  Target: LAMA2; (+) strand; PAM type: YTN; PAM sequence: TTT
tttccccatctttgtggttt

SEQ ID NO: 353881 - DNA, 20 bp, Artificial Sequence
  Description of Artificial Sequence: Synthetic oligonucleotide
  Target: LAMA2; (+) strand; PAM type: YTN; PAM sequence: TTT
ttccccatctttgtggtttt

SEQ ID NO: 353882 - DNA, 20 bp, Artificial Sequence
  Description of Artificial Sequence: Synthetic oligonucleotide
  Target: LAMA2; (+) strand; PAM type: YTN; PAM sequence: TTT
tccccatctttgtggtttta

SEQ ID NO: 353883 - DNA, 20 bp, Artificial Sequence
  Description of Artificial Sequence: Synthetic oligonucleotide
  Target: LAMA2; (+) strand; PAM type: YTN; PAM sequence: TTT
ccccatctttgtggttttat

SEQ ID NO: 353884 - DNA, 20 bp, Artificial Sequence
  Description of Artificial Sequence: Synthetic oligonucleotide
  Target: LAMA2; (+) strand; PAM type: YTN; PAM sequence: TTC
cccatctttgtggttttatc

SEQ ID NO: 353885 - DNA, 20 bp, Artificial Sequence
  Description of Artificial Sequence: Synthetic oligonucleotide
  Target: LAMA2; (+) strand; PAM type: YTN; PAM sequence: CTT
tgtggttttatctacttttg

SEQ ID NO: 353886 - DNA, 20 bp, Artificial Sequence
  Description of Artificial Sequence: Synthetic oligonucleotide
  Target: LAMA2; (+) strand; PAM type: YTN; PAM sequence: TTT
gtggttttatctacttttgg

SEQ ID NO: 353887 - DNA, 20 bp, Artificial Sequence
  Description of Artificial Sequence: Synthetic oligonucleotide
  Target: LAMA2; (+) strand; PAM type: YTN; PAM sequence: TTG
tggttttatctacttttggt

SEQ ID NO: 353888 - DNA, 20 bp, Artificial Sequence
  Description of Artificial Sequence: Synthetic oligonucleotide
  Target: LAMA2; (+) strand; PAM type: YTN; PAM sequence: TTT
tatctacttttggtctttga

SEQ ID NO: 353889 - DNA, 20 bp, Artificial Sequence
  Description of Artificial Sequence: Synthetic oligonucleotide
  Target: LAMA2; (+) strand; PAM type: YTN; PAM sequence: TTT
atctacttttggtctttgat

SEQ ID NO: 353890 - DNA, 20 bp, Artificial Sequence
  Description of Artificial Sequence: Synthetic oligonucleotide
  Target: LAMA2; (+) strand; PAM type: YTN; PAM sequence: TTA
tctacttttggtctttgatg

SEQ ID NO: 353891 - DNA, 20 bp, Artificial Sequence
  Description of Artificial Sequence: Synthetic oligonucleotide
  Target: LAMA2; (+) strand; PAM type: YTN; PAM sequence: CTA
cttttggtctttgatgatgg

SEQ ID NO: 353892 - DNA, 20 bp, Artificial Sequence
  Description of Artificial Sequence: Synthetic oligonucleotide
  Target: LAMA2; (+) strand; PAM type: YTN; PAM sequence: CTT
ttggtctttgatgatggtga

SEQ ID NO: 353893 - DNA, 20 bp, Artificial Sequence
  Description of Artificial Sequence: Synthetic oligonucleotide
  Target: LAMA2; (+) strand; PAM type: YTN; PAM sequence: TTT
tggtctttgatgatggtgat

SEQ ID NO: 353894 - DNA, 20 bp, Artificial Sequence
  Description of Artificial Sequence: Synthetic oligonucleotide
  Target: LAMA2; (+) strand; PAM type: YTN; PAM sequence: TTT
ggtctttgatgatggtgatg

SEQ ID NO: 353895 - DNA, 20 bp, Artificial Sequence
  Description of Artificial Sequence: Synthetic oligonucleotide
  Target: LAMA2; (+) strand; PAM type: YTN; PAM sequence: TTG
gtctttgatgatggtgatgt

SEQ ID NO: 353896 - DNA, 20 bp, Artificial Sequence
  Description of Artificial Sequence: Synthetic oligonucleotide
  Target: LAMA2; (+) strand; PAM type: YTN; PAM sequence: CTT
tgatgatggtgatgtacaga

SEQ ID NO: 353897 - DNA, 20 bp, Artificial Sequence
  Description of Artificial Sequence: Synthetic oligonucleotide
  Target: LAMA2; (+) strand; PAM type: YTN; PAM sequence: TTT
gatgatggtgatgtacagat

SEQ ID NO: 353898 - DNA, 20 bp, Artificial Sequence
  Description of Artificial Sequence: Synthetic oligonucleotide
  Target: LAMA2; (+) strand; PAM type: YTN; PAM sequence: TTG
atgatggtgatgtacagatg

SEQ ID NO: 353899 - DNA, 20 bp, Artificial Sequence
  Description of Artificial Sequence: Synthetic oligonucleotide
  Target: LAMA2; (+) strand; PAM type: YTN; PAM sequence: TTT
ttcgtgtggatgtcctttct

SEQ ID NO: 353900 - DNA, 20 bp, Artificial Sequence
  Description of Artificial Sequence: Synthetic oligonucleotide
  Target: LAMA2; (+) strand; PAM type: YTN; PAM sequence: TTT
tcgtgtggatgtcctttctg

SEQ ID NO: 353901 - DNA, 20 bp, Artificial Sequence
  Description of Artificial Sequence: Synthetic oligonucleotide
  Target: LAMA2; (+) strand; PAM type: YTN; PAM sequence: TTT
cgtgtggatgtcctttctgt

SEQ ID NO: 353902 - DNA, 20 bp, Artificial Sequence
  Description of Artificial Sequence: Synthetic oligonucleotide
  Target: LAMA2; (+) strand; PAM type: YTN; PAM sequence: TTC
gtgtggatgtcctttctgtt

SEQ ID NO: 353903 - DNA, 20 bp, Artificial Sequence
  Description of Artificial Sequence: Synthetic oligonucleotide
  Target: LAMA2; (+) strand; PAM type: YTN; PAM sequence: CTT
tctgtttgttagttttcctt

SEQ ID NO: 353904 - DNA, 20 bp, Artificial Sequence
  Description of Artificial Sequence: Synthetic oligonucleotide
  Target: LAMA2; (+) strand; PAM type: YTN; PAM sequence: TTT
ctgtttgttagttttccttc

SEQ ID NO: 353905 - DNA, 20 bp, Artificial Sequence
  Description of Artificial Sequence: Synthetic oligonucleotide
  Target: LAMA2; (+) strand; PAM type: YTN; PAM sequence: TTC
tgtttgttagttttccttct

SEQ ID NO: 353906 - DNA, 20 bp, Artificial Sequence
  Description of Artificial Sequence: Synthetic oligonucleotide
  Target: LAMA2; (+) strand; PAM type: YTN; PAM sequence: CTG
tttgttagttttccttctaa

SEQ ID NO: 353907 - DNA, 20 bp, Artificial Sequence
  Description of Artificial Sequence: Synthetic oligonucleotide
  Target: LAMA2; (+) strand; PAM type: YTN; PAM sequence: TTT
gttagttttccttctaacag

SEQ ID NO: 353908 - DNA, 20 bp, Artificial Sequence
  Description of Artificial Sequence: Synthetic oligonucleotide
  Target: LAMA2; (+) strand; PAM type: YTN; PAM sequence: TTG
ttagttttccttctaacaga

SEQ ID NO: 353909 - DNA, 20 bp, Artificial Sequence
  Description of Artificial Sequence: Synthetic oligonucleotide
  Target: LAMA2; (+) strand; PAM type: YTN; PAM sequence: TTA
gttttccttctaacagacag

SEQ ID NO: 353910 - DNA, 20 bp, Artificial Sequence
  Description of Artificial Sequence: Synthetic oligonucleotide
  Target: LAMA2; (+) strand; PAM type: YTN; PAM sequence: TTT
tccttctaacagacaggaac

SEQ ID NO: 353911 - DNA, 20 bp, Artificial Sequence
  Description of Artificial Sequence: Synthetic oligonucleotide
  Target: LAMA2; (+) strand; PAM type: YTN; PAM sequence: TTT
ccttctaacagacaggaacc

SEQ ID NO: 353912 - DNA, 20 bp, Artificial Sequence
  Description of Artificial Sequence: Synthetic oligonucleotide
  Target: LAMA2; (+) strand; PAM type: YTN; PAM sequence: TTC
cttctaacagacaggaacct

SEQ ID NO: 353913 - DNA, 20 bp, Artificial Sequence
  Description of Artificial Sequence: Synthetic oligonucleotide
  Target: LAMA2; (+) strand; PAM type: YTN; PAM sequence: CTT
ctaacagacaggaacctcag

SEQ ID NO: 353914 - DNA, 20 bp, Artificial Sequence
  Description of Artificial Sequence: Synthetic oligonucleotide
  Target: LAMA2; (+) strand; PAM type: YTN; PAM sequence: TTC
taacagacaggaacctcagc

SEQ ID NO: 353915 - DNA, 20 bp, Artificial Sequence
  Description of Artificial Sequence: Synthetic oligonucleotide
  Target: LAMA2; (+) strand; PAM type: YTN; PAM sequence: CTA
acagacaggaacctcagctg

SEQ ID NO: 353916 - DNA, 20 bp, Artificial Sequence
  Description of Artificial Sequence: Synthetic oligonucleotide
  Target: LAMA2; (+) strand; PAM type: YTN; PAM sequence: CTC
agctgcaggtctgttgcaat

SEQ ID NO: 353917 - DNA, 20 bp, Artificial Sequence
  Description of Artificial Sequence: Synthetic oligonucleotide
  Target: LAMA2; (+) strand; PAM type: YTN; PAM sequence: CTG
caggtctgttgcaataccct

SEQ ID NO: 353918 - DNA, 20 bp, Artificial Sequence
  Description of Artificial Sequence: Synthetic oligonucleotide
  Target: LAMA2; (+) strand; PAM type: YTN; PAM sequence: CTG
ttgcaataccctgccgtgtg

SEQ ID NO: 353919 - DNA, 20 bp, Artificial Sequence
  Description of Artificial Sequence: Synthetic oligonucleotide
  Target: LAMA2; (+) strand; PAM type: YTN; PAM sequence: TTG
caataccctgccgtgtgagg

SEQ ID NO: 353920 - DNA, 20 bp, Artificial Sequence
  Description of Artificial Sequence: Synthetic oligonucleotide
  Target: LAMA2; (+) strand; PAM type: YTN; PAM sequence: CTG
ccgtgtgaggtgtcagtgtg

SEQ ID NO: 353921 - DNA, 20 bp, Artificial Sequence
  Description of Artificial Sequence: Synthetic oligonucleotide
  Target: LAMA2; (+) strand; PAM type: YTN; PAM sequence: CTG
ctggggggtgcctcccagtt

SEQ ID NO: 353922 - DNA, 20 bp, Artificial Sequence
  Description of Artificial Sequence: Synthetic oligonucleotide
  Target: LAMA2; (+) strand; PAM type: YTN; PAM sequence: CTG
gggggtgcctcccagttacg

SEQ ID NO: 353923 - DNA, 20 bp, Artificial Sequence
  Description of Artificial Sequence: Synthetic oligonucleotide
  Target: LAMA2; (+) strand; PAM type: YTN; PAM sequence: CTC
ccagttacgctgctcagggg

SEQ ID NO: 353924 - DNA, 20 bp, Artificial Sequence
  Description of Artificial Sequence: Synthetic oligonucleotide
  Target: LAMA2; (+) strand; PAM type: YTN; PAM sequence: TTA
cgctgctcaggggtcagggg

SEQ ID NO: 353925 - DNA, 20 bp, Artificial Sequence
  Description of Artificial Sequence: Synthetic oligonucleotide
  Target: LAMA2; (+) strand; PAM type: YTN; PAM sequence: CTG
ctcaggggtcaggggtcagg

SEQ ID NO: 353926 - DNA, 20 bp, Artificial Sequence
  Description of Artificial Sequence: Synthetic oligonucleotide
  Target: LAMA2; (+) strand; PAM type: YTN; PAM sequence: CTC
aggggtcaggggtcagggac

SEQ ID NO: 353927 - DNA, 20 bp, Artificial Sequence
  Description of Artificial Sequence: Synthetic oligonucleotide
  Target: LAMA2; (+) strand; PAM type: YTN; PAM sequence: CTT
gaggaggcagtctgcccgtt

SEQ ID NO: 353928 - DNA, 20 bp, Artificial Sequence
  Description of Artificial Sequence: Synthetic oligonucleotide
  Target: LAMA2; (+) strand; PAM type: YTN; PAM sequence: TTG
aggaggcagtctgcccgttc

SEQ ID NO: 353929 - DNA, 20 bp, Artificial Sequence
  Description of Artificial Sequence: Synthetic oligonucleotide
  Target: LAMA2; (+) strand; PAM type: YTN; PAM sequence: CTG
cccgttcttagatctccagc

SEQ ID NO: 353930 - DNA, 20 bp, Artificial Sequence
  Description of Artificial Sequence: Synthetic oligonucleotide
  Target: LAMA2; (+) strand; PAM type: YTN; PAM sequence: TTC
ttagatctccagctgcgtgc

SEQ ID NO: 353931 - DNA, 20 bp, Artificial Sequence
  Description of Artificial Sequence: Synthetic oligonucleotide
  Target: LAMA2; (+) strand; PAM type: YTN; PAM sequence: CTT
agatctccagctgcgtgctg

SEQ ID NO: 353932 - DNA, 20 bp, Artificial Sequence
  Description of Artificial Sequence: Synthetic oligonucleotide
  Target: LAMA2; (+) strand; PAM type: YTN; PAM sequence: TTA
gatctccagctgcgtgctgg

SEQ ID NO: 353933 - DNA, 20 bp, Artificial Sequence
  Description of Artificial Sequence: Synthetic oligonucleotide
  Target: LAMA2; (+) strand; PAM type: YTN; PAM sequence: CTC
cagctgcgtgctgggagaac

SEQ ID NO: 353934 - DNA, 20 bp, Artificial Sequence
  Description of Artificial Sequence: Synthetic oligonucleotide
  Target: LAMA2; (+) strand; PAM type: YTN; PAM sequence: CTG
cgtgctgggagaaccactgc

SEQ ID NO: 353935 - DNA, 20 bp, Artificial Sequence
  Description of Artificial Sequence: Synthetic oligonucleotide
  Target: LAMA2; (+) strand; PAM type: YTN; PAM sequence: CTG
ggagaaccactgctctcttc

SEQ ID NO: 353936 - DNA, 20 bp, Artificial Sequence
  Description of Artificial Sequence: Synthetic oligonucleotide
  Target: LAMA2; (+) strand; PAM type: YTN; PAM sequence: CTG
ctctcttcaaagctgtcaga

SEQ ID NO: 353937 - DNA, 20 bp, Artificial Sequence
  Description of Artificial Sequence: Synthetic oligonucleotide
  Target: LAMA2; (+) strand; PAM type: YTN; PAM sequence: CTC
tcttcaaagctgtcagaggg

SEQ ID NO: 353938 - DNA, 20 bp, Artificial Sequence
  Description of Artificial Sequence: Synthetic oligonucleotide
  Target: LAMA2; (+) strand; PAM type: YTN; PAM sequence: CTC
ttcaaagctgtcagagggac

SEQ ID NO: 353939 - DNA, 20 bp, Artificial Sequence
  Description of Artificial Sequence: Synthetic oligonucleotide
  Target: LAMA2; (+) strand; PAM type: YTN; PAM sequence: CTT
caaagctgtcagagggacat

SEQ ID NO: 353940 - DNA, 20 bp, Artificial Sequence
  Description of Artificial Sequence: Synthetic oligonucleotide
  Target: LAMA2; (+) strand; PAM type: YTN; PAM sequence: TTC
aaagctgtcagagggacatt

SEQ ID NO: 353941 - DNA, 20 bp, Artificial Sequence
  Description of Artificial Sequence: Synthetic oligonucleotide
  Target: LAMA2; (+) strand; PAM type: YTN; PAM sequence: CTG
tcagagggacatttaagtct

SEQ ID NO: 353942 - DNA, 20 bp, Artificial Sequence
  Description of Artificial Sequence: Synthetic oligonucleotide
  Target: LAMA2; (+) strand; PAM type: YTN; PAM sequence: TTT
aagtctgcagaggttactgc

SEQ ID NO: 353943 - DNA, 20 bp, Artificial Sequence
  Description of Artificial Sequence: Synthetic oligonucleotide
  Target: LAMA2; (+) strand; PAM type: YTN; PAM sequence: TTA
agtctgcagaggttactgct

SEQ ID NO: 353944 - DNA, 20 bp, Artificial Sequence
  Description of Artificial Sequence: Synthetic oligonucleotide
  Target: LAMA2; (+) strand; PAM type: YTN; PAM sequence: CTG
cagaggttactgctgtcttt

SEQ ID NO: 353945 - DNA, 20 bp, Artificial Sequence
  Description of Artificial Sequence: Synthetic oligonucleotide
  Target: LAMA2; (+) strand; PAM type: YTN; PAM sequence: TTA
ctgctgtctttttgtttgtc

SEQ ID NO: 353946 - DNA, 20 bp, Artificial Sequence
  Description of Artificial Sequence: Synthetic oligonucleotide
  Target: LAMA2; (+) strand; PAM type: YTN; PAM sequence: CTG
ctgtctttttgtttgtctgt

SEQ ID NO: 353947 - DNA, 20 bp, Artificial Sequence
  Description of Artificial Sequence: Synthetic oligonucleotide
  Target: LAMA2; (+) strand; PAM type: YTN; PAM sequence: CTG
tctttttgtttgtctgtgcc

SEQ ID NO: 353948 - DNA, 20 bp, Artificial Sequence
  Description of Artificial Sequence: Synthetic oligonucleotide
  Target: LAMA2; (+) strand; PAM type: YTN; PAM sequence: CTT
tttgtttgtctgtgccctgc

SEQ ID NO: 353949 - DNA, 20 bp, Artificial Sequence
  Description of Artificial Sequence: Synthetic oligonucleotide
  Target: LAMA2; (+) strand; PAM type: YTN; PAM sequence: TTT
ttgtttgtctgtgccctgcc

SEQ ID NO: 353950 - DNA, 20 bp, Artificial Sequence
  Description of Artificial Sequence: Synthetic oligonucleotide
  Target: LAMA2; (+) strand; PAM type: YTN; PAM sequence: TTT
tgtttgtctgtgccctgccc

SEQ ID NO: 353951 - DNA, 20 bp, Artificial Sequence
  Description of Artificial Sequence: Synthetic oligonucleotide
  Target: LAMA2; (+) strand; PAM type: YTN; PAM sequence: TTT
gtttgtctgtgccctgcccc

SEQ ID NO: 353952 - DNA, 20 bp, Artificial Sequence
  Description of Artificial Sequence: Synthetic oligonucleotide
  Target: LAMA2; (+) strand; PAM type: YTN; PAM sequence: TTG
tttgtctgtgccctgccccc

SEQ ID NO: 353953 - DNA, 20 bp, Artificial Sequence
  Description of Artificial Sequence: Synthetic oligonucleotide
  Target: LAMA2; (+) strand; PAM type: YTN; PAM sequence: TTT
gtctgtgccctgcccccaga

SEQ ID NO: 353954 - DNA, 20 bp, Artificial Sequence
  Description of Artificial Sequence: Synthetic oligonucleotide
  Target: LAMA2; (+) strand; PAM type: YTN; PAM sequence: TTG
tctgtgccctgcccccagag

SEQ ID NO: 353955 - DNA, 20 bp, Artificial Sequence
  Description of Artificial Sequence: Synthetic oligonucleotide
  Target: LAMA2; (+) strand; PAM type: YTN; PAM sequence: CTG
tgccctgcccccagaggtgg

SEQ ID NO: 353956 - DNA, 20 bp, Artificial Sequence
  Description of Artificial Sequence: Synthetic oligonucleotide
  Target: LAMA2; (+) strand; PAM type: YTN; PAM sequence: CTG
cccccagaggtggagcctac

SEQ ID NO: 353957 - DNA, 20 bp, Artificial Sequence
  Description of Artificial Sequence: Synthetic oligonucleotide
  Target: LAMA2; (+) strand; PAM type: YTN; PAM sequence: CTA
cagaggcaggcaggcctcct

SEQ ID NO: 353958 - DNA, 20 bp, Artificial Sequence
  Description of Artificial Sequence: Synthetic oligonucleotide
  Target: LAMA2; (+) strand; PAM type: YTN; PAM sequence: CTC
cttgagctgtggtgggctcc

SEQ ID NO: 353959 - DNA, 20 bp, Artificial Sequence
  Description of Artificial Sequence: Synthetic oligonucleotide
  Target: LAMA2; (+) strand; PAM type: YTN; PAM sequence: CTT
gagctgtggtgggctccacc

SEQ ID NO: 353960 - DNA, 20 bp, Artificial Sequence
  Description of Artificial Sequence: Synthetic oligonucleotide
  Target: LAMA2; (+) strand; PAM type: YTN; PAM sequence: TTG
agctgtggtgggctccaccc

SEQ ID NO: 353961 - DNA, 20 bp, Artificial Sequence
  Description of Artificial Sequence: Synthetic oligonucleotide
  Target: LAMA2; (+) strand; PAM type: YTN; PAM sequence: CTG
tggtgggctccacccagttg

SEQ ID NO: 353962 - DNA, 20 bp, Artificial Sequence
  Description of Artificial Sequence: Synthetic oligonucleotide
  Target: LAMA2; (+) strand; PAM type: YTN; PAM sequence: CTC
cacccagttggagcttccca

SEQ ID NO: 353963 - DNA, 20 bp, Artificial Sequence
  Description of Artificial Sequence: Synthetic oligonucleotide
  Target: LAMA2; (+) strand; PAM type: YTN; PAM sequence: TTG
gagcttcccagctgctttgt

SEQ ID NO: 353964 - DNA, 20 bp, Artificial Sequence
  Description of Artificial Sequence: Synthetic oligonucleotide
  Target: LAMA2; (+) strand; PAM type: YTN; PAM sequence: CTT
cccagctgctttgtttacct

SEQ ID NO: 353965 - DNA, 20 bp, Artificial Sequence
  Description of Artificial Sequence: Synthetic oligonucleotide
  Target: LAMA2; (+) strand; PAM type: YTN; PAM sequence: TTC
ccagctgctttgtttaccta

SEQ ID NO: 353966 - DNA, 20 bp, Artificial Sequence
  Description of Artificial Sequence: Synthetic oligonucleotide
  Target: LAMA2; (+) strand; PAM type: YTN; PAM sequence: CTG
ctttgtttacctaatcaagc

SEQ ID NO: 353967 - DNA, 20 bp, Artificial Sequence
  Description of Artificial Sequence: Synthetic oligonucleotide
  Target: LAMA2; (+) strand; PAM type: YTN; PAM sequence: CTT
tgtttacctaatcaagcctg

SEQ ID NO: 353968 - DNA, 20 bp, Artificial Sequence
  Description of Artificial Sequence: Synthetic oligonucleotide
  Target: LAMA2; (+) strand; PAM type: YTN; PAM sequence: TTT
gtttacctaatcaagcctgg

SEQ ID NO: 353969 - DNA, 20 bp, Artificial Sequence
  Description of Artificial Sequence: Synthetic oligonucleotide
  Target: LAMA2; (+) strand; PAM type: YTN; PAM sequence: TTG
tttacctaatcaagcctggg

SEQ ID NO: 353970 - DNA, 20 bp, Artificial Sequence
  Description of Artificial Sequence: Synthetic oligonucleotide
  Target: LAMA2; (+) strand; PAM type: YTN; PAM sequence: TTT
acctaatcaagcctgggcaa

SEQ ID NO: 353971 - DNA, 20 bp, Artificial Sequence
  Description of Artificial Sequence: Synthetic oligonucleotide
  Target: LAMA2; (+) strand; PAM type: YTN; PAM sequence: TTA
cctaatcaagcctgggcaat

SEQ ID NO: 353972 - DNA, 20 bp, Artificial Sequence
  Description of Artificial Sequence: Synthetic oligonucleotide
  Target: LAMA2; (+) strand; PAM type: YTN; PAM sequence: CTA
atcaagcctgggcaatggcg

SEQ ID NO: 353973 - DNA, 20 bp, Artificial Sequence
  Description of Artificial Sequence: Synthetic oligonucleotide
  Target: LAMA2; (+) strand; PAM type: YTN; PAM sequence: CTG
ggcaatggcggcgcccctcc

SEQ ID NO: 353974 - DNA, 20 bp, Artificial Sequence
  Description of Artificial Sequence: Synthetic oligonucleotide
  Target: LAMA2; (+) strand; PAM type: YTN; PAM sequence: CTC
ccccagcctcgctgctgcct

SEQ ID NO: 353975 - DNA, 20 bp, Artificial Sequence
  Description of Artificial Sequence: Synthetic oligonucleotide
  Target: LAMA2; (+) strand; PAM type: YTN; PAM sequence: CTC
gctgctgccttgcagtttga

SEQ ID NO: 353976 - DNA, 20 bp, Artificial Sequence
  Description of Artificial Sequence: Synthetic oligonucleotide
  Target: LAMA2; (+) strand; PAM type: YTN; PAM sequence: CTG
ctgccttgcagtttgatctc

SEQ ID NO: 353977 - DNA, 20 bp, Artificial Sequence
  Description of Artificial Sequence: Synthetic oligonucleotide
  Target: LAMA2; (+) strand; PAM type: YTN; PAM sequence: CTG
ccttgcagtttgatctcaga

SEQ ID NO: 353978 - DNA, 20 bp, Artificial Sequence
  Description of Artificial Sequence: Synthetic oligonucleotide
  Target: LAMA2; (+) strand; PAM type: YTN; PAM sequence: CTT
gcagtttgatctcagactgc

SEQ ID NO: 353979 - DNA, 20 bp, Artificial Sequence
  Description of Artificial Sequence: Synthetic oligonucleotide
  Target: LAMA2; (+) strand; PAM type: YTN; PAM sequence: TTG
cagtttgatctcagactgct

SEQ ID NO: 353980 - DNA, 20 bp, Artificial Sequence
  Description of Artificial Sequence: Synthetic oligonucleotide
  Target: LAMA2; (+) strand; PAM type: YTN; PAM sequence: TTT
gatctcagactgctgtgcta

SEQ ID NO: 353981 - DNA, 20 bp, Artificial Sequence
  Description of Artificial Sequence: Synthetic oligonucleotide
  Target: LAMA2; (+) strand; PAM type: YTN; PAM sequence: TTG
atctcagactgctgtgctag

SEQ ID NO: 353982 - DNA, 20 bp, Artificial Sequence
  Description of Artificial Sequence: Synthetic oligonucleotide
  Target: LAMA2; (+) strand; PAM type: YTN; PAM sequence: CTC
agactgctgtgctagcaatc

SEQ ID NO: 353983 - DNA, 20 bp, Artificial Sequence
  Description of Artificial Sequence: Synthetic oligonucleotide
  Target: LAMA2; (+) strand; PAM type: YTN; PAM sequence: CTG
ctgtgctagcaatcagcgag

SEQ ID NO: 353984 - DNA, 20 bp, Artificial Sequence
  Description of Artificial Sequence: Synthetic oligonucleotide
  Target: LAMA2; (+) strand; PAM type: YTN; PAM sequence: CTG
tgctagcaatcagcgagact

SEQ ID NO: 353985 - DNA, 20 bp, Artificial Sequence
  Description of Artificial Sequence: Synthetic oligonucleotide
  Target: LAMA2; (+) strand; PAM type: YTN; PAM sequence: CTA
gcaatcagcgagactccatg

SEQ ID NO: 353986 - DNA, 20 bp, Artificial Sequence
  Description of Artificial Sequence: Synthetic oligonucleotide
  Target: LAMA2; (+) strand; PAM type: YTN; PAM sequence: CTC
catgggcgtaggaccctcca

SEQ ID NO: 353987 - DNA, 20 bp, Artificial Sequence
  Description of Artificial Sequence: Synthetic oligonucleotide
  Target: LAMA2; (+) strand; PAM type: YTN; PAM sequence: CTC
caagccaggtgcaggatata

SEQ ID NO: 353988 - DNA, 20 bp, Artificial Sequence
  Description of Artificial Sequence: Synthetic oligonucleotide
  Target: LAMA2; (+) strand; PAM type: YTN; PAM sequence: CTC
atggttcaccgttttttaag

SEQ ID NO: 353989 - DNA, 20 bp, Artificial Sequence
  Description of Artificial Sequence: Synthetic oligonucleotide
  Target: LAMA2; (+) strand; PAM type: YTN; PAM sequence: TTC
accgttttttaagcccgtcg

SEQ ID NO: 353990 - DNA, 20 bp, Artificial Sequence
  Description of Artificial Sequence: Synthetic oligonucleotide
  Target: LAMA2; (+) strand; PAM type: YTN; PAM sequence: TTT
tttaagcccgtcggaaaagc

SEQ ID NO: 353991 - DNA, 20 bp, Artificial Sequence
  Description of Artificial Sequence: Synthetic oligonucleotide
  Target: LAMA2; (+) strand; PAM type: YTN; PAM sequence: TTT
ttaagcccgtcggaaaagcg

SEQ ID NO: 353992 - DNA, 20 bp, Artificial Sequence
  Description of Artificial Sequence: Synthetic oligonucleotide
  Target: LAMA2; (+) strand; PAM type: YTN; PAM sequence: TTT
taagcccgtcggaaaagcgc

SEQ ID NO: 353993 - DNA, 20 bp, Artificial Sequence
  Description of Artificial Sequence: Synthetic oligonucleotide
  Target: LAMA2; (+) strand; PAM type: YTN; PAM sequence: TTT
aagcccgtcggaaaagcgca

SEQ ID NO: 353994 - DNA, 20 bp, Artificial Sequence
  Description of Artificial Sequence: Synthetic oligonucleotide
  Target: LAMA2; (+) strand; PAM type: YTN; PAM sequence: TTA
agcccgtcggaaaagcgcag

SEQ ID NO: 353995 - DNA, 20 bp, Artificial Sequence
  Description of Artificial Sequence: Synthetic oligonucleotide
  Target: LAMA2; (+) strand; PAM type: YTN; PAM sequence: TTC
cggtgggagtgacccgattt

SEQ ID NO: 353996 - DNA, 20 bp, Artificial Sequence
  Description of Artificial Sequence: Synthetic oligonucleotide
  Target: LAMA2; (+) strand; PAM type: YTN; PAM sequence: TTT
tccaggtgccgtccgtcacc

SEQ ID NO: 353997 - DNA, 20 bp, Artificial Sequence
  Description of Artificial Sequence: Synthetic oligonucleotide
  Target: LAMA2; (+) strand; PAM type: YTN; PAM sequence: TTT
ccaggtgccgtccgtcaccc

SEQ ID NO: 353998 - DNA, 20 bp, Artificial Sequence
  Description of Artificial Sequence: Synthetic oligonucleotide
  Target: LAMA2; (+) strand; PAM type: YTN; PAM sequence: TTC
caggtgccgtccgtcacccc

SEQ ID NO: 353999 - DNA, 20 bp, Artificial Sequence
  Description of Artificial Sequence: Synthetic oligonucleotide
  Target: LAMA2; (+) strand; PAM type: YTN; PAM sequence: CTT
tctgtgactcggaaagggaa

SEQ ID NO: 354000 - DNA, 20 bp, Artificial Sequence
  Description of Artificial Sequence: Synthetic oligonucleotide
  Target: LAMA2; (+) strand; PAM type: YTN; PAM sequence: TTT
ctgtgactcggaaagggaac

SEQ ID NO: 354001 - DNA, 20 bp, Artificial Sequence
  Description of Artificial Sequence: Synthetic oligonucleotide
  Target: LAMA2; (+) strand; PAM type: YTN; PAM sequence: TTC
tgtgactcggaaagggaact

SEQ ID NO: 354002 - DNA, 20 bp, Artificial Sequence
  Description of Artificial Sequence: Synthetic oligonucleotide
  Target: LAMA2; (+) strand; PAM type: YTN; PAM sequence: CTG
tgactcggaaagggaactcc

SEQ ID NO: 354003 - DNA, 20 bp, Artificial Sequence
  Description of Artificial Sequence: Synthetic oligonucleotide
  Target: LAMA2; (+) strand; PAM type: YTN; PAM sequence: CTC
ggaaagggaactccctgacc

SEQ ID NO: 354004 - DNA, 20 bp, Artificial Sequence
  Description of Artificial Sequence: Synthetic oligonucleotide
  Target: LAMA2; (+) strand; PAM type: YTN; PAM sequence: CTC
cctgaccccttgcgcttccc

SEQ ID NO: 354005 - DNA, 20 bp, Artificial Sequence
  Description of Artificial Sequence: Synthetic oligonucleotide
  Target: LAMA2; (+) strand; PAM type: YTN; PAM sequence: CTG
accccttgcgcttcccaagt

SEQ ID NO: 354006 - DNA, 20 bp, Artificial Sequence
  Description of Artificial Sequence: Synthetic oligonucleotide
  Target: LAMA2; (+) strand; PAM type: YTN; PAM sequence: CTT
gcgcttcccaagtgaggcaa

SEQ ID NO: 354007 - DNA, 20 bp, Artificial Sequence
  Description of Artificial Sequence: Synthetic oligonucleotide
  Target: LAMA2; (+) strand; PAM type: YTN; PAM sequence: TTG
cgcttcccaagtgaggcaat

SEQ ID NO: 354008 - DNA, 20 bp, Artificial Sequence
  Description of Artificial Sequence: Synthetic oligonucleotide
  Target: LAMA2; (+) strand; PAM type: YTN; PAM sequence: CTT
cccaagtgaggcaatgcctc

SEQ ID NO: 354009 - DNA, 20 bp, Artificial Sequence
  Description of Artificial Sequence: Synthetic oligonucleotide
  Target: LAMA2; (+) strand; PAM type: YTN; PAM sequence: TTC
ccaagtgaggcaatgcctcg

SEQ ID NO: 354010 - DNA, 20 bp, Artificial Sequence
  Description of Artificial Sequence: Synthetic oligonucleotide
  Target: LAMA2; (+) strand; PAM type: YTN; PAM sequence: CTC
gccctgcttcggctcgcgca

SEQ ID NO: 354011 - DNA, 20 bp, Artificial Sequence
  Description of Artificial Sequence: Synthetic oligonucleotide
  Target: LAMA2; (+) strand; PAM type: YTN; PAM sequence: CTG
cttcggctcgcgcagggtgc

SEQ ID NO: 354012 - DNA, 20 bp, Artificial Sequence
  Description of Artificial Sequence: Synthetic oligonucleotide
  Target: LAMA2; (+) strand; PAM type: YTN; PAM sequence: CTT
cggctcgcgcagggtgcgcg

SEQ ID NO: 354013 - DNA, 20 bp, Artificial Sequence
  Description of Artificial Sequence: Synthetic oligonucleotide
  Target: LAMA2; (+) strand; PAM type: YTN; PAM sequence: TTC
ggctcgcgcagggtgcgcgc

SEQ ID NO: 354014 - DNA, 20 bp, Artificial Sequence
  Description of Artificial Sequence: Synthetic oligonucleotide
  Target: LAMA2; (+) strand; PAM type: YTN; PAM sequence: CTC
gcgcagggtgcgcgcaccca

SEQ ID NO: 354015 - DNA, 20 bp, Artificial Sequence
  Description of Artificial Sequence: Synthetic oligonucleotide
  Target: LAMA2; (+) strand; PAM type: YTN; PAM sequence: CTG
acctgcgcccactgtctggc

SEQ ID NO: 354016 - DNA, 20 bp, Artificial Sequence
  Description of Artificial Sequence: Synthetic oligonucleotide
  Target: LAMA2; (+) strand; PAM type: YTN; PAM sequence: CTG
cgcccactgtctggcattcc

SEQ ID NO: 354017 - DNA, 20 bp, Artificial Sequence
  Description of Artificial Sequence: Synthetic oligonucleotide
  Target: LAMA2; (+) strand; PAM type: YTN; PAM sequence: CTG
tctggcattccctagtgaga

SEQ ID NO: 354018 - DNA, 20 bp, Artificial Sequence
  Description of Artificial Sequence: Synthetic oligonucleotide
  Target: LAMA2; (+) strand; PAM type: YTN; PAM sequence: CTG
gcattccctagtgagatgaa

SEQ ID NO: 354019 - DNA, 20 bp, Artificial Sequence
  Description of Artificial Sequence: Synthetic oligonucleotide
  Target: LAMA2; (+) strand; PAM type: YTN; PAM sequence: TTC
cctagtgagatgaacccggt

SEQ ID NO: 354020 - DNA, 20 bp, Artificial Sequence
  Description of Artificial Sequence: Synthetic oligonucleotide
  Target: LAMA2; (+) strand; PAM type: YTN; PAM sequence: CTA
gtgagatgaacccggtacct

SEQ ID NO: 354021 - DNA, 20 bp, Artificial Sequence
  Description of Artificial Sequence: Synthetic oligonucleotide
  Target: LAMA2; (+) strand; PAM type: YTN; PAM sequence: CTC
agatggaaatgcagaaatca

SEQ ID NO: 354022 - DNA, 20 bp, Artificial Sequence
  Description of Artificial Sequence: Synthetic oligonucleotide
  Target: LAMA2; (+) strand; PAM type: YTN; PAM sequence: CTT
ctgcgtcgctcacgctggga

SEQ ID NO: 354023 - DNA, 20 bp, Artificial Sequence
  Description of Artificial Sequence: Synthetic oligonucleotide
  Target: LAMA2; (+) strand; PAM type: YTN; PAM sequence: TTC
tgcgtcgctcacgctgggag

SEQ ID NO: 354024 - DNA, 20 bp, Artificial Sequence
  Description of Artificial Sequence: Synthetic oligonucleotide
  Target: LAMA2; (+) strand; PAM type: YTN; PAM sequence: CTG
cgtcgctcacgctgggagct

SEQ ID NO: 354025 - DNA, 20 bp, Artificial Sequence
  Description of Artificial Sequence: Synthetic oligonucleotide
  Target: LAMA2; (+) strand; PAM type: YTN; PAM sequence: CTC
acgctgggagctgtagaccg

SEQ ID NO: 354026 - DNA, 20 bp, Artificial Sequence
  Description of Artificial Sequence: Synthetic oligonucleotide
  Target: LAMA2; (+) strand; PAM type: YTN; PAM sequence: CTG
ggagctgtagaccggagctg

SEQ ID NO: 354027 - DNA, 20 bp, Artificial Sequence
  Description of Artificial Sequence: Synthetic oligonucleotide
  Target: LAMA2; (+) strand; PAM type: YTN; PAM sequence: CTG
tagaccggagctgttcctat

SEQ ID NO: 354028 - DNA, 20 bp, Artificial Sequence
  Description of Artificial Sequence: Synthetic oligonucleotide
  Target: LAMA2; (+) strand; PAM type: YTN; PAM sequence: CTG
ttcctattgggccatgttgg

SEQ ID NO: 354029 - DNA, 20 bp, Artificial Sequence
  Description of Artificial Sequence: Synthetic oligonucleotide
  Target: LAMA2; (+) strand; PAM type: YTN; PAM sequence: TTC
ctattgggccatgttggctc

SEQ ID NO: 354030 - DNA, 20 bp, Artificial Sequence
  Description of Artificial Sequence: Synthetic oligonucleotide
  Target: LAMA2; (+) strand; PAM type: YTN; PAM sequence: CTA
ttgggccatgttggctcctc

SEQ ID NO: 354031 - DNA, 20 bp, Artificial Sequence
  Description of Artificial Sequence: Synthetic oligonucleotide
  Target: LAMA2; (+) strand; PAM type: YTN; PAM sequence: TTG
ggccatgttggctcctctcc

SEQ ID NO: 354032 - DNA, 20 bp, Artificial Sequence
  Description of Artificial Sequence: Synthetic oligonucleotide
  Target: LAMA2; (+) strand; PAM type: YTN; PAM sequence: TTG
gctcctctccccgattcagt

SEQ ID NO: 354033 - DNA, 20 bp, Artificial Sequence
  Description of Artificial Sequence: Synthetic oligonucleotide
  Target: LAMA2; (+) strand; PAM type: YTN; PAM sequence: CTC
ctctccccgattcagttttt

SEQ ID NO: 354034 - DNA, 20 bp, Artificial Sequence
  Description of Artificial Sequence: Synthetic oligonucleotide
  Target: LAMA2; (+) strand; PAM type: YTN; PAM sequence: CTC
tccccgattcagttttttag

SEQ ID NO: 354035 - DNA, 20 bp, Artificial Sequence
  Description of Artificial Sequence: Synthetic oligonucleotide
  Target: LAMA2; (+) strand; PAM type: YTN; PAM sequence: CTC
cccgattcagttttttagtg

SEQ ID NO: 354036 - DNA, 20 bp, Artificial Sequence
  Description of Artificial Sequence: Synthetic oligonucleotide
  Target: LAMA2; (+) strand; PAM type: YTN; PAM sequence: TTC
agttttttagtgagttacct

SEQ ID NO: 354037 - DNA, 20 bp, Artificial Sequence
  Description of Artificial Sequence: Synthetic oligonucleotide
  Target: LAMA2; (+) strand; PAM type: YTN; PAM sequence: TTT
tttagtgagttacctttagt

SEQ ID NO: 354038 - DNA, 20 bp, Artificial Sequence
  Description of Artificial Sequence: Synthetic oligonucleotide
  Target: LAMA2; (+) strand; PAM type: YTN; PAM sequence: TTT
ttagtgagttacctttagta

SEQ ID NO: 354039 - DNA, 20 bp, Artificial Sequence
  Description of Artificial Sequence: Synthetic oligonucleotide
  Target: LAMA2; (+) strand; PAM type: YTN; PAM sequence: TTT
tagtgagttacctttagtat

SEQ ID NO: 354040 - DNA, 20 bp, Artificial Sequence
  Description of Artificial Sequence: Synthetic oligonucleotide
  Target: LAMA2; (+) strand; PAM type: YTN; PAM sequence: TTT
agtgagttacctttagtatc

SEQ ID NO: 354041 - DNA, 20 bp, Artificial Sequence
  Description of Artificial Sequence: Synthetic oligonucleotide
  Target: LAMA2; (+) strand; PAM type: YTN; PAM sequence: TTA
gtgagttacctttagtatct

SEQ ID NO: 354042 - DNA, 20 bp, Artificial Sequence
  Description of Artificial Sequence: Synthetic oligonucleotide
  Target: LAMA2; (+) strand; PAM type: YTN; PAM sequence: TTA
cctttagtatctaaataata

SEQ ID NO: 354043 - DNA, 20 bp, Artificial Sequence
  Description of Artificial Sequence: Synthetic oligonucleotide
  Target: LAMA2; (+) strand; PAM type: YTN; PAM sequence: CTT
tagtatctaaataatattct

SEQ ID NO: 354044 - DNA, 20 bp, Artificial Sequence
  Description of Artificial Sequence: Synthetic oligonucleotide
  Target: LAMA2; (+) strand; PAM type: YTN; PAM sequence: TTT
agtatctaaataatattctt

SEQ ID NO: 354045 - DNA, 20 bp, Artificial Sequence
  Description of Artificial Sequence: Synthetic oligonucleotide
  Target: LAMA2; (+) strand; PAM type: YTN; PAM sequence: TTA
gtatctaaataatattctta

SEQ ID NO: 354046 - DNA, 20 bp, Artificial Sequence
  Description of Artificial Sequence: Synthetic oligonucleotide
  Target: LAMA2; (+) strand; PAM type: YTN; PAM sequence: CTA
aataatattcttatcagtac

SEQ ID NO: 354047 - DNA, 20 bp, Artificial Sequence
  Description of Artificial Sequence: Synthetic oligonucleotide
  Target: LAMA2; (+) strand; PAM type: YTN; PAM sequence: TTC
ttatcagtacttttatcacc

SEQ ID NO: 354048 - DNA, 20 bp, Artificial Sequence
  Description of Artificial Sequence: Synthetic oligonucleotide
  Target: LAMA2; (+) strand; PAM type: YTN; PAM sequence: CTT
atcagtacttttatcaccat

SEQ ID NO: 354049 - DNA, 20 bp, Artificial Sequence
  Description of Artificial Sequence: Synthetic oligonucleotide
  Target: LAMA2; (+) strand; PAM type: YTN; PAM sequence: TTA
tcagtacttttatcaccatt

SEQ ID NO: 354050 - DNA, 20 bp, Artificial Sequence
  Description of Artificial Sequence: Synthetic oligonucleotide
  Target: LAMA2; (+) strand; PAM type: YTN; PAM sequence: CTT
ttatcaccattacatattgc

SEQ ID NO: 354051 - DNA, 20 bp, Artificial Sequence
  Description of Artificial Sequence: Synthetic oligonucleotide
  Target: LAMA2; (+) strand; PAM type: YTN; PAM sequence: TTT
tatcaccattacatattgcc

SEQ ID NO: 354052 - DNA, 20 bp, Artificial Sequence
  Description of Artificial Sequence: Synthetic oligonucleotide
  Target: LAMA2; (+) strand; PAM type: YTN; PAM sequence: TTT
atcaccattacatattgcct

SEQ ID NO: 354053 - DNA, 20 bp, Artificial Sequence
  Description of Artificial Sequence: Synthetic oligonucleotide
  Target: LAMA2; (+) strand; PAM type: YTN; PAM sequence: TTA
tcaccattacatattgccta

SEQ ID NO: 354054 - DNA, 20 bp, Artificial Sequence
  Description of Artificial Sequence: Synthetic oligonucleotide
  Target: LAMA2; (+) strand; PAM type: YTN; PAM sequence: TTA
catattgcctattgactctc

SEQ ID NO: 354055 - DNA, 20 bp, Artificial Sequence
  Description of Artificial Sequence: Synthetic oligonucleotide
  Target: LAMA2; (+) strand; PAM type: YTN; PAM sequence: TTG
cctattgactctccgtcttg

SEQ ID NO: 354056 - DNA, 20 bp, Artificial Sequence
  Description of Artificial Sequence: Synthetic oligonucleotide
  Target: LAMA2; (+) strand; PAM type: YTN; PAM sequence: CTA
ttgactctccgtcttgaaag

SEQ ID NO: 354057 - DNA, 20 bp, Artificial Sequence
  Description of Artificial Sequence: Synthetic oligonucleotide
  Target: LAMA2; (+) strand; PAM type: YTN; PAM sequence: TTG
actctccgtcttgaaaggtg

SEQ ID NO: 354058 - DNA, 20 bp, Artificial Sequence
  Description of Artificial Sequence: Synthetic oligonucleotide
  Target: LAMA2; (+) strand; PAM type: YTN; PAM sequence: CTC
tccgtcttgaaaggtgaaga

SEQ ID NO: 354059 - DNA, 20 bp, Artificial Sequence
  Description of Artificial Sequence: Synthetic oligonucleotide
  Target: LAMA2; (+) strand; PAM type: YTN; PAM sequence: CTC
cgtcttgaaaggtgaagaaa

SEQ ID NO: 354060 - DNA, 20 bp, Artificial Sequence
  Description of Artificial Sequence: Synthetic oligonucleotide
  Target: LAMA2; (+) strand; PAM type: YTN; PAM sequence: CTT
gaaaggtgaagaaatgtatc

SEQ ID NO: 354061 - DNA, 20 bp, Artificial Sequence
  Description of Artificial Sequence: Synthetic oligonucleotide
  Target: LAMA2; (+) strand; PAM type: YTN; PAM sequence: TTG
aaaggtgaagaaatgtatca

SEQ ID NO: 354062 - DNA, 20 bp, Artificial Sequence
  Description of Artificial Sequence: Synthetic oligonucleotide
  Target: LAMA2; (+) strand; PAM type: YTN; PAM sequence: TTC
acaacacctccctccttcat

SEQ ID NO: 354063 - DNA, 20 bp, Artificial Sequence
  Description of Artificial Sequence: Synthetic oligonucleotide
  Target: LAMA2; (+) strand; PAM type: YTN; PAM sequence: CTC
cctccttcattccaccatcc

SEQ ID NO: 354064 - DNA, 20 bp, Artificial Sequence
  Description of Artificial Sequence: Synthetic oligonucleotide
  Target: LAMA2; (+) strand; PAM type: YTN; PAM sequence: CTC
cttcattccaccatccatac

SEQ ID NO: 354065 - DNA, 20 bp, Artificial Sequence
  Description of Artificial Sequence: Synthetic oligonucleotide
  Target: LAMA2; (+) strand; PAM type: YTN; PAM sequence: CTT
cattccaccatccatacatt

SEQ ID NO: 354066 - DNA, 20 bp, Artificial Sequence
  Description of Artificial Sequence: Synthetic oligonucleotide
  Target: LAMA2; (+) strand; PAM type: YTN; PAM sequence: TTC
attccaccatccatacattt

SEQ ID NO: 354067 - DNA, 20 bp, Artificial Sequence
  Description of Artificial Sequence: Synthetic oligonucleotide
  Target: LAMA2; (+) strand; PAM type: YTN; PAM sequence: TTC
caccatccatacatttttat

SEQ ID NO: 354068 - DNA, 20 bp, Artificial Sequence
  Description of Artificial Sequence: Synthetic oligonucleotide
  Target: LAMA2; (+) strand; PAM type: YTN; PAM sequence: TTT
ttattatgtgtttcttctac

SEQ ID NO: 354069 - DNA, 20 bp, Artificial Sequence
  Description of Artificial Sequence: Synthetic oligonucleotide
  Target: LAMA2; (+) strand; PAM type: YTN; PAM sequence: TTT
tattatgtgtttcttctacg

SEQ ID NO: 354070 - DNA, 20 bp, Artificial Sequence
  Description of Artificial Sequence: Synthetic oligonucleotide
  Target: LAMA2; (+) strand; PAM type: YTN; PAM sequence: TTT
attatgtgtttcttctacga

SEQ ID NO: 354071 - DNA, 20 bp, Artificial Sequence
  Description of Artificial Sequence: Synthetic oligonucleotide
  Target: LAMA2; (+) strand; PAM type: YTN; PAM sequence: TTA
ttatgtgtttcttctacgat

SEQ ID NO: 354072 - DNA, 20 bp, Artificial Sequence
  Description of Artificial Sequence: Synthetic oligonucleotide
  Target: LAMA2; (+) strand; PAM type: YTN; PAM sequence: TTA
tgtgtttcttctacgatatc

SEQ ID NO: 354073 - DNA, 20 bp, Artificial Sequence
  Description of Artificial Sequence: Synthetic oligonucleotide
  Target: LAMA2; (+) strand; PAM type: YTN; PAM sequence: TTT
cttctacgatatctttatca

SEQ ID NO: 354074 - DNA, 20 bp, Artificial Sequence
  Description of Artificial Sequence: Synthetic oligonucleotide
  Target: LAMA2; (+) strand; PAM type: YTN; PAM sequence: TTC
ttctacgatatctttatcat

SEQ ID NO: 354075 - DNA, 20 bp, Artificial Sequence
  Description of Artificial Sequence: Synthetic oligonucleotide
  Target: LAMA2; (+) strand; PAM type: YTN; PAM sequence: CTT
ctacgatatctttatcatgt

SEQ ID NO: 354076 - DNA, 20 bp, Artificial Sequence
  Description of Artificial Sequence: Synthetic oligonucleotide
  Target: LAMA2; (+) strand; PAM type: YTN; PAM sequence: TTC
tacgatatctttatcatgtt

SEQ ID NO: 354077 - DNA, 20 bp, Artificial Sequence
  Description of Artificial Sequence: Synthetic oligonucleotide
  Target: LAMA2; (+) strand; PAM type: YTN; PAM sequence: CTA
cgatatctttatcatgttca

SEQ ID NO: 354078 - DNA, 20 bp, Artificial Sequence
  Description of Artificial Sequence: Synthetic oligonucleotide
  Target: LAMA2; (+) strand; PAM type: YTN; PAM sequence: CTT
tatcatgttcaagagagctt

SEQ ID NO: 354079 - DNA, 20 bp, Artificial Sequence
  Description of Artificial Sequence: Synthetic oligonucleotide
  Target: LAMA2; (+) strand; PAM type: YTN; PAM sequence: TTT
atcatgttcaagagagctta

SEQ ID NO: 354080 - DNA, 20 bp, Artificial Sequence
  Description of Artificial Sequence: Synthetic oligonucleotide
  Target: LAMA2; (+) strand; PAM type: YTN; PAM sequence: TTA
tcatgttcaagagagcttac

SEQ ID NO: 354081 - DNA, 20 bp, Artificial Sequence
  Description of Artificial Sequence: Synthetic oligonucleotide
  Target: LAMA2; (+) strand; PAM type: YTN; PAM sequence: TTC
aagagagcttacatgtctat

SEQ ID NO: 354082 - DNA, 20 bp, Artificial Sequence
  Description of Artificial Sequence: Synthetic oligonucleotide
  Target: LAMA2; (+) strand; PAM type: YTN; PAM sequence: CTT
acatgtctatttcatcaatg

SEQ ID NO: 354083 - DNA, 20 bp, Artificial Sequence
  Description of Artificial Sequence: Synthetic oligonucleotide
  Target: LAMA2; (+) strand; PAM type: YTN; PAM sequence: TTA
catgtctatttcatcaatga

SEQ ID NO: 354084 - DNA, 20 bp, Artificial Sequence
  Description of Artificial Sequence: Synthetic oligonucleotide
  Target: LAMA2; (+) strand; PAM type: YTN; PAM sequence: CTA
tttcatcaatgactacattt

SEQ ID NO: 354085 - DNA, 20 bp, Artificial Sequence
  Description of Artificial Sequence: Synthetic oligonucleotide
  Target: LAMA2; (+) strand; PAM type: YTN; PAM sequence: TTT
catcaatgactacatttaga

SEQ ID NO: 354086 - DNA, 20 bp, Artificial Sequence
  Description of Artificial Sequence: Synthetic oligonucleotide
  Target: LAMA2; (+) strand; PAM type: YTN; PAM sequence: TTC
atcaatgactacatttagac

SEQ ID NO: 354087 - DNA, 20 bp, Artificial Sequence
  Description of Artificial Sequence: Synthetic oligonucleotide
  Target: LAMA2; (+) strand; PAM type: YTN; PAM sequence: CTA
catttagactttctcttgag

SEQ ID NO: 354088 - DNA, 20 bp, Artificial Sequence
  Description of Artificial Sequence: Synthetic oligonucleotide
  Target: LAMA2; (+) strand; PAM type: YTN; PAM sequence: TTT
agactttctcttgaggtcct

SEQ ID NO: 354089 - DNA, 20 bp, Artificial Sequence
  Description of Artificial Sequence: Synthetic oligonucleotide
  Target: LAMA2; (+) strand; PAM type: YTN; PAM sequence: TTA
gactttctcttgaggtccta

SEQ ID NO: 354090 - DNA, 20 bp, Artificial Sequence
  Description of Artificial Sequence: Synthetic oligonucleotide
  Target: LAMA2; (+) strand; PAM type: YTN; PAM sequence: CTT
tctcttgaggtcctactata

SEQ ID NO: 354091 - DNA, 20 bp, Artificial Sequence
  Description of Artificial Sequence: Synthetic oligonucleotide
  Target: LAMA2; (+) strand; PAM type: YTN; PAM sequence: TTT
ctcttgaggtcctactatat

SEQ ID NO: 354092 - DNA, 20 bp, Artificial Sequence
  Description of Artificial Sequence: Synthetic oligonucleotide
  Target: LAMA2; (+) strand; PAM type: YTN; PAM sequence: TTC
tcttgaggtcctactatata

SEQ ID NO: 354093 - DNA, 20 bp, Artificial Sequence
  Description of Artificial Sequence: Synthetic oligonucleotide
  Target: LAMA2; (+) strand; PAM type: YTN; PAM sequence: CTC
ttgaggtcctactatataag

SEQ ID NO: 354094 - DNA, 20 bp, Artificial Sequence
  Description of Artificial Sequence: Synthetic oligonucleotide
  Target: LAMA2; (+) strand; PAM type: YTN; PAM sequence: CTT
gaggtcctactatataagat

SEQ ID NO: 354095 - DNA, 20 bp, Artificial Sequence
  Description of Artificial Sequence: Synthetic oligonucleotide
  Target: LAMA2; (+) strand; PAM type: YTN; PAM sequence: TTG
aggtcctactatataagatg

SEQ ID NO: 354096 - DNA, 20 bp, Artificial Sequence
  Description of Artificial Sequence: Synthetic oligonucleotide
  Target: LAMA2; (+) strand; PAM type: YTN; PAM sequence: CTA
ctatataagatgtgataaag

SEQ ID NO: 354097 - DNA, 20 bp, Artificial Sequence
  Description of Artificial Sequence: Synthetic oligonucleotide
  Target: LAMA2; (+) strand; PAM type: YTN; PAM sequence: CTA
tataagatgtgataaagact

SEQ ID NO: 354098 - DNA, 20 bp, Artificial Sequence
  Description of Artificial Sequence: Synthetic oligonucleotide
  Target: LAMA2; (+) strand; PAM type: YTN; PAM sequence: CTA
tcatccctacattcttcacc

SEQ ID NO: 354099 - DNA, 20 bp, Artificial Sequence
  Description of Artificial Sequence: Synthetic oligonucleotide
  Target: LAMA2; (+) strand; PAM type: YTN; PAM sequence: CTA
cattcttcaccacttgtcag

SEQ ID NO: 354100 - DNA, 20 bp, Artificial Sequence
  Description of Artificial Sequence: Synthetic oligonucleotide
  Target: LAMA2; (+) strand; PAM type: YTN; PAM sequence: TTC
ttcaccacttgtcagtgtct

SEQ ID NO: 354101 - DNA, 20 bp, Artificial Sequence
  Description of Artificial Sequence: Synthetic oligonucleotide
  Target: LAMA2; (+) strand; PAM type: YTN; PAM sequence: CTT
caccacttgtcagtgtctgt

SEQ ID NO: 354102 - DNA, 20 bp, Artificial Sequence
  Description of Artificial Sequence: Synthetic oligonucleotide
  Target: LAMA2; (+) strand; PAM type: YTN; PAM sequence: TTC
accacttgtcagtgtctgtc

SEQ ID NO: 354103 - DNA, 20 bp, Artificial Sequence
  Description of Artificial Sequence: Synthetic oligonucleotide
  Target: LAMA2; (+) strand; PAM type: YTN; PAM sequence: CTT
gtcagtgtctgtcaattaca

SEQ ID NO: 354104 - DNA, 20 bp, Artificial Sequence
  Description of Artificial Sequence: Synthetic oligonucleotide
  Target: LAMA2; (+) strand; PAM type: YTN; PAM sequence: TTG
tcagtgtctgtcaattacat

SEQ ID NO: 354105 - DNA, 20 bp, Artificial Sequence
  Description of Artificial Sequence: Synthetic oligonucleotide
  Target: LAMA2; (+) strand; PAM type: YTN; PAM sequence: CTG
tcaattacatatctttgaaa

SEQ ID NO: 354106 - DNA, 20 bp, Artificial Sequence
  Description of Artificial Sequence: Synthetic oligonucleotide
  Target: LAMA2; (+) strand; PAM type: YTN; PAM sequence: TTA
catatctttgaaatcttttc

SEQ ID NO: 354107 - DNA, 20 bp, Artificial Sequence
  Description of Artificial Sequence: Synthetic oligonucleotide
  Target: LAMA2; (+) strand; PAM type: YTN; PAM sequence: CTT
tgaaatcttttcaaagattt

SEQ ID NO: 354108 - DNA, 20 bp, Artificial Sequence
  Description of Artificial Sequence: Synthetic oligonucleotide
  Target: LAMA2; (+) strand; PAM type: YTN; PAM sequence: TTT
gaaatcttttcaaagatttt

SEQ ID NO: 354109 - DNA, 20 bp, Artificial Sequence
  Description of Artificial Sequence: Synthetic oligonucleotide
  Target: LAMA2; (+) strand; PAM type: YTN; PAM sequence: TTG
aaatcttttcaaagattttc

SEQ ID NO: 354110 - DNA, 20 bp, Artificial Sequence
  Description of Artificial Sequence: Synthetic oligonucleotide
  Target: LAMA2; (+) strand; PAM type: YTN; PAM sequence: CTT
ttcaaagattttcacagtta

SEQ ID NO: 354111 - DNA, 20 bp, Artificial Sequence
  Description of Artificial Sequence: Synthetic oligonucleotide
  Target: LAMA2; (+) strand; PAM type: YTN; PAM sequence: TTT
tcaaagattttcacagttac

SEQ ID NO: 354112 - DNA, 20 bp, Artificial Sequence
  Description of Artificial Sequence: Synthetic oligonucleotide
  Target: LAMA2; (+) strand; PAM type: YTN; PAM sequence: TTT
caaagattttcacagttaca

SEQ ID NO: 354113 - DNA, 20 bp, Artificial Sequence
  Description of Artificial Sequence: Synthetic oligonucleotide
  Target: LAMA2; (+) strand; PAM type: YTN; PAM sequence: TTC
aaagattttcacagttacat

SEQ ID NO: 354114 - DNA, 20 bp, Artificial Sequence
  Description of Artificial Sequence: Synthetic oligonucleotide
  Target: LAMA2; (+) strand; PAM type: YTN; PAM sequence: TTT
tcacagttacattcagctct

SEQ ID NO: 354115 - DNA, 20 bp, Artificial Sequence
  Description of Artificial Sequence: Synthetic oligonucleotide
  Target: LAMA2; (+) strand; PAM type: YTN; PAM sequence: TTT
cacagttacattcagctctg

SEQ ID NO: 354116 - DNA, 20 bp, Artificial Sequence
  Description of Artificial Sequence: Synthetic oligonucleotide
  Target: LAMA2; (+) strand; PAM type: YTN; PAM sequence: TTC
acagttacattcagctctgg

SEQ ID NO: 354117 - DNA, 20 bp, Artificial Sequence
  Description of Artificial Sequence: Synthetic oligonucleotide
  Target: LAMA2; (+) strand; PAM type: YTN; PAM sequence: TTA
cattcagctctggaccaata

SEQ ID NO: 354118 - DNA, 20 bp, Artificial Sequence
  Description of Artificial Sequence: Synthetic oligonucleotide
  Target: LAMA2; (+) strand; PAM type: YTN; PAM sequence: TTC
agctctggaccaataattaa

SEQ ID NO: 354119 - DNA, 20 bp, Artificial Sequence
  Description of Artificial Sequence: Synthetic oligonucleotide
  Target: LAMA2; (+) strand; PAM type: YTN; PAM sequence: CTC
tggaccaataattaatgctt

SEQ ID NO: 354120 - DNA, 20 bp, Artificial Sequence
  Description of Artificial Sequence: Synthetic oligonucleotide
  Target: LAMA2; (+) strand; PAM type: YTN; PAM sequence: CTG
gaccaataattaatgcttat

SEQ ID NO: 354121 - DNA, 20 bp, Artificial Sequence
  Description of Artificial Sequence: Synthetic oligonucleotide
  Target: LAMA2; (+) strand; PAM type: YTN; PAM sequence: TTA
atgcttataattcaaaaata

SEQ ID NO: 354122 - DNA, 20 bp, Artificial Sequence
  Description of Artificial Sequence: Synthetic oligonucleotide
  Target: LAMA2; (+) strand; PAM type: YTN; PAM sequence: CTT
ataattcaaaaatagaaata

SEQ ID NO: 354123 - DNA, 20 bp, Artificial Sequence
  Description of Artificial Sequence: Synthetic oligonucleotide
  Target: LAMA2; (+) strand; PAM type: YTN; PAM sequence: TTA
taattcaaaaatagaaatat

SEQ ID NO: 354124 - DNA, 20 bp, Artificial Sequence
  Description of Artificial Sequence: Synthetic oligonucleotide
  Target: LAMA2; (+) strand; PAM type: YTN; PAM sequence: TTC
aaaaatagaaatataataat

SEQ ID NO: 354125 - DNA, 20 bp, Artificial Sequence
  Description of Artificial Sequence: Synthetic oligonucleotide
  Target: LAMA2; (+) strand; PAM type: YTN; PAM sequence: TTG
taatactgtaattagataca

SEQ ID NO: 354126 - DNA, 20 bp, Artificial Sequence
  Description of Artificial Sequence: Synthetic oligonucleotide
  Target: LAMA2; (+) strand; PAM type: YTN; PAM sequence: CTG
taattagatacatattattt

SEQ ID NO: 354127 - DNA, 20 bp, Artificial Sequence
  Description of Artificial Sequence: Synthetic oligonucleotide
  Target: LAMA2; (+) strand; PAM type: YTN; PAM sequence: TTA
gatacatattatttgataca

SEQ ID NO: 354128 - DNA, 20 bp, Artificial Sequence
  Description of Artificial Sequence: Synthetic oligonucleotide
  Target: LAMA2; (+) strand; PAM type: YTN; PAM sequence: TTA
tttgatacaggctcgaattg

SEQ ID NO: 354129 - DNA, 20 bp, Artificial Sequence
  Description of Artificial Sequence: Synthetic oligonucleotide
  Target: LAMA2; (+) strand; PAM type: YTN; PAM sequence: TTT
gatacaggctcgaattgcaa

SEQ ID NO: 354130 - DNA, 20 bp, Artificial Sequence
  Description of Artificial Sequence: Synthetic oligonucleotide
  Target: LAMA2; (+) strand; PAM type: YTN; PAM sequence: TTG
atacaggctcgaattgcaaa

SEQ ID NO: 354131 - DNA, 20 bp, Artificial Sequence
  Description of Artificial Sequence: Synthetic oligonucleotide
  Target: LAMA2; (+) strand; PAM type: YTN; PAM sequence: CTC
gaattgcaaaattggacaca

SEQ ID NO: 354132 - DNA, 20 bp, Artificial Sequence
  Description of Artificial Sequence: Synthetic oligonucleotide
  Target: LAMA2; (+) strand; PAM type: YTN; PAM sequence: TTG
caaaattggacacatatttg

SEQ ID NO: 354133 - DNA, 20 bp, Artificial Sequence
  Description of Artificial Sequence: Synthetic oligonucleotide
  Target: LAMA2; (+) strand; PAM type: YTN; PAM sequence: TTG
gacacatatttgtaggtcat

SEQ ID NO: 354134 - DNA, 20 bp, Artificial Sequence
  Description of Artificial Sequence: Synthetic oligonucleotide
  Target: LAMA2; (+) strand; PAM type: YTN; PAM sequence: TTT
gtaggtcatttttatcttca

SEQ ID NO: 354135 - DNA, 20 bp, Artificial Sequence
  Description of Artificial Sequence: Synthetic oligonucleotide
  Target: LAMA2; (+) strand; PAM type: YTN; PAM sequence: TTG
taggtcatttttatcttcat

SEQ ID NO: 354136 - DNA, 20 bp, Artificial Sequence
  Description of Artificial Sequence: Synthetic oligonucleotide
  Target: LAMA2; (+) strand; PAM type: YTN; PAM sequence: TTT
ttatcttcatgcttgctctg

SEQ ID NO: 354137 - DNA, 20 bp, Artificial Sequence
  Description of Artificial Sequence: Synthetic oligonucleotide
  Target: LAMA2; (+) strand; PAM type: YTN; PAM sequence: TTT
tatcttcatgcttgctctga

SEQ ID NO: 354138 - DNA, 20 bp, Artificial Sequence
  Description of Artificial Sequence: Synthetic oligonucleotide
  Target: LAMA2; (+) strand; PAM type: YTN; PAM sequence: TTT
atcttcatgcttgctctgat

SEQ ID NO: 354139 - DNA, 20 bp, Artificial Sequence
  Description of Artificial Sequence: Synthetic oligonucleotide
  Target: LAMA2; (+) strand; PAM type: YTN; PAM sequence: TTA
tcttcatgcttgctctgata

SEQ ID NO: 354140 - DNA, 20 bp, Artificial Sequence
  Description of Artificial Sequence: Synthetic oligonucleotide
  Target: LAMA2; (+) strand; PAM type: YTN; PAM sequence: CTT
catgcttgctctgataactt

SEQ ID NO: 354141 - DNA, 20 bp, Artificial Sequence
  Description of Artificial Sequence: Synthetic oligonucleotide
  Target: LAMA2; (+) strand; PAM type: YTN; PAM sequence: TTC
atgcttgctctgataactta

SEQ ID NO: 354142 - DNA, 20 bp, Artificial Sequence
  Description of Artificial Sequence: Synthetic oligonucleotide
  Target: LAMA2; (+) strand; PAM type: YTN; PAM sequence: CTT
gctctgataacttatttagg

SEQ ID NO: 354143 - DNA, 20 bp, Artificial Sequence
  Description of Artificial Sequence: Synthetic oligonucleotide
  Target: LAMA2; (+) strand; PAM type: YTN; PAM sequence: TTG
ctctgataacttatttagga

SEQ ID NO: 354144 - DNA, 20 bp, Artificial Sequence
  Description of Artificial Sequence: Synthetic oligonucleotide
  Target: LAMA2; (+) strand; PAM type: YTN; PAM sequence: CTC
tgataacttatttaggaaag

SEQ ID NO: 354145 - DNA, 20 bp, Artificial Sequence
  Description of Artificial Sequence: Synthetic oligonucleotide
  Target: LAMA2; (+) strand; PAM type: YTN; PAM sequence: CTG
ataacttatttaggaaagag

SEQ ID NO: 354146 - DNA, 20 bp, Artificial Sequence
  Description of Artificial Sequence: Synthetic oligonucleotide
  Target: LAMA2; (+) strand; PAM type: YTN; PAM sequence: CTT
atttaggaaagagtgtaaga

SEQ ID NO: 354147 - DNA, 20 bp, Artificial Sequence
  Description of Artificial Sequence: Synthetic oligonucleotide
  Target: LAMA2; (+) strand; PAM type: YTN; PAM sequence: TTA
tttaggaaagagtgtaagat

SEQ ID NO: 354148 - DNA, 20 bp, Artificial Sequence
  Description of Artificial Sequence: Synthetic oligonucleotide
  Target: LAMA2; (+) strand; PAM type: YTN; PAM sequence: TTT
aggaaagagtgtaagatgtg

SEQ ID NO: 354149 - DNA, 20 bp, Artificial Sequence
  Description of Artificial Sequence: Synthetic oligonucleotide
  Target: LAMA2; (+) strand; PAM type: YTN; PAM sequence: TTA
ggaaagagtgtaagatgtgg

SEQ ID NO: 354150 - DNA, 20 bp, Artificial Sequence
  Description of Artificial Sequence: Synthetic oligonucleotide
  Target: LAMA2; (+) strand; PAM type: YTN; PAM sequence: CTC
atggtttgcacttcttcatc

SEQ ID NO: 354151 - DNA, 20 bp, Artificial Sequence
  Description of Artificial Sequence: Synthetic oligonucleotide
  Target: LAMA2; (+) strand; PAM type: YTN; PAM sequence: TTT
gcacttcttcatcagattac

SEQ ID NO: 354152 - DNA, 20 bp, Artificial Sequence
  Description of Artificial Sequence: Synthetic oligonucleotide
  Target: LAMA2; (+) strand; PAM type: YTN; PAM sequence: TTG
cacttcttcatcagattaca

SEQ ID NO: 354153 - DNA, 20 bp, Artificial Sequence
  Description of Artificial Sequence: Synthetic oligonucleotide
  Target: LAMA2; (+) strand; PAM type: YTN; PAM sequence: CTT
cttcatcagattacataacc

SEQ ID NO: 354154 - DNA, 20 bp, Artificial Sequence
  Description of Artificial Sequence: Synthetic oligonucleotide
  Target: LAMA2; (+) strand; PAM type: YTN; PAM sequence: TTC
ttcatcagattacataacca

SEQ ID NO: 354155 - DNA, 20 bp, Artificial Sequence
  Description of Artificial Sequence: Synthetic oligonucleotide
  Target: LAMA2; (+) strand; PAM type: YTN; PAM sequence: CTT
catcagattacataaccaga

SEQ ID NO: 354156 - DNA, 20 bp, Artificial Sequence
  Description of Artificial Sequence: Synthetic oligonucleotide
  Target: LAMA2; (+) strand; PAM type: YTN; PAM sequence: TTC
atcagattacataaccagat

SEQ ID NO: 354157 - DNA, 20 bp, Artificial Sequence
  Description of Artificial Sequence: Synthetic oligonucleotide
  Target: LAMA2; (+) strand; PAM type: YTN; PAM sequence: TTA
cataaccagatagtagaaaa

SEQ ID NO: 354158 - DNA, 20 bp, Artificial Sequence
  Description of Artificial Sequence: Synthetic oligonucleotide
  Target: LAMA2; (+) strand; PAM type: YTN; PAM sequence: TTT
tagtgtattactggcattca

SEQ ID NO: 354159 - DNA, 20 bp, Artificial Sequence
  Description of Artificial Sequence: Synthetic oligonucleotide
  Target: LAMA2; (+) strand; PAM type: YTN; PAM sequence: TTT
agtgtattactggcattcat

SEQ ID NO: 354160 - DNA, 20 bp, Artificial Sequence
  Description of Artificial Sequence: Synthetic oligonucleotide
  Target: LAMA2; (+) strand; PAM type: YTN; PAM sequence: TTA
gtgtattactggcattcatt

SEQ ID NO: 354161 - DNA, 20 bp, Artificial Sequence
  Description of Artificial Sequence: Synthetic oligonucleotide
  Target: LAMA2; (+) strand; PAM type: YTN; PAM sequence: TTA
ctggcattcatttgattacg

SEQ ID NO: 354162 - DNA, 20 bp, Artificial Sequence
  Description of Artificial Sequence: Synthetic oligonucleotide
  Target: LAMA2; (+) strand; PAM type: YTN; PAM sequence: CTG
gcattcatttgattacgagg

SEQ ID NO: 354163 - DNA, 20 bp, Artificial Sequence
  Description of Artificial Sequence: Synthetic oligonucleotide
  Target: LAMA2; (+) strand; PAM type: YTN; PAM sequence: TTC
atttgattacgagggaaata

SEQ ID NO: 354164 - DNA, 20 bp, Artificial Sequence
  Description of Artificial Sequence: Synthetic oligonucleotide
  Target: LAMA2; (+) strand; PAM type: YTN; PAM sequence: TTT
gattacgagggaaatacgat

SEQ ID NO: 354165 - DNA, 20 bp, Artificial Sequence
  Description of Artificial Sequence: Synthetic oligonucleotide
  Target: LAMA2; (+) strand; PAM type: YTN; PAM sequence: TTG
attacgagggaaatacgatg

SEQ ID NO: 354166 - DNA, 20 bp, Artificial Sequence
  Description of Artificial Sequence: Synthetic oligonucleotide
  Target: LAMA2; (+) strand; PAM type: YTN; PAM sequence: TTA
cgagggaaatacgatgtatt

SEQ ID NO: 354167 - DNA, 20 bp, Artificial Sequence
  Description of Artificial Sequence: Synthetic oligonucleotide
  Target: LAMA2; (+) strand; PAM type: YTN; PAM sequence: TTT
cttctctgatttttctttta

SEQ ID NO: 354168 - DNA, 20 bp, Artificial Sequence
  Description of Artificial Sequence: Synthetic oligonucleotide
  Target: LAMA2; (+) strand; PAM type: YTN; PAM sequence: TTC
ttctctgatttttcttttag

SEQ ID NO: 354169 - DNA, 20 bp, Artificial Sequence
  Description of Artificial Sequence: Synthetic oligonucleotide
  Target: LAMA2; (+) strand; PAM type: YTN; PAM sequence: CTT
ctctgatttttcttttagtt

SEQ ID NO: 354170 - DNA, 20 bp, Artificial Sequence
  Description of Artificial Sequence: Synthetic oligonucleotide
  Target: LAMA2; (+) strand; PAM type: YTN; PAM sequence: TTC
tctgatttttcttttagttt

SEQ ID NO: 354171 - DNA, 20 bp, Artificial Sequence
  Description of Artificial Sequence: Synthetic oligonucleotide
  Target: LAMA2; (+) strand; PAM type: YTN; PAM sequence: CTC
tgatttttcttttagttttc

SEQ ID NO: 354172 - DNA, 20 bp, Artificial Sequence
  Description of Artificial Sequence: Synthetic oligonucleotide
  Target: LAMA2; (+) strand; PAM type: YTN; PAM sequence: CTG
atttttcttttagttttctt

SEQ ID NO: 354173 - DNA, 20 bp, Artificial Sequence
  Description of Artificial Sequence: Synthetic oligonucleotide
  Target: LAMA2; (+) strand; PAM type: YTN; PAM sequence: TTT
ttcttttagttttcttcatt

SEQ ID NO: 354174 - DNA, 20 bp, Artificial Sequence
  Description of Artificial Sequence: Synthetic oligonucleotide
  Target: LAMA2; (+) strand; PAM type: YTN; PAM sequence: TTT
tcttttagttttcttcattt

SEQ ID NO: 354175 - DNA, 20 bp, Artificial Sequence
  Description of Artificial Sequence: Synthetic oligonucleotide
  Target: LAMA2; (+) strand; PAM type: YTN; PAM sequence: TTT
cttttagttttcttcatttt

SEQ ID NO: 354176 - DNA, 20 bp, Artificial Sequence
  Description of Artificial Sequence: Synthetic oligonucleotide
  Target: LAMA2; (+) strand; PAM type: YTN; PAM sequence: TTC
ttttagttttcttcattttc

SEQ ID NO: 354177 - DNA, 20 bp, Artificial Sequence
  Description of Artificial Sequence: Synthetic oligonucleotide
  Target: LAMA2; (+) strand; PAM type: YTN; PAM sequence: CTT
ttagttttcttcattttctt

SEQ ID NO: 354178 - DNA, 20 bp, Artificial Sequence
  Description of Artificial Sequence: Synthetic oligonucleotide
  Target: LAMA2; (+) strand; PAM type: YTN; PAM sequence: TTT
tagttttcttcattttcttt

SEQ ID NO: 354179 - DNA, 20 bp, Artificial Sequence
  Description of Artificial Sequence: Synthetic oligonucleotide
  Target: LAMA2; (+) strand; PAM type: YTN; PAM sequence: TTT
agttttcttcattttctttt

SEQ ID NO: 354180 - DNA, 20 bp, Artificial Sequence
  Description of Artificial Sequence: Synthetic oligonucleotide
  Target: LAMA2; (+) strand; PAM type: YTN; PAM sequence: TTA
gttttcttcattttctttta

SEQ ID NO: 354181 - DNA, 20 bp, Artificial Sequence
  Description of Artificial Sequence: Synthetic oligonucleotide
  Target: LAMA2; (+) strand; PAM type: YTN; PAM sequence: TTT
tcttcattttcttttagtag

SEQ ID NO: 354182 - DNA, 20 bp, Artificial Sequence
  Description of Artificial Sequence: Synthetic oligonucleotide
  Target: LAMA2; (+) strand; PAM type: YTN; PAM sequence: TTT
cttcattttcttttagtaga

SEQ ID NO: 354183 - DNA, 20 bp, Artificial Sequence
  Description of Artificial Sequence: Synthetic oligonucleotide
  Target: LAMA2; (+) strand; PAM type: YTN; PAM sequence: TTC
ttcattttcttttagtagaa

SEQ ID NO: 354184 - DNA, 20 bp, Artificial Sequence
  Description of Artificial Sequence: Synthetic oligonucleotide
  Target: LAMA2; (+) strand; PAM type: YTN; PAM sequence: CTT
cattttcttttagtagaagg

SEQ ID NO: 354185 - DNA, 20 bp, Artificial Sequence
  Description of Artificial Sequence: Synthetic oligonucleotide
  Target: LAMA2; (+) strand; PAM type: YTN; PAM sequence: TTC
attttcttttagtagaagga

SEQ ID NO: 354186 - DNA, 20 bp, Artificial Sequence
  Description of Artificial Sequence: Synthetic oligonucleotide
  Target: LAMA2; (+) strand; PAM type: YTN; PAM sequence: TTT
tcttttagtagaaggaagtt

SEQ ID NO: 354187 - DNA, 20 bp, Artificial Sequence
  Description of Artificial Sequence: Synthetic oligonucleotide
  Target: LAMA2; (+) strand; PAM type: YTN; PAM sequence: TTT
cttttagtagaaggaagttt

SEQ ID NO: 354188 - DNA, 20 bp, Artificial Sequence
  Description of Artificial Sequence: Synthetic oligonucleotide
  Target: LAMA2; (+) strand; PAM type: YTN; PAM sequence: TTC
ttttagtagaaggaagtttt

SEQ ID NO: 354189 - DNA, 20 bp, Artificial Sequence
  Description of Artificial Sequence: Synthetic oligonucleotide
  Target: LAMA2; (+) strand; PAM type: YTN; PAM sequence: CTT
ttagtagaaggaagttttct

SEQ ID NO: 354190 - DNA, 20 bp, Artificial Sequence
  Description of Artificial Sequence: Synthetic oligonucleotide
  Target: LAMA2; (+) strand; PAM type: YTN; PAM sequence: TTT
tagtagaaggaagttttctc

SEQ ID NO: 354191 - DNA, 20 bp, Artificial Sequence
  Description of Artificial Sequence: Synthetic oligonucleotide
  Target: LAMA2; (+) strand; PAM type: YTN; PAM sequence: TTT
agtagaaggaagttttctcc

SEQ ID NO: 354192 - DNA, 20 bp, Artificial Sequence
  Description of Artificial Sequence: Synthetic oligonucleotide
  Target: LAMA2; (+) strand; PAM type: YTN; PAM sequence: TTA
gtagaaggaagttttctccc

SEQ ID NO: 354193 - DNA, 20 bp, Artificial Sequence
  Description of Artificial Sequence: Synthetic oligonucleotide
  Target: LAMA2; (+) strand; PAM type: YTN; PAM sequence: TTT
tctcccttgtagatttgtaa

SEQ ID NO: 354194 - DNA, 20 bp, Artificial Sequence
  Description of Artificial Sequence: Synthetic oligonucleotide
  Target: LAMA2; (+) strand; PAM type: YTN; PAM sequence: TTT
ctcccttgtagatttgtaag

SEQ ID NO: 354195 - DNA, 20 bp, Artificial Sequence
  Description of Artificial Sequence: Synthetic oligonucleotide
  Target: LAMA2; (+) strand; PAM type: YTN; PAM sequence: TTC
tcccttgtagatttgtaaga

SEQ ID NO: 354196 - DNA, 20 bp, Artificial Sequence
  Description of Artificial Sequence: Synthetic oligonucleotide
  Target: LAMA2; (+) strand; PAM type: YTN; PAM sequence: CTC
ccttgtagatttgtaagagc

SEQ ID NO: 354197 - DNA, 20 bp, Artificial Sequence
  Description of Artificial Sequence: Synthetic oligonucleotide
  Target: LAMA2; (+) strand; PAM type: YTN; PAM sequence: CTT
gtagatttgtaagagcactt

SEQ ID NO: 354198 - DNA, 20 bp, Artificial Sequence
  Description of Artificial Sequence: Synthetic oligonucleotide
  Target: LAMA2; (+) strand; PAM type: YTN; PAM sequence: TTG
tagatttgtaagagcacttt

SEQ ID NO: 354199 - DNA, 20 bp, Artificial Sequence
  Description of Artificial Sequence: Synthetic oligonucleotide
  Target: LAMA2; (+) strand; PAM type: YTN; PAM sequence: TTT
gtaagagcactttaaatatt

SEQ ID NO: 354200 - DNA, 20 bp, Artificial Sequence
  Description of Artificial Sequence: Synthetic oligonucleotide
  Target: LAMA2; (+) strand; PAM type: YTN; PAM sequence: TTG
taagagcactttaaatatta

SEQ ID NO: 354201 - DNA, 20 bp, Artificial Sequence
  Description of Artificial Sequence: Synthetic oligonucleotide
  Target: LAMA2; (+) strand; PAM type: YTN; PAM sequence: CTT
taaatattaaaaacagtgat

SEQ ID NO: 354202 - DNA, 20 bp, Artificial Sequence
  Description of Artificial Sequence: Synthetic oligonucleotide
  Target: LAMA2; (+) strand; PAM type: YTN; PAM sequence: TTT
aaatattaaaaacagtgata

SEQ ID NO: 354203 - DNA, 20 bp, Artificial Sequence
  Description of Artificial Sequence: Synthetic oligonucleotide
  Target: LAMA2; (+) strand; PAM type: YTN; PAM sequence: TTA
aatattaaaaacagtgatag

SEQ ID NO: 354204 - DNA, 20 bp, Artificial Sequence
  Description of Artificial Sequence: Synthetic oligonucleotide
  Target: LAMA2; (+) strand; PAM type: YTN; PAM sequence: TTA
aaaacagtgatagtatatca

SEQ ID NO: 354205 - DNA, 20 bp, Artificial Sequence
  Description of Artificial Sequence: Synthetic oligonucleotide
  Target: LAMA2; (+) strand; PAM type: YTN; PAM sequence: TTT
tttaataatcagttttcaga

SEQ ID NO: 354206 - DNA, 20 bp, Artificial Sequence
  Description of Artificial Sequence: Synthetic oligonucleotide
  Target: LAMA2; (+) strand; PAM type: YTN; PAM sequence: TTT
ttaataatcagttttcagat

SEQ ID NO: 354207 - DNA, 20 bp, Artificial Sequence
  Description of Artificial Sequence: Synthetic oligonucleotide
  Target: LAMA2; (+) strand; PAM type: YTN; PAM sequence: TTT
taataatcagttttcagatt

SEQ ID NO: 354208 - DNA, 20 bp, Artificial Sequence
  Description of Artificial Sequence: Synthetic oligonucleotide
  Target: LAMA2; (+) strand; PAM type: YTN; PAM sequence: TTT
aataatcagttttcagattt

SEQ ID NO: 354209 - DNA, 20 bp, Artificial Sequence
  Description of Artificial Sequence: Synthetic oligonucleotide
  Target: LAMA2; (+) strand; PAM type: YTN; PAM sequence: TTA
ataatcagttttcagatttg

SEQ ID NO: 354210 - DNA, 20 bp, Artificial Sequence
  Description of Artificial Sequence: Synthetic oligonucleotide
  Target: LAMA2; (+) strand; PAM type: YTN; PAM sequence: TTT
tcagatttgctttgtgtctc

SEQ ID NO: 354211 - DNA, 20 bp, Artificial Sequence
  Description of Artificial Sequence: Synthetic oligonucleotide
  Target: LAMA2; (+) strand; PAM type: YTN; PAM sequence: TTT
cagatttgctttgtgtctca

SEQ ID NO: 354212 - DNA, 20 bp, Artificial Sequence
  Description of Artificial Sequence: Synthetic oligonucleotide
  Target: LAMA2; (+) strand; PAM type: YTN; PAM sequence: TTC
agatttgctttgtgtctcac

SEQ ID NO: 354213 - DNA, 20 bp, Artificial Sequence
  Description of Artificial Sequence: Synthetic oligonucleotide
  Target: LAMA2; (+) strand; PAM type: YTN; PAM sequence: TTT
gctttgtgtctcactactgt

SEQ ID NO: 354214 - DNA, 20 bp, Artificial Sequence
  Description of Artificial Sequence: Synthetic oligonucleotide
  Target: LAMA2; (+) strand; PAM type: YTN; PAM sequence: TTG
ctttgtgtctcactactgtt

SEQ ID NO: 354215 - DNA, 20 bp, Artificial Sequence
  Description of Artificial Sequence: Synthetic oligonucleotide
  Target: LAMA2; (+) strand; PAM type: YTN; PAM sequence: CTT
tgtgtctcactactgttgat

SEQ ID NO: 354216 - DNA, 20 bp, Artificial Sequence
  Description of Artificial Sequence: Synthetic oligonucleotide
  Target: LAMA2; (+) strand; PAM type: YTN; PAM sequence: TTT
gtgtctcactactgttgata

SEQ ID NO: 354217 - DNA, 20 bp, Artificial Sequence
  Description of Artificial Sequence: Synthetic oligonucleotide
  Target: LAMA2; (+) strand; PAM type: YTN; PAM sequence: TTG
tgtctcactactgttgataa

SEQ ID NO: 354218 - DNA, 20 bp, Artificial Sequence
  Description of Artificial Sequence: Synthetic oligonucleotide
  Target: LAMA2; (+) strand; PAM type: YTN; PAM sequence: CTC
actactgttgataatttcta

SEQ ID NO: 354219 - DNA, 20 bp, Artificial Sequence
  Description of Artificial Sequence: Synthetic oligonucleotide
  Target: LAMA2; (+) strand; PAM type: YTN; PAM sequence: CTA
ctgttgataatttctagtgc

SEQ ID NO: 354220 - DNA, 20 bp, Artificial Sequence
  Description of Artificial Sequence: Synthetic oligonucleotide
  Target: LAMA2; (+) strand; PAM type: YTN; PAM sequence: CTG
ttgataatttctagtgcaca

SEQ ID NO: 354221 - DNA, 20 bp, Artificial Sequence
  Description of Artificial Sequence: Synthetic oligonucleotide
  Target: LAMA2; (+) strand; PAM type: YTN; PAM sequence: TTG
ataatttctagtgcacaaac

SEQ ID NO: 354222 - DNA, 20 bp, Artificial Sequence
  Description of Artificial Sequence: Synthetic oligonucleotide
  Target: LAMA2; (+) strand; PAM type: YTN; PAM sequence: TTT
ctagtgcacaaacttcaaaa

SEQ ID NO: 354223 - DNA, 20 bp, Artificial Sequence
  Description of Artificial Sequence: Synthetic oligonucleotide
  Target: LAMA2; (+) strand; PAM type: YTN; PAM sequence: TTC
tagtgcacaaacttcaaaaa

SEQ ID NO: 354224 - DNA, 20 bp, Artificial Sequence
  Description of Artificial Sequence: Synthetic oligonucleotide
  Target: LAMA2; (+) strand; PAM type: YTN; PAM sequence: CTA
gtgcacaaacttcaaaaatt

SEQ ID NO: 354225 - DNA, 20 bp, Artificial Sequence
  Description of Artificial Sequence: Synthetic oligonucleotide
  Target: LAMA2; (+) strand; PAM type: YTN; PAM sequence: CTT
caaaaattttatgtaatcag

SEQ ID NO: 354226 - DNA, 20 bp, Artificial Sequence
  Description of Artificial Sequence: Synthetic oligonucleotide
  Target: LAMA2; (+) strand; PAM type: YTN; PAM sequence: TTC
aaaaattttatgtaatcagc

SEQ ID NO: 354227 - DNA, 20 bp, Artificial Sequence
  Description of Artificial Sequence: Synthetic oligonucleotide
  Target: LAMA2; (+) strand; PAM type: YTN; PAM sequence: TTT
tatgtaatcagctgtcaaag

SEQ ID NO: 354228 - DNA, 20 bp, Artificial Sequence
  Description of Artificial Sequence: Synthetic oligonucleotide
  Target: LAMA2; (+) strand; PAM type: YTN; PAM sequence: TTT
atgtaatcagctgtcaaagt

SEQ ID NO: 354229 - DNA, 20 bp, Artificial Sequence
  Description of Artificial Sequence: Synthetic oligonucleotide
  Target: LAMA2; (+) strand; PAM type: YTN; PAM sequence: TTA
tgtaatcagctgtcaaagtt

SEQ ID NO: 354230 - DNA, 20 bp, Artificial Sequence
  Description of Artificial Sequence: Synthetic oligonucleotide
  Target: LAMA2; (+) strand; PAM type: YTN; PAM sequence: CTG
tcaaagttcaggtaaaattc

SEQ ID NO: 354231 - DNA, 20 bp, Artificial Sequence
  Description of Artificial Sequence: Synthetic oligonucleotide
  Target: LAMA2; (+) strand; PAM type: YTN; PAM sequence: TTC
aggtaaaattctttacttat

SEQ ID NO: 354232 - DNA, 20 bp, Artificial Sequence
  Description of Artificial Sequence: Synthetic oligonucleotide
  Target: LAMA2; (+) strand; PAM type: YTN; PAM sequence: TTC
tttacttataataatgatac

SEQ ID NO: 354233 - DNA, 20 bp, Artificial Sequence
  Description of Artificial Sequence: Synthetic oligonucleotide
  Target: LAMA2; (+) strand; PAM type: YTN; PAM sequence: CTT
tacttataataatgatacca

SEQ ID NO: 354234 - DNA, 20 bp, Artificial Sequence
  Description of Artificial Sequence: Synthetic oligonucleotide
  Target: LAMA2; (+) strand; PAM type: YTN; PAM sequence: TTT
acttataataatgataccaa

SEQ ID NO: 354235 - DNA, 20 bp, Artificial Sequence
  Description of Artificial Sequence: Synthetic oligonucleotide
  Target: LAMA2; (+) strand; PAM type: YTN; PAM sequence: TTA
cttataataatgataccaac

SEQ ID NO: 354236 - DNA, 20 bp, Artificial Sequence
  Description of Artificial Sequence: Synthetic oligonucleotide
  Target: LAMA2; (+) strand; PAM type: YTN; PAM sequence: CTT
ataataatgataccaaccca

SEQ ID NO: 354237 - DNA, 20 bp, Artificial Sequence
  Description of Artificial Sequence: Synthetic oligonucleotide
  Target: LAMA2; (+) strand; PAM type: YTN; PAM sequence: TTA
taataatgataccaacccat

SEQ ID NO: 354238 - DNA, 20 bp, Artificial Sequence
  Description of Artificial Sequence: Synthetic oligonucleotide
  Target: LAMA2; (+) strand; PAM type: YTN; PAM sequence: TTA
ttatatattttgattttttt

SEQ ID NO: 354239 - DNA, 20 bp, Artificial Sequence
  Description of Artificial Sequence: Synthetic oligonucleotide
  Target: LAMA2; (+) strand; PAM type: YTN; PAM sequence: TTA
tatattttgatttttttgtg

SEQ ID NO: 354240 - DNA, 20 bp, Artificial Sequence
  Description of Artificial Sequence: Synthetic oligonucleotide
  Target: LAMA2; (+) strand; PAM type: YTN; PAM sequence: TTT
tgatttttttgtgtatttct

SEQ ID NO: 354241 - DNA, 20 bp, Artificial Sequence
  Description of Artificial Sequence: Synthetic oligonucleotide
  Target: LAMA2; (+) strand; PAM type: YTN; PAM sequence: TTT
gatttttttgtgtatttctt

SEQ ID NO: 354242 - DNA, 20 bp, Artificial Sequence
  Description of Artificial Sequence: Synthetic oligonucleotide
  Target: LAMA2; (+) strand; PAM type: YTN; PAM sequence: TTG
atttttttgtgtatttctta

SEQ ID NO: 354243 - DNA, 20 bp, Artificial Sequence
  Description of Artificial Sequence: Synthetic oligonucleotide
  Target: LAMA2; (+) strand; PAM type: YTN; PAM sequence: TTT
ttttgtgtatttcttacatg

SEQ ID NO: 354244 - DNA, 20 bp, Artificial Sequence
  Description of Artificial Sequence: Synthetic oligonucleotide
  Target: LAMA2; (+) strand; PAM type: YTN; PAM sequence: TTT
tttgtgtatttcttacatgc

SEQ ID NO: 354245 - DNA, 20 bp, Artificial Sequence
  Description of Artificial Sequence: Synthetic oligonucleotide
  Target: LAMA2; (+) strand; PAM type: YTN; PAM sequence: TTT
ttgtgtatttcttacatgct

SEQ ID NO: 354246 - DNA, 20 bp, Artificial Sequence
  Description of Artificial Sequence: Synthetic oligonucleotide
  Target: LAMA2; (+) strand; PAM type: YTN; PAM sequence: TTT
tgtgtatttcttacatgctt

SEQ ID NO: 354247 - DNA, 20 bp, Artificial Sequence
  Description of Artificial Sequence: Synthetic oligonucleotide
  Target: LAMA2; (+) strand; PAM type: YTN; PAM sequence: TTT
gtgtatttcttacatgcttt

SEQ ID NO: 354248 - DNA, 20 bp, Artificial Sequence
  Description of Artificial Sequence: Synthetic oligonucleotide
  Target: LAMA2; (+) strand; PAM type: YTN; PAM sequence: TTG
tgtatttcttacatgcttta

SEQ ID NO: 354249 - DNA, 20 bp, Artificial Sequence
  Description of Artificial Sequence: Synthetic oligonucleotide
  Target: LAMA2; (+) strand; PAM type: YTN; PAM sequence: TTT
cttacatgctttataatcct

SEQ ID NO: 354250 - DNA, 20 bp, Artificial Sequence
  Description of Artificial Sequence: Synthetic oligonucleotide
  Target: LAMA2; (+) strand; PAM type: YTN; PAM sequence: TTC
ttacatgctttataatccta

SEQ ID NO: 354251 - DNA, 20 bp, Artificial Sequence
  Description of Artificial Sequence: Synthetic oligonucleotide
  Target: LAMA2; (+) strand; PAM type: YTN; PAM sequence: CTT
acatgctttataatcctaga

SEQ ID NO: 354252 - DNA, 20 bp, Artificial Sequence
  Description of Artificial Sequence: Synthetic oligonucleotide
  Target: LAMA2; (+) strand; PAM type: YTN; PAM sequence: TTA
catgctttataatcctagaa

SEQ ID NO: 354253 - DNA, 20 bp, Artificial Sequence
  Description of Artificial Sequence: Synthetic oligonucleotide
  Target: LAMA2; (+) strand; PAM type: YTN; PAM sequence: CTT
tataatcctagaactctcat

SEQ ID NO: 354254 - DNA, 20 bp, Artificial Sequence
  Description of Artificial Sequence: Synthetic oligonucleotide
  Target: LAMA2; (+) strand; PAM type: YTN; PAM sequence: TTT
ataatcctagaactctcatc

SEQ ID NO: 354255 - DNA, 20 bp, Artificial Sequence
  Description of Artificial Sequence: Synthetic oligonucleotide
  Target: LAMA2; (+) strand; PAM type: YTN; PAM sequence: TTA
taatcctagaactctcatct

SEQ ID NO: 354256 - DNA, 20 bp, Artificial Sequence
  Description of Artificial Sequence: Synthetic oligonucleotide
  Target: LAMA2; (+) strand; PAM type: YTN; PAM sequence: CTA
gaactctcatctatcccaag

SEQ ID NO: 354257 - DNA, 20 bp, Artificial Sequence
  Description of Artificial Sequence: Synthetic oligonucleotide
  Target: LAMA2; (+) strand; PAM type: YTN; PAM sequence: CTC
tcatctatcccaagattaga

SEQ ID NO: 354258 - DNA, 20 bp, Artificial Sequence
  Description of Artificial Sequence: Synthetic oligonucleotide
  Target: LAMA2; (+) strand; PAM type: YTN; PAM sequence: CTC
atctatcccaagattagaaa

SEQ ID NO: 354259 - DNA, 20 bp, Artificial Sequence
  Description of Artificial Sequence: Synthetic oligonucleotide
  Target: LAMA2; (+) strand; PAM type: YTN; PAM sequence: CTA
tcccaagattagaaaaatgt

SEQ ID NO: 354260 - DNA, 20 bp, Artificial Sequence
  Description of Artificial Sequence: Synthetic oligonucleotide
  Target: LAMA2; (+) strand; PAM type: YTN; PAM sequence: TTA
gaaaaatgtatttgttttct

SEQ ID NO: 354261 - DNA, 20 bp, Artificial Sequence
  Description of Artificial Sequence: Synthetic oligonucleotide
  Target: LAMA2; (+) strand; PAM type: YTN; PAM sequence: TTT
gttttcttcatttgtatgat

SEQ ID NO: 354262 - DNA, 20 bp, Artificial Sequence
  Description of Artificial Sequence: Synthetic oligonucleotide
  Target: LAMA2; (+) strand; PAM type: YTN; PAM sequence: TTG
ttttcttcatttgtatgatt

SEQ ID NO: 354263 - DNA, 20 bp, Artificial Sequence
  Description of Artificial Sequence: Synthetic oligonucleotide
  Target: LAMA2; (+) strand; PAM type: YTN; PAM sequence: TTT
tcttcatttgtatgatttca

SEQ ID NO: 354264 - DNA, 20 bp, Artificial Sequence
  Description of Artificial Sequence: Synthetic oligonucleotide
  Target: LAMA2; (+) strand; PAM type: YTN; PAM sequence: TTT
cttcatttgtatgatttcat

SEQ ID NO: 354265 - DNA, 20 bp, Artificial Sequence
  Description of Artificial Sequence: Synthetic oligonucleotide
  Target: LAMA2; (+) strand; PAM type: YTN; PAM sequence: TTC
ttcatttgtatgatttcatt

SEQ ID NO: 354266 - DNA, 20 bp, Artificial Sequence
  Description of Artificial Sequence: Synthetic oligonucleotide
  Target: LAMA2; (+) strand; PAM type: YTN; PAM sequence: CTT
catttgtatgatttcatttt

SEQ ID NO: 354267 - DNA, 20 bp, Artificial Sequence
  Description of Artificial Sequence: Synthetic oligonucleotide
  Target: LAMA2; (+) strand; PAM type: YTN; PAM sequence: TTC
atttgtatgatttcatttta

SEQ ID NO: 354268 - DNA, 20 bp, Artificial Sequence
  Description of Artificial Sequence: Synthetic oligonucleotide
  Target: LAMA2; (+) strand; PAM type: YTN; PAM sequence: TTT
gtatgatttcattttataat

SEQ ID NO: 354269 - DNA, 20 bp, Artificial Sequence
  Description of Artificial Sequence: Synthetic oligonucleotide
  Target: LAMA2; (+) strand; PAM type: YTN; PAM sequence: TTG
tatgatttcattttataata

SEQ ID NO: 354270 - DNA, 20 bp, Artificial Sequence
  Description of Artificial Sequence: Synthetic oligonucleotide
  Target: LAMA2; (+) strand; PAM type: YTN; PAM sequence: TTT
cattttataatacttaattt

SEQ ID NO: 354271 - DNA, 20 bp, Artificial Sequence
  Description of Artificial Sequence: Synthetic oligonucleotide
  Target: LAMA2; (+) strand; PAM type: YTN; PAM sequence: TTC
attttataatacttaatttt

SEQ ID NO: 354272 - DNA, 20 bp, Artificial Sequence
  Description of Artificial Sequence: Synthetic oligonucleotide
  Target: LAMA2; (+) strand; PAM type: YTN; PAM sequence: TTT
tataatacttaattttttat

SEQ ID NO: 354273 - DNA, 20 bp, Artificial Sequence
  Description of Artificial Sequence: Synthetic oligonucleotide
  Target: LAMA2; (+) strand; PAM type: YTN; PAM sequence: TTT
ataatacttaattttttatt

SEQ ID NO: 354274 - DNA, 20 bp, Artificial Sequence
  Description of Artificial Sequence: Synthetic oligonucleotide
  Target: LAMA2; (+) strand; PAM type: YTN; PAM sequence: TTA
taatacttaattttttattc

SEQ ID NO: 354275 - DNA, 20 bp, Artificial Sequence
  Description of Artificial Sequence: Synthetic oligonucleotide
  Target: LAMA2; (+) strand; PAM type: YTN; PAM sequence: CTT
aattttttattccatctaga

SEQ ID NO: 354276 - DNA, 20 bp, Artificial Sequence
  Description of Artificial Sequence: Synthetic oligonucleotide
  Target: LAMA2; (+) strand; PAM type: YTN; PAM sequence: TTA
attttttattccatctagaa

SEQ ID NO: 354277 - DNA, 20 bp, Artificial Sequence
  Description of Artificial Sequence: Synthetic oligonucleotide
  Target: LAMA2; (+) strand; PAM type: YTN; PAM sequence: TTT
tttattccatctagaattta

SEQ ID NO: 354278 - DNA, 20 bp, Artificial Sequence
  Description of Artificial Sequence: Synthetic oligonucleotide
  Target: LAMA2; (+) strand; PAM type: YTN; PAM sequence: TTT
ttattccatctagaatttat

SEQ ID NO: 354279 - DNA, 20 bp, Artificial Sequence
  Description of Artificial Sequence: Synthetic oligonucleotide
  Target: LAMA2; (+) strand; PAM type: YTN; PAM sequence: TTT
tattccatctagaatttatt

SEQ ID NO: 354280 - DNA, 20 bp, Artificial Sequence
  Description of Artificial Sequence: Synthetic oligonucleotide
  Target: LAMA2; (+) strand; PAM type: YTN; PAM sequence: TTT
attccatctagaatttattt

SEQ ID NO: 354281 - DNA, 20 bp, Artificial Sequence
  Description of Artificial Sequence: Synthetic oligonucleotide
  Target: LAMA2; (+) strand; PAM type: YTN; PAM sequence: TTA
ttccatctagaatttatttt

SEQ ID NO: 354282 - DNA, 20 bp, Artificial Sequence
  Description of Artificial Sequence: Synthetic oligonucleotide
  Target: LAMA2; (+) strand; PAM type: YTN; PAM sequence: TTC
catctagaatttattttgtt

SEQ ID NO: 354283 - DNA, 20 bp, Artificial Sequence
  Description of Artificial Sequence: Synthetic oligonucleotide
  Target: LAMA2; (+) strand; PAM type: YTN; PAM sequence: CTA
gaatttattttgttatattt

SEQ ID NO: 354284 - DNA, 20 bp, Artificial Sequence
  Description of Artificial Sequence: Synthetic oligonucleotide
  Target: LAMA2; (+) strand; PAM type: YTN; PAM sequence: TTT
attttgttatatttcataag

SEQ ID NO: 354285 - DNA, 20 bp, Artificial Sequence
  Description of Artificial Sequence: Synthetic oligonucleotide
  Target: LAMA2; (+) strand; PAM type: YTN; PAM sequence: TTA
ttttgttatatttcataagg

SEQ ID NO: 354286 - DNA, 20 bp, Artificial Sequence
  Description of Artificial Sequence: Synthetic oligonucleotide
  Target: LAMA2; (+) strand; PAM type: YTN; PAM sequence: TTT
tgttatatttcataaggaaa

SEQ ID NO: 354287 - DNA, 20 bp, Artificial Sequence
  Description of Artificial Sequence: Synthetic oligonucleotide
  Target: LAMA2; (+) strand; PAM type: YTN; PAM sequence: TTT
gttatatttcataaggaaat

SEQ ID NO: 354288 - DNA, 20 bp, Artificial Sequence
  Description of Artificial Sequence: Synthetic oligonucleotide
  Target: LAMA2; (+) strand; PAM type: YTN; PAM sequence: TTG
ttatatttcataaggaaatt

SEQ ID NO: 354289 - DNA, 20 bp, Artificial Sequence
  Description of Artificial Sequence: Synthetic oligonucleotide
  Target: LAMA2; (+) strand; PAM type: YTN; PAM sequence: TTA
tatttcataaggaaattttc

SEQ ID NO: 354290 - DNA, 20 bp, Artificial Sequence
  Description of Artificial Sequence: Synthetic oligonucleotide
  Target: LAMA2; (+) strand; PAM type: YTN; PAM sequence: TTT
cataaggaaattttcaaact

SEQ ID NO: 354291 - DNA, 20 bp, Artificial Sequence
  Description of Artificial Sequence: Synthetic oligonucleotide
  Target: LAMA2; (+) strand; PAM type: YTN; PAM sequence: TTC
ataaggaaattttcaaacta

SEQ ID NO: 354292 - DNA, 20 bp, Artificial Sequence
  Description of Artificial Sequence: Synthetic oligonucleotide
  Target: LAMA2; (+) strand; PAM type: YTN; PAM sequence: TTT
tcaaactacattttgttttc

SEQ ID NO: 354293 - DNA, 20 bp, Artificial Sequence
  Description of Artificial Sequence: Synthetic oligonucleotide
  Target: LAMA2; (+) strand; PAM type: YTN; PAM sequence: TTT
caaactacattttgttttcc

SEQ ID NO: 354294 - DNA, 20 bp, Artificial Sequence
  Description of Artificial Sequence: Synthetic oligonucleotide
  Target: LAMA2; (+) strand; PAM type: YTN; PAM sequence: TTC
aaactacattttgttttcca

SEQ ID NO: 354295 - DNA, 20 bp, Artificial Sequence
  Description of Artificial Sequence: Synthetic oligonucleotide
  Target: LAMA2; (+) strand; PAM type: YTN; PAM sequence: CTA
cattttgttttccaatactc

SEQ ID NO: 354296 - DNA, 20 bp, Artificial Sequence
  Description of Artificial Sequence: Synthetic oligonucleotide
  Target: LAMA2; (+) strand; PAM type: YTN; PAM sequence: TTT
tgttttccaatactcttttt

SEQ ID NO: 354297 - DNA, 20 bp, Artificial Sequence
  Description of Artificial Sequence: Synthetic oligonucleotide
  Target: LAMA2; (+) strand; PAM type: YTN; PAM sequence: TTT
gttttccaatactctttttt

SEQ ID NO: 354298 - DNA, 20 bp, Artificial Sequence
  Description of Artificial Sequence: Synthetic oligonucleotide
  Target: LAMA2; (+) strand; PAM type: YTN; PAM sequence: TTG
ttttccaatactctttttta

SEQ ID NO: 354299 - DNA, 20 bp, Artificial Sequence
  Description of Artificial Sequence: Synthetic oligonucleotide
  Target: LAMA2; (+) strand; PAM type: YTN; PAM sequence: TTT
tccaatactcttttttactc

SEQ ID NO: 354300 - DNA, 20 bp, Artificial Sequence
  Description of Artificial Sequence: Synthetic oligonucleotide
  Target: LAMA2; (+) strand; PAM type: YTN; PAM sequence: TTT
ccaatactcttttttactca

SEQ ID NO: 354301 - DNA, 20 bp, Artificial Sequence
  Description of Artificial Sequence: Synthetic oligonucleotide
  Target: LAMA2; (+) strand; PAM type: YTN; PAM sequence: TTC
caatactcttttttactcat

SEQ ID NO: 354302 - DNA, 20 bp, Artificial Sequence
  Description of Artificial Sequence: Synthetic oligonucleotide
  Target: LAMA2; (+) strand; PAM type: YTN; PAM sequence: CTC
ttttttactcatctacattt

SEQ ID NO: 354303 - DNA, 20 bp, Artificial Sequence
  Description of Artificial Sequence: Synthetic oligonucleotide
  Target: LAMA2; (+) strand; PAM type: YTN; PAM sequence: CTT
ttttactcatctacatttaa

SEQ ID NO: 354304 - DNA, 20 bp, Artificial Sequence
  Description of Artificial Sequence: Synthetic oligonucleotide
  Target: LAMA2; (+) strand; PAM type: YTN; PAM sequence: TTT
tttactcatctacatttaat

SEQ ID NO: 354305 - DNA, 20 bp, Artificial Sequence
  Description of Artificial Sequence: Synthetic oligonucleotide
  Target: LAMA2; (+) strand; PAM type: YTN; PAM sequence: TTT
ttactcatctacatttaata

SEQ ID NO: 354306 - DNA, 20 bp, Artificial Sequence
  Description of Artificial Sequence: Synthetic oligonucleotide
  Target: LAMA2; (+) strand; PAM type: YTN; PAM sequence: TTT
tactcatctacatttaatat

SEQ ID NO: 354307 - DNA, 20 bp, Artificial Sequence
  Description of Artificial Sequence: Synthetic oligonucleotide
  Target: LAMA2; (+) strand; PAM type: YTN; PAM sequence: TTT
actcatctacatttaatatt

SEQ ID NO: 354308 - DNA, 20 bp, Artificial Sequence
  Description of Artificial Sequence: Synthetic oligonucleotide
  Target: LAMA2; (+) strand; PAM type: YTN; PAM sequence: TTA
ctcatctacatttaatatta

SEQ ID NO: 354309 - DNA, 20 bp, Artificial Sequence
  Description of Artificial Sequence: Synthetic oligonucleotide
  Target: LAMA2; (+) strand; PAM type: YTN; PAM sequence: CTC
atctacatttaatattactt

SEQ ID NO: 354310 - DNA, 20 bp, Artificial Sequence
  Description of Artificial Sequence: Synthetic oligonucleotide
  Target: LAMA2; (+) strand; PAM type: YTN; PAM sequence: CTA
catttaatattactttcagc

SEQ ID NO: 354311 - DNA, 20 bp, Artificial Sequence
  Description of Artificial Sequence: Synthetic oligonucleotide
  Target: LAMA2; (+) strand; PAM type: YTN; PAM sequence: TTT
aatattactttcagctcttt

SEQ ID NO: 354312 - DNA, 20 bp, Artificial Sequence
  Description of Artificial Sequence: Synthetic oligonucleotide
  Target: LAMA2; (+) strand; PAM type: YTN; PAM sequence: TTA
atattactttcagctcttta

SEQ ID NO: 354313 - DNA, 20 bp, Artificial Sequence
  Description of Artificial Sequence: Synthetic oligonucleotide
  Target: LAMA2; (+) strand; PAM type: YTN; PAM sequence: TTA
ctttcagctctttagacata

SEQ ID NO: 354314 - DNA, 20 bp, Artificial Sequence
  Description of Artificial Sequence: Synthetic oligonucleotide
  Target: LAMA2; (+) strand; PAM type: YTN; PAM sequence: CTT
tcagctctttagacatatta

SEQ ID NO: 354315 - DNA, 20 bp, Artificial Sequence
  Description of Artificial Sequence: Synthetic oligonucleotide
  Target: LAMA2; (+) strand; PAM type: YTN; PAM sequence: TTT
cagctctttagacatattaa

SEQ ID NO: 354316 - DNA, 20 bp, Artificial Sequence
  Description of Artificial Sequence: Synthetic oligonucleotide
  Target: LAMA2; (+) strand; PAM type: YTN; PAM sequence: TTC
agctctttagacatattaaa

SEQ ID NO: 354317 - DNA, 20 bp, Artificial Sequence
  Description of Artificial Sequence: Synthetic oligonucleotide
  Target: LAMA2; (+) strand; PAM type: YTN; PAM sequence: CTC
tttagacatattaaatatat

SEQ ID NO: 354318 - DNA, 20 bp, Artificial Sequence
  Description of Artificial Sequence: Synthetic oligonucleotide
  Target: LAMA2; (+) strand; PAM type: YTN; PAM sequence: CTT
tagacatattaaatatattt

SEQ ID NO: 354319 - DNA, 20 bp, Artificial Sequence
  Description of Artificial Sequence: Synthetic oligonucleotide
  Target: LAMA2; (+) strand; PAM type: YTN; PAM sequence: TTT
agacatattaaatatattta

SEQ ID NO: 354320 - DNA, 20 bp, Artificial Sequence
  Description of Artificial Sequence: Synthetic oligonucleotide
  Target: LAMA2; (+) strand; PAM type: YTN; PAM sequence: TTA
gacatattaaatatatttat

SEQ ID NO: 354321 - DNA, 20 bp, Artificial Sequence
  Description of Artificial Sequence: Synthetic oligonucleotide
  Target: LAMA2; (+) strand; PAM type: YTN; PAM sequence: TTA
aatatatttattttattttc

SEQ ID NO: 354322 - DNA, 20 bp, Artificial Sequence
  Description of Artificial Sequence: Synthetic oligonucleotide
  Target: LAMA2; (+) strand; PAM type: YTN; PAM sequence: TTT
attttattttcggaatctgt

SEQ ID NO: 354323 - DNA, 20 bp, Artificial Sequence
  Description of Artificial Sequence: Synthetic oligonucleotide
  Target: LAMA2; (+) strand; PAM type: YTN; PAM sequence: TTA
ttttattttcggaatctgtt

SEQ ID NO: 354324 - DNA, 20 bp, Artificial Sequence
  Description of Artificial Sequence: Synthetic oligonucleotide
  Target: LAMA2; (+) strand; PAM type: YTN; PAM sequence: TTT
tattttcggaatctgttaga

SEQ ID NO: 354325 - DNA, 20 bp, Artificial Sequence
  Description of Artificial Sequence: Synthetic oligonucleotide
  Target: LAMA2; (+) strand; PAM type: YTN; PAM sequence: TTT
attttcggaatctgttagaa

SEQ ID NO: 354326 - DNA, 20 bp, Artificial Sequence
  Description of Artificial Sequence: Synthetic oligonucleotide
  Target: LAMA2; (+) strand; PAM type: YTN; PAM sequence: TTA
ttttcggaatctgttagaag

SEQ ID NO: 354327 - DNA, 20 bp, Artificial Sequence
  Description of Artificial Sequence: Synthetic oligonucleotide
  Target: LAMA2; (+) strand; PAM type: YTN; PAM sequence: TTT
tcggaatctgttagaagcac

SEQ ID NO: 354328 - DNA, 20 bp, Artificial Sequence
  Description of Artificial Sequence: Synthetic oligonucleotide
  Target: LAMA2; (+) strand; PAM type: YTN; PAM sequence: TTT
cggaatctgttagaagcact

SEQ ID NO: 354329 - DNA, 20 bp, Artificial Sequence
  Description of Artificial Sequence: Synthetic oligonucleotide
  Target: LAMA2; (+) strand; PAM type: YTN; PAM sequence: TTC
ggaatctgttagaagcactc

SEQ ID NO: 354330 - DNA, 20 bp, Artificial Sequence
  Description of Artificial Sequence: Synthetic oligonucleotide
  Target: LAMA2; (+) strand; PAM type: YTN; PAM sequence: CTG
ttagaagcactctgttattg

SEQ ID NO: 354331 - DNA, 20 bp, Artificial Sequence
  Description of Artificial Sequence: Synthetic oligonucleotide
  Target: LAMA2; (+) strand; PAM type: YTN; PAM sequence: TTA
gaagcactctgttattgagt

SEQ ID NO: 354332 - DNA, 20 bp, Artificial Sequence
  Description of Artificial Sequence: Synthetic oligonucleotide
  Target: LAMA2; (+) strand; PAM type: YTN; PAM sequence: CTC
tgttattgagtctgagtctg

SEQ ID NO: 354333 - DNA, 20 bp, Artificial Sequence
  Description of Artificial Sequence: Synthetic oligonucleotide
  Target: LAMA2; (+) strand; PAM type: YTN; PAM sequence: CTG
ttattgagtctgagtctgca

SEQ ID NO: 354334 - DNA, 20 bp, Artificial Sequence
  Description of Artificial Sequence: Synthetic oligonucleotide
  Target: LAMA2; (+) strand; PAM type: YTN; PAM sequence: TTA
ttgagtctgagtctgcattt

SEQ ID NO: 354335 - DNA, 20 bp, Artificial Sequence
  Description of Artificial Sequence: Synthetic oligonucleotide
  Target: LAMA2; (+) strand; PAM type: YTN; PAM sequence: TTG
agtctgagtctgcattttta

SEQ ID NO: 354336 - DNA, 20 bp, Artificial Sequence
  Description of Artificial Sequence: Synthetic oligonucleotide
  Target: LAMA2; (+) strand; PAM type: YTN; PAM sequence: CTG
agtctgcatttttatttctc

SEQ ID NO: 354337 - DNA, 20 bp, Artificial Sequence
  Description of Artificial Sequence: Synthetic oligonucleotide
  Target: LAMA2; (+) strand; PAM type: YTN; PAM sequence: CTG
catttttatttctcttctaa

SEQ ID NO: 354338 - DNA, 20 bp, Artificial Sequence
  Description of Artificial Sequence: Synthetic oligonucleotide
  Target: LAMA2; (+) strand; PAM type: YTN; PAM sequence: TTT
ttatttctcttctaactctt

SEQ ID NO: 354339 - DNA, 20 bp, Artificial Sequence
  Description of Artificial Sequence: Synthetic oligonucleotide
  Target: LAMA2; (+) strand; PAM type: YTN; PAM sequence: TTT
tatttctcttctaactctta

SEQ ID NO: 354340 - DNA, 20 bp, Artificial Sequence
  Description of Artificial Sequence: Synthetic oligonucleotide
  Target: LAMA2; (+) strand; PAM type: YTN; PAM sequence: TTT
atttctcttctaactcttat

SEQ ID NO: 354341 - DNA, 20 bp, Artificial Sequence
  Description of Artificial Sequence: Synthetic oligonucleotide
  Target: LAMA2; (+) strand; PAM type: YTN; PAM sequence: TTA
tttctcttctaactcttatt

SEQ ID NO: 354342 - DNA, 20 bp, Artificial Sequence
  Description of Artificial Sequence: Synthetic oligonucleotide
  Target: LAMA2; (+) strand; PAM type: YTN; PAM sequence: TTT
ctcttctaactcttattcat

SEQ ID NO: 354343 - DNA, 20 bp, Artificial Sequence
  Description of Artificial Sequence: Synthetic oligonucleotide
  Target: LAMA2; (+) strand; PAM type: YTN; PAM sequence: TTC
tcttctaactcttattcata

SEQ ID NO: 354344 - DNA, 20 bp, Artificial Sequence
  Description of Artificial Sequence: Synthetic oligonucleotide
  Target: LAMA2; (+) strand; PAM type: YTN; PAM sequence: CTC
ttctaactcttattcatatg

SEQ ID NO: 354345 - DNA, 20 bp, Artificial Sequence
  Description of Artificial Sequence: Synthetic oligonucleotide
  Target: LAMA2; (+) strand; PAM type: YTN; PAM sequence: CTT
ctaactcttattcatatgga

SEQ ID NO: 354346 - DNA, 20 bp, Artificial Sequence
  Description of Artificial Sequence: Synthetic oligonucleotide
  Target: LAMA2; (+) strand; PAM type: YTN; PAM sequence: TTC
taactcttattcatatggac

SEQ ID NO: 354347 - DNA, 20 bp, Artificial Sequence
  Description of Artificial Sequence: Synthetic oligonucleotide
  Target: LAMA2; (+) strand; PAM type: YTN; PAM sequence: CTA
actcttattcatatggactt

SEQ ID NO: 354348 - DNA, 20 bp, Artificial Sequence
  Description of Artificial Sequence: Synthetic oligonucleotide
  Target: LAMA2; (+) strand; PAM type: YTN; PAM sequence: CTC
ttattcatatggacttcatt

SEQ ID NO: 354349 - DNA, 20 bp, Artificial Sequence
  Description of Artificial Sequence: Synthetic oligonucleotide
  Target: LAMA2; (+) strand; PAM type: YTN; PAM sequence: CTT
attcatatggacttcatttt

SEQ ID NO: 354350 - DNA, 20 bp, Artificial Sequence
  Description of Artificial Sequence: Synthetic oligonucleotide
  Target: LAMA2; (+) strand; PAM type: YTN; PAM sequence: TTA
ttcatatggacttcattttc

SEQ ID NO: 354351 - DNA, 20 bp, Artificial Sequence
  Description of Artificial Sequence: Synthetic oligonucleotide
  Target: LAMA2; (+) strand; PAM type: YTN; PAM sequence: TTC
atatggacttcattttctta

SEQ ID NO: 354352 - DNA, 20 bp, Artificial Sequence
  Description of Artificial Sequence: Synthetic oligonucleotide
  Target: LAMA2; (+) strand; PAM type: YTN; PAM sequence: CTT
cattttcttatgtttcgtaa

SEQ ID NO: 354353 - DNA, 20 bp, Artificial Sequence
  Description of Artificial Sequence: Synthetic oligonucleotide
  Target: LAMA2; (+) strand; PAM type: YTN; PAM sequence: TTC
attttcttatgtttcgtaag

SEQ ID NO: 354354 - DNA, 20 bp, Artificial Sequence
  Description of Artificial Sequence: Synthetic oligonucleotide
  Target: LAMA2; (+) strand; PAM type: YTN; PAM sequence: TTT
tcttatgtttcgtaagtgtg

SEQ ID NO: 354355 - DNA, 20 bp, Artificial Sequence
  Description of Artificial Sequence: Synthetic oligonucleotide
  Target: LAMA2; (+) strand; PAM type: YTN; PAM sequence: TTT
cttatgtttcgtaagtgtgt

SEQ ID NO: 354356 - DNA, 20 bp, Artificial Sequence
  Description of Artificial Sequence: Synthetic oligonucleotide
  Target: LAMA2; (+) strand; PAM type: YTN; PAM sequence: TTC
ttatgtttcgtaagtgtgtg

SEQ ID NO: 354357 - DNA, 20 bp, Artificial Sequence
  Description of Artificial Sequence: Synthetic oligonucleotide
  Target: LAMA2; (+) strand; PAM type: YTN; PAM sequence: CTT
atgtttcgtaagtgtgtgtg

SEQ ID NO: 354358 - DNA, 20 bp, Artificial Sequence
  Description of Artificial Sequence: Synthetic oligonucleotide
  Target: LAMA2; (+) strand; PAM type: YTN; PAM sequence: TTA
tgtttcgtaagtgtgtgtgt

SEQ ID NO: 354359 - DNA, 20 bp, Artificial Sequence
  Description of Artificial Sequence: Synthetic oligonucleotide
  Target: LAMA2; (+) strand; PAM type: YTN; PAM sequence: TTT
cgtaagtgtgtgtgtgtgtg

SEQ ID NO: 354360 - DNA, 20 bp, Artificial Sequence
  Description of Artificial Sequence: Synthetic oligonucleotide
  Target: LAMA2; (+) strand; PAM type: YTN; PAM sequence: TTC
gtaagtgtgtgtgtgtgtgt

SEQ ID NO: 354361 - DNA, 20 bp, Artificial Sequence
  Description of Artificial Sequence: Synthetic oligonucleotide
  Target: LAMA2; (+) strand; PAM type: YTN; PAM sequence: TTT
tgtggatgtatgcgtgcata

SEQ ID NO: 354362 - DNA, 20 bp, Artificial Sequence
  Description of Artificial Sequence: Synthetic oligonucleotide
  Target: LAMA2; (+) strand; PAM type: YTN; PAM sequence: TTT
gtggatgtatgcgtgcatat

SEQ ID NO: 354363 - DNA, 20 bp, Artificial Sequence
  Description of Artificial Sequence: Synthetic oligonucleotide
  Target: LAMA2; (+) strand; PAM type: YTN; PAM sequence: TTG
tggatgtatgcgtgcatatg

SEQ ID NO: 354364 - DNA, 20 bp, Artificial Sequence
  Description of Artificial Sequence: Synthetic oligonucleotide
  Target: LAMA2; (+) strand; PAM type: YTN; PAM sequence: TTT
cttagtttattctttcagaa

SEQ ID NO: 354365 - DNA, 20 bp, Artificial Sequence
  Description of Artificial Sequence: Synthetic oligonucleotide
  Target: LAMA2; (+) strand; PAM type: YTN; PAM sequence: TTC
ttagtttattctttcagaag

SEQ ID NO: 354366 - DNA, 20 bp, Artificial Sequence
  Description of Artificial Sequence: Synthetic oligonucleotide
  Target: LAMA2; (+) strand; PAM type: YTN; PAM sequence: CTT
agtttattctttcagaagcc

SEQ ID NO: 354367 - DNA, 20 bp, Artificial Sequence
  Description of Artificial Sequence: Synthetic oligonucleotide
  Target: LAMA2; (+) strand; PAM type: YTN; PAM sequence: TTA
gtttattctttcagaagcct

SEQ ID NO: 354368 - DNA, 20 bp, Artificial Sequence
  Description of Artificial Sequence: Synthetic oligonucleotide
  Target: LAMA2; (+) strand; PAM type: YTN; PAM sequence: TTT
attctttcagaagccttgaa

SEQ ID NO: 354369 - DNA, 20 bp, Artificial Sequence
  Description of Artificial Sequence: Synthetic oligonucleotide
  Target: LAMA2; (+) strand; PAM type: YTN; PAM sequence: TTA
ttctttcagaagccttgaat

SEQ ID NO: 354370 - DNA, 20 bp, Artificial Sequence
  Description of Artificial Sequence: Synthetic oligonucleotide
  Target: LAMA2; (+) strand; PAM type: YTN; PAM sequence: TTC
tttcagaagccttgaattta

SEQ ID NO: 354371 - DNA, 20 bp, Artificial Sequence
  Description of Artificial Sequence: Synthetic oligonucleotide
  Target: LAMA2; (+) strand; PAM type: YTN; PAM sequence: CTT
tcagaagccttgaatttaca

SEQ ID NO: 354372 - DNA, 20 bp, Artificial Sequence
  Description of Artificial Sequence: Synthetic oligonucleotide
  Target: LAMA2; (+) strand; PAM type: YTN; PAM sequence: TTT
cagaagccttgaatttacat

SEQ ID NO: 354373 - DNA, 20 bp, Artificial Sequence
  Description of Artificial Sequence: Synthetic oligonucleotide
  Target: LAMA2; (+) strand; PAM type: YTN; PAM sequence: TTC
agaagccttgaatttacatg

SEQ ID NO: 354374 - DNA, 20 bp, Artificial Sequence
  Description of Artificial Sequence: Synthetic oligonucleotide
  Target: LAMA2; (+) strand; PAM type: YTN; PAM sequence: CTT
gaatttacatgaagttatgt

SEQ ID NO: 354375 - DNA, 20 bp, Artificial Sequence
  Description of Artificial Sequence: Synthetic oligonucleotide
  Target: LAMA2; (+) strand; PAM type: YTN; PAM sequence: TTG
aatttacatgaagttatgtg

SEQ ID NO: 354376 - DNA, 20 bp, Artificial Sequence
  Description of Artificial Sequence: Synthetic oligonucleotide
  Target: LAMA2; (+) strand; PAM type: YTN; PAM sequence: TTT
acatgaagttatgtgataat

SEQ ID NO: 354377 - DNA, 20 bp, Artificial Sequence
  Description of Artificial Sequence: Synthetic oligonucleotide
  Target: LAMA2; (+) strand; PAM type: YTN; PAM sequence: TTA
catgaagttatgtgataatg

SEQ ID NO: 354378 - DNA, 20 bp, Artificial Sequence
  Description of Artificial Sequence: Synthetic oligonucleotide
  Target: LAMA2; (+) strand; PAM type: YTN; PAM sequence: TTA
tgtgataatgacctacctta

SEQ ID NO: 354379 - DNA, 20 bp, Artificial Sequence
  Description of Artificial Sequence: Synthetic oligonucleotide
  Target: LAMA2; (+) strand; PAM type: YTN; PAM sequence: CTA
ccttatataggacctagaat

SEQ ID NO: 354380 - DNA, 20 bp, Artificial Sequence
  Description of Artificial Sequence: Synthetic oligonucleotide
  Target: LAMA2; (+) strand; PAM type: YTN; PAM sequence: CTT
atataggacctagaattttt

SEQ ID NO: 354381 - DNA, 20 bp, Artificial Sequence
  Description of Artificial Sequence: Synthetic oligonucleotide
  Target: LAMA2; (+) strand; PAM type: YTN; PAM sequence: TTA
tataggacctagaatttttt

SEQ ID NO: 354382 - DNA, 20 bp, Artificial Sequence
  Description of Artificial Sequence: Synthetic oligonucleotide
  Target: LAMA2; (+) strand; PAM type: YTN; PAM sequence: CTA
gaattttttgttgttcttct

SEQ ID NO: 354383 - DNA, 20 bp, Artificial Sequence
  Description of Artificial Sequence: Synthetic oligonucleotide
  Target: LAMA2; (+) strand; PAM type: YTN; PAM sequence: TTT
tttgttgttcttctgtaaaa

SEQ ID NO: 354384 - DNA, 20 bp, Artificial Sequence
  Description of Artificial Sequence: Synthetic oligonucleotide
  Target: LAMA2; (+) strand; PAM type: YTN; PAM sequence: TTT
ttgttgttcttctgtaaaac

SEQ ID NO: 354385 - DNA, 20 bp, Artificial Sequence
  Description of Artificial Sequence: Synthetic oligonucleotide
  Target: LAMA2; (+) strand; PAM type: YTN; PAM sequence: TTT
tgttgttcttctgtaaaacc

SEQ ID NO: 354386 - DNA, 20 bp, Artificial Sequence
  Description of Artificial Sequence: Synthetic oligonucleotide
  Target: LAMA2; (+) strand; PAM type: YTN; PAM sequence: TTT
gttgttcttctgtaaaacca

SEQ ID NO: 354387 - DNA, 20 bp, Artificial Sequence
  Description of Artificial Sequence: Synthetic oligonucleotide
  Target: LAMA2; (+) strand; PAM type: YTN; PAM sequence: TTG
ttgttcttctgtaaaaccat

SEQ ID NO: 354388 - DNA, 20 bp, Artificial Sequence
  Description of Artificial Sequence: Synthetic oligonucleotide
  Target: LAMA2; (+) strand; PAM type: YTN; PAM sequence: TTG
ttcttctgtaaaaccatgct

SEQ ID NO: 354389 - DNA, 20 bp, Artificial Sequence
  Description of Artificial Sequence: Synthetic oligonucleotide
  Target: LAMA2; (+) strand; PAM type: YTN; PAM sequence: TTC
ttctgtaaaaccatgctccc

SEQ ID NO: 354390 - DNA, 20 bp, Artificial Sequence
  Description of Artificial Sequence: Synthetic oligonucleotide
  Target: LAMA2; (+) strand; PAM type: YTN; PAM sequence: CTT
ctgtaaaaccatgctccctg

SEQ ID NO: 354391 - DNA, 20 bp, Artificial Sequence
  Description of Artificial Sequence: Synthetic oligonucleotide
  Target: LAMA2; (+) strand; PAM type: YTN; PAM sequence: TTC
tgtaaaaccatgctccctga

SEQ ID NO: 354392 - DNA, 20 bp, Artificial Sequence
  Description of Artificial Sequence: Synthetic oligonucleotide
  Target: LAMA2; (+) strand; PAM type: YTN; PAM sequence: CTG
taaaaccatgctccctgaac

SEQ ID NO: 354393 - DNA, 20 bp, Artificial Sequence
  Description of Artificial Sequence: Synthetic oligonucleotide
  Target: LAMA2; (+) strand; PAM type: YTN; PAM sequence: CTC
cctgaactgtagtctagtca

SEQ ID NO: 354394 - DNA, 20 bp, Artificial Sequence
  Description of Artificial Sequence: Synthetic oligonucleotide
  Target: LAMA2; (+) strand; PAM type: YTN; PAM sequence: CTG
aactgtagtctagtcatcag

SEQ ID NO: 354395 - DNA, 20 bp, Artificial Sequence
  Description of Artificial Sequence: Synthetic oligonucleotide
  Target: LAMA2; (+) strand; PAM type: YTN; PAM sequence: CTG
tagtctagtcatcagaattt

SEQ ID NO: 354396 - DNA, 20 bp, Artificial Sequence
  Description of Artificial Sequence: Synthetic oligonucleotide
  Target: LAMA2; (+) strand; PAM type: YTN; PAM sequence: CTA
gtcatcagaatttgccagtc

SEQ ID NO: 354397 - DNA, 20 bp, Artificial Sequence
  Description of Artificial Sequence: Synthetic oligonucleotide
  Target: LAMA2; (+) strand; PAM type: YTN; PAM sequence: TTT
gccagtcaactccaggaaag

SEQ ID NO: 354398 - DNA, 20 bp, Artificial Sequence
  Description of Artificial Sequence: Synthetic oligonucleotide
  Target: LAMA2; (+) strand; PAM type: YTN; PAM sequence: TTG
ccagtcaactccaggaaaga

SEQ ID NO: 354399 - DNA, 20 bp, Artificial Sequence
  Description of Artificial Sequence: Synthetic oligonucleotide
  Target: LAMA2; (+) strand; PAM type: YTN; PAM sequence: CTC
caggaaagacattgttttaa

SEQ ID NO: 354400 - DNA, 20 bp, Artificial Sequence
  Description of Artificial Sequence: Synthetic oligonucleotide
  Target: LAMA2; (+) strand; PAM type: YTN; PAM sequence: TTG
ttttaaagaatgacgtaagc

SEQ ID NO: 354401 - DNA, 20 bp, Artificial Sequence
  Description of Artificial Sequence: Synthetic oligonucleotide
  Target: LAMA2; (+) strand; PAM type: YTN; PAM sequence: TTT
taaagaatgacgtaagcttt

SEQ ID NO: 354402 - DNA, 20 bp, Artificial Sequence
  Description of Artificial Sequence: Synthetic oligonucleotide
  Target: LAMA2; (+) strand; PAM type: YTN; PAM sequence: TTT
aaagaatgacgtaagctttc

SEQ ID NO: 354403 - DNA, 20 bp, Artificial Sequence
  Description of Artificial Sequence: Synthetic oligonucleotide
  Target: LAMA2; (+) strand; PAM type: YTN; PAM sequence: TTA
aagaatgacgtaagctttct

SEQ ID NO: 354404 - DNA, 20 bp, Artificial Sequence
  Description of Artificial Sequence: Synthetic oligonucleotide
  Target: LAMA2; (+) strand; PAM type: YTN; PAM sequence: CTT
tctagaagtcaattttgtag

SEQ ID NO: 354405 - DNA, 20 bp, Artificial Sequence
  Description of Artificial Sequence: Synthetic oligonucleotide
  Target: LAMA2; (+) strand; PAM type: YTN; PAM sequence: TTT
ctagaagtcaattttgtagt

SEQ ID NO: 354406 - DNA, 20 bp, Artificial Sequence
  Description of Artificial Sequence: Synthetic oligonucleotide
  Target: LAMA2; (+) strand; PAM type: YTN; PAM sequence: TTC
tagaagtcaattttgtagtt

SEQ ID NO: 354407 - DNA, 20 bp, Artificial Sequence
  Description of Artificial Sequence: Synthetic oligonucleotide
  Target: LAMA2; (+) strand; PAM type: YTN; PAM sequence: CTA
gaagtcaattttgtagtttc

SEQ ID NO: 354408 - DNA, 20 bp, Artificial Sequence
  Description of Artificial Sequence: Synthetic oligonucleotide
  Target: LAMA2; (+) strand; PAM type: YTN; PAM sequence: TTT
tgtagtttctcatctccaag

SEQ ID NO: 354409 - DNA, 20 bp, Artificial Sequence
  Description of Artificial Sequence: Synthetic oligonucleotide
  Target: LAMA2; (+) strand; PAM type: YTN; PAM sequence: TTT
gtagtttctcatctccaagg

SEQ ID NO: 354410 - DNA, 20 bp, Artificial Sequence
  Description of Artificial Sequence: Synthetic oligonucleotide
  Target: LAMA2; (+) strand; PAM type: YTN; PAM sequence: TTG
tagtttctcatctccaaggg

SEQ ID NO: 354411 - DNA, 20 bp, Artificial Sequence
  Description of Artificial Sequence: Synthetic oligonucleotide
  Target: LAMA2; (+) strand; PAM type: YTN; PAM sequence: TTT
ctcatctccaaggggtttct

SEQ ID NO: 354412 - DNA, 20 bp, Artificial Sequence
  Description of Artificial Sequence: Synthetic oligonucleotide
  Target: LAMA2; (+) strand; PAM type: YTN; PAM sequence: TTC
tcatctccaaggggtttctt

SEQ ID NO: 354413 - DNA, 20 bp, Artificial Sequence
  Description of Artificial Sequence: Synthetic oligonucleotide
  Target: LAMA2; (+) strand; PAM type: YTN; PAM sequence: CTC
atctccaaggggtttcttta

SEQ ID NO: 354414 - DNA, 20 bp, Artificial Sequence
  Description of Artificial Sequence: Synthetic oligonucleotide
  Target: LAMA2; (+) strand; PAM type: YTN; PAM sequence: CTC
caaggggtttctttatttct

SEQ ID NO: 354415 - DNA, 20 bp, Artificial Sequence
  Description of Artificial Sequence: Synthetic oligonucleotide
  Target: LAMA2; (+) strand; PAM type: YTN; PAM sequence: TTT
ctttatttcttgccagcgca

SEQ ID NO: 354416 - DNA, 20 bp, Artificial Sequence
  Description of Artificial Sequence: Synthetic oligonucleotide
  Target: LAMA2; (+) strand; PAM type: YTN; PAM sequence: TTC
tttatttcttgccagcgcaa

SEQ ID NO: 354417 - DNA, 20 bp, Artificial Sequence
  Description of Artificial Sequence: Synthetic oligonucleotide
  Target: LAMA2; (+) strand; PAM type: YTN; PAM sequence: CTT
tatttcttgccagcgcaacg

SEQ ID NO: 354418 - DNA, 20 bp, Artificial Sequence
  Description of Artificial Sequence: Synthetic oligonucleotide
  Target: LAMA2; (+) strand; PAM type: YTN; PAM sequence: TTT
atttcttgccagcgcaacga

SEQ ID NO: 354419 - DNA, 20 bp, Artificial Sequence
  Description of Artificial Sequence: Synthetic oligonucleotide
  Target: LAMA2; (+) strand; PAM type: YTN; PAM sequence: TTA
tttcttgccagcgcaacgat

SEQ ID NO: 354420 - DNA, 20 bp, Artificial Sequence
  Description of Artificial Sequence: Synthetic oligonucleotide
  Target: LAMA2; (+) strand; PAM type: YTN; PAM sequence: TTT
cttgccagcgcaacgattct

SEQ ID NO: 354421 - DNA, 20 bp, Artificial Sequence
  Description of Artificial Sequence: Synthetic oligonucleotide
  Target: LAMA2; (+) strand; PAM type: YTN; PAM sequence: TTC
ttgccagcgcaacgattctg

SEQ ID NO: 354422 - DNA, 20 bp, Artificial Sequence
  Description of Artificial Sequence: Synthetic oligonucleotide
  Target: LAMA2; (+) strand; PAM type: YTN; PAM sequence: CTT
gccagcgcaacgattctgtt

SEQ ID NO: 354423 - DNA, 20 bp, Artificial Sequence
  Description of Artificial Sequence: Synthetic oligonucleotide
  Target: LAMA2; (+) strand; PAM type: YTN; PAM sequence: TTG
ccagcgcaacgattctgtta

SEQ ID NO: 354424 - DNA, 20 bp, Artificial Sequence
  Description of Artificial Sequence: Synthetic oligonucleotide
  Target: LAMA2; (+) strand; PAM type: YTN; PAM sequence: TTC
tgttatctgccatctgtctt

SEQ ID NO: 354425 - DNA, 20 bp, Artificial Sequence
  Description of Artificial Sequence: Synthetic oligonucleotide
  Target: LAMA2; (+) strand; PAM type: YTN; PAM sequence: CTG
ttatctgccatctgtctttc

SEQ ID NO: 354426 - DNA, 20 bp, Artificial Sequence
  Description of Artificial Sequence: Synthetic oligonucleotide
  Target: LAMA2; (+) strand; PAM type: YTN; PAM sequence: TTA
tctgccatctgtctttcgat

SEQ ID NO: 354427 - DNA, 20 bp, Artificial Sequence
  Description of Artificial Sequence: Synthetic oligonucleotide
  Target: LAMA2; (+) strand; PAM type: YTN; PAM sequence: CTG
ccatctgtctttcgatctat

SEQ ID NO: 354428 - DNA, 20 bp, Artificial Sequence
  Description of Artificial Sequence: Synthetic oligonucleotide
  Target: LAMA2; (+) strand; PAM type: YTN; PAM sequence: CTG
tctttcgatctatctaccta

SEQ ID NO: 354429 - DNA, 20 bp, Artificial Sequence
  Description of Artificial Sequence: Synthetic oligonucleotide
  Target: LAMA2; (+) strand; PAM type: YTN; PAM sequence: CTT
tcgatctatctacctaccta

SEQ ID NO: 354430 - DNA, 20 bp, Artificial Sequence
  Description of Artificial Sequence: Synthetic oligonucleotide
  Target: LAMA2; (+) strand; PAM type: YTN; PAM sequence: TTT
cgatctatctacctacctac

SEQ ID NO: 354431 - DNA, 20 bp, Artificial Sequence
  Description of Artificial Sequence: Synthetic oligonucleotide
  Target: LAMA2; (+) strand; PAM type: YTN; PAM sequence: TTC
gatctatctacctacctacc

SEQ ID NO: 354432 - DNA, 20 bp, Artificial Sequence
  Description of Artificial Sequence: Synthetic oligonucleotide
  Target: LAMA2; (+) strand; PAM type: YTN; PAM sequence: CTA
tctacctacctacctaccta

SEQ ID NO: 354433 - DNA, 20 bp, Artificial Sequence
  Description of Artificial Sequence: Synthetic oligonucleotide
  Target: LAMA2; (+) strand; PAM type: YTN; PAM sequence: CTA
cctacctacctacctaccta

SEQ ID NO: 354434 - DNA, 20 bp, Artificial Sequence
  Description of Artificial Sequence: Synthetic oligonucleotide
  Target: LAMA2; (+) strand; PAM type: YTN; PAM sequence: CTA
cctacctacctacctaccta

SEQ ID NO: 354435 - DNA, 20 bp, Artificial Sequence
  Description of Artificial Sequence: Synthetic oligonucleotide
  Target: LAMA2; (+) strand; PAM type: YTN; PAM sequence: CTA
cctacctacctacctatcta

SEQ ID NO: 354436 - DNA, 20 bp, Artificial Sequence
  Description of Artificial Sequence: Synthetic oligonucleotide
  Target: LAMA2; (+) strand; PAM type: YTN; PAM sequence: CTA
cctacctacctatctatttt

SEQ ID NO: 354437 - DNA, 20 bp, Artificial Sequence
  Description of Artificial Sequence: Synthetic oligonucleotide
  Target: LAMA2; (+) strand; PAM type: YTN; PAM sequence: CTA
cctacctatctatttttcta

SEQ ID NO: 354438 - DNA, 20 bp, Artificial Sequence
  Description of Artificial Sequence: Synthetic oligonucleotide
  Target: LAMA2; (+) strand; PAM type: YTN; PAM sequence: CTA
cctatctatttttctacgtt

SEQ ID NO: 354439 - DNA, 20 bp, Artificial Sequence
  Description of Artificial Sequence: Synthetic oligonucleotide
  Target: LAMA2; (+) strand; PAM type: YTN; PAM sequence: CTA
tctatttttctacgtttaat

SEQ ID NO: 354440 - DNA, 20 bp, Artificial Sequence
  Description of Artificial Sequence: Synthetic oligonucleotide
  Target: LAMA2; (+) strand; PAM type: YTN; PAM sequence: CTA
tttttctacgtttaatttta

SEQ ID NO: 354441 - DNA, 20 bp, Artificial Sequence
  Description of Artificial Sequence: Synthetic oligonucleotide
  Target: LAMA2; (+) strand; PAM type: YTN; PAM sequence: TTT
ttctacgtttaattttattc

SEQ ID NO: 354442 - DNA, 20 bp, Artificial Sequence
  Description of Artificial Sequence: Synthetic oligonucleotide
  Target: LAMA2; (+) strand; PAM type: YTN; PAM sequence: TTT
tctacgtttaattttattct

SEQ ID NO: 354443 - DNA, 20 bp, Artificial Sequence
  Description of Artificial Sequence: Synthetic oligonucleotide
  Target: LAMA2; (+) strand; PAM type: YTN; PAM sequence: TTT
ctacgtttaattttattctg

SEQ ID NO: 354444 - DNA, 20 bp, Artificial Sequence
  Description of Artificial Sequence: Synthetic oligonucleotide
  Target: LAMA2; (+) strand; PAM type: YTN; PAM sequence: TTC
tacgtttaattttattctgt

SEQ ID NO: 354445 - DNA, 20 bp, Artificial Sequence
  Description of Artificial Sequence: Synthetic oligonucleotide
  Target: LAMA2; (+) strand; PAM type: YTN; PAM sequence: CTA
cgtttaattttattctgtat

SEQ ID NO: 354446 - DNA, 20 bp, Artificial Sequence
  Description of Artificial Sequence: Synthetic oligonucleotide
  Target: LAMA2; (+) strand; PAM type: YTN; PAM sequence: TTT
aattttattctgtatcttca

SEQ ID NO: 354447 - DNA, 20 bp, Artificial Sequence
  Description of Artificial Sequence: Synthetic oligonucleotide
  Target: LAMA2; (+) strand; PAM type: YTN; PAM sequence: TTA
attttattctgtatcttcaa

SEQ ID NO: 354448 - DNA, 20 bp, Artificial Sequence
  Description of Artificial Sequence: Synthetic oligonucleotide
  Target: LAMA2; (+) strand; PAM type: YTN; PAM sequence: TTT
tattctgtatcttcaactgt

SEQ ID NO: 354449 - DNA, 20 bp, Artificial Sequence
  Description of Artificial Sequence: Synthetic oligonucleotide
  Target: LAMA2; (+) strand; PAM type: YTN; PAM sequence: TTT
attctgtatcttcaactgtt

SEQ ID NO: 354450 - DNA, 20 bp, Artificial Sequence
  Description of Artificial Sequence: Synthetic oligonucleotide
  Target: LAMA2; (+) strand; PAM type: YTN; PAM sequence: TTA
ttctgtatcttcaactgttc

SEQ ID NO: 354451 - DNA, 20 bp, Artificial Sequence
  Description of Artificial Sequence: Synthetic oligonucleotide
  Target: LAMA2; (+) strand; PAM type: YTN; PAM sequence: TTC
tgtatcttcaactgttctga

SEQ ID NO: 354452 - DNA, 20 bp, Artificial Sequence
  Description of Artificial Sequence: Synthetic oligonucleotide
  Target: LAMA2; (+) strand; PAM type: YTN; PAM sequence: CTG
tatcttcaactgttctgaac

SEQ ID NO: 354453 - DNA, 20 bp, Artificial Sequence
  Description of Artificial Sequence: Synthetic oligonucleotide
  Target: LAMA2; (+) strand; PAM type: YTN; PAM sequence: CTT
caactgttctgaacaggagg

SEQ ID NO: 354454 - DNA, 20 bp, Artificial Sequence
  Description of Artificial Sequence: Synthetic oligonucleotide
  Target: LAMA2; (+) strand; PAM type: YTN; PAM sequence: TTC
aactgttctgaacaggaggg

SEQ ID NO: 354455 - DNA, 20 bp, Artificial Sequence
  Description of Artificial Sequence: Synthetic oligonucleotide
  Target: LAMA2; (+) strand; PAM type: YTN; PAM sequence: CTG
ttctgaacaggaggggtttt

SEQ ID NO: 354456 - DNA, 20 bp, Artificial Sequence
  Description of Artificial Sequence: Synthetic oligonucleotide
  Target: LAMA2; (+) strand; PAM type: YTN; PAM sequence: TTC
tgaacaggaggggttttttg

SEQ ID NO: 354457 - DNA, 20 bp, Artificial Sequence
  Description of Artificial Sequence: Synthetic oligonucleotide
  Target: LAMA2; (+) strand; PAM type: YTN; PAM sequence: CTG
aacaggaggggttttttgga

SEQ ID NO: 354458 - DNA, 20 bp, Artificial Sequence
  Description of Artificial Sequence: Synthetic oligonucleotide
  Target: LAMA2; (+) strand; PAM type: YTN; PAM sequence: TTT
tttggacatctagtctacaa

SEQ ID NO: 354459 - DNA, 20 bp, Artificial Sequence
  Description of Artificial Sequence: Synthetic oligonucleotide
  Target: LAMA2; (+) strand; PAM type: YTN; PAM sequence: TTT
ttggacatctagtctacaat

SEQ ID NO: 354460 - DNA, 20 bp, Artificial Sequence
  Description of Artificial Sequence: Synthetic oligonucleotide
  Target: LAMA2; (+) strand; PAM type: YTN; PAM sequence: TTT
tggacatctagtctacaata

SEQ ID NO: 354461 - DNA, 20 bp, Artificial Sequence
  Description of Artificial Sequence: Synthetic oligonucleotide
  Target: LAMA2; (+) strand; PAM type: YTN; PAM sequence: TTT
ggacatctagtctacaatac

SEQ ID NO: 354462 - DNA, 20 bp, Artificial Sequence
  Description of Artificial Sequence: Synthetic oligonucleotide
  Target: LAMA2; (+) strand; PAM type: YTN; PAM sequence: TTG
gacatctagtctacaatact

SEQ ID NO: 354463 - DNA, 20 bp, Artificial Sequence
  Description of Artificial Sequence: Synthetic oligonucleotide
  Target: LAMA2; (+) strand; PAM type: YTN; PAM sequence: CTA
gtctacaatacttccagaaa

SEQ ID NO: 354464 - DNA, 20 bp, Artificial Sequence
  Description of Artificial Sequence: Synthetic oligonucleotide
  Target: LAMA2; (+) strand; PAM type: YTN; PAM sequence: CTA
caatacttccagaaataaaa

SEQ ID NO: 354465 - DNA, 20 bp, Artificial Sequence
  Description of Artificial Sequence: Synthetic oligonucleotide
  Target: LAMA2; (+) strand; PAM type: YTN; PAM sequence: CTT
ccagaaataaaagttaagat

SEQ ID NO: 354466 - DNA, 20 bp, Artificial Sequence
  Description of Artificial Sequence: Synthetic oligonucleotide
  Target: LAMA2; (+) strand; PAM type: YTN; PAM sequence: TTC
cagaaataaaagttaagata

SEQ ID NO: 354467 - DNA, 20 bp, Artificial Sequence
  Description of Artificial Sequence: Synthetic oligonucleotide
  Target: LAMA2; (+) strand; PAM type: YTN; PAM sequence: TTA
agatagacattgtttaatac

SEQ ID NO: 354468 - DNA, 20 bp, Artificial Sequence
  Description of Artificial Sequence: Synthetic oligonucleotide
  Target: LAMA2; (+) strand; PAM type: YTN; PAM sequence: TTG
tttaatacatgaagtacttc

SEQ ID NO: 354469 - DNA, 20 bp, Artificial Sequence
  Description of Artificial Sequence: Synthetic oligonucleotide
  Target: LAMA2; (+) strand; PAM type: YTN; PAM sequence: TTT
aatacatgaagtacttctac

SEQ ID NO: 354470 - DNA, 20 bp, Artificial Sequence
  Description of Artificial Sequence: Synthetic oligonucleotide
  Target: LAMA2; (+) strand; PAM type: YTN; PAM sequence: TTA
atacatgaagtacttctaca

SEQ ID NO: 354471 - DNA, 20 bp, Artificial Sequence
  Description of Artificial Sequence: Synthetic oligonucleotide
  Target: LAMA2; (+) strand; PAM type: YTN; PAM sequence: CTT
ctacatttagcctcaatttc

SEQ ID NO: 354472 - DNA, 20 bp, Artificial Sequence
  Description of Artificial Sequence: Synthetic oligonucleotide
  Target: LAMA2; (+) strand; PAM type: YTN; PAM sequence: TTC
tacatttagcctcaatttct

SEQ ID NO: 354473 - DNA, 20 bp, Artificial Sequence
  Description of Artificial Sequence: Synthetic oligonucleotide
  Target: LAMA2; (+) strand; PAM type: YTN; PAM sequence: CTA
catttagcctcaatttctgg

SEQ ID NO: 354474 - DNA, 20 bp, Artificial Sequence
  Description of Artificial Sequence: Synthetic oligonucleotide
  Target: LAMA2; (+) strand; PAM type: YTN; PAM sequence: TTT
agcctcaatttctggaaatt

SEQ ID NO: 354475 - DNA, 20 bp, Artificial Sequence
  Description of Artificial Sequence: Synthetic oligonucleotide
  Target: LAMA2; (+) strand; PAM type: YTN; PAM sequence: TTA
gcctcaatttctggaaattt

SEQ ID NO: 354476 - DNA, 20 bp, Artificial Sequence
  Description of Artificial Sequence: Synthetic oligonucleotide
  Target: LAMA2; (+) strand; PAM type: YTN; PAM sequence: CTC
aatttctggaaattttaaca

SEQ ID NO: 354477 - DNA, 20 bp, Artificial Sequence
  Description of Artificial Sequence: Synthetic oligonucleotide
  Target: LAMA2; (+) strand; PAM type: YTN; PAM sequence: TTT
ctggaaattttaacatcaga

SEQ ID NO: 354478 - DNA, 20 bp, Artificial Sequence
  Description of Artificial Sequence: Synthetic oligonucleotide
  Target: LAMA2; (+) strand; PAM type: YTN; PAM sequence: TTC
tggaaattttaacatcagaa

SEQ ID NO: 354479 - DNA, 20 bp, Artificial Sequence
  Description of Artificial Sequence: Synthetic oligonucleotide
  Target: LAMA2; (+) strand; PAM type: YTN; PAM sequence: CTG
gaaattttaacatcagaaat

SEQ ID NO: 354480 - DNA, 20 bp, Artificial Sequence
  Description of Artificial Sequence: Synthetic oligonucleotide
  Target: LAMA2; (+) strand; PAM type: YTN; PAM sequence: TTT
taacatcagaaataatgtta

SEQ ID NO: 354481 - DNA, 20 bp, Artificial Sequence
  Description of Artificial Sequence: Synthetic oligonucleotide
  Target: LAMA2; (+) strand; PAM type: YTN; PAM sequence: TTT
aacatcagaaataatgttaa

SEQ ID NO: 354482 - DNA, 20 bp, Artificial Sequence
  Description of Artificial Sequence: Synthetic oligonucleotide
  Target: LAMA2; (+) strand; PAM type: YTN; PAM sequence: TTA
acatcagaaataatgttaaa

SEQ ID NO: 354483 - DNA, 20 bp, Artificial Sequence
  Description of Artificial Sequence: Synthetic oligonucleotide
  Target: LAMA2; (+) strand; PAM type: YTN; PAM sequence: TTA
aactatttaatgcctttgca

SEQ ID NO: 354484 - DNA, 20 bp, Artificial Sequence
  Description of Artificial Sequence: Synthetic oligonucleotide
  Target: LAMA2; (+) strand; PAM type: YTN; PAM sequence: CTA
tttaatgcctttgcaaactt

SEQ ID NO: 354485 - DNA, 20 bp, Artificial Sequence
  Description of Artificial Sequence: Synthetic oligonucleotide
  Target: LAMA2; (+) strand; PAM type: YTN; PAM sequence: TTT
aatgcctttgcaaactttat

SEQ ID NO: 354486 - DNA, 20 bp, Artificial Sequence
  Description of Artificial Sequence: Synthetic oligonucleotide
  Target: LAMA2; (+) strand; PAM type: YTN; PAM sequence: TTA
atgcctttgcaaactttatt

SEQ ID NO: 354487 - DNA, 20 bp, Artificial Sequence
  Description of Artificial Sequence: Synthetic oligonucleotide
  Target: LAMA2; (+) strand; PAM type: YTN; PAM sequence: CTT
tgcaaactttattaaaatta

SEQ ID NO: 354488 - DNA, 20 bp, Artificial Sequence
  Description of Artificial Sequence: Synthetic oligonucleotide
  Target: LAMA2; (+) strand; PAM type: YTN; PAM sequence: TTT
gcaaactttattaaaattat

SEQ ID NO: 354489 - DNA, 20 bp, Artificial Sequence
  Description of Artificial Sequence: Synthetic oligonucleotide
  Target: LAMA2; (+) strand; PAM type: YTN; PAM sequence: TTG
caaactttattaaaattatc

SEQ ID NO: 354490 - DNA, 20 bp, Artificial Sequence
  Description of Artificial Sequence: Synthetic oligonucleotide
  Target: LAMA2; (+) strand; PAM type: YTN; PAM sequence: CTT
tattaaaattatcagattta

SEQ ID NO: 354491 - DNA, 20 bp, Artificial Sequence
  Description of Artificial Sequence: Synthetic oligonucleotide
  Target: LAMA2; (+) strand; PAM type: YTN; PAM sequence: TTT
attaaaattatcagatttat

SEQ ID NO: 354492 - DNA, 20 bp, Artificial Sequence
  Description of Artificial Sequence: Synthetic oligonucleotide
  Target: LAMA2; (+) strand; PAM type: YTN; PAM sequence: TTA
ttaaaattatcagatttatt

SEQ ID NO: 354493 - DNA, 20 bp, Artificial Sequence
  Description of Artificial Sequence: Synthetic oligonucleotide
  Target: LAMA2; (+) strand; PAM type: YTN; PAM sequence: TTA
aaattatcagatttatttcc

SEQ ID NO: 354494 - DNA, 20 bp, Artificial Sequence
  Description of Artificial Sequence: Synthetic oligonucleotide
  Target: LAMA2; (+) strand; PAM type: YTN; PAM sequence: TTA
tcagatttatttcccatttg

SEQ ID NO: 354495 - DNA, 20 bp, Artificial Sequence
  Description of Artificial Sequence: Synthetic oligonucleotide
  Target: LAMA2; (+) strand; PAM type: YTN; PAM sequence: TTT
atttcccatttggtctattg

SEQ ID NO: 354496 - DNA, 20 bp, Artificial Sequence
  Description of Artificial Sequence: Synthetic oligonucleotide
  Target: LAMA2; (+) strand; PAM type: YTN; PAM sequence: TTA
tttcccatttggtctattgg

SEQ ID NO: 354497 - DNA, 20 bp, Artificial Sequence
  Description of Artificial Sequence: Synthetic oligonucleotide
  Target: LAMA2; (+) strand; PAM type: YTN; PAM sequence: TTT
cccatttggtctattgggta

SEQ ID NO: 354498 - DNA, 20 bp, Artificial Sequence
  Description of Artificial Sequence: Synthetic oligonucleotide
  Target: LAMA2; (+) strand; PAM type: YTN; PAM sequence: TTC
ccatttggtctattgggtaa

SEQ ID NO: 354499 - DNA, 20 bp, Artificial Sequence
  Description of Artificial Sequence: Synthetic oligonucleotide
  Target: LAMA2; (+) strand; PAM type: YTN; PAM sequence: TTT
ggtctattgggtaatctatt

SEQ ID NO: 354500 - DNA, 20 bp, Artificial Sequence
  Description of Artificial Sequence: Synthetic oligonucleotide
  Target: LAMA2; (+) strand; PAM type: YTN; PAM sequence: TTG
gtctattgggtaatctatta

SEQ ID NO: 354501 - DNA, 20 bp, Artificial Sequence
  Description of Artificial Sequence: Synthetic oligonucleotide
  Target: LAMA2; (+) strand; PAM type: YTN; PAM sequence: CTA
ttgggtaatctattagaaac

SEQ ID NO: 354502 - DNA, 20 bp, Artificial Sequence
  Description of Artificial Sequence: Synthetic oligonucleotide
  Target: LAMA2; (+) strand; PAM type: YTN; PAM sequence: TTG
ggtaatctattagaaacgaa

SEQ ID NO: 354503 - DNA, 20 bp, Artificial Sequence
  Description of Artificial Sequence: Synthetic oligonucleotide
  Target: LAMA2; (+) strand; PAM type: YTN; PAM sequence: CTA
ttagaaacgaacttactaat

SEQ ID NO: 354504 - DNA, 20 bp, Artificial Sequence
  Description of Artificial Sequence: Synthetic oligonucleotide
  Target: LAMA2; (+) strand; PAM type: YTN; PAM sequence: TTA
gaaacgaacttactaatatc

SEQ ID NO: 354505 - DNA, 20 bp, Artificial Sequence
  Description of Artificial Sequence: Synthetic oligonucleotide
  Target: LAMA2; (+) strand; PAM type: YTN; PAM sequence: CTT
actaatatcaaacaatattt

SEQ ID NO: 354506 - DNA, 20 bp, Artificial Sequence
  Description of Artificial Sequence: Synthetic oligonucleotide
  Target: LAMA2; (+) strand; PAM type: YTN; PAM sequence: TTA
ctaatatcaaacaatattta

SEQ ID NO: 354507 - DNA, 20 bp, Artificial Sequence
  Description of Artificial Sequence: Synthetic oligonucleotide
  Target: LAMA2; (+) strand; PAM type: YTN; PAM sequence: CTA
atatcaaacaatatttattt

SEQ ID NO: 354508 - DNA, 20 bp, Artificial Sequence
  Description of Artificial Sequence: Synthetic oligonucleotide
  Target: LAMA2; (+) strand; PAM type: YTN; PAM sequence: TTT
attttaccagagtatgttct

SEQ ID NO: 354509 - DNA, 20 bp, Artificial Sequence
  Description of Artificial Sequence: Synthetic oligonucleotide
  Target: LAMA2; (+) strand; PAM type: YTN; PAM sequence: TTA
ttttaccagagtatgttcta

SEQ ID NO: 354510 - DNA, 20 bp, Artificial Sequence
  Description of Artificial Sequence: Synthetic oligonucleotide
  Target: LAMA2; (+) strand; PAM type: YTN; PAM sequence: TTT
taccagagtatgttctactt

SEQ ID NO: 354511 - DNA, 20 bp, Artificial Sequence
  Description of Artificial Sequence: Synthetic oligonucleotide
  Target: LAMA2; (+) strand; PAM type: YTN; PAM sequence: TTT
accagagtatgttctacttg

SEQ ID NO: 354512 - DNA, 20 bp, Artificial Sequence
  Description of Artificial Sequence: Synthetic oligonucleotide
  Target: LAMA2; (+) strand; PAM type: YTN; PAM sequence: TTA
ccagagtatgttctacttgg

SEQ ID NO: 354513 - DNA, 20 bp, Artificial Sequence
  Description of Artificial Sequence: Synthetic oligonucleotide
  Target: LAMA2; (+) strand; PAM type: YTN; PAM sequence: TTC
tacttggacatcatagagga

SEQ ID NO: 354514 - DNA, 20 bp, Artificial Sequence
  Description of Artificial Sequence: Synthetic oligonucleotide
  Target: LAMA2; (+) strand; PAM type: YTN; PAM sequence: CTA
cttggacatcatagaggatc

SEQ ID NO: 354515 - DNA, 20 bp, Artificial Sequence
  Description of Artificial Sequence: Synthetic oligonucleotide
  Target: LAMA2; (+) strand; PAM type: YTN; PAM sequence: CTT
ggacatcatagaggatcctt

SEQ ID NO: 354516 - DNA, 20 bp, Artificial Sequence
  Description of Artificial Sequence: Synthetic oligonucleotide
  Target: LAMA2; (+) strand; PAM type: YTN; PAM sequence: TTG
gacatcatagaggatccttt

SEQ ID NO: 354517 - DNA, 20 bp, Artificial Sequence
  Description of Artificial Sequence: Synthetic oligonucleotide
  Target: LAMA2; (+) strand; PAM type: YTN; PAM sequence: CTT
ttaatgtactttaggattca

SEQ ID NO: 354518 - DNA, 20 bp, Artificial Sequence
  Description of Artificial Sequence: Synthetic oligonucleotide
  Target: LAMA2; (+) strand; PAM type: YTN; PAM sequence: TTT
taatgtactttaggattcag

SEQ ID NO: 354519 - DNA, 20 bp, Artificial Sequence
  Description of Artificial Sequence: Synthetic oligonucleotide
  Target: LAMA2; (+) strand; PAM type: YTN; PAM sequence: TTT
aatgtactttaggattcagt

SEQ ID NO: 354520 - DNA, 20 bp, Artificial Sequence
  Description of Artificial Sequence: Synthetic oligonucleotide
  Target: LAMA2; (+) strand; PAM type: YTN; PAM sequence: TTA
atgtactttaggattcagtt

SEQ ID NO: 354521 - DNA, 20 bp, Artificial Sequence
  Description of Artificial Sequence: Synthetic oligonucleotide
  Target: LAMA2; (+) strand; PAM type: YTN; PAM sequence: CTT
taggattcagtttggtgttt

SEQ ID NO: 354522 - DNA, 20 bp, Artificial Sequence
  Description of Artificial Sequence: Synthetic oligonucleotide
  Target: LAMA2; (+) strand; PAM type: YTN; PAM sequence: TTT
aggattcagtttggtgtttt

SEQ ID NO: 354523 - DNA, 20 bp, Artificial Sequence
  Description of Artificial Sequence: Synthetic oligonucleotide
  Target: LAMA2; (+) strand; PAM type: YTN; PAM sequence: TTA
ggattcagtttggtgttttg

SEQ ID NO: 354524 - DNA, 20 bp, Artificial Sequence
  Description of Artificial Sequence: Synthetic oligonucleotide
  Target: LAMA2; (+) strand; PAM type: YTN; PAM sequence: TTC
agtttggtgttttgctcatc

SEQ ID NO: 354525 - DNA, 20 bp, Artificial Sequence
  Description of Artificial Sequence: Synthetic oligonucleotide
  Target: LAMA2; (+) strand; PAM type: YTN; PAM sequence: TTT
ggtgttttgctcatctggat

SEQ ID NO: 354526 - DNA, 20 bp, Artificial Sequence
  Description of Artificial Sequence: Synthetic oligonucleotide
  Target: LAMA2; (+) strand; PAM type: YTN; PAM sequence: TTG
gtgttttgctcatctggatt

SEQ ID NO: 354527 - DNA, 20 bp, Artificial Sequence
  Description of Artificial Sequence: Synthetic oligonucleotide
  Target: LAMA2; (+) strand; PAM type: YTN; PAM sequence: TTT
tgctcatctggattcataag

SEQ ID NO: 354528 - DNA, 20 bp, Artificial Sequence
  Description of Artificial Sequence: Synthetic oligonucleotide
  Target: LAMA2; (+) strand; PAM type: YTN; PAM sequence: TTT
gctcatctggattcataagt

SEQ ID NO: 354529 - DNA, 20 bp, Artificial Sequence
  Description of Artificial Sequence: Synthetic oligonucleotide
  Target: LAMA2; (+) strand; PAM type: YTN; PAM sequence: TTG
ctcatctggattcataagtt

SEQ ID NO: 354530 - DNA, 20 bp, Artificial Sequence
  Description of Artificial Sequence: Synthetic oligonucleotide
  Target: LAMA2; (+) strand; PAM type: YTN; PAM sequence: CTC
atctggattcataagttaat

SEQ ID NO: 354531 - DNA, 20 bp, Artificial Sequence
  Description of Artificial Sequence: Synthetic oligonucleotide
  Target: LAMA2; (+) strand; PAM type: YTN; PAM sequence: CTG
gattcataagttaattgcct

SEQ ID NO: 354532 - DNA, 20 bp, Artificial Sequence
  Description of Artificial Sequence: Synthetic oligonucleotide
  Target: LAMA2; (+) strand; PAM type: YTN; PAM sequence: TTC
ataagttaattgcctgtgac

SEQ ID NO: 354533 - DNA, 20 bp, Artificial Sequence
  Description of Artificial Sequence: Synthetic oligonucleotide
  Target: LAMA2; (+) strand; PAM type: YTN; PAM sequence: TTA
attgcctgtgactcagacac

SEQ ID NO: 354534 - DNA, 20 bp, Artificial Sequence
  Description of Artificial Sequence: Synthetic oligonucleotide
  Target: LAMA2; (+) strand; PAM type: YTN; PAM sequence: TTG
cctgtgactcagacacccac

SEQ ID NO: 354535 - DNA, 20 bp, Artificial Sequence
  Description of Artificial Sequence: Synthetic oligonucleotide
  Target: LAMA2; (+) strand; PAM type: YTN; PAM sequence: CTG
tgactcagacacccaccagt

SEQ ID NO: 354536 - DNA, 20 bp, Artificial Sequence
  Description of Artificial Sequence: Synthetic oligonucleotide
  Target: LAMA2; (+) strand; PAM type: YTN; PAM sequence: CTC
agacacccaccagttgtgct

SEQ ID NO: 354537 - DNA, 20 bp, Artificial Sequence
  Description of Artificial Sequence: Synthetic oligonucleotide
  Target: LAMA2; (+) strand; PAM type: YTN; PAM sequence: TTG
tgctcctttggcaaatcact

SEQ ID NO: 354538 - DNA, 20 bp, Artificial Sequence
  Description of Artificial Sequence: Synthetic oligonucleotide
  Target: LAMA2; (+) strand; PAM type: YTN; PAM sequence: CTC
ctttggcaaatcacttaatt

SEQ ID NO: 354539 - DNA, 20 bp, Artificial Sequence
  Description of Artificial Sequence: Synthetic oligonucleotide
  Target: LAMA2; (+) strand; PAM type: YTN; PAM sequence: CTT
tggcaaatcacttaatttct

SEQ ID NO: 354540 - DNA, 20 bp, Artificial Sequence
  Description of Artificial Sequence: Synthetic oligonucleotide
  Target: LAMA2; (+) strand; PAM type: YTN; PAM sequence: TTT
ggcaaatcacttaatttctc

SEQ ID NO: 354541 - DNA, 20 bp, Artificial Sequence
  Description of Artificial Sequence: Synthetic oligonucleotide
  Target: LAMA2; (+) strand; PAM type: YTN; PAM sequence: TTG
gcaaatcacttaatttctcc

SEQ ID NO: 354542 - DNA, 20 bp, Artificial Sequence
  Description of Artificial Sequence: Synthetic oligonucleotide
  Target: LAMA2; (+) strand; PAM type: YTN; PAM sequence: CTT
aatttctccatgccttagtt

SEQ ID NO: 354543 - DNA, 20 bp, Artificial Sequence
  Description of Artificial Sequence: Synthetic oligonucleotide
  Target: LAMA2; (+) strand; PAM type: YTN; PAM sequence: TTA
atttctccatgccttagtta

SEQ ID NO: 354544 - DNA, 20 bp, Artificial Sequence
  Description of Artificial Sequence: Synthetic oligonucleotide
  Target: LAMA2; (+) strand; PAM type: YTN; PAM sequence: TTT
ctccatgccttagttacctc

SEQ ID NO: 354545 - DNA, 20 bp, Artificial Sequence
  Description of Artificial Sequence: Synthetic oligonucleotide
  Target: LAMA2; (+) strand; PAM type: YTN; PAM sequence: TTC
tccatgccttagttacctca

SEQ ID NO: 354546 - DNA, 20 bp, Artificial Sequence
  Description of Artificial Sequence: Synthetic oligonucleotide
  Target: LAMA2; (+) strand; PAM type: YTN; PAM sequence: CTC
catgccttagttacctcatc

SEQ ID NO: 354547 - DNA, 20 bp, Artificial Sequence
  Description of Artificial Sequence: Synthetic oligonucleotide
  Target: LAMA2; (+) strand; PAM type: YTN; PAM sequence: CTT
agttacctcatctgtgaaac

SEQ ID NO: 354548 - DNA, 20 bp, Artificial Sequence
  Description of Artificial Sequence: Synthetic oligonucleotide
  Target: LAMA2; (+) strand; PAM type: YTN; PAM sequence: TTA
gttacctcatctgtgaaaca

SEQ ID NO: 354549 - DNA, 20 bp, Artificial Sequence
  Description of Artificial Sequence: Synthetic oligonucleotide
  Target: LAMA2; (+) strand; PAM type: YTN; PAM sequence: TTA
cctcatctgtgaaacaggaa

SEQ ID NO: 354550 - DNA, 20 bp, Artificial Sequence
  Description of Artificial Sequence: Synthetic oligonucleotide
  Target: LAMA2; (+) strand; PAM type: YTN; PAM sequence: CTC
atctgtgaaacaggaaaaat

SEQ ID NO: 354551 - DNA, 20 bp, Artificial Sequence
  Description of Artificial Sequence: Synthetic oligonucleotide
  Target: LAMA2; (+) strand; PAM type: YTN; PAM sequence: CTG
tgaaacaggaaaaataatag

SEQ ID NO: 354552 - DNA, 20 bp, Artificial Sequence
  Description of Artificial Sequence: Synthetic oligonucleotide
  Target: LAMA2; (+) strand; PAM type: YTN; PAM sequence: CTA
tctcatatagatgttttgag

SEQ ID NO: 354553 - DNA, 20 bp, Artificial Sequence
  Description of Artificial Sequence: Synthetic oligonucleotide
  Target: LAMA2; (+) strand; PAM type: YTN; PAM sequence: CTC
atatagatgttttgagtact

SEQ ID NO: 354554 - DNA, 20 bp, Artificial Sequence
  Description of Artificial Sequence: Synthetic oligonucleotide
  Target: LAMA2; (+) strand; PAM type: YTN; PAM sequence: TTT
tgagtactaactgaattaac

SEQ ID NO: 354555 - DNA, 20 bp, Artificial Sequence
  Description of Artificial Sequence: Synthetic oligonucleotide
  Target: LAMA2; (+) strand; PAM type: YTN; PAM sequence: TTT
gagtactaactgaattaacc

SEQ ID NO: 354556 - DNA, 20 bp, Artificial Sequence
  Description of Artificial Sequence: Synthetic oligonucleotide
  Target: LAMA2; (+) strand; PAM type: YTN; PAM sequence: TTG
agtactaactgaattaaccc

SEQ ID NO: 354557 - DNA, 20 bp, Artificial Sequence
  Description of Artificial Sequence: Synthetic oligonucleotide
  Target: LAMA2; (+) strand; PAM type: YTN; PAM sequence: CTA
actgaattaacccctgtgtt

SEQ ID NO: 354558 - DNA, 20 bp, Artificial Sequence
  Description of Artificial Sequence: Synthetic oligonucleotide
  Target: LAMA2; (+) strand; PAM type: YTN; PAM sequence: CTG
aattaacccctgtgttttgt

SEQ ID NO: 354559 - DNA, 20 bp, Artificial Sequence
  Description of Artificial Sequence: Synthetic oligonucleotide
  Target: LAMA2; (+) strand; PAM type: YTN; PAM sequence: TTA
acccctgtgttttgtgtaat

SEQ ID NO: 354560 - DNA, 20 bp, Artificial Sequence
  Description of Artificial Sequence: Synthetic oligonucleotide
  Target: LAMA2; (+) strand; PAM type: YTN; PAM sequence: CTG
tgttttgtgtaatgctaagt

SEQ ID NO: 354561 - DNA, 20 bp, Artificial Sequence
  Description of Artificial Sequence: Synthetic oligonucleotide
  Target: LAMA2; (+) strand; PAM type: YTN; PAM sequence: TTT
tgtgtaatgctaagtataat

SEQ ID NO: 354562 - DNA, 20 bp, Artificial Sequence
  Description of Artificial Sequence: Synthetic oligonucleotide
  Target: LAMA2; (+) strand; PAM type: YTN; PAM sequence: TTT
gtgtaatgctaagtataatg

SEQ ID NO: 354563 - DNA, 20 bp, Artificial Sequence
  Description of Artificial Sequence: Synthetic oligonucleotide
  Target: LAMA2; (+) strand; PAM type: YTN; PAM sequence: TTG
tgtaatgctaagtataatga

SEQ ID NO: 354564 - DNA, 20 bp, Artificial Sequence
  Description of Artificial Sequence: Synthetic oligonucleotide
  Target: LAMA2; (+) strand; PAM type: YTN; PAM sequence: CTA
agtataatgactaccataag

SEQ ID NO: 354565 - DNA, 20 bp, Artificial Sequence
  Description of Artificial Sequence: Synthetic oligonucleotide
  Target: LAMA2; (+) strand; PAM type: YTN; PAM sequence: CTA
ccataagataagtgctattt

SEQ ID NO: 354566 - DNA, 20 bp, Artificial Sequence
  Description of Artificial Sequence: Synthetic oligonucleotide
  Target: LAMA2; (+) strand; PAM type: YTN; PAM sequence: CTA
tttgagtcttagaagttttg

SEQ ID NO: 354567 - DNA, 20 bp, Artificial Sequence
  Description of Artificial Sequence: Synthetic oligonucleotide
  Target: LAMA2; (+) strand; PAM type: YTN; PAM sequence: TTT
gagtcttagaagttttgttt

SEQ ID NO: 354568 - DNA, 20 bp, Artificial Sequence
  Description of Artificial Sequence: Synthetic oligonucleotide
  Target: LAMA2; (+) strand; PAM type: YTN; PAM sequence: TTG
agtcttagaagttttgttta

SEQ ID NO: 354569 - DNA, 20 bp, Artificial Sequence
  Description of Artificial Sequence: Synthetic oligonucleotide
  Target: LAMA2; (+) strand; PAM type: YTN; PAM sequence: CTT
agaagttttgtttatttggg

SEQ ID NO: 354570 - DNA, 20 bp, Artificial Sequence
  Description of Artificial Sequence: Synthetic oligonucleotide
  Target: LAMA2; (+) strand; PAM type: YTN; PAM sequence: TTA
gaagttttgtttatttgggg

SEQ ID NO: 354571 - DNA, 20 bp, Artificial Sequence
  Description of Artificial Sequence: Synthetic oligonucleotide
  Target: LAMA2; (+) strand; PAM type: YTN; PAM sequence: TTT
tgtttatttggggttatcat

SEQ ID NO: 354572 - DNA, 20 bp, Artificial Sequence
  Description of Artificial Sequence: Synthetic oligonucleotide
  Target: LAMA2; (+) strand; PAM type: YTN; PAM sequence: TTT
gtttatttggggttatcatt

SEQ ID NO: 354573 - DNA, 20 bp, Artificial Sequence
  Description of Artificial Sequence: Synthetic oligonucleotide
  Target: LAMA2; (+) strand; PAM type: YTN; PAM sequence: TTG
tttatttggggttatcattt

SEQ ID NO: 354574 - DNA, 20 bp, Artificial Sequence
  Description of Artificial Sequence: Synthetic oligonucleotide
  Target: LAMA2; (+) strand; PAM type: YTN; PAM sequence: TTT
atttggggttatcatttgca

SEQ ID NO: 354575 - DNA, 20 bp, Artificial Sequence
  Description of Artificial Sequence: Synthetic oligonucleotide
  Target: LAMA2; (+) strand; PAM type: YTN; PAM sequence: TTA
tttggggttatcatttgcat

SEQ ID NO: 354576 - DNA, 20 bp, Artificial Sequence
  Description of Artificial Sequence: Synthetic oligonucleotide
  Target: LAMA2; (+) strand; PAM type: YTN; PAM sequence: TTT
ggggttatcatttgcatttg

SEQ ID NO: 354577 - DNA, 20 bp, Artificial Sequence
  Description of Artificial Sequence: Synthetic oligonucleotide
  Target: LAMA2; (+) strand; PAM type: YTN; PAM sequence: TTG
gggttatcatttgcatttgg

SEQ ID NO: 354578 - DNA, 20 bp, Artificial Sequence
  Description of Artificial Sequence: Synthetic oligonucleotide
  Target: LAMA2; (+) strand; PAM type: YTN; PAM sequence: TTA
tcatttgcatttgggtatca

SEQ ID NO: 354579 - DNA, 20 bp, Artificial Sequence
  Description of Artificial Sequence: Synthetic oligonucleotide
  Target: LAMA2; (+) strand; PAM type: YTN; PAM sequence: TTT
gcatttgggtatcaagttag

SEQ ID NO: 354580 - DNA, 20 bp, Artificial Sequence
  Description of Artificial Sequence: Synthetic oligonucleotide
  Target: LAMA2; (+) strand; PAM type: YTN; PAM sequence: TTG
catttgggtatcaagttaga

SEQ ID NO: 354581 - DNA, 20 bp, Artificial Sequence
  Description of Artificial Sequence: Synthetic oligonucleotide
  Target: LAMA2; (+) strand; PAM type: YTN; PAM sequence: TTT
gggtatcaagttagaatttg

SEQ ID NO: 354582 - DNA, 20 bp, Artificial Sequence
  Description of Artificial Sequence: Synthetic oligonucleotide
  Target: LAMA2; (+) strand; PAM type: YTN; PAM sequence: TTG
ggtatcaagttagaatttgc

SEQ ID NO: 354583 - DNA, 20 bp, Artificial Sequence
  Description of Artificial Sequence: Synthetic oligonucleotide
  Target: LAMA2; (+) strand; PAM type: YTN; PAM sequence: TTA
gaatttgcttcataaattga

SEQ ID NO: 354584 - DNA, 20 bp, Artificial Sequence
  Description of Artificial Sequence: Synthetic oligonucleotide
  Target: LAMA2; (+) strand; PAM type: YTN; PAM sequence: TTT
gcttcataaattgaattaca

SEQ ID NO: 354585 - DNA, 20 bp, Artificial Sequence
  Description of Artificial Sequence: Synthetic oligonucleotide
  Target: LAMA2; (+) strand; PAM type: YTN; PAM sequence: TTG
cttcataaattgaattacat

SEQ ID NO: 354586 - DNA, 20 bp, Artificial Sequence
  Description of Artificial Sequence: Synthetic oligonucleotide
  Target: LAMA2; (+) strand; PAM type: YTN; PAM sequence: CTT
cataaattgaattacatagc

SEQ ID NO: 354587 - DNA, 20 bp, Artificial Sequence
  Description of Artificial Sequence: Synthetic oligonucleotide
  Target: LAMA2; (+) strand; PAM type: YTN; PAM sequence: TTC
ataaattgaattacatagct

SEQ ID NO: 354588 - DNA, 20 bp, Artificial Sequence
  Description of Artificial Sequence: Synthetic oligonucleotide
  Target: LAMA2; (+) strand; PAM type: YTN; PAM sequence: TTG
aattacatagctctccattt

SEQ ID NO: 354589 - DNA, 20 bp, Artificial Sequence
  Description of Artificial Sequence: Synthetic oligonucleotide
  Target: LAMA2; (+) strand; PAM type: YTN; PAM sequence: TTA
catagctctccatttttata

SEQ ID NO: 354590 - DNA, 20 bp, Artificial Sequence
  Description of Artificial Sequence: Synthetic oligonucleotide
  Target: LAMA2; (+) strand; PAM type: YTN; PAM sequence: CTC
tccatttttatatgaccata

SEQ ID NO: 354591 - DNA, 20 bp, Artificial Sequence
  Description of Artificial Sequence: Synthetic oligonucleotide
  Target: LAMA2; (+) strand; PAM type: YTN; PAM sequence: CTC
catttttatatgaccataag

SEQ ID NO: 354592 - DNA, 20 bp, Artificial Sequence
  Description of Artificial Sequence: Synthetic oligonucleotide
  Target: LAMA2; (+) strand; PAM type: YTN; PAM sequence: TTT
ttatatgaccataagagttt

SEQ ID NO: 354593 - DNA, 20 bp, Artificial Sequence
  Description of Artificial Sequence: Synthetic oligonucleotide
  Target: LAMA2; (+) strand; PAM type: YTN; PAM sequence: TTT
tatatgaccataagagtttc

SEQ ID NO: 354594 - DNA, 20 bp, Artificial Sequence
  Description of Artificial Sequence: Synthetic oligonucleotide
  Target: LAMA2; (+) strand; PAM type: YTN; PAM sequence: TTT
atatgaccataagagtttca

SEQ ID NO: 354595 - DNA, 20 bp, Artificial Sequence
  Description of Artificial Sequence: Synthetic oligonucleotide
  Target: LAMA2; (+) strand; PAM type: YTN; PAM sequence: TTA
tatgaccataagagtttcaa

SEQ ID NO: 354596 - DNA, 20 bp, Artificial Sequence
  Description of Artificial Sequence: Synthetic oligonucleotide
  Target: LAMA2; (+) strand; PAM type: YTN; PAM sequence: TTT
caagttttgaaaacagtctg

SEQ ID NO: 354597 - DNA, 20 bp, Artificial Sequence
  Description of Artificial Sequence: Synthetic oligonucleotide
  Target: LAMA2; (+) strand; PAM type: YTN; PAM sequence: TTC
aagttttgaaaacagtctgt

SEQ ID NO: 354598 - DNA, 20 bp, Artificial Sequence
  Description of Artificial Sequence: Synthetic oligonucleotide
  Target: LAMA2; (+) strand; PAM type: YTN; PAM sequence: TTT
tgaaaacagtctgtaaaaat

SEQ ID NO: 354599 - DNA, 20 bp, Artificial Sequence
  Description of Artificial Sequence: Synthetic oligonucleotide
  Target: LAMA2; (+) strand; PAM type: YTN; PAM sequence: TTT
gaaaacagtctgtaaaaatt

SEQ ID NO: 354600 - DNA, 20 bp, Artificial Sequence
  Description of Artificial Sequence: Synthetic oligonucleotide
  Target: LAMA2; (+) strand; PAM type: YTN; PAM sequence: TTG
aaaacagtctgtaaaaatta

SEQ ID NO: 354601 - DNA, 20 bp, Artificial Sequence
  Description of Artificial Sequence: Synthetic oligonucleotide
  Target: LAMA2; (+) strand; PAM type: YTN; PAM sequence: CTG
taaaaattaactagcattac

SEQ ID NO: 354602 - DNA, 20 bp, Artificial Sequence
  Description of Artificial Sequence: Synthetic oligonucleotide
  Target: LAMA2; (+) strand; PAM type: YTN; PAM sequence: TTA
actagcattacagaaaacca

SEQ ID NO: 354603 - DNA, 20 bp, Artificial Sequence
  Description of Artificial Sequence: Synthetic oligonucleotide
  Target: LAMA2; (+) strand; PAM type: YTN; PAM sequence: CTA
gcattacagaaaaccaaaca

SEQ ID NO: 354604 - DNA, 20 bp, Artificial Sequence
  Description of Artificial Sequence: Synthetic oligonucleotide
  Target: LAMA2; (+) strand; PAM type: YTN; PAM sequence: TTA
cagaaaaccaaacaccgcat

SEQ ID NO: 354605 - DNA, 20 bp, Artificial Sequence
  Description of Artificial Sequence: Synthetic oligonucleotide
  Target: LAMA2; (+) strand; PAM type: YTN; PAM sequence: TTC
ttactcgtaagtgggagttg

SEQ ID NO: 354606 - DNA, 20 bp, Artificial Sequence
  Description of Artificial Sequence: Synthetic oligonucleotide
  Target: LAMA2; (+) strand; PAM type: YTN; PAM sequence: CTT
actcgtaagtgggagttgaa

SEQ ID NO: 354607 - DNA, 20 bp, Artificial Sequence
  Description of Artificial Sequence: Synthetic oligonucleotide
  Target: LAMA2; (+) strand; PAM type: YTN; PAM sequence: TTA
ctcgtaagtgggagttgaac

SEQ ID NO: 354608 - DNA, 20 bp, Artificial Sequence
  Description of Artificial Sequence: Synthetic oligonucleotide
  Target: LAMA2; (+) strand; PAM type: YTN; PAM sequence: CTC
gtaagtgggagttgaacaat

SEQ ID NO: 354609 - DNA, 20 bp, Artificial Sequence
  Description of Artificial Sequence: Synthetic oligonucleotide
  Target: LAMA2; (+) strand; PAM type: YTN; PAM sequence: TTG
aacaatgagaacacatgaac

SEQ ID NO: 354610 - DNA, 20 bp, Artificial Sequence
  Description of Artificial Sequence: Synthetic oligonucleotide
  Target: LAMA2; (+) strand; PAM type: YTN; PAM sequence: CTG
tcagtgggtgggggtctagg

SEQ ID NO: 354611 - DNA, 20 bp, Artificial Sequence
  Description of Artificial Sequence: Synthetic oligonucleotide
  Target: LAMA2; (+) strand; PAM type: YTN; PAM sequence: CTA
ggggaggaacagcattagga

SEQ ID NO: 354612 - DNA, 20 bp, Artificial Sequence
  Description of Artificial Sequence: Synthetic oligonucleotide
  Target: LAMA2; (+) strand; PAM type: YTN; PAM sequence: TTA
ggagaaatacctaatgtaga

SEQ ID NO: 354613 - DNA, 20 bp, Artificial Sequence
  Description of Artificial Sequence: Synthetic oligonucleotide
  Target: LAMA2; (+) strand; PAM type: YTN; PAM sequence: CTA
atgtagatgacaggtcgatg

SEQ ID NO: 354614 - DNA, 20 bp, Artificial Sequence
  Description of Artificial Sequence: Synthetic oligonucleotide
  Target: LAMA2; (+) strand; PAM type: YTN; PAM sequence: CTG
cagcaaaccaccatggcacg

SEQ ID NO: 354615 - DNA, 20 bp, Artificial Sequence
  Description of Artificial Sequence: Synthetic oligonucleotide
  Target: LAMA2; (+) strand; PAM type: YTN; PAM sequence: CTA
tgtgacaaacctggatgttc

SEQ ID NO: 354616 - DNA, 20 bp, Artificial Sequence
  Description of Artificial Sequence: Synthetic oligonucleotide
  Target: LAMA2; (+) strand; PAM type: YTN; PAM sequence: CTG
gatgttctgcacatgtattc

SEQ ID NO: 354617 - DNA, 20 bp, Artificial Sequence
  Description of Artificial Sequence: Synthetic oligonucleotide
  Target: LAMA2; (+) strand; PAM type: YTN; PAM sequence: TTC
tgcacatgtattccagaact

SEQ ID NO: 354618 - DNA, 20 bp, Artificial Sequence
  Description of Artificial Sequence: Synthetic oligonucleotide
  Target: LAMA2; (+) strand; PAM type: YTN; PAM sequence: CTG
cacatgtattccagaactta

SEQ ID NO: 354619 - DNA, 20 bp, Artificial Sequence
  Description of Artificial Sequence: Synthetic oligonucleotide
  Target: LAMA2; (+) strand; PAM type: YTN; PAM sequence: TTC
cagaacttaaagtataataa

SEQ ID NO: 354620 - DNA, 20 bp, Artificial Sequence
  Description of Artificial Sequence: Synthetic oligonucleotide
  Target: LAMA2; (+) strand; PAM type: YTN; PAM sequence: CTT
aaagtataataataaaaaaa

SEQ ID NO: 354621 - DNA, 20 bp, Artificial Sequence
  Description of Artificial Sequence: Synthetic oligonucleotide
  Target: LAMA2; (+) strand; PAM type: YTN; PAM sequence: TTA
aagtataataataaaaaaaa

SEQ ID NO: 354622 - DNA, 20 bp, Artificial Sequence
  Description of Artificial Sequence: Synthetic oligonucleotide
  Target: LAMA2; (+) strand; PAM type: YTN; PAM sequence: TTA
actatcattaaaacatgttt

SEQ ID NO: 354623 - DNA, 20 bp, Artificial Sequence
  Description of Artificial Sequence: Synthetic oligonucleotide
  Target: LAMA2; (+) strand; PAM type: YTN; PAM sequence: CTA
tcattaaaacatgtttgtgg

SEQ ID NO: 354624 - DNA, 20 bp, Artificial Sequence
  Description of Artificial Sequence: Synthetic oligonucleotide
  Target: LAMA2; (+) strand; PAM type: YTN; PAM sequence: TTA
aaacatgtttgtggtagttc

SEQ ID NO: 354625 - DNA, 20 bp, Artificial Sequence
  Description of Artificial Sequence: Synthetic oligonucleotide
  Target: LAMA2; (+) strand; PAM type: YTN; PAM sequence: TTT
gtggtagttctttgataatt

SEQ ID NO: 354626 - DNA, 20 bp, Artificial Sequence
  Description of Artificial Sequence: Synthetic oligonucleotide
  Target: LAMA2; (+) strand; PAM type: YTN; PAM sequence: TTG
tggtagttctttgataattt

SEQ ID NO: 354627 - DNA, 20 bp, Artificial Sequence
  Description of Artificial Sequence: Synthetic oligonucleotide
  Target: LAMA2; (+) strand; PAM type: YTN; PAM sequence: TTC
tttgataatttgtcctcttt

SEQ ID NO: 354628 - DNA, 20 bp, Artificial Sequence
  Description of Artificial Sequence: Synthetic oligonucleotide
  Target: LAMA2; (+) strand; PAM type: YTN; PAM sequence: CTT
tgataatttgtcctcttttg

SEQ ID NO: 354629 - DNA, 20 bp, Artificial Sequence
  Description of Artificial Sequence: Synthetic oligonucleotide
  Target: LAMA2; (+) strand; PAM type: YTN; PAM sequence: TTT
gataatttgtcctcttttga

SEQ ID NO: 354630 - DNA, 20 bp, Artificial Sequence
  Description of Artificial Sequence: Synthetic oligonucleotide
  Target: LAMA2; (+) strand; PAM type: YTN; PAM sequence: TTG
ataatttgtcctcttttgat

SEQ ID NO: 354631 - DNA, 20 bp, Artificial Sequence
  Description of Artificial Sequence: Synthetic oligonucleotide
  Target: LAMA2; (+) strand; PAM type: YTN; PAM sequence: TTT
gtcctcttttgatacccttg

SEQ ID NO: 354632 - DNA, 20 bp, Artificial Sequence
  Description of Artificial Sequence: Synthetic oligonucleotide
  Target: LAMA2; (+) strand; PAM type: YTN; PAM sequence: TTG
tcctcttttgatacccttga

SEQ ID NO: 354633 - DNA, 20 bp, Artificial Sequence
  Description of Artificial Sequence: Synthetic oligonucleotide
  Target: LAMA2; (+) strand; PAM type: YTN; PAM sequence: CTC
ttttgatacccttgattagc

SEQ ID NO: 354634 - DNA, 20 bp, Artificial Sequence
  Description of Artificial Sequence: Synthetic oligonucleotide
  Target: LAMA2; (+) strand; PAM type: YTN; PAM sequence: CTT
ttgatacccttgattagctt

SEQ ID NO: 354635 - DNA, 20 bp, Artificial Sequence
  Description of Artificial Sequence: Synthetic oligonucleotide
  Target: LAMA2; (+) strand; PAM type: YTN; PAM sequence: TTT
tgatacccttgattagcttt

SEQ ID NO: 354636 - DNA, 20 bp, Artificial Sequence
  Description of Artificial Sequence: Synthetic oligonucleotide
  Target: LAMA2; (+) strand; PAM type: YTN; PAM sequence: TTT
gatacccttgattagctttg

SEQ ID NO: 354637 - DNA, 20 bp, Artificial Sequence
  Description of Artificial Sequence: Synthetic oligonucleotide
  Target: LAMA2; (+) strand; PAM type: YTN; PAM sequence: TTG
atacccttgattagctttgt

SEQ ID NO: 354638 - DNA, 20 bp, Artificial Sequence
  Description of Artificial Sequence: Synthetic oligonucleotide
  Target: LAMA2; (+) strand; PAM type: YTN; PAM sequence: CTT
gattagctttgtttaccgtt

SEQ ID NO: 354639 - DNA, 20 bp, Artificial Sequence
  Description of Artificial Sequence: Synthetic oligonucleotide
  Target: LAMA2; (+) strand; PAM type: YTN; PAM sequence: TTG
attagctttgtttaccgttt

SEQ ID NO: 354640 - DNA, 20 bp, Artificial Sequence
  Description of Artificial Sequence: Synthetic oligonucleotide
  Target: LAMA2; (+) strand; PAM type: YTN; PAM sequence: TTA
gctttgtttaccgtttcctt

SEQ ID NO: 354641 - DNA, 20 bp, Artificial Sequence
  Description of Artificial Sequence: Synthetic oligonucleotide
  Target: LAMA2; (+) strand; PAM type: YTN; PAM sequence: CTT
tgtttaccgtttccttttgc

SEQ ID NO: 354642 - DNA, 20 bp, Artificial Sequence
  Description of Artificial Sequence: Synthetic oligonucleotide
  Target: LAMA2; (+) strand; PAM type: YTN; PAM sequence: TTT
gtttaccgtttccttttgct

SEQ ID NO: 354643 - DNA, 20 bp, Artificial Sequence
  Description of Artificial Sequence: Synthetic oligonucleotide
  Target: LAMA2; (+) strand; PAM type: YTN; PAM sequence: TTG
tttaccgtttccttttgctt

SEQ ID NO: 354644 - DNA, 20 bp, Artificial Sequence
  Description of Artificial Sequence: Synthetic oligonucleotide
  Target: LAMA2; (+) strand; PAM type: YTN; PAM sequence: TTT
accgtttccttttgcttgct

SEQ ID NO: 354645 - DNA, 20 bp, Artificial Sequence
  Description of Artificial Sequence: Synthetic oligonucleotide
  Target: LAMA2; (+) strand; PAM type: YTN; PAM sequence: TTA
ccgtttccttttgcttgctt

SEQ ID NO: 354646 - DNA, 20 bp, Artificial Sequence
  Description of Artificial Sequence: Synthetic oligonucleotide
  Target: LAMA2; (+) strand; PAM type: YTN; PAM sequence: TTT
ccttttgcttgcttttcttt

SEQ ID NO: 354647 - DNA, 20 bp, Artificial Sequence
  Description of Artificial Sequence: Synthetic oligonucleotide
  Target: LAMA2; (+) strand; PAM type: YTN; PAM sequence: TTC
cttttgcttgcttttctttt

SEQ ID NO: 354648 - DNA, 20 bp, Artificial Sequence
  Description of Artificial Sequence: Synthetic oligonucleotide
  Target: LAMA2; (+) strand; PAM type: YTN; PAM sequence: CTT
ttgcttgcttttcttttttt

SEQ ID NO: 354649 - DNA, 20 bp, Artificial Sequence
  Description of Artificial Sequence: Synthetic oligonucleotide
  Target: LAMA2; (+) strand; PAM type: YTN; PAM sequence: TTT
tgcttgcttttctttttttc

SEQ ID NO: 354650 - DNA, 20 bp, Artificial Sequence
  Description of Artificial Sequence: Synthetic oligonucleotide
  Target: LAMA2; (+) strand; PAM type: YTN; PAM sequence: TTT
gcttgcttttctttttttca

SEQ ID NO: 354651 - DNA, 20 bp, Artificial Sequence
  Description of Artificial Sequence: Synthetic oligonucleotide
  Target: LAMA2; (+) strand; PAM type: YTN; PAM sequence: TTG
cttgcttttctttttttcaa

SEQ ID NO: 354652 - DNA, 20 bp, Artificial Sequence
  Description of Artificial Sequence: Synthetic oligonucleotide
  Target: LAMA2; (+) strand; PAM type: YTN; PAM sequence: CTT
gcttttctttttttcaaatc

SEQ ID NO: 354653 - DNA, 20 bp, Artificial Sequence
  Description of Artificial Sequence: Synthetic oligonucleotide
  Target: LAMA2; (+) strand; PAM type: YTN; PAM sequence: TTG
cttttctttttttcaaatct

SEQ ID NO: 354654 - DNA, 20 bp, Artificial Sequence
  Description of Artificial Sequence: Synthetic oligonucleotide
  Target: LAMA2; (+) strand; PAM type: YTN; PAM sequence: CTT
ttctttttttcaaatctctt

SEQ ID NO: 354655 - DNA, 20 bp, Artificial Sequence
  Description of Artificial Sequence: Synthetic oligonucleotide
  Target: LAMA2; (+) strand; PAM type: YTN; PAM sequence: TTT
tctttttttcaaatctcttt

SEQ ID NO: 354656 - DNA, 20 bp, Artificial Sequence
  Description of Artificial Sequence: Synthetic oligonucleotide
  Target: LAMA2; (+) strand; PAM type: YTN; PAM sequence: TTT
ctttttttcaaatctcttta

SEQ ID NO: 354657 - DNA, 20 bp, Artificial Sequence
  Description of Artificial Sequence: Synthetic oligonucleotide
  Target: LAMA2; (+) strand; PAM type: YTN; PAM sequence: TTC
tttttttcaaatctctttac

SEQ ID NO: 354658 - DNA, 20 bp, Artificial Sequence
  Description of Artificial Sequence: Synthetic oligonucleotide
  Target: LAMA2; (+) strand; PAM type: YTN; PAM sequence: CTT
tttttcaaatctctttactt

SEQ ID NO: 354659 - DNA, 20 bp, Artificial Sequence
  Description of Artificial Sequence: Synthetic oligonucleotide
  Target: LAMA2; (+) strand; PAM type: YTN; PAM sequence: TTT
ttttcaaatctctttacttc

SEQ ID NO: 354660 - DNA, 20 bp, Artificial Sequence
  Description of Artificial Sequence: Synthetic oligonucleotide
  Target: LAMA2; (+) strand; PAM type: YTN; PAM sequence: TTT
tttcaaatctctttacttcc

SEQ ID NO: 354661 - DNA, 20 bp, Artificial Sequence
  Description of Artificial Sequence: Synthetic oligonucleotide
  Target: LAMA2; (+) strand; PAM type: YTN; PAM sequence: TTT
ttcaaatctctttacttcct

SEQ ID NO: 354662 - DNA, 20 bp, Artificial Sequence
  Description of Artificial Sequence: Synthetic oligonucleotide
  Target: LAMA2; (+) strand; PAM type: YTN; PAM sequence: TTT
tcaaatctctttacttcctg

SEQ ID NO: 354663 - DNA, 20 bp, Artificial Sequence
  Description of Artificial Sequence: Synthetic oligonucleotide
  Target: LAMA2; (+) strand; PAM type: YTN; PAM sequence: TTT
caaatctctttacttcctgt

SEQ ID NO: 354664 - DNA, 20 bp, Artificial Sequence
  Description of Artificial Sequence: Synthetic oligonucleotide
  Target: LAMA2; (+) strand; PAM type: YTN; PAM sequence: TTC
aaatctctttacttcctgtg

SEQ ID NO: 354665 - DNA, 20 bp, Artificial Sequence
  Description of Artificial Sequence: Synthetic oligonucleotide
  Target: LAMA2; (+) strand; PAM type: YTN; PAM sequence: CTC
tttacttcctgtggtgttta

SEQ ID NO: 354666 - DNA, 20 bp, Artificial Sequence
  Description of Artificial Sequence: Synthetic oligonucleotide
  Target: LAMA2; (+) strand; PAM type: YTN; PAM sequence: CTT
tacttcctgtggtgtttata

SEQ ID NO: 354667 - DNA, 20 bp, Artificial Sequence
  Description of Artificial Sequence: Synthetic oligonucleotide
  Target: LAMA2; (+) strand; PAM type: YTN; PAM sequence: TTT
acttcctgtggtgtttatat

SEQ ID NO: 354668 - DNA, 20 bp, Artificial Sequence
  Description of Artificial Sequence: Synthetic oligonucleotide
  Target: LAMA2; (+) strand; PAM type: YTN; PAM sequence: TTA
cttcctgtggtgtttatatt

SEQ ID NO: 354669 - DNA, 20 bp, Artificial Sequence
  Description of Artificial Sequence: Synthetic oligonucleotide
  Target: LAMA2; (+) strand; PAM type: YTN; PAM sequence: CTT
cctgtggtgtttatattttc

SEQ ID NO: 354670 - DNA, 20 bp, Artificial Sequence
  Description of Artificial Sequence: Synthetic oligonucleotide
  Target: LAMA2; (+) strand; PAM type: YTN; PAM sequence: TTC
ctgtggtgtttatattttct

SEQ ID NO: 354671 - DNA, 20 bp, Artificial Sequence
  Description of Artificial Sequence: Synthetic oligonucleotide
  Target: LAMA2; (+) strand; PAM type: YTN; PAM sequence: CTG
tggtgtttatattttctctt

SEQ ID NO: 354672 - DNA, 20 bp, Artificial Sequence
  Description of Artificial Sequence: Synthetic oligonucleotide
  Target: LAMA2; (+) strand; PAM type: YTN; PAM sequence: TTT
atattttctcttttttatac

SEQ ID NO: 354673 - DNA, 20 bp, Artificial Sequence
  Description of Artificial Sequence: Synthetic oligonucleotide
  Target: LAMA2; (+) strand; PAM type: YTN; PAM sequence: TTA
tattttctcttttttatact

SEQ ID NO: 354674 - DNA, 20 bp, Artificial Sequence
  Description of Artificial Sequence: Synthetic oligonucleotide
  Target: LAMA2; (+) strand; PAM type: YTN; PAM sequence: TTT
tctcttttttatacttaaat

SEQ ID NO: 354675 - DNA, 20 bp, Artificial Sequence
  Description of Artificial Sequence: Synthetic oligonucleotide
  Target: LAMA2; (+) strand; PAM type: YTN; PAM sequence: TTT
ctcttttttatacttaaatg

SEQ ID NO: 354676 - DNA, 20 bp, Artificial Sequence
  Description of Artificial Sequence: Synthetic oligonucleotide
  Target: LAMA2; (+) strand; PAM type: YTN; PAM sequence: TTC
tcttttttatacttaaatga

SEQ ID NO: 354677 - DNA, 20 bp, Artificial Sequence
  Description of Artificial Sequence: Synthetic oligonucleotide
  Target: LAMA2; (+) strand; PAM type: YTN; PAM sequence: CTC
ttttttatacttaaatgaat

SEQ ID NO: 354678 - DNA, 20 bp, Artificial Sequence
  Description of Artificial Sequence: Synthetic oligonucleotide
  Target: LAMA2; (+) strand; PAM type: YTN; PAM sequence: CTT
ttttatacttaaatgaatta

SEQ ID NO: 354679 - DNA, 20 bp, Artificial Sequence
  Description of Artificial Sequence: Synthetic oligonucleotide
  Target: LAMA2; (+) strand; PAM type: YTN; PAM sequence: TTT
tttatacttaaatgaattaa

SEQ ID NO: 354680 - DNA, 20 bp, Artificial Sequence
  Description of Artificial Sequence: Synthetic oligonucleotide
  Target: LAMA2; (+) strand; PAM type: YTN; PAM sequence: TTT
ttatacttaaatgaattaaa

SEQ ID NO: 354681 - DNA, 20 bp, Artificial Sequence
  Description of Artificial Sequence: Synthetic oligonucleotide
  Target: LAMA2; (+) strand; PAM type: YTN; PAM sequence: TTT
tatacttaaatgaattaaat

SEQ ID NO: 354682 - DNA, 20 bp, Artificial Sequence
  Description of Artificial Sequence: Synthetic oligonucleotide
  Target: LAMA2; (+) strand; PAM type: YTN; PAM sequence: TTT
atacttaaatgaattaaatt

SEQ ID NO: 354683 - DNA, 20 bp, Artificial Sequence
  Description of Artificial Sequence: Synthetic oligonucleotide
  Target: LAMA2; (+) strand; PAM type: YTN; PAM sequence: TTA
tacttaaatgaattaaattt

SEQ ID NO: 354684 - DNA, 20 bp, Artificial Sequence
  Description of Artificial Sequence: Synthetic oligonucleotide
  Target: LAMA2; (+) strand; PAM type: YTN; PAM sequence: CTT
aaatgaattaaattttaatt

SEQ ID NO: 354685 - DNA, 20 bp, Artificial Sequence
  Description of Artificial Sequence: Synthetic oligonucleotide
  Target: LAMA2; (+) strand; PAM type: YTN; PAM sequence: TTA
aatgaattaaattttaattt

SEQ ID NO: 354686 - DNA, 20 bp, Artificial Sequence
  Description of Artificial Sequence: Synthetic oligonucleotide
  Target: LAMA2; (+) strand; PAM type: YTN; PAM sequence: TTA
aattttaatttatctatttt

SEQ ID NO: 354687 - DNA, 20 bp, Artificial Sequence
  Description of Artificial Sequence: Synthetic oligonucleotide
  Target: LAMA2; (+) strand; PAM type: YTN; PAM sequence: TTT
taatttatctatttttaaaa

SEQ ID NO: 354688 - DNA, 20 bp, Artificial Sequence
  Description of Artificial Sequence: Synthetic oligonucleotide
  Target: LAMA2; (+) strand; PAM type: YTN; PAM sequence: TTT
aatttatctatttttaaaat

SEQ ID NO: 354689 - DNA, 20 bp, Artificial Sequence
  Description of Artificial Sequence: Synthetic oligonucleotide
  Target: LAMA2; (+) strand; PAM type: YTN; PAM sequence: TTA
atttatctatttttaaaata

SEQ ID NO: 354690 - DNA, 20 bp, Artificial Sequence
  Description of Artificial Sequence: Synthetic oligonucleotide
  Target: LAMA2; (+) strand; PAM type: YTN; PAM sequence: TTT
atctatttttaaaataatgg

SEQ ID NO: 354691 - DNA, 20 bp, Artificial Sequence
  Description of Artificial Sequence: Synthetic oligonucleotide
  Target: LAMA2; (+) strand; PAM type: YTN; PAM sequence: TTA
tctatttttaaaataatgga

SEQ ID NO: 354692 - DNA, 20 bp, Artificial Sequence
  Description of Artificial Sequence: Synthetic oligonucleotide
  Target: LAMA2; (+) strand; PAM type: YTN; PAM sequence: CTA
tttttaaaataatggactat

SEQ ID NO: 354693 - DNA, 20 bp, Artificial Sequence
  Description of Artificial Sequence: Synthetic oligonucleotide
  Target: LAMA2; (+) strand; PAM type: YTN; PAM sequence: TTT
ttaaaataatggactattta

SEQ ID NO: 354694 - DNA, 20 bp, Artificial Sequence
  Description of Artificial Sequence: Synthetic oligonucleotide
  Target: LAMA2; (+) strand; PAM type: YTN; PAM sequence: TTT
taaaataatggactatttaa

SEQ ID NO: 354695 - DNA, 20 bp, Artificial Sequence
  Description of Artificial Sequence: Synthetic oligonucleotide
  Target: LAMA2; (+) strand; PAM type: YTN; PAM sequence: TTT
aaaataatggactatttaag

SEQ ID NO: 354696 - DNA, 20 bp, Artificial Sequence
  Description of Artificial Sequence: Synthetic oligonucleotide
  Target: LAMA2; (+) strand; PAM type: YTN; PAM sequence: TTA
aaataatggactatttaagc

SEQ ID NO: 354697 - DNA, 20 bp, Artificial Sequence
  Description of Artificial Sequence: Synthetic oligonucleotide
  Target: LAMA2; (+) strand; PAM type: YTN; PAM sequence: CTA
tttaagcctataagtttact

SEQ ID NO: 354698 - DNA, 20 bp, Artificial Sequence
  Description of Artificial Sequence: Synthetic oligonucleotide
  Target: LAMA2; (+) strand; PAM type: YTN; PAM sequence: TTT
aagcctataagtttactttt

SEQ ID NO: 354699 - DNA, 20 bp, Artificial Sequence
  Description of Artificial Sequence: Synthetic oligonucleotide
  Target: LAMA2; (+) strand; PAM type: YTN; PAM sequence: TTA
agcctataagtttacttttg

SEQ ID NO: 354700 - DNA, 20 bp, Artificial Sequence
  Description of Artificial Sequence: Synthetic oligonucleotide
  Target: LAMA2; (+) strand; PAM type: YTN; PAM sequence: CTA
taagtttacttttgggtaca

SEQ ID NO: 354701 - DNA, 20 bp, Artificial Sequence
  Description of Artificial Sequence: Synthetic oligonucleotide
  Target: LAMA2; (+) strand; PAM type: YTN; PAM sequence: TTT
acttttgggtacagtttttc

SEQ ID NO: 354702 - DNA, 20 bp, Artificial Sequence
  Description of Artificial Sequence: Synthetic oligonucleotide
  Target: LAMA2; (+) strand; PAM type: YTN; PAM sequence: TTA
cttttgggtacagtttttcc

SEQ ID NO: 354703 - DNA, 20 bp, Artificial Sequence
  Description of Artificial Sequence: Synthetic oligonucleotide
  Target: LAMA2; (+) strand; PAM type: YTN; PAM sequence: CTT
ttgggtacagtttttccata

SEQ ID NO: 354704 - DNA, 20 bp, Artificial Sequence
  Description of Artificial Sequence: Synthetic oligonucleotide
  Target: LAMA2; (+) strand; PAM type: YTN; PAM sequence: TTT
tgggtacagtttttccatac

SEQ ID NO: 354705 - DNA, 20 bp, Artificial Sequence
  Description of Artificial Sequence: Synthetic oligonucleotide
  Target: LAMA2; (+) strand; PAM type: YTN; PAM sequence: TTT
gggtacagtttttccatact

SEQ ID NO: 354706 - DNA, 20 bp, Artificial Sequence
  Description of Artificial Sequence: Synthetic oligonucleotide
  Target: LAMA2; (+) strand; PAM type: YTN; PAM sequence: TTG
ggtacagtttttccatactc

SEQ ID NO: 354707 - DNA, 20 bp, Artificial Sequence
  Description of Artificial Sequence: Synthetic oligonucleotide
  Target: LAMA2; (+) strand; PAM type: YTN; PAM sequence: TTT
ttccatactcaacaaaaatt

SEQ ID NO: 354708 - DNA, 20 bp, Artificial Sequence
  Description of Artificial Sequence: Synthetic oligonucleotide
  Target: LAMA2; (+) strand; PAM type: YTN; PAM sequence: TTT
tccatactcaacaaaaatta

SEQ ID NO: 354709 - DNA, 20 bp, Artificial Sequence
  Description of Artificial Sequence: Synthetic oligonucleotide
  Target: LAMA2; (+) strand; PAM type: YTN; PAM sequence: TTT
ccatactcaacaaaaattaa

SEQ ID NO: 354710 - DNA, 20 bp, Artificial Sequence
  Description of Artificial Sequence: Synthetic oligonucleotide
  Target: LAMA2; (+) strand; PAM type: YTN; PAM sequence: TTC
catactcaacaaaaattaag

SEQ ID NO: 354711 - DNA, 20 bp, Artificial Sequence
  Description of Artificial Sequence: Synthetic oligonucleotide
  Target: LAMA2; (+) strand; PAM type: YTN; PAM sequence: CTC
aacaaaaattaagttccttt

SEQ ID NO: 354712 - DNA, 20 bp, Artificial Sequence
  Description of Artificial Sequence: Synthetic oligonucleotide
  Target: LAMA2; (+) strand; PAM type: YTN; PAM sequence: TTA
agttccttttttactgctat

SEQ ID NO: 354713 - DNA, 20 bp, Artificial Sequence
  Description of Artificial Sequence: Synthetic oligonucleotide
  Target: LAMA2; (+) strand; PAM type: YTN; PAM sequence: TTC
cttttttactgctattatat

SEQ ID NO: 354714 - DNA, 20 bp, Artificial Sequence
  Description of Artificial Sequence: Synthetic oligonucleotide
  Target: LAMA2; (+) strand; PAM type: YTN; PAM sequence: CTT
ttttactgctattatattct

SEQ ID NO: 354715 - DNA, 20 bp, Artificial Sequence
  Description of Artificial Sequence: Synthetic oligonucleotide
  Target: LAMA2; (+) strand; PAM type: YTN; PAM sequence: TTT
tttactgctattatattcta

SEQ ID NO: 354716 - DNA, 20 bp, Artificial Sequence
  Description of Artificial Sequence: Synthetic oligonucleotide
  Target: LAMA2; (+) strand; PAM type: YTN; PAM sequence: TTT
ttactgctattatattctac

SEQ ID NO: 354717 - DNA, 20 bp, Artificial Sequence
  Description of Artificial Sequence: Synthetic oligonucleotide
  Target: LAMA2; (+) strand; PAM type: YTN; PAM sequence: TTT
tactgctattatattctacc

SEQ ID NO: 354718 - DNA, 20 bp, Artificial Sequence
  Description of Artificial Sequence: Synthetic oligonucleotide
  Target: LAMA2; (+) strand; PAM type: YTN; PAM sequence: TTT
actgctattatattctacct

SEQ ID NO: 354719 - DNA, 20 bp, Artificial Sequence
  Description of Artificial Sequence: Synthetic oligonucleotide
  Target: LAMA2; (+) strand; PAM type: YTN; PAM sequence: TTA
ctgctattatattctaccta

SEQ ID NO: 354720 - DNA, 20 bp, Artificial Sequence
  Description of Artificial Sequence: Synthetic oligonucleotide
  Target: LAMA2; (+) strand; PAM type: YTN; PAM sequence: CTG
ctattatattctacctagat

SEQ ID NO: 354721 - DNA, 20 bp, Artificial Sequence
  Description of Artificial Sequence: Synthetic oligonucleotide
  Target: LAMA2; (+) strand; PAM type: YTN; PAM sequence: CTA
ttatattctacctagatagc

SEQ ID NO: 354722 - DNA, 20 bp, Artificial Sequence
  Description of Artificial Sequence: Synthetic oligonucleotide
  Target: LAMA2; (+) strand; PAM type: YTN; PAM sequence: TTA
tattctacctagatagctat

SEQ ID NO: 354723 - DNA, 20 bp, Artificial Sequence
  Description of Artificial Sequence: Synthetic oligonucleotide
  Target: LAMA2; (+) strand; PAM type: YTN; PAM sequence: TTC
tacctagatagctatttatt

SEQ ID NO: 354724 - DNA, 20 bp, Artificial Sequence
  Description of Artificial Sequence: Synthetic oligonucleotide
  Target: LAMA2; (+) strand; PAM type: YTN; PAM sequence: CTA
cctagatagctatttatttt

SEQ ID NO: 354725 - DNA, 20 bp, Artificial Sequence
  Description of Artificial Sequence: Synthetic oligonucleotide
  Target: LAMA2; (+) strand; PAM type: YTN; PAM sequence: CTA
gatagctatttatttttaat

SEQ ID NO: 354726 - DNA, 20 bp, Artificial Sequence
  Description of Artificial Sequence: Synthetic oligonucleotide
  Target: LAMA2; (+) strand; PAM type: YTN; PAM sequence: CTA
tttatttttaattgaagtct

SEQ ID NO: 354727 - DNA, 20 bp, Artificial Sequence
  Description of Artificial Sequence: Synthetic oligonucleotide
  Target: LAMA2; (+) strand; PAM type: YTN; PAM sequence: TTT
atttttaattgaagtcttga

SEQ ID NO: 354728 - DNA, 20 bp, Artificial Sequence
  Description of Artificial Sequence: Synthetic oligonucleotide
  Target: LAMA2; (+) strand; PAM type: YTN; PAM sequence: TTA
tttttaattgaagtcttgat

SEQ ID NO: 354729 - DNA, 20 bp, Artificial Sequence
  Description of Artificial Sequence: Synthetic oligonucleotide
  Target: LAMA2; (+) strand; PAM type: YTN; PAM sequence: TTT
ttaattgaagtcttgatttt

SEQ ID NO: 354730 - DNA, 20 bp, Artificial Sequence
  Description of Artificial Sequence: Synthetic oligonucleotide
  Target: LAMA2; (+) strand; PAM type: YTN; PAM sequence: TTT
taattgaagtcttgattttc

SEQ ID NO: 354731 - DNA, 20 bp, Artificial Sequence
  Description of Artificial Sequence: Synthetic oligonucleotide
  Target: LAMA2; (+) strand; PAM type: YTN; PAM sequence: TTT
aattgaagtcttgattttct

SEQ ID NO: 354732 - DNA, 20 bp, Artificial Sequence
  Description of Artificial Sequence: Synthetic oligonucleotide
  Target: LAMA2; (+) strand; PAM type: YTN; PAM sequence: TTA
attgaagtcttgattttctc

SEQ ID NO: 354733 - DNA, 20 bp, Artificial Sequence
  Description of Artificial Sequence: Synthetic oligonucleotide
  Target: LAMA2; (+) strand; PAM type: YTN; PAM sequence: TTG
aagtcttgattttctcttta

SEQ ID NO: 354734 - DNA, 20 bp, Artificial Sequence
  Description of Artificial Sequence: Synthetic oligonucleotide
  Target: LAMA2; (+) strand; PAM type: YTN; PAM sequence: CTT
gattttctctttaacccaag

SEQ ID NO: 354735 - DNA, 20 bp, Artificial Sequence
  Description of Artificial Sequence: Synthetic oligonucleotide
  Target: LAMA2; (+) strand; PAM type: YTN; PAM sequence: TTG
attttctctttaacccaaga

SEQ ID NO: 354736 - DNA, 20 bp, Artificial Sequence
  Description of Artificial Sequence: Synthetic oligonucleotide
  Target: LAMA2; (+) strand; PAM type: YTN; PAM sequence: TTT
tctctttaacccaagagtta

SEQ ID NO: 354737 - DNA, 20 bp, Artificial Sequence
  Description of Artificial Sequence: Synthetic oligonucleotide
  Target: LAMA2; (+) strand; PAM type: YTN; PAM sequence: TTT
ctctttaacccaagagttat

SEQ ID NO: 354738 - DNA, 20 bp, Artificial Sequence
  Description of Artificial Sequence: Synthetic oligonucleotide
  Target: LAMA2; (+) strand; PAM type: YTN; PAM sequence: TTC
tctttaacccaagagttatt

SEQ ID NO: 354739 - DNA, 20 bp, Artificial Sequence
  Description of Artificial Sequence: Synthetic oligonucleotide
  Target: LAMA2; (+) strand; PAM type: YTN; PAM sequence: CTC
tttaacccaagagttattaa

SEQ ID NO: 354740 - DNA, 20 bp, Artificial Sequence
  Description of Artificial Sequence: Synthetic oligonucleotide
  Target: LAMA2; (+) strand; PAM type: YTN; PAM sequence: CTT
taacccaagagttattaaag

SEQ ID NO: 354741 - DNA, 20 bp, Artificial Sequence
  Description of Artificial Sequence: Synthetic oligonucleotide
  Target: LAMA2; (+) strand; PAM type: YTN; PAM sequence: TTT
aacccaagagttattaaaga

SEQ ID NO: 354742 - DNA, 20 bp, Artificial Sequence
  Description of Artificial Sequence: Synthetic oligonucleotide
  Target: LAMA2; (+) strand; PAM type: YTN; PAM sequence: TTA
acccaagagttattaaagag

SEQ ID NO: 354743 - DNA, 20 bp, Artificial Sequence
  Description of Artificial Sequence: Synthetic oligonucleotide
  Target: LAMA2; (+) strand; PAM type: YTN; PAM sequence: TTA
ttaaagagaaatatttaggc

SEQ ID NO: 354744 - DNA, 20 bp, Artificial Sequence
  Description of Artificial Sequence: Synthetic oligonucleotide
  Target: LAMA2; (+) strand; PAM type: YTN; PAM sequence: TTA
aagagaaatatttaggcatt

SEQ ID NO: 354745 - DNA, 20 bp, Artificial Sequence
  Description of Artificial Sequence: Synthetic oligonucleotide
  Target: LAMA2; (+) strand; PAM type: YTN; PAM sequence: TTT
aggcattaatttttagaaca

SEQ ID NO: 354746 - DNA, 20 bp, Artificial Sequence
  Description of Artificial Sequence: Synthetic oligonucleotide
  Target: LAMA2; (+) strand; PAM type: YTN; PAM sequence: TTA
ggcattaatttttagaacag

SEQ ID NO: 354747 - DNA, 20 bp, Artificial Sequence
  Description of Artificial Sequence: Synthetic oligonucleotide
  Target: LAMA2; (+) strand; PAM type: YTN; PAM sequence: TTA
atttttagaacagttgaatt

SEQ ID NO: 354748 - DNA, 20 bp, Artificial Sequence
  Description of Artificial Sequence: Synthetic oligonucleotide
  Target: LAMA2; (+) strand; PAM type: YTN; PAM sequence: TTT
ttagaacagttgaattttgc

SEQ ID NO: 354749 - DNA, 20 bp, Artificial Sequence
  Description of Artificial Sequence: Synthetic oligonucleotide
  Target: LAMA2; (+) strand; PAM type: YTN; PAM sequence: TTT
tagaacagttgaattttgca

SEQ ID NO: 354750 - DNA, 20 bp, Artificial Sequence
  Description of Artificial Sequence: Synthetic oligonucleotide
  Target: LAMA2; (+) strand; PAM type: YTN; PAM sequence: TTT
agaacagttgaattttgcat

SEQ ID NO: 354751 - DNA, 20 bp, Artificial Sequence
  Description of Artificial Sequence: Synthetic oligonucleotide
  Target: LAMA2; (+) strand; PAM type: YTN; PAM sequence: TTA
gaacagttgaattttgcata

SEQ ID NO: 354752 - DNA, 20 bp, Artificial Sequence
  Description of Artificial Sequence: Synthetic oligonucleotide
  Target: LAMA2; (+) strand; PAM type: YTN; PAM sequence: TTG
aattttgcataaaattctct

SEQ ID NO: 354753 - DNA, 20 bp, Artificial Sequence
  Description of Artificial Sequence: Synthetic oligonucleotide
  Target: LAMA2; (+) strand; PAM type: YTN; PAM sequence: TTT
tgcataaaattctctcatca

SEQ ID NO: 354754 - DNA, 20 bp, Artificial Sequence
  Description of Artificial Sequence: Synthetic oligonucleotide
  Target: LAMA2; (+) strand; PAM type: YTN; PAM sequence: TTT
gcataaaattctctcatcat

SEQ ID NO: 354755 - DNA, 20 bp, Artificial Sequence
  Description of Artificial Sequence: Synthetic oligonucleotide
  Target: LAMA2; (+) strand; PAM type: YTN; PAM sequence: TTG
cataaaattctctcatcatg

SEQ ID NO: 354756 - DNA, 20 bp, Artificial Sequence
  Description of Artificial Sequence: Synthetic oligonucleotide
  Target: LAMA2; (+) strand; PAM type: YTN; PAM sequence: TTC
tctcatcatgtttgatattc

SEQ ID NO: 354757 - DNA, 20 bp, Artificial Sequence
  Description of Artificial Sequence: Synthetic oligonucleotide
  Target: LAMA2; (+) strand; PAM type: YTN; PAM sequence: CTC
tcatcatgtttgatattcag

SEQ ID NO: 354758 - DNA, 20 bp, Artificial Sequence
  Description of Artificial Sequence: Synthetic oligonucleotide
  Target: LAMA2; (+) strand; PAM type: YTN; PAM sequence: CTC
atcatgtttgatattcagaa

SEQ ID NO: 354759 - DNA, 20 bp, Artificial Sequence
  Description of Artificial Sequence: Synthetic oligonucleotide
  Target: LAMA2; (+) strand; PAM type: YTN; PAM sequence: TTT
gatattcagaactaatttaa

SEQ ID NO: 354760 - DNA, 20 bp, Artificial Sequence
  Description of Artificial Sequence: Synthetic oligonucleotide
  Target: LAMA2; (+) strand; PAM type: YTN; PAM sequence: TTG
atattcagaactaatttaat

SEQ ID NO: 354761 - DNA, 20 bp, Artificial Sequence
  Description of Artificial Sequence: Synthetic oligonucleotide
  Target: LAMA2; (+) strand; PAM type: YTN; PAM sequence: TTC
agaactaatttaatcttaat

SEQ ID NO: 354762 - DNA, 20 bp, Artificial Sequence
  Description of Artificial Sequence: Synthetic oligonucleotide
  Target: LAMA2; (+) strand; PAM type: YTN; PAM sequence: CTA
atttaatcttaatttttgtg

SEQ ID NO: 354763 - DNA, 20 bp, Artificial Sequence
  Description of Artificial Sequence: Synthetic oligonucleotide
  Target: LAMA2; (+) strand; PAM type: YTN; PAM sequence: TTT
aatcttaatttttgtggcat

SEQ ID NO: 354764 - DNA, 20 bp, Artificial Sequence
  Description of Artificial Sequence: Synthetic oligonucleotide
  Target: LAMA2; (+) strand; PAM type: YTN; PAM sequence: TTA
atcttaatttttgtggcatt

SEQ ID NO: 354765 - DNA, 20 bp, Artificial Sequence
  Description of Artificial Sequence: Synthetic oligonucleotide
  Target: LAMA2; (+) strand; PAM type: YTN; PAM sequence: CTT
aatttttgtggcatttgata

SEQ ID NO: 354766 - DNA, 20 bp, Artificial Sequence
  Description of Artificial Sequence: Synthetic oligonucleotide
  Target: LAMA2; (+) strand; PAM type: YTN; PAM sequence: TTA
atttttgtggcatttgatac

SEQ ID NO: 354767 - DNA, 20 bp, Artificial Sequence
  Description of Artificial Sequence: Synthetic oligonucleotide
  Target: LAMA2; (+) strand; PAM type: YTN; PAM sequence: TTT
ttgtggcatttgatacacat

SEQ ID NO: 354768 - DNA, 20 bp, Artificial Sequence
  Description of Artificial Sequence: Synthetic oligonucleotide
  Target: LAMA2; (+) strand; PAM type: YTN; PAM sequence: TTT
tgtggcatttgatacacatc

SEQ ID NO: 354769 - DNA, 20 bp, Artificial Sequence
  Description of Artificial Sequence: Synthetic oligonucleotide
  Target: LAMA2; (+) strand; PAM type: YTN; PAM sequence: TTT
gtggcatttgatacacatct

SEQ ID NO: 354770 - DNA, 20 bp, Artificial Sequence
  Description of Artificial Sequence: Synthetic oligonucleotide
  Target: LAMA2; (+) strand; PAM type: YTN; PAM sequence: TTG
tggcatttgatacacatcta

SEQ ID NO: 354771 - DNA, 20 bp, Artificial Sequence
  Description of Artificial Sequence: Synthetic oligonucleotide
  Target: LAMA2; (+) strand; PAM type: YTN; PAM sequence: TTT
gatacacatctaaaagtagt

SEQ ID NO: 354772 - DNA, 20 bp, Artificial Sequence
  Description of Artificial Sequence: Synthetic oligonucleotide
  Target: LAMA2; (+) strand; PAM type: YTN; PAM sequence: TTG
atacacatctaaaagtagta

SEQ ID NO: 354773 - DNA, 20 bp, Artificial Sequence
  Description of Artificial Sequence: Synthetic oligonucleotide
  Target: LAMA2; (+) strand; PAM type: YTN; PAM sequence: CTA
aaagtagtaatttatgttaa

SEQ ID NO: 354774 - DNA, 20 bp, Artificial Sequence
  Description of Artificial Sequence: Synthetic oligonucleotide
  Target: LAMA2; (+) strand; PAM type: YTN; PAM sequence: TTT
atgttaagaaaataagcctt

SEQ ID NO: 354775 - DNA, 20 bp, Artificial Sequence
  Description of Artificial Sequence: Synthetic oligonucleotide
  Target: LAMA2; (+) strand; PAM type: YTN; PAM sequence: TTA
tgttaagaaaataagcctta

SEQ ID NO: 354776 - DNA, 20 bp, Artificial Sequence
  Description of Artificial Sequence: Synthetic oligonucleotide
  Target: LAMA2; (+) strand; PAM type: YTN; PAM sequence: TTA
agaaaataagccttagataa

SEQ ID NO: 354777 - DNA, 20 bp, Artificial Sequence
  Description of Artificial Sequence: Synthetic oligonucleotide
  Target: LAMA2; (+) strand; PAM type: YTN; PAM sequence: CTT
agataatttctgctttgata

SEQ ID NO: 354778 - DNA, 20 bp, Artificial Sequence
  Description of Artificial Sequence: Synthetic oligonucleotide
  Target: LAMA2; (+) strand; PAM type: YTN; PAM sequence: TTA
gataatttctgctttgataa

SEQ ID NO: 354779 - DNA, 20 bp, Artificial Sequence
  Description of Artificial Sequence: Synthetic oligonucleotide
  Target: LAMA2; (+) strand; PAM type: YTN; PAM sequence: TTT
ctgctttgataattgagtat

SEQ ID NO: 354780 - DNA, 20 bp, Artificial Sequence
  Description of Artificial Sequence: Synthetic oligonucleotide
  Target: LAMA2; (+) strand; PAM type: YTN; PAM sequence: TTC
tgctttgataattgagtatt

SEQ ID NO: 354781 - DNA, 20 bp, Artificial Sequence
  Description of Artificial Sequence: Synthetic oligonucleotide
  Target: LAMA2; (+) strand; PAM type: YTN; PAM sequence: CTG
ctttgataattgagtatttt

SEQ ID NO: 354782 - DNA, 20 bp, Artificial Sequence
  Description of Artificial Sequence: Synthetic oligonucleotide
  Target: LAMA2; (+) strand; PAM type: YTN; PAM sequence: CTT
tgataattgagtatttttta

SEQ ID NO: 354783 - DNA, 20 bp, Artificial Sequence
  Description of Artificial Sequence: Synthetic oligonucleotide
  Target: LAMA2; (+) strand; PAM type: YTN; PAM sequence: TTT
gataattgagtattttttat

SEQ ID NO: 354784 - DNA, 20 bp, Artificial Sequence
  Description of Artificial Sequence: Synthetic oligonucleotide
  Target: LAMA2; (+) strand; PAM type: YTN; PAM sequence: TTG
ataattgagtattttttata

SEQ ID NO: 354785 - DNA, 20 bp, Artificial Sequence
  Description of Artificial Sequence: Synthetic oligonucleotide
  Target: LAMA2; (+) strand; PAM type: YTN; PAM sequence: TTG
agtattttttatagtcaatc

SEQ ID NO: 354786 - DNA, 20 bp, Artificial Sequence
  Description of Artificial Sequence: Synthetic oligonucleotide
  Target: LAMA2; (+) strand; PAM type: YTN; PAM sequence: TTT
tttatagtcaatcacaaact

SEQ ID NO: 354787 - DNA, 20 bp, Artificial Sequence
  Description of Artificial Sequence: Synthetic oligonucleotide
  Target: LAMA2; (+) strand; PAM type: YTN; PAM sequence: TTT
ttatagtcaatcacaaacta

SEQ ID NO: 354788 - DNA, 20 bp, Artificial Sequence
  Description of Artificial Sequence: Synthetic oligonucleotide
  Target: LAMA2; (+) strand; PAM type: YTN; PAM sequence: TTT
tatagtcaatcacaaactat

SEQ ID NO: 354789 - DNA, 20 bp, Artificial Sequence
  Description of Artificial Sequence: Synthetic oligonucleotide
  Target: LAMA2; (+) strand; PAM type: YTN; PAM sequence: TTT
atagtcaatcacaaactatg

SEQ ID NO: 354790 - DNA, 20 bp, Artificial Sequence
  Description of Artificial Sequence: Synthetic oligonucleotide
  Target: LAMA2; (+) strand; PAM type: YTN; PAM sequence: TTA
tagtcaatcacaaactatgg

SEQ ID NO: 354791 - DNA, 20 bp, Artificial Sequence
  Description of Artificial Sequence: Synthetic oligonucleotide
  Target: LAMA2; (+) strand; PAM type: YTN; PAM sequence: CTA
tggtaaatatttagttatat

SEQ ID NO: 354792 - DNA, 20 bp, Artificial Sequence
  Description of Artificial Sequence: Synthetic oligonucleotide
  Target: LAMA2; (+) strand; PAM type: YTN; PAM sequence: TTT
agttatataccacataatat

SEQ ID NO: 354793 - DNA, 20 bp, Artificial Sequence
  Description of Artificial Sequence: Synthetic oligonucleotide
  Target: LAMA2; (+) strand; PAM type: YTN; PAM sequence: TTA
gttatataccacataatatg

SEQ ID NO: 354794 - DNA, 20 bp, Artificial Sequence
  Description of Artificial Sequence: Synthetic oligonucleotide
  Target: LAMA2; (+) strand; PAM type: YTN; PAM sequence: TTA
tataccacataatatgtaat

SEQ ID NO: 354795 - DNA, 20 bp, Artificial Sequence
  Description of Artificial Sequence: Synthetic oligonucleotide
  Target: LAMA2; (+) strand; PAM type: YTN; PAM sequence: TTT
gatattattagattattcaa

SEQ ID NO: 354796 - DNA, 20 bp, Artificial Sequence
  Description of Artificial Sequence: Synthetic oligonucleotide
  Target: LAMA2; (+) strand; PAM type: YTN; PAM sequence: TTG
atattattagattattcaaa

SEQ ID NO: 354797 - DNA, 20 bp, Artificial Sequence
  Description of Artificial Sequence: Synthetic oligonucleotide
  Target: LAMA2; (+) strand; PAM type: YTN; PAM sequence: TTA
ttagattattcaaattttct

SEQ ID NO: 354798 - DNA, 20 bp, Artificial Sequence
  Description of Artificial Sequence: Synthetic oligonucleotide
  Target: LAMA2; (+) strand; PAM type: YTN; PAM sequence: TTA
gattattcaaattttctgtt

SEQ ID NO: 354799 - DNA, 20 bp, Artificial Sequence
  Description of Artificial Sequence: Synthetic oligonucleotide
  Target: LAMA2; (+) strand; PAM type: YTN; PAM sequence: TTA
ttcaaattttctgttttttc

SEQ ID NO: 354800 - DNA, 20 bp, Artificial Sequence
  Description of Artificial Sequence: Synthetic oligonucleotide
  Target: LAMA2; (+) strand; PAM type: YTN; PAM sequence: TTC
aaattttctgttttttctta

SEQ ID NO: 354801 - DNA, 20 bp, Artificial Sequence
  Description of Artificial Sequence: Synthetic oligonucleotide
  Target: LAMA2; (+) strand; PAM type: YTN; PAM sequence: TTT
tctgttttttcttacttcat

SEQ ID NO: 354802 - DNA, 20 bp, Artificial Sequence
  Description of Artificial Sequence: Synthetic oligonucleotide
  Target: LAMA2; (+) strand; PAM type: YTN; PAM sequence: TTT
ctgttttttcttacttcatc

SEQ ID NO: 354803 - DNA, 20 bp, Artificial Sequence
  Description of Artificial Sequence: Synthetic oligonucleotide
  Target: LAMA2; (+) strand; PAM type: YTN; PAM sequence: TTC
tgttttttcttacttcatct

SEQ ID NO: 354804 - DNA, 20 bp, Artificial Sequence
  Description of Artificial Sequence: Synthetic oligonucleotide
  Target: LAMA2; (+) strand; PAM type: YTN; PAM sequence: CTG
ttttttcttacttcatctgt

SEQ ID NO: 354805 - DNA, 20 bp, Artificial Sequence
  Description of Artificial Sequence: Synthetic oligonucleotide
  Target: LAMA2; (+) strand; PAM type: YTN; PAM sequence: TTT
tttcttacttcatctgtaaa

SEQ ID NO: 354806 - DNA, 20 bp, Artificial Sequence
  Description of Artificial Sequence: Synthetic oligonucleotide
  Target: LAMA2; (+) strand; PAM type: YTN; PAM sequence: TTT
ttcttacttcatctgtaaat

SEQ ID NO: 354807 - DNA, 20 bp, Artificial Sequence
  Description of Artificial Sequence: Synthetic oligonucleotide
  Target: LAMA2; (+) strand; PAM type: YTN; PAM sequence: TTT
tcttacttcatctgtaaata

SEQ ID NO: 354808 - DNA, 20 bp, Artificial Sequence
  Description of Artificial Sequence: Synthetic oligonucleotide
  Target: LAMA2; (+) strand; PAM type: YTN; PAM sequence: TTT
cttacttcatctgtaaatac

SEQ ID NO: 354809 - DNA, 20 bp, Artificial Sequence
  Description of Artificial Sequence: Synthetic oligonucleotide
  Target: LAMA2; (+) strand; PAM type: YTN; PAM sequence: TTC
ttacttcatctgtaaatact

SEQ ID NO: 354810 - DNA, 20 bp, Artificial Sequence
  Description of Artificial Sequence: Synthetic oligonucleotide
  Target: LAMA2; (+) strand; PAM type: YTN; PAM sequence: CTT
acttcatctgtaaatactta

SEQ ID NO: 354811 - DNA, 20 bp, Artificial Sequence
  Description of Artificial Sequence: Synthetic oligonucleotide
  Target: LAMA2; (+) strand; PAM type: YTN; PAM sequence: TTA
cttcatctgtaaatacttaa

SEQ ID NO: 354812 - DNA, 20 bp, Artificial Sequence
  Description of Artificial Sequence: Synthetic oligonucleotide
  Target: LAMA2; (+) strand; PAM type: YTN; PAM sequence: CTT
catctgtaaatacttaagat

SEQ ID NO: 354813 - DNA, 20 bp, Artificial Sequence
  Description of Artificial Sequence: Synthetic oligonucleotide
  Target: LAMA2; (+) strand; PAM type: YTN; PAM sequence: TTC
atctgtaaatacttaagatg

SEQ ID NO: 354814 - DNA, 20 bp, Artificial Sequence
  Description of Artificial Sequence: Synthetic oligonucleotide
  Target: LAMA2; (+) strand; PAM type: YTN; PAM sequence: CTG
taaatacttaagatgagtaa

SEQ ID NO: 354815 - DNA, 20 bp, Artificial Sequence
  Description of Artificial Sequence: Synthetic oligonucleotide
  Target: LAMA2; (+) strand; PAM type: YTN; PAM sequence: CTT
aagatgagtaagttagcatc

SEQ ID NO: 354816 - DNA, 20 bp, Artificial Sequence
  Description of Artificial Sequence: Synthetic oligonucleotide
  Target: LAMA2; (+) strand; PAM type: YTN; PAM sequence: TTA
agatgagtaagttagcatca

SEQ ID NO: 354817 - DNA, 20 bp, Artificial Sequence
  Description of Artificial Sequence: Synthetic oligonucleotide
  Target: LAMA2; (+) strand; PAM type: YTN; PAM sequence: TTA
gcatcattttcagccattga

SEQ ID NO: 354818 - DNA, 20 bp, Artificial Sequence
  Description of Artificial Sequence: Synthetic oligonucleotide
  Target: LAMA2; (+) strand; PAM type: YTN; PAM sequence: TTT
tcagccattgacttttaaag

SEQ ID NO: 354819 - DNA, 20 bp, Artificial Sequence
  Description of Artificial Sequence: Synthetic oligonucleotide
  Target: LAMA2; (+) strand; PAM type: YTN; PAM sequence: TTT
cagccattgacttttaaagt

SEQ ID NO: 354820 - DNA, 20 bp, Artificial Sequence
  Description of Artificial Sequence: Synthetic oligonucleotide
  Target: LAMA2; (+) strand; PAM type: YTN; PAM sequence: TTC
agccattgacttttaaagtt

SEQ ID NO: 354821 - DNA, 20 bp, Artificial Sequence
  Description of Artificial Sequence: Synthetic oligonucleotide
  Target: LAMA2; (+) strand; PAM type: YTN; PAM sequence: TTG
acttttaaagtttttatttc

SEQ ID NO: 354822 - DNA, 20 bp, Artificial Sequence
  Description of Artificial Sequence: Synthetic oligonucleotide
  Target: LAMA2; (+) strand; PAM type: YTN; PAM sequence: CTT
ttaaagtttttatttccaat

SEQ ID NO: 354823 - DNA, 20 bp, Artificial Sequence
  Description of Artificial Sequence: Synthetic oligonucleotide
  Target: LAMA2; (+) strand; PAM type: YTN; PAM sequence: TTT
taaagtttttatttccaata

SEQ ID NO: 354824 - DNA, 20 bp, Artificial Sequence
  Description of Artificial Sequence: Synthetic oligonucleotide
  Target: LAMA2; (+) strand; PAM type: YTN; PAM sequence: TTT
aaagtttttatttccaatat

SEQ ID NO: 354825 - DNA, 20 bp, Artificial Sequence
  Description of Artificial Sequence: Synthetic oligonucleotide
  Target: LAMA2; (+) strand; PAM type: YTN; PAM sequence: TTA
aagtttttatttccaatata

SEQ ID NO: 354826 - DNA, 20 bp, Artificial Sequence
  Description of Artificial Sequence: Synthetic oligonucleotide
  Target: LAMA2; (+) strand; PAM type: YTN; PAM sequence: TTT
ttatttccaatatattttgt

SEQ ID NO: 354827 - DNA, 20 bp, Artificial Sequence
  Description of Artificial Sequence: Synthetic oligonucleotide
  Target: LAMA2; (+) strand; PAM type: YTN; PAM sequence: TTT
tatttccaatatattttgtt

SEQ ID NO: 354828 - DNA, 20 bp, Artificial Sequence
  Description of Artificial Sequence: Synthetic oligonucleotide
  Target: LAMA2; (+) strand; PAM type: YTN; PAM sequence: TTT
atttccaatatattttgttg

SEQ ID NO: 354829 - DNA, 20 bp, Artificial Sequence
  Description of Artificial Sequence: Synthetic oligonucleotide
  Target: LAMA2; (+) strand; PAM type: YTN; PAM sequence: TTA
tttccaatatattttgttgt

SEQ ID NO: 354830 - DNA, 20 bp, Artificial Sequence
  Description of Artificial Sequence: Synthetic oligonucleotide
  Target: LAMA2; (+) strand; PAM type: YTN; PAM sequence: TTT
ccaatatattttgttgtcca

SEQ ID NO: 354831 - DNA, 20 bp, Artificial Sequence
  Description of Artificial Sequence: Synthetic oligonucleotide
  Target: LAMA2; (+) strand; PAM type: YTN; PAM sequence: TTC
caatatattttgttgtccac

SEQ ID NO: 354832 - DNA, 20 bp, Artificial Sequence
  Description of Artificial Sequence: Synthetic oligonucleotide
  Target: LAMA2; (+) strand; PAM type: YTN; PAM sequence: TTT
tgttgtccacatatttttgt

SEQ ID NO: 354833 - DNA, 20 bp, Artificial Sequence
  Description of Artificial Sequence: Synthetic oligonucleotide
  Target: LAMA2; (+) strand; PAM type: YTN; PAM sequence: TTT
gttgtccacatatttttgta

SEQ ID NO: 354834 - DNA, 20 bp, Artificial Sequence
  Description of Artificial Sequence: Synthetic oligonucleotide
  Target: LAMA2; (+) strand; PAM type: YTN; PAM sequence: TTG
ttgtccacatatttttgtac

SEQ ID NO: 354835 - DNA, 20 bp, Artificial Sequence
  Description of Artificial Sequence: Synthetic oligonucleotide
  Target: LAMA2; (+) strand; PAM type: YTN; PAM sequence: TTG
tccacatatttttgtactga

SEQ ID NO: 354836 - DNA, 20 bp, Artificial Sequence
  Description of Artificial Sequence: Synthetic oligonucleotide
  Target: LAMA2; (+) strand; PAM type: YTN; PAM sequence: TTT
ttgtactgataattagtgct

SEQ ID NO: 354837 - DNA, 20 bp, Artificial Sequence
  Description of Artificial Sequence: Synthetic oligonucleotide
  Target: LAMA2; (+) strand; PAM type: YTN; PAM sequence: TTT
tgtactgataattagtgctt

SEQ ID NO: 354838 - DNA, 20 bp, Artificial Sequence
  Description of Artificial Sequence: Synthetic oligonucleotide
  Target: LAMA2; (+) strand; PAM type: YTN; PAM sequence: TTT
gtactgataattagtgctta

SEQ ID NO: 354839 - DNA, 20 bp, Artificial Sequence
  Description of Artificial Sequence: Synthetic oligonucleotide
  Target: LAMA2; (+) strand; PAM type: YTN; PAM sequence: TTG
tactgataattagtgcttat

SEQ ID NO: 354840 - DNA, 20 bp, Artificial Sequence
  Description of Artificial Sequence: Synthetic oligonucleotide
  Target: LAMA2; (+) strand; PAM type: YTN; PAM sequence: CTG
ataattagtgcttatttgaa

SEQ ID NO: 354841 - DNA, 20 bp, Artificial Sequence
  Description of Artificial Sequence: Synthetic oligonucleotide
  Target: LAMA2; (+) strand; PAM type: YTN; PAM sequence: TTA
gtgcttatttgaagcataaa

SEQ ID NO: 354842 - DNA, 20 bp, Artificial Sequence
  Description of Artificial Sequence: Synthetic oligonucleotide
  Target: LAMA2; (+) strand; PAM type: YTN; PAM sequence: CTT
atttgaagcataaacataat

SEQ ID NO: 354843 - DNA, 20 bp, Artificial Sequence
  Description of Artificial Sequence: Synthetic oligonucleotide
  Target: LAMA2; (+) strand; PAM type: YTN; PAM sequence: TTA
tttgaagcataaacataata

SEQ ID NO: 354844 - DNA, 20 bp, Artificial Sequence
  Description of Artificial Sequence: Synthetic oligonucleotide
  Target: LAMA2; (+) strand; PAM type: YTN; PAM sequence: TTT
gaagcataaacataataatt

SEQ ID NO: 354845 - DNA, 20 bp, Artificial Sequence
  Description of Artificial Sequence: Synthetic oligonucleotide
  Target: LAMA2; (+) strand; PAM type: YTN; PAM sequence: TTG
aagcataaacataataattt

SEQ ID NO: 354846 - DNA, 20 bp, Artificial Sequence
  Description of Artificial Sequence: Synthetic oligonucleotide
  Target: LAMA2; (+) strand; PAM type: YTN; PAM sequence: TTT
aaatcatgtttttattatat

SEQ ID NO: 354847 - DNA, 20 bp, Artificial Sequence
  Description of Artificial Sequence: Synthetic oligonucleotide
  Target: LAMA2; (+) strand; PAM type: YTN; PAM sequence: TTA
aatcatgtttttattatatt

SEQ ID NO: 354848 - DNA, 20 bp, Artificial Sequence
  Description of Artificial Sequence: Synthetic oligonucleotide
  Target: LAMA2; (+) strand; PAM type: YTN; PAM sequence: TTT
ttattatatttttatcaatg

SEQ ID NO: 354849 - DNA, 20 bp, Artificial Sequence
  Description of Artificial Sequence: Synthetic oligonucleotide
  Target: LAMA2; (+) strand; PAM type: YTN; PAM sequence: TTT
tattatatttttatcaatgt

SEQ ID NO: 354850 - DNA, 20 bp, Artificial Sequence
  Description of Artificial Sequence: Synthetic oligonucleotide
  Target: LAMA2; (+) strand; PAM type: YTN; PAM sequence: TTT
attatatttttatcaatgta

SEQ ID NO: 354851 - DNA, 20 bp, Artificial Sequence
  Description of Artificial Sequence: Synthetic oligonucleotide
  Target: LAMA2; (+) strand; PAM type: YTN; PAM sequence: TTA
ttatatttttatcaatgtaa

SEQ ID NO: 354852 - DNA, 20 bp, Artificial Sequence
  Description of Artificial Sequence: Synthetic oligonucleotide
  Target: LAMA2; (+) strand; PAM type: YTN; PAM sequence: TTA
tatttttatcaatgtaaaat

SEQ ID NO: 354853 - DNA, 20 bp, Artificial Sequence
  Description of Artificial Sequence: Synthetic oligonucleotide
  Target: LAMA2; (+) strand; PAM type: YTN; PAM sequence: TTT
ttatcaatgtaaaatgagag

SEQ ID NO: 354854 - DNA, 20 bp, Artificial Sequence
  Description of Artificial Sequence: Synthetic oligonucleotide
  Target: LAMA2; (+) strand; PAM type: YTN; PAM sequence: TTT
tatcaatgtaaaatgagagc

SEQ ID NO: 354855 - DNA, 20 bp, Artificial Sequence
  Description of Artificial Sequence: Synthetic oligonucleotide
  Target: LAMA2; (+) strand; PAM type: YTN; PAM sequence: TTT
atcaatgtaaaatgagagct

SEQ ID NO: 354856 - DNA, 20 bp, Artificial Sequence
  Description of Artificial Sequence: Synthetic oligonucleotide
  Target: LAMA2; (+) strand; PAM type: YTN; PAM sequence: TTA
tcaatgtaaaatgagagctt

SEQ ID NO: 354857 - DNA, 20 bp, Artificial Sequence
  Description of Artificial Sequence: Synthetic oligonucleotide
  Target: LAMA2; (+) strand; PAM type: YTN; PAM sequence: CTT
gccttactgaacctagttta

SEQ ID NO: 354858 - DNA, 20 bp, Artificial Sequence
  Description of Artificial Sequence: Synthetic oligonucleotide
  Target: LAMA2; (+) strand; PAM type: YTN; PAM sequence: TTG
ccttactgaacctagtttat

SEQ ID NO: 354859 - DNA, 20 bp, Artificial Sequence
  Description of Artificial Sequence: Synthetic oligonucleotide
  Target: LAMA2; (+) strand; PAM type: YTN; PAM sequence: CTT
actgaacctagtttatttga

SEQ ID NO: 354860 - DNA, 20 bp, Artificial Sequence
  Description of Artificial Sequence: Synthetic oligonucleotide
  Target: LAMA2; (+) strand; PAM type: YTN; PAM sequence: TTA
ctgaacctagtttatttgag

SEQ ID NO: 354861 - DNA, 20 bp, Artificial Sequence
  Description of Artificial Sequence: Synthetic oligonucleotide
  Target: LAMA2; (+) strand; PAM type: YTN; PAM sequence: CTG
aacctagtttatttgagttc

SEQ ID NO: 354862 - DNA, 20 bp, Artificial Sequence
  Description of Artificial Sequence: Synthetic oligonucleotide
  Target: LAMA2; (+) strand; PAM type: YTN; PAM sequence: CTA
gtttatttgagttctacttt

SEQ ID NO: 354863 - DNA, 20 bp, Artificial Sequence
  Description of Artificial Sequence: Synthetic oligonucleotide
  Target: LAMA2; (+) strand; PAM type: YTN; PAM sequence: TTT
atttgagttctactttggcc

SEQ ID NO: 354864 - DNA, 20 bp, Artificial Sequence
  Description of Artificial Sequence: Synthetic oligonucleotide
  Target: LAMA2; (+) strand; PAM type: YTN; PAM sequence: TTA
tttgagttctactttggccc

SEQ ID NO: 354865 - DNA, 20 bp, Artificial Sequence
  Description of Artificial Sequence: Synthetic oligonucleotide
  Target: LAMA2; (+) strand; PAM type: YTN; PAM sequence: TTT
gagttctactttggccctat

SEQ ID NO: 354866 - DNA, 20 bp, Artificial Sequence
  Description of Artificial Sequence: Synthetic oligonucleotide
  Target: LAMA2; (+) strand; PAM type: YTN; PAM sequence: TTG
agttctactttggccctatt

SEQ ID NO: 354867 - DNA, 20 bp, Artificial Sequence
  Description of Artificial Sequence: Synthetic oligonucleotide
  Target: LAMA2; (+) strand; PAM type: YTN; PAM sequence: TTC
tactttggccctatttaata

SEQ ID NO: 354868 - DNA, 20 bp, Artificial Sequence
  Description of Artificial Sequence: Synthetic oligonucleotide
  Target: LAMA2; (+) strand; PAM type: YTN; PAM sequence: CTA
ctttggccctatttaatatt

SEQ ID NO: 354869 - DNA, 20 bp, Artificial Sequence
  Description of Artificial Sequence: Synthetic oligonucleotide
  Target: LAMA2; (+) strand; PAM type: YTN; PAM sequence: CTT
tggccctatttaatatttca

SEQ ID NO: 354870 - DNA, 20 bp, Artificial Sequence
  Description of Artificial Sequence: Synthetic oligonucleotide
  Target: LAMA2; (+) strand; PAM type: YTN; PAM sequence: TTT
ggccctatttaatatttcac

SEQ ID NO: 354871 - DNA, 20 bp, Artificial Sequence
  Description of Artificial Sequence: Synthetic oligonucleotide
  Target: LAMA2; (+) strand; PAM type: YTN; PAM sequence: TTG
gccctatttaatatttcaca

SEQ ID NO: 354872 - DNA, 20 bp, Artificial Sequence
  Description of Artificial Sequence: Synthetic oligonucleotide
  Target: LAMA2; (+) strand; PAM type: YTN; PAM sequence: CTA
tttaatatttcacaactttt

SEQ ID NO: 354873 - DNA, 20 bp, Artificial Sequence
  Description of Artificial Sequence: Synthetic oligonucleotide
  Target: LAMA2; (+) strand; PAM type: YTN; PAM sequence: TTT
aatatttcacaacttttttt

SEQ ID NO: 354874 - DNA, 20 bp, Artificial Sequence
  Description of Artificial Sequence: Synthetic oligonucleotide
  Target: LAMA2; (+) strand; PAM type: YTN; PAM sequence: TTA
atatttcacaactttttttt

SEQ ID NO: 354875 - DNA, 20 bp, Artificial Sequence
  Description of Artificial Sequence: Synthetic oligonucleotide
  Target: LAMA2; (+) strand; PAM type: YTN; PAM sequence: TTT
cacaacttttttttcttttc

SEQ ID NO: 354876 - DNA, 20 bp, Artificial Sequence
  Description of Artificial Sequence: Synthetic oligonucleotide
  Target: LAMA2; (+) strand; PAM type: YTN; PAM sequence: TTC
acaacttttttttcttttcc

SEQ ID NO: 354877 - DNA, 20 bp, Artificial Sequence
  Description of Artificial Sequence: Synthetic oligonucleotide
  Target: LAMA2; (+) strand; PAM type: YTN; PAM sequence: CTT
ttttttcttttccatacgct

SEQ ID NO: 354878 - DNA, 20 bp, Artificial Sequence
  Description of Artificial Sequence: Synthetic oligonucleotide
  Target: LAMA2; (+) strand; PAM type: YTN; PAM sequence: TTT
tttttcttttccatacgctt

SEQ ID NO: 354879 - DNA, 20 bp, Artificial Sequence
  Description of Artificial Sequence: Synthetic oligonucleotide
  Target: LAMA2; (+) strand; PAM type: YTN; PAM sequence: TTT
ttttcttttccatacgcttt

SEQ ID NO: 354880 - DNA, 20 bp, Artificial Sequence
  Description of Artificial Sequence: Synthetic oligonucleotide
  Target: LAMA2; (+) strand; PAM type: YTN; PAM sequence: TTT
tttcttttccatacgctttc

SEQ ID NO: 354881 - DNA, 20 bp, Artificial Sequence
  Description of Artificial Sequence: Synthetic oligonucleotide
  Target: LAMA2; (+) strand; PAM type: YTN; PAM sequence: TTT
ttcttttccatacgctttct

SEQ ID NO: 354882 - DNA, 20 bp, Artificial Sequence
  Description of Artificial Sequence: Synthetic oligonucleotide
  Target: LAMA2; (+) strand; PAM type: YTN; PAM sequence: TTT
tcttttccatacgctttctt

SEQ ID NO: 354883 - DNA, 20 bp, Artificial Sequence
  Description of Artificial Sequence: Synthetic oligonucleotide
  Target: LAMA2; (+) strand; PAM type: YTN; PAM sequence: TTT
cttttccatacgctttcttg

SEQ ID NO: 354884 - DNA, 20 bp, Artificial Sequence
  Description of Artificial Sequence: Synthetic oligonucleotide
  Target: LAMA2; (+) strand; PAM type: YTN; PAM sequence: TTC
ttttccatacgctttcttga

SEQ ID NO: 354885 - DNA, 20 bp, Artificial Sequence
  Description of Artificial Sequence: Synthetic oligonucleotide
  Target: LAMA2; (+) strand; PAM type: YTN; PAM sequence: CTT
ttccatacgctttcttgaca

SEQ ID NO: 354886 - DNA, 20 bp, Artificial Sequence
  Description of Artificial Sequence: Synthetic oligonucleotide
  Target: LAMA2; (+) strand; PAM type: YTN; PAM sequence: TTT
tccatacgctttcttgacac

SEQ ID NO: 354887 - DNA, 20 bp, Artificial Sequence
  Description of Artificial Sequence: Synthetic oligonucleotide
  Target: LAMA2; (+) strand; PAM type: YTN; PAM sequence: TTT
ccatacgctttcttgacaca

SEQ ID NO: 354888 - DNA, 20 bp, Artificial Sequence
  Description of Artificial Sequence: Synthetic oligonucleotide
  Target: LAMA2; (+) strand; PAM type: YTN; PAM sequence: TTC
catacgctttcttgacacac

SEQ ID NO: 354889 - DNA, 20 bp, Artificial Sequence
  Description of Artificial Sequence: Synthetic oligonucleotide
  Target: LAMA2; (+) strand; PAM type: YTN; PAM sequence: CTT
tcttgacacacattcatttt

SEQ ID NO: 354890 - DNA, 20 bp, Artificial Sequence
  Description of Artificial Sequence: Synthetic oligonucleotide
  Target: LAMA2; (+) strand; PAM type: YTN; PAM sequence: TTT
cttgacacacattcattttc

SEQ ID NO: 354891 - DNA, 20 bp, Artificial Sequence
  Description of Artificial Sequence: Synthetic oligonucleotide
  Target: LAMA2; (+) strand; PAM type: YTN; PAM sequence: TTC
ttgacacacattcattttct

SEQ ID NO: 354892 - DNA, 20 bp, Artificial Sequence
  Description of Artificial Sequence: Synthetic oligonucleotide
  Target: LAMA2; (+) strand; PAM type: YTN; PAM sequence: CTT
gacacacattcattttcttt

SEQ ID NO: 354893 - DNA, 20 bp, Artificial Sequence
  Description of Artificial Sequence: Synthetic oligonucleotide
  Target: LAMA2; (+) strand; PAM type: YTN; PAM sequence: TTG
acacacattcattttctttt

SEQ ID NO: 354894 - DNA, 20 bp, Artificial Sequence
  Description of Artificial Sequence: Synthetic oligonucleotide
  Target: LAMA2; (+) strand; PAM type: YTN; PAM sequence: TTC
attttcttttacttgtaata

SEQ ID NO: 354895 - DNA, 20 bp, Artificial Sequence
  Description of Artificial Sequence: Synthetic oligonucleotide
  Target: LAMA2; (+) strand; PAM type: YTN; PAM sequence: TTT
tcttttacttgtaatatttt

SEQ ID NO: 354896 - DNA, 20 bp, Artificial Sequence
  Description of Artificial Sequence: Synthetic oligonucleotide
  Target: LAMA2; (+) strand; PAM type: YTN; PAM sequence: TTT
cttttacttgtaatatttta

SEQ ID NO: 354897 - DNA, 20 bp, Artificial Sequence
  Description of Artificial Sequence: Synthetic oligonucleotide
  Target: LAMA2; (+) strand; PAM type: YTN; PAM sequence: TTC
ttttacttgtaatattttat

SEQ ID NO: 354898 - DNA, 20 bp, Artificial Sequence
  Description of Artificial Sequence: Synthetic oligonucleotide
  Target: LAMA2; (+) strand; PAM type: YTN; PAM sequence: CTT
ttacttgtaatattttattt

SEQ ID NO: 354899 - DNA, 20 bp, Artificial Sequence
  Description of Artificial Sequence: Synthetic oligonucleotide
  Target: LAMA2; (+) strand; PAM type: YTN; PAM sequence: TTT
tacttgtaatattttatttg

SEQ ID NO: 354900 - DNA, 20 bp, Artificial Sequence
  Description of Artificial Sequence: Synthetic oligonucleotide
  Target: LAMA2; (+) strand; PAM type: YTN; PAM sequence: TTT
acttgtaatattttatttgc

SEQ ID NO: 354901 - DNA, 20 bp, Artificial Sequence
  Description of Artificial Sequence: Synthetic oligonucleotide
  Target: LAMA2; (+) strand; PAM type: YTN; PAM sequence: TTA
cttgtaatattttatttgca

SEQ ID NO: 354902 - DNA, 20 bp, Artificial Sequence
  Description of Artificial Sequence: Synthetic oligonucleotide
  Target: LAMA2; (+) strand; PAM type: YTN; PAM sequence: CTT
gtaatattttatttgcaata

SEQ ID NO: 354903 - DNA, 20 bp, Artificial Sequence
  Description of Artificial Sequence: Synthetic oligonucleotide
  Target: LAMA2; (+) strand; PAM type: YTN; PAM sequence: TTG
taatattttatttgcaatat

SEQ ID NO: 354904 - DNA, 20 bp, Artificial Sequence
  Description of Artificial Sequence: Synthetic oligonucleotide
  Target: LAMA2; (+) strand; PAM type: YTN; PAM sequence: TTT
tatttgcaatattcctgttc

SEQ ID NO: 354905 - DNA, 20 bp, Artificial Sequence
  Description of Artificial Sequence: Synthetic oligonucleotide
  Target: LAMA2; (+) strand; PAM type: YTN; PAM sequence: TTT
atttgcaatattcctgttca

SEQ ID NO: 354906 - DNA, 20 bp, Artificial Sequence
  Description of Artificial Sequence: Synthetic oligonucleotide
  Target: LAMA2; (+) strand; PAM type: YTN; PAM sequence: TTA
tttgcaatattcctgttcat

SEQ ID NO: 354907 - DNA, 20 bp, Artificial Sequence
  Description of Artificial Sequence: Synthetic oligonucleotide
  Target: LAMA2; (+) strand; PAM type: YTN; PAM sequence: TTT
gcaatattcctgttcatttt

SEQ ID NO: 354908 - DNA, 20 bp, Artificial Sequence
  Description of Artificial Sequence: Synthetic oligonucleotide
  Target: LAMA2; (+) strand; PAM type: YTN; PAM sequence: TTG
caatattcctgttcattttg

SEQ ID NO: 354909 - DNA, 20 bp, Artificial Sequence
  Description of Artificial Sequence: Synthetic oligonucleotide
  Target: LAMA2; (+) strand; PAM type: YTN; PAM sequence: TTC
ctgttcattttgtttatctc

SEQ ID NO: 354910 - DNA, 20 bp, Artificial Sequence
  Description of Artificial Sequence: Synthetic oligonucleotide
  Target: LAMA2; (+) strand; PAM type: YTN; PAM sequence: CTG
ttcattttgtttatctcttg

SEQ ID NO: 354911 - DNA, 20 bp, Artificial Sequence
  Description of Artificial Sequence: Synthetic oligonucleotide
  Target: LAMA2; (+) strand; PAM type: YTN; PAM sequence: TTC
attttgtttatctcttgtgc

SEQ ID NO: 354912 - DNA, 20 bp, Artificial Sequence
  Description of Artificial Sequence: Synthetic oligonucleotide
  Target: LAMA2; (+) strand; PAM type: YTN; PAM sequence: TTT
tgtttatctcttgtgcacat

SEQ ID NO: 354913 - DNA, 20 bp, Artificial Sequence
  Description of Artificial Sequence: Synthetic oligonucleotide
  Target: LAMA2; (+) strand; PAM type: YTN; PAM sequence: TTT
gtttatctcttgtgcacatt

SEQ ID NO: 354914 - DNA, 20 bp, Artificial Sequence
  Description of Artificial Sequence: Synthetic oligonucleotide
  Target: LAMA2; (+) strand; PAM type: YTN; PAM sequence: TTG
tttatctcttgtgcacatta

SEQ ID NO: 354915 - DNA, 20 bp, Artificial Sequence
  Description of Artificial Sequence: Synthetic oligonucleotide
  Target: LAMA2; (+) strand; PAM type: YTN; PAM sequence: TTT
atctcttgtgcacattacat

SEQ ID NO: 354916 - DNA, 20 bp, Artificial Sequence
  Description of Artificial Sequence: Synthetic oligonucleotide
  Target: LAMA2; (+) strand; PAM type: YTN; PAM sequence: TTA
tctcttgtgcacattacatg

SEQ ID NO: 354917 - DNA, 20 bp, Artificial Sequence
  Description of Artificial Sequence: Synthetic oligonucleotide
  Target: LAMA2; (+) strand; PAM type: YTN; PAM sequence: CTC
ttgtgcacattacatgttta

SEQ ID NO: 354918 - DNA, 20 bp, Artificial Sequence
  Description of Artificial Sequence: Synthetic oligonucleotide
  Target: LAMA2; (+) strand; PAM type: YTN; PAM sequence: CTT
gtgcacattacatgtttatg

SEQ ID NO: 354919 - DNA, 20 bp, Artificial Sequence
  Description of Artificial Sequence: Synthetic oligonucleotide
  Target: LAMA2; (+) strand; PAM type: YTN; PAM sequence: TTG
tgcacattacatgtttatgt

SEQ ID NO: 354920 - DNA, 20 bp, Artificial Sequence
  Description of Artificial Sequence: Synthetic oligonucleotide
  Target: LAMA2; (+) strand; PAM type: YTN; PAM sequence: TTA
catgtttatgtttttaataa

SEQ ID NO: 354921 - DNA, 20 bp, Artificial Sequence
  Description of Artificial Sequence: Synthetic oligonucleotide
  Target: LAMA2; (+) strand; PAM type: YTN; PAM sequence: TTT
atgtttttaataagaacagt

SEQ ID NO: 354922 - DNA, 20 bp, Artificial Sequence
  Description of Artificial Sequence: Synthetic oligonucleotide
  Target: LAMA2; (+) strand; PAM type: YTN; PAM sequence: TTA
tgtttttaataagaacagta

SEQ ID NO: 354923 - DNA, 20 bp, Artificial Sequence
  Description of Artificial Sequence: Synthetic oligonucleotide
  Target: LAMA2; (+) strand; PAM type: YTN; PAM sequence: TTT
ttaataagaacagtaagact

SEQ ID NO: 354924 - DNA, 20 bp, Artificial Sequence
  Description of Artificial Sequence: Synthetic oligonucleotide
  Target: LAMA2; (+) strand; PAM type: YTN; PAM sequence: TTT
taataagaacagtaagactg

SEQ ID NO: 354925 - DNA, 20 bp, Artificial Sequence
  Description of Artificial Sequence: Synthetic oligonucleotide
  Target: LAMA2; (+) strand; PAM type: YTN; PAM sequence: TTT
aataagaacagtaagactgc

SEQ ID NO: 354926 - DNA, 20 bp, Artificial Sequence
  Description of Artificial Sequence: Synthetic oligonucleotide
  Target: LAMA2; (+) strand; PAM type: YTN; PAM sequence: TTA
ataagaacagtaagactgct

SEQ ID NO: 354927 - DNA, 20 bp, Artificial Sequence
  Description of Artificial Sequence: Synthetic oligonucleotide
  Target: LAMA2; (+) strand; PAM type: YTN; PAM sequence: CTG
cttaactcattagtatgtat

SEQ ID NO: 354928 - DNA, 20 bp, Artificial Sequence
  Description of Artificial Sequence: Synthetic oligonucleotide
  Target: LAMA2; (+) strand; PAM type: YTN; PAM sequence: CTT
aactcattagtatgtattta

SEQ ID NO: 354929 - DNA, 20 bp, Artificial Sequence
  Description of Artificial Sequence: Synthetic oligonucleotide
  Target: LAMA2; (+) strand; PAM type: YTN; PAM sequence: TTA
actcattagtatgtatttag

SEQ ID NO: 354930 - DNA, 20 bp, Artificial Sequence
  Description of Artificial Sequence: Synthetic oligonucleotide
  Target: LAMA2; (+) strand; PAM type: YTN; PAM sequence: CTC
attagtatgtatttagtatg

SEQ ID NO: 354931 - DNA, 20 bp, Artificial Sequence
  Description of Artificial Sequence: Synthetic oligonucleotide
  Target: LAMA2; (+) strand; PAM type: YTN; PAM sequence: TTA
gtatgtatttagtatgcatt

SEQ ID NO: 354932 - DNA, 20 bp, Artificial Sequence
  Description of Artificial Sequence: Synthetic oligonucleotide
  Target: LAMA2; (+) strand; PAM type: YTN; PAM sequence: TTT
agtatgcatttctgacacta

SEQ ID NO: 354933 - DNA, 20 bp, Artificial Sequence
  Description of Artificial Sequence: Synthetic oligonucleotide
  Target: LAMA2; (+) strand; PAM type: YTN; PAM sequence: TTA
gtatgcatttctgacactaa

SEQ ID NO: 354934 - DNA, 20 bp, Artificial Sequence
  Description of Artificial Sequence: Synthetic oligonucleotide
  Target: LAMA2; (+) strand; PAM type: YTN; PAM sequence: TTT
ctgacactaattctgtcatt

SEQ ID NO: 354935 - DNA, 20 bp, Artificial Sequence
  Description of Artificial Sequence: Synthetic oligonucleotide
  Target: LAMA2; (+) strand; PAM type: YTN; PAM sequence: TTC
tgacactaattctgtcattc

SEQ ID NO: 354936 - DNA, 20 bp, Artificial Sequence
  Description of Artificial Sequence: Synthetic oligonucleotide
  Target: LAMA2; (+) strand; PAM type: YTN; PAM sequence: CTG
acactaattctgtcattctg

SEQ ID NO: 354937 - DNA, 20 bp, Artificial Sequence
  Description of Artificial Sequence: Synthetic oligonucleotide
  Target: LAMA2; (+) strand; PAM type: YTN; PAM sequence: CTA
attctgtcattctgcttttt

SEQ ID NO: 354938 - DNA, 20 bp, Artificial Sequence
  Description of Artificial Sequence: Synthetic oligonucleotide
  Target: LAMA2; (+) strand; PAM type: YTN; PAM sequence: TTC
tgtcattctgctttttgctt

SEQ ID NO: 354939 - DNA, 20 bp, Artificial Sequence
  Description of Artificial Sequence: Synthetic oligonucleotide
  Target: LAMA2; (+) strand; PAM type: YTN; PAM sequence: CTG
tcattctgctttttgctttc

SEQ ID NO: 354940 - DNA, 20 bp, Artificial Sequence
  Description of Artificial Sequence: Synthetic oligonucleotide
  Target: LAMA2; (+) strand; PAM type: YTN; PAM sequence: TTC
tgctttttgctttctctccc

SEQ ID NO: 354941 - DNA, 20 bp, Artificial Sequence
  Description of Artificial Sequence: Synthetic oligonucleotide
  Target: LAMA2; (+) strand; PAM type: YTN; PAM sequence: CTG
ctttttgctttctctcccta

SEQ ID NO: 354942 - DNA, 20 bp, Artificial Sequence
  Description of Artificial Sequence: Synthetic oligonucleotide
  Target: LAMA2; (+) strand; PAM type: YTN; PAM sequence: CTT
tttgctttctctccctaatg

SEQ ID NO: 354943 - DNA, 20 bp, Artificial Sequence
  Description of Artificial Sequence: Synthetic oligonucleotide
  Target: LAMA2; (+) strand; PAM type: YTN; PAM sequence: TTT
ttgctttctctccctaatgt

SEQ ID NO: 354944 - DNA, 20 bp, Artificial Sequence
  Description of Artificial Sequence: Synthetic oligonucleotide
  Target: LAMA2; (+) strand; PAM type: YTN; PAM sequence: TTT
tgctttctctccctaatgtt

SEQ ID NO: 354945 - DNA, 20 bp, Artificial Sequence
  Description of Artificial Sequence: Synthetic oligonucleotide
  Target: LAMA2; (+) strand; PAM type: YTN; PAM sequence: TTT
gctttctctccctaatgttt

SEQ ID NO: 354946 - DNA, 20 bp, Artificial Sequence
  Description of Artificial Sequence: Synthetic oligonucleotide
  Target: LAMA2; (+) strand; PAM type: YTN; PAM sequence: TTG
ctttctctccctaatgtttc

SEQ ID NO: 354947 - DNA, 20 bp, Artificial Sequence
  Description of Artificial Sequence: Synthetic oligonucleotide
  Target: LAMA2; (+) strand; PAM type: YTN; PAM sequence: CTT
tctctccctaatgtttcctt

SEQ ID NO: 354948 - DNA, 20 bp, Artificial Sequence
  Description of Artificial Sequence: Synthetic oligonucleotide
  Target: LAMA2; (+) strand; PAM type: YTN; PAM sequence: TTT
ctctccctaatgtttccttg

SEQ ID NO: 354949 - DNA, 20 bp, Artificial Sequence
  Description of Artificial Sequence: Synthetic oligonucleotide
  Target: LAMA2; (+) strand; PAM type: YTN; PAM sequence: TTC
tctccctaatgtttccttgc

SEQ ID NO: 354950 - DNA, 20 bp, Artificial Sequence
  Description of Artificial Sequence: Synthetic oligonucleotide
  Target: LAMA2; (+) strand; PAM type: YTN; PAM sequence: CTC
tccctaatgtttccttgcct

SEQ ID NO: 354951 - DNA, 20 bp, Artificial Sequence
  Description of Artificial Sequence: Synthetic oligonucleotide
  Target: LAMA2; (+) strand; PAM type: YTN; PAM sequence: CTC
cctaatgtttccttgccttt

SEQ ID NO: 354952 - DNA, 20 bp, Artificial Sequence
  Description of Artificial Sequence: Synthetic oligonucleotide
  Target: LAMA2; (+) strand; PAM type: YTN; PAM sequence: CTA
atgtttccttgccttttttt

SEQ ID NO: 354953 - DNA, 20 bp, Artificial Sequence
  Description of Artificial Sequence: Synthetic oligonucleotide
  Target: LAMA2; (+) strand; PAM type: YTN; PAM sequence: TTT
ccttgcctttttttccctcc

SEQ ID NO: 354954 - DNA, 20 bp, Artificial Sequence
  Description of Artificial Sequence: Synthetic oligonucleotide
  Target: LAMA2; (+) strand; PAM type: YTN; PAM sequence: TTC
cttgcctttttttccctcct

SEQ ID NO: 354955 - DNA, 20 bp, Artificial Sequence
  Description of Artificial Sequence: Synthetic oligonucleotide
  Target: LAMA2; (+) strand; PAM type: YTN; PAM sequence: CTT
gcctttttttccctcctcct

SEQ ID NO: 354956 - DNA, 20 bp, Artificial Sequence
  Description of Artificial Sequence: Synthetic oligonucleotide
  Target: LAMA2; (+) strand; PAM type: YTN; PAM sequence: TTG
cctttttttccctcctcctt

SEQ ID NO: 354957 - DNA, 20 bp, Artificial Sequence
  Description of Artificial Sequence: Synthetic oligonucleotide
  Target: LAMA2; (+) strand; PAM type: YTN; PAM sequence: CTT
tttttccctcctcctttctt

SEQ ID NO: 354958 - DNA, 20 bp, Artificial Sequence
  Description of Artificial Sequence: Synthetic oligonucleotide
  Target: LAMA2; (+) strand; PAM type: YTN; PAM sequence: TTT
ttttccctcctcctttcttc

SEQ ID NO: 354959 - DNA, 20 bp, Artificial Sequence
  Description of Artificial Sequence: Synthetic oligonucleotide
  Target: LAMA2; (+) strand; PAM type: YTN; PAM sequence: TTT
tttccctcctcctttcttct

SEQ ID NO: 354960 - DNA, 20 bp, Artificial Sequence
  Description of Artificial Sequence: Synthetic oligonucleotide
  Target: LAMA2; (+) strand; PAM type: YTN; PAM sequence: TTT
ttccctcctcctttcttctt

SEQ ID NO: 354961 - DNA, 20 bp, Artificial Sequence
  Description of Artificial Sequence: Synthetic oligonucleotide
  Target: LAMA2; (+) strand; PAM type: YTN; PAM sequence: TTT
tccctcctcctttcttcttt

SEQ ID NO: 354962 - DNA, 20 bp, Artificial Sequence
  Description of Artificial Sequence: Synthetic oligonucleotide
  Target: LAMA2; (+) strand; PAM type: YTN; PAM sequence: TTT
ccctcctcctttcttctttc

SEQ ID NO: 354963 - DNA, 20 bp, Artificial Sequence
  Description of Artificial Sequence: Synthetic oligonucleotide
  Target: LAMA2; (+) strand; PAM type: YTN; PAM sequence: TTC
cctcctcctttcttctttct

SEQ ID NO: 354964 - DNA, 20 bp, Artificial Sequence
  Description of Artificial Sequence: Synthetic oligonucleotide
  Target: LAMA2; (+) strand; PAM type: YTN; PAM sequence: CTC
ctcctttcttctttctgatg

SEQ ID NO: 354965 - DNA, 20 bp, Artificial Sequence
  Description of Artificial Sequence: Synthetic oligonucleotide
  Target: LAMA2; (+) strand; PAM type: YTN; PAM sequence: CTC
ctttcttctttctgatggac

SEQ ID NO: 354966 - DNA, 20 bp, Artificial Sequence
  Description of Artificial Sequence: Synthetic oligonucleotide
  Target: LAMA2; (+) strand; PAM type: YTN; PAM sequence: CTT
tcttctttctgatggactat

SEQ ID NO: 354967 - DNA, 20 bp, Artificial Sequence
  Description of Artificial Sequence: Synthetic oligonucleotide
  Target: LAMA2; (+) strand; PAM type: YTN; PAM sequence: TTT
cttctttctgatggactata

SEQ ID NO: 354968 - DNA, 20 bp, Artificial Sequence
  Description of Artificial Sequence: Synthetic oligonucleotide
  Target: LAMA2; (+) strand; PAM type: YTN; PAM sequence: TTC
ttctttctgatggactatat

SEQ ID NO: 354969 - DNA, 20 bp, Artificial Sequence
  Description of Artificial Sequence: Synthetic oligonucleotide
  Target: LAMA2; (+) strand; PAM type: YTN; PAM sequence: CTT
ctttctgatggactatatat

SEQ ID NO: 354970 - DNA, 20 bp, Artificial Sequence
  Description of Artificial Sequence: Synthetic oligonucleotide
  Target: LAMA2; (+) strand; PAM type: YTN; PAM sequence: TTC
tttctgatggactatatata

SEQ ID NO: 354971 - DNA, 20 bp, Artificial Sequence
  Description of Artificial Sequence: Synthetic oligonucleotide
  Target: LAMA2; (+) strand; PAM type: YTN; PAM sequence: CTT
tctgatggactatatatatt

SEQ ID NO: 354972 - DNA, 20 bp, Artificial Sequence
  Description of Artificial Sequence: Synthetic oligonucleotide
  Target: LAMA2; (+) strand; PAM type: YTN; PAM sequence: TTT
ctgatggactatatatatta

SEQ ID NO: 354973 - DNA, 20 bp, Artificial Sequence
  Description of Artificial Sequence: Synthetic oligonucleotide
  Target: LAMA2; (+) strand; PAM type: YTN; PAM sequence: TTC
tgatggactatatatattac

SEQ ID NO: 354974 - DNA, 20 bp, Artificial Sequence
  Description of Artificial Sequence: Synthetic oligonucleotide
  Target: LAMA2; (+) strand; PAM type: YTN; PAM sequence: CTG
atggactatatatattactg

SEQ ID NO: 354975 - DNA, 20 bp, Artificial Sequence
  Description of Artificial Sequence: Synthetic oligonucleotide
  Target: LAMA2; (+) strand; PAM type: YTN; PAM sequence: CTA
tatatattactgatttgctt

SEQ ID NO: 354976 - DNA, 20 bp, Artificial Sequence
  Description of Artificial Sequence: Synthetic oligonucleotide
  Target: LAMA2; (+) strand; PAM type: YTN; PAM sequence: TTA
ctgatttgcttttatctttc

SEQ ID NO: 354977 - DNA, 20 bp, Artificial Sequence
  Description of Artificial Sequence: Synthetic oligonucleotide
  Target: LAMA2; (+) strand; PAM type: YTN; PAM sequence: CTG
atttgcttttatctttctcc

SEQ ID NO: 354978 - DNA, 20 bp, Artificial Sequence
  Description of Artificial Sequence: Synthetic oligonucleotide
  Target: LAMA2; (+) strand; PAM type: YTN; PAM sequence: TTT
gcttttatctttctccagat

SEQ ID NO: 354979 - DNA, 20 bp, Artificial Sequence
  Description of Artificial Sequence: Synthetic oligonucleotide
  Target: LAMA2; (+) strand; PAM type: YTN; PAM sequence: TTG
cttttatctttctccagatt

SEQ ID NO: 354980 - DNA, 20 bp, Artificial Sequence
  Description of Artificial Sequence: Synthetic oligonucleotide
  Target: LAMA2; (+) strand; PAM type: YTN; PAM sequence: CTT
ttatctttctccagattttg

SEQ ID NO: 354981 - DNA, 20 bp, Artificial Sequence
  Description of Artificial Sequence: Synthetic oligonucleotide
  Target: LAMA2; (+) strand; PAM type: YTN; PAM sequence: TTT
tatctttctccagattttga

SEQ ID NO: 354982 - DNA, 20 bp, Artificial Sequence
  Description of Artificial Sequence: Synthetic oligonucleotide
  Target: LAMA2; (+) strand; PAM type: YTN; PAM sequence: TTT
atctttctccagattttgaa

SEQ ID NO: 354983 - DNA, 20 bp, Artificial Sequence
  Description of Artificial Sequence: Synthetic oligonucleotide
  Target: LAMA2; (+) strand; PAM type: YTN; PAM sequence: TTA
tctttctccagattttgaag

SEQ ID NO: 354984 - DNA, 20 bp, Artificial Sequence
  Description of Artificial Sequence: Synthetic oligonucleotide
  Target: LAMA2; (+) strand; PAM type: YTN; PAM sequence: CTT
tctccagattttgaaggtct

SEQ ID NO: 354985 - DNA, 20 bp, Artificial Sequence
  Description of Artificial Sequence: Synthetic oligonucleotide
  Target: LAMA2; (+) strand; PAM type: YTN; PAM sequence: TTT
ctccagattttgaaggtctg

SEQ ID NO: 354986 - DNA, 20 bp, Artificial Sequence
  Description of Artificial Sequence: Synthetic oligonucleotide
  Target: LAMA2; (+) strand; PAM type: YTN; PAM sequence: TTC
tccagattttgaaggtctgt

SEQ ID NO: 354987 - DNA, 20 bp, Artificial Sequence
  Description of Artificial Sequence: Synthetic oligonucleotide
  Target: LAMA2; (+) strand; PAM type: YTN; PAM sequence: CTC
cagattttgaaggtctgtta

SEQ ID NO: 354988 - DNA, 20 bp, Artificial Sequence
  Description of Artificial Sequence: Synthetic oligonucleotide
  Target: LAMA2; (+) strand; PAM type: YTN; PAM sequence: TTT
tgaaggtctgttagttgtat

SEQ ID NO: 354989 - DNA, 20 bp, Artificial Sequence
  Description of Artificial Sequence: Synthetic oligonucleotide
  Target: LAMA2; (+) strand; PAM type: YTN; PAM sequence: TTT
gaaggtctgttagttgtatt

SEQ ID NO: 354990 - DNA, 20 bp, Artificial Sequence
  Description of Artificial Sequence: Synthetic oligonucleotide
  Target: LAMA2; (+) strand; PAM type: YTN; PAM sequence: TTG
aaggtctgttagttgtattc

SEQ ID NO: 354991 - DNA, 20 bp, Artificial Sequence
  Description of Artificial Sequence: Synthetic oligonucleotide
  Target: LAMA2; (+) strand; PAM type: YTN; PAM sequence: CTG
ttagttgtattcattcatcc

SEQ ID NO: 354992 - DNA, 20 bp, Artificial Sequence
  Description of Artificial Sequence: Synthetic oligonucleotide
  Target: LAMA2; (+) strand; PAM type: YTN; PAM sequence: TTA
gttgtattcattcatcctgt

SEQ ID NO: 354993 - DNA, 20 bp, Artificial Sequence
  Description of Artificial Sequence: Synthetic oligonucleotide
  Target: LAMA2; (+) strand; PAM type: YTN; PAM sequence: TTG
tattcattcatcctgtatta

SEQ ID NO: 354994 - DNA, 20 bp, Artificial Sequence
  Description of Artificial Sequence: Synthetic oligonucleotide
  Target: LAMA2; (+) strand; PAM type: YTN; PAM sequence: TTC
attcatcctgtattatttct

SEQ ID NO: 354995 - DNA, 20 bp, Artificial Sequence
  Description of Artificial Sequence: Synthetic oligonucleotide
  Target: LAMA2; (+) strand; PAM type: YTN; PAM sequence: TTC
atcctgtattatttctattt

SEQ ID NO: 354996 - DNA, 20 bp, Artificial Sequence
  Description of Artificial Sequence: Synthetic oligonucleotide
  Target: LAMA2; (+) strand; PAM type: YTN; PAM sequence: CTG
tattatttctattttttaat

SEQ ID NO: 354997 - DNA, 20 bp, Artificial Sequence
  Description of Artificial Sequence: Synthetic oligonucleotide
  Target: LAMA2; (+) strand; PAM type: YTN; PAM sequence: TTA
tttctattttttaatcaaag

SEQ ID NO: 354998 - DNA, 20 bp, Artificial Sequence
  Description of Artificial Sequence: Synthetic oligonucleotide
  Target: LAMA2; (+) strand; PAM type: YTN; PAM sequence: TTT
ctattttttaatcaaagaca

SEQ ID NO: 354999 - DNA, 20 bp, Artificial Sequence
  Description of Artificial Sequence: Synthetic oligonucleotide
  Target: LAMA2; (+) strand; PAM type: YTN; PAM sequence: TTC
tattttttaatcaaagacat

SEQ ID NO: 355000 - DNA, 20 bp, Artificial Sequence
  Description of Artificial Sequence: Synthetic oligonucleotide
  Target: LAMA2; (+) strand; PAM type: YTN; PAM sequence: CTA
ttttttaatcaaagacatga

SEQ ID NO: 355001 - DNA, 20 bp, Artificial Sequence
  Description of Artificial Sequence: Synthetic oligonucleotide
  Target: LAMA2; (+) strand; PAM type: YTN; PAM sequence: TTT
tttaatcaaagacatgaata

SEQ ID NO: 355002 - DNA, 20 bp, Artificial Sequence
  Description of Artificial Sequence: Synthetic oligonucleotide
  Target: LAMA2; (+) strand; PAM type: YTN; PAM sequence: TTT
ttaatcaaagacatgaataa

SEQ ID NO: 355003 - DNA, 20 bp, Artificial Sequence
  Description of Artificial Sequence: Synthetic oligonucleotide
  Target: LAMA2; (+) strand; PAM type: YTN; PAM sequence: TTT
taatcaaagacatgaataaa

SEQ ID NO: 355004 - DNA, 20 bp, Artificial Sequence
  Description of Artificial Sequence: Synthetic oligonucleotide
  Target: LAMA2; (+) strand; PAM type: YTN; PAM sequence: TTT
aatcaaagacatgaataaac

SEQ ID NO: 355005 - DNA, 20 bp, Artificial Sequence
  Description of Artificial Sequence: Synthetic oligonucleotide
  Target: LAMA2; (+) strand; PAM type: YTN; PAM sequence: TTA
atcaaagacatgaataaaca

SEQ ID NO: 355006 - DNA, 20 bp, Artificial Sequence
  Description of Artificial Sequence: Synthetic oligonucleotide
  Target: LAMA2; (+) strand; PAM type: YTN; PAM sequence: TTG
tgttttgtatttctgtatgt

SEQ ID NO: 355007 - DNA, 20 bp, Artificial Sequence
  Description of Artificial Sequence: Synthetic oligonucleotide
  Target: LAMA2; (+) strand; PAM type: YTN; PAM sequence: TTT
tgtatttctgtatgttaaaa

SEQ ID NO: 355008 - DNA, 20 bp, Artificial Sequence
  Description of Artificial Sequence: Synthetic oligonucleotide
  Target: LAMA2; (+) strand; PAM type: YTN; PAM sequence: TTT
gtatttctgtatgttaaaaa

SEQ ID NO: 355009 - DNA, 20 bp, Artificial Sequence
  Description of Artificial Sequence: Synthetic oligonucleotide
  Target: LAMA2; (+) strand; PAM type: YTN; PAM sequence: TTG
tatttctgtatgttaaaaaa

SEQ ID NO: 355010 - DNA, 20 bp, Artificial Sequence
  Description of Artificial Sequence: Synthetic oligonucleotide
  Target: LAMA2; (+) strand; PAM type: YTN; PAM sequence: TTT
ctgtatgttaaaaaagtaaa

SEQ ID NO: 355011 - DNA, 20 bp, Artificial Sequence
  Description of Artificial Sequence: Synthetic oligonucleotide
  Target: LAMA2; (+) strand; PAM type: YTN; PAM sequence: TTC
tgtatgttaaaaaagtaaat

SEQ ID NO: 355012 - DNA, 20 bp, Artificial Sequence
  Description of Artificial Sequence: Synthetic oligonucleotide
  Target: LAMA2; (+) strand; PAM type: YTN; PAM sequence: CTG
tatgttaaaaaagtaaattt

SEQ ID NO: 355013 - DNA, 20 bp, Artificial Sequence
  Description of Artificial Sequence: Synthetic oligonucleotide
  Target: LAMA2; (+) strand; PAM type: YTN; PAM sequence: TTA
aaaaagtaaatttaaacttt

SEQ ID NO: 355014 - DNA, 20 bp, Artificial Sequence
  Description of Artificial Sequence: Synthetic oligonucleotide
  Target: LAMA2; (+) strand; PAM type: YTN; PAM sequence: TTT
aaacttttcattcccctcat

SEQ ID NO: 355015 - DNA, 20 bp, Artificial Sequence
  Description of Artificial Sequence: Synthetic oligonucleotide
  Target: LAMA2; (+) strand; PAM type: YTN; PAM sequence: TTA
aacttttcattcccctcatc

SEQ ID NO: 355016 - DNA, 20 bp, Artificial Sequence
  Description of Artificial Sequence: Synthetic oligonucleotide
  Target: LAMA2; (+) strand; PAM type: YTN; PAM sequence: CTT
ttcattcccctcatctattg

SEQ ID NO: 355017 - DNA, 20 bp, Artificial Sequence
  Description of Artificial Sequence: Synthetic oligonucleotide
  Target: LAMA2; (+) strand; PAM type: YTN; PAM sequence: TTT
tcattcccctcatctattgc

SEQ ID NO: 355018 - DNA, 20 bp, Artificial Sequence
  Description of Artificial Sequence: Synthetic oligonucleotide
  Target: LAMA2; (+) strand; PAM type: YTN; PAM sequence: TTT
cattcccctcatctattgct

SEQ ID NO: 355019 - DNA, 20 bp, Artificial Sequence
  Description of Artificial Sequence: Synthetic oligonucleotide
  Target: LAMA2; (+) strand; PAM type: YTN; PAM sequence: TTC
attcccctcatctattgctt

SEQ ID NO: 355020 - DNA, 20 bp, Artificial Sequence
  Description of Artificial Sequence: Synthetic oligonucleotide
  Target: LAMA2; (+) strand; PAM type: YTN; PAM sequence: TTC
ccctcatctattgcttctta

SEQ ID NO: 355021 - DNA, 20 bp, Artificial Sequence
  Description of Artificial Sequence: Synthetic oligonucleotide
  Target: LAMA2; (+) strand; PAM type: YTN; PAM sequence: CTC
atctattgcttcttatcccc

SEQ ID NO: 355022 - DNA, 20 bp, Artificial Sequence
  Description of Artificial Sequence: Synthetic oligonucleotide
  Target: LAMA2; (+) strand; PAM type: YTN; PAM sequence: CTA
ttgcttcttatccccaaaat

SEQ ID NO: 355023 - DNA, 20 bp, Artificial Sequence
  Description of Artificial Sequence: Synthetic oligonucleotide
  Target: LAMA2; (+) strand; PAM type: YTN; PAM sequence: TTG
cttcttatccccaaaatatc

SEQ ID NO: 355024 - DNA, 20 bp, Artificial Sequence
  Description of Artificial Sequence: Synthetic oligonucleotide
  Target: LAMA2; (+) strand; PAM type: YTN; PAM sequence: CTT
cttatccccaaaatatcaat

SEQ ID NO: 355025 - DNA, 20 bp, Artificial Sequence
  Description of Artificial Sequence: Synthetic oligonucleotide
  Target: LAMA2; (+) strand; PAM type: YTN; PAM sequence: TTC
ttatccccaaaatatcaatt

SEQ ID NO: 355026 - DNA, 20 bp, Artificial Sequence
  Description of Artificial Sequence: Synthetic oligonucleotide
  Target: LAMA2; (+) strand; PAM type: YTN; PAM sequence: CTT
atccccaaaatatcaattcc

SEQ ID NO: 355027 - DNA, 20 bp, Artificial Sequence
  Description of Artificial Sequence: Synthetic oligonucleotide
  Target: LAMA2; (+) strand; PAM type: YTN; PAM sequence: TTA
tccccaaaatatcaattcca

SEQ ID NO: 355028 - DNA, 20 bp, Artificial Sequence
  Description of Artificial Sequence: Synthetic oligonucleotide
  Target: LAMA2; (+) strand; PAM type: YTN; PAM sequence: TTC
caatgaacacctttattttc

SEQ ID NO: 355029 - DNA, 20 bp, Artificial Sequence
  Description of Artificial Sequence: Synthetic oligonucleotide
  Target: LAMA2; (+) strand; PAM type: YTN; PAM sequence: CTT
tattttctttagtaatactg

SEQ ID NO: 355030 - DNA, 20 bp, Artificial Sequence
  Description of Artificial Sequence: Synthetic oligonucleotide
  Target: LAMA2; (+) strand; PAM type: YTN; PAM sequence: TTT
attttctttagtaatactgc

SEQ ID NO: 355031 - DNA, 20 bp, Artificial Sequence
  Description of Artificial Sequence: Synthetic oligonucleotide
  Target: LAMA2; (+) strand; PAM type: YTN; PAM sequence: TTA
ttttctttagtaatactgcc

SEQ ID NO: 355032 - DNA, 20 bp, Artificial Sequence
  Description of Artificial Sequence: Synthetic oligonucleotide
  Target: LAMA2; (+) strand; PAM type: YTN; PAM sequence: TTT
tctttagtaatactgccagt

SEQ ID NO: 355033 - DNA, 20 bp, Artificial Sequence
  Description of Artificial Sequence: Synthetic oligonucleotide
  Target: LAMA2; (+) strand; PAM type: YTN; PAM sequence: TTT
ctttagtaatactgccagtg

SEQ ID NO: 355034 - DNA, 20 bp, Artificial Sequence
  Description of Artificial Sequence: Synthetic oligonucleotide
  Target: LAMA2; (+) strand; PAM type: YTN; PAM sequence: TTC
tttagtaatactgccagtgg

SEQ ID NO: 355035 - DNA, 20 bp, Artificial Sequence
  Description of Artificial Sequence: Synthetic oligonucleotide
  Target: LAMA2; (+) strand; PAM type: YTN; PAM sequence: CTT
tagtaatactgccagtggca

SEQ ID NO: 355036 - DNA, 20 bp, Artificial Sequence
  Description of Artificial Sequence: Synthetic oligonucleotide
  Target: LAMA2; (+) strand; PAM type: YTN; PAM sequence: TTT
agtaatactgccagtggcat

SEQ ID NO: 355037 - DNA, 20 bp, Artificial Sequence
  Description of Artificial Sequence: Synthetic oligonucleotide
  Target: LAMA2; (+) strand; PAM type: YTN; PAM sequence: TTA
gtaatactgccagtggcatg

SEQ ID NO: 355038 - DNA, 20 bp, Artificial Sequence
  Description of Artificial Sequence: Synthetic oligonucleotide
  Target: LAMA2; (+) strand; PAM type: YTN; PAM sequence: CTG
ccagtggcatgttcttagag

SEQ ID NO: 355039 - DNA, 20 bp, Artificial Sequence
  Description of Artificial Sequence: Synthetic oligonucleotide
  Target: LAMA2; (+) strand; PAM type: YTN; PAM sequence: TTC
ttagagtatcattgttaaac

SEQ ID NO: 355040 - DNA, 20 bp, Artificial Sequence
  Description of Artificial Sequence: Synthetic oligonucleotide
  Target: LAMA2; (+) strand; PAM type: YTN; PAM sequence: CTT
agagtatcattgttaaactg

SEQ ID NO: 355041 - DNA, 20 bp, Artificial Sequence
  Description of Artificial Sequence: Synthetic oligonucleotide
  Target: LAMA2; (+) strand; PAM type: YTN; PAM sequence: TTA
gagtatcattgttaaactgt

SEQ ID NO: 355042 - DNA, 20 bp, Artificial Sequence
  Description of Artificial Sequence: Synthetic oligonucleotide
  Target: LAMA2; (+) strand; PAM type: YTN; PAM sequence: TTG
ttaaactgttattttaagta

SEQ ID NO: 355043 - DNA, 20 bp, Artificial Sequence
  Description of Artificial Sequence: Synthetic oligonucleotide
  Target: LAMA2; (+) strand; PAM type: YTN; PAM sequence: TTA
aactgttattttaagtaata

SEQ ID NO: 355044 - DNA, 20 bp, Artificial Sequence
  Description of Artificial Sequence: Synthetic oligonucleotide
  Target: LAMA2; (+) strand; PAM type: YTN; PAM sequence: CTG
ttattttaagtaatatgtct

SEQ ID NO: 355045 - DNA, 20 bp, Artificial Sequence
  Description of Artificial Sequence: Synthetic oligonucleotide
  Target: LAMA2; (+) strand; PAM type: YTN; PAM sequence: TTA
ttttaagtaatatgtcttta

SEQ ID NO: 355046 - DNA, 20 bp, Artificial Sequence
  Description of Artificial Sequence: Synthetic oligonucleotide
  Target: LAMA2; (+) strand; PAM type: YTN; PAM sequence: TTT
taagtaatatgtctttattc

SEQ ID NO: 355047 - DNA, 20 bp, Artificial Sequence
  Description of Artificial Sequence: Synthetic oligonucleotide
  Target: LAMA2; (+) strand; PAM type: YTN; PAM sequence: TTT
aagtaatatgtctttattcc

SEQ ID NO: 355048 - DNA, 20 bp, Artificial Sequence
  Description of Artificial Sequence: Synthetic oligonucleotide
  Target: LAMA2; (+) strand; PAM type: YTN; PAM sequence: TTA
agtaatatgtctttattccc

SEQ ID NO: 355049 - DNA, 20 bp, Artificial Sequence
  Description of Artificial Sequence: Synthetic oligonucleotide
  Target: LAMA2; (+) strand; PAM type: YTN; PAM sequence: CTT
tattcccaaggctactttgc

SEQ ID NO: 355050 - DNA, 20 bp, Artificial Sequence
  Description of Artificial Sequence: Synthetic oligonucleotide
  Target: LAMA2; (+) strand; PAM type: YTN; PAM sequence: TTT
attcccaaggctactttgca

SEQ ID NO: 355051 - DNA, 20 bp, Artificial Sequence
  Description of Artificial Sequence: Synthetic oligonucleotide
  Target: LAMA2; (+) strand; PAM type: YTN; PAM sequence: TTA
ttcccaaggctactttgcac

SEQ ID NO: 355052 - DNA, 20 bp, Artificial Sequence
  Description of Artificial Sequence: Synthetic oligonucleotide
  Target: LAMA2; (+) strand; PAM type: YTN; PAM sequence: TTC
ccaaggctactttgcacctg

SEQ ID NO: 355053 - DNA, 20 bp, Artificial Sequence
  Description of Artificial Sequence: Synthetic oligonucleotide
  Target: LAMA2; (+) strand; PAM type: YTN; PAM sequence: CTA
ctttgcacctgtaatagtct

SEQ ID NO: 355054 - DNA, 20 bp, Artificial Sequence
  Description of Artificial Sequence: Synthetic oligonucleotide
  Target: LAMA2; (+) strand; PAM type: YTN; PAM sequence: CTT
tgcacctgtaatagtctggt

SEQ ID NO: 355055 - DNA, 20 bp, Artificial Sequence
  Description of Artificial Sequence: Synthetic oligonucleotide
  Target: LAMA2; (+) strand; PAM type: YTN; PAM sequence: TTT
gcacctgtaatagtctggtg

SEQ ID NO: 355056 - DNA, 20 bp, Artificial Sequence
  Description of Artificial Sequence: Synthetic oligonucleotide
  Target: LAMA2; (+) strand; PAM type: YTN; PAM sequence: TTG
cacctgtaatagtctggtgg

SEQ ID NO: 355057 - DNA, 20 bp, Artificial Sequence
  Description of Artificial Sequence: Synthetic oligonucleotide
  Target: LAMA2; (+) strand; PAM type: YTN; PAM sequence: CTG
taatagtctggtggagcagg

SEQ ID NO: 355058 - DNA, 20 bp, Artificial Sequence
  Description of Artificial Sequence: Synthetic oligonucleotide
  Target: LAMA2; (+) strand; PAM type: YTN; PAM sequence: CTG
gtggagcaggcttgttccgt

SEQ ID NO: 355059 - DNA, 20 bp, Artificial Sequence
  Description of Artificial Sequence: Synthetic oligonucleotide
  Target: LAMA2; (+) strand; PAM type: YTN; PAM sequence: CTT
gttccgtgagccactagttt

SEQ ID NO: 355060 - DNA, 20 bp, Artificial Sequence
  Description of Artificial Sequence: Synthetic oligonucleotide
  Target: LAMA2; (+) strand; PAM type: YTN; PAM sequence: TTG
ttccgtgagccactagtttt

SEQ ID NO: 355061 - DNA, 20 bp, Artificial Sequence
  Description of Artificial Sequence: Synthetic oligonucleotide
  Target: LAMA2; (+) strand; PAM type: YTN; PAM sequence: TTC
cgtgagccactagttttgca

SEQ ID NO: 355062 - DNA, 20 bp, Artificial Sequence
  Description of Artificial Sequence: Synthetic oligonucleotide
  Target: LAMA2; (+) strand; PAM type: YTN; PAM sequence: CTA
gttttgcatttgttactgct

SEQ ID NO: 355063 - DNA, 20 bp, Artificial Sequence
  Description of Artificial Sequence: Synthetic oligonucleotide
  Target: LAMA2; (+) strand; PAM type: YTN; PAM sequence: TTT
tgcatttgttactgcttatt

SEQ ID NO: 355064 - DNA, 20 bp, Artificial Sequence
  Description of Artificial Sequence: Synthetic oligonucleotide
  Target: LAMA2; (+) strand; PAM type: YTN; PAM sequence: TTT
gcatttgttactgcttattc

SEQ ID NO: 355065 - DNA, 20 bp, Artificial Sequence
  Description of Artificial Sequence: Synthetic oligonucleotide
  Target: LAMA2; (+) strand; PAM type: YTN; PAM sequence: TTG
catttgttactgcttattct

SEQ ID NO: 355066 - DNA, 20 bp, Artificial Sequence
  Description of Artificial Sequence: Synthetic oligonucleotide
  Target: LAMA2; (+) strand; PAM type: YTN; PAM sequence: TTT
gttactgcttattcttctca

SEQ ID NO: 355067 - DNA, 20 bp, Artificial Sequence
  Description of Artificial Sequence: Synthetic oligonucleotide
  Target: LAMA2; (+) strand; PAM type: YTN; PAM sequence: TTG
ttactgcttattcttctcaa

SEQ ID NO: 355068 - DNA, 20 bp, Artificial Sequence
  Description of Artificial Sequence: Synthetic oligonucleotide
  Target: LAMA2; (+) strand; PAM type: YTN; PAM sequence: TTA
ctgcttattcttctcaatgt

SEQ ID NO: 355069 - DNA, 20 bp, Artificial Sequence
  Description of Artificial Sequence: Synthetic oligonucleotide
  Target: LAMA2; (+) strand; PAM type: YTN; PAM sequence: CTG
cttattcttctcaatgtagc

SEQ ID NO: 355070 - DNA, 20 bp, Artificial Sequence
  Description of Artificial Sequence: Synthetic oligonucleotide
  Target: LAMA2; (+) strand; PAM type: YTN; PAM sequence: CTT
attcttctcaatgtagcatc

SEQ ID NO: 355071 - DNA, 20 bp, Artificial Sequence
  Description of Artificial Sequence: Synthetic oligonucleotide
  Target: LAMA2; (+) strand; PAM type: YTN; PAM sequence: TTA
ttcttctcaatgtagcatca

SEQ ID NO: 355072 - DNA, 20 bp, Artificial Sequence
  Description of Artificial Sequence: Synthetic oligonucleotide
  Target: LAMA2; (+) strand; PAM type: YTN; PAM sequence: TTC
ttctcaatgtagcatcatca

SEQ ID NO: 355073 - DNA, 20 bp, Artificial Sequence
  Description of Artificial Sequence: Synthetic oligonucleotide
  Target: LAMA2; (+) strand; PAM type: YTN; PAM sequence: CTT
ctcaatgtagcatcatcagc

SEQ ID NO: 355074 - DNA, 20 bp, Artificial Sequence
  Description of Artificial Sequence: Synthetic oligonucleotide
  Target: LAMA2; (+) strand; PAM type: YTN; PAM sequence: TTC
tcaatgtagcatcatcagca

SEQ ID NO: 355075 - DNA, 20 bp, Artificial Sequence
  Description of Artificial Sequence: Synthetic oligonucleotide
  Target: LAMA2; (+) strand; PAM type: YTN; PAM sequence: CTC
aatgtagcatcatcagcatt

SEQ ID NO: 355076 - DNA, 20 bp, Artificial Sequence
  Description of Artificial Sequence: Synthetic oligonucleotide
  Target: LAMA2; (+) strand; PAM type: YTN; PAM sequence: TTA
gcgtttgtggaaatttctcc

SEQ ID NO: 355077 - DNA, 20 bp, Artificial Sequence
  Description of Artificial Sequence: Synthetic oligonucleotide
  Target: LAMA2; (+) strand; PAM type: YTN; PAM sequence: TTT
gtggaaatttctccttggtc

SEQ ID NO: 355078 - DNA, 20 bp, Artificial Sequence
  Description of Artificial Sequence: Synthetic oligonucleotide
  Target: LAMA2; (+) strand; PAM type: YTN; PAM sequence: TTG
tggaaatttctccttggtca

SEQ ID NO: 355079 - DNA, 20 bp, Artificial Sequence
  Description of Artificial Sequence: Synthetic oligonucleotide
  Target: LAMA2; (+) strand; PAM type: YTN; PAM sequence: TTT
ctccttggtcattgttttct

SEQ ID NO: 355080 - DNA, 20 bp, Artificial Sequence
  Description of Artificial Sequence: Synthetic oligonucleotide
  Target: LAMA2; (+) strand; PAM type: YTN; PAM sequence: TTC
tccttggtcattgttttcta

SEQ ID NO: 355081 - DNA, 20 bp, Artificial Sequence
  Description of Artificial Sequence: Synthetic oligonucleotide
  Target: LAMA2; (+) strand; PAM type: YTN; PAM sequence: CTC
cttggtcattgttttctata

SEQ ID NO: 355082 - DNA, 20 bp, Artificial Sequence
  Description of Artificial Sequence: Synthetic oligonucleotide
  Target: LAMA2; (+) strand; PAM type: YTN; PAM sequence: CTT
ggtcattgttttctatagcc

SEQ ID NO: 355083 - DNA, 20 bp, Artificial Sequence
  Description of Artificial Sequence: Synthetic oligonucleotide
  Target: LAMA2; (+) strand; PAM type: YTN; PAM sequence: TTG
gtcattgttttctatagcca

SEQ ID NO: 355084 - DNA, 20 bp, Artificial Sequence
  Description of Artificial Sequence: Synthetic oligonucleotide
  Target: LAMA2; (+) strand; PAM type: YTN; PAM sequence: TTG
ttttctatagccatagtttg

SEQ ID NO: 355085 - DNA, 20 bp, Artificial Sequence
  Description of Artificial Sequence: Synthetic oligonucleotide
  Target: LAMA2; (+) strand; PAM type: YTN; PAM sequence: TTT
tctatagccatagtttggta

SEQ ID NO: 355086 - DNA, 20 bp, Artificial Sequence
  Description of Artificial Sequence: Synthetic oligonucleotide
  Target: LAMA2; (+) strand; PAM type: YTN; PAM sequence: TTT
ctatagccatagtttggtag

SEQ ID NO: 355087 - DNA, 20 bp, Artificial Sequence
  Description of Artificial Sequence: Synthetic oligonucleotide
  Target: LAMA2; (+) strand; PAM type: YTN; PAM sequence: TTC
tatagccatagtttggtaga

SEQ ID NO: 355088 - DNA, 20 bp, Artificial Sequence
  Description of Artificial Sequence: Synthetic oligonucleotide
  Target: LAMA2; (+) strand; PAM type: YTN; PAM sequence: CTA
tagccatagtttggtagatg

SEQ ID NO: 355089 - DNA, 20 bp, Artificial Sequence
  Description of Artificial Sequence: Synthetic oligonucleotide
  Target: LAMA2; (+) strand; PAM type: YTN; PAM sequence: TTT
ggtagatgctttgagatttc

SEQ ID NO: 355090 - DNA, 20 bp, Artificial Sequence
  Description of Artificial Sequence: Synthetic oligonucleotide
  Target: LAMA2; (+) strand; PAM type: YTN; PAM sequence: TTG
gtagatgctttgagatttca

SEQ ID NO: 355091 - DNA, 20 bp, Artificial Sequence
  Description of Artificial Sequence: Synthetic oligonucleotide
  Target: LAMA2; (+) strand; PAM type: YTN; PAM sequence: CTT
tgagatttcatctttcttgt

SEQ ID NO: 355092 - DNA, 20 bp, Artificial Sequence
  Description of Artificial Sequence: Synthetic oligonucleotide
  Target: LAMA2; (+) strand; PAM type: YTN; PAM sequence: TTT
gagatttcatctttcttgtt

SEQ ID NO: 355093 - DNA, 20 bp, Artificial Sequence
  Description of Artificial Sequence: Synthetic oligonucleotide
  Target: LAMA2; (+) strand; PAM type: YTN; PAM sequence: TTG
agatttcatctttcttgttt

SEQ ID NO: 355094 - DNA, 20 bp, Artificial Sequence
  Description of Artificial Sequence: Synthetic oligonucleotide
  Target: LAMA2; (+) strand; PAM type: YTN; PAM sequence: TTT
catctttcttgtttacattt

SEQ ID NO: 355095 - DNA, 20 bp, Artificial Sequence
  Description of Artificial Sequence: Synthetic oligonucleotide
  Target: LAMA2; (+) strand; PAM type: YTN; PAM sequence: TTC
atctttcttgtttacatttt

SEQ ID NO: 355096 - DNA, 20 bp, Artificial Sequence
  Description of Artificial Sequence: Synthetic oligonucleotide
  Target: LAMA2; (+) strand; PAM type: YTN; PAM sequence: CTT
tcttgtttacatttttaata

SEQ ID NO: 355097 - DNA, 20 bp, Artificial Sequence
  Description of Artificial Sequence: Synthetic oligonucleotide
  Target: LAMA2; (+) strand; PAM type: YTN; PAM sequence: TTT
cttgtttacatttttaatat

SEQ ID NO: 355098 - DNA, 20 bp, Artificial Sequence
  Description of Artificial Sequence: Synthetic oligonucleotide
  Target: LAMA2; (+) strand; PAM type: YTN; PAM sequence: TTC
ttgtttacatttttaatatt

SEQ ID NO: 355099 - DNA, 20 bp, Artificial Sequence
  Description of Artificial Sequence: Synthetic oligonucleotide
  Target: LAMA2; (+) strand; PAM type: YTN; PAM sequence: CTT
gtttacatttttaatatttc

SEQ ID NO: 355100 - DNA, 20 bp, Artificial Sequence
  Description of Artificial Sequence: Synthetic oligonucleotide
  Target: LAMA2; (+) strand; PAM type: YTN; PAM sequence: TTG
tttacatttttaatatttct

SEQ ID NO: 355101 - DNA, 20 bp, Artificial Sequence
  Description of Artificial Sequence: Synthetic oligonucleotide
  Target: LAMA2; (+) strand; PAM type: YTN; PAM sequence: TTT
acatttttaatatttctatt

SEQ ID NO: 355102 - DNA, 20 bp, Artificial Sequence
  Description of Artificial Sequence: Synthetic oligonucleotide
  Target: LAMA2; (+) strand; PAM type: YTN; PAM sequence: TTA
catttttaatatttctattg

SEQ ID NO: 355103 - DNA, 20 bp, Artificial Sequence
  Description of Artificial Sequence: Synthetic oligonucleotide
  Target: LAMA2; (+) strand; PAM type: YTN; PAM sequence: TTT
ttaatatttctattgacact

SEQ ID NO: 355104 - DNA, 20 bp, Artificial Sequence
  Description of Artificial Sequence: Synthetic oligonucleotide
  Target: LAMA2; (+) strand; PAM type: YTN; PAM sequence: TTT
taatatttctattgacactt

SEQ ID NO: 355105 - DNA, 20 bp, Artificial Sequence
  Description of Artificial Sequence: Synthetic oligonucleotide
  Target: LAMA2; (+) strand; PAM type: YTN; PAM sequence: TTT
aatatttctattgacactta

SEQ ID NO: 355106 - DNA, 20 bp, Artificial Sequence
  Description of Artificial Sequence: Synthetic oligonucleotide
  Target: LAMA2; (+) strand; PAM type: YTN; PAM sequence: TTA
atatttctattgacacttag

SEQ ID NO: 355107 - DNA, 20 bp, Artificial Sequence
  Description of Artificial Sequence: Synthetic oligonucleotide
  Target: LAMA2; (+) strand; PAM type: YTN; PAM sequence: TTT
ctattgacacttagaagatg

SEQ ID NO: 355108 - DNA, 20 bp, Artificial Sequence
  Description of Artificial Sequence: Synthetic oligonucleotide
  Target: LAMA2; (+) strand; PAM type: YTN; PAM sequence: TTC
tattgacacttagaagatgc

SEQ ID NO: 355109 - DNA, 20 bp, Artificial Sequence
  Description of Artificial Sequence: Synthetic oligonucleotide
  Target: LAMA2; (+) strand; PAM type: YTN; PAM sequence: CTA
ttgacacttagaagatgcta

SEQ ID NO: 355110 - DNA, 20 bp, Artificial Sequence
  Description of Artificial Sequence: Synthetic oligonucleotide
  Target: LAMA2; (+) strand; PAM type: YTN; PAM sequence: TTG
acacttagaagatgctatgt

SEQ ID NO: 355111 - DNA, 20 bp, Artificial Sequence
  Description of Artificial Sequence: Synthetic oligonucleotide
  Target: LAMA2; (+) strand; PAM type: YTN; PAM sequence: CTT
agaagatgctatgttcacgt

SEQ ID NO: 355112 - DNA, 20 bp, Artificial Sequence
  Description of Artificial Sequence: Synthetic oligonucleotide
  Target: LAMA2; (+) strand; PAM type: YTN; PAM sequence: TTA
gaagatgctatgttcacgta

SEQ ID NO: 355113 - DNA, 20 bp, Artificial Sequence
  Description of Artificial Sequence: Synthetic oligonucleotide
  Target: LAMA2; (+) strand; PAM type: YTN; PAM sequence: CTA
tgttcacgtaatcatagaaa

SEQ ID NO: 355114 - DNA, 20 bp, Artificial Sequence
  Description of Artificial Sequence: Synthetic oligonucleotide
  Target: LAMA2; (+) strand; PAM type: YTN; PAM sequence: TTC
acgtaatcatagaaagcttt

SEQ ID NO: 355115 - DNA, 20 bp, Artificial Sequence
  Description of Artificial Sequence: Synthetic oligonucleotide
  Target: LAMA2; (+) strand; PAM type: YTN; PAM sequence: CTT
ttaattaaaccctctactct

SEQ ID NO: 355116 - DNA, 20 bp, Artificial Sequence
  Description of Artificial Sequence: Synthetic oligonucleotide
  Target: LAMA2; (+) strand; PAM type: YTN; PAM sequence: TTT
taattaaaccctctactctt

SEQ ID NO: 355117 - DNA, 20 bp, Artificial Sequence
  Description of Artificial Sequence: Synthetic oligonucleotide
  Target: LAMA2; (+) strand; PAM type: YTN; PAM sequence: TTT
aattaaaccctctactcttt

SEQ ID NO: 355118 - DNA, 20 bp, Artificial Sequence
  Description of Artificial Sequence: Synthetic oligonucleotide
  Target: LAMA2; (+) strand; PAM type: YTN; PAM sequence: TTA
attaaaccctctactctttg

SEQ ID NO: 355119 - DNA, 20 bp, Artificial Sequence
  Description of Artificial Sequence: Synthetic oligonucleotide
  Target: LAMA2; (+) strand; PAM type: YTN; PAM sequence: TTA
aaccctctactctttggttt

SEQ ID NO: 355120 - DNA, 20 bp, Artificial Sequence
  Description of Artificial Sequence: Synthetic oligonucleotide
  Target: LAMA2; (+) strand; PAM type: YTN; PAM sequence: CTC
tactctttggttttaacttt

SEQ ID NO: 355121 - DNA, 20 bp, Artificial Sequence
  Description of Artificial Sequence: Synthetic oligonucleotide
  Target: LAMA2; (+) strand; PAM type: YTN; PAM sequence: CTA
ctctttggttttaacttttc

SEQ ID NO: 355122 - DNA, 20 bp, Artificial Sequence
  Description of Artificial Sequence: Synthetic oligonucleotide
  Target: LAMA2; (+) strand; PAM type: YTN; PAM sequence: CTC
tttggttttaacttttcttt

SEQ ID NO: 355123 - DNA, 20 bp, Artificial Sequence
  Description of Artificial Sequence: Synthetic oligonucleotide
  Target: LAMA2; (+) strand; PAM type: YTN; PAM sequence: CTT
tggttttaacttttctttat

SEQ ID NO: 355124 - DNA, 20 bp, Artificial Sequence
  Description of Artificial Sequence: Synthetic oligonucleotide
  Target: LAMA2; (+) strand; PAM type: YTN; PAM sequence: TTT
ggttttaacttttctttatt

SEQ ID NO: 355125 - DNA, 20 bp, Artificial Sequence
  Description of Artificial Sequence: Synthetic oligonucleotide
  Target: LAMA2; (+) strand; PAM type: YTN; PAM sequence: TTG
gttttaacttttctttattg

SEQ ID NO: 355126 - DNA, 20 bp, Artificial Sequence
  Description of Artificial Sequence: Synthetic oligonucleotide
  Target: LAMA2; (+) strand; PAM type: YTN; PAM sequence: TTT
taacttttctttattgatat

SEQ ID NO: 355127 - DNA, 20 bp, Artificial Sequence
  Description of Artificial Sequence: Synthetic oligonucleotide
  Target: LAMA2; (+) strand; PAM type: YTN; PAM sequence: TTT
aacttttctttattgatata

SEQ ID NO: 355128 - DNA, 20 bp, Artificial Sequence
  Description of Artificial Sequence: Synthetic oligonucleotide
  Target: LAMA2; (+) strand; PAM type: YTN; PAM sequence: TTA
acttttctttattgatatat

SEQ ID NO: 355129 - DNA, 20 bp, Artificial Sequence
  Description of Artificial Sequence: Synthetic oligonucleotide
  Target: LAMA2; (+) strand; PAM type: YTN; PAM sequence: CTT
ttctttattgatatatataa

SEQ ID NO: 355130 - DNA, 20 bp, Artificial Sequence
  Description of Artificial Sequence: Synthetic oligonucleotide
  Target: LAMA2; (+) strand; PAM type: YTN; PAM sequence: TTT
tctttattgatatatataaa

SEQ ID NO: 355131 - DNA, 20 bp, Artificial Sequence
  Description of Artificial Sequence: Synthetic oligonucleotide
  Target: LAMA2; (+) strand; PAM type: YTN; PAM sequence: TTT
ctttattgatatatataaaa

SEQ ID NO: 355132 - DNA, 20 bp, Artificial Sequence
  Description of Artificial Sequence: Synthetic oligonucleotide
  Target: LAMA2; (+) strand; PAM type: YTN; PAM sequence: TTC
tttattgatatatataaaaa

SEQ ID NO: 355133 - DNA, 20 bp, Artificial Sequence
  Description of Artificial Sequence: Synthetic oligonucleotide
  Target: LAMA2; (+) strand; PAM type: YTN; PAM sequence: CTT
tattgatatatataaaaaat

SEQ ID NO: 355134 - DNA, 20 bp, Artificial Sequence
  Description of Artificial Sequence: Synthetic oligonucleotide
  Target: LAMA2; (+) strand; PAM type: YTN; PAM sequence: TTT
attgatatatataaaaaatc

SEQ ID NO: 355135 - DNA, 20 bp, Artificial Sequence
  Description of Artificial Sequence: Synthetic oligonucleotide
  Target: LAMA2; (+) strand; PAM type: YTN; PAM sequence: TTA
ttgatatatataaaaaatct

SEQ ID NO: 355136 - DNA, 20 bp, Artificial Sequence
  Description of Artificial Sequence: Synthetic oligonucleotide
  Target: LAMA2; (+) strand; PAM type: YTN; PAM sequence: TTG
atatatataaaaaatctatt

SEQ ID NO: 355137 - DNA, 20 bp, Artificial Sequence
  Description of Artificial Sequence: Synthetic oligonucleotide
  Target: LAMA2; (+) strand; PAM type: YTN; PAM sequence: CTA
tttttgtgtcaaaatagcat

SEQ ID NO: 355138 - DNA, 20 bp, Artificial Sequence
  Description of Artificial Sequence: Synthetic oligonucleotide
  Target: LAMA2; (+) strand; PAM type: YTN; PAM sequence: TTT
ttgtgtcaaaatagcatttt

SEQ ID NO: 355139 - DNA, 20 bp, Artificial Sequence
  Description of Artificial Sequence: Synthetic oligonucleotide
  Target: LAMA2; (+) strand; PAM type: YTN; PAM sequence: TTT
tgtgtcaaaatagcatttta

SEQ ID NO: 355140 - DNA, 20 bp, Artificial Sequence
  Description of Artificial Sequence: Synthetic oligonucleotide
  Target: LAMA2; (+) strand; PAM type: YTN; PAM sequence: TTT
gtgtcaaaatagcattttaa

SEQ ID NO: 355141 - DNA, 20 bp, Artificial Sequence
  Description of Artificial Sequence: Synthetic oligonucleotide
  Target: LAMA2; (+) strand; PAM type: YTN; PAM sequence: TTG
tgtcaaaatagcattttaaa

SEQ ID NO: 355142 - DNA, 20 bp, Artificial Sequence
  Description of Artificial Sequence: Synthetic oligonucleotide
  Target: LAMA2; (+) strand; PAM type: YTN; PAM sequence: TTT
taaaggttactgtcattaaa

SEQ ID NO: 355143 - DNA, 20 bp, Artificial Sequence
  Description of Artificial Sequence: Synthetic oligonucleotide
  Target: LAMA2; (+) strand; PAM type: YTN; PAM sequence: TTT
aaaggttactgtcattaaaa

SEQ ID NO: 355144 - DNA, 20 bp, Artificial Sequence
  Description of Artificial Sequence: Synthetic oligonucleotide
  Target: LAMA2; (+) strand; PAM type: YTN; PAM sequence: TTA
aaggttactgtcattaaaac

SEQ ID NO: 355145 - DNA, 20 bp, Artificial Sequence
  Description of Artificial Sequence: Synthetic oligonucleotide
  Target: LAMA2; (+) strand; PAM type: YTN; PAM sequence: TTA
ctgtcattaaaactttaaca

SEQ ID NO: 355146 - DNA, 20 bp, Artificial Sequence
  Description of Artificial Sequence: Synthetic oligonucleotide
  Target: LAMA2; (+) strand; PAM type: YTN; PAM sequence: CTG
tcattaaaactttaacaact

SEQ ID NO: 355147 - DNA, 20 bp, Artificial Sequence
  Description of Artificial Sequence: Synthetic oligonucleotide
  Target: LAMA2; (+) strand; PAM type: YTN; PAM sequence: TTA
aaactttaacaactaaatta

SEQ ID NO: 355148 - DNA, 20 bp, Artificial Sequence
  Description of Artificial Sequence: Synthetic oligonucleotide
  Target: LAMA2; (+) strand; PAM type: YTN; PAM sequence: CTT
taacaactaaattatgtact

SEQ ID NO: 355149 - DNA, 20 bp, Artificial Sequence
  Description of Artificial Sequence: Synthetic oligonucleotide
  Target: LAMA2; (+) strand; PAM type: YTN; PAM sequence: TTT
aacaactaaattatgtactt

SEQ ID NO: 355150 - DNA, 20 bp, Artificial Sequence
  Description of Artificial Sequence: Synthetic oligonucleotide
  Target: LAMA2; (+) strand; PAM type: YTN; PAM sequence: TTA
acaactaaattatgtacttg

SEQ ID NO: 355151 - DNA, 20 bp, Artificial Sequence
  Description of Artificial Sequence: Synthetic oligonucleotide
  Target: LAMA2; (+) strand; PAM type: YTN; PAM sequence: CTA
aattatgtacttgttttaga

SEQ ID NO: 355152 - DNA, 20 bp, Artificial Sequence
  Description of Artificial Sequence: Synthetic oligonucleotide
  Target: LAMA2; (+) strand; PAM type: YTN; PAM sequence: TTA
tgtacttgttttagaaatgt

SEQ ID NO: 355153 - DNA, 20 bp, Artificial Sequence
  Description of Artificial Sequence: Synthetic oligonucleotide
  Target: LAMA2; (+) strand; PAM type: YTN; PAM sequence: CTT
gttttagaaatgttgatatg

SEQ ID NO: 355154 - DNA, 20 bp, Artificial Sequence
  Description of Artificial Sequence: Synthetic oligonucleotide
  Target: LAMA2; (+) strand; PAM type: YTN; PAM sequence: TTG
ttttagaaatgttgatatgt

SEQ ID NO: 355155 - DNA, 20 bp, Artificial Sequence
  Description of Artificial Sequence: Synthetic oligonucleotide
  Target: LAMA2; (+) strand; PAM type: YTN; PAM sequence: TTT
tagaaatgttgatatgtggc

SEQ ID NO: 355156 - DNA, 20 bp, Artificial Sequence
  Description of Artificial Sequence: Synthetic oligonucleotide
  Target: LAMA2; (+) strand; PAM type: YTN; PAM sequence: TTT
agaaatgttgatatgtggct

SEQ ID NO: 355157 - DNA, 20 bp, Artificial Sequence
  Description of Artificial Sequence: Synthetic oligonucleotide
  Target: LAMA2; (+) strand; PAM type: YTN; PAM sequence: TTA
gaaatgttgatatgtggctc

SEQ ID NO: 355158 - DNA, 20 bp, Artificial Sequence
  Description of Artificial Sequence: Synthetic oligonucleotide
  Target: LAMA2; (+) strand; PAM type: YTN; PAM sequence: TTG
atatgtggctcatctttctt

SEQ ID NO: 355159 - DNA, 20 bp, Artificial Sequence
  Description of Artificial Sequence: Synthetic oligonucleotide
  Target: LAMA2; (+) strand; PAM type: YTN; PAM sequence: CTC
atctttctttaggtttggca

SEQ ID NO: 355160 - DNA, 20 bp, Artificial Sequence
  Description of Artificial Sequence: Synthetic oligonucleotide
  Target: LAMA2; (+) strand; PAM type: YTN; PAM sequence: CTT
tctttaggtttggcacctgg

SEQ ID NO: 355161 - DNA, 20 bp, Artificial Sequence
  Description of Artificial Sequence: Synthetic oligonucleotide
  Target: LAMA2; (+) strand; PAM type: YTN; PAM sequence: TTT
ctttaggtttggcacctgga

SEQ ID NO: 355162 - DNA, 20 bp, Artificial Sequence
  Description of Artificial Sequence: Synthetic oligonucleotide
  Target: LAMA2; (+) strand; PAM type: YTN; PAM sequence: TTC
tttaggtttggcacctggat

SEQ ID NO: 355163 - DNA, 20 bp, Artificial Sequence
  Description of Artificial Sequence: Synthetic oligonucleotide
  Target: LAMA2; (+) strand; PAM type: YTN; PAM sequence: CTT
taggtttggcacctggatcc

SEQ ID NO: 355164 - DNA, 20 bp, Artificial Sequence
  Description of Artificial Sequence: Synthetic oligonucleotide
  Target: LAMA2; (+) strand; PAM type: YTN; PAM sequence: TTT
aggtttggcacctggatcct

SEQ ID NO: 355165 - DNA, 20 bp, Artificial Sequence
  Description of Artificial Sequence: Synthetic oligonucleotide
  Target: LAMA2; (+) strand; PAM type: YTN; PAM sequence: TTA
ggtttggcacctggatcctg

SEQ ID NO: 355166 - DNA, 20 bp, Artificial Sequence
  Description of Artificial Sequence: Synthetic oligonucleotide
  Target: LAMA2; (+) strand; PAM type: YTN; PAM sequence: TTT
ggcacctggatcctgtcatt

SEQ ID NO: 355167 - DNA, 20 bp, Artificial Sequence
  Description of Artificial Sequence: Synthetic oligonucleotide
  Target: LAMA2; (+) strand; PAM type: YTN; PAM sequence: TTG
gcacctggatcctgtcattg

SEQ ID NO: 355168 - DNA, 20 bp, Artificial Sequence
  Description of Artificial Sequence: Synthetic oligonucleotide
  Target: LAMA2; (+) strand; PAM type: YTN; PAM sequence: CTG
gatcctgtcattgcaaaact

SEQ ID NO: 355169 - DNA, 20 bp, Artificial Sequence
  Description of Artificial Sequence: Synthetic oligonucleotide
  Target: LAMA2; (+) strand; PAM type: YTN; PAM sequence: CTG
tcattgcaaaactggttttg

SEQ ID NO: 355170 - DNA, 20 bp, Artificial Sequence
  Description of Artificial Sequence: Synthetic oligonucleotide
  Target: LAMA2; (+) strand; PAM type: YTN; PAM sequence: TTG
caaaactggttttggaggtg

SEQ ID NO: 355171 - DNA, 20 bp, Artificial Sequence
  Description of Artificial Sequence: Synthetic oligonucleotide
  Target: LAMA2; (+) strand; PAM type: YTN; PAM sequence: CTG
gttttggaggtgtgagctgt

SEQ ID NO: 355172 - DNA, 20 bp, Artificial Sequence
  Description of Artificial Sequence: Synthetic oligonucleotide
  Target: LAMA2; (+) strand; PAM type: YTN; PAM sequence: TTT
tggaggtgtgagctgtgatc

SEQ ID NO: 355173 - DNA, 20 bp, Artificial Sequence
  Description of Artificial Sequence: Synthetic oligonucleotide
  Target: LAMA2; (+) strand; PAM type: YTN; PAM sequence: TTT
ggaggtgtgagctgtgatcg

SEQ ID NO: 355174 - DNA, 20 bp, Artificial Sequence
  Description of Artificial Sequence: Synthetic oligonucleotide
  Target: LAMA2; (+) strand; PAM type: YTN; PAM sequence: TTG
gaggtgtgagctgtgatcgg

SEQ ID NO: 355175 - DNA, 20 bp, Artificial Sequence
  Description of Artificial Sequence: Synthetic oligonucleotide
  Target: LAMA2; (+) strand; PAM type: YTN; PAM sequence: CTG
tgatcggtgtgccaggggct

SEQ ID NO: 355176 - DNA, 20 bp, Artificial Sequence
  Description of Artificial Sequence: Synthetic oligonucleotide
  Target: LAMA2; (+) strand; PAM type: YTN; PAM sequence: CTA
cactggctacccggactgca

SEQ ID NO: 355177 - DNA, 20 bp, Artificial Sequence
  Description of Artificial Sequence: Synthetic oligonucleotide
  Target: LAMA2; (+) strand; PAM type: YTN; PAM sequence: CTG
gctacccggactgcaaagcc

SEQ ID NO: 355178 - DNA, 20 bp, Artificial Sequence
  Description of Artificial Sequence: Synthetic oligonucleotide
  Target: LAMA2; (+) strand; PAM type: YTN; PAM sequence: CTA
cccggactgcaaagcctgta

SEQ ID NO: 355179 - DNA, 20 bp, Artificial Sequence
  Description of Artificial Sequence: Synthetic oligonucleotide
  Target: LAMA2; (+) strand; PAM type: YTN; PAM sequence: CTG
caaagcctgtaactgcagtg

SEQ ID NO: 355180 - DNA, 20 bp, Artificial Sequence
  Description of Artificial Sequence: Synthetic oligonucleotide
  Target: LAMA2; (+) strand; PAM type: YTN; PAM sequence: CTG
taactgcagtgggttaggga

SEQ ID NO: 355181 - DNA, 20 bp, Artificial Sequence
  Description of Artificial Sequence: Synthetic oligonucleotide
  Target: LAMA2; (+) strand; PAM type: YTN; PAM sequence: CTG
cagtgggttagggagcaaaa

SEQ ID NO: 355182 - DNA, 20 bp, Artificial Sequence
  Description of Artificial Sequence: Synthetic oligonucleotide
  Target: LAMA2; (+) strand; PAM type: YTN; PAM sequence: TTA
gggagcaaaaatgaggatcc

SEQ ID NO: 355183 - DNA, 20 bp, Artificial Sequence
  Description of Artificial Sequence: Synthetic oligonucleotide
  Target: LAMA2; (+) strand; PAM type: YTN; PAM sequence: CTT
gttttggcccctgtatctgc

SEQ ID NO: 355184 - DNA, 20 bp, Artificial Sequence
  Description of Artificial Sequence: Synthetic oligonucleotide
  Target: LAMA2; (+) strand; PAM type: YTN; PAM sequence: TTG
ttttggcccctgtatctgca

SEQ ID NO: 355185 - DNA, 20 bp, Artificial Sequence
  Description of Artificial Sequence: Synthetic oligonucleotide
  Target: LAMA2; (+) strand; PAM type: YTN; PAM sequence: TTT
tggcccctgtatctgcaagg

SEQ ID NO: 355186 - DNA, 20 bp, Artificial Sequence
  Description of Artificial Sequence: Synthetic oligonucleotide
  Target: LAMA2; (+) strand; PAM type: YTN; PAM sequence: TTT
ggcccctgtatctgcaaggt

SEQ ID NO: 355187 - DNA, 20 bp, Artificial Sequence
  Description of Artificial Sequence: Synthetic oligonucleotide
  Target: LAMA2; (+) strand; PAM type: YTN; PAM sequence: TTG
gcccctgtatctgcaaggta

SEQ ID NO: 355188 - DNA, 20 bp, Artificial Sequence
  Description of Artificial Sequence: Synthetic oligonucleotide
  Target: LAMA2; (+) strand; PAM type: YTN; PAM sequence: CTG
tatctgcaaggtacattgtt

SEQ ID NO: 355189 - DNA, 20 bp, Artificial Sequence
  Description of Artificial Sequence: Synthetic oligonucleotide
  Target: LAMA2; (+) strand; PAM type: YTN; PAM sequence: CTG
caaggtacattgtttattcc

SEQ ID NO: 355190 - DNA, 20 bp, Artificial Sequence
  Description of Artificial Sequence: Synthetic oligonucleotide
  Target: LAMA2; (+) strand; PAM type: YTN; PAM sequence: TTG
tttattccagtaatgtccca

SEQ ID NO: 355191 - DNA, 20 bp, Artificial Sequence
  Description of Artificial Sequence: Synthetic oligonucleotide
  Target: LAMA2; (+) strand; PAM type: YTN; PAM sequence: TTT
attccagtaatgtcccactg

SEQ ID NO: 355192 - DNA, 20 bp, Artificial Sequence
  Description of Artificial Sequence: Synthetic oligonucleotide
  Target: LAMA2; (+) strand; PAM type: YTN; PAM sequence: TTA
ttccagtaatgtcccactgt

SEQ ID NO: 355193 - DNA, 20 bp, Artificial Sequence
  Description of Artificial Sequence: Synthetic oligonucleotide
  Target: LAMA2; (+) strand; PAM type: YTN; PAM sequence: TTC
cagtaatgtcccactgtcaa

SEQ ID NO: 355194 - DNA, 20 bp, Artificial Sequence
  Description of Artificial Sequence: Synthetic oligonucleotide
  Target: LAMA2; (+) strand; PAM type: YTN; PAM sequence: CTG
tcaagacagaaggttatttt

SEQ ID NO: 355195 - DNA, 20 bp, Artificial Sequence
  Description of Artificial Sequence: Synthetic oligonucleotide
  Target: LAMA2; (+) strand; PAM type: YTN; PAM sequence: TTA
tttttcttggcttctctgtt

SEQ ID NO: 355196 - DNA, 20 bp, Artificial Sequence
  Description of Artificial Sequence: Synthetic oligonucleotide
  Target: LAMA2; (+) strand; PAM type: YTN; PAM sequence: TTT
ttcttggcttctctgttgat

SEQ ID NO: 355197 - DNA, 20 bp, Artificial Sequence
  Description of Artificial Sequence: Synthetic oligonucleotide
  Target: LAMA2; (+) strand; PAM type: YTN; PAM sequence: TTT
tcttggcttctctgttgatt

SEQ ID NO: 355198 - DNA, 20 bp, Artificial Sequence
  Description of Artificial Sequence: Synthetic oligonucleotide
  Target: LAMA2; (+) strand; PAM type: YTN; PAM sequence: TTT
cttggcttctctgttgattt

SEQ ID NO: 355199 - DNA, 20 bp, Artificial Sequence
  Description of Artificial Sequence: Synthetic oligonucleotide
  Target: LAMA2; (+) strand; PAM type: YTN; PAM sequence: TTC
ttggcttctctgttgatttc

SEQ ID NO: 355200 - DNA, 20 bp, Artificial Sequence
  Description of Artificial Sequence: Synthetic oligonucleotide
  Target: LAMA2; (+) strand; PAM type: YTN; PAM sequence: CTT
ggcttctctgttgatttcct

SEQ ID NO: 355201 - DNA, 20 bp, Artificial Sequence
  Description of Artificial Sequence: Synthetic oligonucleotide
  Target: LAMA2; (+) strand; PAM type: YTN; PAM sequence: TTG
gcttctctgttgatttcctt

SEQ ID NO: 355202 - DNA, 20 bp, Artificial Sequence
  Description of Artificial Sequence: Synthetic oligonucleotide
  Target: LAMA2; (+) strand; PAM type: YTN; PAM sequence: CTT
ctctgttgatttccttggca

SEQ ID NO: 355203 - DNA, 20 bp, Artificial Sequence
  Description of Artificial Sequence: Synthetic oligonucleotide
  Target: LAMA2; (+) strand; PAM type: YTN; PAM sequence: TTC
tctgttgatttccttggcat

SEQ ID NO: 355204 - DNA, 20 bp, Artificial Sequence
  Description of Artificial Sequence: Synthetic oligonucleotide
  Target: LAMA2; (+) strand; PAM type: YTN; PAM sequence: CTC
tgttgatttccttggcatta

SEQ ID NO: 355205 - DNA, 20 bp, Artificial Sequence
  Description of Artificial Sequence: Synthetic oligonucleotide
  Target: LAMA2; (+) strand; PAM type: YTN; PAM sequence: CTG
ttgatttccttggcattaag

SEQ ID NO: 355206 - DNA, 20 bp, Artificial Sequence
  Description of Artificial Sequence: Synthetic oligonucleotide
  Target: LAMA2; (+) strand; PAM type: YTN; PAM sequence: TTG
atttccttggcattaagcaa

SEQ ID NO: 355207 - DNA, 20 bp, Artificial Sequence
  Description of Artificial Sequence: Synthetic oligonucleotide
  Target: LAMA2; (+) strand; PAM type: YTN; PAM sequence: TTT
ccttggcattaagcaatttt

SEQ ID NO: 355208 - DNA, 20 bp, Artificial Sequence
  Description of Artificial Sequence: Synthetic oligonucleotide
  Target: LAMA2; (+) strand; PAM type: YTN; PAM sequence: TTC
cttggcattaagcaatttta

SEQ ID NO: 355209 - DNA, 20 bp, Artificial Sequence
  Description of Artificial Sequence: Synthetic oligonucleotide
  Target: LAMA2; (+) strand; PAM type: YTN; PAM sequence: CTT
ggcattaagcaattttaatg

SEQ ID NO: 355210 - DNA, 20 bp, Artificial Sequence
  Description of Artificial Sequence: Synthetic oligonucleotide
  Target: LAMA2; (+) strand; PAM type: YTN; PAM sequence: TTG
gcattaagcaattttaatga

SEQ ID NO: 355211 - DNA, 20 bp, Artificial Sequence
  Description of Artificial Sequence: Synthetic oligonucleotide
  Target: LAMA2; (+) strand; PAM type: YTN; PAM sequence: TTA
agcaattttaatgacttctg

SEQ ID NO: 355212 - DNA, 20 bp, Artificial Sequence
  Description of Artificial Sequence: Synthetic oligonucleotide
  Target: LAMA2; (+) strand; PAM type: YTN; PAM sequence: TTT
taatgacttctggaagtatc

SEQ ID NO: 355213 - DNA, 20 bp, Artificial Sequence
  Description of Artificial Sequence: Synthetic oligonucleotide
  Target: LAMA2; (+) strand; PAM type: YTN; PAM sequence: TTT
aatgacttctggaagtatcc

SEQ ID NO: 355214 - DNA, 20 bp, Artificial Sequence
  Description of Artificial Sequence: Synthetic oligonucleotide
  Target: LAMA2; (+) strand; PAM type: YTN; PAM sequence: TTA
atgacttctggaagtatcca

SEQ ID NO: 355215 - DNA, 20 bp, Artificial Sequence
  Description of Artificial Sequence: Synthetic oligonucleotide
  Target: LAMA2; (+) strand; PAM type: YTN; PAM sequence: CTT
ctggaagtatccataatcta

SEQ ID NO: 355216 - DNA, 20 bp, Artificial Sequence
  Description of Artificial Sequence: Synthetic oligonucleotide
  Target: LAMA2; (+) strand; PAM type: YTN; PAM sequence: TTC
tggaagtatccataatctat

SEQ ID NO: 355217 - DNA, 20 bp, Artificial Sequence
  Description of Artificial Sequence: Synthetic oligonucleotide
  Target: LAMA2; (+) strand; PAM type: YTN; PAM sequence: CTG
gaagtatccataatctattc

SEQ ID NO: 355218 - DNA, 20 bp, Artificial Sequence
  Description of Artificial Sequence: Synthetic oligonucleotide
  Target: LAMA2; (+) strand; PAM type: YTN; PAM sequence: CTA
ttctacgtgtggtgacccac

SEQ ID NO: 355219 - DNA, 20 bp, Artificial Sequence
  Description of Artificial Sequence: Synthetic oligonucleotide
  Target: LAMA2; (+) strand; PAM type: YTN; PAM sequence: TTC
tacgtgtggtgacccaccag

SEQ ID NO: 355220 - DNA, 20 bp, Artificial Sequence
  Description of Artificial Sequence: Synthetic oligonucleotide
  Target: LAMA2; (+) strand; PAM type: YTN; PAM sequence: CTA
cgtgtggtgacccaccaggt

SEQ ID NO: 355221 - DNA, 20 bp, Artificial Sequence
  Description of Artificial Sequence: Synthetic oligonucleotide
  Target: LAMA2; (+) strand; PAM type: YTN; PAM sequence: TTC
actgtagcaggatgtttata

SEQ ID NO: 355222 - DNA, 20 bp, Artificial Sequence
  Description of Artificial Sequence: Synthetic oligonucleotide
  Target: LAMA2; (+) strand; PAM type: YTN; PAM sequence: CTG
tagcaggatgtttataaggc

SEQ ID NO: 355223 - DNA, 20 bp, Artificial Sequence
  Description of Artificial Sequence: Synthetic oligonucleotide
  Target: LAMA2; (+) strand; PAM type: YTN; PAM sequence: TTT
ataaggcacttatctaaaag

SEQ ID NO: 355224 - DNA, 20 bp, Artificial Sequence
  Description of Artificial Sequence: Synthetic oligonucleotide
  Target: LAMA2; (+) strand; PAM type: YTN; PAM sequence: TTA
taaggcacttatctaaaagc

SEQ ID NO: 355225 - DNA, 20 bp, Artificial Sequence
  Description of Artificial Sequence: Synthetic oligonucleotide
  Target: LAMA2; (+) strand; PAM type: YTN; PAM sequence: CTT
atctaaaagcctacaaatgc

SEQ ID NO: 355226 - DNA, 20 bp, Artificial Sequence
  Description of Artificial Sequence: Synthetic oligonucleotide
  Target: LAMA2; (+) strand; PAM type: YTN; PAM sequence: TTA
tctaaaagcctacaaatgca

SEQ ID NO: 355227 - DNA, 20 bp, Artificial Sequence
  Description of Artificial Sequence: Synthetic oligonucleotide
  Target: LAMA2; (+) strand; PAM type: YTN; PAM sequence: CTA
aaagcctacaaatgcacgga

SEQ ID NO: 355228 - DNA, 20 bp, Artificial Sequence
  Description of Artificial Sequence: Synthetic oligonucleotide
  Target: LAMA2; (+) strand; PAM type: YTN; PAM sequence: CTA
caaatgcacggaggataaac

SEQ ID NO: 355229 - DNA, 20 bp, Artificial Sequence
  Description of Artificial Sequence: Synthetic oligonucleotide
  Target: LAMA2; (+) strand; PAM type: YTN; PAM sequence: TTT
aaaggcttgttattttataa

SEQ ID NO: 355230 - DNA, 20 bp, Artificial Sequence
  Description of Artificial Sequence: Synthetic oligonucleotide
  Target: LAMA2; (+) strand; PAM type: YTN; PAM sequence: TTA
aaggcttgttattttataac

SEQ ID NO: 355231 - DNA, 20 bp, Artificial Sequence
  Description of Artificial Sequence: Synthetic oligonucleotide
  Target: LAMA2; (+) strand; PAM type: YTN; PAM sequence: CTT
gttattttataacaaaaaca

SEQ ID NO: 355232 - DNA, 20 bp, Artificial Sequence
  Description of Artificial Sequence: Synthetic oligonucleotide
  Target: LAMA2; (+) strand; PAM type: YTN; PAM sequence: TTG
ttattttataacaaaaacac

SEQ ID NO: 355233 - DNA, 20 bp, Artificial Sequence
  Description of Artificial Sequence: Synthetic oligonucleotide
  Target: LAMA2; (+) strand; PAM type: YTN; PAM sequence: TTA
ttttataacaaaaacacttt

SEQ ID NO: 355234 - DNA, 20 bp, Artificial Sequence
  Description of Artificial Sequence: Synthetic oligonucleotide
  Target: LAMA2; (+) strand; PAM type: YTN; PAM sequence: TTT
tataacaaaaacactttcac

SEQ ID NO: 355235 - DNA, 20 bp, Artificial Sequence
  Description of Artificial Sequence: Synthetic oligonucleotide
  Target: LAMA2; (+) strand; PAM type: YTN; PAM sequence: TTT
ataacaaaaacactttcacc

SEQ ID NO: 355236 - DNA, 20 bp, Artificial Sequence
  Description of Artificial Sequence: Synthetic oligonucleotide
  Target: LAMA2; (+) strand; PAM type: YTN; PAM sequence: TTA
taacaaaaacactttcaccc

SEQ ID NO: 355237 - DNA, 20 bp, Artificial Sequence
  Description of Artificial Sequence: Synthetic oligonucleotide
  Target: LAMA2; (+) strand; PAM type: YTN; PAM sequence: CTT
tcaccccattgcccaactag

SEQ ID NO: 355238 - DNA, 20 bp, Artificial Sequence
  Description of Artificial Sequence: Synthetic oligonucleotide
  Target: LAMA2; (+) strand; PAM type: YTN; PAM sequence: TTT
caccccattgcccaactagt

SEQ ID NO: 355239 - DNA, 20 bp, Artificial Sequence
  Description of Artificial Sequence: Synthetic oligonucleotide
  Target: LAMA2; (+) strand; PAM type: YTN; PAM sequence: TTC
accccattgcccaactagtg

SEQ ID NO: 355240 - DNA, 20 bp, Artificial Sequence
  Description of Artificial Sequence: Synthetic oligonucleotide
  Target: LAMA2; (+) strand; PAM type: YTN; PAM sequence: TTG
cccaactagtgtgttaattt

SEQ ID NO: 355241 - DNA, 20 bp, Artificial Sequence
  Description of Artificial Sequence: Synthetic oligonucleotide
  Target: LAMA2; (+) strand; PAM type: YTN; PAM sequence: CTA
gtgtgttaatttaaaaatat

SEQ ID NO: 355242 - DNA, 20 bp, Artificial Sequence
  Description of Artificial Sequence: Synthetic oligonucleotide
  Target: LAMA2; (+) strand; PAM type: YTN; PAM sequence: TTA
atttaaaaatatacggcact

SEQ ID NO: 355243 - DNA, 20 bp, Artificial Sequence
  Description of Artificial Sequence: Synthetic oligonucleotide
  Target: LAMA2; (+) strand; PAM type: YTN; PAM sequence: TTT
aaaaatatacggcactagaa

SEQ ID NO: 355244 - DNA, 20 bp, Artificial Sequence
  Description of Artificial Sequence: Synthetic oligonucleotide
  Target: LAMA2; (+) strand; PAM type: YTN; PAM sequence: TTA
aaaatatacggcactagaaa

SEQ ID NO: 355245 - DNA, 20 bp, Artificial Sequence
  Description of Artificial Sequence: Synthetic oligonucleotide
  Target: LAMA2; (+) strand; PAM type: YTN; PAM sequence: CTA
gaaatagcaaccctttaaaa

SEQ ID NO: 355246 - DNA, 20 bp, Artificial Sequence
  Description of Artificial Sequence: Synthetic oligonucleotide
  Target: LAMA2; (+) strand; PAM type: YTN; PAM sequence: CTT
taaaactaaagtgcattcaa

SEQ ID NO: 355247 - DNA, 20 bp, Artificial Sequence
  Description of Artificial Sequence: Synthetic oligonucleotide
  Target: LAMA2; (+) strand; PAM type: YTN; PAM sequence: TTT
aaaactaaagtgcattcaaa

SEQ ID NO: 355248 - DNA, 20 bp, Artificial Sequence
  Description of Artificial Sequence: Synthetic oligonucleotide
  Target: LAMA2; (+) strand; PAM type: YTN; PAM sequence: TTA
aaactaaagtgcattcaaat

SEQ ID NO: 355249 - DNA, 20 bp, Artificial Sequence
  Description of Artificial Sequence: Synthetic oligonucleotide
  Target: LAMA2; (+) strand; PAM type: YTN; PAM sequence: CTA
aagtgcattcaaatctacct

SEQ ID NO: 355250 - DNA, 20 bp, Artificial Sequence
  Description of Artificial Sequence: Synthetic oligonucleotide
  Target: LAMA2; (+) strand; PAM type: YTN; PAM sequence: TTC
aaatctacctttgcatctaa

SEQ ID NO: 355251 - DNA, 20 bp, Artificial Sequence
  Description of Artificial Sequence: Synthetic oligonucleotide
  Target: LAMA2; (+) strand; PAM type: YTN; PAM sequence: CTA
cctttgcatctaattcagta

SEQ ID NO: 355252 - DNA, 20 bp, Artificial Sequence
  Description of Artificial Sequence: Synthetic oligonucleotide
  Target: LAMA2; (+) strand; PAM type: YTN; PAM sequence: CTT
tgcatctaattcagtaatga

SEQ ID NO: 355253 - DNA, 20 bp, Artificial Sequence
  Description of Artificial Sequence: Synthetic oligonucleotide
  Target: LAMA2; (+) strand; PAM type: YTN; PAM sequence: TTT
gcatctaattcagtaatgaa

SEQ ID NO: 355254 - DNA, 20 bp, Artificial Sequence
  Description of Artificial Sequence: Synthetic oligonucleotide
  Target: LAMA2; (+) strand; PAM type: YTN; PAM sequence: TTG
catctaattcagtaatgaat

SEQ ID NO: 355255 - DNA, 20 bp, Artificial Sequence
  Description of Artificial Sequence: Synthetic oligonucleotide
  Target: LAMA2; (+) strand; PAM type: YTN; PAM sequence: CTA
attcagtaatgaattctgtc

SEQ ID NO: 355256 - DNA, 20 bp, Artificial Sequence
  Description of Artificial Sequence: Synthetic oligonucleotide
  Target: LAMA2; (+) strand; PAM type: YTN; PAM sequence: TTC
agtaatgaattctgtcaagg

SEQ ID NO: 355257 - DNA, 20 bp, Artificial Sequence
  Description of Artificial Sequence: Synthetic oligonucleotide
  Target: LAMA2; (+) strand; PAM type: YTN; PAM sequence: TTC
tgtcaagggttttattctga

SEQ ID NO: 355258 - DNA, 20 bp, Artificial Sequence
  Description of Artificial Sequence: Synthetic oligonucleotide
  Target: LAMA2; (+) strand; PAM type: YTN; PAM sequence: CTG
tcaagggttttattctgaat

SEQ ID NO: 355259 - DNA, 20 bp, Artificial Sequence
  Description of Artificial Sequence: Synthetic oligonucleotide
  Target: LAMA2; (+) strand; PAM type: YTN; PAM sequence: TTT
tattctgaatttttaaataa

SEQ ID NO: 355260 - DNA, 20 bp, Artificial Sequence
  Description of Artificial Sequence: Synthetic oligonucleotide
  Target: LAMA2; (+) strand; PAM type: YTN; PAM sequence: TTT
attctgaatttttaaataat

SEQ ID NO: 355261 - DNA, 20 bp, Artificial Sequence
  Description of Artificial Sequence: Synthetic oligonucleotide
  Target: LAMA2; (+) strand; PAM type: YTN; PAM sequence: TTA
ttctgaatttttaaataatc

SEQ ID NO: 355262 - DNA, 20 bp, Artificial Sequence
  Description of Artificial Sequence: Synthetic oligonucleotide
  Target: LAMA2; (+) strand; PAM type: YTN; PAM sequence: TTC
tgaatttttaaataatcttc

SEQ ID NO: 355263 - DNA, 20 bp, Artificial Sequence
  Description of Artificial Sequence: Synthetic oligonucleotide
  Target: LAMA2; (+) strand; PAM type: YTN; PAM sequence: CTG
aatttttaaataatcttcta

SEQ ID NO: 355264 - DNA, 20 bp, Artificial Sequence
  Description of Artificial Sequence: Synthetic oligonucleotide
  Target: LAMA2; (+) strand; PAM type: YTN; PAM sequence: TTT
ttaaataatcttctaaagtt

SEQ ID NO: 355265 - DNA, 20 bp, Artificial Sequence
  Description of Artificial Sequence: Synthetic oligonucleotide
  Target: LAMA2; (+) strand; PAM type: YTN; PAM sequence: TTT
taaataatcttctaaagttt

SEQ ID NO: 355266 - DNA, 20 bp, Artificial Sequence
  Description of Artificial Sequence: Synthetic oligonucleotide
  Target: LAMA2; (+) strand; PAM type: YTN; PAM sequence: TTT
aaataatcttctaaagtttg

SEQ ID NO: 355267 - DNA, 20 bp, Artificial Sequence
  Description of Artificial Sequence: Synthetic oligonucleotide
  Target: LAMA2; (+) strand; PAM type: YTN; PAM sequence: TTA
aataatcttctaaagtttga

SEQ ID NO: 355268 - DNA, 20 bp, Artificial Sequence
  Description of Artificial Sequence: Synthetic oligonucleotide
  Target: LAMA2; (+) strand; PAM type: YTN; PAM sequence: CTT
ctaaagtttgaacccagata

SEQ ID NO: 355269 - DNA, 20 bp, Artificial Sequence
  Description of Artificial Sequence: Synthetic oligonucleotide
  Target: LAMA2; (+) strand; PAM type: YTN; PAM sequence: TTC
taaagtttgaacccagataa

SEQ ID NO: 355270 - DNA, 20 bp, Artificial Sequence
  Description of Artificial Sequence: Synthetic oligonucleotide
  Target: LAMA2; (+) strand; PAM type: YTN; PAM sequence: CTA
aagtttgaacccagataagc

SEQ ID NO: 355271 - DNA, 20 bp, Artificial Sequence
  Description of Artificial Sequence: Synthetic oligonucleotide
  Target: LAMA2; (+) strand; PAM type: YTN; PAM sequence: TTT
gaacccagataagccttaaa

SEQ ID NO: 355272 - DNA, 20 bp, Artificial Sequence
  Description of Artificial Sequence: Synthetic oligonucleotide
  Target: LAMA2; (+) strand; PAM type: YTN; PAM sequence: TTG
aacccagataagccttaaaa

SEQ ID NO: 355273 - DNA, 20 bp, Artificial Sequence
  Description of Artificial Sequence: Synthetic oligonucleotide
  Target: LAMA2; (+) strand; PAM type: YTN; PAM sequence: CTT
aaaatactcattatattcaa

SEQ ID NO: 355274 - DNA, 20 bp, Artificial Sequence
  Description of Artificial Sequence: Synthetic oligonucleotide
  Target: LAMA2; (+) strand; PAM type: YTN; PAM sequence: TTA
aaatactcattatattcaaa

SEQ ID NO: 355275 - DNA, 20 bp, Artificial Sequence
  Description of Artificial Sequence: Synthetic oligonucleotide
  Target: LAMA2; (+) strand; PAM type: YTN; PAM sequence: CTC
attatattcaaatttttctg

SEQ ID NO: 355276 - DNA, 20 bp, Artificial Sequence
  Description of Artificial Sequence: Synthetic oligonucleotide
  Target: LAMA2; (+) strand; PAM type: YTN; PAM sequence: TTA
tattcaaatttttctgttca

SEQ ID NO: 355277 - DNA, 20 bp, Artificial Sequence
  Description of Artificial Sequence: Synthetic oligonucleotide
  Target: LAMA2; (+) strand; PAM type: YTN; PAM sequence: TTC
aaatttttctgttcaattat

SEQ ID NO: 355278 - DNA, 20 bp, Artificial Sequence
  Description of Artificial Sequence: Synthetic oligonucleotide
  Target: LAMA2; (+) strand; PAM type: YTN; PAM sequence: TTT
ttctgttcaattataaaaaa

SEQ ID NO: 355279 - DNA, 20 bp, Artificial Sequence
  Description of Artificial Sequence: Synthetic oligonucleotide
  Target: LAMA2; (+) strand; PAM type: YTN; PAM sequence: TTT
tctgttcaattataaaaaag

SEQ ID NO: 355280 - DNA, 20 bp, Artificial Sequence
  Description of Artificial Sequence: Synthetic oligonucleotide
  Target: LAMA2; (+) strand; PAM type: YTN; PAM sequence: TTT
ctgttcaattataaaaaagt

SEQ ID NO: 355281 - DNA, 20 bp, Artificial Sequence
  Description of Artificial Sequence: Synthetic oligonucleotide
  Target: LAMA2; (+) strand; PAM type: YTN; PAM sequence: TTC
tgttcaattataaaaaagta

SEQ ID NO: 355282 - DNA, 20 bp, Artificial Sequence
  Description of Artificial Sequence: Synthetic oligonucleotide
  Target: LAMA2; (+) strand; PAM type: YTN; PAM sequence: CTG
ttcaattataaaaaagtaca

SEQ ID NO: 355283 - DNA, 20 bp, Artificial Sequence
  Description of Artificial Sequence: Synthetic oligonucleotide
  Target: LAMA2; (+) strand; PAM type: YTN; PAM sequence: TTC
aattataaaaaagtacaaag

SEQ ID NO: 355284 - DNA, 20 bp, Artificial Sequence
  Description of Artificial Sequence: Synthetic oligonucleotide
  Target: LAMA2; (+) strand; PAM type: YTN; PAM sequence: TTA
taaaaaagtacaaagcccta

SEQ ID NO: 355285 - DNA, 20 bp, Artificial Sequence
  Description of Artificial Sequence: Synthetic oligonucleotide
  Target: LAMA2; (+) strand; PAM type: YTN; PAM sequence: CTA
atggaattaattaaaggctc

SEQ ID NO: 355286 - DNA, 20 bp, Artificial Sequence
  Description of Artificial Sequence: Synthetic oligonucleotide
  Target: LAMA2; (+) strand; PAM type: YTN; PAM sequence: TTA
attaaaggctcaatattttc

SEQ ID NO: 355287 - DNA, 20 bp, Artificial Sequence
  Description of Artificial Sequence: Synthetic oligonucleotide
  Target: LAMA2; (+) strand; PAM type: YTN; PAM sequence: TTA
aaggctcaatattttcttcc

SEQ ID NO: 355288 - DNA, 20 bp, Artificial Sequence
  Description of Artificial Sequence: Synthetic oligonucleotide
  Target: LAMA2; (+) strand; PAM type: YTN; PAM sequence: CTC
aatattttcttccaagatta

SEQ ID NO: 355289 - DNA, 20 bp, Artificial Sequence
  Description of Artificial Sequence: Synthetic oligonucleotide
  Target: LAMA2; (+) strand; PAM type: YTN; PAM sequence: TTT
tcttccaagattacttttag

SEQ ID NO: 355290 - DNA, 20 bp, Artificial Sequence
  Description of Artificial Sequence: Synthetic oligonucleotide
  Target: LAMA2; (+) strand; PAM type: YTN; PAM sequence: TTT
cttccaagattacttttaga

SEQ ID NO: 355291 - DNA, 20 bp, Artificial Sequence
  Description of Artificial Sequence: Synthetic oligonucleotide
  Target: LAMA2; (+) strand; PAM type: YTN; PAM sequence: TTC
ttccaagattacttttagaa

SEQ ID NO: 355292 - DNA, 20 bp, Artificial Sequence
  Description of Artificial Sequence: Synthetic oligonucleotide
  Target: LAMA2; (+) strand; PAM type: YTN; PAM sequence: CTT
ccaagattacttttagaaat

SEQ ID NO: 355293 - DNA, 20 bp, Artificial Sequence
  Description of Artificial Sequence: Synthetic oligonucleotide
  Target: LAMA2; (+) strand; PAM type: YTN; PAM sequence: TTC
caagattacttttagaaatg

SEQ ID NO: 355294 - DNA, 20 bp, Artificial Sequence
  Description of Artificial Sequence: Synthetic oligonucleotide
  Target: LAMA2; (+) strand; PAM type: YTN; PAM sequence: TTA
cttttagaaatgcaacttta

SEQ ID NO: 355295 - DNA, 20 bp, Artificial Sequence
  Description of Artificial Sequence: Synthetic oligonucleotide
  Target: LAMA2; (+) strand; PAM type: YTN; PAM sequence: CTT
ttagaaatgcaactttattt

SEQ ID NO: 355296 - DNA, 20 bp, Artificial Sequence
  Description of Artificial Sequence: Synthetic oligonucleotide
  Target: LAMA2; (+) strand; PAM type: YTN; PAM sequence: TTT
tagaaatgcaactttatttg

SEQ ID NO: 355297 - DNA, 20 bp, Artificial Sequence
  Description of Artificial Sequence: Synthetic oligonucleotide
  Target: LAMA2; (+) strand; PAM type: YTN; PAM sequence: TTT
agaaatgcaactttatttgt

SEQ ID NO: 355298 - DNA, 20 bp, Artificial Sequence
  Description of Artificial Sequence: Synthetic oligonucleotide
  Target: LAMA2; (+) strand; PAM type: YTN; PAM sequence: TTA
gaaatgcaactttatttgtt

SEQ ID NO: 355299 - DNA, 20 bp, Artificial Sequence
  Description of Artificial Sequence: Synthetic oligonucleotide
  Target: LAMA2; (+) strand; PAM type: YTN; PAM sequence: CTT
tatttgttgtacatgctcac

SEQ ID NO: 355300 - DNA, 20 bp, Artificial Sequence
  Description of Artificial Sequence: Synthetic oligonucleotide
  Target: LAMA2; (+) strand; PAM type: YTN; PAM sequence: TTT
atttgttgtacatgctcacc

SEQ ID NO: 355301 - DNA, 20 bp, Artificial Sequence
  Description of Artificial Sequence: Synthetic oligonucleotide
  Target: LAMA2; (+) strand; PAM type: YTN; PAM sequence: TTA
tttgttgtacatgctcacct

SEQ ID NO: 355302 - DNA, 20 bp, Artificial Sequence
  Description of Artificial Sequence: Synthetic oligonucleotide
  Target: LAMA2; (+) strand; PAM type: YTN; PAM sequence: TTT
gttgtacatgctcacctaat

SEQ ID NO: 355303 - DNA, 20 bp, Artificial Sequence
  Description of Artificial Sequence: Synthetic oligonucleotide
  Target: LAMA2; (+) strand; PAM type: YTN; PAM sequence: TTG
ttgtacatgctcacctaata

SEQ ID NO: 355304 - DNA, 20 bp, Artificial Sequence
  Description of Artificial Sequence: Synthetic oligonucleotide
  Target: LAMA2; (+) strand; PAM type: YTN; PAM sequence: TTG
tacatgctcacctaataaca

SEQ ID NO: 355305 - DNA, 20 bp, Artificial Sequence
  Description of Artificial Sequence: Synthetic oligonucleotide
  Target: LAMA2; (+) strand; PAM type: YTN; PAM sequence: CTC
acctaataacaaatcatgtt

SEQ ID NO: 355306 - DNA, 20 bp, Artificial Sequence
  Description of Artificial Sequence: Synthetic oligonucleotide
  Target: LAMA2; (+) strand; PAM type: YTN; PAM sequence: CTA
ataacaaatcatgttaacac

SEQ ID NO: 355307 - DNA, 20 bp, Artificial Sequence
  Description of Artificial Sequence: Synthetic oligonucleotide
  Target: LAMA2; (+) strand; PAM type: YTN; PAM sequence: TTA
acaccaagggatgcattacc

SEQ ID NO: 355308 - DNA, 20 bp, Artificial Sequence
  Description of Artificial Sequence: Synthetic oligonucleotide
  Target: LAMA2; (+) strand; PAM type: YTN; PAM sequence: TTA
cctctgcagcttataaacat

SEQ ID NO: 355309 - DNA, 20 bp, Artificial Sequence
  Description of Artificial Sequence: Synthetic oligonucleotide
  Target: LAMA2; (+) strand; PAM type: YTN; PAM sequence: CTC
tgcagcttataaacattatg

SEQ ID NO: 355310 - DNA, 20 bp, Artificial Sequence
  Description of Artificial Sequence: Synthetic oligonucleotide
  Target: LAMA2; (+) strand; PAM type: YTN; PAM sequence: CTG
cagcttataaacattatgaa

SEQ ID NO: 355311 - DNA, 20 bp, Artificial Sequence
  Description of Artificial Sequence: Synthetic oligonucleotide
  Target: LAMA2; (+) strand; PAM type: YTN; PAM sequence: CTT
ataaacattatgaagcatac

SEQ ID NO: 355312 - DNA, 20 bp, Artificial Sequence
  Description of Artificial Sequence: Synthetic oligonucleotide
  Target: LAMA2; (+) strand; PAM type: YTN; PAM sequence: TTA
taaacattatgaagcataca

SEQ ID NO: 355313 - DNA, 20 bp, Artificial Sequence
  Description of Artificial Sequence: Synthetic oligonucleotide
  Target: LAMA2; (+) strand; PAM type: YTN; PAM sequence: TTA
tgaagcatacaggcatgcac

SEQ ID NO: 355314 - DNA, 20 bp, Artificial Sequence
  Description of Artificial Sequence: Synthetic oligonucleotide
  Target: LAMA2; (+) strand; PAM type: YTN; PAM sequence: CTG
atttactttacctatagtaa

SEQ ID NO: 355315 - DNA, 20 bp, Artificial Sequence
  Description of Artificial Sequence: Synthetic oligonucleotide
  Target: LAMA2; (+) strand; PAM type: YTN; PAM sequence: TTT
actttacctatagtaatgag

SEQ ID NO: 355316 - DNA, 20 bp, Artificial Sequence
  Description of Artificial Sequence: Synthetic oligonucleotide
  Target: LAMA2; (+) strand; PAM type: YTN; PAM sequence: TTA
ctttacctatagtaatgagt

SEQ ID NO: 355317 - DNA, 20 bp, Artificial Sequence
  Description of Artificial Sequence: Synthetic oligonucleotide
  Target: LAMA2; (+) strand; PAM type: YTN; PAM sequence: CTT
tacctatagtaatgagttct

SEQ ID NO: 355318 - DNA, 20 bp, Artificial Sequence
  Description of Artificial Sequence: Synthetic oligonucleotide
  Target: LAMA2; (+) strand; PAM type: YTN; PAM sequence: TTT
acctatagtaatgagttcta

SEQ ID NO: 355319 - DNA, 20 bp, Artificial Sequence
  Description of Artificial Sequence: Synthetic oligonucleotide
  Target: LAMA2; (+) strand; PAM type: YTN; PAM sequence: TTA
cctatagtaatgagttctat

SEQ ID NO: 355320 - DNA, 20 bp, Artificial Sequence
  Description of Artificial Sequence: Synthetic oligonucleotide
  Target: LAMA2; (+) strand; PAM type: YTN; PAM sequence: CTA
tagtaatgagttctataaca

SEQ ID NO: 355321 - DNA, 20 bp, Artificial Sequence
  Description of Artificial Sequence: Synthetic oligonucleotide
  Target: LAMA2; (+) strand; PAM type: YTN; PAM sequence: TTC
tataacattctgaccagacg

SEQ ID NO: 355322 - DNA, 20 bp, Artificial Sequence
  Description of Artificial Sequence: Synthetic oligonucleotide
  Target: LAMA2; (+) strand; PAM type: YTN; PAM sequence: CTA
taacattctgaccagacggt

SEQ ID NO: 355323 - DNA, 20 bp, Artificial Sequence
  Description of Artificial Sequence: Synthetic oligonucleotide
  Target: LAMA2; (+) strand; PAM type: YTN; PAM sequence: TTC
tgaccagacggtgtataact

SEQ ID NO: 355324 - DNA, 20 bp, Artificial Sequence
  Description of Artificial Sequence: Synthetic oligonucleotide
  Target: LAMA2; (+) strand; PAM type: YTN; PAM sequence: CTG
accagacggtgtataactac

SEQ ID NO: 355325 - DNA, 20 bp, Artificial Sequence
  Description of Artificial Sequence: Synthetic oligonucleotide
  Target: LAMA2; (+) strand; PAM type: YTN; PAM sequence: CTA
cattagctgagagaatgaac

SEQ ID NO: 355326 - DNA, 20 bp, Artificial Sequence
  Description of Artificial Sequence: Synthetic oligonucleotide
  Target: LAMA2; (+) strand; PAM type: YTN; PAM sequence: TTA
gctgagagaatgaaccattc

SEQ ID NO: 355327 - DNA, 20 bp, Artificial Sequence
  Description of Artificial Sequence: Synthetic oligonucleotide
  Target: LAMA2; (+) strand; PAM type: YTN; PAM sequence: CTG
agagaatgaaccattctttg

SEQ ID NO: 355328 - DNA, 20 bp, Artificial Sequence
  Description of Artificial Sequence: Synthetic oligonucleotide
  Target: LAMA2; (+) strand; PAM type: YTN; PAM sequence: TTC
tttgaaaaagttagcatacc

SEQ ID NO: 355329 - DNA, 20 bp, Artificial Sequence
  Description of Artificial Sequence: Synthetic oligonucleotide
  Target: LAMA2; (+) strand; PAM type: YTN; PAM sequence: CTT
tgaaaaagttagcataccat

SEQ ID NO: 355330 - DNA, 20 bp, Artificial Sequence
  Description of Artificial Sequence: Synthetic oligonucleotide
  Target: LAMA2; (+) strand; PAM type: YTN; PAM sequence: TTT
gaaaaagttagcataccata

SEQ ID NO: 355331 - DNA, 20 bp, Artificial Sequence
  Description of Artificial Sequence: Synthetic oligonucleotide
  Target: LAMA2; (+) strand; PAM type: YTN; PAM sequence: TTG
aaaaagttagcataccatac

SEQ ID NO: 355332 - DNA, 20 bp, Artificial Sequence
  Description of Artificial Sequence: Synthetic oligonucleotide
  Target: LAMA2; (+) strand; PAM type: YTN; PAM sequence: TTA
gcataccatacttatgtaaa

SEQ ID NO: 355333 - DNA, 20 bp, Artificial Sequence
  Description of Artificial Sequence: Synthetic oligonucleotide
  Target: LAMA2; (+) strand; PAM type: YTN; PAM sequence: CTT
atgtaaaaatgaaagttact

SEQ ID NO: 355334 - DNA, 20 bp, Artificial Sequence
  Description of Artificial Sequence: Synthetic oligonucleotide
  Target: LAMA2; (+) strand; PAM type: YTN; PAM sequence: TTA
tgtaaaaatgaaagttacta

SEQ ID NO: 355335 - DNA, 20 bp, Artificial Sequence
  Description of Artificial Sequence: Synthetic oligonucleotide
  Target: LAMA2; (+) strand; PAM type: YTN; PAM sequence: TTA
ctacttttttctttattttc

SEQ ID NO: 355336 - DNA, 20 bp, Artificial Sequence
  Description of Artificial Sequence: Synthetic oligonucleotide
  Target: LAMA2; (+) strand; PAM type: YTN; PAM sequence: CTA
cttttttctttattttcaat

SEQ ID NO: 355337 - DNA, 20 bp, Artificial Sequence
  Description of Artificial Sequence: Synthetic oligonucleotide
  Target: LAMA2; (+) strand; PAM type: YTN; PAM sequence: CTT
ttttctttattttcaattaa

SEQ ID NO: 355338 - DNA, 20 bp, Artificial Sequence
  Description of Artificial Sequence: Synthetic oligonucleotide
  Target: LAMA2; (+) strand; PAM type: YTN; PAM sequence: TTT
tttctttattttcaattaaa

SEQ ID NO: 355339 - DNA, 20 bp, Artificial Sequence
  Description of Artificial Sequence: Synthetic oligonucleotide
  Target: LAMA2; (+) strand; PAM type: YTN; PAM sequence: TTT
ttctttattttcaattaaag

SEQ ID NO: 355340 - DNA, 20 bp, Artificial Sequence
  Description of Artificial Sequence: Synthetic oligonucleotide
  Target: LAMA2; (+) strand; PAM type: YTN; PAM sequence: TTT
tctttattttcaattaaaga

SEQ ID NO: 355341 - DNA, 20 bp, Artificial Sequence
  Description of Artificial Sequence: Synthetic oligonucleotide
  Target: LAMA2; (+) strand; PAM type: YTN; PAM sequence: TTT
ctttattttcaattaaagag

SEQ ID NO: 355342 - DNA, 20 bp, Artificial Sequence
  Description of Artificial Sequence: Synthetic oligonucleotide
  Target: LAMA2; (+) strand; PAM type: YTN; PAM sequence: TTC
tttattttcaattaaagagg

SEQ ID NO: 355343 - DNA, 20 bp, Artificial Sequence
  Description of Artificial Sequence: Synthetic oligonucleotide
  Target: LAMA2; (+) strand; PAM type: YTN; PAM sequence: CTT
tattttcaattaaagaggga

SEQ ID NO: 355344 - DNA, 20 bp, Artificial Sequence
  Description of Artificial Sequence: Synthetic oligonucleotide
  Target: LAMA2; (+) strand; PAM type: YTN; PAM sequence: TTT
attttcaattaaagagggac

SEQ ID NO: 355345 - DNA, 20 bp, Artificial Sequence
  Description of Artificial Sequence: Synthetic oligonucleotide
  Target: LAMA2; (+) strand; PAM type: YTN; PAM sequence: TTA
ttttcaattaaagagggacc

SEQ ID NO: 355346 - DNA, 20 bp, Artificial Sequence
  Description of Artificial Sequence: Synthetic oligonucleotide
  Target: LAMA2; (+) strand; PAM type: YTN; PAM sequence: TTT
tcaattaaagagggaccctt

SEQ ID NO: 355347 - DNA, 20 bp, Artificial Sequence
  Description of Artificial Sequence: Synthetic oligonucleotide
  Target: LAMA2; (+) strand; PAM type: YTN; PAM sequence: TTT
caattaaagagggaccctta

SEQ ID NO: 355348 - DNA, 20 bp, Artificial Sequence
  Description of Artificial Sequence: Synthetic oligonucleotide
  Target: LAMA2; (+) strand; PAM type: YTN; PAM sequence: TTC
aattaaagagggacccttat

SEQ ID NO: 355349 - DNA, 20 bp, Artificial Sequence
  Description of Artificial Sequence: Synthetic oligonucleotide
  Target: LAMA2; (+) strand; PAM type: YTN; PAM sequence: TTA
aagagggacccttattaaaa

SEQ ID NO: 355350 - DNA, 20 bp, Artificial Sequence
  Description of Artificial Sequence: Synthetic oligonucleotide
  Target: LAMA2; (+) strand; PAM type: YTN; PAM sequence: CTT
attaaaaatatttttattaa

SEQ ID NO: 355351 - DNA, 20 bp, Artificial Sequence
  Description of Artificial Sequence: Synthetic oligonucleotide
  Target: LAMA2; (+) strand; PAM type: YTN; PAM sequence: TTA
ttaaaaatatttttattaac

SEQ ID NO: 355352 - DNA, 20 bp, Artificial Sequence
  Description of Artificial Sequence: Synthetic oligonucleotide
  Target: LAMA2; (+) strand; PAM type: YTN; PAM sequence: TTA
aaaatatttttattaacctg

SEQ ID NO: 355353 - DNA, 20 bp, Artificial Sequence
  Description of Artificial Sequence: Synthetic oligonucleotide
  Target: LAMA2; (+) strand; PAM type: YTN; PAM sequence: TTT
ttattaacctgttagtctta

SEQ ID NO: 355354 - DNA, 20 bp, Artificial Sequence
  Description of Artificial Sequence: Synthetic oligonucleotide
  Target: LAMA2; (+) strand; PAM type: YTN; PAM sequence: TTT
tattaacctgttagtcttat

SEQ ID NO: 355355 - DNA, 20 bp, Artificial Sequence
  Description of Artificial Sequence: Synthetic oligonucleotide
  Target: LAMA2; (+) strand; PAM type: YTN; PAM sequence: TTT
attaacctgttagtcttatc

SEQ ID NO: 355356 - DNA, 20 bp, Artificial Sequence
  Description of Artificial Sequence: Synthetic oligonucleotide
  Target: LAMA2; (+) strand; PAM type: YTN; PAM sequence: TTA
ttaacctgttagtcttatct

SEQ ID NO: 355357 - DNA, 20 bp, Artificial Sequence
  Description of Artificial Sequence: Synthetic oligonucleotide
  Target: LAMA2; (+) strand; PAM type: YTN; PAM sequence: TTA
acctgttagtcttatcttgg

SEQ ID NO: 355358 - DNA, 20 bp, Artificial Sequence
  Description of Artificial Sequence: Synthetic oligonucleotide
  Target: LAMA2; (+) strand; PAM type: YTN; PAM sequence: CTG
ttagtcttatcttggcagct

SEQ ID NO: 355359 - DNA, 20 bp, Artificial Sequence
  Description of Artificial Sequence: Synthetic oligonucleotide
  Target: LAMA2; (+) strand; PAM type: YTN; PAM sequence: TTA
gtcttatcttggcagctata

SEQ ID NO: 355360 - DNA, 20 bp, Artificial Sequence
  Description of Artificial Sequence: Synthetic oligonucleotide
  Target: LAMA2; (+) strand; PAM type: YTN; PAM sequence: CTT
atcttggcagctataaaata

SEQ ID NO: 355361 - DNA, 20 bp, Artificial Sequence
  Description of Artificial Sequence: Synthetic oligonucleotide
  Target: LAMA2; (+) strand; PAM type: YTN; PAM sequence: TTA
tcttggcagctataaaatat

SEQ ID NO: 355362 - DNA, 20 bp, Artificial Sequence
  Description of Artificial Sequence: Synthetic oligonucleotide
  Target: LAMA2; (+) strand; PAM type: YTN; PAM sequence: CTT
ggcagctataaaatattata

SEQ ID NO: 355363 - DNA, 20 bp, Artificial Sequence
  Description of Artificial Sequence: Synthetic oligonucleotide
  Target: LAMA2; (+) strand; PAM type: YTN; PAM sequence: TTG
gcagctataaaatattatat

SEQ ID NO: 355364 - DNA, 20 bp, Artificial Sequence
  Description of Artificial Sequence: Synthetic oligonucleotide
  Target: LAMA2; (+) strand; PAM type: YTN; PAM sequence: CTA
taaaatattatatagttata

SEQ ID NO: 355365 - DNA, 20 bp, Artificial Sequence
  Description of Artificial Sequence: Synthetic oligonucleotide
  Target: LAMA2; (+) strand; PAM type: YTN; PAM sequence: TTA
tatagttatatttggtacat

SEQ ID NO: 355366 - DNA, 20 bp, Artificial Sequence
  Description of Artificial Sequence: Synthetic oligonucleotide
  Target: LAMA2; (+) strand; PAM type: YTN; PAM sequence: TTA
tatttggtacatgtgagcat

SEQ ID NO: 355367 - DNA, 20 bp, Artificial Sequence
  Description of Artificial Sequence: Synthetic oligonucleotide
  Target: LAMA2; (+) strand; PAM type: YTN; PAM sequence: TTT
ggtacatgtgagcatatgtg

SEQ ID NO: 355368 - DNA, 20 bp, Artificial Sequence
  Description of Artificial Sequence: Synthetic oligonucleotide
  Target: LAMA2; (+) strand; PAM type: YTN; PAM sequence: TTG
gtacatgtgagcatatgtgt

SEQ ID NO: 355369 - DNA, 20 bp, Artificial Sequence
  Description of Artificial Sequence: Synthetic oligonucleotide
  Target: LAMA2; (+) strand; PAM type: YTN; PAM sequence: TTA
agccataatataagtagtaa

SEQ ID NO: 355370 - DNA, 20 bp, Artificial Sequence
  Description of Artificial Sequence: Synthetic oligonucleotide
  Target: LAMA2; (+) strand; PAM type: YTN; PAM sequence: TTA
gttttaatgaagtgtttatg

SEQ ID NO: 355371 - DNA, 20 bp, Artificial Sequence
  Description of Artificial Sequence: Synthetic oligonucleotide
  Target: LAMA2; (+) strand; PAM type: YTN; PAM sequence: TTT
taatgaagtgtttatgaatt

SEQ ID NO: 355372 - DNA, 20 bp, Artificial Sequence
  Description of Artificial Sequence: Synthetic oligonucleotide
  Target: LAMA2; (+) strand; PAM type: YTN; PAM sequence: TTT
aatgaagtgtttatgaattg

SEQ ID NO: 355373 - DNA, 20 bp, Artificial Sequence
  Description of Artificial Sequence: Synthetic oligonucleotide
  Target: LAMA2; (+) strand; PAM type: YTN; PAM sequence: TTA
atgaagtgtttatgaattgg

SEQ ID NO: 355374 - DNA, 20 bp, Artificial Sequence
  Description of Artificial Sequence: Synthetic oligonucleotide
  Target: LAMA2; (+) strand; PAM type: YTN; PAM sequence: TTT
atgaattgggacaagaatgt

SEQ ID NO: 355375 - DNA, 20 bp, Artificial Sequence
  Description of Artificial Sequence: Synthetic oligonucleotide
  Target: LAMA2; (+) strand; PAM type: YTN; PAM sequence: TTA
tgaattgggacaagaatgtc

SEQ ID NO: 355376 - DNA, 20 bp, Artificial Sequence
  Description of Artificial Sequence: Synthetic oligonucleotide
  Target: LAMA2; (+) strand; PAM type: YTN; PAM sequence: TTG
ggacaagaatgtctggaaat

SEQ ID NO: 355377 - DNA, 20 bp, Artificial Sequence
  Description of Artificial Sequence: Synthetic oligonucleotide
  Target: LAMA2; (+) strand; PAM type: YTN; PAM sequence: CTG
gaaatatcaagctaaatata

SEQ ID NO: 355378 - DNA, 20 bp, Artificial Sequence
  Description of Artificial Sequence: Synthetic oligonucleotide
  Target: LAMA2; (+) strand; PAM type: YTN; PAM sequence: CTA
aatataataataatagttac

SEQ ID NO: 355379 - DNA, 20 bp, Artificial Sequence
  Description of Artificial Sequence: Synthetic oligonucleotide
  Target: LAMA2; (+) strand; PAM type: YTN; PAM sequence: TTA
cataataggtatatgttaca

SEQ ID NO: 355380 - DNA, 20 bp, Artificial Sequence
  Description of Artificial Sequence: Synthetic oligonucleotide
  Target: LAMA2; (+) strand; PAM type: YTN; PAM sequence: TTA
catcaggggcaatttaggtt

SEQ ID NO: 355381 - DNA, 20 bp, Artificial Sequence
  Description of Artificial Sequence: Synthetic oligonucleotide
  Target: LAMA2; (+) strand; PAM type: YTN; PAM sequence: TTT
aggttcctattttgaactac

SEQ ID NO: 355382 - DNA, 20 bp, Artificial Sequence
  Description of Artificial Sequence: Synthetic oligonucleotide
  Target: LAMA2; (+) strand; PAM type: YTN; PAM sequence: TTA
ggttcctattttgaactact

SEQ ID NO: 355383 - DNA, 20 bp, Artificial Sequence
  Description of Artificial Sequence: Synthetic oligonucleotide
  Target: LAMA2; (+) strand; PAM type: YTN; PAM sequence: TTC
ctattttgaactactgaaat

SEQ ID NO: 355384 - DNA, 20 bp, Artificial Sequence
  Description of Artificial Sequence: Synthetic oligonucleotide
  Target: LAMA2; (+) strand; PAM type: YTN; PAM sequence: CTA
ttttgaactactgaaataat

SEQ ID NO: 355385 - DNA, 20 bp, Artificial Sequence
  Description of Artificial Sequence: Synthetic oligonucleotide
  Target: LAMA2; (+) strand; PAM type: YTN; PAM sequence: TTT
tgaactactgaaataataaa

SEQ ID NO: 355386 - DNA, 20 bp, Artificial Sequence
  Description of Artificial Sequence: Synthetic oligonucleotide
  Target: LAMA2; (+) strand; PAM type: YTN; PAM sequence: TTT
gaactactgaaataataaaa

SEQ ID NO: 355387 - DNA, 20 bp, Artificial Sequence
  Description of Artificial Sequence: Synthetic oligonucleotide
  Target: LAMA2; (+) strand; PAM type: YTN; PAM sequence: TTG
aactactgaaataataaaac

SEQ ID NO: 355388 - DNA, 20 bp, Artificial Sequence
  Description of Artificial Sequence: Synthetic oligonucleotide
  Target: LAMA2; (+) strand; PAM type: YTN; PAM sequence: CTA
ctgaaataataaaactcctg

SEQ ID NO: 355389 - DNA, 20 bp, Artificial Sequence
  Description of Artificial Sequence: Synthetic oligonucleotide
  Target: LAMA2; (+) strand; PAM type: YTN; PAM sequence: CTG
aaataataaaactcctgtgg

SEQ ID NO: 355390 - DNA, 20 bp, Artificial Sequence
  Description of Artificial Sequence: Synthetic oligonucleotide
  Target: LAMA2; (+) strand; PAM type: YTN; PAM sequence: CTC
ctgtggacacagtaagcaga

SEQ ID NO: 355391 - DNA, 20 bp, Artificial Sequence
  Description of Artificial Sequence: Synthetic oligonucleotide
  Target: LAMA2; (+) strand; PAM type: YTN; PAM sequence: CTG
tggacacagtaagcagaaaa

SEQ ID NO: 355392 - DNA, 20 bp, Artificial Sequence
  Description of Artificial Sequence: Synthetic oligonucleotide
  Target: LAMA2; (+) strand; PAM type: YTN; PAM sequence: TTG
ccatgtcctggaatgtagta

SEQ ID NO: 355393 - DNA, 20 bp, Artificial Sequence
  Description of Artificial Sequence: Synthetic oligonucleotide
  Target: LAMA2; (+) strand; PAM type: YTN; PAM sequence: CTG
gaatgtagtaaattttctaa

SEQ ID NO: 355394 - DNA, 20 bp, Artificial Sequence
  Description of Artificial Sequence: Synthetic oligonucleotide
  Target: LAMA2; (+) strand; PAM type: YTN; PAM sequence: TTT
tctaatctattacatttcat

SEQ ID NO: 355395 - DNA, 20 bp, Artificial Sequence
  Description of Artificial Sequence: Synthetic oligonucleotide
  Target: LAMA2; (+) strand; PAM type: YTN; PAM sequence: TTT
ctaatctattacatttcatt

SEQ ID NO: 355396 - DNA, 20 bp, Artificial Sequence
  Description of Artificial Sequence: Synthetic oligonucleotide
  Target: LAMA2; (+) strand; PAM type: YTN; PAM sequence: TTC
taatctattacatttcattc

SEQ ID NO: 355397 - DNA, 20 bp, Artificial Sequence
  Description of Artificial Sequence: Synthetic oligonucleotide
  Target: LAMA2; (+) strand; PAM type: YTN; PAM sequence: CTA
atctattacatttcattcca

SEQ ID NO: 355398 - DNA, 20 bp, Artificial Sequence
  Description of Artificial Sequence: Synthetic oligonucleotide
  Target: LAMA2; (+) strand; PAM type: YTN; PAM sequence: CTA
ttacatttcattccaatatt

SEQ ID NO: 355399 - DNA, 20 bp, Artificial Sequence
  Description of Artificial Sequence: Synthetic oligonucleotide
  Target: LAMA2; (+) strand; PAM type: YTN; PAM sequence: TTA
catttcattccaatattatc

SEQ ID NO: 355400 - DNA, 20 bp, Artificial Sequence
  Description of Artificial Sequence: Synthetic oligonucleotide
  Target: LAMA2; (+) strand; PAM type: YTN; PAM sequence: TTT
cattccaatattatctgaaa

SEQ ID NO: 355401 - DNA, 20 bp, Artificial Sequence
  Description of Artificial Sequence: Synthetic oligonucleotide
  Target: LAMA2; (+) strand; PAM type: YTN; PAM sequence: TTC
attccaatattatctgaaat

SEQ ID NO: 355402 - DNA, 20 bp, Artificial Sequence
  Description of Artificial Sequence: Synthetic oligonucleotide
  Target: LAMA2; (+) strand; PAM type: YTN; PAM sequence: TTC
caatattatctgaaatgaaa

SEQ ID NO: 355403 - DNA, 20 bp, Artificial Sequence
  Description of Artificial Sequence: Synthetic oligonucleotide
  Target: LAMA2; (+) strand; PAM type: YTN; PAM sequence: TTA
tctgaaatgaaaaattgctt

SEQ ID NO: 355404 - DNA, 20 bp, Artificial Sequence
  Description of Artificial Sequence: Synthetic oligonucleotide
  Target: LAMA2; (+) strand; PAM type: YTN; PAM sequence: CTG
aaatgaaaaattgcttgagt

SEQ ID NO: 355405 - DNA, 20 bp, Artificial Sequence
  Description of Artificial Sequence: Synthetic oligonucleotide
  Target: LAMA2; (+) strand; PAM type: YTN; PAM sequence: TTG
cttgagttgaccaagattgt

SEQ ID NO: 355406 - DNA, 20 bp, Artificial Sequence
  Description of Artificial Sequence: Synthetic oligonucleotide
  Target: LAMA2; (+) strand; PAM type: YTN; PAM sequence: CTT
gagttgaccaagattgtgta

SEQ ID NO: 355407 - DNA, 20 bp, Artificial Sequence
  Description of Artificial Sequence: Synthetic oligonucleotide
  Target: LAMA2; (+) strand; PAM type: YTN; PAM sequence: TTG
agttgaccaagattgtgtag

SEQ ID NO: 355408 - DNA, 20 bp, Artificial Sequence
  Description of Artificial Sequence: Synthetic oligonucleotide
  Target: LAMA2; (+) strand; PAM type: YTN; PAM sequence: TTG
accaagattgtgtagcagtg

SEQ ID NO: 355409 - DNA, 20 bp, Artificial Sequence
  Description of Artificial Sequence: Synthetic oligonucleotide
  Target: LAMA2; (+) strand; PAM type: YTN; PAM sequence: TTG
tgtagcagtgtgtgagtgat

SEQ ID NO: 355410 - DNA, 20 bp, Artificial Sequence
  Description of Artificial Sequence: Synthetic oligonucleotide
  Target: LAMA2; (+) strand; PAM type: YTN; PAM sequence: TTG
cttgcttaaggacacctccc

SEQ ID NO: 355411 - DNA, 20 bp, Artificial Sequence
  Description of Artificial Sequence: Synthetic oligonucleotide
  Target: LAMA2; (+) strand; PAM type: YTN; PAM sequence: CTT
gcttaaggacacctcccctc

SEQ ID NO: 355412 - DNA, 20 bp, Artificial Sequence
  Description of Artificial Sequence: Synthetic oligonucleotide
  Target: LAMA2; (+) strand; PAM type: YTN; PAM sequence: TTG
cttaaggacacctcccctct

SEQ ID NO: 355413 - DNA, 20 bp, Artificial Sequence
  Description of Artificial Sequence: Synthetic oligonucleotide
  Target: LAMA2; (+) strand; PAM type: YTN; PAM sequence: CTT
aaggacacctcccctctcca

SEQ ID NO: 355414 - DNA, 20 bp, Artificial Sequence
  Description of Artificial Sequence: Synthetic oligonucleotide
  Target: LAMA2; (+) strand; PAM type: YTN; PAM sequence: TTA
aggacacctcccctctccat

SEQ ID NO: 355415 - DNA, 20 bp, Artificial Sequence
  Description of Artificial Sequence: Synthetic oligonucleotide
  Target: LAMA2; (+) strand; PAM type: YTN; PAM sequence: CTC
ccctctccatcttgtatgtc

SEQ ID NO: 355416 - DNA, 20 bp, Artificial Sequence
  Description of Artificial Sequence: Synthetic oligonucleotide
  Target: LAMA2; (+) strand; PAM type: YTN; PAM sequence: CTC
tccatcttgtatgtctctgt

SEQ ID NO: 355417 - DNA, 20 bp, Artificial Sequence
  Description of Artificial Sequence: Synthetic oligonucleotide
  Target: LAMA2; (+) strand; PAM type: YTN; PAM sequence: CTC
catcttgtatgtctctgtgg

SEQ ID NO: 355418 - DNA, 20 bp, Artificial Sequence
  Description of Artificial Sequence: Synthetic oligonucleotide
  Target: LAMA2; (+) strand; PAM type: YTN; PAM sequence: CTT
gtatgtctctgtgggcaatc

SEQ ID NO: 355419 - DNA, 20 bp, Artificial Sequence
  Description of Artificial Sequence: Synthetic oligonucleotide
  Target: LAMA2; (+) strand; PAM type: YTN; PAM sequence: TTG
tatgtctctgtgggcaatcc

SEQ ID NO: 355420 - DNA, 20 bp, Artificial Sequence
  Description of Artificial Sequence: Synthetic oligonucleotide
  Target: LAMA2; (+) strand; PAM type: YTN; PAM sequence: CTC
tgtgggcaatcctgcaggct

SEQ ID NO: 355421 - DNA, 20 bp, Artificial Sequence
  Description of Artificial Sequence: Synthetic oligonucleotide
  Target: LAMA2; (+) strand; PAM type: YTN; PAM sequence: CTG
tgggcaatcctgcaggctct

SEQ ID NO: 355422 - DNA, 20 bp, Artificial Sequence
  Description of Artificial Sequence: Synthetic oligonucleotide
  Target: LAMA2; (+) strand; PAM type: YTN; PAM sequence: CTG
caggctcttagtgcatcttc

SEQ ID NO: 355423 - DNA, 20 bp, Artificial Sequence
  Description of Artificial Sequence: Synthetic oligonucleotide
  Target: LAMA2; (+) strand; PAM type: YTN; PAM sequence: CTC
ttagtgcatcttctctagta

SEQ ID NO: 355424 - DNA, 20 bp, Artificial Sequence
  Description of Artificial Sequence: Synthetic oligonucleotide
  Target: LAMA2; (+) strand; PAM type: YTN; PAM sequence: CTT
agtgcatcttctctagtatt

SEQ ID NO: 355425 - DNA, 20 bp, Artificial Sequence
  Description of Artificial Sequence: Synthetic oligonucleotide
  Target: LAMA2; (+) strand; PAM type: YTN; PAM sequence: TTA
gtgcatcttctctagtattt

SEQ ID NO: 355426 - DNA, 20 bp, Artificial Sequence
  Description of Artificial Sequence: Synthetic oligonucleotide
  Target: LAMA2; (+) strand; PAM type: YTN; PAM sequence: CTT
ctctagtatttatcaaaaca

SEQ ID NO: 355427 - DNA, 20 bp, Artificial Sequence
  Description of Artificial Sequence: Synthetic oligonucleotide
  Target: LAMA2; (+) strand; PAM type: YTN; PAM sequence: TTC
tctagtatttatcaaaacat

SEQ ID NO: 355428 - DNA, 20 bp, Artificial Sequence
  Description of Artificial Sequence: Synthetic oligonucleotide
  Target: LAMA2; (+) strand; PAM type: YTN; PAM sequence: CTC
tagtatttatcaaaacatgt

SEQ ID NO: 355429 - DNA, 20 bp, Artificial Sequence
  Description of Artificial Sequence: Synthetic oligonucleotide
  Target: LAMA2; (+) strand; PAM type: YTN; PAM sequence: CTA
gtatttatcaaaacatgtct

SEQ ID NO: 355430 - DNA, 20 bp, Artificial Sequence
  Description of Artificial Sequence: Synthetic oligonucleotide
  Target: LAMA2; (+) strand; PAM type: YTN; PAM sequence: TTT
atcaaaacatgtcttgtgtg

SEQ ID NO: 355431 - DNA, 20 bp, Artificial Sequence
  Description of Artificial Sequence: Synthetic oligonucleotide
  Target: LAMA2; (+) strand; PAM type: YTN; PAM sequence: TTA
tcaaaacatgtcttgtgtgt

SEQ ID NO: 355432 - DNA, 20 bp, Artificial Sequence
  Description of Artificial Sequence: Synthetic oligonucleotide
  Target: LAMA2; (+) strand; PAM type: YTN; PAM sequence: CTT
gtgtgtgctttattctcttt

SEQ ID NO: 355433 - DNA, 20 bp, Artificial Sequence
  Description of Artificial Sequence: Synthetic oligonucleotide
  Target: LAMA2; (+) strand; PAM type: YTN; PAM sequence: TTG
tgtgtgctttattctctttt

SEQ ID NO: 355434 - DNA, 20 bp, Artificial Sequence
  Description of Artificial Sequence: Synthetic oligonucleotide
  Target: LAMA2; (+) strand; PAM type: YTN; PAM sequence: CTT
tattctcttttcaaaactcc

SEQ ID NO: 355435 - DNA, 20 bp, Artificial Sequence
  Description of Artificial Sequence: Synthetic oligonucleotide
  Target: LAMA2; (+) strand; PAM type: YTN; PAM sequence: TTT
attctcttttcaaaactcca

SEQ ID NO: 355436 - DNA, 20 bp, Artificial Sequence
  Description of Artificial Sequence: Synthetic oligonucleotide
  Target: LAMA2; (+) strand; PAM type: YTN; PAM sequence: TTA
ttctcttttcaaaactccac

SEQ ID NO: 355437 - DNA, 20 bp, Artificial Sequence
  Description of Artificial Sequence: Synthetic oligonucleotide
  Target: LAMA2; (+) strand; PAM type: YTN; PAM sequence: TTC
tcttttcaaaactccacaga

SEQ ID NO: 355438 - DNA, 20 bp, Artificial Sequence
  Description of Artificial Sequence: Synthetic oligonucleotide
  Target: LAMA2; (+) strand; PAM type: YTN; PAM sequence: CTC
ttttcaaaactccacagaaa

SEQ ID NO: 355439 - DNA, 20 bp, Artificial Sequence
  Description of Artificial Sequence: Synthetic oligonucleotide
  Target: LAMA2; (+) strand; PAM type: YTN; PAM sequence: CTT
ttcaaaactccacagaaatc

SEQ ID NO: 355440 - DNA, 20 bp, Artificial Sequence
  Description of Artificial Sequence: Synthetic oligonucleotide
  Target: LAMA2; (+) strand; PAM type: YTN; PAM sequence: TTT
tcaaaactccacagaaatct

SEQ ID NO: 355441 - DNA, 20 bp, Artificial Sequence
  Description of Artificial Sequence: Synthetic oligonucleotide
  Target: LAMA2; (+) strand; PAM type: YTN; PAM sequence: TTT
caaaactccacagaaatctc

SEQ ID NO: 355442 - DNA, 20 bp, Artificial Sequence
  Description of Artificial Sequence: Synthetic oligonucleotide
  Target: LAMA2; (+) strand; PAM type: YTN; PAM sequence: TTC
aaaactccacagaaatctct

SEQ ID NO: 355443 - DNA, 20 bp, Artificial Sequence
  Description of Artificial Sequence: Synthetic oligonucleotide
  Target: LAMA2; (+) strand; PAM type: YTN; PAM sequence: CTC
cacagaaatctctaaccttt

SEQ ID NO: 355444 - DNA, 20 bp, Artificial Sequence
  Description of Artificial Sequence: Synthetic oligonucleotide
  Target: LAMA2; (+) strand; PAM type: YTN; PAM sequence: CTC
taacctttaccacttgctca

SEQ ID NO: 355445 - DNA, 20 bp, Artificial Sequence
  Description of Artificial Sequence: Synthetic oligonucleotide
  Target: LAMA2; (+) strand; PAM type: YTN; PAM sequence: CTA
acctttaccacttgctcaaa

SEQ ID NO: 355446 - DNA, 20 bp, Artificial Sequence
  Description of Artificial Sequence: Synthetic oligonucleotide
  Target: LAMA2; (+) strand; PAM type: YTN; PAM sequence: CTT
taccacttgctcaaataaag

SEQ ID NO: 355447 - DNA, 20 bp, Artificial Sequence
  Description of Artificial Sequence: Synthetic oligonucleotide
  Target: LAMA2; (+) strand; PAM type: YTN; PAM sequence: TTT
accacttgctcaaataaagg

SEQ ID NO: 355448 - DNA, 20 bp, Artificial Sequence
  Description of Artificial Sequence: Synthetic oligonucleotide
  Target: LAMA2; (+) strand; PAM type: YTN; PAM sequence: TTA
ccacttgctcaaataaagga

SEQ ID NO: 355449 - DNA, 20 bp, Artificial Sequence
  Description of Artificial Sequence: Synthetic oligonucleotide
  Target: LAMA2; (+) strand; PAM type: YTN; PAM sequence: CTT
gctcaaataaaggacagtca

SEQ ID NO: 355450 - DNA, 20 bp, Artificial Sequence
  Description of Artificial Sequence: Synthetic oligonucleotide
  Target: LAMA2; (+) strand; PAM type: YTN; PAM sequence: TTG
ctcaaataaaggacagtcaa

SEQ ID NO: 355451 - DNA, 20 bp, Artificial Sequence
  Description of Artificial Sequence: Synthetic oligonucleotide
  Target: LAMA2; (+) strand; PAM type: YTN; PAM sequence: CTC
aaataaaggacagtcaaaac

SEQ ID NO: 355452 - DNA, 20 bp, Artificial Sequence
  Description of Artificial Sequence: Synthetic oligonucleotide
  Target: LAMA2; (+) strand; PAM type: YTN; PAM sequence: CTA
agcttaaaatggaaaagaaa

SEQ ID NO: 355453 - DNA, 20 bp, Artificial Sequence
  Description of Artificial Sequence: Synthetic oligonucleotide
  Target: LAMA2; (+) strand; PAM type: YTN; PAM sequence: CTT
aaaatggaaaagaaacctcc

SEQ ID NO: 355454 - DNA, 20 bp, Artificial Sequence
  Description of Artificial Sequence: Synthetic oligonucleotide
  Target: LAMA2; (+) strand; PAM type: YTN; PAM sequence: TTA
aaatggaaaagaaacctcct

SEQ ID NO: 355455 - DNA, 20 bp, Artificial Sequence
  Description of Artificial Sequence: Synthetic oligonucleotide
  Target: LAMA2; (+) strand; PAM type: YTN; PAM sequence: CTC
ctgagtttctagaatatata

SEQ ID NO: 355456 - DNA, 20 bp, Artificial Sequence
  Description of Artificial Sequence: Synthetic oligonucleotide
  Target: LAMA2; (+) strand; PAM type: YTN; PAM sequence: CTG
agtttctagaatatataaaa

SEQ ID NO: 355457 - DNA, 20 bp, Artificial Sequence
  Description of Artificial Sequence: Synthetic oligonucleotide
  Target: LAMA2; (+) strand; PAM type: YTN; PAM sequence: TTT
ctagaatatataaaatcaaa

SEQ ID NO: 355458 - DNA, 20 bp, Artificial Sequence
  Description of Artificial Sequence: Synthetic oligonucleotide
  Target: LAMA2; (+) strand; PAM type: YTN; PAM sequence: TTC
tagaatatataaaatcaaac

SEQ ID NO: 355459 - DNA, 20 bp, Artificial Sequence
  Description of Artificial Sequence: Synthetic oligonucleotide
  Target: LAMA2; (+) strand; PAM type: YTN; PAM sequence: CTA
gaatatataaaatcaaacag

SEQ ID NO: 355460 - DNA, 20 bp, Artificial Sequence
  Description of Artificial Sequence: Synthetic oligonucleotide
  Target: LAMA2; (+) strand; PAM type: YTN; PAM sequence: CTT
ttctacacctaccactcata

SEQ ID NO: 355461 - DNA, 20 bp, Artificial Sequence
  Description of Artificial Sequence: Synthetic oligonucleotide
  Target: LAMA2; (+) strand; PAM type: YTN; PAM sequence: TTT
tctacacctaccactcatac

SEQ ID NO: 355462 - DNA, 20 bp, Artificial Sequence
  Description of Artificial Sequence: Synthetic oligonucleotide
  Target: LAMA2; (+) strand; PAM type: YTN; PAM sequence: TTT
ctacacctaccactcataca

SEQ ID NO: 355463 - DNA, 20 bp, Artificial Sequence
  Description of Artificial Sequence: Synthetic oligonucleotide
  Target: LAMA2; (+) strand; PAM type: YTN; PAM sequence: TTC
tacacctaccactcatacag

SEQ ID NO: 355464 - DNA, 20 bp, Artificial Sequence
  Description of Artificial Sequence: Synthetic oligonucleotide
  Target: LAMA2; (+) strand; PAM type: YTN; PAM sequence: CTA
cacctaccactcatacagtg

SEQ ID NO: 355465 - DNA, 20 bp, Artificial Sequence
  Description of Artificial Sequence: Synthetic oligonucleotide
  Target: LAMA2; (+) strand; PAM type: YTN; PAM sequence: CTA
ccactcatacagtggtgatg

SEQ ID NO: 355466 - DNA, 20 bp, Artificial Sequence
  Description of Artificial Sequence: Synthetic oligonucleotide
  Target: LAMA2; (+) strand; PAM type: YTN; PAM sequence: CTC
atacagtggtgatgtctggt

SEQ ID NO: 355467 - DNA, 20 bp, Artificial Sequence
  Description of Artificial Sequence: Synthetic oligonucleotide
  Target: LAMA2; (+) strand; PAM type: YTN; PAM sequence: CTG
gtatttgcaaggaaagggag

SEQ ID NO: 355468 - DNA, 20 bp, Artificial Sequence
  Description of Artificial Sequence: Synthetic oligonucleotide
  Target: LAMA2; (+) strand; PAM type: YTN; PAM sequence: TTT
gcaaggaaagggagtaataa

SEQ ID NO: 355469 - DNA, 20 bp, Artificial Sequence
  Description of Artificial Sequence: Synthetic oligonucleotide
  Target: LAMA2; (+) strand; PAM type: YTN; PAM sequence: TTG
caaggaaagggagtaataag

SEQ ID NO: 355470 - DNA, 20 bp, Artificial Sequence
  Description of Artificial Sequence: Synthetic oligonucleotide
  Target: LAMA2; (+) strand; PAM type: YTN; PAM sequence: TTA
attttctttggtaaatatag

SEQ ID NO: 355471 - DNA, 20 bp, Artificial Sequence
  Description of Artificial Sequence: Synthetic oligonucleotide
  Target: LAMA2; (+) strand; PAM type: YTN; PAM sequence: TTT
tctttggtaaatatagcgag

SEQ ID NO: 355472 - DNA, 20 bp, Artificial Sequence
  Description of Artificial Sequence: Synthetic oligonucleotide
  Target: LAMA2; (+) strand; PAM type: YTN; PAM sequence: TTT
ctttggtaaatatagcgaga

SEQ ID NO: 355473 - DNA, 20 bp, Artificial Sequence
  Description of Artificial Sequence: Synthetic oligonucleotide
  Target: LAMA2; (+) strand; PAM type: YTN; PAM sequence: TTC
tttggtaaatatagcgagaa

SEQ ID NO: 355474 - DNA, 20 bp, Artificial Sequence
  Description of Artificial Sequence: Synthetic oligonucleotide
  Target: LAMA2; (+) strand; PAM type: YTN; PAM sequence: CTT
tggtaaatatagcgagaaag

SEQ ID NO: 355475 - DNA, 20 bp, Artificial Sequence
  Description of Artificial Sequence: Synthetic oligonucleotide
  Target: LAMA2; (+) strand; PAM type: YTN; PAM sequence: TTT
ggtaaatatagcgagaaagg

SEQ ID NO: 355476 - DNA, 20 bp, Artificial Sequence
  Description of Artificial Sequence: Synthetic oligonucleotide
  Target: LAMA2; (+) strand; PAM type: YTN; PAM sequence: TTG
gtaaatatagcgagaaaggc

SEQ ID NO: 355477 - DNA, 20 bp, Artificial Sequence
  Description of Artificial Sequence: Synthetic oligonucleotide
  Target: LAMA2; (+) strand; PAM type: YTN; PAM sequence: CTG
gagcaagagagctgtagtga

SEQ ID NO: 355478 - DNA, 20 bp, Artificial Sequence
  Description of Artificial Sequence: Synthetic oligonucleotide
  Target: LAMA2; (+) strand; PAM type: YTN; PAM sequence: CTG
tagtgattagcagggctcca

SEQ ID NO: 355479 - DNA, 20 bp, Artificial Sequence
  Description of Artificial Sequence: Synthetic oligonucleotide
  Target: LAMA2; (+) strand; PAM type: YTN; PAM sequence: TTA
gcagggctccaagggaaagc

SEQ ID NO: 355480 - DNA, 20 bp, Artificial Sequence
  Description of Artificial Sequence: Synthetic oligonucleotide
  Target: LAMA2; (+) strand; PAM type: YTN; PAM sequence: CTC
caagggaaagccccttgagc

SEQ ID NO: 355481 - DNA, 20 bp, Artificial Sequence
  Description of Artificial Sequence: Synthetic oligonucleotide
  Target: LAMA2; (+) strand; PAM type: YTN; PAM sequence: CTT
gagctacttactgcctgctc

SEQ ID NO: 355482 - DNA, 20 bp, Artificial Sequence
  Description of Artificial Sequence: Synthetic oligonucleotide
  Target: LAMA2; (+) strand; PAM type: YTN; PAM sequence: TTG
agctacttactgcctgctct

SEQ ID NO: 355483 - DNA, 20 bp, Artificial Sequence
  Description of Artificial Sequence: Synthetic oligonucleotide
  Target: LAMA2; (+) strand; PAM type: YTN; PAM sequence: CTA
cttactgcctgctctcagcc

SEQ ID NO: 355484 - DNA, 20 bp, Artificial Sequence
  Description of Artificial Sequence: Synthetic oligonucleotide
  Target: LAMA2; (+) strand; PAM type: YTN; PAM sequence: CTT
actgcctgctctcagccgaa

SEQ ID NO: 355485 - DNA, 20 bp, Artificial Sequence
  Description of Artificial Sequence: Synthetic oligonucleotide
  Target: LAMA2; (+) strand; PAM type: YTN; PAM sequence: TTA
ctgcctgctctcagccgaac

SEQ ID NO: 355486 - DNA, 20 bp, Artificial Sequence
  Description of Artificial Sequence: Synthetic oligonucleotide
  Target: LAMA2; (+) strand; PAM type: YTN; PAM sequence: CTG
cctgctctcagccgaactca

SEQ ID NO: 355487 - DNA, 20 bp, Artificial Sequence
  Description of Artificial Sequence: Synthetic oligonucleotide
  Target: LAMA2; (+) strand; PAM type: YTN; PAM sequence: CTG
ctctcagccgaactcaatat

SEQ ID NO: 355488 - DNA, 20 bp, Artificial Sequence
  Description of Artificial Sequence: Synthetic oligonucleotide
  Target: LAMA2; (+) strand; PAM type: YTN; PAM sequence: CTC
tcagccgaactcaatattgt

SEQ ID NO: 355489 - DNA, 20 bp, Artificial Sequence
  Description of Artificial Sequence: Synthetic oligonucleotide
  Target: LAMA2; (+) strand; PAM type: YTN; PAM sequence: CTC
agccgaactcaatattgtac

SEQ ID NO: 355490 - DNA, 20 bp, Artificial Sequence
  Description of Artificial Sequence: Synthetic oligonucleotide
  Target: LAMA2; (+) strand; PAM type: YTN; PAM sequence: CTC
aatattgtactgagaattat

SEQ ID NO: 355491 - DNA, 20 bp, Artificial Sequence
  Description of Artificial Sequence: Synthetic oligonucleotide
  Target: LAMA2; (+) strand; PAM type: YTN; PAM sequence: TTG
tactgagaattattataatc

SEQ ID NO: 355492 - DNA, 20 bp, Artificial Sequence
  Description of Artificial Sequence: Synthetic oligonucleotide
  Target: LAMA2; (+) strand; PAM type: YTN; PAM sequence: CTG
agaattattataatcctaat

SEQ ID NO: 355493 - DNA, 20 bp, Artificial Sequence
  Description of Artificial Sequence: Synthetic oligonucleotide
  Target: LAMA2; (+) strand; PAM type: YTN; PAM sequence: TTA
ttataatcctaataagaaag

SEQ ID NO: 355494 - DNA, 20 bp, Artificial Sequence
  Description of Artificial Sequence: Synthetic oligonucleotide
  Target: LAMA2; (+) strand; PAM type: YTN; PAM sequence: TTA
taatcctaataagaaagatg

SEQ ID NO: 355495 - DNA, 20 bp, Artificial Sequence
  Description of Artificial Sequence: Synthetic oligonucleotide
  Target: LAMA2; (+) strand; PAM type: YTN; PAM sequence: CTA
ataagaaagatgcctcctgt

SEQ ID NO: 355496 - DNA, 20 bp, Artificial Sequence
  Description of Artificial Sequence: Synthetic oligonucleotide
  Target: LAMA2; (+) strand; PAM type: YTN; PAM sequence: CTC
ctgtgtagacacttgaagct

SEQ ID NO: 355497 - DNA, 20 bp, Artificial Sequence
  Description of Artificial Sequence: Synthetic oligonucleotide
  Target: LAMA2; (+) strand; PAM type: YTN; PAM sequence: CTG
tgtagacacttgaagctcta

SEQ ID NO: 355498 - DNA, 20 bp, Artificial Sequence
  Description of Artificial Sequence: Synthetic oligonucleotide
  Target: LAMA2; (+) strand; PAM type: YTN; PAM sequence: CTT
gaagctctacacagacaatt

SEQ ID NO: 355499 - DNA, 20 bp, Artificial Sequence
  Description of Artificial Sequence: Synthetic oligonucleotide
  Target: LAMA2; (+) strand; PAM type: YTN; PAM sequence: TTG
aagctctacacagacaatta

SEQ ID NO: 355500 - DNA, 20 bp, Artificial Sequence
  Description of Artificial Sequence: Synthetic oligonucleotide
  Target: LAMA2; (+) strand; PAM type: YTN; PAM sequence: CTC
tacacagacaattaaaatgc

SEQ ID NO: 355501 - DNA, 20 bp, Artificial Sequence
  Description of Artificial Sequence: Synthetic oligonucleotide
  Target: LAMA2; (+) strand; PAM type: YTN; PAM sequence: CTA
cacagacaattaaaatgcaa

SEQ ID NO: 355502 - DNA, 20 bp, Artificial Sequence
  Description of Artificial Sequence: Synthetic oligonucleotide
  Target: LAMA2; (+) strand; PAM type: YTN; PAM sequence: TTA
aaatgcaacaataaacagca

SEQ ID NO: 355503 - DNA, 20 bp, Artificial Sequence
  Description of Artificial Sequence: Synthetic oligonucleotide
  Target: LAMA2; (+) strand; PAM type: YTN; PAM sequence: TTA
agaaatcataaaagagaatg

SEQ ID NO: 355504 - DNA, 20 bp, Artificial Sequence
  Description of Artificial Sequence: Synthetic oligonucleotide
  Target: LAMA2; (+) strand; PAM type: YTN; PAM sequence: TTA
agtaaatagcattattaaaa

SEQ ID NO: 355505 - DNA, 20 bp, Artificial Sequence
  Description of Artificial Sequence: Synthetic oligonucleotide
  Target: LAMA2; (+) strand; PAM type: YTN; PAM sequence: TTA
ttaaaataaatgcctttcta

SEQ ID NO: 355506 - DNA, 20 bp, Artificial Sequence
  Description of Artificial Sequence: Synthetic oligonucleotide
  Target: LAMA2; (+) strand; PAM type: YTN; PAM sequence: TTA
aaataaatgcctttctacca

SEQ ID NO: 355507 - DNA, 20 bp, Artificial Sequence
  Description of Artificial Sequence: Synthetic oligonucleotide
  Target: LAMA2; (+) strand; PAM type: YTN; PAM sequence: CTT
tctaccatgtgatatcttaa

SEQ ID NO: 355508 - DNA, 20 bp, Artificial Sequence
  Description of Artificial Sequence: Synthetic oligonucleotide
  Target: LAMA2; (+) strand; PAM type: YTN; PAM sequence: TTT
ctaccatgtgatatcttaaa

SEQ ID NO: 355509 - DNA, 20 bp, Artificial Sequence
  Description of Artificial Sequence: Synthetic oligonucleotide
  Target: LAMA2; (+) strand; PAM type: YTN; PAM sequence: TTC
taccatgtgatatcttaaat

SEQ ID NO: 355510 - DNA, 20 bp, Artificial Sequence
  Description of Artificial Sequence: Synthetic oligonucleotide
  Target: LAMA2; (+) strand; PAM type: YTN; PAM sequence: CTA
ccatgtgatatcttaaatag

SEQ ID NO: 355511 - DNA, 20 bp, Artificial Sequence
  Description of Artificial Sequence: Synthetic oligonucleotide
  Target: LAMA2; (+) strand; PAM type: YTN; PAM sequence: CTT
aaatagaaaactgtaagttc

SEQ ID NO: 355512 - DNA, 20 bp, Artificial Sequence
  Description of Artificial Sequence: Synthetic oligonucleotide
  Target: LAMA2; (+) strand; PAM type: YTN; PAM sequence: TTA
aatagaaaactgtaagttct

SEQ ID NO: 355513 - DNA, 20 bp, Artificial Sequence
  Description of Artificial Sequence: Synthetic oligonucleotide
  Target: LAMA2; (+) strand; PAM type: YTN; PAM sequence: CTG
taagttcttataaactaaat

SEQ ID NO: 355514 - DNA, 20 bp, Artificial Sequence
  Description of Artificial Sequence: Synthetic oligonucleotide
  Target: LAMA2; (+) strand; PAM type: YTN; PAM sequence: TTC
ttataaactaaattgtttca

SEQ ID NO: 355515 - DNA, 20 bp, Artificial Sequence
  Description of Artificial Sequence: Synthetic oligonucleotide
  Target: LAMA2; (+) strand; PAM type: YTN; PAM sequence: CTT
ataaactaaattgtttcagg

SEQ ID NO: 355516 - DNA, 20 bp, Artificial Sequence
  Description of Artificial Sequence: Synthetic oligonucleotide
  Target: LAMA2; (+) strand; PAM type: YTN; PAM sequence: TTA
taaactaaattgtttcagga

SEQ ID NO: 355517 - DNA, 20 bp, Artificial Sequence
  Description of Artificial Sequence: Synthetic oligonucleotide
  Target: LAMA2; (+) strand; PAM type: YTN; PAM sequence: CTA
aattgtttcaggattaaaaa

SEQ ID NO: 355518 - DNA, 20 bp, Artificial Sequence
  Description of Artificial Sequence: Synthetic oligonucleotide
  Target: LAMA2; (+) strand; PAM type: YTN; PAM sequence: TTG
tttcaggattaaaaacttgc

SEQ ID NO: 355519 - DNA, 20 bp, Artificial Sequence
  Description of Artificial Sequence: Synthetic oligonucleotide
  Target: LAMA2; (+) strand; PAM type: YTN; PAM sequence: TTT
caggattaaaaacttgcaga

SEQ ID NO: 355520 - DNA, 20 bp, Artificial Sequence
  Description of Artificial Sequence: Synthetic oligonucleotide
  Target: LAMA2; (+) strand; PAM type: YTN; PAM sequence: TTC
aggattaaaaacttgcagaa

SEQ ID NO: 355521 - DNA, 20 bp, Artificial Sequence
  Description of Artificial Sequence: Synthetic oligonucleotide
  Target: LAMA2; (+) strand; PAM type: YTN; PAM sequence: TTA
aaaacttgcagaaagcaagt

SEQ ID NO: 355522 - DNA, 20 bp, Artificial Sequence
  Description of Artificial Sequence: Synthetic oligonucleotide
  Target: LAMA2; (+) strand; PAM type: YTN; PAM sequence: CTT
gcagaaagcaagtttcataa

SEQ ID NO: 355523 - DNA, 20 bp, Artificial Sequence
  Description of Artificial Sequence: Synthetic oligonucleotide
  Target: LAMA2; (+) strand; PAM type: YTN; PAM sequence: TTG
cagaaagcaagtttcataaa

SEQ ID NO: 355524 - DNA, 20 bp, Artificial Sequence
  Description of Artificial Sequence: Synthetic oligonucleotide
  Target: LAMA2; (+) strand; PAM type: YTN; PAM sequence: TTT
cataaaacatctacataatt

SEQ ID NO: 355525 - DNA, 20 bp, Artificial Sequence
  Description of Artificial Sequence: Synthetic oligonucleotide
  Target: LAMA2; (+) strand; PAM type: YTN; PAM sequence: TTC
ataaaacatctacataatta

SEQ ID NO: 355526 - DNA, 20 bp, Artificial Sequence
  Description of Artificial Sequence: Synthetic oligonucleotide
  Target: LAMA2; (+) strand; PAM type: YTN; PAM sequence: CTA
cataattataaaaatcacaa

SEQ ID NO: 355527 - DNA, 20 bp, Artificial Sequence
  Description of Artificial Sequence: Synthetic oligonucleotide
  Target: LAMA2; (+) strand; PAM type: YTN; PAM sequence: TTA
taaaaatcacaaattatatg

SEQ ID NO: 355528 - DNA, 20 bp, Artificial Sequence
  Description of Artificial Sequence: Synthetic oligonucleotide
  Target: LAMA2; (+) strand; PAM type: YTN; PAM sequence: TTA
tatgcatataacatgaatta

SEQ ID NO: 355529 - DNA, 20 bp, Artificial Sequence
  Description of Artificial Sequence: Synthetic oligonucleotide
  Target: LAMA2; (+) strand; PAM type: YTN; PAM sequence: TTA
catcacagaattatatatca

SEQ ID NO: 355530 - DNA, 20 bp, Artificial Sequence
  Description of Artificial Sequence: Synthetic oligonucleotide
  Target: LAMA2; (+) strand; PAM type: YTN; PAM sequence: TTA
tatatcacaataatatcaca

SEQ ID NO: 355531 - DNA, 20 bp, Artificial Sequence
  Description of Artificial Sequence: Synthetic oligonucleotide
  Target: LAMA2; (+) strand; PAM type: YTN; PAM sequence: TTA
tatcaaaatgtgcatgcaat

SEQ ID NO: 355532 - DNA, 20 bp, Artificial Sequence
  Description of Artificial Sequence: Synthetic oligonucleotide
  Target: LAMA2; (+) strand; PAM type: YTN; PAM sequence: CTA
caattaagtgcctacagtct

SEQ ID NO: 355533 - DNA, 20 bp, Artificial Sequence
  Description of Artificial Sequence: Synthetic oligonucleotide
  Target: LAMA2; (+) strand; PAM type: YTN; PAM sequence: TTA
agtgcctacagtctcttgtt

SEQ ID NO: 355534 - DNA, 20 bp, Artificial Sequence
  Description of Artificial Sequence: Synthetic oligonucleotide
  Target: LAMA2; (+) strand; PAM type: YTN; PAM sequence: CTA
cagtctcttgtttaaaaaat

SEQ ID NO: 355535 - DNA, 20 bp, Artificial Sequence
  Description of Artificial Sequence: Synthetic oligonucleotide
  Target: LAMA2; (+) strand; PAM type: YTN; PAM sequence: CTC
ttgtttaaaaaataattaat

SEQ ID NO: 355536 - DNA, 20 bp, Artificial Sequence
  Description of Artificial Sequence: Synthetic oligonucleotide
  Target: LAMA2; (+) strand; PAM type: YTN; PAM sequence: CTT
gtttaaaaaataattaataa

SEQ ID NO: 355537 - DNA, 20 bp, Artificial Sequence
  Description of Artificial Sequence: Synthetic oligonucleotide
  Target: LAMA2; (+) strand; PAM type: YTN; PAM sequence: TTG
tttaaaaaataattaataac

SEQ ID NO: 355538 - DNA, 20 bp, Artificial Sequence
  Description of Artificial Sequence: Synthetic oligonucleotide
  Target: LAMA2; (+) strand; PAM type: YTN; PAM sequence: TTT
aaaaaataattaataaccta

SEQ ID NO: 355539 - DNA, 20 bp, Artificial Sequence
  Description of Artificial Sequence: Synthetic oligonucleotide
  Target: LAMA2; (+) strand; PAM type: YTN; PAM sequence: TTA
aaaaataattaataacctag

SEQ ID NO: 355540 - DNA, 20 bp, Artificial Sequence
  Description of Artificial Sequence: Synthetic oligonucleotide
  Target: LAMA2; (+) strand; PAM type: YTN; PAM sequence: TTA
ataacctagcatttcaacaa

SEQ ID NO: 355541 - DNA, 20 bp, Artificial Sequence
  Description of Artificial Sequence: Synthetic oligonucleotide
  Target: LAMA2; (+) strand; PAM type: YTN; PAM sequence: CTA
gcatttcaacaaaatatgca

SEQ ID NO: 355542 - DNA, 20 bp, Artificial Sequence
  Description of Artificial Sequence: Synthetic oligonucleotide
  Target: LAMA2; (+) strand; PAM type: YTN; PAM sequence: TTT
caacaaaatatgcatacaat

SEQ ID NO: 355543 - DNA, 20 bp, Artificial Sequence
  Description of Artificial Sequence: Synthetic oligonucleotide
  Target: LAMA2; (+) strand; PAM type: YTN; PAM sequence: TTC
aacaaaatatgcatacaatt

SEQ ID NO: 355544 - DNA, 20 bp, Artificial Sequence
  Description of Artificial Sequence: Synthetic oligonucleotide
  Target: LAMA2; (+) strand; PAM type: YTN; PAM sequence: TTT
aaatactgaaaagacactta

SEQ ID NO: 355545 - DNA, 20 bp, Artificial Sequence
  Description of Artificial Sequence: Synthetic oligonucleotide
  Target: LAMA2; (+) strand; PAM type: YTN; PAM sequence: TTA
aatactgaaaagacacttag

SEQ ID NO: 355546 - DNA, 20 bp, Artificial Sequence
  Description of Artificial Sequence: Synthetic oligonucleotide
  Target: LAMA2; (+) strand; PAM type: YTN; PAM sequence: CTG
aaaagacacttagtgtagtg

SEQ ID NO: 355547 - DNA, 20 bp, Artificial Sequence
  Description of Artificial Sequence: Synthetic oligonucleotide
  Target: LAMA2; (+) strand; PAM type: YTN; PAM sequence: CTT
agtgtagtgtatttaaatac

SEQ ID NO: 355548 - DNA, 20 bp, Artificial Sequence
  Description of Artificial Sequence: Synthetic oligonucleotide
  Target: LAMA2; (+) strand; PAM type: YTN; PAM sequence: TTA
gtgtagtgtatttaaatact

SEQ ID NO: 355549 - DNA, 20 bp, Artificial Sequence
  Description of Artificial Sequence: Synthetic oligonucleotide
  Target: LAMA2; (+) strand; PAM type: YTN; PAM sequence: TTT
aaatactgaaaagacactta

SEQ ID NO: 355550 - DNA, 20 bp, Artificial Sequence
  Description of Artificial Sequence: Synthetic oligonucleotide
  Target: LAMA2; (+) strand; PAM type: YTN; PAM sequence: TTA
aatactgaaaagacacttag

SEQ ID NO: 355551 - DNA, 20 bp, Artificial Sequence
  Description of Artificial Sequence: Synthetic oligonucleotide
  Target: LAMA2; (+) strand; PAM type: YTN; PAM sequence: CTG
aaaagacacttagtgtagtg

SEQ ID NO: 355552 - DNA, 20 bp, Artificial Sequence
  Description of Artificial Sequence: Synthetic oligonucleotide
  Target: LAMA2; (+) strand; PAM type: YTN; PAM sequence: CTT
agtgtagtgtatttaaatac

SEQ ID NO: 355553 - DNA, 20 bp, Artificial Sequence
  Description of Artificial Sequence: Synthetic oligonucleotide
  Target: LAMA2; (+) strand; PAM type: YTN; PAM sequence: TTA
gtgtagtgtatttaaatact

SEQ ID NO: 355554 - DNA, 20 bp, Artificial Sequence
  Description of Artificial Sequence: Synthetic oligonucleotide
  Target: LAMA2; (+) strand; PAM type: YTN; PAM sequence: TTT
aaatactgaaaagacactta

SEQ ID NO: 355555 - DNA, 20 bp, Artificial Sequence
  Description of Artificial Sequence: Synthetic oligonucleotide
  Target: LAMA2; (+) strand; PAM type: YTN; PAM sequence: TTA
aatactgaaaagacacttaa

SEQ ID NO: 355556 - DNA, 20 bp, Artificial Sequence
  Description of Artificial Sequence: Synthetic oligonucleotide
  Target: LAMA2; (+) strand; PAM type: YTN; PAM sequence: CTG
aaaagacacttaatgtaaca

SEQ ID NO: 355557 - DNA, 20 bp, Artificial Sequence
  Description of Artificial Sequence: Synthetic oligonucleotide
  Target: LAMA2; (+) strand; PAM type: YTN; PAM sequence: CTT
aatgtaacagttcatactgt

SEQ ID NO: 355558 - DNA, 20 bp, Artificial Sequence
  Description of Artificial Sequence: Synthetic oligonucleotide
  Target: LAMA2; (+) strand; PAM type: YTN; PAM sequence: TTA
atgtaacagttcatactgtt

SEQ ID NO: 355559 - DNA, 20 bp, Artificial Sequence
  Description of Artificial Sequence: Synthetic oligonucleotide
  Target: LAMA2; (+) strand; PAM type: YTN; PAM sequence: TTC
atactgtttcacaaaaacat

SEQ ID NO: 355560 - DNA, 20 bp, Artificial Sequence
  Description of Artificial Sequence: Synthetic oligonucleotide
  Target: LAMA2; (+) strand; PAM type: YTN; PAM sequence: CTG
tttcacaaaaacatgatttg

SEQ ID NO: 355561 - DNA, 20 bp, Artificial Sequence
  Description of Artificial Sequence: Synthetic oligonucleotide
  Target: LAMA2; (+) strand; PAM type: YTN; PAM sequence: TTT
cacaaaaacatgatttgaca

SEQ ID NO: 355562 - DNA, 20 bp, Artificial Sequence
  Description of Artificial Sequence: Synthetic oligonucleotide
  Target: LAMA2; (+) strand; PAM type: YTN; PAM sequence: TTC
acaaaaacatgatttgacat

SEQ ID NO: 355563 - DNA, 20 bp, Artificial Sequence
  Description of Artificial Sequence: Synthetic oligonucleotide
  Target: LAMA2; (+) strand; PAM type: YTN; PAM sequence: TTT
gacatagatatgtcaactga

SEQ ID NO: 355564 - DNA, 20 bp, Artificial Sequence
  Description of Artificial Sequence: Synthetic oligonucleotide
  Target: LAMA2; (+) strand; PAM type: YTN; PAM sequence: TTG
acatagatatgtcaactgat

SEQ ID NO: 355565 - DNA, 20 bp, Artificial Sequence
  Description of Artificial Sequence: Synthetic oligonucleotide
  Target: LAMA2; (+) strand; PAM type: YTN; PAM sequence: CTG
attgtaaaaacagcatggat

SEQ ID NO: 355566 - DNA, 20 bp, Artificial Sequence
  Description of Artificial Sequence: Synthetic oligonucleotide
  Target: LAMA2; (+) strand; PAM type: YTN; PAM sequence: TTG
taaaaacagcatggatcaaa

SEQ ID NO: 355567 - DNA, 20 bp, Artificial Sequence
  Description of Artificial Sequence: Synthetic oligonucleotide
  Target: LAMA2; (+) strand; PAM type: YTN; PAM sequence: CTG
cttaagaagcaaaattttat

SEQ ID NO: 355568 - DNA, 20 bp, Artificial Sequence
  Description of Artificial Sequence: Synthetic oligonucleotide
  Target: LAMA2; (+) strand; PAM type: YTN; PAM sequence: CTT
aagaagcaaaattttattga

SEQ ID NO: 355569 - DNA, 20 bp, Artificial Sequence
  Description of Artificial Sequence: Synthetic oligonucleotide
  Target: LAMA2; (+) strand; PAM type: YTN; PAM sequence: TTA
agaagcaaaattttattgaa

SEQ ID NO: 355570 - DNA, 20 bp, Artificial Sequence
  Description of Artificial Sequence: Synthetic oligonucleotide
  Target: LAMA2; (+) strand; PAM type: YTN; PAM sequence: TTT
tattgaaagactaaaatatt

SEQ ID NO: 355571 - DNA, 20 bp, Artificial Sequence
  Description of Artificial Sequence: Synthetic oligonucleotide
  Target: LAMA2; (+) strand; PAM type: YTN; PAM sequence: TTT
attgaaagactaaaatattg

SEQ ID NO: 355572 - DNA, 20 bp, Artificial Sequence
  Description of Artificial Sequence: Synthetic oligonucleotide
  Target: LAMA2; (+) strand; PAM type: YTN; PAM sequence: TTA
ttgaaagactaaaatattgg

SEQ ID NO: 355573 - DNA, 20 bp, Artificial Sequence
  Description of Artificial Sequence: Synthetic oligonucleotide
  Target: LAMA2; (+) strand; PAM type: YTN; PAM sequence: TTG
aaagactaaaatattggaga

SEQ ID NO: 355574 - DNA, 20 bp, Artificial Sequence
  Description of Artificial Sequence: Synthetic oligonucleotide
  Target: LAMA2; (+) strand; PAM type: YTN; PAM sequence: CTA
aaatattggagatataaatt

SEQ ID NO: 355575 - DNA, 20 bp, Artificial Sequence
  Description of Artificial Sequence: Synthetic oligonucleotide
  Target: LAMA2; (+) strand; PAM type: YTN; PAM sequence: TTG
gagatataaattcaaattaa

SEQ ID NO: 355576 - DNA, 20 bp, Artificial Sequence
  Description of Artificial Sequence: Synthetic oligonucleotide
  Target: LAMA2; (+) strand; PAM type: YTN; PAM sequence: TTC
aaattaaatgacaggttttt

SEQ ID NO: 355577 - DNA, 20 bp, Artificial Sequence
  Description of Artificial Sequence: Synthetic oligonucleotide
  Target: LAMA2; (+) strand; PAM type: YTN; PAM sequence: TTA
aatgacaggtttttagcaga

SEQ ID NO: 355578 - DNA, 20 bp, Artificial Sequence
  Description of Artificial Sequence: Synthetic oligonucleotide
  Target: LAMA2; (+) strand; PAM type: YTN; PAM sequence: TTT
ttagcagaaggggaagaata

SEQ ID NO: 355579 - DNA, 20 bp, Artificial Sequence
  Description of Artificial Sequence: Synthetic oligonucleotide
  Target: LAMA2; (+) strand; PAM type: YTN; PAM sequence: TTT
tagcagaaggggaagaatat

SEQ ID NO: 355580 - DNA, 20 bp, Artificial Sequence
  Description of Artificial Sequence: Synthetic oligonucleotide
  Target: LAMA2; (+) strand; PAM type: YTN; PAM sequence: TTT
agcagaaggggaagaatata

SEQ ID NO: 355581 - DNA, 20 bp, Artificial Sequence
  Description of Artificial Sequence: Synthetic oligonucleotide
  Target: LAMA2; (+) strand; PAM type: YTN; PAM sequence: TTA
gcagaaggggaagaatatat

SEQ ID NO: 355582 - DNA, 20 bp, Artificial Sequence
  Description of Artificial Sequence: Synthetic oligonucleotide
  Target: LAMA2; (+) strand; PAM type: YTN; PAM sequence: TTT
ctatccaagttagtaacttt

SEQ ID NO: 355583 - DNA, 20 bp, Artificial Sequence
  Description of Artificial Sequence: Synthetic oligonucleotide
  Target: LAMA2; (+) strand; PAM type: YTN; PAM sequence: TTC
tatccaagttagtaacttta

SEQ ID NO: 355584 - DNA, 20 bp, Artificial Sequence
  Description of Artificial Sequence: Synthetic oligonucleotide
  Target: LAMA2; (+) strand; PAM type: YTN; PAM sequence: CTA
tccaagttagtaactttaaa

SEQ ID NO: 355585 - DNA, 20 bp, Artificial Sequence
  Description of Artificial Sequence: Synthetic oligonucleotide
  Target: LAMA2; (+) strand; PAM type: YTN; PAM sequence: TTA
gtaactttaaataagtattt

SEQ ID NO: 355586 - DNA, 20 bp, Artificial Sequence
  Description of Artificial Sequence: Synthetic oligonucleotide
  Target: LAMA2; (+) strand; PAM type: YTN; PAM sequence: CTT
taaataagtatttatctgta

SEQ ID NO: 355587 - DNA, 20 bp, Artificial Sequence
  Description of Artificial Sequence: Synthetic oligonucleotide
  Target: LAMA2; (+) strand; PAM type: YTN; PAM sequence: TTT
aaataagtatttatctgtaa

SEQ ID NO: 355588 - DNA, 20 bp, Artificial Sequence
  Description of Artificial Sequence: Synthetic oligonucleotide
  Target: LAMA2; (+) strand; PAM type: YTN; PAM sequence: TTA
aataagtatttatctgtaaa

SEQ ID NO: 355589 - DNA, 20 bp, Artificial Sequence
  Description of Artificial Sequence: Synthetic oligonucleotide
  Target: LAMA2; (+) strand; PAM type: YTN; PAM sequence: TTT
atctgtaaatagaaataata

SEQ ID NO: 355590 - DNA, 20 bp, Artificial Sequence
  Description of Artificial Sequence: Synthetic oligonucleotide
  Target: LAMA2; (+) strand; PAM type: YTN; PAM sequence: TTA
tctgtaaatagaaataatat

SEQ ID NO: 355591 - DNA, 20 bp, Artificial Sequence
  Description of Artificial Sequence: Synthetic oligonucleotide
  Target: LAMA2; (+) strand; PAM type: YTN; PAM sequence: CTG
taaatagaaataatataaat

SEQ ID NO: 355592 - DNA, 20 bp, Artificial Sequence
  Description of Artificial Sequence: Synthetic oligonucleotide
  Target: LAMA2; (+) strand; PAM type: YTN; PAM sequence: TTC
atctccaaaatgcttattaa

SEQ ID NO: 355593 - DNA, 20 bp, Artificial Sequence
  Description of Artificial Sequence: Synthetic oligonucleotide
  Target: LAMA2; (+) strand; PAM type: YTN; PAM sequence: CTC
caaaatgcttattaacctta

SEQ ID NO: 355594 - DNA, 20 bp, Artificial Sequence
  Description of Artificial Sequence: Synthetic oligonucleotide
  Target: LAMA2; (+) strand; PAM type: YTN; PAM sequence: CTT
attaaccttaaacatttgta

SEQ ID NO: 355595 - DNA, 20 bp, Artificial Sequence
  Description of Artificial Sequence: Synthetic oligonucleotide
  Target: LAMA2; (+) strand; PAM type: YTN; PAM sequence: TTA
ttaaccttaaacatttgtac

SEQ ID NO: 355596 - DNA, 20 bp, Artificial Sequence
  Description of Artificial Sequence: Synthetic oligonucleotide
  Target: LAMA2; (+) strand; PAM type: YTN; PAM sequence: TTA
accttaaacatttgtacctt

SEQ ID NO: 355597 - DNA, 20 bp, Artificial Sequence
  Description of Artificial Sequence: Synthetic oligonucleotide
  Target: LAMA2; (+) strand; PAM type: YTN; PAM sequence: CTT
aaacatttgtacctttattc

SEQ ID NO: 355598 - DNA, 20 bp, Artificial Sequence
  Description of Artificial Sequence: Synthetic oligonucleotide
  Target: LAMA2; (+) strand; PAM type: YTN; PAM sequence: TTA
aacatttgtacctttattct

SEQ ID NO: 355599 - DNA, 20 bp, Artificial Sequence
  Description of Artificial Sequence: Synthetic oligonucleotide
  Target: LAMA2; (+) strand; PAM type: YTN; PAM sequence: TTT
gtacctttattctcttatac

SEQ ID NO: 355600 - DNA, 20 bp, Artificial Sequence
  Description of Artificial Sequence: Synthetic oligonucleotide
  Target: LAMA2; (+) strand; PAM type: YTN; PAM sequence: TTG
tacctttattctcttatact

SEQ ID NO: 355601 - DNA, 20 bp, Artificial Sequence
  Description of Artificial Sequence: Synthetic oligonucleotide
  Target: LAMA2; (+) strand; PAM type: YTN; PAM sequence: CTT
tattctcttatactataaca

SEQ ID NO: 355602 - DNA, 20 bp, Artificial Sequence
  Description of Artificial Sequence: Synthetic oligonucleotide
  Target: LAMA2; (+) strand; PAM type: YTN; PAM sequence: TTT
attctcttatactataacat

SEQ ID NO: 355603 - DNA, 20 bp, Artificial Sequence
  Description of Artificial Sequence: Synthetic oligonucleotide
  Target: LAMA2; (+) strand; PAM type: YTN; PAM sequence: TTA
ttctcttatactataacata

SEQ ID NO: 355604 - DNA, 20 bp, Artificial Sequence
  Description of Artificial Sequence: Synthetic oligonucleotide
  Target: LAMA2; (+) strand; PAM type: YTN; PAM sequence: TTC
tcttatactataacatatga

SEQ ID NO: 355605 - DNA, 20 bp, Artificial Sequence
  Description of Artificial Sequence: Synthetic oligonucleotide
  Target: LAMA2; (+) strand; PAM type: YTN; PAM sequence: CTC
ttatactataacatatgagt

SEQ ID NO: 355606 - DNA, 20 bp, Artificial Sequence
  Description of Artificial Sequence: Synthetic oligonucleotide
  Target: LAMA2; (+) strand; PAM type: YTN; PAM sequence: CTT
atactataacatatgagttt

SEQ ID NO: 355607 - DNA, 20 bp, Artificial Sequence
  Description of Artificial Sequence: Synthetic oligonucleotide
  Target: LAMA2; (+) strand; PAM type: YTN; PAM sequence: TTA
tactataacatatgagtttt

SEQ ID NO: 355608 - DNA, 20 bp, Artificial Sequence
  Description of Artificial Sequence: Synthetic oligonucleotide
  Target: LAMA2; (+) strand; PAM type: YTN; PAM sequence: CTA
taacatatgagtttttaaat

SEQ ID NO: 355609 - DNA, 20 bp, Artificial Sequence
  Description of Artificial Sequence: Synthetic oligonucleotide
  Target: LAMA2; (+) strand; PAM type: YTN; PAM sequence: TTT
ttaaatagtttttttttatc

SEQ ID NO: 355610 - DNA, 20 bp, Artificial Sequence
  Description of Artificial Sequence: Synthetic oligonucleotide
  Target: LAMA2; (+) strand; PAM type: YTN; PAM sequence: TTT
taaatagtttttttttatca

SEQ ID NO: 355611 - DNA, 20 bp, Artificial Sequence
  Description of Artificial Sequence: Synthetic oligonucleotide
  Target: LAMA2; (+) strand; PAM type: YTN; PAM sequence: TTT
aaatagtttttttttatcag

SEQ ID NO: 355612 - DNA, 20 bp, Artificial Sequence
  Description of Artificial Sequence: Synthetic oligonucleotide
  Target: LAMA2; (+) strand; PAM type: YTN; PAM sequence: TTA
aatagtttttttttatcaga

SEQ ID NO: 355613 - DNA, 20 bp, Artificial Sequence
  Description of Artificial Sequence: Synthetic oligonucleotide
  Target: LAMA2; (+) strand; PAM type: YTN; PAM sequence: TTT
ttttttatcagaaagaaata

SEQ ID NO: 355614 - DNA, 20 bp, Artificial Sequence
  Description of Artificial Sequence: Synthetic oligonucleotide
  Target: LAMA2; (+) strand; PAM type: YTN; PAM sequence: TTT
tttttatcagaaagaaatat

SEQ ID NO: 355615 - DNA, 20 bp, Artificial Sequence
  Description of Artificial Sequence: Synthetic oligonucleotide
  Target: LAMA2; (+) strand; PAM type: YTN; PAM sequence: TTT
ttttatcagaaagaaatatc

SEQ ID NO: 355616 - DNA, 20 bp, Artificial Sequence
  Description of Artificial Sequence: Synthetic oligonucleotide
  Target: LAMA2; (+) strand; PAM type: YTN; PAM sequence: TTT
tttatcagaaagaaatatct

SEQ ID NO: 355617 - DNA, 20 bp, Artificial Sequence
  Description of Artificial Sequence: Synthetic oligonucleotide
  Target: LAMA2; (+) strand; PAM type: YTN; PAM sequence: TTT
ttatcagaaagaaatatctt

SEQ ID NO: 355618 - DNA, 20 bp, Artificial Sequence
  Description of Artificial Sequence: Synthetic oligonucleotide
  Target: LAMA2; (+) strand; PAM type: YTN; PAM sequence: TTT
tatcagaaagaaatatctta

SEQ ID NO: 355619 - DNA, 20 bp, Artificial Sequence
  Description of Artificial Sequence: Synthetic oligonucleotide
  Target: LAMA2; (+) strand; PAM type: YTN; PAM sequence: TTT
atcagaaagaaatatcttac

SEQ ID NO: 355620 - DNA, 20 bp, Artificial Sequence
  Description of Artificial Sequence: Synthetic oligonucleotide
  Target: LAMA2; (+) strand; PAM type: YTN; PAM sequence: TTA
tcagaaagaaatatcttact

SEQ ID NO: 355621 - DNA, 20 bp, Artificial Sequence
  Description of Artificial Sequence: Synthetic oligonucleotide
  Target: LAMA2; (+) strand; PAM type: YTN; PAM sequence: CTT
actgaagtgtgaagacattt

SEQ ID NO: 355622 - DNA, 20 bp, Artificial Sequence
  Description of Artificial Sequence: Synthetic oligonucleotide
  Target: LAMA2; (+) strand; PAM type: YTN; PAM sequence: TTA
ctgaagtgtgaagacatttt

SEQ ID NO: 355623 - DNA, 20 bp, Artificial Sequence
  Description of Artificial Sequence: Synthetic oligonucleotide
  Target: LAMA2; (+) strand; PAM type: YTN; PAM sequence: CTG
aagtgtgaagacatttttaa

SEQ ID NO: 355624 - DNA, 20 bp, Artificial Sequence
  Description of Artificial Sequence: Synthetic oligonucleotide
  Target: LAMA2; (+) strand; PAM type: YTN; PAM sequence: TTT
ttaaaaagagcttcattagg

SEQ ID NO: 355625 - DNA, 20 bp, Artificial Sequence
  Description of Artificial Sequence: Synthetic oligonucleotide
  Target: LAMA2; (+) strand; PAM type: YTN; PAM sequence: TTT
taaaaagagcttcattagga

SEQ ID NO: 355626 - DNA, 20 bp, Artificial Sequence
  Description of Artificial Sequence: Synthetic oligonucleotide
  Target: LAMA2; (+) strand; PAM type: YTN; PAM sequence: TTT
aaaaagagcttcattaggaa

SEQ ID NO: 355627 - DNA, 20 bp, Artificial Sequence
  Description of Artificial Sequence: Synthetic oligonucleotide
  Target: LAMA2; (+) strand; PAM type: YTN; PAM sequence: TTA
aaaagagcttcattaggaag

SEQ ID NO: 355628 - DNA, 20 bp, Artificial Sequence
  Description of Artificial Sequence: Synthetic oligonucleotide
  Target: LAMA2; (+) strand; PAM type: YTN; PAM sequence: CTT
cattaggaagtcttgggcct

SEQ ID NO: 355629 - DNA, 20 bp, Artificial Sequence
  Description of Artificial Sequence: Synthetic oligonucleotide
  Target: LAMA2; (+) strand; PAM type: YTN; PAM sequence: TTC
attaggaagtcttgggccta

SEQ ID NO: 355630 - DNA, 20 bp, Artificial Sequence
  Description of Artificial Sequence: Synthetic oligonucleotide
  Target: LAMA2; (+) strand; PAM type: YTN; PAM sequence: TTA
ggaagtcttgggcctaattg

SEQ ID NO: 355631 - DNA, 20 bp, Artificial Sequence
  Description of Artificial Sequence: Synthetic oligonucleotide
  Target: LAMA2; (+) strand; PAM type: YTN; PAM sequence: CTT
gggcctaattgttttttgtt

SEQ ID NO: 355632 - DNA, 20 bp, Artificial Sequence
  Description of Artificial Sequence: Synthetic oligonucleotide
  Target: LAMA2; (+) strand; PAM type: YTN; PAM sequence: TTG
ggcctaattgttttttgttt

SEQ ID NO: 355633 - DNA, 20 bp, Artificial Sequence
  Description of Artificial Sequence: Synthetic oligonucleotide
  Target: LAMA2; (+) strand; PAM type: YTN; PAM sequence: CTA
attgttttttgttttataaa

SEQ ID NO: 355634 - DNA, 20 bp, Artificial Sequence
  Description of Artificial Sequence: Synthetic oligonucleotide
  Target: LAMA2; (+) strand; PAM type: YTN; PAM sequence: TTG
ttttttgttttataaatttt

SEQ ID NO: 355635 - DNA, 20 bp, Artificial Sequence
  Description of Artificial Sequence: Synthetic oligonucleotide
  Target: LAMA2; (+) strand; PAM type: YTN; PAM sequence: TTT
tttgttttataaattttaaa

SEQ ID NO: 355636 - DNA, 20 bp, Artificial Sequence
  Description of Artificial Sequence: Synthetic oligonucleotide
  Target: LAMA2; (+) strand; PAM type: YTN; PAM sequence: TTT
ttgttttataaattttaaat

SEQ ID NO: 355637 - DNA, 20 bp, Artificial Sequence
  Description of Artificial Sequence: Synthetic oligonucleotide
  Target: LAMA2; (+) strand; PAM type: YTN; PAM sequence: TTT
tgttttataaattttaaatg

SEQ ID NO: 355638 - DNA, 20 bp, Artificial Sequence
  Description of Artificial Sequence: Synthetic oligonucleotide
  Target: LAMA2; (+) strand; PAM type: YTN; PAM sequence: TTT
gttttataaattttaaatga

SEQ ID NO: 355639 - DNA, 20 bp, Artificial Sequence
  Description of Artificial Sequence: Synthetic oligonucleotide
  Target: LAMA2; (+) strand; PAM type: YTN; PAM sequence: TTG
ttttataaattttaaatgac

SEQ ID NO: 355640 - DNA, 20 bp, Artificial Sequence
  Description of Artificial Sequence: Synthetic oligonucleotide
  Target: LAMA2; (+) strand; PAM type: YTN; PAM sequence: TTT
tataaattttaaatgactgc

SEQ ID NO: 355641 - DNA, 20 bp, Artificial Sequence
  Description of Artificial Sequence: Synthetic oligonucleotide
  Target: LAMA2; (+) strand; PAM type: YTN; PAM sequence: TTT
ataaattttaaatgactgct

SEQ ID NO: 355642 - DNA, 20 bp, Artificial Sequence
  Description of Artificial Sequence: Synthetic oligonucleotide
  Target: LAMA2; (+) strand; PAM type: YTN; PAM sequence: TTA
taaattttaaatgactgctc

SEQ ID NO: 355643 - DNA, 20 bp, Artificial Sequence
  Description of Artificial Sequence: Synthetic oligonucleotide
  Target: LAMA2; (+) strand; PAM type: YTN; PAM sequence: TTT
taaatgactgctctgtgatg

SEQ ID NO: 355644 - DNA, 20 bp, Artificial Sequence
  Description of Artificial Sequence: Synthetic oligonucleotide
  Target: LAMA2; (+) strand; PAM type: YTN; PAM sequence: TTT
aaatgactgctctgtgatga

SEQ ID NO: 355645 - DNA, 20 bp, Artificial Sequence
  Description of Artificial Sequence: Synthetic oligonucleotide
  Target: LAMA2; (+) strand; PAM type: YTN; PAM sequence: TTA
aatgactgctctgtgatgag

SEQ ID NO: 355646 - DNA, 20 bp, Artificial Sequence
  Description of Artificial Sequence: Synthetic oligonucleotide
  Target: LAMA2; (+) strand; PAM type: YTN; PAM sequence: CTG
ctctgtgatgagcccatttc

SEQ ID NO: 355647 - DNA, 20 bp, Artificial Sequence
  Description of Artificial Sequence: Synthetic oligonucleotide
  Target: LAMA2; (+) strand; PAM type: YTN; PAM sequence: CTC
tgtgatgagcccatttcagt

SEQ ID NO: 355648 - DNA, 20 bp, Artificial Sequence
  Description of Artificial Sequence: Synthetic oligonucleotide
  Target: LAMA2; (+) strand; PAM type: YTN; PAM sequence: CTG
tgatgagcccatttcagttg

SEQ ID NO: 355649 - DNA, 20 bp, Artificial Sequence
  Description of Artificial Sequence: Synthetic oligonucleotide
  Target: LAMA2; (+) strand; PAM type: YTN; PAM sequence: TTT
cagttgaggctgtattattt

SEQ ID NO: 355650 - DNA, 20 bp, Artificial Sequence
  Description of Artificial Sequence: Synthetic oligonucleotide
  Target: LAMA2; (+) strand; PAM type: YTN; PAM sequence: TTC
agttgaggctgtattatttt

SEQ ID NO: 355651 - DNA, 20 bp, Artificial Sequence
  Description of Artificial Sequence: Synthetic oligonucleotide
  Target: LAMA2; (+) strand; PAM type: YTN; PAM sequence: TTG
aggctgtattatttttcctg

SEQ ID NO: 355652 - DNA, 20 bp, Artificial Sequence
  Description of Artificial Sequence: Synthetic oligonucleotide
  Target: LAMA2; (+) strand; PAM type: YTN; PAM sequence: CTG
tattatttttcctgtgggta

SEQ ID NO: 355653 - DNA, 20 bp, Artificial Sequence
  Description of Artificial Sequence: Synthetic oligonucleotide
  Target: LAMA2; (+) strand; PAM type: YTN; PAM sequence: TTA
tttttcctgtgggtaaaatg

SEQ ID NO: 355654 - DNA, 20 bp, Artificial Sequence
  Description of Artificial Sequence: Synthetic oligonucleotide
  Target: LAMA2; (+) strand; PAM type: YTN; PAM sequence: TTT
ttcctgtgggtaaaatgaca

SEQ ID NO: 355655 - DNA, 20 bp, Artificial Sequence
  Description of Artificial Sequence: Synthetic oligonucleotide
  Target: LAMA2; (+) strand; PAM type: YTN; PAM sequence: TTT
tcctgtgggtaaaatgacat

SEQ ID NO: 355656 - DNA, 20 bp, Artificial Sequence
  Description of Artificial Sequence: Synthetic oligonucleotide
  Target: LAMA2; (+) strand; PAM type: YTN; PAM sequence: TTT
cctgtgggtaaaatgacata

SEQ ID NO: 355657 - DNA, 20 bp, Artificial Sequence
  Description of Artificial Sequence: Synthetic oligonucleotide
  Target: LAMA2; (+) strand; PAM type: YTN; PAM sequence: TTC
ctgtgggtaaaatgacatac

SEQ ID NO: 355658 - DNA, 20 bp, Artificial Sequence
  Description of Artificial Sequence: Synthetic oligonucleotide
  Target: LAMA2; (+) strand; PAM type: YTN; PAM sequence: CTG
tgggtaaaatgacatactga

SEQ ID NO: 355659 - DNA, 20 bp, Artificial Sequence
  Description of Artificial Sequence: Synthetic oligonucleotide
  Target: LAMA2; (+) strand; PAM type: YTN; PAM sequence: CTG
agctgatatggacatcactt

SEQ ID NO: 355660 - DNA, 20 bp, Artificial Sequence
  Description of Artificial Sequence: Synthetic oligonucleotide
  Target: LAMA2; (+) strand; PAM type: YTN; PAM sequence: CTG
atatggacatcacttctccc

SEQ ID NO: 355661 - DNA, 20 bp, Artificial Sequence
  Description of Artificial Sequence: Synthetic oligonucleotide
  Target: LAMA2; (+) strand; PAM type: YTN; PAM sequence: CTT
ctcccacttttgctatttta

SEQ ID NO: 355662 - DNA, 20 bp, Artificial Sequence
  Description of Artificial Sequence: Synthetic oligonucleotide
  Target: LAMA2; (+) strand; PAM type: YTN; PAM sequence: TTC
tcccacttttgctattttaa

SEQ ID NO: 355663 - DNA, 20 bp, Artificial Sequence
  Description of Artificial Sequence: Synthetic oligonucleotide
  Target: LAMA2; (+) strand; PAM type: YTN; PAM sequence: CTC
ccacttttgctattttaaaa

SEQ ID NO: 355664 - DNA, 20 bp, Artificial Sequence
  Description of Artificial Sequence: Synthetic oligonucleotide
  Target: LAMA2; (+) strand; PAM type: YTN; PAM sequence: CTT
ttgctattttaaaaatacag

SEQ ID NO: 355665 - DNA, 20 bp, Artificial Sequence
  Description of Artificial Sequence: Synthetic oligonucleotide
  Target: LAMA2; (+) strand; PAM type: YTN; PAM sequence: TTT
tgctattttaaaaatacaga

SEQ ID NO: 355666 - DNA, 20 bp, Artificial Sequence
  Description of Artificial Sequence: Synthetic oligonucleotide
  Target: LAMA2; (+) strand; PAM type: YTN; PAM sequence: TTT
gctattttaaaaatacagat

SEQ ID NO: 355667 - DNA, 20 bp, Artificial Sequence
  Description of Artificial Sequence: Synthetic oligonucleotide
  Target: LAMA2; (+) strand; PAM type: YTN; PAM sequence: TTG
ctattttaaaaatacagata

SEQ ID NO: 355668 - DNA, 20 bp, Artificial Sequence
  Description of Artificial Sequence: Synthetic oligonucleotide
  Target: LAMA2; (+) strand; PAM type: YTN; PAM sequence: CTA
ttttaaaaatacagatatgc

SEQ ID NO: 355669 - DNA, 20 bp, Artificial Sequence
  Description of Artificial Sequence: Synthetic oligonucleotide
  Target: LAMA2; (+) strand; PAM type: YTN; PAM sequence: TTT
taaaaatacagatatgctgc

SEQ ID NO: 355670 - DNA, 20 bp, Artificial Sequence
  Description of Artificial Sequence: Synthetic oligonucleotide
  Target: LAMA2; (+) strand; PAM type: YTN; PAM sequence: TTT
aaaaatacagatatgctgca

SEQ ID NO: 355671 - DNA, 20 bp, Artificial Sequence
  Description of Artificial Sequence: Synthetic oligonucleotide
  Target: LAMA2; (+) strand; PAM type: YTN; PAM sequence: TTA
aaaatacagatatgctgcat

SEQ ID NO: 355672 - DNA, 20 bp, Artificial Sequence
  Description of Artificial Sequence: Synthetic oligonucleotide
  Target: LAMA2; (+) strand; PAM type: YTN; PAM sequence: CTG
cataaacatagcaaatagat

SEQ ID NO: 355673 - DNA, 20 bp, Artificial Sequence
  Description of Artificial Sequence: Synthetic oligonucleotide
  Target: LAMA2; (+) strand; PAM type: YTN; PAM sequence: TTT
ataaacatttagattcaaga

SEQ ID NO: 355674 - DNA, 20 bp, Artificial Sequence
  Description of Artificial Sequence: Synthetic oligonucleotide
  Target: LAMA2; (+) strand; PAM type: YTN; PAM sequence: TTA
taaacatttagattcaagaa

SEQ ID NO: 355675 - DNA, 20 bp, Artificial Sequence
  Description of Artificial Sequence: Synthetic oligonucleotide
  Target: LAMA2; (+) strand; PAM type: YTN; PAM sequence: TTT
agattcaagaaagaaaggga

SEQ ID NO: 355676 - DNA, 20 bp, Artificial Sequence
  Description of Artificial Sequence: Synthetic oligonucleotide
  Target: LAMA2; (+) strand; PAM type: YTN; PAM sequence: TTA
gattcaagaaagaaagggaa

SEQ ID NO: 355677 - DNA, 20 bp, Artificial Sequence
  Description of Artificial Sequence: Synthetic oligonucleotide
  Target: LAMA2; (+) strand; PAM type: YTN; PAM sequence: TTC
aagaaagaaagggaaattcc

SEQ ID NO: 355678 - DNA, 20 bp, Artificial Sequence
  Description of Artificial Sequence: Synthetic oligonucleotide
  Target: LAMA2; (+) strand; PAM type: YTN; PAM sequence: TTC
ctagatgtcagaccaaagag

SEQ ID NO: 355679 - DNA, 20 bp, Artificial Sequence
  Description of Artificial Sequence: Synthetic oligonucleotide
  Target: LAMA2; (+) strand; PAM type: YTN; PAM sequence: CTA
gatgtcagaccaaagaggga

SEQ ID NO: 355680 - DNA, 20 bp, Artificial Sequence
  Description of Artificial Sequence: Synthetic oligonucleotide
  Target: LAMA2; (+) strand; PAM type: YTN; PAM sequence: CTA
agttaagcataagcaaaagc

SEQ ID NO: 355681 - DNA, 20 bp, Artificial Sequence
  Description of Artificial Sequence: Synthetic oligonucleotide
  Target: LAMA2; (+) strand; PAM type: YTN; PAM sequence: TTA
agcataagcaaaagctcaag

SEQ ID NO: 355682 - DNA, 20 bp, Artificial Sequence
  Description of Artificial Sequence: Synthetic oligonucleotide
  Target: LAMA2; (+) strand; PAM type: YTN; PAM sequence: CTC
aagctaaactgagcaactgg

SEQ ID NO: 355683 - DNA, 20 bp, Artificial Sequence
  Description of Artificial Sequence: Synthetic oligonucleotide
  Target: LAMA2; (+) strand; PAM type: YTN; PAM sequence: CTA
aactgagcaactggggtcat

SEQ ID NO: 355684 - DNA, 20 bp, Artificial Sequence
  Description of Artificial Sequence: Synthetic oligonucleotide
  Target: LAMA2; (+) strand; PAM type: YTN; PAM sequence: CTG
agcaactggggtcatggggt

SEQ ID NO: 355685 - DNA, 20 bp, Artificial Sequence
  Description of Artificial Sequence: Synthetic oligonucleotide
  Target: LAMA2; (+) strand; PAM type: YTN; PAM sequence: CTG
gggtcatggggtggagggtg

SEQ ID NO: 355686 - DNA, 20 bp, Artificial Sequence
  Description of Artificial Sequence: Synthetic oligonucleotide
  Target: LAMA2; (+) strand; PAM type: YTN; PAM sequence: CTT
agttctaagatcagggctaa

SEQ ID NO: 355687 - DNA, 20 bp, Artificial Sequence
  Description of Artificial Sequence: Synthetic oligonucleotide
  Target: LAMA2; (+) strand; PAM type: YTN; PAM sequence: TTA
gttctaagatcagggctaaa

SEQ ID NO: 355688 - DNA, 20 bp, Artificial Sequence
  Description of Artificial Sequence: Synthetic oligonucleotide
  Target: LAMA2; (+) strand; PAM type: YTN; PAM sequence: TTC
taagatcagggctaaagttt

SEQ ID NO: 355689 - DNA, 20 bp, Artificial Sequence
  Description of Artificial Sequence: Synthetic oligonucleotide
  Target: LAMA2; (+) strand; PAM type: YTN; PAM sequence: CTA
agatcagggctaaagtttgg

SEQ ID NO: 355690 - DNA, 20 bp, Artificial Sequence
  Description of Artificial Sequence: Synthetic oligonucleotide
  Target: LAMA2; (+) strand; PAM type: YTN; PAM sequence: CTA
aagtttggagttttaatgcc

SEQ ID NO: 355691 - DNA, 20 bp, Artificial Sequence
  Description of Artificial Sequence: Synthetic oligonucleotide
  Target: LAMA2; (+) strand; PAM type: YTN; PAM sequence: TTT
ggagttttaatgccctcact

SEQ ID NO: 355692 - DNA, 20 bp, Artificial Sequence
  Description of Artificial Sequence: Synthetic oligonucleotide
  Target: LAMA2; (+) strand; PAM type: YTN; PAM sequence: TTG
gagttttaatgccctcacta

SEQ ID NO: 355693 - DNA, 20 bp, Artificial Sequence
  Description of Artificial Sequence: Synthetic oligonucleotide
  Target: LAMA2; (+) strand; PAM type: YTN; PAM sequence: TTT
taatgccctcactaggactt

SEQ ID NO: 355694 - DNA, 20 bp, Artificial Sequence
  Description of Artificial Sequence: Synthetic oligonucleotide
  Target: LAMA2; (+) strand; PAM type: YTN; PAM sequence: TTT
aatgccctcactaggacttg

SEQ ID NO: 355695 - DNA, 20 bp, Artificial Sequence
  Description of Artificial Sequence: Synthetic oligonucleotide
  Target: LAMA2; (+) strand; PAM type: YTN; PAM sequence: TTA
atgccctcactaggacttga

SEQ ID NO: 355696 - DNA, 20 bp, Artificial Sequence
  Description of Artificial Sequence: Synthetic oligonucleotide
  Target: LAMA2; (+) strand; PAM type: YTN; PAM sequence: CTC
actaggacttgacactagga

SEQ ID NO: 355697 - DNA, 20 bp, Artificial Sequence
  Description of Artificial Sequence: Synthetic oligonucleotide
  Target: LAMA2; (+) strand; PAM type: YTN; PAM sequence: CTA
ggacttgacactaggatttg

SEQ ID NO: 355698 - DNA, 20 bp, Artificial Sequence
  Description of Artificial Sequence: Synthetic oligonucleotide
  Target: LAMA2; (+) strand; PAM type: YTN; PAM sequence: CTT
gacactaggatttggaccca

SEQ ID NO: 355699 - DNA, 20 bp, Artificial Sequence
  Description of Artificial Sequence: Synthetic oligonucleotide
  Target: LAMA2; (+) strand; PAM type: YTN; PAM sequence: TTG
acactaggatttggacccac

SEQ ID NO: 355700 - DNA, 20 bp, Artificial Sequence
  Description of Artificial Sequence: Synthetic oligonucleotide
  Target: LAMA2; (+) strand; PAM type: YTN; PAM sequence: CTA
ggatttggacccacagacgg

SEQ ID NO: 355701 - DNA, 20 bp, Artificial Sequence
  Description of Artificial Sequence: Synthetic oligonucleotide
  Target: LAMA2; (+) strand; PAM type: YTN; PAM sequence: TTT
ggacccacagacggaaattg

SEQ ID NO: 355702 - DNA, 20 bp, Artificial Sequence
  Description of Artificial Sequence: Synthetic oligonucleotide
  Target: LAMA2; (+) strand; PAM type: YTN; PAM sequence: TTG
gacccacagacggaaattgc

SEQ ID NO: 355703 - DNA, 20 bp, Artificial Sequence
  Description of Artificial Sequence: Synthetic oligonucleotide
  Target: LAMA2; (+) strand; PAM type: YTN; PAM sequence: TTG
cagctgaactccctgaagca

SEQ ID NO: 355704 - DNA, 20 bp, Artificial Sequence
  Description of Artificial Sequence: Synthetic oligonucleotide
  Target: LAMA2; (+) strand; PAM type: YTN; PAM sequence: CTG
aactccctgaagcagggaca

SEQ ID NO: 355705 - DNA, 20 bp, Artificial Sequence
  Description of Artificial Sequence: Synthetic oligonucleotide
  Target: LAMA2; (+) strand; PAM type: YTN; PAM sequence: CTC
cctgaagcagggacactaga

SEQ ID NO: 355706 - DNA, 20 bp, Artificial Sequence
  Description of Artificial Sequence: Synthetic oligonucleotide
  Target: LAMA2; (+) strand; PAM type: YTN; PAM sequence: CTG
aagcagggacactagaaatg

SEQ ID NO: 355707 - DNA, 20 bp, Artificial Sequence
  Description of Artificial Sequence: Synthetic oligonucleotide
  Target: LAMA2; (+) strand; PAM type: YTN; PAM sequence: CTA
gaaatgctttcagacagtga

SEQ ID NO: 355708 - DNA, 20 bp, Artificial Sequence
  Description of Artificial Sequence: Synthetic oligonucleotide
  Target: LAMA2; (+) strand; PAM type: YTN; PAM sequence: CTT
tcagacagtgaaatgggggc

SEQ ID NO: 355709 - DNA, 20 bp, Artificial Sequence
  Description of Artificial Sequence: Synthetic oligonucleotide
  Target: LAMA2; (+) strand; PAM type: YTN; PAM sequence: TTT
cagacagtgaaatgggggct

SEQ ID NO: 355710 - DNA, 20 bp, Artificial Sequence
  Description of Artificial Sequence: Synthetic oligonucleotide
  Target: LAMA2; (+) strand; PAM type: YTN; PAM sequence: TTC
agacagtgaaatgggggcta

SEQ ID NO: 355711 - DNA, 20 bp, Artificial Sequence
  Description of Artificial Sequence: Synthetic oligonucleotide
  Target: LAMA2; (+) strand; PAM type: YTN; PAM sequence: CTA
gaaaattcttcctgcaagcc

SEQ ID NO: 355712 - DNA, 20 bp, Artificial Sequence
  Description of Artificial Sequence: Synthetic oligonucleotide
  Target: LAMA2; (+) strand; PAM type: YTN; PAM sequence: TTC
ttcctgcaagcctacagagg

SEQ ID NO: 355713 - DNA, 20 bp, Artificial Sequence
  Description of Artificial Sequence: Synthetic oligonucleotide
  Target: LAMA2; (+) strand; PAM type: YTN; PAM sequence: CTT
cctgcaagcctacagaggca

SEQ ID NO: 355714 - DNA, 20 bp, Artificial Sequence
  Description of Artificial Sequence: Synthetic oligonucleotide
  Target: LAMA2; (+) strand; PAM type: YTN; PAM sequence: TTC
ctgcaagcctacagaggcag

SEQ ID NO: 355715 - DNA, 20 bp, Artificial Sequence
  Description of Artificial Sequence: Synthetic oligonucleotide
  Target: LAMA2; (+) strand; PAM type: YTN; PAM sequence: CTG
caagcctacagaggcagcta

SEQ ID NO: 355716 - DNA, 20 bp, Artificial Sequence
  Description of Artificial Sequence: Synthetic oligonucleotide
  Target: LAMA2; (+) strand; PAM type: YTN; PAM sequence: CTA
cagaggcagctagaaaattt

SEQ ID NO: 355717 - DNA, 20 bp, Artificial Sequence
  Description of Artificial Sequence: Synthetic oligonucleotide
  Target: LAMA2; (+) strand; PAM type: YTN; PAM sequence: CTA
gaaaatttttctcttagggg

SEQ ID NO: 355718 - DNA, 20 bp, Artificial Sequence
  Description of Artificial Sequence: Synthetic oligonucleotide
  Target: LAMA2; (+) strand; PAM type: YTN; PAM sequence: TTT
ttctcttaggggctctgggt

SEQ ID NO: 355719 - DNA, 20 bp, Artificial Sequence
  Description of Artificial Sequence: Synthetic oligonucleotide
  Target: LAMA2; (+) strand; PAM type: YTN; PAM sequence: TTT
tctcttaggggctctgggtg

SEQ ID NO: 355720 - DNA, 20 bp, Artificial Sequence
  Description of Artificial Sequence: Synthetic oligonucleotide
  Target: LAMA2; (+) strand; PAM type: YTN; PAM sequence: TTT
ctcttaggggctctgggtgg

SEQ ID NO: 355721 - DNA, 20 bp, Artificial Sequence
  Description of Artificial Sequence: Synthetic oligonucleotide
  Target: LAMA2; (+) strand; PAM type: YTN; PAM sequence: TTC
tcttaggggctctgggtggg

SEQ ID NO: 355722 - DNA, 20 bp, Artificial Sequence
  Description of Artificial Sequence: Synthetic oligonucleotide
  Target: LAMA2; (+) strand; PAM type: YTN; PAM sequence: CTC
ttaggggctctgggtgggta

SEQ ID NO: 355723 - DNA, 20 bp, Artificial Sequence
  Description of Artificial Sequence: Synthetic oligonucleotide
  Target: LAMA2; (+) strand; PAM type: YTN; PAM sequence: CTT
aggggctctgggtgggtaaa

SEQ ID NO: 355724 - DNA, 20 bp, Artificial Sequence
  Description of Artificial Sequence: Synthetic oligonucleotide
  Target: LAMA2; (+) strand; PAM type: YTN; PAM sequence: TTA
ggggctctgggtgggtaaaa

SEQ ID NO: 355725 - DNA, 20 bp, Artificial Sequence
  Description of Artificial Sequence: Synthetic oligonucleotide
  Target: LAMA2; (+) strand; PAM type: YTN; PAM sequence: CTC
tgggtgggtaaaagttacta

SEQ ID NO: 355726 - DNA, 20 bp, Artificial Sequence
  Description of Artificial Sequence: Synthetic oligonucleotide
  Target: LAMA2; (+) strand; PAM type: YTN; PAM sequence: CTG
ggtgggtaaaagttactacc

SEQ ID NO: 355727 - DNA, 20 bp, Artificial Sequence
  Description of Artificial Sequence: Synthetic oligonucleotide
  Target: LAMA2; (+) strand; PAM type: YTN; PAM sequence: TTA
ctaccttgtgtaggaccgaa

SEQ ID NO: 355728 - DNA, 20 bp, Artificial Sequence
  Description of Artificial Sequence: Synthetic oligonucleotide
  Target: LAMA2; (+) strand; PAM type: YTN; PAM sequence: CTA
ccttgtgtaggaccgaatcc

SEQ ID NO: 355729 - DNA, 20 bp, Artificial Sequence
  Description of Artificial Sequence: Synthetic oligonucleotide
  Target: LAMA2; (+) strand; PAM type: YTN; PAM sequence: CTT
gtgtaggaccgaatccccaa

SEQ ID NO: 355730 - DNA, 20 bp, Artificial Sequence
  Description of Artificial Sequence: Synthetic oligonucleotide
  Target: LAMA2; (+) strand; PAM type: YTN; PAM sequence: TTG
tgtaggaccgaatccccaaa

SEQ ID NO: 355731 - DNA, 20 bp, Artificial Sequence
  Description of Artificial Sequence: Synthetic oligonucleotide
  Target: LAMA2; (+) strand; PAM type: YTN; PAM sequence: CTG
tgtgccacgtgggaatggga

SEQ ID NO: 355732 - DNA, 20 bp, Artificial Sequence
  Description of Artificial Sequence: Synthetic oligonucleotide
  Target: LAMA2; (+) strand; PAM type: YTN; PAM sequence: TTT
ttattctccccttatgtgct

SEQ ID NO: 355733 - DNA, 20 bp, Artificial Sequence
  Description of Artificial Sequence: Synthetic oligonucleotide
  Target: LAMA2; (+) strand; PAM type: YTN; PAM sequence: TTT
tattctccccttatgtgctg

SEQ ID NO: 355734 - DNA, 20 bp, Artificial Sequence
  Description of Artificial Sequence: Synthetic oligonucleotide
  Target: LAMA2; (+) strand; PAM type: YTN; PAM sequence: TTT
attctccccttatgtgctgg

SEQ ID NO: 355735 - DNA, 20 bp, Artificial Sequence
  Description of Artificial Sequence: Synthetic oligonucleotide
  Target: LAMA2; (+) strand; PAM type: YTN; PAM sequence: TTA
ttctccccttatgtgctggc

SEQ ID NO: 355736 - DNA, 20 bp, Artificial Sequence
  Description of Artificial Sequence: Synthetic oligonucleotide
  Target: LAMA2; (+) strand; PAM type: YTN; PAM sequence: TTC
tccccttatgtgctggcatt

SEQ ID NO: 355737 - DNA, 20 bp, Artificial Sequence
  Description of Artificial Sequence: Synthetic oligonucleotide
  Target: LAMA2; (+) strand; PAM type: YTN; PAM sequence: CTC
cccttatgtgctggcattct

SEQ ID NO: 355738 - DNA, 20 bp, Artificial Sequence
  Description of Artificial Sequence: Synthetic oligonucleotide
  Target: LAMA2; (+) strand; PAM type: YTN; PAM sequence: CTT
atgtgctggcattcttcaac

SEQ ID NO: 355739 - DNA, 20 bp, Artificial Sequence
  Description of Artificial Sequence: Synthetic oligonucleotide
  Target: LAMA2; (+) strand; PAM type: YTN; PAM sequence: TTA
tgtgctggcattcttcaaca

SEQ ID NO: 355740 - DNA, 20 bp, Artificial Sequence
  Description of Artificial Sequence: Synthetic oligonucleotide
  Target: LAMA2; (+) strand; PAM type: YTN; PAM sequence: CTG
gcattcttcaacaagtcaag

SEQ ID NO: 355741 - DNA, 20 bp, Artificial Sequence
  Description of Artificial Sequence: Synthetic oligonucleotide
  Target: LAMA2; (+) strand; PAM type: YTN; PAM sequence: TTC
ttcaacaagtcaaggaaatg

SEQ ID NO: 355742 - DNA, 20 bp, Artificial Sequence
  Description of Artificial Sequence: Synthetic oligonucleotide
  Target: LAMA2; (+) strand; PAM type: YTN; PAM sequence: CTT
caacaagtcaaggaaatgat

SEQ ID NO: 355743 - DNA, 20 bp, Artificial Sequence
  Description of Artificial Sequence: Synthetic oligonucleotide
  Target: LAMA2; (+) strand; PAM type: YTN; PAM sequence: TTC
aacaagtcaaggaaatgata

SEQ ID NO: 355744 - DNA, 20 bp, Artificial Sequence
  Description of Artificial Sequence: Synthetic oligonucleotide
  Target: LAMA2; (+) strand; PAM type: YTN; PAM sequence: TTC
ccataggaaaaataatacag

SEQ ID NO: 355745 - DNA, 20 bp, Artificial Sequence
  Description of Artificial Sequence: Synthetic oligonucleotide
  Target: LAMA2; (+) strand; PAM type: YTN; PAM sequence: CTC
aactgaaaatgatctcatca

SEQ ID NO: 355746 - DNA, 20 bp, Artificial Sequence
  Description of Artificial Sequence: Synthetic oligonucleotide
  Target: LAMA2; (+) strand; PAM type: YTN; PAM sequence: CTG
aaaatgatctcatcacaaag

SEQ ID NO: 355747 - DNA, 20 bp, Artificial Sequence
  Description of Artificial Sequence: Synthetic oligonucleotide
  Target: LAMA2; (+) strand; PAM type: YTN; PAM sequence: CTC
atcacaaagcaagtaaagta

SEQ ID NO: 355748 - DNA, 20 bp, Artificial Sequence
  Description of Artificial Sequence: Synthetic oligonucleotide
  Target: LAMA2; (+) strand; PAM type: YTN; PAM sequence: CTA
caaaaggaaaccagtagcca

SEQ ID NO: 355749 - DNA, 20 bp, Artificial Sequence
  Description of Artificial Sequence: Synthetic oligonucleotide
  Target: LAMA2; (+) strand; PAM type: YTN; PAM sequence: TTT
gtacacaaagaactagaaag

SEQ ID NO: 355750 - DNA, 20 bp, Artificial Sequence
  Description of Artificial Sequence: Synthetic oligonucleotide
  Target: LAMA2; (+) strand; PAM type: YTN; PAM sequence: TTG
tacacaaagaactagaaagg

SEQ ID NO: 355751 - DNA, 20 bp, Artificial Sequence
  Description of Artificial Sequence: Synthetic oligonucleotide
  Target: LAMA2; (+) strand; PAM type: YTN; PAM sequence: CTA
gaaagggtagtctgaaataa

SEQ ID NO: 355752 - DNA, 20 bp, Artificial Sequence
  Description of Artificial Sequence: Synthetic oligonucleotide
  Target: LAMA2; (+) strand; PAM type: YTN; PAM sequence: CTG
aaataaatttgtattcataa

SEQ ID NO: 355753 - DNA, 20 bp, Artificial Sequence
  Description of Artificial Sequence: Synthetic oligonucleotide
  Target: LAMA2; (+) strand; PAM type: YTN; PAM sequence: TTT
gtattcataaaaatctgtga

SEQ ID NO: 355754 - DNA, 20 bp, Artificial Sequence
  Description of Artificial Sequence: Synthetic oligonucleotide
  Target: LAMA2; (+) strand; PAM type: YTN; PAM sequence: TTG
tattcataaaaatctgtgat

SEQ ID NO: 355755 - DNA, 20 bp, Artificial Sequence
  Description of Artificial Sequence: Synthetic oligonucleotide
  Target: LAMA2; (+) strand; PAM type: YTN; PAM sequence: TTC
ataaaaatctgtgatcatat

SEQ ID NO: 355756 - DNA, 20 bp, Artificial Sequence
  Description of Artificial Sequence: Synthetic oligonucleotide
  Target: LAMA2; (+) strand; PAM type: YTN; PAM sequence: CTG
tgatcatattcttatcacat

SEQ ID NO: 355757 - DNA, 20 bp, Artificial Sequence
  Description of Artificial Sequence: Synthetic oligonucleotide
  Target: LAMA2; (+) strand; PAM type: YTN; PAM sequence: TTC
ttatcacataaatcataaaa

SEQ ID NO: 355758 - DNA, 20 bp, Artificial Sequence
  Description of Artificial Sequence: Synthetic oligonucleotide
  Target: LAMA2; (+) strand; PAM type: YTN; PAM sequence: CTT
atcacataaatcataaaaat

SEQ ID NO: 355759 - DNA, 20 bp, Artificial Sequence
  Description of Artificial Sequence: Synthetic oligonucleotide
  Target: LAMA2; (+) strand; PAM type: YTN; PAM sequence: TTA
tcacataaatcataaaaata

SEQ ID NO: 355760 - DNA, 20 bp, Artificial Sequence
  Description of Artificial Sequence: Synthetic oligonucleotide
  Target: LAMA2; (+) strand; PAM type: YTN; PAM sequence: TTT
aaaatgtacaattataaaag

SEQ ID NO: 355761 - DNA, 20 bp, Artificial Sequence
  Description of Artificial Sequence: Synthetic oligonucleotide
  Target: LAMA2; (+) strand; PAM type: YTN; PAM sequence: TTA
aaatgtacaattataaaagc

SEQ ID NO: 355762 - DNA, 20 bp, Artificial Sequence
  Description of Artificial Sequence: Synthetic oligonucleotide
  Target: LAMA2; (+) strand; PAM type: YTN; PAM sequence: TTA
taaaagcatgattagaagat

SEQ ID NO: 355763 - DNA, 20 bp, Artificial Sequence
  Description of Artificial Sequence: Synthetic oligonucleotide
  Target: LAMA2; (+) strand; PAM type: YTN; PAM sequence: TTA
gaagattgaagaataaacaa

SEQ ID NO: 355764 - DNA, 20 bp, Artificial Sequence
  Description of Artificial Sequence: Synthetic oligonucleotide
  Target: LAMA2; (+) strand; PAM type: YTN; PAM sequence: TTG
aagaataaacaaagaaggaa

SEQ ID NO: 355765 - DNA, 20 bp, Artificial Sequence
  Description of Artificial Sequence: Synthetic oligonucleotide
  Target: LAMA2; (+) strand; PAM type: YTN; PAM sequence: CTA
tattaaaattcaaaagtaac

SEQ ID NO: 355766 - DNA, 20 bp, Artificial Sequence
  Description of Artificial Sequence: Synthetic oligonucleotide
  Target: LAMA2; (+) strand; PAM type: YTN; PAM sequence: TTA
aaattcaaaagtaaccaggt

SEQ ID NO: 355767 - DNA, 20 bp, Artificial Sequence
  Description of Artificial Sequence: Synthetic oligonucleotide
  Target: LAMA2; (+) strand; PAM type: YTN; PAM sequence: TTC
aaaagtaaccaggtttggaa

SEQ ID NO: 355768 - DNA, 20 bp, Artificial Sequence
  Description of Artificial Sequence: Synthetic oligonucleotide
  Target: LAMA2; (+) strand; PAM type: YTN; PAM sequence: TTT
ggaaaagaaacatgtataat

SEQ ID NO: 355769 - DNA, 20 bp, Artificial Sequence
  Description of Artificial Sequence: Synthetic oligonucleotide
  Target: LAMA2; (+) strand; PAM type: YTN; PAM sequence: TTG
gaaaagaaacatgtataatt

SEQ ID NO: 355770 - DNA, 20 bp, Artificial Sequence
  Description of Artificial Sequence: Synthetic oligonucleotide
  Target: LAMA2; (+) strand; PAM type: YTN; PAM sequence: TTT
acttccagaaatgaaaaaaa

SEQ ID NO: 355771 - DNA, 20 bp, Artificial Sequence
  Description of Artificial Sequence: Synthetic oligonucleotide
  Target: LAMA2; (+) strand; PAM type: YTN; PAM sequence: TTA
cttccagaaatgaaaaaaat

SEQ ID NO: 355772 - DNA, 20 bp, Artificial Sequence
  Description of Artificial Sequence: Synthetic oligonucleotide
  Target: LAMA2; (+) strand; PAM type: YTN; PAM sequence: CTT
ccagaaatgaaaaaaatatg

SEQ ID NO: 355773 - DNA, 20 bp, Artificial Sequence
  Description of Artificial Sequence: Synthetic oligonucleotide
  Target: LAMA2; (+) strand; PAM type: YTN; PAM sequence: TTC
cagaaatgaaaaaaatatgc

SEQ ID NO: 355774 - DNA, 20 bp, Artificial Sequence
  Description of Artificial Sequence: Synthetic oligonucleotide
  Target: LAMA2; (+) strand; PAM type: YTN; PAM sequence: TTG
aaattaaaaattcaatgatt

SEQ ID NO: 355775 - DNA, 20 bp, Artificial Sequence
  Description of Artificial Sequence: Synthetic oligonucleotide
  Target: LAMA2; (+) strand; PAM type: YTN; PAM sequence: TTA
aaaattcaatgattgggtta

SEQ ID NO: 355776 - DNA, 20 bp, Artificial Sequence
  Description of Artificial Sequence: Synthetic oligonucleotide
  Target: LAMA2; (+) strand; PAM type: YTN; PAM sequence: TTC
aatgattgggttaaacaaga

SEQ ID NO: 355777 - DNA, 20 bp, Artificial Sequence
  Description of Artificial Sequence: Synthetic oligonucleotide
  Target: LAMA2; (+) strand; PAM type: YTN; PAM sequence: TTG
ggttaaacaagagatgagaa

SEQ ID NO: 355778 - DNA, 20 bp, Artificial Sequence
  Description of Artificial Sequence: Synthetic oligonucleotide
  Target: LAMA2; (+) strand; PAM type: YTN; PAM sequence: TTA
aacaagagatgagaaactgc

SEQ ID NO: 355779 - DNA, 20 bp, Artificial Sequence
  Description of Artificial Sequence: Synthetic oligonucleotide
  Target: LAMA2; (+) strand; PAM type: YTN; PAM sequence: CTG
caggatagaaaatcagaaat

SEQ ID NO: 355780 - DNA, 20 bp, Artificial Sequence
  Description of Artificial Sequence: Synthetic oligonucleotide
  Target: LAMA2; (+) strand; PAM type: YTN; PAM sequence: CTG
aaaaaattacctataaattg

SEQ ID NO: 355781 - DNA, 20 bp, Artificial Sequence
  Description of Artificial Sequence: Synthetic oligonucleotide
  Target: LAMA2; (+) strand; PAM type: YTN; PAM sequence: TTA
cctataaattgacataggga

SEQ ID NO: 355782 - DNA, 20 bp, Artificial Sequence
  Description of Artificial Sequence: Synthetic oligonucleotide
  Target: LAMA2; (+) strand; PAM type: YTN; PAM sequence: CTA
taaattgacatagggaagta

SEQ ID NO: 355783 - DNA, 20 bp, Artificial Sequence
  Description of Artificial Sequence: Synthetic oligonucleotide
  Target: LAMA2; (+) strand; PAM type: YTN; PAM sequence: TTG
acatagggaagtaaataaat

SEQ ID NO: 355784 - DNA, 20 bp, Artificial Sequence
  Description of Artificial Sequence: Synthetic oligonucleotide
  Target: LAMA2; (+) strand; PAM type: YTN; PAM sequence: CTA
actgactcacagaattgtaa

SEQ ID NO: 355785 - DNA, 20 bp, Artificial Sequence
  Description of Artificial Sequence: Synthetic oligonucleotide
  Target: LAMA2; (+) strand; PAM type: YTN; PAM sequence: CTG
actcacagaattgtaaaatt

SEQ ID NO: 355786 - DNA, 20 bp, Artificial Sequence
  Description of Artificial Sequence: Synthetic oligonucleotide
  Target: LAMA2; (+) strand; PAM type: YTN; PAM sequence: CTC
acagaattgtaaaattgaac

SEQ ID NO: 355787 - DNA, 20 bp, Artificial Sequence
  Description of Artificial Sequence: Synthetic oligonucleotide
  Target: LAMA2; (+) strand; PAM type: YTN; PAM sequence: TTG
taaaattgaacagaagttta

SEQ ID NO: 355788 - DNA, 20 bp, Artificial Sequence
  Description of Artificial Sequence: Synthetic oligonucleotide
  Target: LAMA2; (+) strand; PAM type: YTN; PAM sequence: TTG
aacagaagtttagcagaagt

SEQ ID NO: 355789 - DNA, 20 bp, Artificial Sequence
  Description of Artificial Sequence: Synthetic oligonucleotide
  Target: LAMA2; (+) strand; PAM type: YTN; PAM sequence: TTT
agcagaagttgccaaagaag

SEQ ID NO: 355790 - DNA, 20 bp, Artificial Sequence
  Description of Artificial Sequence: Synthetic oligonucleotide
  Target: LAMA2; (+) strand; PAM type: YTN; PAM sequence: TTA
gcagaagttgccaaagaaga

SEQ ID NO: 355791 - DNA, 20 bp, Artificial Sequence
  Description of Artificial Sequence: Synthetic oligonucleotide
  Target: LAMA2; (+) strand; PAM type: YTN; PAM sequence: TTG
ccaaagaagagattagaaga

SEQ ID NO: 355792 - DNA, 20 bp, Artificial Sequence
  Description of Artificial Sequence: Synthetic oligonucleotide
  Target: LAMA2; (+) strand; PAM type: YTN; PAM sequence: TTA
gaagaagttgagggaaacaa

SEQ ID NO: 355793 - DNA, 20 bp, Artificial Sequence
  Description of Artificial Sequence: Synthetic oligonucleotide
  Target: LAMA2; (+) strand; PAM type: YTN; PAM sequence: TTG
agggaaacaatattcaaaaa

SEQ ID NO: 355794 - DNA, 20 bp, Artificial Sequence
  Description of Artificial Sequence: Synthetic oligonucleotide
  Target: LAMA2; (+) strand; PAM type: YTN; PAM sequence: TTC
aaaaaaataatgaaggagag

SEQ ID NO: 355795 - DNA, 20 bp, Artificial Sequence
  Description of Artificial Sequence: Synthetic oligonucleotide
  Target: LAMA2; (+) strand; PAM type: YTN; PAM sequence: TTA
aaaactattataaatcctca

SEQ ID NO: 355796 - DNA, 20 bp, Artificial Sequence
  Description of Artificial Sequence: Synthetic oligonucleotide
  Target: LAMA2; (+) strand; PAM type: YTN; PAM sequence: CTA
ttataaatcctcagtttgag

SEQ ID NO: 355797 - DNA, 20 bp, Artificial Sequence
  Description of Artificial Sequence: Synthetic oligonucleotide
  Target: LAMA2; (+) strand; PAM type: YTN; PAM sequence: TTA
taaatcctcagtttgaggat

SEQ ID NO: 355798 - DNA, 20 bp, Artificial Sequence
  Description of Artificial Sequence: Synthetic oligonucleotide
  Target: LAMA2; (+) strand; PAM type: YTN; PAM sequence: CTC
agtttgaggatgataaaaaa

SEQ ID NO: 355799 - DNA, 20 bp, Artificial Sequence
  Description of Artificial Sequence: Synthetic oligonucleotide
  Target: LAMA2; (+) strand; PAM type: YTN; PAM sequence: TTT
gaggatgataaaaaataagt

SEQ ID NO: 355800 - DNA, 20 bp, Artificial Sequence
  Description of Artificial Sequence: Synthetic oligonucleotide
  Target: LAMA2; (+) strand; PAM type: YTN; PAM sequence: TTG
aggatgataaaaaataagtc

SEQ ID NO: 355801 - DNA, 20 bp, Artificial Sequence
  Description of Artificial Sequence: Synthetic oligonucleotide
  Target: LAMA2; (+) strand; PAM type: YTN; PAM sequence: CTA
cccctagtagaaaacctgtc

SEQ ID NO: 355802 - DNA, 20 bp, Artificial Sequence
  Description of Artificial Sequence: Synthetic oligonucleotide
  Target: LAMA2; (+) strand; PAM type: YTN; PAM sequence: CTA
gtagaaaacctgtcaaccag

SEQ ID NO: 355803 - DNA, 20 bp, Artificial Sequence
  Description of Artificial Sequence: Synthetic oligonucleotide
  Target: LAMA2; (+) strand; PAM type: YTN; PAM sequence: CTG
tcaaccagcaagacaaagag

SEQ ID NO: 355804 - DNA, 20 bp, Artificial Sequence
  Description of Artificial Sequence: Synthetic oligonucleotide
  Target: LAMA2; (+) strand; PAM type: YTN; PAM sequence: TTA
aaactgggggcaaatatctt

SEQ ID NO: 355805 - DNA, 20 bp, Artificial Sequence
  Description of Artificial Sequence: Synthetic oligonucleotide
  Target: LAMA2; (+) strand; PAM type: YTN; PAM sequence: CTG
ggggcaaatatctttattgt

SEQ ID NO: 355806 - DNA, 20 bp, Artificial Sequence
  Description of Artificial Sequence: Synthetic oligonucleotide
  Target: LAMA2; (+) strand; PAM type: YTN; PAM sequence: CTT
tattgtgagtgtttaccact

SEQ ID NO: 355807 - DNA, 20 bp, Artificial Sequence
  Description of Artificial Sequence: Synthetic oligonucleotide
  Target: LAMA2; (+) strand; PAM type: YTN; PAM sequence: TTT
attgtgagtgtttaccactc

SEQ ID NO: 355808 - DNA, 20 bp, Artificial Sequence
  Description of Artificial Sequence: Synthetic oligonucleotide
  Target: LAMA2; (+) strand; PAM type: YTN; PAM sequence: TTA
ttgtgagtgtttaccactca

SEQ ID NO: 355809 - DNA, 20 bp, Artificial Sequence
  Description of Artificial Sequence: Synthetic oligonucleotide
  Target: LAMA2; (+) strand; PAM type: YTN; PAM sequence: TTG
tgagtgtttaccactcacag

SEQ ID NO: 355810 - DNA, 20 bp, Artificial Sequence
  Description of Artificial Sequence: Synthetic oligonucleotide
  Target: LAMA2; (+) strand; PAM type: YTN; PAM sequence: TTT
accactcacagtccaacttc

SEQ ID NO: 355811 - DNA, 20 bp, Artificial Sequence
  Description of Artificial Sequence: Synthetic oligonucleotide
  Target: LAMA2; (+) strand; PAM type: YTN; PAM sequence: TTA
ccactcacagtccaacttca

SEQ ID NO: 355812 - DNA, 20 bp, Artificial Sequence
  Description of Artificial Sequence: Synthetic oligonucleotide
  Target: LAMA2; (+) strand; PAM type: YTN; PAM sequence: CTC
acagtccaacttcatggaaa

SEQ ID NO: 355813 - DNA, 20 bp, Artificial Sequence
  Description of Artificial Sequence: Synthetic oligonucleotide
  Target: LAMA2; (+) strand; PAM type: YTN; PAM sequence: CTT
catggaaagaatattaaata

SEQ ID NO: 355814 - DNA, 20 bp, Artificial Sequence
  Description of Artificial Sequence: Synthetic oligonucleotide
  Target: LAMA2; (+) strand; PAM type: YTN; PAM sequence: TTC
atggaaagaatattaaataa

SEQ ID NO: 355815 - DNA, 20 bp, Artificial Sequence
  Description of Artificial Sequence: Synthetic oligonucleotide
  Target: LAMA2; (+) strand; PAM type: YTN; PAM sequence: TTA
aataatatatgtcctttagt

SEQ ID NO: 355816 - DNA, 20 bp, Artificial Sequence
  Description of Artificial Sequence: Synthetic oligonucleotide
  Target: LAMA2; (+) strand; PAM type: YTN; PAM sequence: CTT
tagtaagaatattgaaccca

SEQ ID NO: 355817 - DNA, 20 bp, Artificial Sequence
  Description of Artificial Sequence: Synthetic oligonucleotide
  Target: LAMA2; (+) strand; PAM type: YTN; PAM sequence: TTT
agtaagaatattgaacccat

SEQ ID NO: 355818 - DNA, 20 bp, Artificial Sequence
  Description of Artificial Sequence: Synthetic oligonucleotide
  Target: LAMA2; (+) strand; PAM type: YTN; PAM sequence: TTA
gtaagaatattgaacccata

SEQ ID NO: 355819 - DNA, 20 bp, Artificial Sequence
  Description of Artificial Sequence: Synthetic oligonucleotide
  Target: LAMA2; (+) strand; PAM type: YTN; PAM sequence: TTG
aacccataagacagtttcac

SEQ ID NO: 355820 - DNA, 20 bp, Artificial Sequence
  Description of Artificial Sequence: Synthetic oligonucleotide
  Target: LAMA2; (+) strand; PAM type: YTN; PAM sequence: TTT
cactagattatagtccagaa

SEQ ID NO: 355821 - DNA, 20 bp, Artificial Sequence
  Description of Artificial Sequence: Synthetic oligonucleotide
  Target: LAMA2; (+) strand; PAM type: YTN; PAM sequence: TTC
actagattatagtccagaag

SEQ ID NO: 355822 - DNA, 20 bp, Artificial Sequence
  Description of Artificial Sequence: Synthetic oligonucleotide
  Target: LAMA2; (+) strand; PAM type: YTN; PAM sequence: CTA
gattatagtccagaagaatc

SEQ ID NO: 355823 - DNA, 20 bp, Artificial Sequence
  Description of Artificial Sequence: Synthetic oligonucleotide
  Target: LAMA2; (+) strand; PAM type: YTN; PAM sequence: TTA
tagtccagaagaatcaatct

SEQ ID NO: 355824 - DNA, 20 bp, Artificial Sequence
  Description of Artificial Sequence: Synthetic oligonucleotide
  Target: LAMA2; (+) strand; PAM type: YTN; PAM sequence: CTA
taaaaagcagtagtatttct

SEQ ID NO: 355825 - DNA, 20 bp, Artificial Sequence
  Description of Artificial Sequence: Synthetic oligonucleotide
  Target: LAMA2; (+) strand; PAM type: YTN; PAM sequence: TTT
ctatatgtcagtgacaagca

SEQ ID NO: 355826 - DNA, 20 bp, Artificial Sequence
  Description of Artificial Sequence: Synthetic oligonucleotide
  Target: LAMA2; (+) strand; PAM type: YTN; PAM sequence: TTC
tatatgtcagtgacaagcaa

SEQ ID NO: 355827 - DNA, 20 bp, Artificial Sequence
  Description of Artificial Sequence: Synthetic oligonucleotide
  Target: LAMA2; (+) strand; PAM type: YTN; PAM sequence: CTA
tatgtcagtgacaagcaaat

SEQ ID NO: 355828 - DNA, 20 bp, Artificial Sequence
  Description of Artificial Sequence: Synthetic oligonucleotide
  Target: LAMA2; (+) strand; PAM type: YTN; PAM sequence: CTT
agaatagcaagaaaaacttc

SEQ ID NO: 355829 - DNA, 20 bp, Artificial Sequence
  Description of Artificial Sequence: Synthetic oligonucleotide
  Target: LAMA2; (+) strand; PAM type: YTN; PAM sequence: TTA
gaatagcaagaaaaacttca

SEQ ID NO: 355830 - DNA, 20 bp, Artificial Sequence
  Description of Artificial Sequence: Synthetic oligonucleotide
  Target: LAMA2; (+) strand; PAM type: YTN; PAM sequence: CTT
catgatacctaaaaataagt

SEQ ID NO: 355831 - DNA, 20 bp, Artificial Sequence
  Description of Artificial Sequence: Synthetic oligonucleotide
  Target: LAMA2; (+) strand; PAM type: YTN; PAM sequence: TTC
atgatacctaaaaataagtg

SEQ ID NO: 355832 - DNA, 20 bp, Artificial Sequence
  Description of Artificial Sequence: Synthetic oligonucleotide
  Target: LAMA2; (+) strand; PAM type: YTN; PAM sequence: CTA
aaaataagtgtttgtaaaat

SEQ ID NO: 355833 - DNA, 20 bp, Artificial Sequence
  Description of Artificial Sequence: Synthetic oligonucleotide
  Target: LAMA2; (+) strand; PAM type: YTN; PAM sequence: TTT
gtaaaattgagataattttt

SEQ ID NO: 355834 - DNA, 20 bp, Artificial Sequence
  Description of Artificial Sequence: Synthetic oligonucleotide
  Target: LAMA2; (+) strand; PAM type: YTN; PAM sequence: TTG
taaaattgagataattttta

SEQ ID NO: 355835 - DNA, 20 bp, Artificial Sequence
  Description of Artificial Sequence: Synthetic oligonucleotide
  Target: LAMA2; (+) strand; PAM type: YTN; PAM sequence: TTG
agataatttttaaaggttat

SEQ ID NO: 355836 - DNA, 20 bp, Artificial Sequence
  Description of Artificial Sequence: Synthetic oligonucleotide
  Target: LAMA2; (+) strand; PAM type: YTN; PAM sequence: TTT
ttaaaggttattgaagaaca

SEQ ID NO: 355837 - DNA, 20 bp, Artificial Sequence
  Description of Artificial Sequence: Synthetic oligonucleotide
  Target: LAMA2; (+) strand; PAM type: YTN; PAM sequence: TTT
taaaggttattgaagaacat

SEQ ID NO: 355838 - DNA, 20 bp, Artificial Sequence
  Description of Artificial Sequence: Synthetic oligonucleotide
  Target: LAMA2; (+) strand; PAM type: YTN; PAM sequence: TTT
aaaggttattgaagaacata

SEQ ID NO: 355839 - DNA, 20 bp, Artificial Sequence
  Description of Artificial Sequence: Synthetic oligonucleotide
  Target: LAMA2; (+) strand; PAM type: YTN; PAM sequence: TTA
aaggttattgaagaacataa

SEQ ID NO: 355840 - DNA, 20 bp, Artificial Sequence
  Description of Artificial Sequence: Synthetic oligonucleotide
  Target: LAMA2; (+) strand; PAM type: YTN; PAM sequence: TTA
ttgaagaacataaaattcta

SEQ ID NO: 355841 - DNA, 20 bp, Artificial Sequence
  Description of Artificial Sequence: Synthetic oligonucleotide
  Target: LAMA2; (+) strand; PAM type: YTN; PAM sequence: TTG
aagaacataaaattctaaat

SEQ ID NO: 355842 - DNA, 20 bp, Artificial Sequence
  Description of Artificial Sequence: Synthetic oligonucleotide
  Target: LAMA2; (+) strand; PAM type: YTN; PAM sequence: TTC
taaatgaggagacagctgag

SEQ ID NO: 355843 - DNA, 20 bp, Artificial Sequence
  Description of Artificial Sequence: Synthetic oligonucleotide
  Target: LAMA2; (+) strand; PAM type: YTN; PAM sequence: CTA
aatgaggagacagctgagga

SEQ ID NO: 355844 - DNA, 20 bp, Artificial Sequence
  Description of Artificial Sequence: Synthetic oligonucleotide
  Target: LAMA2; (+) strand; PAM type: YTN; PAM sequence: CTG
aggatcaccaagtaccagtg

SEQ ID NO: 355845 - DNA, 20 bp, Artificial Sequence
  Description of Artificial Sequence: Synthetic oligonucleotide
  Target: LAMA2; (+) strand; PAM type: YTN; PAM sequence: CTG
tgaaatttgaaatgtttacc

SEQ ID NO: 355846 - DNA, 20 bp, Artificial Sequence
  Description of Artificial Sequence: Synthetic oligonucleotide
  Target: LAMA2; (+) strand; PAM type: YTN; PAM sequence: TTT
gaaatgtttaccatttctat

SEQ ID NO: 355847 - DNA, 20 bp, Artificial Sequence
  Description of Artificial Sequence: Synthetic oligonucleotide
  Target: LAMA2; (+) strand; PAM type: YTN; PAM sequence: TTG
aaatgtttaccatttctatt

SEQ ID NO: 355848 - DNA, 20 bp, Artificial Sequence
  Description of Artificial Sequence: Synthetic oligonucleotide
  Target: LAMA2; (+) strand; PAM type: YTN; PAM sequence: TTT
accatttctattaatagagt

SEQ ID NO: 355849 - DNA, 20 bp, Artificial Sequence
  Description of Artificial Sequence: Synthetic oligonucleotide
  Target: LAMA2; (+) strand; PAM type: YTN; PAM sequence: TTA
ccatttctattaatagagtt

SEQ ID NO: 355850 - DNA, 20 bp, Artificial Sequence
  Description of Artificial Sequence: Synthetic oligonucleotide
  Target: LAMA2; (+) strand; PAM type: YTN; PAM sequence: TTT
ctattaatagagttaattag

SEQ ID NO: 355851 - DNA, 20 bp, Artificial Sequence
  Description of Artificial Sequence: Synthetic oligonucleotide
  Target: LAMA2; (+) strand; PAM type: YTN; PAM sequence: TTC
tattaatagagttaattagt

SEQ ID NO: 355852 - DNA, 20 bp, Artificial Sequence
  Description of Artificial Sequence: Synthetic oligonucleotide
  Target: LAMA2; (+) strand; PAM type: YTN; PAM sequence: CTA
ttaatagagttaattagtac

SEQ ID NO: 355853 - DNA, 20 bp, Artificial Sequence
  Description of Artificial Sequence: Synthetic oligonucleotide
  Target: LAMA2; (+) strand; PAM type: YTN; PAM sequence: TTA
atagagttaattagtaccac

SEQ ID NO: 355854 - DNA, 20 bp, Artificial Sequence
  Description of Artificial Sequence: Synthetic oligonucleotide
  Target: LAMA2; (+) strand; PAM type: YTN; PAM sequence: TTA
attagtaccacaatttagga

SEQ ID NO: 355855 - DNA, 20 bp, Artificial Sequence
  Description of Artificial Sequence: Synthetic oligonucleotide
  Target: LAMA2; (+) strand; PAM type: YTN; PAM sequence: TTA
gtaccacaatttaggagggc

SEQ ID NO: 355856 - DNA, 20 bp, Artificial Sequence
  Description of Artificial Sequence: Synthetic oligonucleotide
  Target: LAMA2; (+) strand; PAM type: YTN; PAM sequence: TTT
aggagggcaatatggtatta

SEQ ID NO: 355857 - DNA, 20 bp, Artificial Sequence
  Description of Artificial Sequence: Synthetic oligonucleotide
  Target: LAMA2; (+) strand; PAM type: YTN; PAM sequence: TTA
ggagggcaatatggtattat

SEQ ID NO: 355858 - DNA, 20 bp, Artificial Sequence
  Description of Artificial Sequence: Synthetic oligonucleotide
  Target: LAMA2; (+) strand; PAM type: YTN; PAM sequence: TTA
tctagtatctttgaaggtga

SEQ ID NO: 355859 - DNA, 20 bp, Artificial Sequence
  Description of Artificial Sequence: Synthetic oligonucleotide
  Target: LAMA2; (+) strand; PAM type: YTN; PAM sequence: CTA
gtatctttgaaggtgataaa

SEQ ID NO: 355860 - DNA, 20 bp, Artificial Sequence
  Description of Artificial Sequence: Synthetic oligonucleotide
  Target: LAMA2; (+) strand; PAM type: YTN; PAM sequence: CTT
tgaaggtgataaaaccctgt

SEQ ID NO: 355861 - DNA, 20 bp, Artificial Sequence
  Description of Artificial Sequence: Synthetic oligonucleotide
  Target: LAMA2; (+) strand; PAM type: YTN; PAM sequence: TTT
gaaggtgataaaaccctgtc

SEQ ID NO: 355862 - DNA, 20 bp, Artificial Sequence
  Description of Artificial Sequence: Synthetic oligonucleotide
  Target: LAMA2; (+) strand; PAM type: YTN; PAM sequence: TTG
aaggtgataaaaccctgtca

SEQ ID NO: 355863 - DNA, 20 bp, Artificial Sequence
  Description of Artificial Sequence: Synthetic oligonucleotide
  Target: LAMA2; (+) strand; PAM type: YTN; PAM sequence: CTG
tcaaccagcaattccacatc

SEQ ID NO: 355864 - DNA, 20 bp, Artificial Sequence
  Description of Artificial Sequence: Synthetic oligonucleotide
  Target: LAMA2; (+) strand; PAM type: YTN; PAM sequence: TTC
cacatccaaacatttacccc

SEQ ID NO: 355865 - DNA, 20 bp, Artificial Sequence
  Description of Artificial Sequence: Synthetic oligonucleotide
  Target: LAMA2; (+) strand; PAM type: YTN; PAM sequence: TTT
accccaaaaaactcttacaa

SEQ ID NO: 355866 - DNA, 20 bp, Artificial Sequence
  Description of Artificial Sequence: Synthetic oligonucleotide
  Target: LAMA2; (+) strand; PAM type: YTN; PAM sequence: TTA
ccccaaaaaactcttacaat

SEQ ID NO: 355867 - DNA, 20 bp, Artificial Sequence
  Description of Artificial Sequence: Synthetic oligonucleotide
  Target: LAMA2; (+) strand; PAM type: YTN; PAM sequence: CTC
ttacaatgtatagagaaaaa

SEQ ID NO: 355868 - DNA, 20 bp, Artificial Sequence
  Description of Artificial Sequence: Synthetic oligonucleotide
  Target: LAMA2; (+) strand; PAM type: YTN; PAM sequence: CTT
acaatgtatagagaaaaacc

SEQ ID NO: 355869 - DNA, 20 bp, Artificial Sequence
  Description of Artificial Sequence: Synthetic oligonucleotide
  Target: LAMA2; (+) strand; PAM type: YTN; PAM sequence: TTA
caatgtatagagaaaaacca

SEQ ID NO: 355870 - DNA, 20 bp, Artificial Sequence
  Description of Artificial Sequence: Synthetic oligonucleotide
  Target: LAMA2; (+) strand; PAM type: YTN; PAM sequence: CTA
aaatgtgctcaacgtaaatg

SEQ ID NO: 355871 - DNA, 20 bp, Artificial Sequence
  Description of Artificial Sequence: Synthetic oligonucleotide
  Target: LAMA2; (+) strand; PAM type: YTN; PAM sequence: CTC
aacgtaaatgtacttactat

SEQ ID NO: 355872 - DNA, 20 bp, Artificial Sequence
  Description of Artificial Sequence: Synthetic oligonucleotide
  Target: LAMA2; (+) strand; PAM type: YTN; PAM sequence: CTT
actatgatgaaaatgagaaa

SEQ ID NO: 355873 - DNA, 20 bp, Artificial Sequence
  Description of Artificial Sequence: Synthetic oligonucleotide
  Target: LAMA2; (+) strand; PAM type: YTN; PAM sequence: TTA
ctatgatgaaaatgagaaaa

SEQ ID NO: 355874 - DNA, 20 bp, Artificial Sequence
  Description of Artificial Sequence: Synthetic oligonucleotide
  Target: LAMA2; (+) strand; PAM type: YTN; PAM sequence: CTA
tgatgaaaatgagaaaaata

SEQ ID NO: 355875 - DNA, 20 bp, Artificial Sequence
  Description of Artificial Sequence: Synthetic oligonucleotide
  Target: LAMA2; (+) strand; PAM type: YTN; PAM sequence: TTG
tagtgtttcctttaatctga

SEQ ID NO: 355876 - DNA, 20 bp, Artificial Sequence
  Description of Artificial Sequence: Synthetic oligonucleotide
  Target: LAMA2; (+) strand; PAM type: YTN; PAM sequence: TTT
cctttaatctgataaaagaa

SEQ ID NO: 355877 - DNA, 20 bp, Artificial Sequence
  Description of Artificial Sequence: Synthetic oligonucleotide
  Target: LAMA2; (+) strand; PAM type: YTN; PAM sequence: TTC
ctttaatctgataaaagaaa

SEQ ID NO: 355878 - DNA, 20 bp, Artificial Sequence
  Description of Artificial Sequence: Synthetic oligonucleotide
  Target: LAMA2; (+) strand; PAM type: YTN; PAM sequence: CTT
taatctgataaaagaaacag

SEQ ID NO: 355879 - DNA, 20 bp, Artificial Sequence
  Description of Artificial Sequence: Synthetic oligonucleotide
  Target: LAMA2; (+) strand; PAM type: YTN; PAM sequence: TTT
aatctgataaaagaaacagt

SEQ ID NO: 355880 - DNA, 20 bp, Artificial Sequence
  Description of Artificial Sequence: Synthetic oligonucleotide
  Target: LAMA2; (+) strand; PAM type: YTN; PAM sequence: TTA
atctgataaaagaaacagtt

SEQ ID NO: 355881 - DNA, 20 bp, Artificial Sequence
  Description of Artificial Sequence: Synthetic oligonucleotide
  Target: LAMA2; (+) strand; PAM type: YTN; PAM sequence: CTG
ataaaagaaacagttaaagt

SEQ ID NO: 355882 - DNA, 20 bp, Artificial Sequence
  Description of Artificial Sequence: Synthetic oligonucleotide
  Target: LAMA2; (+) strand; PAM type: YTN; PAM sequence: TTA
aagtggttgaaatagatctt

SEQ ID NO: 355883 - DNA, 20 bp, Artificial Sequence
  Description of Artificial Sequence: Synthetic oligonucleotide
  Target: LAMA2; (+) strand; PAM type: YTN; PAM sequence: TTG
aaatagatcttcatgtataa

SEQ ID NO: 355884 - DNA, 20 bp, Artificial Sequence
  Description of Artificial Sequence: Synthetic oligonucleotide
  Target: LAMA2; (+) strand; PAM type: YTN; PAM sequence: CTT
catgtataaaccatgataaa

SEQ ID NO: 355885 - DNA, 20 bp, Artificial Sequence
  Description of Artificial Sequence: Synthetic oligonucleotide
  Target: LAMA2; (+) strand; PAM type: YTN; PAM sequence: TTC
atgtataaaccatgataaat

SEQ ID NO: 355886 - DNA, 20 bp, Artificial Sequence
  Description of Artificial Sequence: Synthetic oligonucleotide
  Target: LAMA2; (+) strand; PAM type: YTN; PAM sequence: TTT
cagaaacttcaggtggaaaa

SEQ ID NO: 355887 - DNA, 20 bp, Artificial Sequence
  Description of Artificial Sequence: Synthetic oligonucleotide
  Target: LAMA2; (+) strand; PAM type: YTN; PAM sequence: TTC
agaaacttcaggtggaaaaa

SEQ ID NO: 355888 - DNA, 20 bp, Artificial Sequence
  Description of Artificial Sequence: Synthetic oligonucleotide
  Target: LAMA2; (+) strand; PAM type: YTN; PAM sequence: CTT
caggtggaaaaaacaatgtc

SEQ ID NO: 355889 - DNA, 20 bp, Artificial Sequence
  Description of Artificial Sequence: Synthetic oligonucleotide
  Target: LAMA2; (+) strand; PAM type: YTN; PAM sequence: TTC
aggtggaaaaaacaatgtca

SEQ ID NO: 355890 - DNA, 20 bp, Artificial Sequence
  Description of Artificial Sequence: Synthetic oligonucleotide
  Target: LAMA2; (+) strand; PAM type: YTN; PAM sequence: TTA
tggtattatttatatcaagt

SEQ ID NO: 355891 - DNA, 20 bp, Artificial Sequence
  Description of Artificial Sequence: Synthetic oligonucleotide
  Target: LAMA2; (+) strand; PAM type: YTN; PAM sequence: TTA
tttatatcaagttgtaaaac

SEQ ID NO: 355892 - DNA, 20 bp, Artificial Sequence
  Description of Artificial Sequence: Synthetic oligonucleotide
  Target: LAMA2; (+) strand; PAM type: YTN; PAM sequence: TTT
atatcaagttgtaaaacata

SEQ ID NO: 355893 - DNA, 20 bp, Artificial Sequence
  Description of Artificial Sequence: Synthetic oligonucleotide
  Target: LAMA2; (+) strand; PAM type: YTN; PAM sequence: TTA
tatcaagttgtaaaacataa

SEQ ID NO: 355894 - DNA, 20 bp, Artificial Sequence
  Description of Artificial Sequence: Synthetic oligonucleotide
  Target: LAMA2; (+) strand; PAM type: YTN; PAM sequence: TTG
taaaacataaaacaatgcta

SEQ ID NO: 355895 - DNA, 20 bp, Artificial Sequence
  Description of Artificial Sequence: Synthetic oligonucleotide
  Target: LAMA2; (+) strand; PAM type: YTN; PAM sequence: CTA
cattgtttgtgaatacatat

SEQ ID NO: 355896 - DNA, 20 bp, Artificial Sequence
  Description of Artificial Sequence: Synthetic oligonucleotide
  Target: LAMA2; (+) strand; PAM type: YTN; PAM sequence: TTG
tttgtgaatacatatattat

SEQ ID NO: 355897 - DNA, 20 bp, Artificial Sequence
  Description of Artificial Sequence: Synthetic oligonucleotide
  Target: LAMA2; (+) strand; PAM type: YTN; PAM sequence: TTT
gtgaatacatatattataat

SEQ ID NO: 355898 - DNA, 20 bp, Artificial Sequence
  Description of Artificial Sequence: Synthetic oligonucleotide
  Target: LAMA2; (+) strand; PAM type: YTN; PAM sequence: TTG
tgaatacatatattataatt

SEQ ID NO: 355899 - DNA, 20 bp, Artificial Sequence
  Description of Artificial Sequence: Synthetic oligonucleotide
  Target: LAMA2; (+) strand; PAM type: YTN; PAM sequence: TTA
taattaaaaaatttaaatac

SEQ ID NO: 355900 - DNA, 20 bp, Artificial Sequence
  Description of Artificial Sequence: Synthetic oligonucleotide
  Target: LAMA2; (+) strand; PAM type: YTN; PAM sequence: TTA
aaaaatttaaatacacttgt

SEQ ID NO: 355901 - DNA, 20 bp, Artificial Sequence
  Description of Artificial Sequence: Synthetic oligonucleotide
  Target: LAMA2; (+) strand; PAM type: YTN; PAM sequence: TTT
aaatacacttgtagggtaag

SEQ ID NO: 355902 - DNA, 20 bp, Artificial Sequence
  Description of Artificial Sequence: Synthetic oligonucleotide
  Target: LAMA2; (+) strand; PAM type: YTN; PAM sequence: TTA
aatacacttgtagggtaagt

SEQ ID NO: 355903 - DNA, 20 bp, Artificial Sequence
  Description of Artificial Sequence: Synthetic oligonucleotide
  Target: LAMA2; (+) strand; PAM type: YTN; PAM sequence: CTT
gtagggtaagtactaatttc

SEQ ID NO: 355904 - DNA, 20 bp, Artificial Sequence
  Description of Artificial Sequence: Synthetic oligonucleotide
  Target: LAMA2; (+) strand; PAM type: YTN; PAM sequence: TTG
tagggtaagtactaatttca

SEQ ID NO: 355905 - DNA, 20 bp, Artificial Sequence
  Description of Artificial Sequence: Synthetic oligonucleotide
  Target: LAMA2; (+) strand; PAM type: YTN; PAM sequence: CTA
atttcagaatagtagttacc

SEQ ID NO: 355906 - DNA, 20 bp, Artificial Sequence
  Description of Artificial Sequence: Synthetic oligonucleotide
  Target: LAMA2; (+) strand; PAM type: YTN; PAM sequence: TTT
cagaatagtagttacctcta

SEQ ID NO: 355907 - DNA, 20 bp, Artificial Sequence
  Description of Artificial Sequence: Synthetic oligonucleotide
  Target: LAMA2; (+) strand; PAM type: YTN; PAM sequence: TTC
agaatagtagttacctctag

SEQ ID NO: 355908 - DNA, 20 bp, Artificial Sequence
  Description of Artificial Sequence: Synthetic oligonucleotide
  Target: LAMA2; (+) strand; PAM type: YTN; PAM sequence: TTA
cctctagagaaacaggaaag

SEQ ID NO: 355909 - DNA, 20 bp, Artificial Sequence
  Description of Artificial Sequence: Synthetic oligonucleotide
  Target: LAMA2; (+) strand; PAM type: YTN; PAM sequence: CTC
tagagaaacaggaaagggaa

SEQ ID NO: 355910 - DNA, 20 bp, Artificial Sequence
  Description of Artificial Sequence: Synthetic oligonucleotide
  Target: LAMA2; (+) strand; PAM type: YTN; PAM sequence: CTA
gagaaacaggaaagggaata

SEQ ID NO: 355911 - DNA, 20 bp, Artificial Sequence
  Description of Artificial Sequence: Synthetic oligonucleotide
  Target: LAMA2; (+) strand; PAM type: YTN; PAM sequence: TTC
atttgtatctaagtatcatt

SEQ ID NO: 355912 - DNA, 20 bp, Artificial Sequence
  Description of Artificial Sequence: Synthetic oligonucleotide
  Target: LAMA2; (+) strand; PAM type: YTN; PAM sequence: TTT
gtatctaagtatcattgctt

SEQ ID NO: 355913 - DNA, 20 bp, Artificial Sequence
  Description of Artificial Sequence: Synthetic oligonucleotide
  Target: LAMA2; (+) strand; PAM type: YTN; PAM sequence: TTG
tatctaagtatcattgcttt

SEQ ID NO: 355914 - DNA, 20 bp, Artificial Sequence
  Description of Artificial Sequence: Synthetic oligonucleotide
  Target: LAMA2; (+) strand; PAM type: YTN; PAM sequence: CTA
agtatcattgctttaaaaat

SEQ ID NO: 355915 - DNA, 20 bp, Artificial Sequence
  Description of Artificial Sequence: Synthetic oligonucleotide
  Target: LAMA2; (+) strand; PAM type: YTN; PAM sequence: TTG
ctttaaaaatatatctgagg

SEQ ID NO: 355916 - DNA, 20 bp, Artificial Sequence
  Description of Artificial Sequence: Synthetic oligonucleotide
  Target: LAMA2; (+) strand; PAM type: YTN; PAM sequence: CTT
taaaaatatatctgaggcaa

SEQ ID NO: 355917 - DNA, 20 bp, Artificial Sequence
  Description of Artificial Sequence: Synthetic oligonucleotide
  Target: LAMA2; (+) strand; PAM type: YTN; PAM sequence: TTT
aaaaatatatctgaggcaaa

SEQ ID NO: 355918 - DNA, 20 bp, Artificial Sequence
  Description of Artificial Sequence: Synthetic oligonucleotide
  Target: LAMA2; (+) strand; PAM type: YTN; PAM sequence: TTA
aaaatatatctgaggcaaat

SEQ ID NO: 355919 - DNA, 20 bp, Artificial Sequence
  Description of Artificial Sequence: Synthetic oligonucleotide
  Target: LAMA2; (+) strand; PAM type: YTN; PAM sequence: CTG
aggcaaatataaaatataaa

SEQ ID NO: 355920 - DNA, 20 bp, Artificial Sequence
  Description of Artificial Sequence: Synthetic oligonucleotide
  Target: LAMA2; (+) strand; PAM type: YTN; PAM sequence: TTT
tgttacctctaggttgcatg

SEQ ID NO: 355921 - DNA, 20 bp, Artificial Sequence
  Description of Artificial Sequence: Synthetic oligonucleotide
  Target: LAMA2; (+) strand; PAM type: YTN; PAM sequence: TTT
gttacctctaggttgcatgg

SEQ ID NO: 355922 - DNA, 20 bp, Artificial Sequence
  Description of Artificial Sequence: Synthetic oligonucleotide
  Target: LAMA2; (+) strand; PAM type: YTN; PAM sequence: TTG
ttacctctaggttgcatggg

SEQ ID NO: 355923 - DNA, 20 bp, Artificial Sequence
  Description of Artificial Sequence: Synthetic oligonucleotide
  Target: LAMA2; (+) strand; PAM type: YTN; PAM sequence: TTA
cctctaggttgcatgggtaa

SEQ ID NO: 355924 - DNA, 20 bp, Artificial Sequence
  Description of Artificial Sequence: Synthetic oligonucleotide
  Target: LAMA2; (+) strand; PAM type: YTN; PAM sequence: CTC
taggttgcatgggtaatgca

SEQ ID NO: 355925 - DNA, 20 bp, Artificial Sequence
  Description of Artificial Sequence: Synthetic oligonucleotide
  Target: LAMA2; (+) strand; PAM type: YTN; PAM sequence: CTA
ggttgcatgggtaatgcatg

SEQ ID NO: 355926 - DNA, 20 bp, Artificial Sequence
  Description of Artificial Sequence: Synthetic oligonucleotide
  Target: LAMA2; (+) strand; PAM type: YTN; PAM sequence: TTG
catgggtaatgcatgttata

SEQ ID NO: 355927 - DNA, 20 bp, Artificial Sequence
  Description of Artificial Sequence: Synthetic oligonucleotide
  Target: LAMA2; (+) strand; PAM type: YTN; PAM sequence: TTA
tatgtgctttttgaatgtct

SEQ ID NO: 355928 - DNA, 20 bp, Artificial Sequence
  Description of Artificial Sequence: Synthetic oligonucleotide
  Target: LAMA2; (+) strand; PAM type: YTN; PAM sequence: CTT
tttgaatgtcttaatataat

SEQ ID NO: 355929 - DNA, 20 bp, Artificial Sequence
  Description of Artificial Sequence: Synthetic oligonucleotide
  Target: LAMA2; (+) strand; PAM type: YTN; PAM sequence: TTT
ttgaatgtcttaatataatt

SEQ ID NO: 355930 - DNA, 20 bp, Artificial Sequence
  Description of Artificial Sequence: Synthetic oligonucleotide
  Target: LAMA2; (+) strand; PAM type: YTN; PAM sequence: TTT
tgaatgtcttaatataattt

SEQ ID NO: 355931 - DNA, 20 bp, Artificial Sequence
  Description of Artificial Sequence: Synthetic oligonucleotide
  Target: LAMA2; (+) strand; PAM type: YTN; PAM sequence: TTT
gaatgtcttaatataatttc

SEQ ID NO: 355932 - DNA, 20 bp, Artificial Sequence
  Description of Artificial Sequence: Synthetic oligonucleotide
  Target: LAMA2; (+) strand; PAM type: YTN; PAM sequence: TTG
aatgtcttaatataatttct

SEQ ID NO: 355933 - DNA, 20 bp, Artificial Sequence
  Description of Artificial Sequence: Synthetic oligonucleotide
  Target: LAMA2; (+) strand; PAM type: YTN; PAM sequence: CTT
aatataatttctaatttaaa

SEQ ID NO: 355934 - DNA, 20 bp, Artificial Sequence
  Description of Artificial Sequence: Synthetic oligonucleotide
  Target: LAMA2; (+) strand; PAM type: YTN; PAM sequence: TTA
atataatttctaatttaaaa

SEQ ID NO: 355935 - DNA, 20 bp, Artificial Sequence
  Description of Artificial Sequence: Synthetic oligonucleotide
  Target: LAMA2; (+) strand; PAM type: YTN; PAM sequence: TTT
ctaatttaaaatttctttaa

SEQ ID NO: 355936 - DNA, 20 bp, Artificial Sequence
  Description of Artificial Sequence: Synthetic oligonucleotide
  Target: LAMA2; (+) strand; PAM type: YTN; PAM sequence: TTC
taatttaaaatttctttaat

SEQ ID NO: 355937 - DNA, 20 bp, Artificial Sequence
  Description of Artificial Sequence: Synthetic oligonucleotide
  Target: LAMA2; (+) strand; PAM type: YTN; PAM sequence: CTA
atttaaaatttctttaattg

SEQ ID NO: 355938 - DNA, 20 bp, Artificial Sequence
  Description of Artificial Sequence: Synthetic oligonucleotide
  Target: LAMA2; (+) strand; PAM type: YTN; PAM sequence: TTT
aaaatttctttaattgaatg

SEQ ID NO: 355939 - DNA, 20 bp, Artificial Sequence
  Description of Artificial Sequence: Synthetic oligonucleotide
  Target: LAMA2; (+) strand; PAM type: YTN; PAM sequence: TTA
aaatttctttaattgaatgt

SEQ ID NO: 355940 - DNA, 20 bp, Artificial Sequence
  Description of Artificial Sequence: Synthetic oligonucleotide
  Target: LAMA2; (+) strand; PAM type: YTN; PAM sequence: TTT
ctttaattgaatgtaaaaaa

SEQ ID NO: 355941 - DNA, 20 bp, Artificial Sequence
  Description of Artificial Sequence: Synthetic oligonucleotide
  Target: LAMA2; (+) strand; PAM type: YTN; PAM sequence: TTC
tttaattgaatgtaaaaaag

SEQ ID NO: 355942 - DNA, 20 bp, Artificial Sequence
  Description of Artificial Sequence: Synthetic oligonucleotide
  Target: LAMA2; (+) strand; PAM type: YTN; PAM sequence: CTT
taattgaatgtaaaaaagaa

SEQ ID NO: 355943 - DNA, 20 bp, Artificial Sequence
  Description of Artificial Sequence: Synthetic oligonucleotide
  Target: LAMA2; (+) strand; PAM type: YTN; PAM sequence: TTT
aattgaatgtaaaaaagaat

SEQ ID NO: 355944 - DNA, 20 bp, Artificial Sequence
  Description of Artificial Sequence: Synthetic oligonucleotide
  Target: LAMA2; (+) strand; PAM type: YTN; PAM sequence: TTA
attgaatgtaaaaaagaatt

SEQ ID NO: 355945 - DNA, 20 bp, Artificial Sequence
  Description of Artificial Sequence: Synthetic oligonucleotide
  Target: LAMA2; (+) strand; PAM type: YTN; PAM sequence: TTG
aatgtaaaaaagaattccag

SEQ ID NO: 355946 - DNA, 20 bp, Artificial Sequence
  Description of Artificial Sequence: Synthetic oligonucleotide
  Target: LAMA2; (+) strand; PAM type: YTN; PAM sequence: TTC
cagatttaaaaagaggagaa

SEQ ID NO: 355947 - DNA, 20 bp, Artificial Sequence
  Description of Artificial Sequence: Synthetic oligonucleotide
  Target: LAMA2; (+) strand; PAM type: YTN; PAM sequence: TTT
aaaaagaggagaatgaaatt

SEQ ID NO: 355948 - DNA, 20 bp, Artificial Sequence
  Description of Artificial Sequence: Synthetic oligonucleotide
  Target: LAMA2; (+) strand; PAM type: YTN; PAM sequence: TTA
aaaagaggagaatgaaattt

SEQ ID NO: 355949 - DNA, 20 bp, Artificial Sequence
  Description of Artificial Sequence: Synthetic oligonucleotide
  Target: LAMA2; (+) strand; PAM type: YTN; PAM sequence: TTT
ttaatacaatgtcaactaca

SEQ ID NO: 355950 - DNA, 20 bp, Artificial Sequence
  Description of Artificial Sequence: Synthetic oligonucleotide
  Target: LAMA2; (+) strand; PAM type: YTN; PAM sequence: TTT
taatacaatgtcaactacat

SEQ ID NO: 355951 - DNA, 20 bp, Artificial Sequence
  Description of Artificial Sequence: Synthetic oligonucleotide
  Target: LAMA2; (+) strand; PAM type: YTN; PAM sequence: TTT
aatacaatgtcaactacatt

SEQ ID NO: 355952 - DNA, 20 bp, Artificial Sequence
  Description of Artificial Sequence: Synthetic oligonucleotide
  Target: LAMA2; (+) strand; PAM type: YTN; PAM sequence: TTA
atacaatgtcaactacatta

SEQ ID NO: 355953 - DNA, 20 bp, Artificial Sequence
  Description of Artificial Sequence: Synthetic oligonucleotide
  Target: LAMA2; (+) strand; PAM type: YTN; PAM sequence: CTA
cattattacattttacacat

SEQ ID NO: 355954 - DNA, 20 bp, Artificial Sequence
  Description of Artificial Sequence: Synthetic oligonucleotide
  Target: LAMA2; (+) strand; PAM type: YTN; PAM sequence: TTA
ttacattttacacataagat

SEQ ID NO: 355955 - DNA, 20 bp, Artificial Sequence
  Description of Artificial Sequence: Synthetic oligonucleotide
  Target: LAMA2; (+) strand; PAM type: YTN; PAM sequence: TTA
cattttacacataagatttt

SEQ ID NO: 355956 - DNA, 20 bp, Artificial Sequence
  Description of Artificial Sequence: Synthetic oligonucleotide
  Target: LAMA2; (+) strand; PAM type: YTN; PAM sequence: TTT
tacacataagattttctctt

SEQ ID NO: 355957 - DNA, 20 bp, Artificial Sequence
  Description of Artificial Sequence: Synthetic oligonucleotide
  Target: LAMA2; (+) strand; PAM type: YTN; PAM sequence: TTT
acacataagattttctcttc

SEQ ID NO: 355958 - DNA, 20 bp, Artificial Sequence
  Description of Artificial Sequence: Synthetic oligonucleotide
  Target: LAMA2; (+) strand; PAM type: YTN; PAM sequence: TTA
cacataagattttctcttca

SEQ ID NO: 355959 - DNA, 20 bp, Artificial Sequence
  Description of Artificial Sequence: Synthetic oligonucleotide
  Target: LAMA2; (+) strand; PAM type: YTN; PAM sequence: TTT
tctcttcaacaatgatgtta

SEQ ID NO: 355960 - DNA, 20 bp, Artificial Sequence
  Description of Artificial Sequence: Synthetic oligonucleotide
  Target: LAMA2; (+) strand; PAM type: YTN; PAM sequence: TTT
ctcttcaacaatgatgttaa

SEQ ID NO: 355961 - DNA, 20 bp, Artificial Sequence
  Description of Artificial Sequence: Synthetic oligonucleotide
  Target: LAMA2; (+) strand; PAM type: YTN; PAM sequence: TTC
tcttcaacaatgatgttaat

SEQ ID NO: 355962 - DNA, 20 bp, Artificial Sequence
  Description of Artificial Sequence: Synthetic oligonucleotide
  Target: LAMA2; (+) strand; PAM type: YTN; PAM sequence: CTC
ttcaacaatgatgttaatga

SEQ ID NO: 355963 - DNA, 20 bp, Artificial Sequence
  Description of Artificial Sequence: Synthetic oligonucleotide
  Target: LAMA2; (+) strand; PAM type: YTN; PAM sequence: CTT
caacaatgatgttaatgaat

SEQ ID NO: 355964 - DNA, 20 bp, Artificial Sequence
  Description of Artificial Sequence: Synthetic oligonucleotide
  Target: LAMA2; (+) strand; PAM type: YTN; PAM sequence: TTC
aacaatgatgttaatgaata

SEQ ID NO: 355965 - DNA, 20 bp, Artificial Sequence
  Description of Artificial Sequence: Synthetic oligonucleotide
  Target: LAMA2; (+) strand; PAM type: YTN; PAM sequence: TTA
atgaatattatcatcattat

SEQ ID NO: 355966 - DNA, 20 bp, Artificial Sequence
  Description of Artificial Sequence: Synthetic oligonucleotide
  Target: LAMA2; (+) strand; PAM type: YTN; PAM sequence: TTA
tcatcattatatttcaaaat

SEQ ID NO: 355967 - DNA, 20 bp, Artificial Sequence
  Description of Artificial Sequence: Synthetic oligonucleotide
  Target: LAMA2; (+) strand; PAM type: YTN; PAM sequence: TTA
tatttcaaaatgtgaaagca

SEQ ID NO: 355968 - DNA, 20 bp, Artificial Sequence
  Description of Artificial Sequence: Synthetic oligonucleotide
  Target: LAMA2; (+) strand; PAM type: YTN; PAM sequence: TTT
caaaatgtgaaagcagtgct

SEQ ID NO: 355969 - DNA, 20 bp, Artificial Sequence
  Description of Artificial Sequence: Synthetic oligonucleotide
  Target: LAMA2; (+) strand; PAM type: YTN; PAM sequence: TTC
aaaatgtgaaagcagtgcta

SEQ ID NO: 355970 - DNA, 20 bp, Artificial Sequence
  Description of Artificial Sequence: Synthetic oligonucleotide
  Target: LAMA2; (+) strand; PAM type: YTN; PAM sequence: CTA
gctcaagacactcaaatgtt

SEQ ID NO: 355971 - DNA, 20 bp, Artificial Sequence
  Description of Artificial Sequence: Synthetic oligonucleotide
  Target: LAMA2; (+) strand; PAM type: YTN; PAM sequence: CTC
aagacactcaaatgtttata

SEQ ID NO: 355972 - DNA, 20 bp, Artificial Sequence
  Description of Artificial Sequence: Synthetic oligonucleotide
  Target: LAMA2; (+) strand; PAM type: YTN; PAM sequence: CTC
aaatgtttataatatttttg

SEQ ID NO: 355973 - DNA, 20 bp, Artificial Sequence
  Description of Artificial Sequence: Synthetic oligonucleotide
  Target: LAMA2; (+) strand; PAM type: YTN; PAM sequence: TTT
ataatatttttgcattgtta

SEQ ID NO: 355974 - DNA, 20 bp, Artificial Sequence
  Description of Artificial Sequence: Synthetic oligonucleotide
  Target: LAMA2; (+) strand; PAM type: YTN; PAM sequence: TTA
taatatttttgcattgttaa

SEQ ID NO: 355975 - DNA, 20 bp, Artificial Sequence
  Description of Artificial Sequence: Synthetic oligonucleotide
  Target: LAMA2; (+) strand; PAM type: YTN; PAM sequence: TTT
ttgcattgttaaaaatgttg

SEQ ID NO: 355976 - DNA, 20 bp, Artificial Sequence
  Description of Artificial Sequence: Synthetic oligonucleotide
  Target: LAMA2; (+) strand; PAM type: YTN; PAM sequence: TTT
tgcattgttaaaaatgttga

SEQ ID NO: 355977 - DNA, 20 bp, Artificial Sequence
  Description of Artificial Sequence: Synthetic oligonucleotide
  Target: LAMA2; (+) strand; PAM type: YTN; PAM sequence: TTT
gcattgttaaaaatgttgaa

SEQ ID NO: 355978 - DNA, 20 bp, Artificial Sequence
  Description of Artificial Sequence: Synthetic oligonucleotide
  Target: LAMA2; (+) strand; PAM type: YTN; PAM sequence: TTG
cattgttaaaaatgttgaaa

SEQ ID NO: 355979 - DNA, 20 bp, Artificial Sequence
  Description of Artificial Sequence: Synthetic oligonucleotide
  Target: LAMA2; (+) strand; PAM type: YTN; PAM sequence: TTG
ttaaaaatgttgaaatttct

SEQ ID NO: 355980 - DNA, 20 bp, Artificial Sequence
  Description of Artificial Sequence: Synthetic oligonucleotide
  Target: LAMA2; (+) strand; PAM type: YTN; PAM sequence: TTA
aaaatgttgaaatttctctc

SEQ ID NO: 355981 - DNA, 20 bp, Artificial Sequence
  Description of Artificial Sequence: Synthetic oligonucleotide
  Target: LAMA2; (+) strand; PAM type: YTN; PAM sequence: TTG
aaatttctctcacgaattac

SEQ ID NO: 355982 - DNA, 20 bp, Artificial Sequence
  Description of Artificial Sequence: Synthetic oligonucleotide
  Target: LAMA2; (+) strand; PAM type: YTN; PAM sequence: TTT
ctctcacgaattacaagagg

SEQ ID NO: 355983 - DNA, 20 bp, Artificial Sequence
  Description of Artificial Sequence: Synthetic oligonucleotide
  Target: LAMA2; (+) strand; PAM type: YTN; PAM sequence: TTC
tctcacgaattacaagaggc

SEQ ID NO: 355984 - DNA, 20 bp, Artificial Sequence
  Description of Artificial Sequence: Synthetic oligonucleotide
  Target: LAMA2; (+) strand; PAM type: YTN; PAM sequence: CTC
tcacgaattacaagaggcaa

SEQ ID NO: 355985 - DNA, 20 bp, Artificial Sequence
  Description of Artificial Sequence: Synthetic oligonucleotide
  Target: LAMA2; (+) strand; PAM type: YTN; PAM sequence: CTC
acgaattacaagaggcaagt

SEQ ID NO: 355986 - DNA, 20 bp, Artificial Sequence
  Description of Artificial Sequence: Synthetic oligonucleotide
  Target: LAMA2; (+) strand; PAM type: YTN; PAM sequence: TTA
caagaggcaagtcaatctca

SEQ ID NO: 355987 - DNA, 20 bp, Artificial Sequence
  Description of Artificial Sequence: Synthetic oligonucleotide
  Target: LAMA2; (+) strand; PAM type: YTN; PAM sequence: CTC
agatatatgacaagtcattg

SEQ ID NO: 355988 - DNA, 20 bp, Artificial Sequence
  Description of Artificial Sequence: Synthetic oligonucleotide
  Target: LAMA2; (+) strand; PAM type: YTN; PAM sequence: TTG
actataagtgctgtctgact

SEQ ID NO: 355989 - DNA, 20 bp, Artificial Sequence
  Description of Artificial Sequence: Synthetic oligonucleotide
  Target: LAMA2; (+) strand; PAM type: YTN; PAM sequence: CTA
taagtgctgtctgactctca

SEQ ID NO: 355990 - DNA, 20 bp, Artificial Sequence
  Description of Artificial Sequence: Synthetic oligonucleotide
  Target: LAMA2; (+) strand; PAM type: YTN; PAM sequence: CTG
tctgactctcagtatttgtt

SEQ ID NO: 355991 - DNA, 20 bp, Artificial Sequence
  Description of Artificial Sequence: Synthetic oligonucleotide
  Target: LAMA2; (+) strand; PAM type: YTN; PAM sequence: CTG
actctcagtatttgtttatt

SEQ ID NO: 355992 - DNA, 20 bp, Artificial Sequence
  Description of Artificial Sequence: Synthetic oligonucleotide
  Target: LAMA2; (+) strand; PAM type: YTN; PAM sequence: CTC
tcagtatttgtttatttcaa

SEQ ID NO: 355993 - DNA, 20 bp, Artificial Sequence
  Description of Artificial Sequence: Synthetic oligonucleotide
  Target: LAMA2; (+) strand; PAM type: YTN; PAM sequence: CTC
agtatttgtttatttcaagt

SEQ ID NO: 355994 - DNA, 20 bp, Artificial Sequence
  Description of Artificial Sequence: Synthetic oligonucleotide
  Target: LAMA2; (+) strand; PAM type: YTN; PAM sequence: TTT
gtttatttcaagtaccatat

SEQ ID NO: 355995 - DNA, 20 bp, Artificial Sequence
  Description of Artificial Sequence: Synthetic oligonucleotide
  Target: LAMA2; (+) strand; PAM type: YTN; PAM sequence: TTG
tttatttcaagtaccatatg

SEQ ID NO: 355996 - DNA, 20 bp, Artificial Sequence
  Description of Artificial Sequence: Synthetic oligonucleotide
  Target: LAMA2; (+) strand; PAM type: YTN; PAM sequence: TTT
atttcaagtaccatatgcta

SEQ ID NO: 355997 - DNA, 20 bp, Artificial Sequence
  Description of Artificial Sequence: Synthetic oligonucleotide
  Target: LAMA2; (+) strand; PAM type: YTN; PAM sequence: TTA
tttcaagtaccatatgctag

SEQ ID NO: 355998 - DNA, 20 bp, Artificial Sequence
  Description of Artificial Sequence: Synthetic oligonucleotide
  Target: LAMA2; (+) strand; PAM type: YTN; PAM sequence: TTT
caagtaccatatgctagaaa

SEQ ID NO: 355999 - DNA, 20 bp, Artificial Sequence
  Description of Artificial Sequence: Synthetic oligonucleotide
  Target: LAMA2; (+) strand; PAM type: YTN; PAM sequence: TTC
aagtaccatatgctagaaat

SEQ ID NO: 356000 - DNA, 20 bp, Artificial Sequence
  Description of Artificial Sequence: Synthetic oligonucleotide
  Target: LAMA2; (+) strand; PAM type: YTN; PAM sequence: CTA
gaaattggctcttttgcagt

SEQ ID NO: 356001 - DNA, 20 bp, Artificial Sequence
  Description of Artificial Sequence: Synthetic oligonucleotide
  Target: LAMA2; (+) strand; PAM type: YTN; PAM sequence: TTG
gctcttttgcagtttggtgt

SEQ ID NO: 356002 - DNA, 20 bp, Artificial Sequence
  Description of Artificial Sequence: Synthetic oligonucleotide
  Target: LAMA2; (+) strand; PAM type: YTN; PAM sequence: CTC
ttttgcagtttggtgtcata

SEQ ID NO: 356003 - DNA, 20 bp, Artificial Sequence
  Description of Artificial Sequence: Synthetic oligonucleotide
  Target: LAMA2; (+) strand; PAM type: YTN; PAM sequence: CTT
ttgcagtttggtgtcatatt

SEQ ID NO: 356004 - DNA, 20 bp, Artificial Sequence
  Description of Artificial Sequence: Synthetic oligonucleotide
  Target: LAMA2; (+) strand; PAM type: YTN; PAM sequence: TTT
tgcagtttggtgtcatatta

SEQ ID NO: 356005 - DNA, 20 bp, Artificial Sequence
  Description of Artificial Sequence: Synthetic oligonucleotide
  Target: LAMA2; (+) strand; PAM type: YTN; PAM sequence: TTT
gcagtttggtgtcatattat

SEQ ID NO: 356006 - DNA, 20 bp, Artificial Sequence
  Description of Artificial Sequence: Synthetic oligonucleotide
  Target: LAMA2; (+) strand; PAM type: YTN; PAM sequence: TTG
cagtttggtgtcatattatt

SEQ ID NO: 356007 - DNA, 20 bp, Artificial Sequence
  Description of Artificial Sequence: Synthetic oligonucleotide
  Target: LAMA2; (+) strand; PAM type: YTN; PAM sequence: TTT
ggtgtcatattatttatgca

SEQ ID NO: 356008 - DNA, 20 bp, Artificial Sequence
  Description of Artificial Sequence: Synthetic oligonucleotide
  Target: LAMA2; (+) strand; PAM type: YTN; PAM sequence: TTG
gtgtcatattatttatgcaa

SEQ ID NO: 356009 - DNA, 20 bp, Artificial Sequence
  Description of Artificial Sequence: Synthetic oligonucleotide
  Target: LAMA2; (+) strand; PAM type: YTN; PAM sequence: TTA
tttatgcaaaatcagttggt

SEQ ID NO: 356010 - DNA, 20 bp, Artificial Sequence
  Description of Artificial Sequence: Synthetic oligonucleotide
  Target: LAMA2; (+) strand; PAM type: YTN; PAM sequence: TTT
atgcaaaatcagttggtatg

SEQ ID NO: 356011 - DNA, 20 bp, Artificial Sequence
  Description of Artificial Sequence: Synthetic oligonucleotide
  Target: LAMA2; (+) strand; PAM type: YTN; PAM sequence: TTA
tgcaaaatcagttggtatgt

SEQ ID NO: 356012 - DNA, 20 bp, Artificial Sequence
  Description of Artificial Sequence: Synthetic oligonucleotide
  Target: LAMA2; (+) strand; PAM type: YTN; PAM sequence: TTG
gtatgtagaatctcacacat

SEQ ID NO: 356013 - DNA, 20 bp, Artificial Sequence
  Description of Artificial Sequence: Synthetic oligonucleotide
  Target: LAMA2; (+) strand; PAM type: YTN; PAM sequence: CTC
acacataatataaattgaca

SEQ ID NO: 356014 - DNA, 20 bp, Artificial Sequence
  Description of Artificial Sequence: Synthetic oligonucleotide
  Target: LAMA2; (+) strand; PAM type: YTN; PAM sequence: TTG
acattgatctagttaggaac

SEQ ID NO: 356015 - DNA, 20 bp, Artificial Sequence
  Description of Artificial Sequence: Synthetic oligonucleotide
  Target: LAMA2; (+) strand; PAM type: YTN; PAM sequence: TTG
atctagttaggaacatgtgc

SEQ ID NO: 356016 - DNA, 20 bp, Artificial Sequence
  Description of Artificial Sequence: Synthetic oligonucleotide
  Target: LAMA2; (+) strand; PAM type: YTN; PAM sequence: CTA
gttaggaacatgtgctttta

SEQ ID NO: 356017 - DNA, 20 bp, Artificial Sequence
  Description of Artificial Sequence: Synthetic oligonucleotide
  Target: LAMA2; (+) strand; PAM type: YTN; PAM sequence: TTA
ggaacatgtgcttttatttt

SEQ ID NO: 356018 - DNA, 20 bp, Artificial Sequence
  Description of Artificial Sequence: Synthetic oligonucleotide
  Target: LAMA2; (+) strand; PAM type: YTN; PAM sequence: CTT
ttatttttatcaaagtctta

SEQ ID NO: 356019 - DNA, 20 bp, Artificial Sequence
  Description of Artificial Sequence: Synthetic oligonucleotide
  Target: LAMA2; (+) strand; PAM type: YTN; PAM sequence: TTT
tatttttatcaaagtcttat

SEQ ID NO: 356020 - DNA, 20 bp, Artificial Sequence
  Description of Artificial Sequence: Synthetic oligonucleotide
  Target: LAMA2; (+) strand; PAM type: YTN; PAM sequence: TTT
atttttatcaaagtcttata

SEQ ID NO: 356021 - DNA, 20 bp, Artificial Sequence
  Description of Artificial Sequence: Synthetic oligonucleotide
  Target: LAMA2; (+) strand; PAM type: YTN; PAM sequence: TTA
tttttatcaaagtcttataa

SEQ ID NO: 356022 - DNA, 20 bp, Artificial Sequence
  Description of Artificial Sequence: Synthetic oligonucleotide
  Target: LAMA2; (+) strand; PAM type: YTN; PAM sequence: TTT
ttatcaaagtcttataatag

SEQ ID NO: 356023 - DNA, 20 bp, Artificial Sequence
  Description of Artificial Sequence: Synthetic oligonucleotide
  Target: LAMA2; (+) strand; PAM type: YTN; PAM sequence: TTT
tatcaaagtcttataataga

SEQ ID NO: 356024 - DNA, 20 bp, Artificial Sequence
  Description of Artificial Sequence: Synthetic oligonucleotide
  Target: LAMA2; (+) strand; PAM type: YTN; PAM sequence: TTT
atcaaagtcttataatagaa

SEQ ID NO: 356025 - DNA, 20 bp, Artificial Sequence
  Description of Artificial Sequence: Synthetic oligonucleotide
  Target: LAMA2; (+) strand; PAM type: YTN; PAM sequence: TTA
tcaaagtcttataatagaaa

SEQ ID NO: 356026 - DNA, 20 bp, Artificial Sequence
  Description of Artificial Sequence: Synthetic oligonucleotide
  Target: LAMA2; (+) strand; PAM type: YTN; PAM sequence: CTT
ataatagaaagataaatagt

SEQ ID NO: 356027 - DNA, 20 bp, Artificial Sequence
  Description of Artificial Sequence: Synthetic oligonucleotide
  Target: LAMA2; (+) strand; PAM type: YTN; PAM sequence: TTA
taatagaaagataaatagtg

SEQ ID NO: 356028 - DNA, 20 bp, Artificial Sequence
  Description of Artificial Sequence: Synthetic oligonucleotide
  Target: LAMA2; (+) strand; PAM type: YTN; PAM sequence: CTA
gaaatcaaagtctgtatttt

SEQ ID NO: 356029 - DNA, 20 bp, Artificial Sequence
  Description of Artificial Sequence: Synthetic oligonucleotide
  Target: LAMA2; (+) strand; PAM type: YTN; PAM sequence: CTG
tattttcatcttgttttgct

SEQ ID NO: 356030 - DNA, 20 bp, Artificial Sequence
  Description of Artificial Sequence: Synthetic oligonucleotide
  Target: LAMA2; (+) strand; PAM type: YTN; PAM sequence: TTT
tcatcttgttttgctttgtt

SEQ ID NO: 356031 - DNA, 20 bp, Artificial Sequence
  Description of Artificial Sequence: Synthetic oligonucleotide
  Target: LAMA2; (+) strand; PAM type: YTN; PAM sequence: TTT
catcttgttttgctttgttt

SEQ ID NO: 356032 - DNA, 20 bp, Artificial Sequence
  Description of Artificial Sequence: Synthetic oligonucleotide
  Target: LAMA2; (+) strand; PAM type: YTN; PAM sequence: TTC
atcttgttttgctttgtttt

SEQ ID NO: 356033 - DNA, 20 bp, Artificial Sequence
  Description of Artificial Sequence: Synthetic oligonucleotide
  Target: LAMA2; (+) strand; PAM type: YTN; PAM sequence: CTT
gttttgctttgtttttattg

SEQ ID NO: 356034 - DNA, 20 bp, Artificial Sequence
  Description of Artificial Sequence: Synthetic oligonucleotide
  Target: LAMA2; (+) strand; PAM type: YTN; PAM sequence: TTG
ttttgctttgtttttattgc

SEQ ID NO: 356035 - DNA, 20 bp, Artificial Sequence
  Description of Artificial Sequence: Synthetic oligonucleotide
  Target: LAMA2; (+) strand; PAM type: YTN; PAM sequence: TTT
tgctttgtttttattgcatt

SEQ ID NO: 356036 - DNA, 20 bp, Artificial Sequence
  Description of Artificial Sequence: Synthetic oligonucleotide
  Target: LAMA2; (+) strand; PAM type: YTN; PAM sequence: TTT
gctttgtttttattgcattt

SEQ ID NO: 356037 - DNA, 20 bp, Artificial Sequence
  Description of Artificial Sequence: Synthetic oligonucleotide
  Target: LAMA2; (+) strand; PAM type: YTN; PAM sequence: TTG
ctttgtttttattgcatttt

SEQ ID NO: 356038 - DNA, 20 bp, Artificial Sequence
  Description of Artificial Sequence: Synthetic oligonucleotide
  Target: LAMA2; (+) strand; PAM type: YTN; PAM sequence: CTT
tgtttttattgcattttcca

SEQ ID NO: 356039 - DNA, 20 bp, Artificial Sequence
  Description of Artificial Sequence: Synthetic oligonucleotide
  Target: LAMA2; (+) strand; PAM type: YTN; PAM sequence: TTT
gtttttattgcattttccat

SEQ ID NO: 356040 - DNA, 20 bp, Artificial Sequence
  Description of Artificial Sequence: Synthetic oligonucleotide
  Target: LAMA2; (+) strand; PAM type: YTN; PAM sequence: TTG
tttttattgcattttccatt

SEQ ID NO: 356041 - DNA, 20 bp, Artificial Sequence
  Description of Artificial Sequence: Synthetic oligonucleotide
  Target: LAMA2; (+) strand; PAM type: YTN; PAM sequence: TTT
ttattgcattttccattaag

SEQ ID NO: 356042 - DNA, 20 bp, Artificial Sequence
  Description of Artificial Sequence: Synthetic oligonucleotide
  Target: LAMA2; (+) strand; PAM type: YTN; PAM sequence: TTT
tattgcattttccattaagt

SEQ ID NO: 356043 - DNA, 20 bp, Artificial Sequence
  Description of Artificial Sequence: Synthetic oligonucleotide
  Target: LAMA2; (+) strand; PAM type: YTN; PAM sequence: TTT
attgcattttccattaagtc

SEQ ID NO: 356044 - DNA, 20 bp, Artificial Sequence
  Description of Artificial Sequence: Synthetic oligonucleotide
  Target: LAMA2; (+) strand; PAM type: YTN; PAM sequence: TTA
ttgcattttccattaagtcc

SEQ ID NO: 356045 - DNA, 20 bp, Artificial Sequence
  Description of Artificial Sequence: Synthetic oligonucleotide
  Target: LAMA2; (+) strand; PAM type: YTN; PAM sequence: TTG
cattttccattaagtcctta

SEQ ID NO: 356046 - DNA, 20 bp, Artificial Sequence
  Description of Artificial Sequence: Synthetic oligonucleotide
  Target: LAMA2; (+) strand; PAM type: YTN; PAM sequence: TTT
tccattaagtccttacaggc

SEQ ID NO: 356047 - DNA, 20 bp, Artificial Sequence
  Description of Artificial Sequence: Synthetic oligonucleotide
  Target: LAMA2; (+) strand; PAM type: YTN; PAM sequence: TTT
ccattaagtccttacaggcc

SEQ ID NO: 356048 - DNA, 20 bp, Artificial Sequence
  Description of Artificial Sequence: Synthetic oligonucleotide
  Target: LAMA2; (+) strand; PAM type: YTN; PAM sequence: TTC
cattaagtccttacaggccc

SEQ ID NO: 356049 - DNA, 20 bp, Artificial Sequence
  Description of Artificial Sequence: Synthetic oligonucleotide
  Target: LAMA2; (+) strand; PAM type: YTN; PAM sequence: TTA
agtccttacaggcccacgag

SEQ ID NO: 356050 - DNA, 20 bp, Artificial Sequence
  Description of Artificial Sequence: Synthetic oligonucleotide
  Target: LAMA2; (+) strand; PAM type: YTN; PAM sequence: CTT
acaggcccacgagactatgt

SEQ ID NO: 356051 - DNA, 20 bp, Artificial Sequence
  Description of Artificial Sequence: Synthetic oligonucleotide
  Target: LAMA2; (+) strand; PAM type: YTN; PAM sequence: TTA
caggcccacgagactatgtg

SEQ ID NO: 356052 - DNA, 20 bp, Artificial Sequence
  Description of Artificial Sequence: Synthetic oligonucleotide
  Target: LAMA2; (+) strand; PAM type: YTN; PAM sequence: CTA
tgtgatctggccttggctta

SEQ ID NO: 356053 - DNA, 20 bp, Artificial Sequence
  Description of Artificial Sequence: Synthetic oligonucleotide
  Target: LAMA2; (+) strand; PAM type: YTN; PAM sequence: CTG
gccttggcttacctctccag

SEQ ID NO: 356054 - DNA, 20 bp, Artificial Sequence
  Description of Artificial Sequence: Synthetic oligonucleotide
  Target: LAMA2; (+) strand; PAM type: YTN; PAM sequence: CTT
ggcttacctctccagaatgt

SEQ ID NO: 356055 - DNA, 20 bp, Artificial Sequence
  Description of Artificial Sequence: Synthetic oligonucleotide
  Target: LAMA2; (+) strand; PAM type: YTN; PAM sequence: TTG
gcttacctctccagaatgtt

SEQ ID NO: 356056 - DNA, 20 bp, Artificial Sequence
  Description of Artificial Sequence: Synthetic oligonucleotide
  Target: LAMA2; (+) strand; PAM type: YTN; PAM sequence: CTT
acctctccagaatgttcttg

SEQ ID NO: 356057 - DNA, 20 bp, Artificial Sequence
  Description of Artificial Sequence: Synthetic oligonucleotide
  Target: LAMA2; (+) strand; PAM type: YTN; PAM sequence: TTA
cctctccagaatgttcttga

SEQ ID NO: 356058 - DNA, 20 bp, Artificial Sequence
  Description of Artificial Sequence: Synthetic oligonucleotide
  Target: LAMA2; (+) strand; PAM type: YTN; PAM sequence: CTC
tccagaatgttcttgagttt

SEQ ID NO: 356059 - DNA, 20 bp, Artificial Sequence
  Description of Artificial Sequence: Synthetic oligonucleotide
  Target: LAMA2; (+) strand; PAM type: YTN; PAM sequence: CTC
cagaatgttcttgagtttca

SEQ ID NO: 356060 - DNA, 20 bp, Artificial Sequence
  Description of Artificial Sequence: Synthetic oligonucleotide
  Target: LAMA2; (+) strand; PAM type: YTN; PAM sequence: TTC
ttgagtttcagtcactgttt

SEQ ID NO: 356061 - DNA, 20 bp, Artificial Sequence
  Description of Artificial Sequence: Synthetic oligonucleotide
  Target: LAMA2; (+) strand; PAM type: YTN; PAM sequence: CTT
gagtttcagtcactgttttt

SEQ ID NO: 356062 - DNA, 20 bp, Artificial Sequence
  Description of Artificial Sequence: Synthetic oligonucleotide
  Target: LAMA2; (+) strand; PAM type: YTN; PAM sequence: TTG
agtttcagtcactgtttttc

SEQ ID NO: 356063 - DNA, 20 bp, Artificial Sequence
  Description of Artificial Sequence: Synthetic oligonucleotide
  Target: LAMA2; (+) strand; PAM type: YTN; PAM sequence: TTT
cagtcactgtttttcagctt

SEQ ID NO: 356064 - DNA, 20 bp, Artificial Sequence
  Description of Artificial Sequence: Synthetic oligonucleotide
  Target: LAMA2; (+) strand; PAM type: YTN; PAM sequence: TTC
agtcactgtttttcagcttt

SEQ ID NO: 356065 - DNA, 20 bp, Artificial Sequence
  Description of Artificial Sequence: Synthetic oligonucleotide
  Target: LAMA2; (+) strand; PAM type: YTN; PAM sequence: CTG
tttttcagctttgcttaaat

SEQ ID NO: 356066 - DNA, 20 bp, Artificial Sequence
  Description of Artificial Sequence: Synthetic oligonucleotide
  Target: LAMA2; (+) strand; PAM type: YTN; PAM sequence: TTT
ttcagctttgcttaaatttc

SEQ ID NO: 356067 - DNA, 20 bp, Artificial Sequence
  Description of Artificial Sequence: Synthetic oligonucleotide
  Target: LAMA2; (+) strand; PAM type: YTN; PAM sequence: TTT
tcagctttgcttaaatttct

SEQ ID NO: 356068 - DNA, 20 bp, Artificial Sequence
  Description of Artificial Sequence: Synthetic oligonucleotide
  Target: LAMA2; (+) strand; PAM type: YTN; PAM sequence: TTT
cagctttgcttaaatttctt

SEQ ID NO: 356069 - DNA, 20 bp, Artificial Sequence
  Description of Artificial Sequence: Synthetic oligonucleotide
  Target: LAMA2; (+) strand; PAM type: YTN; PAM sequence: TTC
agctttgcttaaatttcttg

SEQ ID NO: 356070 - DNA, 20 bp, Artificial Sequence
  Description of Artificial Sequence: Synthetic oligonucleotide
  Target: LAMA2; (+) strand; PAM type: YTN; PAM sequence: CTT
tgcttaaatttcttgagtct

SEQ ID NO: 356071 - DNA, 20 bp, Artificial Sequence
  Description of Artificial Sequence: Synthetic oligonucleotide
  Target: LAMA2; (+) strand; PAM type: YTN; PAM sequence: TTT
gcttaaatttcttgagtctc

SEQ ID NO: 356072 - DNA, 20 bp, Artificial Sequence
  Description of Artificial Sequence: Synthetic oligonucleotide
  Target: LAMA2; (+) strand; PAM type: YTN; PAM sequence: TTG
cttaaatttcttgagtctct

SEQ ID NO: 356073 - DNA, 20 bp, Artificial Sequence
  Description of Artificial Sequence: Synthetic oligonucleotide
  Target: LAMA2; (+) strand; PAM type: YTN; PAM sequence: CTT
aaatttcttgagtctcttag

SEQ ID NO: 356074 - DNA, 20 bp, Artificial Sequence
  Description of Artificial Sequence: Synthetic oligonucleotide
  Target: LAMA2; (+) strand; PAM type: YTN; PAM sequence: TTA
aatttcttgagtctcttagt

SEQ ID NO: 356075 - DNA, 20 bp, Artificial Sequence
  Description of Artificial Sequence: Synthetic oligonucleotide
  Target: LAMA2; (+) strand; PAM type: YTN; PAM sequence: TTT
cttgagtctcttagttgttt

SEQ ID NO: 356076 - DNA, 20 bp, Artificial Sequence
  Description of Artificial Sequence: Synthetic oligonucleotide
  Target: LAMA2; (+) strand; PAM type: YTN; PAM sequence: TTC
ttgagtctcttagttgtttg

SEQ ID NO: 356077 - DNA, 20 bp, Artificial Sequence
  Description of Artificial Sequence: Synthetic oligonucleotide
  Target: LAMA2; (+) strand; PAM type: YTN; PAM sequence: CTT
gagtctcttagttgtttgta

SEQ ID NO: 356078 - DNA, 20 bp, Artificial Sequence
  Description of Artificial Sequence: Synthetic oligonucleotide
  Target: LAMA2; (+) strand; PAM type: YTN; PAM sequence: TTG
agtctcttagttgtttgtag

SEQ ID NO: 356079 - DNA, 20 bp, Artificial Sequence
  Description of Artificial Sequence: Synthetic oligonucleotide
  Target: LAMA2; (+) strand; PAM type: YTN; PAM sequence: CTC
ttagttgtttgtagcatctg

SEQ ID NO: 356080 - DNA, 20 bp, Artificial Sequence
  Description of Artificial Sequence: Synthetic oligonucleotide
  Target: LAMA2; (+) strand; PAM type: YTN; PAM sequence: CTT
agttgtttgtagcatctgga

SEQ ID NO: 356081 - DNA, 20 bp, Artificial Sequence
  Description of Artificial Sequence: Synthetic oligonucleotide
  Target: LAMA2; (+) strand; PAM type: YTN; PAM sequence: TTA
gttgtttgtagcatctggaa

SEQ ID NO: 356082 - DNA, 20 bp, Artificial Sequence
  Description of Artificial Sequence: Synthetic oligonucleotide
  Target: LAMA2; (+) strand; PAM type: YTN; PAM sequence: TTG
tttgtagcatctggaatttt

SEQ ID NO: 356083 - DNA, 20 bp, Artificial Sequence
  Description of Artificial Sequence: Synthetic oligonucleotide
  Target: LAMA2; (+) strand; PAM type: YTN; PAM sequence: TTT
gtagcatctggaattttata

SEQ ID NO: 356084 - DNA, 20 bp, Artificial Sequence
  Description of Artificial Sequence: Synthetic oligonucleotide
  Target: LAMA2; (+) strand; PAM type: YTN; PAM sequence: TTG
tagcatctggaattttataa

SEQ ID NO: 356085 - DNA, 20 bp, Artificial Sequence
  Description of Artificial Sequence: Synthetic oligonucleotide
  Target: LAMA2; (+) strand; PAM type: YTN; PAM sequence: CTG
gaattttataagttctattc

SEQ ID NO: 356086 - DNA, 20 bp, Artificial Sequence
  Description of Artificial Sequence: Synthetic oligonucleotide
  Target: LAMA2; (+) strand; PAM type: YTN; PAM sequence: TTT
tataagttctattcagattt

SEQ ID NO: 356087 - DNA, 20 bp, Artificial Sequence
  Description of Artificial Sequence: Synthetic oligonucleotide
  Target: LAMA2; (+) strand; PAM type: YTN; PAM sequence: TTT
ataagttctattcagatttc

SEQ ID NO: 356088 - DNA, 20 bp, Artificial Sequence
  Description of Artificial Sequence: Synthetic oligonucleotide
  Target: LAMA2; (+) strand; PAM type: YTN; PAM sequence: TTA
taagttctattcagatttct

SEQ ID NO: 356089 - DNA, 20 bp, Artificial Sequence
  Description of Artificial Sequence: Synthetic oligonucleotide
  Target: LAMA2; (+) strand; PAM type: YTN; PAM sequence: TTC
tattcagatttcttgggata

SEQ ID NO: 356090 - DNA, 20 bp, Artificial Sequence
  Description of Artificial Sequence: Synthetic oligonucleotide
  Target: LAMA2; (+) strand; PAM type: YTN; PAM sequence: CTA
ttcagatttcttgggatacc

SEQ ID NO: 356091 - DNA, 20 bp, Artificial Sequence
  Description of Artificial Sequence: Synthetic oligonucleotide
  Target: LAMA2; (+) strand; PAM type: YTN; PAM sequence: TTC
agatttcttgggatacctca

SEQ ID NO: 356092 - DNA, 20 bp, Artificial Sequence
  Description of Artificial Sequence: Synthetic oligonucleotide
  Target: LAMA2; (+) strand; PAM type: YTN; PAM sequence: TTT
cttgggatacctcatttcta

SEQ ID NO: 356093 - DNA, 20 bp, Artificial Sequence
  Description of Artificial Sequence: Synthetic oligonucleotide
  Target: LAMA2; (+) strand; PAM type: YTN; PAM sequence: TTC
ttgggatacctcatttctag

SEQ ID NO: 356094 - DNA, 20 bp, Artificial Sequence
  Description of Artificial Sequence: Synthetic oligonucleotide
  Target: LAMA2; (+) strand; PAM type: YTN; PAM sequence: CTT
gggatacctcatttctagcc

SEQ ID NO: 356095 - DNA, 20 bp, Artificial Sequence
  Description of Artificial Sequence: Synthetic oligonucleotide
  Target: LAMA2; (+) strand; PAM type: YTN; PAM sequence: TTG
ggatacctcatttctagccc

SEQ ID NO: 356096 - DNA, 20 bp, Artificial Sequence
  Description of Artificial Sequence: Synthetic oligonucleotide
  Target: LAMA2; (+) strand; PAM type: YTN; PAM sequence: CTC
atttctagccctattccttt

SEQ ID NO: 356097 - DNA, 20 bp, Artificial Sequence
  Description of Artificial Sequence: Synthetic oligonucleotide
  Target: LAMA2; (+) strand; PAM type: YTN; PAM sequence: TTT
ctagccctattcctttgctt

SEQ ID NO: 356098 - DNA, 20 bp, Artificial Sequence
  Description of Artificial Sequence: Synthetic oligonucleotide
  Target: LAMA2; (+) strand; PAM type: YTN; PAM sequence: TTC
tagccctattcctttgctta

SEQ ID NO: 356099 - DNA, 20 bp, Artificial Sequence
  Description of Artificial Sequence: Synthetic oligonucleotide
  Target: LAMA2; (+) strand; PAM type: YTN; PAM sequence: CTA
gccctattcctttgcttagc

SEQ ID NO: 356100 - DNA, 20 bp, Artificial Sequence
  Description of Artificial Sequence: Synthetic oligonucleotide
  Target: LAMA2; (+) strand; PAM type: YTN; PAM sequence: CTA
ttcctttgcttagccaggca

SEQ ID NO: 356101 - DNA, 20 bp, Artificial Sequence
  Description of Artificial Sequence: Synthetic oligonucleotide
  Target: LAMA2; (+) strand; PAM type: YTN; PAM sequence: TTC
ctttgcttagccaggcattt

SEQ ID NO: 356102 - DNA, 20 bp, Artificial Sequence
  Description of Artificial Sequence: Synthetic oligonucleotide
  Target: LAMA2; (+) strand; PAM type: YTN; PAM sequence: CTT
tgcttagccaggcattttta

SEQ ID NO: 356103 - DNA, 20 bp, Artificial Sequence
  Description of Artificial Sequence: Synthetic oligonucleotide
  Target: LAMA2; (+) strand; PAM type: YTN; PAM sequence: TTT
gcttagccaggcatttttaa

SEQ ID NO: 356104 - DNA, 20 bp, Artificial Sequence
  Description of Artificial Sequence: Synthetic oligonucleotide
  Target: LAMA2; (+) strand; PAM type: YTN; PAM sequence: TTG
cttagccaggcatttttaat

SEQ ID NO: 356105 - DNA, 20 bp, Artificial Sequence
  Description of Artificial Sequence: Synthetic oligonucleotide
  Target: LAMA2; (+) strand; PAM type: YTN; PAM sequence: CTT
agccaggcatttttaatggc

SEQ ID NO: 356106 - DNA, 20 bp, Artificial Sequence
  Description of Artificial Sequence: Synthetic oligonucleotide
  Target: LAMA2; (+) strand; PAM type: YTN; PAM sequence: TTA
gccaggcatttttaatggct

SEQ ID NO: 356107 - DNA, 20 bp, Artificial Sequence
  Description of Artificial Sequence: Synthetic oligonucleotide
  Target: LAMA2; (+) strand; PAM type: YTN; PAM sequence: TTT
ttaatggctcggcttaactt

SEQ ID NO: 356108 - DNA, 20 bp, Artificial Sequence
  Description of Artificial Sequence: Synthetic oligonucleotide
  Target: LAMA2; (+) strand; PAM type: YTN; PAM sequence: TTT
taatggctcggcttaacttc

SEQ ID NO: 356109 - DNA, 20 bp, Artificial Sequence
  Description of Artificial Sequence: Synthetic oligonucleotide
  Target: LAMA2; (+) strand; PAM type: YTN; PAM sequence: TTT
aatggctcggcttaacttca

SEQ ID NO: 356110 - DNA, 20 bp, Artificial Sequence
  Description of Artificial Sequence: Synthetic oligonucleotide
  Target: LAMA2; (+) strand; PAM type: YTN; PAM sequence: TTA
atggctcggcttaacttcaa

SEQ ID NO: 356111 - DNA, 20 bp, Artificial Sequence
  Description of Artificial Sequence: Synthetic oligonucleotide
  Target: LAMA2; (+) strand; PAM type: YTN; PAM sequence: CTC
ggcttaacttcaactttctc

SEQ ID NO: 356112 - DNA, 20 bp, Artificial Sequence
  Description of Artificial Sequence: Synthetic oligonucleotide
  Target: LAMA2; (+) strand; PAM type: YTN; PAM sequence: CTT
aacttcaactttctcaggaa

SEQ ID NO: 356113 - DNA, 20 bp, Artificial Sequence
  Description of Artificial Sequence: Synthetic oligonucleotide
  Target: LAMA2; (+) strand; PAM type: YTN; PAM sequence: TTA
acttcaactttctcaggaaa

SEQ ID NO: 356114 - DNA, 20 bp, Artificial Sequence
  Description of Artificial Sequence: Synthetic oligonucleotide
  Target: LAMA2; (+) strand; PAM type: YTN; PAM sequence: CTT
caactttctcaggaaagctg

SEQ ID NO: 356115 - DNA, 20 bp, Artificial Sequence
  Description of Artificial Sequence: Synthetic oligonucleotide
  Target: LAMA2; (+) strand; PAM type: YTN; PAM sequence: TTC
aactttctcaggaaagctgc

SEQ ID NO: 356116 - DNA, 20 bp, Artificial Sequence
  Description of Artificial Sequence: Synthetic oligonucleotide
  Target: LAMA2; (+) strand; PAM type: YTN; PAM sequence: CTT
tctcaggaaagctgcccctg

SEQ ID NO: 356117 - DNA, 20 bp, Artificial Sequence
  Description of Artificial Sequence: Synthetic oligonucleotide
  Target: LAMA2; (+) strand; PAM type: YTN; PAM sequence: TTT
ctcaggaaagctgcccctgc

SEQ ID NO: 356118 - DNA, 20 bp, Artificial Sequence
  Description of Artificial Sequence: Synthetic oligonucleotide
  Target: LAMA2; (+) strand; PAM type: YTN; PAM sequence: TTC
tcaggaaagctgcccctgca

SEQ ID NO: 356119 - DNA, 20 bp, Artificial Sequence
  Description of Artificial Sequence: Synthetic oligonucleotide
  Target: LAMA2; (+) strand; PAM type: YTN; PAM sequence: CTC
aggaaagctgcccctgcatc

SEQ ID NO: 356120 - DNA, 20 bp, Artificial Sequence
  Description of Artificial Sequence: Synthetic oligonucleotide
  Target: LAMA2; (+) strand; PAM type: YTN; PAM sequence: CTG
cccctgcatcctcaagtcat

SEQ ID NO: 356121 - DNA, 20 bp, Artificial Sequence
  Description of Artificial Sequence: Synthetic oligonucleotide
  Target: LAMA2; (+) strand; PAM type: YTN; PAM sequence: CTG
catcctcaagtcatatcatt

SEQ ID NO: 356122 - DNA, 20 bp, Artificial Sequence
  Description of Artificial Sequence: Synthetic oligonucleotide
  Target: LAMA2; (+) strand; PAM type: YTN; PAM sequence: CTC
aagtcatatcattctcatgg

SEQ ID NO: 356123 - DNA, 20 bp, Artificial Sequence
  Description of Artificial Sequence: Synthetic oligonucleotide
  Target: LAMA2; (+) strand; PAM type: YTN; PAM sequence: TTC
tcatggcataatcacttttc

SEQ ID NO: 356124 - DNA, 20 bp, Artificial Sequence
  Description of Artificial Sequence: Synthetic oligonucleotide
  Target: LAMA2; (+) strand; PAM type: YTN; PAM sequence: CTC
atggcataatcacttttcaa

SEQ ID NO: 356125 - DNA, 20 bp, Artificial Sequence
  Description of Artificial Sequence: Synthetic oligonucleotide
  Target: LAMA2; (+) strand; PAM type: YTN; PAM sequence: CTT
ttcaaacctttttcttttct

SEQ ID NO: 356126 - DNA, 20 bp, Artificial Sequence
  Description of Artificial Sequence: Synthetic oligonucleotide
  Target: LAMA2; (+) strand; PAM type: YTN; PAM sequence: TTT
tcaaacctttttcttttctt

SEQ ID NO: 356127 - DNA, 20 bp, Artificial Sequence
  Description of Artificial Sequence: Synthetic oligonucleotide
  Target: LAMA2; (+) strand; PAM type: YTN; PAM sequence: TTT
caaacctttttcttttcttt

SEQ ID NO: 356128 - DNA, 20 bp, Artificial Sequence
  Description of Artificial Sequence: Synthetic oligonucleotide
  Target: LAMA2; (+) strand; PAM type: YTN; PAM sequence: TTC
aaacctttttcttttctttt

SEQ ID NO: 356129 - DNA, 20 bp, Artificial Sequence
  Description of Artificial Sequence: Synthetic oligonucleotide
  Target: LAMA2; (+) strand; PAM type: YTN; PAM sequence: CTT
tttcttttcttttatgatct

SEQ ID NO: 356130 - DNA, 20 bp, Artificial Sequence
  Description of Artificial Sequence: Synthetic oligonucleotide
  Target: LAMA2; (+) strand; PAM type: YTN; PAM sequence: TTT
ttcttttcttttatgatctc

SEQ ID NO: 356131 - DNA, 20 bp, Artificial Sequence
  Description of Artificial Sequence: Synthetic oligonucleotide
  Target: LAMA2; (+) strand; PAM type: YTN; PAM sequence: TTT
tcttttcttttatgatctca

SEQ ID NO: 356132 - DNA, 20 bp, Artificial Sequence
  Description of Artificial Sequence: Synthetic oligonucleotide
  Target: LAMA2; (+) strand; PAM type: YTN; PAM sequence: TTT
cttttcttttatgatctcat

SEQ ID NO: 356133 - DNA, 20 bp, Artificial Sequence
  Description of Artificial Sequence: Synthetic oligonucleotide
  Target: LAMA2; (+) strand; PAM type: YTN; PAM sequence: TTC
ttttcttttatgatctcata

SEQ ID NO: 356134 - DNA, 20 bp, Artificial Sequence
  Description of Artificial Sequence: Synthetic oligonucleotide
  Target: LAMA2; (+) strand; PAM type: YTN; PAM sequence: CTT
ttcttttatgatctcataat

SEQ ID NO: 356135 - DNA, 20 bp, Artificial Sequence
  Description of Artificial Sequence: Synthetic oligonucleotide
  Target: LAMA2; (+) strand; PAM type: YTN; PAM sequence: TTT
tcttttatgatctcataatg

SEQ ID NO: 356136 - DNA, 20 bp, Artificial Sequence
  Description of Artificial Sequence: Synthetic oligonucleotide
  Target: LAMA2; (+) strand; PAM type: YTN; PAM sequence: TTT
cttttatgatctcataatga

SEQ ID NO: 356137 - DNA, 20 bp, Artificial Sequence
  Description of Artificial Sequence: Synthetic oligonucleotide
  Target: LAMA2; (+) strand; PAM type: YTN; PAM sequence: TTC
ttttatgatctcataatgag

SEQ ID NO: 356138 - DNA, 20 bp, Artificial Sequence
  Description of Artificial Sequence: Synthetic oligonucleotide
  Target: LAMA2; (+) strand; PAM type: YTN; PAM sequence: CTT
ttatgatctcataatgagta

SEQ ID NO: 356139 - DNA, 20 bp, Artificial Sequence
  Description of Artificial Sequence: Synthetic oligonucleotide
  Target: LAMA2; (+) strand; PAM type: YTN; PAM sequence: TTT
tatgatctcataatgagtaa

SEQ ID NO: 356140 - DNA, 20 bp, Artificial Sequence
  Description of Artificial Sequence: Synthetic oligonucleotide
  Target: LAMA2; (+) strand; PAM type: YTN; PAM sequence: TTT
atgatctcataatgagtaat

SEQ ID NO: 356141 - DNA, 20 bp, Artificial Sequence
  Description of Artificial Sequence: Synthetic oligonucleotide
  Target: LAMA2; (+) strand; PAM type: YTN; PAM sequence: TTA
tgatctcataatgagtaatt

SEQ ID NO: 356142 - DNA, 20 bp, Artificial Sequence
  Description of Artificial Sequence: Synthetic oligonucleotide
  Target: LAMA2; (+) strand; PAM type: YTN; PAM sequence: CTC
ataatgagtaattctgtttt

SEQ ID NO: 356143 - DNA, 20 bp, Artificial Sequence
  Description of Artificial Sequence: Synthetic oligonucleotide
  Target: LAMA2; (+) strand; PAM type: YTN; PAM sequence: TTC
tgttttatgtctatcttacc

SEQ ID NO: 356144 - DNA, 20 bp, Artificial Sequence
  Description of Artificial Sequence: Synthetic oligonucleotide
  Target: LAMA2; (+) strand; PAM type: YTN; PAM sequence: CTG
ttttatgtctatcttacctc

SEQ ID NO: 356145 - DNA, 20 bp, Artificial Sequence
  Description of Artificial Sequence: Synthetic oligonucleotide
  Target: LAMA2; (+) strand; PAM type: YTN; PAM sequence: TTT
tatgtctatcttacctctgg

SEQ ID NO: 356146 - DNA, 20 bp, Artificial Sequence
  Description of Artificial Sequence: Synthetic oligonucleotide
  Target: LAMA2; (+) strand; PAM type: YTN; PAM sequence: TTT
atgtctatcttacctctggt

SEQ ID NO: 356147 - DNA, 20 bp, Artificial Sequence
  Description of Artificial Sequence: Synthetic oligonucleotide
  Target: LAMA2; (+) strand; PAM type: YTN; PAM sequence: TTA
tgtctatcttacctctggtg

SEQ ID NO: 356148 - DNA, 20 bp, Artificial Sequence
  Description of Artificial Sequence: Synthetic oligonucleotide
  Target: LAMA2; (+) strand; PAM type: YTN; PAM sequence: CTA
tcttacctctggtgatgata

SEQ ID NO: 356149 - DNA, 20 bp, Artificial Sequence
  Description of Artificial Sequence: Synthetic oligonucleotide
  Target: LAMA2; (+) strand; PAM type: YTN; PAM sequence: CTT
acctctggtgatgatatgga

SEQ ID NO: 356150 - DNA, 20 bp, Artificial Sequence
  Description of Artificial Sequence: Synthetic oligonucleotide
  Target: LAMA2; (+) strand; PAM type: YTN; PAM sequence: TTA
cctctggtgatgatatggac

SEQ ID NO: 356151 - DNA, 20 bp, Artificial Sequence
  Description of Artificial Sequence: Synthetic oligonucleotide
  Target: LAMA2; (+) strand; PAM type: YTN; PAM sequence: CTC
tggtgatgatatggacccta

SEQ ID NO: 356152 - DNA, 20 bp, Artificial Sequence
  Description of Artificial Sequence: Synthetic oligonucleotide
  Target: LAMA2; (+) strand; PAM type: YTN; PAM sequence: CTG
gtgatgatatggaccctata

SEQ ID NO: 356153 - DNA, 20 bp, Artificial Sequence
  Description of Artificial Sequence: Synthetic oligonucleotide
  Target: LAMA2; (+) strand; PAM type: YTN; PAM sequence: CTA
tatattttctttaccattgc

SEQ ID NO: 356154 - DNA, 20 bp, Artificial Sequence
  Description of Artificial Sequence: Synthetic oligonucleotide
  Target: LAMA2; (+) strand; PAM type: YTN; PAM sequence: TTT
tctttaccattgcacaataa

SEQ ID NO: 356155 - DNA, 20 bp, Artificial Sequence
  Description of Artificial Sequence: Synthetic oligonucleotide
  Target: LAMA2; (+) strand; PAM type: YTN; PAM sequence: TTT
ctttaccattgcacaataag

SEQ ID NO: 356156 - DNA, 20 bp, Artificial Sequence
  Description of Artificial Sequence: Synthetic oligonucleotide
  Target: LAMA2; (+) strand; PAM type: YTN; PAM sequence: TTC
tttaccattgcacaataaga

SEQ ID NO: 356157 - DNA, 20 bp, Artificial Sequence
  Description of Artificial Sequence: Synthetic oligonucleotide
  Target: LAMA2; (+) strand; PAM type: YTN; PAM sequence: CTT
taccattgcacaataagaag

SEQ ID NO: 356158 - DNA, 20 bp, Artificial Sequence
  Description of Artificial Sequence: Synthetic oligonucleotide
  Target: LAMA2; (+) strand; PAM type: YTN; PAM sequence: TTT
accattgcacaataagaaga

SEQ ID NO: 356159 - DNA, 20 bp, Artificial Sequence
  Description of Artificial Sequence: Synthetic oligonucleotide
  Target: LAMA2; (+) strand; PAM type: YTN; PAM sequence: TTA
ccattgcacaataagaagat

SEQ ID NO: 356160 - DNA, 20 bp, Artificial Sequence
  Description of Artificial Sequence: Synthetic oligonucleotide
  Target: LAMA2; (+) strand; PAM type: YTN; PAM sequence: TTG
cacaataagaagataacaca

SEQ ID NO: 356161 - DNA, 20 bp, Artificial Sequence
  Description of Artificial Sequence: Synthetic oligonucleotide
  Target: LAMA2; (+) strand; PAM type: YTN; PAM sequence: CTC
atacaaaagaaagaaggaag

SEQ ID NO: 356162 - DNA, 20 bp, Artificial Sequence
  Description of Artificial Sequence: Synthetic oligonucleotide
  Target: LAMA2; (+) strand; PAM type: YTN; PAM sequence: CTA
aaatctcgtgaagctttgac

SEQ ID NO: 356163 - DNA, 20 bp, Artificial Sequence
  Description of Artificial Sequence: Synthetic oligonucleotide
  Target: LAMA2; (+) strand; PAM type: YTN; PAM sequence: CTC
gtgaagctttgacagtcatt

SEQ ID NO: 356164 - DNA, 20 bp, Artificial Sequence
  Description of Artificial Sequence: Synthetic oligonucleotide
  Target: LAMA2; (+) strand; PAM type: YTN; PAM sequence: CTT
tgacagtcatttagcctttc

SEQ ID NO: 356165 - DNA, 20 bp, Artificial Sequence
  Description of Artificial Sequence: Synthetic oligonucleotide
  Target: LAMA2; (+) strand; PAM type: YTN; PAM sequence: TTT
gacagtcatttagcctttcc

SEQ ID NO: 356166 - DNA, 20 bp, Artificial Sequence
  Description of Artificial Sequence: Synthetic oligonucleotide
  Target: LAMA2; (+) strand; PAM type: YTN; PAM sequence: TTG
acagtcatttagcctttccg

SEQ ID NO: 356167 - DNA, 20 bp, Artificial Sequence
  Description of Artificial Sequence: Synthetic oligonucleotide
  Target: LAMA2; (+) strand; PAM type: YTN; PAM sequence: TTT
agcctttccgattctgtttt

SEQ ID NO: 356168 - DNA, 20 bp, Artificial Sequence
  Description of Artificial Sequence: Synthetic oligonucleotide
  Target: LAMA2; (+) strand; PAM type: YTN; PAM sequence: TTA
gcctttccgattctgtttta

SEQ ID NO: 356169 - DNA, 20 bp, Artificial Sequence
  Description of Artificial Sequence: Synthetic oligonucleotide
  Target: LAMA2; (+) strand; PAM type: YTN; PAM sequence: CTT
tccgattctgttttataatc

SEQ ID NO: 356170 - DNA, 20 bp, Artificial Sequence
  Description of Artificial Sequence: Synthetic oligonucleotide
  Target: LAMA2; (+) strand; PAM type: YTN; PAM sequence: TTT
ccgattctgttttataatct

SEQ ID NO: 356171 - DNA, 20 bp, Artificial Sequence
  Description of Artificial Sequence: Synthetic oligonucleotide
  Target: LAMA2; (+) strand; PAM type: YTN; PAM sequence: TTC
cgattctgttttataatcta

SEQ ID NO: 356172 - DNA, 20 bp, Artificial Sequence
  Description of Artificial Sequence: Synthetic oligonucleotide
  Target: LAMA2; (+) strand; PAM type: YTN; PAM sequence: TTC
tgttttataatctatgaaat

SEQ ID NO: 356173 - DNA, 20 bp, Artificial Sequence
  Description of Artificial Sequence: Synthetic oligonucleotide
  Target: LAMA2; (+) strand; PAM type: YTN; PAM sequence: CTG
ttttataatctatgaaatgg

SEQ ID NO: 356174 - DNA, 20 bp, Artificial Sequence
  Description of Artificial Sequence: Synthetic oligonucleotide
  Target: LAMA2; (+) strand; PAM type: YTN; PAM sequence: TTT
tataatctatgaaatggtgt

SEQ ID NO: 356175 - DNA, 20 bp, Artificial Sequence
  Description of Artificial Sequence: Synthetic oligonucleotide
  Target: LAMA2; (+) strand; PAM type: YTN; PAM sequence: TTT
ataatctatgaaatggtgtt

SEQ ID NO: 356176 - DNA, 20 bp, Artificial Sequence
  Description of Artificial Sequence: Synthetic oligonucleotide
  Target: LAMA2; (+) strand; PAM type: YTN; PAM sequence: TTA
taatctatgaaatggtgtta

SEQ ID NO: 356177 - DNA, 20 bp, Artificial Sequence
  Description of Artificial Sequence: Synthetic oligonucleotide
  Target: LAMA2; (+) strand; PAM type: YTN; PAM sequence: CTA
tgaaatggtgttattgaatc

SEQ ID NO: 356178 - DNA, 20 bp, Artificial Sequence
  Description of Artificial Sequence: Synthetic oligonucleotide
  Target: LAMA2; (+) strand; PAM type: YTN; PAM sequence: TTA
ttgaatcttttctgcctctc

SEQ ID NO: 356179 - DNA, 20 bp, Artificial Sequence
  Description of Artificial Sequence: Synthetic oligonucleotide
  Target: LAMA2; (+) strand; PAM type: YTN; PAM sequence: TTG
aatcttttctgcctctcagt

SEQ ID NO: 356180 - DNA, 20 bp, Artificial Sequence
  Description of Artificial Sequence: Synthetic oligonucleotide
  Target: LAMA2; (+) strand; PAM type: YTN; PAM sequence: CTT
ttctgcctctcagtaggtat

SEQ ID NO: 356181 - DNA, 20 bp, Artificial Sequence
  Description of Artificial Sequence: Synthetic oligonucleotide
  Target: LAMA2; (+) strand; PAM type: YTN; PAM sequence: TTT
tctgcctctcagtaggtata

SEQ ID NO: 356182 - DNA, 20 bp, Artificial Sequence
  Description of Artificial Sequence: Synthetic oligonucleotide
  Target: LAMA2; (+) strand; PAM type: YTN; PAM sequence: TTT
ctgcctctcagtaggtataa

SEQ ID NO: 356183 - DNA, 20 bp, Artificial Sequence
  Description of Artificial Sequence: Synthetic oligonucleotide
  Target: LAMA2; (+) strand; PAM type: YTN; PAM sequence: TTC
tgcctctcagtaggtataat

SEQ ID NO: 356184 - DNA, 20 bp, Artificial Sequence
  Description of Artificial Sequence: Synthetic oligonucleotide
  Target: LAMA2; (+) strand; PAM type: YTN; PAM sequence: CTG
cctctcagtaggtataatta

SEQ ID NO: 356185 - DNA, 20 bp, Artificial Sequence
  Description of Artificial Sequence: Synthetic oligonucleotide
  Target: LAMA2; (+) strand; PAM type: YTN; PAM sequence: CTC
tcagtaggtataattatcac

SEQ ID NO: 356186 - DNA, 20 bp, Artificial Sequence
  Description of Artificial Sequence: Synthetic oligonucleotide
  Target: LAMA2; (+) strand; PAM type: YTN; PAM sequence: CTC
agtaggtataattatcacac

SEQ ID NO: 356187 - DNA, 20 bp, Artificial Sequence
  Description of Artificial Sequence: Synthetic oligonucleotide
  Target: LAMA2; (+) strand; PAM type: YTN; PAM sequence: TTA
tcacactgaagccctgtaca

SEQ ID NO: 356188 - DNA, 20 bp, Artificial Sequence
  Description of Artificial Sequence: Synthetic oligonucleotide
  Target: LAMA2; (+) strand; PAM type: YTN; PAM sequence: CTG
aagccctgtacaagtataaa

SEQ ID NO: 356189 - DNA, 20 bp, Artificial Sequence
  Description of Artificial Sequence: Synthetic oligonucleotide
  Target: LAMA2; (+) strand; PAM type: YTN; PAM sequence: CTG
tacaagtataaagtataacc

SEQ ID NO: 356190 - DNA, 20 bp, Artificial Sequence
  Description of Artificial Sequence: Synthetic oligonucleotide
  Target: LAMA2; (+) strand; PAM type: YTN; PAM sequence: CTA
ctggattactttttgttgtt

SEQ ID NO: 356191 - DNA, 20 bp, Artificial Sequence
  Description of Artificial Sequence: Synthetic oligonucleotide
  Target: LAMA2; (+) strand; PAM type: YTN; PAM sequence: CTG
gattactttttgttgttgtt

SEQ ID NO: 356192 - DNA, 20 bp, Artificial Sequence
  Description of Artificial Sequence: Synthetic oligonucleotide
  Target: LAMA2; (+) strand; PAM type: YTN; PAM sequence: TTA
ctttttgttgttgtttatat

SEQ ID NO: 356193 - DNA, 20 bp, Artificial Sequence
  Description of Artificial Sequence: Synthetic oligonucleotide
  Target: LAMA2; (+) strand; PAM type: YTN; PAM sequence: CTT
tttgttgttgtttatattgc

SEQ ID NO: 356194 - DNA, 20 bp, Artificial Sequence
  Description of Artificial Sequence: Synthetic oligonucleotide
  Target: LAMA2; (+) strand; PAM type: YTN; PAM sequence: TTT
ttgttgttgtttatattgct

SEQ ID NO: 356195 - DNA, 20 bp, Artificial Sequence
  Description of Artificial Sequence: Synthetic oligonucleotide
  Target: LAMA2; (+) strand; PAM type: YTN; PAM sequence: TTT
tgttgttgtttatattgctt

SEQ ID NO: 356196 - DNA, 20 bp, Artificial Sequence
  Description of Artificial Sequence: Synthetic oligonucleotide
  Target: LAMA2; (+) strand; PAM type: YTN; PAM sequence: TTT
gttgttgtttatattgcttt

SEQ ID NO: 356197 - DNA, 20 bp, Artificial Sequence
  Description of Artificial Sequence: Synthetic oligonucleotide
  Target: LAMA2; (+) strand; PAM type: YTN; PAM sequence: TTG
ttgttgtttatattgctttt

SEQ ID NO: 356198 - DNA, 20 bp, Artificial Sequence
  Description of Artificial Sequence: Synthetic oligonucleotide
  Target: LAMA2; (+) strand; PAM type: YTN; PAM sequence: TTG
ttgtttatattgcttttccc

SEQ ID NO: 356199 - DNA, 20 bp, Artificial Sequence
  Description of Artificial Sequence: Synthetic oligonucleotide
  Target: LAMA2; (+) strand; PAM type: YTN; PAM sequence: TTG
tttatattgcttttcccaag

SEQ ID NO: 356200 - DNA, 20 bp, Artificial Sequence
  Description of Artificial Sequence: Synthetic oligonucleotide
  Target: LAMA2; (+) strand; PAM type: YTN; PAM sequence: TTT
atattgcttttcccaagtag

SEQ ID NO: 356201 - DNA, 20 bp, Artificial Sequence
  Description of Artificial Sequence: Synthetic oligonucleotide
  Target: LAMA2; (+) strand; PAM type: YTN; PAM sequence: TTA
tattgcttttcccaagtaga

SEQ ID NO: 356202 - DNA, 20 bp, Artificial Sequence
  Description of Artificial Sequence: Synthetic oligonucleotide
  Target: LAMA2; (+) strand; PAM type: YTN; PAM sequence: TTG
cttttcccaagtagagataa

SEQ ID NO: 356203 - DNA, 20 bp, Artificial Sequence
  Description of Artificial Sequence: Synthetic oligonucleotide
  Target: LAMA2; (+) strand; PAM type: YTN; PAM sequence: CTT
ttcccaagtagagataagtt

SEQ ID NO: 356204 - DNA, 20 bp, Artificial Sequence
  Description of Artificial Sequence: Synthetic oligonucleotide
  Target: LAMA2; (+) strand; PAM type: YTN; PAM sequence: TTT
tcccaagtagagataagttt

SEQ ID NO: 356205 - DNA, 20 bp, Artificial Sequence
  Description of Artificial Sequence: Synthetic oligonucleotide
  Target: LAMA2; (+) strand; PAM type: YTN; PAM sequence: TTT
cccaagtagagataagtttc

SEQ ID NO: 356206 - DNA, 20 bp, Artificial Sequence
  Description of Artificial Sequence: Synthetic oligonucleotide
  Target: LAMA2; (+) strand; PAM type: YTN; PAM sequence: TTC
ccaagtagagataagtttct

SEQ ID NO: 356207 - DNA, 20 bp, Artificial Sequence
  Description of Artificial Sequence: Synthetic oligonucleotide
  Target: LAMA2; (+) strand; PAM type: YTN; PAM sequence: TTT
ctgttctttttccctgaaag

SEQ ID NO: 356208 - DNA, 20 bp, Artificial Sequence
  Description of Artificial Sequence: Synthetic oligonucleotide
  Target: LAMA2; (+) strand; PAM type: YTN; PAM sequence: TTC
tgttctttttccctgaaagg

SEQ ID NO: 356209 - DNA, 20 bp, Artificial Sequence
  Description of Artificial Sequence: Synthetic oligonucleotide
  Target: LAMA2; (+) strand; PAM type: YTN; PAM sequence: CTG
ttctttttccctgaaaggat

SEQ ID NO: 356210 - DNA, 20 bp, Artificial Sequence
  Description of Artificial Sequence: Synthetic oligonucleotide
  Target: LAMA2; (+) strand; PAM type: YTN; PAM sequence: TTC
tttttccctgaaaggatttt

SEQ ID NO: 356211 - DNA, 20 bp, Artificial Sequence
  Description of Artificial Sequence: Synthetic oligonucleotide
  Target: LAMA2; (+) strand; PAM type: YTN; PAM sequence: CTT
tttccctgaaaggattttta

SEQ ID NO: 356212 - DNA, 20 bp, Artificial Sequence
  Description of Artificial Sequence: Synthetic oligonucleotide
  Target: LAMA2; (+) strand; PAM type: YTN; PAM sequence: TTT
ttccctgaaaggatttttat

SEQ ID NO: 356213 - DNA, 20 bp, Artificial Sequence
  Description of Artificial Sequence: Synthetic oligonucleotide
  Target: LAMA2; (+) strand; PAM type: YTN; PAM sequence: TTT
tccctgaaaggatttttatg

SEQ ID NO: 356214 - DNA, 20 bp, Artificial Sequence
  Description of Artificial Sequence: Synthetic oligonucleotide
  Target: LAMA2; (+) strand; PAM type: YTN; PAM sequence: TTT
ccctgaaaggatttttatgg

SEQ ID NO: 356215 - DNA, 20 bp, Artificial Sequence
  Description of Artificial Sequence: Synthetic oligonucleotide
  Target: LAMA2; (+) strand; PAM type: YTN; PAM sequence: TTC
cctgaaaggatttttatggt

SEQ ID NO: 356216 - DNA, 20 bp, Artificial Sequence
  Description of Artificial Sequence: Synthetic oligonucleotide
  Target: LAMA2; (+) strand; PAM type: YTN; PAM sequence: CTG
aaaggatttttatggtgtgt

SEQ ID NO: 356217 - DNA, 20 bp, Artificial Sequence
  Description of Artificial Sequence: Synthetic oligonucleotide
  Target: LAMA2; (+) strand; PAM type: YTN; PAM sequence: TTT
ttatggtgtgttaacatttt

SEQ ID NO: 356218 - DNA, 20 bp, Artificial Sequence
  Description of Artificial Sequence: Synthetic oligonucleotide
  Target: LAMA2; (+) strand; PAM type: YTN; PAM sequence: TTT
tatggtgtgttaacattttt

SEQ ID NO: 356219 - DNA, 20 bp, Artificial Sequence
  Description of Artificial Sequence: Synthetic oligonucleotide
  Target: LAMA2; (+) strand; PAM type: YTN; PAM sequence: TTT
atggtgtgttaacattttta

SEQ ID NO: 356220 - DNA, 20 bp, Artificial Sequence
  Description of Artificial Sequence: Synthetic oligonucleotide
  Target: LAMA2; (+) strand; PAM type: YTN; PAM sequence: TTA
tggtgtgttaacatttttat

SEQ ID NO: 356221 - DNA, 20 bp, Artificial Sequence
  Description of Artificial Sequence: Synthetic oligonucleotide
  Target: LAMA2; (+) strand; PAM type: YTN; PAM sequence: TTA
acatttttattggttttgga

SEQ ID NO: 356222 - DNA, 20 bp, Artificial Sequence
  Description of Artificial Sequence: Synthetic oligonucleotide
  Target: LAMA2; (+) strand; PAM type: YTN; PAM sequence: TTT
ttattggttttggatttccc

SEQ ID NO: 356223 - DNA, 20 bp, Artificial Sequence
  Description of Artificial Sequence: Synthetic oligonucleotide
  Target: LAMA2; (+) strand; PAM type: YTN; PAM sequence: TTT
tattggttttggatttccct

SEQ ID NO: 356224 - DNA, 20 bp, Artificial Sequence
  Description of Artificial Sequence: Synthetic oligonucleotide
  Target: LAMA2; (+) strand; PAM type: YTN; PAM sequence: TTT
attggttttggatttccctc

SEQ ID NO: 356225 - DNA, 20 bp, Artificial Sequence
  Description of Artificial Sequence: Synthetic oligonucleotide
  Target: LAMA2; (+) strand; PAM type: YTN; PAM sequence: TTA
ttggttttggatttccctct

SEQ ID NO: 356226 - DNA, 20 bp, Artificial Sequence
  Description of Artificial Sequence: Synthetic oligonucleotide
  Target: LAMA2; (+) strand; PAM type: YTN; PAM sequence: TTG
gttttggatttccctcttct

SEQ ID NO: 356227 - DNA, 20 bp, Artificial Sequence
  Description of Artificial Sequence: Synthetic oligonucleotide
  Target: LAMA2; (+) strand; PAM type: YTN; PAM sequence: TTT
tggatttccctcttcttttt

SEQ ID NO: 356228 - DNA, 20 bp, Artificial Sequence
  Description of Artificial Sequence: Synthetic oligonucleotide
  Target: LAMA2; (+) strand; PAM type: YTN; PAM sequence: TTT
ggatttccctcttctttttc

SEQ ID NO: 356229 - DNA, 20 bp, Artificial Sequence
  Description of Artificial Sequence: Synthetic oligonucleotide
  Target: LAMA2; (+) strand; PAM type: YTN; PAM sequence: TTG
gatttccctcttctttttca

SEQ ID NO: 356230 - DNA, 20 bp, Artificial Sequence
  Description of Artificial Sequence: Synthetic oligonucleotide
  Target: LAMA2; (+) strand; PAM type: YTN; PAM sequence: TTT
ccctcttctttttcatttgt

SEQ ID NO: 356231 - DNA, 20 bp, Artificial Sequence
  Description of Artificial Sequence: Synthetic oligonucleotide
  Target: LAMA2; (+) strand; PAM type: YTN; PAM sequence: TTC
cctcttctttttcatttgtg

SEQ ID NO: 356232 - DNA, 20 bp, Artificial Sequence
  Description of Artificial Sequence: Synthetic oligonucleotide
  Target: LAMA2; (+) strand; PAM type: YTN; PAM sequence: CTC
ttctttttcatttgtgtaca

SEQ ID NO: 356233 - DNA, 20 bp, Artificial Sequence
  Description of Artificial Sequence: Synthetic oligonucleotide
  Target: LAMA2; (+) strand; PAM type: YTN; PAM sequence: CTT
ctttttcatttgtgtacagg

SEQ ID NO: 356234 - DNA, 20 bp, Artificial Sequence
  Description of Artificial Sequence: Synthetic oligonucleotide
  Target: LAMA2; (+) strand; PAM type: YTN; PAM sequence: TTC
tttttcatttgtgtacagga

SEQ ID NO: 356235 - DNA, 20 bp, Artificial Sequence
  Description of Artificial Sequence: Synthetic oligonucleotide
  Target: LAMA2; (+) strand; PAM type: YTN; PAM sequence: CTT
tttcatttgtgtacaggaat

SEQ ID NO: 356236 - DNA, 20 bp, Artificial Sequence
  Description of Artificial Sequence: Synthetic oligonucleotide
  Target: LAMA2; (+) strand; PAM type: YTN; PAM sequence: TTT
ttcatttgtgtacaggaatg

SEQ ID NO: 356237 - DNA, 20 bp, Artificial Sequence
  Description of Artificial Sequence: Synthetic oligonucleotide
  Target: LAMA2; (+) strand; PAM type: YTN; PAM sequence: TTT
tcatttgtgtacaggaatgg

SEQ ID NO: 356238 - DNA, 20 bp, Artificial Sequence
  Description of Artificial Sequence: Synthetic oligonucleotide
  Target: LAMA2; (+) strand; PAM type: YTN; PAM sequence: TTT
catttgtgtacaggaatggt

SEQ ID NO: 356239 - DNA, 20 bp, Artificial Sequence
  Description of Artificial Sequence: Synthetic oligonucleotide
  Target: LAMA2; (+) strand; PAM type: YTN; PAM sequence: TTC
atttgtgtacaggaatggtc

SEQ ID NO: 356240 - DNA, 20 bp, Artificial Sequence
  Description of Artificial Sequence: Synthetic oligonucleotide
  Target: LAMA2; (+) strand; PAM type: YTN; PAM sequence: TTT
gtgtacaggaatggtcactt

SEQ ID NO: 356241 - DNA, 20 bp, Artificial Sequence
  Description of Artificial Sequence: Synthetic oligonucleotide
  Target: LAMA2; (+) strand; PAM type: YTN; PAM sequence: TTG
tgtacaggaatggtcacttc

SEQ ID NO: 356242 - DNA, 20 bp, Artificial Sequence
  Description of Artificial Sequence: Synthetic oligonucleotide
  Target: LAMA2; (+) strand; PAM type: YTN; PAM sequence: CTT
cattaacttgtagacttgat

SEQ ID NO: 356243 - DNA, 20 bp, Artificial Sequence
  Description of Artificial Sequence: Synthetic oligonucleotide
  Target: LAMA2; (+) strand; PAM type: YTN; PAM sequence: TTC
attaacttgtagacttgatt

SEQ ID NO: 356244 - DNA, 20 bp, Artificial Sequence
  Description of Artificial Sequence: Synthetic oligonucleotide
  Target: LAMA2; (+) strand; PAM type: YTN; PAM sequence: TTA
acttgtagacttgattcctg

SEQ ID NO: 356245 - DNA, 20 bp, Artificial Sequence
  Description of Artificial Sequence: Synthetic oligonucleotide
  Target: LAMA2; (+) strand; PAM type: YTN; PAM sequence: CTT
gtagacttgattcctgggca

SEQ ID NO: 356246 - DNA, 20 bp, Artificial Sequence
  Description of Artificial Sequence: Synthetic oligonucleotide
  Target: LAMA2; (+) strand; PAM type: YTN; PAM sequence: TTG
tagacttgattcctgggcat

SEQ ID NO: 356247 - DNA, 20 bp, Artificial Sequence
  Description of Artificial Sequence: Synthetic oligonucleotide
  Target: LAMA2; (+) strand; PAM type: YTN; PAM sequence: CTT
gattcctgggcatttttaca

SEQ ID NO: 356248 - DNA, 20 bp, Artificial Sequence
  Description of Artificial Sequence: Synthetic oligonucleotide
  Target: LAMA2; (+) strand; PAM type: YTN; PAM sequence: TTG
attcctgggcatttttacaa

SEQ ID NO: 356249 - DNA, 20 bp, Artificial Sequence
  Description of Artificial Sequence: Synthetic oligonucleotide
  Target: LAMA2; (+) strand; PAM type: YTN; PAM sequence: TTC
ctgggcatttttacaaatgg

SEQ ID NO: 356250 - DNA, 20 bp, Artificial Sequence
  Description of Artificial Sequence: Synthetic oligonucleotide
  Target: LAMA2; (+) strand; PAM type: YTN; PAM sequence: CTG
ggcatttttacaaatggact

SEQ ID NO: 356251 - DNA, 20 bp, Artificial Sequence
  Description of Artificial Sequence: Synthetic oligonucleotide
  Target: LAMA2; (+) strand; PAM type: YTN; PAM sequence: TTT
ttacaaatggacttcaatgt

SEQ ID NO: 356252 - DNA, 20 bp, Artificial Sequence
  Description of Artificial Sequence: Synthetic oligonucleotide
  Target: LAMA2; (+) strand; PAM type: YTN; PAM sequence: TTT
tacaaatggacttcaatgtg

SEQ ID NO: 356253 - DNA, 20 bp, Artificial Sequence
  Description of Artificial Sequence: Synthetic oligonucleotide
  Target: LAMA2; (+) strand; PAM type: YTN; PAM sequence: TTT
acaaatggacttcaatgtgt

SEQ ID NO: 356254 - DNA, 20 bp, Artificial Sequence
  Description of Artificial Sequence: Synthetic oligonucleotide
  Target: LAMA2; (+) strand; PAM type: YTN; PAM sequence: TTA
caaatggacttcaatgtgta

SEQ ID NO: 356255 - DNA, 20 bp, Artificial Sequence
  Description of Artificial Sequence: Synthetic oligonucleotide
  Target: LAMA2; (+) strand; PAM type: YTN; PAM sequence: CTT
caatgtgtacatttaatcct

SEQ ID NO: 356256 - DNA, 20 bp, Artificial Sequence
  Description of Artificial Sequence: Synthetic oligonucleotide
  Target: LAMA2; (+) strand; PAM type: YTN; PAM sequence: TTC
aatgtgtacatttaatcctg

SEQ ID NO: 356257 - DNA, 20 bp, Artificial Sequence
  Description of Artificial Sequence: Synthetic oligonucleotide
  Target: LAMA2; (+) strand; PAM type: YTN; PAM sequence: TTT
aatcctgaatctaaattaca

SEQ ID NO: 356258 - DNA, 20 bp, Artificial Sequence
  Description of Artificial Sequence: Synthetic oligonucleotide
  Target: LAMA2; (+) strand; PAM type: YTN; PAM sequence: TTA
atcctgaatctaaattacag

SEQ ID NO: 356259 - DNA, 20 bp, Artificial Sequence
  Description of Artificial Sequence: Synthetic oligonucleotide
  Target: LAMA2; (+) strand; PAM type: YTN; PAM sequence: CTG
aatctaaattacagatgtag

SEQ ID NO: 356260 - DNA, 20 bp, Artificial Sequence
  Description of Artificial Sequence: Synthetic oligonucleotide
  Target: LAMA2; (+) strand; PAM type: YTN; PAM sequence: CTA
aattacagatgtagaatttt

SEQ ID NO: 356261 - DNA, 20 bp, Artificial Sequence
  Description of Artificial Sequence: Synthetic oligonucleotide
  Target: LAMA2; (+) strand; PAM type: YTN; PAM sequence: TTA
cagatgtagaatttttggca

SEQ ID NO: 356262 - DNA, 20 bp, Artificial Sequence
  Description of Artificial Sequence: Synthetic oligonucleotide
  Target: LAMA2; (+) strand; PAM type: YTN; PAM sequence: TTT
ttggcataaaaggttcatgc

SEQ ID NO: 356263 - DNA, 20 bp, Artificial Sequence
  Description of Artificial Sequence: Synthetic oligonucleotide
  Target: LAMA2; (+) strand; PAM type: YTN; PAM sequence: TTT
tggcataaaaggttcatgca

SEQ ID NO: 356264 - DNA, 20 bp, Artificial Sequence
  Description of Artificial Sequence: Synthetic oligonucleotide
  Target: LAMA2; (+) strand; PAM type: YTN; PAM sequence: TTT
ggcataaaaggttcatgcat

SEQ ID NO: 356265 - DNA, 20 bp, Artificial Sequence
  Description of Artificial Sequence: Synthetic oligonucleotide
  Target: LAMA2; (+) strand; PAM type: YTN; PAM sequence: TTG
gcataaaaggttcatgcatg

SEQ ID NO: 356266 - DNA, 20 bp, Artificial Sequence
  Description of Artificial Sequence: Synthetic oligonucleotide
  Target: LAMA2; (+) strand; PAM type: YTN; PAM sequence: TTC
atgcatgaatgaatttatct

SEQ ID NO: 356267 - DNA, 20 bp, Artificial Sequence
  Description of Artificial Sequence: Synthetic oligonucleotide
  Target: LAMA2; (+) strand; PAM type: YTN; PAM sequence: TTT
atctcttgcaacccctacag

SEQ ID NO: 356268 - DNA, 20 bp, Artificial Sequence
  Description of Artificial Sequence: Synthetic oligonucleotide
  Target: LAMA2; (+) strand; PAM type: YTN; PAM sequence: TTA
tctcttgcaacccctacagt

SEQ ID NO: 356269 - DNA, 20 bp, Artificial Sequence
  Description of Artificial Sequence: Synthetic oligonucleotide
  Target: LAMA2; (+) strand; PAM type: YTN; PAM sequence: CTC
ttgcaacccctacagttcaa

SEQ ID NO: 356270 - DNA, 20 bp, Artificial Sequence
  Description of Artificial Sequence: Synthetic oligonucleotide
  Target: LAMA2; (+) strand; PAM type: YTN; PAM sequence: CTT
gcaacccctacagttcaaat

SEQ ID NO: 356271 - DNA, 20 bp, Artificial Sequence
  Description of Artificial Sequence: Synthetic oligonucleotide
  Target: LAMA2; (+) strand; PAM type: YTN; PAM sequence: TTG
caacccctacagttcaaata

SEQ ID NO: 356272 - DNA, 20 bp, Artificial Sequence
  Description of Artificial Sequence: Synthetic oligonucleotide
  Target: LAMA2; (+) strand; PAM type: YTN; PAM sequence: CTA
cagttcaaataatattatgt

SEQ ID NO: 356273 - DNA, 20 bp, Artificial Sequence
  Description of Artificial Sequence: Synthetic oligonucleotide
  Target: LAMA2; (+) strand; PAM type: YTN; PAM sequence: TTC
aaataatattatgttagtca

SEQ ID NO: 356274 - DNA, 20 bp, Artificial Sequence
  Description of Artificial Sequence: Synthetic oligonucleotide
  Target: LAMA2; (+) strand; PAM type: YTN; PAM sequence: TTA
tgttagtcaattttttacat

SEQ ID NO: 356275 - DNA, 20 bp, Artificial Sequence
  Description of Artificial Sequence: Synthetic oligonucleotide
  Target: LAMA2; (+) strand; PAM type: YTN; PAM sequence: TTA
gtcaattttttacatggaca

SEQ ID NO: 356276 - DNA, 20 bp, Artificial Sequence
  Description of Artificial Sequence: Synthetic oligonucleotide
  Target: LAMA2; (+) strand; PAM type: YTN; PAM sequence: TTT
tttacatggacagactctct

SEQ ID NO: 356277 - DNA, 20 bp, Artificial Sequence
  Description of Artificial Sequence: Synthetic oligonucleotide
  Target: LAMA2; (+) strand; PAM type: YTN; PAM sequence: TTT
ttacatggacagactctctc

SEQ ID NO: 356278 - DNA, 20 bp, Artificial Sequence
  Description of Artificial Sequence: Synthetic oligonucleotide
  Target: LAMA2; (+) strand; PAM type: YTN; PAM sequence: TTT
tacatggacagactctctcc

SEQ ID NO: 356279 - DNA, 20 bp, Artificial Sequence
  Description of Artificial Sequence: Synthetic oligonucleotide
  Target: LAMA2; (+) strand; PAM type: YTN; PAM sequence: TTT
acatggacagactctctcct

SEQ ID NO: 356280 - DNA, 20 bp, Artificial Sequence
  Description of Artificial Sequence: Synthetic oligonucleotide
  Target: LAMA2; (+) strand; PAM type: YTN; PAM sequence: TTA
catggacagactctctcctt

SEQ ID NO: 356281 - DNA, 20 bp, Artificial Sequence
  Description of Artificial Sequence: Synthetic oligonucleotide
  Target: LAMA2; (+) strand; PAM type: YTN; PAM sequence: CTC
tctccttgaccaaattttgg

SEQ ID NO: 356282 - DNA, 20 bp, Artificial Sequence
  Description of Artificial Sequence: Synthetic oligonucleotide
  Target: LAMA2; (+) strand; PAM type: YTN; PAM sequence: CTC
tccttgaccaaattttggaa

SEQ ID NO: 356283 - DNA, 20 bp, Artificial Sequence
  Description of Artificial Sequence: Synthetic oligonucleotide
  Target: LAMA2; (+) strand; PAM type: YTN; PAM sequence: CTC
cttgaccaaattttggaaag

SEQ ID NO: 356284 - DNA, 20 bp, Artificial Sequence
  Description of Artificial Sequence: Synthetic oligonucleotide
  Target: LAMA2; (+) strand; PAM type: YTN; PAM sequence: CTT
gaccaaattttggaaagtct

SEQ ID NO: 356285 - DNA, 20 bp, Artificial Sequence
  Description of Artificial Sequence: Synthetic oligonucleotide
  Target: LAMA2; (+) strand; PAM type: YTN; PAM sequence: TTG
accaaattttggaaagtctt

SEQ ID NO: 356286 - DNA, 20 bp, Artificial Sequence
  Description of Artificial Sequence: Synthetic oligonucleotide
  Target: LAMA2; (+) strand; PAM type: YTN; PAM sequence: TTT
tggaaagtcttctctgagtc

SEQ ID NO: 356287 - DNA, 20 bp, Artificial Sequence
  Description of Artificial Sequence: Synthetic oligonucleotide
  Target: LAMA2; (+) strand; PAM type: YTN; PAM sequence: TTT
ggaaagtcttctctgagtcc

SEQ ID NO: 356288 - DNA, 20 bp, Artificial Sequence
  Description of Artificial Sequence: Synthetic oligonucleotide
  Target: LAMA2; (+) strand; PAM type: YTN; PAM sequence: TTG
gaaagtcttctctgagtcct

SEQ ID NO: 356289 - DNA, 20 bp, Artificial Sequence
  Description of Artificial Sequence: Synthetic oligonucleotide
  Target: LAMA2; (+) strand; PAM type: YTN; PAM sequence: CTT
ctctgagtcctctttttgat

SEQ ID NO: 356290 - DNA, 20 bp, Artificial Sequence
  Description of Artificial Sequence: Synthetic oligonucleotide
  Target: LAMA2; (+) strand; PAM type: YTN; PAM sequence: TTC
tctgagtcctctttttgatg

SEQ ID NO: 356291 - DNA, 20 bp, Artificial Sequence
  Description of Artificial Sequence: Synthetic oligonucleotide
  Target: LAMA2; (+) strand; PAM type: YTN; PAM sequence: CTC
tgagtcctctttttgatgag

SEQ ID NO: 356292 - DNA, 20 bp, Artificial Sequence
  Description of Artificial Sequence: Synthetic oligonucleotide
  Target: LAMA2; (+) strand; PAM type: YTN; PAM sequence: CTG
agtcctctttttgatgaggc

SEQ ID NO: 356293 - DNA, 20 bp, Artificial Sequence
  Description of Artificial Sequence: Synthetic oligonucleotide
  Target: LAMA2; (+) strand; PAM type: YTN; PAM sequence: CTC
tttttgatgaggcctcatcg

SEQ ID NO: 356294 - DNA, 20 bp, Artificial Sequence
  Description of Artificial Sequence: Synthetic oligonucleotide
  Target: LAMA2; (+) strand; PAM type: YTN; PAM sequence: CTT
tttgatgaggcctcatcgtt

SEQ ID NO: 356295 - DNA, 20 bp, Artificial Sequence
  Description of Artificial Sequence: Synthetic oligonucleotide
  Target: LAMA2; (+) strand; PAM type: YTN; PAM sequence: TTT
ttgatgaggcctcatcgttg

SEQ ID NO: 356296 - DNA, 20 bp, Artificial Sequence
  Description of Artificial Sequence: Synthetic oligonucleotide
  Target: LAMA2; (+) strand; PAM type: YTN; PAM sequence: TTT
tgatgaggcctcatcgttga

SEQ ID NO: 356297 - DNA, 20 bp, Artificial Sequence
  Description of Artificial Sequence: Synthetic oligonucleotide
  Target: LAMA2; (+) strand; PAM type: YTN; PAM sequence: TTT
gatgaggcctcatcgttgac

SEQ ID NO: 356298 - DNA, 20 bp, Artificial Sequence
  Description of Artificial Sequence: Synthetic oligonucleotide
  Target: LAMA2; (+) strand; PAM type: YTN; PAM sequence: TTG
atgaggcctcatcgttgacc

SEQ ID NO: 356299 - DNA, 20 bp, Artificial Sequence
  Description of Artificial Sequence: Synthetic oligonucleotide
  Target: LAMA2; (+) strand; PAM type: YTN; PAM sequence: CTC
atcgttgacccttgtcctca

SEQ ID NO: 356300 - DNA, 20 bp, Artificial Sequence
  Description of Artificial Sequence: Synthetic oligonucleotide
  Target: LAMA2; (+) strand; PAM type: YTN; PAM sequence: TTG
acccttgtcctcaaacctag

SEQ ID NO: 356301 - DNA, 20 bp, Artificial Sequence
  Description of Artificial Sequence: Synthetic oligonucleotide
  Target: LAMA2; (+) strand; PAM type: YTN; PAM sequence: CTT
gtcctcaaacctagcttggt

SEQ ID NO: 356302 - DNA, 20 bp, Artificial Sequence
  Description of Artificial Sequence: Synthetic oligonucleotide
  Target: LAMA2; (+) strand; PAM type: YTN; PAM sequence: TTG
tcctcaaacctagcttggtt

SEQ ID NO: 356303 - DNA, 20 bp, Artificial Sequence
  Description of Artificial Sequence: Synthetic oligonucleotide
  Target: LAMA2; (+) strand; PAM type: YTN; PAM sequence: CTC
aaacctagcttggttaaagc

SEQ ID NO: 356304 - DNA, 20 bp, Artificial Sequence
  Description of Artificial Sequence: Synthetic oligonucleotide
  Target: LAMA2; (+) strand; PAM type: YTN; PAM sequence: CTA
gcttggttaaagcaagaatt

SEQ ID NO: 356305 - DNA, 20 bp, Artificial Sequence
  Description of Artificial Sequence: Synthetic oligonucleotide
  Target: LAMA2; (+) strand; PAM type: YTN; PAM sequence: CTT
ggttaaagcaagaattctgc

SEQ ID NO: 356306 - DNA, 20 bp, Artificial Sequence
  Description of Artificial Sequence: Synthetic oligonucleotide
  Target: LAMA2; (+) strand; PAM type: YTN; PAM sequence: TTG
gttaaagcaagaattctgct

SEQ ID NO: 356307 - DNA, 20 bp, Artificial Sequence
  Description of Artificial Sequence: Synthetic oligonucleotide
  Target: LAMA2; (+) strand; PAM type: YTN; PAM sequence: TTA
aagcaagaattctgctaagt

SEQ ID NO: 356308 - DNA, 20 bp, Artificial Sequence
  Description of Artificial Sequence: Synthetic oligonucleotide
  Target: LAMA2; (+) strand; PAM type: YTN; PAM sequence: TTC
tgctaagtcagtgtgttaag

SEQ ID NO: 356309 - DNA, 20 bp, Artificial Sequence
  Description of Artificial Sequence: Synthetic oligonucleotide
  Target: LAMA2; (+) strand; PAM type: YTN; PAM sequence: CTG
ctaagtcagtgtgttaagaa

SEQ ID NO: 356310 - DNA, 20 bp, Artificial Sequence
  Description of Artificial Sequence: Synthetic oligonucleotide
  Target: LAMA2; (+) strand; PAM type: YTN; PAM sequence: CTA
agtcagtgtgttaagaacac

SEQ ID NO: 356311 - DNA, 20 bp, Artificial Sequence
  Description of Artificial Sequence: Synthetic oligonucleotide
  Target: LAMA2; (+) strand; PAM type: YTN; PAM sequence: TTA
agaacaccttacccttgata

SEQ ID NO: 356312 - DNA, 20 bp, Artificial Sequence
  Description of Artificial Sequence: Synthetic oligonucleotide
  Target: LAMA2; (+) strand; PAM type: YTN; PAM sequence: CTT
acccttgatatctgatccct

SEQ ID NO: 356313 - DNA, 20 bp, Artificial Sequence
  Description of Artificial Sequence: Synthetic oligonucleotide
  Target: LAMA2; (+) strand; PAM type: YTN; PAM sequence: TTA
cccttgatatctgatccctc

SEQ ID NO: 356314 - DNA, 20 bp, Artificial Sequence
  Description of Artificial Sequence: Synthetic oligonucleotide
  Target: LAMA2; (+) strand; PAM type: YTN; PAM sequence: CTT
gatatctgatccctctggcc

SEQ ID NO: 356315 - DNA, 20 bp, Artificial Sequence
  Description of Artificial Sequence: Synthetic oligonucleotide
  Target: LAMA2; (+) strand; PAM type: YTN; PAM sequence: TTG
atatctgatccctctggcct

SEQ ID NO: 356316 - DNA, 20 bp, Artificial Sequence
  Description of Artificial Sequence: Synthetic oligonucleotide
  Target: LAMA2; (+) strand; PAM type: YTN; PAM sequence: CTG
atccctctggcctgtcttca

SEQ ID NO: 356317 - DNA, 20 bp, Artificial Sequence
  Description of Artificial Sequence: Synthetic oligonucleotide
  Target: LAMA2; (+) strand; PAM type: YTN; PAM sequence: CTC
tggcctgtcttcaacaagaa

SEQ ID NO: 356318 - DNA, 20 bp, Artificial Sequence
  Description of Artificial Sequence: Synthetic oligonucleotide
  Target: LAMA2; (+) strand; PAM type: YTN; PAM sequence: CTG
gcctgtcttcaacaagaatc

SEQ ID NO: 356319 - DNA, 20 bp, Artificial Sequence
  Description of Artificial Sequence: Synthetic oligonucleotide
  Target: LAMA2; (+) strand; PAM type: YTN; PAM sequence: CTG
tcttcaacaagaatcctgtt

SEQ ID NO: 356320 - DNA, 20 bp, Artificial Sequence
  Description of Artificial Sequence: Synthetic oligonucleotide
  Target: LAMA2; (+) strand; PAM type: YTN; PAM sequence: CTT
caacaagaatcctgttaatt

SEQ ID NO: 356321 - DNA, 20 bp, Artificial Sequence
  Description of Artificial Sequence: Synthetic oligonucleotide
  Target: LAMA2; (+) strand; PAM type: YTN; PAM sequence: TTC
aacaagaatcctgttaattt

SEQ ID NO: 356322 - DNA, 20 bp, Artificial Sequence
  Description of Artificial Sequence: Synthetic oligonucleotide
  Target: LAMA2; (+) strand; PAM type: YTN; PAM sequence: CTG
ttaatttggtttagcaagaa

SEQ ID NO: 356323 - DNA, 20 bp, Artificial Sequence
  Description of Artificial Sequence: Synthetic oligonucleotide
  Target: LAMA2; (+) strand; PAM type: YTN; PAM sequence: TTA
atttggtttagcaagaatcc

SEQ ID NO: 356324 - DNA, 20 bp, Artificial Sequence
  Description of Artificial Sequence: Synthetic oligonucleotide
  Target: LAMA2; (+) strand; PAM type: YTN; PAM sequence: TTT
ggtttagcaagaatcccccc

SEQ ID NO: 356325 - DNA, 20 bp, Artificial Sequence
  Description of Artificial Sequence: Synthetic oligonucleotide
  Target: LAMA2; (+) strand; PAM type: YTN; PAM sequence: TTG
gtttagcaagaatcccccct

SEQ ID NO: 356326 - DNA, 20 bp, Artificial Sequence
  Description of Artificial Sequence: Synthetic oligonucleotide
  Target: LAMA2; (+) strand; PAM type: YTN; PAM sequence: TTT
agcaagaatcccccctacct

SEQ ID NO: 356327 - DNA, 20 bp, Artificial Sequence
  Description of Artificial Sequence: Synthetic oligonucleotide
  Target: LAMA2; (+) strand; PAM type: YTN; PAM sequence: TTA
gcaagaatcccccctaccta

SEQ ID NO: 356328 - DNA, 20 bp, Artificial Sequence
  Description of Artificial Sequence: Synthetic oligonucleotide
  Target: LAMA2; (+) strand; PAM type: YTN; PAM sequence: CTA
cctacccctgatgtctcctc

SEQ ID NO: 356329 - DNA, 20 bp, Artificial Sequence
  Description of Artificial Sequence: Synthetic oligonucleotide
  Target: LAMA2; (+) strand; PAM type: YTN; PAM sequence: CTA
cccctgatgtctcctcttaa

SEQ ID NO: 356330 - DNA, 20 bp, Artificial Sequence
  Description of Artificial Sequence: Synthetic oligonucleotide
  Target: LAMA2; (+) strand; PAM type: YTN; PAM sequence: CTG
atgtctcctcttaatgattg

SEQ ID NO: 356331 - DNA, 20 bp, Artificial Sequence
  Description of Artificial Sequence: Synthetic oligonucleotide
  Target: LAMA2; (+) strand; PAM type: YTN; PAM sequence: CTC
ctcttaatgattgttcgccc

SEQ ID NO: 356332 - DNA, 20 bp, Artificial Sequence
  Description of Artificial Sequence: Synthetic oligonucleotide
  Target: LAMA2; (+) strand; PAM type: YTN; PAM sequence: CTC
ttaatgattgttcgcccctg

SEQ ID NO: 356333 - DNA, 20 bp, Artificial Sequence
  Description of Artificial Sequence: Synthetic oligonucleotide
  Target: LAMA2; (+) strand; PAM type: YTN; PAM sequence: CTT
aatgattgttcgcccctgat

SEQ ID NO: 356334 - DNA, 20 bp, Artificial Sequence
  Description of Artificial Sequence: Synthetic oligonucleotide
  Target: LAMA2; (+) strand; PAM type: YTN; PAM sequence: TTA
atgattgttcgcccctgatc

SEQ ID NO: 356335 - DNA, 20 bp, Artificial Sequence
  Description of Artificial Sequence: Synthetic oligonucleotide
  Target: LAMA2; (+) strand; PAM type: YTN; PAM sequence: TTG
ttcgcccctgatccttgctc

SEQ ID NO: 356336 - DNA, 20 bp, Artificial Sequence
  Description of Artificial Sequence: Synthetic oligonucleotide
  Target: LAMA2; (+) strand; PAM type: YTN; PAM sequence: TTC
gcccctgatccttgctcgtg

SEQ ID NO: 356337 - DNA, 20 bp, Artificial Sequence
  Description of Artificial Sequence: Synthetic oligonucleotide
  Target: LAMA2; (+) strand; PAM type: YTN; PAM sequence: CTG
atccttgctcgtggctataa

SEQ ID NO: 356338 - DNA, 20 bp, Artificial Sequence
  Description of Artificial Sequence: Synthetic oligonucleotide
  Target: LAMA2; (+) strand; PAM type: YTN; PAM sequence: CTT
gctcgtggctataaatctct

SEQ ID NO: 356339 - DNA, 20 bp, Artificial Sequence
  Description of Artificial Sequence: Synthetic oligonucleotide
  Target: LAMA2; (+) strand; PAM type: YTN; PAM sequence: TTG
ctcgtggctataaatctcta

SEQ ID NO: 356340 - DNA, 20 bp, Artificial Sequence
  Description of Artificial Sequence: Synthetic oligonucleotide
  Target: LAMA2; (+) strand; PAM type: YTN; PAM sequence: CTC
gtggctataaatctctaccc

SEQ ID NO: 356341 - DNA, 20 bp, Artificial Sequence
  Description of Artificial Sequence: Synthetic oligonucleotide
  Target: LAMA2; (+) strand; PAM type: YTN; PAM sequence: CTA
taaatctctacccttttcct

SEQ ID NO: 356342 - DNA, 20 bp, Artificial Sequence
  Description of Artificial Sequence: Synthetic oligonucleotide
  Target: LAMA2; (+) strand; PAM type: YTN; PAM sequence: CTC
tacccttttccttggcactg

SEQ ID NO: 356343 - DNA, 20 bp, Artificial Sequence
  Description of Artificial Sequence: Synthetic oligonucleotide
  Target: LAMA2; (+) strand; PAM type: YTN; PAM sequence: CTA
cccttttccttggcactgaa

SEQ ID NO: 356344 - DNA, 20 bp, Artificial Sequence
  Description of Artificial Sequence: Synthetic oligonucleotide
  Target: LAMA2; (+) strand; PAM type: YTN; PAM sequence: CTT
ttccttggcactgaatccct

SEQ ID NO: 356345 - DNA, 20 bp, Artificial Sequence
  Description of Artificial Sequence: Synthetic oligonucleotide
  Target: LAMA2; (+) strand; PAM type: YTN; PAM sequence: TTT
tccttggcactgaatcccta

SEQ ID NO: 356346 - DNA, 20 bp, Artificial Sequence
  Description of Artificial Sequence: Synthetic oligonucleotide
  Target: LAMA2; (+) strand; PAM type: YTN; PAM sequence: TTT
ccttggcactgaatccctac

SEQ ID NO: 356347 - DNA, 20 bp, Artificial Sequence
  Description of Artificial Sequence: Synthetic oligonucleotide
  Target: LAMA2; (+) strand; PAM type: YTN; PAM sequence: TTC
cttggcactgaatccctact

SEQ ID NO: 356348 - DNA, 20 bp, Artificial Sequence
  Description of Artificial Sequence: Synthetic oligonucleotide
  Target: LAMA2; (+) strand; PAM type: YTN; PAM sequence: CTT
ggcactgaatccctacttgt

SEQ ID NO: 356349 - DNA, 20 bp, Artificial Sequence
  Description of Artificial Sequence: Synthetic oligonucleotide
  Target: LAMA2; (+) strand; PAM type: YTN; PAM sequence: TTG
gcactgaatccctacttgtt

SEQ ID NO: 356350 - DNA, 20 bp, Artificial Sequence
  Description of Artificial Sequence: Synthetic oligonucleotide
  Target: LAMA2; (+) strand; PAM type: YTN; PAM sequence: CTG
aatccctacttgttcatgtt

SEQ ID NO: 356351 - DNA, 20 bp, Artificial Sequence
  Description of Artificial Sequence: Synthetic oligonucleotide
  Target: LAMA2; (+) strand; PAM type: YTN; PAM sequence: CTA
cttgttcatgttgtattggg

SEQ ID NO: 356352 - DNA, 20 bp, Artificial Sequence
  Description of Artificial Sequence: Synthetic oligonucleotide
  Target: LAMA2; (+) strand; PAM type: YTN; PAM sequence: CTT
gttcatgttgtattgggaat

SEQ ID NO: 356353 - DNA, 20 bp, Artificial Sequence
  Description of Artificial Sequence: Synthetic oligonucleotide
  Target: LAMA2; (+) strand; PAM type: YTN; PAM sequence: TTG
ttcatgttgtattgggaatg

SEQ ID NO: 356354 - DNA, 20 bp, Artificial Sequence
  Description of Artificial Sequence: Synthetic oligonucleotide
  Target: LAMA2; (+) strand; PAM type: YTN; PAM sequence: TTC
atgttgtattgggaatggag

SEQ ID NO: 356355 - DNA, 20 bp, Artificial Sequence
  Description of Artificial Sequence: Synthetic oligonucleotide
  Target: LAMA2; (+) strand; PAM type: YTN; PAM sequence: TTG
tattgggaatggaggctagt

SEQ ID NO: 356356 - DNA, 20 bp, Artificial Sequence
  Description of Artificial Sequence: Synthetic oligonucleotide
  Target: LAMA2; (+) strand; PAM type: YTN; PAM sequence: TTG
ggaatggaggctagttcttt

SEQ ID NO: 356357 - DNA, 20 bp, Artificial Sequence
  Description of Artificial Sequence: Synthetic oligonucleotide
  Target: LAMA2; (+) strand; PAM type: YTN; PAM sequence: CTA
gttctttactaaggttgctt

SEQ ID NO: 356358 - DNA, 20 bp, Artificial Sequence
  Description of Artificial Sequence: Synthetic oligonucleotide
  Target: LAMA2; (+) strand; PAM type: YTN; PAM sequence: TTC
tttactaaggttgctttttc

SEQ ID NO: 356359 - DNA, 20 bp, Artificial Sequence
  Description of Artificial Sequence: Synthetic oligonucleotide
  Target: LAMA2; (+) strand; PAM type: YTN; PAM sequence: CTT
tactaaggttgctttttctc

SEQ ID NO: 356360 - DNA, 20 bp, Artificial Sequence
  Description of Artificial Sequence: Synthetic oligonucleotide
  Target: LAMA2; (+) strand; PAM type: YTN; PAM sequence: TTT
actaaggttgctttttctct

SEQ ID NO: 356361 - DNA, 20 bp, Artificial Sequence
  Description of Artificial Sequence: Synthetic oligonucleotide
  Target: LAMA2; (+) strand; PAM type: YTN; PAM sequence: TTA
ctaaggttgctttttctcta

SEQ ID NO: 356362 - DNA, 20 bp, Artificial Sequence
  Description of Artificial Sequence: Synthetic oligonucleotide
  Target: LAMA2; (+) strand; PAM type: YTN; PAM sequence: CTA
aggttgctttttctctattg

SEQ ID NO: 356363 - DNA, 20 bp, Artificial Sequence
  Description of Artificial Sequence: Synthetic oligonucleotide
  Target: LAMA2; (+) strand; PAM type: YTN; PAM sequence: TTG
ctttttctctattgccatag

SEQ ID NO: 356364 - DNA, 20 bp, Artificial Sequence
  Description of Artificial Sequence: Synthetic oligonucleotide
  Target: LAMA2; (+) strand; PAM type: YTN; PAM sequence: CTT
tttctctattgccatagttt

SEQ ID NO: 356365 - DNA, 20 bp, Artificial Sequence
  Description of Artificial Sequence: Synthetic oligonucleotide
  Target: LAMA2; (+) strand; PAM type: YTN; PAM sequence: TTT
ttctctattgccatagtttc

SEQ ID NO: 356366 - DNA, 20 bp, Artificial Sequence
  Description of Artificial Sequence: Synthetic oligonucleotide
  Target: LAMA2; (+) strand; PAM type: YTN; PAM sequence: TTT
tctctattgccatagtttct

SEQ ID NO: 356367 - DNA, 20 bp, Artificial Sequence
  Description of Artificial Sequence: Synthetic oligonucleotide
  Target: LAMA2; (+) strand; PAM type: YTN; PAM sequence: TTT
ctctattgccatagtttctc

SEQ ID NO: 356368 - DNA, 20 bp, Artificial Sequence
  Description of Artificial Sequence: Synthetic oligonucleotide
  Target: LAMA2; (+) strand; PAM type: YTN; PAM sequence: TTC
tctattgccatagtttctca

SEQ ID NO: 356369 - DNA, 20 bp, Artificial Sequence
  Description of Artificial Sequence: Synthetic oligonucleotide
  Target: LAMA2; (+) strand; PAM type: YTN; PAM sequence: CTC
tattgccatagtttctcact

SEQ ID NO: 356370 - DNA, 20 bp, Artificial Sequence
  Description of Artificial Sequence: Synthetic oligonucleotide
  Target: LAMA2; (+) strand; PAM type: YTN; PAM sequence: CTA
ttgccatagtttctcactga

SEQ ID NO: 356371 - DNA, 20 bp, Artificial Sequence
  Description of Artificial Sequence: Synthetic oligonucleotide
  Target: LAMA2; (+) strand; PAM type: YTN; PAM sequence: TTG
ccatagtttctcactgaagc

SEQ ID NO: 356372 - DNA, 20 bp, Artificial Sequence
  Description of Artificial Sequence: Synthetic oligonucleotide
  Target: LAMA2; (+) strand; PAM type: YTN; PAM sequence: TTT
ctcactgaagcctattttca

SEQ ID NO: 356373 - DNA, 20 bp, Artificial Sequence
  Description of Artificial Sequence: Synthetic oligonucleotide
  Target: LAMA2; (+) strand; PAM type: YTN; PAM sequence: TTC
tcactgaagcctattttcat

SEQ ID NO: 356374 - DNA, 20 bp, Artificial Sequence
  Description of Artificial Sequence: Synthetic oligonucleotide
  Target: LAMA2; (+) strand; PAM type: YTN; PAM sequence: CTC
actgaagcctattttcatcg

SEQ ID NO: 356375 - DNA, 20 bp, Artificial Sequence
  Description of Artificial Sequence: Synthetic oligonucleotide
  Target: LAMA2; (+) strand; PAM type: YTN; PAM sequence: CTG
aagcctattttcatcgtttt

SEQ ID NO: 356376 - DNA, 20 bp, Artificial Sequence
  Description of Artificial Sequence: Synthetic oligonucleotide
  Target: LAMA2; (+) strand; PAM type: YTN; PAM sequence: CTA
ttttcatcgttttaactact

SEQ ID NO: 356377 - DNA, 20 bp, Artificial Sequence
  Description of Artificial Sequence: Synthetic oligonucleotide
  Target: LAMA2; (+) strand; PAM type: YTN; PAM sequence: TTT
tcatcgttttaactactgtc

SEQ ID NO: 356378 - DNA, 20 bp, Artificial Sequence
  Description of Artificial Sequence: Synthetic oligonucleotide
  Target: LAMA2; (+) strand; PAM type: YTN; PAM sequence: TTT
catcgttttaactactgtcc

SEQ ID NO: 356379 - DNA, 20 bp, Artificial Sequence
  Description of Artificial Sequence: Synthetic oligonucleotide
  Target: LAMA2; (+) strand; PAM type: YTN; PAM sequence: TTC
atcgttttaactactgtcca

SEQ ID NO: 356380 - DNA, 20 bp, Artificial Sequence
  Description of Artificial Sequence: Synthetic oligonucleotide
  Target: LAMA2; (+) strand; PAM type: YTN; PAM sequence: TTT
taactactgtccagctctgg

SEQ ID NO: 356381 - DNA, 20 bp, Artificial Sequence
  Description of Artificial Sequence: Synthetic oligonucleotide
  Target: LAMA2; (+) strand; PAM type: YTN; PAM sequence: TTT
aactactgtccagctctggt

SEQ ID NO: 356382 - DNA, 20 bp, Artificial Sequence
  Description of Artificial Sequence: Synthetic oligonucleotide
  Target: LAMA2; (+) strand; PAM type: YTN; PAM sequence: TTA
actactgtccagctctggtt

SEQ ID NO: 356383 - DNA, 20 bp, Artificial Sequence
  Description of Artificial Sequence: Synthetic oligonucleotide
  Target: LAMA2; (+) strand; PAM type: YTN; PAM sequence: CTA
ctgtccagctctggttctct

SEQ ID NO: 356384 - DNA, 20 bp, Artificial Sequence
  Description of Artificial Sequence: Synthetic oligonucleotide
  Target: LAMA2; (+) strand; PAM type: YTN; PAM sequence: CTG
tccagctctggttctctttc

SEQ ID NO: 356385 - DNA, 20 bp, Artificial Sequence
  Description of Artificial Sequence: Synthetic oligonucleotide
  Target: LAMA2; (+) strand; PAM type: YTN; PAM sequence: CTC
tggttctctttcacaatatt

SEQ ID NO: 356386 - DNA, 20 bp, Artificial Sequence
  Description of Artificial Sequence: Synthetic oligonucleotide
  Target: LAMA2; (+) strand; PAM type: YTN; PAM sequence: CTG
gttctctttcacaatattaa

SEQ ID NO: 356387 - DNA, 20 bp, Artificial Sequence
  Description of Artificial Sequence: Synthetic oligonucleotide
  Target: LAMA2; (+) strand; PAM type: YTN; PAM sequence: TTC
tctttcacaatattaaaagc

SEQ ID NO: 356388 - DNA, 20 bp, Artificial Sequence
  Description of Artificial Sequence: Synthetic oligonucleotide
  Target: LAMA2; (+) strand; PAM type: YTN; PAM sequence: CTC
tttcacaatattaaaagctg

SEQ ID NO: 356389 - DNA, 20 bp, Artificial Sequence
  Description of Artificial Sequence: Synthetic oligonucleotide
  Target: LAMA2; (+) strand; PAM type: YTN; PAM sequence: CTT
tcacaatattaaaagctgaa

SEQ ID NO: 356390 - DNA, 20 bp, Artificial Sequence
  Description of Artificial Sequence: Synthetic oligonucleotide
  Target: LAMA2; (+) strand; PAM type: YTN; PAM sequence: TTT
cacaatattaaaagctgaac

SEQ ID NO: 356391 - DNA, 20 bp, Artificial Sequence
  Description of Artificial Sequence: Synthetic oligonucleotide
  Target: LAMA2; (+) strand; PAM type: YTN; PAM sequence: TTC
acaatattaaaagctgaact

SEQ ID NO: 356392 - DNA, 20 bp, Artificial Sequence
  Description of Artificial Sequence: Synthetic oligonucleotide
  Target: LAMA2; (+) strand; PAM type: YTN; PAM sequence: TTA
aaagctgaacttgtgaaaat

SEQ ID NO: 356393 - DNA, 20 bp, Artificial Sequence
  Description of Artificial Sequence: Synthetic oligonucleotide
  Target: LAMA2; (+) strand; PAM type: YTN; PAM sequence: CTG
aacttgtgaaaattgagaac

SEQ ID NO: 356394 - DNA, 20 bp, Artificial Sequence
  Description of Artificial Sequence: Synthetic oligonucleotide
  Target: LAMA2; (+) strand; PAM type: YTN; PAM sequence: CTT
gtgaaaattgagaactaatg

SEQ ID NO: 356395 - DNA, 20 bp, Artificial Sequence
  Description of Artificial Sequence: Synthetic oligonucleotide
  Target: LAMA2; (+) strand; PAM type: YTN; PAM sequence: TTG
tgaaaattgagaactaatgt

SEQ ID NO: 356396 - DNA, 20 bp, Artificial Sequence
  Description of Artificial Sequence: Synthetic oligonucleotide
  Target: LAMA2; (+) strand; PAM type: YTN; PAM sequence: TTG
agaactaatgtttatgtatt

SEQ ID NO: 356397 - DNA, 20 bp, Artificial Sequence
  Description of Artificial Sequence: Synthetic oligonucleotide
  Target: LAMA2; (+) strand; PAM type: YTN; PAM sequence: CTA
atgtttatgtatttccttct

SEQ ID NO: 356398 - DNA, 20 bp, Artificial Sequence
  Description of Artificial Sequence: Synthetic oligonucleotide
  Target: LAMA2; (+) strand; PAM type: YTN; PAM sequence: TTT
atgtatttccttctccctcc

SEQ ID NO: 356399 - DNA, 20 bp, Artificial Sequence
  Description of Artificial Sequence: Synthetic oligonucleotide
  Target: LAMA2; (+) strand; PAM type: YTN; PAM sequence: TTA
tgtatttccttctccctccc

SEQ ID NO: 356400 - DNA, 20 bp, Artificial Sequence
  Description of Artificial Sequence: Synthetic oligonucleotide
  Target: LAMA2; (+) strand; PAM type: YTN; PAM sequence: TTT
ccttctccctccctaaccca

SEQ ID NO: 356401 - DNA, 20 bp, Artificial Sequence
  Description of Artificial Sequence: Synthetic oligonucleotide
  Target: LAMA2; (+) strand; PAM type: YTN; PAM sequence: TTC
cttctccctccctaacccat

SEQ ID NO: 356402 - DNA, 20 bp, Artificial Sequence
  Description of Artificial Sequence: Synthetic oligonucleotide
  Target: LAMA2; (+) strand; PAM type: YTN; PAM sequence: CTT
ctccctccctaacccatcaa

SEQ ID NO: 356403 - DNA, 20 bp, Artificial Sequence
  Description of Artificial Sequence: Synthetic oligonucleotide
  Target: LAMA2; (+) strand; PAM type: YTN; PAM sequence: TTC
tccctccctaacccatcaac

SEQ ID NO: 356404 - DNA, 20 bp, Artificial Sequence
  Description of Artificial Sequence: Synthetic oligonucleotide
  Target: LAMA2; (+) strand; PAM type: YTN; PAM sequence: CTC
cctccctaacccatcaacta

SEQ ID NO: 356405 - DNA, 20 bp, Artificial Sequence
  Description of Artificial Sequence: Synthetic oligonucleotide
  Target: LAMA2; (+) strand; PAM type: YTN; PAM sequence: CTC
cctaacccatcaactattat

SEQ ID NO: 356406 - DNA, 20 bp, Artificial Sequence
  Description of Artificial Sequence: Synthetic oligonucleotide
  Target: LAMA2; (+) strand; PAM type: YTN; PAM sequence: CTA
acccatcaactattatctag

SEQ ID NO: 356407 - DNA, 20 bp, Artificial Sequence
  Description of Artificial Sequence: Synthetic oligonucleotide
  Target: LAMA2; (+) strand; PAM type: YTN; PAM sequence: CTA
ttatctagccttggaaaagt

SEQ ID NO: 356408 - DNA, 20 bp, Artificial Sequence
  Description of Artificial Sequence: Synthetic oligonucleotide
  Target: LAMA2; (+) strand; PAM type: YTN; PAM sequence: TTA
tctagccttggaaaagtgtg

SEQ ID NO: 356409 - DNA, 20 bp, Artificial Sequence
  Description of Artificial Sequence: Synthetic oligonucleotide
  Target: LAMA2; (+) strand; PAM type: YTN; PAM sequence: CTA
gccttggaaaagtgtgtttt

SEQ ID NO: 356410 - DNA, 20 bp, Artificial Sequence
  Description of Artificial Sequence: Synthetic oligonucleotide
  Target: LAMA2; (+) strand; PAM type: YTN; PAM sequence: CTT
ggaaaagtgtgttttaggag

SEQ ID NO: 356411 - DNA, 20 bp, Artificial Sequence
  Description of Artificial Sequence: Synthetic oligonucleotide
  Target: LAMA2; (+) strand; PAM type: YTN; PAM sequence: TTG
gaaaagtgtgttttaggagt

SEQ ID NO: 356412 - DNA, 20 bp, Artificial Sequence
  Description of Artificial Sequence: Synthetic oligonucleotide
  Target: LAMA2; (+) strand; PAM type: YTN; PAM sequence: TTT
taggagtaagtcctcaacaa

SEQ ID NO: 356413 - DNA, 20 bp, Artificial Sequence
  Description of Artificial Sequence: Synthetic oligonucleotide
  Target: LAMA2; (+) strand; PAM type: YTN; PAM sequence: TTT
aggagtaagtcctcaacaaa

SEQ ID NO: 356414 - DNA, 20 bp, Artificial Sequence
  Description of Artificial Sequence: Synthetic oligonucleotide
  Target: LAMA2; (+) strand; PAM type: YTN; PAM sequence: TTA
ggagtaagtcctcaacaaat

SEQ ID NO: 356415 - DNA, 20 bp, Artificial Sequence
  Description of Artificial Sequence: Synthetic oligonucleotide
  Target: LAMA2; (+) strand; PAM type: YTN; PAM sequence: CTC
aacaaatactgctaattaac

SEQ ID NO: 356416 - DNA, 20 bp, Artificial Sequence
  Description of Artificial Sequence: Synthetic oligonucleotide
  Target: LAMA2; (+) strand; PAM type: YTN; PAM sequence: CTG
ctaattaactaattatcctt

SEQ ID NO: 356417 - DNA, 20 bp, Artificial Sequence
  Description of Artificial Sequence: Synthetic oligonucleotide
  Target: LAMA2; (+) strand; PAM type: YTN; PAM sequence: CTA
attaactaattatccttctt

SEQ ID NO: 356418 - DNA, 20 bp, Artificial Sequence
  Description of Artificial Sequence: Synthetic oligonucleotide
  Target: LAMA2; (+) strand; PAM type: YTN; PAM sequence: TTA
actaattatccttcttttgt

SEQ ID NO: 356419 - DNA, 20 bp, Artificial Sequence
  Description of Artificial Sequence: Synthetic oligonucleotide
  Target: LAMA2; (+) strand; PAM type: YTN; PAM sequence: CTA
attatccttcttttgttaac

SEQ ID NO: 356420 - DNA, 20 bp, Artificial Sequence
  Description of Artificial Sequence: Synthetic oligonucleotide
  Target: LAMA2; (+) strand; PAM type: YTN; PAM sequence: TTA
tccttcttttgttaacttat

SEQ ID NO: 356421 - DNA, 20 bp, Artificial Sequence
  Description of Artificial Sequence: Synthetic oligonucleotide
  Target: LAMA2; (+) strand; PAM type: YTN; PAM sequence: CTT
cttttgttaacttattttaa

SEQ ID NO: 356422 - DNA, 20 bp, Artificial Sequence
  Description of Artificial Sequence: Synthetic oligonucleotide
  Target: LAMA2; (+) strand; PAM type: YTN; PAM sequence: TTC
ttttgttaacttattttaat

SEQ ID NO: 356423 - DNA, 20 bp, Artificial Sequence
  Description of Artificial Sequence: Synthetic oligonucleotide
  Target: LAMA2; (+) strand; PAM type: YTN; PAM sequence: CTT
ttgttaacttattttaatac

SEQ ID NO: 356424 - DNA, 20 bp, Artificial Sequence
  Description of Artificial Sequence: Synthetic oligonucleotide
  Target: LAMA2; (+) strand; PAM type: YTN; PAM sequence: TTT
tgttaacttattttaatact

SEQ ID NO: 356425 - DNA, 20 bp, Artificial Sequence
  Description of Artificial Sequence: Synthetic oligonucleotide
  Target: LAMA2; (+) strand; PAM type: YTN; PAM sequence: TTT
gttaacttattttaatacta

SEQ ID NO: 356426 - DNA, 20 bp, Artificial Sequence
  Description of Artificial Sequence: Synthetic oligonucleotide
  Target: LAMA2; (+) strand; PAM type: YTN; PAM sequence: TTG
ttaacttattttaatactag

SEQ ID NO: 356427 - DNA, 20 bp, Artificial Sequence
  Description of Artificial Sequence: Synthetic oligonucleotide
  Target: LAMA2; (+) strand; PAM type: YTN; PAM sequence: TTA
acttattttaatactaggat

SEQ ID NO: 356428 - DNA, 20 bp, Artificial Sequence
  Description of Artificial Sequence: Synthetic oligonucleotide
  Target: LAMA2; (+) strand; PAM type: YTN; PAM sequence: CTT
attttaatactaggatgcat

SEQ ID NO: 356429 - DNA, 20 bp, Artificial Sequence
  Description of Artificial Sequence: Synthetic oligonucleotide
  Target: LAMA2; (+) strand; PAM type: YTN; PAM sequence: TTA
ttttaatactaggatgcatt

SEQ ID NO: 356430 - DNA, 20 bp, Artificial Sequence
  Description of Artificial Sequence: Synthetic oligonucleotide
  Target: LAMA2; (+) strand; PAM type: YTN; PAM sequence: TTT
taatactaggatgcattagt

SEQ ID NO: 356431 - DNA, 20 bp, Artificial Sequence
  Description of Artificial Sequence: Synthetic oligonucleotide
  Target: LAMA2; (+) strand; PAM type: YTN; PAM sequence: TTT
aatactaggatgcattagtc

SEQ ID NO: 356432 - DNA, 20 bp, Artificial Sequence
  Description of Artificial Sequence: Synthetic oligonucleotide
  Target: LAMA2; (+) strand; PAM type: YTN; PAM sequence: TTA
atactaggatgcattagtct

SEQ ID NO: 356433 - DNA, 20 bp, Artificial Sequence
  Description of Artificial Sequence: Synthetic oligonucleotide
  Target: LAMA2; (+) strand; PAM type: YTN; PAM sequence: CTA
ggatgcattagtctaaaggt

SEQ ID NO: 356434 - DNA, 20 bp, Artificial Sequence
  Description of Artificial Sequence: Synthetic oligonucleotide
  Target: LAMA2; (+) strand; PAM type: YTN; PAM sequence: TTA
gtctaaaggtcataacagaa

SEQ ID NO: 356435 - DNA, 20 bp, Artificial Sequence
  Description of Artificial Sequence: Synthetic oligonucleotide
  Target: LAMA2; (+) strand; PAM type: YTN; PAM sequence: CTA
aaggtcataacagaagaaaa

SEQ ID NO: 356436 - DNA, 20 bp, Artificial Sequence
  Description of Artificial Sequence: Synthetic oligonucleotide
  Target: LAMA2; (+) strand; PAM type: YTN; PAM sequence: CTG
taattaactacaaactacca

SEQ ID NO: 356437 - DNA, 20 bp, Artificial Sequence
  Description of Artificial Sequence: Synthetic oligonucleotide
  Target: LAMA2; (+) strand; PAM type: YTN; PAM sequence: TTA
actacaaactaccaaaaaac

SEQ ID NO: 356438 - DNA, 20 bp, Artificial Sequence
  Description of Artificial Sequence: Synthetic oligonucleotide
  Target: LAMA2; (+) strand; PAM type: YTN; PAM sequence: CTA
caaactaccaaaaaaccaag

SEQ ID NO: 356439 - DNA, 20 bp, Artificial Sequence
  Description of Artificial Sequence: Synthetic oligonucleotide
  Target: LAMA2; (+) strand; PAM type: YTN; PAM sequence: CTA
ccaaaaaaccaagcatgact

SEQ ID NO: 356440 - DNA, 20 bp, Artificial Sequence
  Description of Artificial Sequence: Synthetic oligonucleotide
  Target: LAMA2; (+) strand; PAM type: YTN; PAM sequence: CTG
agaaattcctgaagcaatta

SEQ ID NO: 356441 - DNA, 20 bp, Artificial Sequence
  Description of Artificial Sequence: Synthetic oligonucleotide
  Target: LAMA2; (+) strand; PAM type: YTN; PAM sequence: TTC
ctgaagcaattatcacacaa

SEQ ID NO: 356442 - DNA, 20 bp, Artificial Sequence
  Description of Artificial Sequence: Synthetic oligonucleotide
  Target: LAMA2; (+) strand; PAM type: YTN; PAM sequence: CTG
aagcaattatcacacaaaaa

SEQ ID NO: 356443 - DNA, 20 bp, Artificial Sequence
  Description of Artificial Sequence: Synthetic oligonucleotide
  Target: LAMA2; (+) strand; PAM type: YTN; PAM sequence: TTA
tcacacaaaaaaaataactt

SEQ ID NO: 356444 - DNA, 20 bp, Artificial Sequence
  Description of Artificial Sequence: Synthetic oligonucleotide
  Target: LAMA2; (+) strand; PAM type: YTN; PAM sequence: CTT
aaatgtcactggagctattc

SEQ ID NO: 356445 - DNA, 20 bp, Artificial Sequence
  Description of Artificial Sequence: Synthetic oligonucleotide
  Target: LAMA2; (+) strand; PAM type: YTN; PAM sequence: TTA
aatgtcactggagctattcc

SEQ ID NO: 356446 - DNA, 20 bp, Artificial Sequence
  Description of Artificial Sequence: Synthetic oligonucleotide
  Target: LAMA2; (+) strand; PAM type: YTN; PAM sequence: CTG
gagctattcctggtaacttt

SEQ ID NO: 356447 - DNA, 20 bp, Artificial Sequence
  Description of Artificial Sequence: Synthetic oligonucleotide
  Target: LAMA2; (+) strand; PAM type: YTN; PAM sequence: CTA
ttcctggtaactttgtcagt

SEQ ID NO: 356448 - DNA, 20 bp, Artificial Sequence
  Description of Artificial Sequence: Synthetic oligonucleotide
  Target: LAMA2; (+) strand; PAM type: YTN; PAM sequence: TTC
ctggtaactttgtcagtagt

SEQ ID NO: 356449 - DNA, 20 bp, Artificial Sequence
  Description of Artificial Sequence: Synthetic oligonucleotide
  Target: LAMA2; (+) strand; PAM type: YTN; PAM sequence: CTG
gtaactttgtcagtagtact

SEQ ID NO: 356450 - DNA, 20 bp, Artificial Sequence
  Description of Artificial Sequence: Synthetic oligonucleotide
  Target: LAMA2; (+) strand; PAM type: YTN; PAM sequence: CTT
tgtcagtagtactcccagct

SEQ ID NO: 356451 - DNA, 20 bp, Artificial Sequence
  Description of Artificial Sequence: Synthetic oligonucleotide
  Target: LAMA2; (+) strand; PAM type: YTN; PAM sequence: TTT
gtcagtagtactcccagctg

SEQ ID NO: 356452 - DNA, 20 bp, Artificial Sequence
  Description of Artificial Sequence: Synthetic oligonucleotide
  Target: LAMA2; (+) strand; PAM type: YTN; PAM sequence: TTG
tcagtagtactcccagctga

SEQ ID NO: 356453 - DNA, 20 bp, Artificial Sequence
  Description of Artificial Sequence: Synthetic oligonucleotide
  Target: LAMA2; (+) strand; PAM type: YTN; PAM sequence: CTC
ccagctgactaacaatcaca

SEQ ID NO: 356454 - DNA, 20 bp, Artificial Sequence
  Description of Artificial Sequence: Synthetic oligonucleotide
  Target: LAMA2; (+) strand; PAM type: YTN; PAM sequence: CTG
actaacaatcacagttcaat

SEQ ID NO: 356455 - DNA, 20 bp, Artificial Sequence
  Description of Artificial Sequence: Synthetic oligonucleotide
  Target: LAMA2; (+) strand; PAM type: YTN; PAM sequence: CTA
acaatcacagttcaatatgt

SEQ ID NO: 356456 - DNA, 20 bp, Artificial Sequence
  Description of Artificial Sequence: Synthetic oligonucleotide
  Target: LAMA2; (+) strand; PAM type: YTN; PAM sequence: TTC
aatatgtactgctgaagttg

SEQ ID NO: 356457 - DNA, 20 bp, Artificial Sequence
  Description of Artificial Sequence: Synthetic oligonucleotide
  Target: LAMA2; (+) strand; PAM type: YTN; PAM sequence: CTG
ctgaagttgtacctagttta

SEQ ID NO: 356458 - DNA, 20 bp, Artificial Sequence
  Description of Artificial Sequence: Synthetic oligonucleotide
  Target: LAMA2; (+) strand; PAM type: YTN; PAM sequence: CTG
aagttgtacctagtttataa

SEQ ID NO: 356459 - DNA, 20 bp, Artificial Sequence
  Description of Artificial Sequence: Synthetic oligonucleotide
  Target: LAMA2; (+) strand; PAM type: YTN; PAM sequence: TTG
tacctagtttataaagcagt

SEQ ID NO: 356460 - DNA, 20 bp, Artificial Sequence
  Description of Artificial Sequence: Synthetic oligonucleotide
  Target: LAMA2; (+) strand; PAM type: YTN; PAM sequence: CTA
gtttataaagcagtagcttc

SEQ ID NO: 356461 - DNA, 20 bp, Artificial Sequence
  Description of Artificial Sequence: Synthetic oligonucleotide
  Target: LAMA2; (+) strand; PAM type: YTN; PAM sequence: TTT
ataaagcagtagcttctatg

SEQ ID NO: 356462 - DNA, 20 bp, Artificial Sequence
  Description of Artificial Sequence: Synthetic oligonucleotide
  Target: LAMA2; (+) strand; PAM type: YTN; PAM sequence: TTA
taaagcagtagcttctatga

SEQ ID NO: 356463 - DNA, 20 bp, Artificial Sequence
  Description of Artificial Sequence: Synthetic oligonucleotide
  Target: LAMA2; (+) strand; PAM type: YTN; PAM sequence: CTT
ctatgagaaagaatacaaga

SEQ ID NO: 356464 - DNA, 20 bp, Artificial Sequence
  Description of Artificial Sequence: Synthetic oligonucleotide
  Target: LAMA2; (+) strand; PAM type: YTN; PAM sequence: TTC
tatgagaaagaatacaagaa

SEQ ID NO: 356465 - DNA, 20 bp, Artificial Sequence
  Description of Artificial Sequence: Synthetic oligonucleotide
  Target: LAMA2; (+) strand; PAM type: YTN; PAM sequence: CTA
tgagaaagaatacaagaaaa

SEQ ID NO: 356466 - DNA, 20 bp, Artificial Sequence
  Description of Artificial Sequence: Synthetic oligonucleotide
  Target: LAMA2; (+) strand; PAM type: YTN; PAM sequence: CTA
cggtgactatttctccagag

SEQ ID NO: 356467 - DNA, 20 bp, Artificial Sequence
  Description of Artificial Sequence: Synthetic oligonucleotide
  Target: LAMA2; (+) strand; PAM type: YTN; PAM sequence: CTA
tttctccagagaaaaactgt

SEQ ID NO: 356468 - DNA, 20 bp, Artificial Sequence
  Description of Artificial Sequence: Synthetic oligonucleotide
  Target: LAMA2; (+) strand; PAM type: YTN; PAM sequence: TTT
ctccagagaaaaactgtact

SEQ ID NO: 356469 - DNA, 20 bp, Artificial Sequence
  Description of Artificial Sequence: Synthetic oligonucleotide
  Target: LAMA2; (+) strand; PAM type: YTN; PAM sequence: TTC
tccagagaaaaactgtactg

SEQ ID NO: 356470 - DNA, 20 bp, Artificial Sequence
  Description of Artificial Sequence: Synthetic oligonucleotide
  Target: LAMA2; (+) strand; PAM type: YTN; PAM sequence: CTC
cagagaaaaactgtactgag

SEQ ID NO: 356471 - DNA, 20 bp, Artificial Sequence
  Description of Artificial Sequence: Synthetic oligonucleotide
  Target: LAMA2; (+) strand; PAM type: YTN; PAM sequence: CTG
tactgaggaaactatagcaa

SEQ ID NO: 356472 - DNA, 20 bp, Artificial Sequence
  Description of Artificial Sequence: Synthetic oligonucleotide
  Target: LAMA2; (+) strand; PAM type: YTN; PAM sequence: CTG
aggaaactatagcaaaaaga

SEQ ID NO: 356473 - DNA, 20 bp, Artificial Sequence
  Description of Artificial Sequence: Synthetic oligonucleotide
  Target: LAMA2; (+) strand; PAM type: YTN; PAM sequence: CTA
tagcaaaaagaaaattgatg

SEQ ID NO: 356474 - DNA, 20 bp, Artificial Sequence
  Description of Artificial Sequence: Synthetic oligonucleotide
  Target: LAMA2; (+) strand; PAM type: YTN; PAM sequence: TTG
atgtcaacacaatagtatct

SEQ ID NO: 356475 - DNA, 20 bp, Artificial Sequence
  Description of Artificial Sequence: Synthetic oligonucleotide
  Target: LAMA2; (+) strand; PAM type: YTN; PAM sequence: CTC
acttcaagaaatcaaaaaca

SEQ ID NO: 356476 - DNA, 20 bp, Artificial Sequence
  Description of Artificial Sequence: Synthetic oligonucleotide
  Target: LAMA2; (+) strand; PAM type: YTN; PAM sequence: CTT
caagaaatcaaaaacaaaag

SEQ ID NO: 356477 - DNA, 20 bp, Artificial Sequence
  Description of Artificial Sequence: Synthetic oligonucleotide
  Target: LAMA2; (+) strand; PAM type: YTN; PAM sequence: TTC
aagaaatcaaaaacaaaaga

SEQ ID NO: 356478 - DNA, 20 bp, Artificial Sequence
  Description of Artificial Sequence: Synthetic oligonucleotide
  Target: LAMA2; (+) strand; PAM type: YTN; PAM sequence: CTT
agtaaaatttttctaattca

SEQ ID NO: 356479 - DNA, 20 bp, Artificial Sequence
  Description of Artificial Sequence: Synthetic oligonucleotide
  Target: LAMA2; (+) strand; PAM type: YTN; PAM sequence: TTA
gtaaaatttttctaattcaa

SEQ ID NO: 356480 - DNA, 20 bp, Artificial Sequence
  Description of Artificial Sequence: Synthetic oligonucleotide
  Target: LAMA2; (+) strand; PAM type: YTN; PAM sequence: TTT
ttctaattcaactttgtttt

SEQ ID NO: 356481 - DNA, 20 bp, Artificial Sequence
  Description of Artificial Sequence: Synthetic oligonucleotide
  Target: LAMA2; (+) strand; PAM type: YTN; PAM sequence: TTT
tctaattcaactttgttttt

SEQ ID NO: 356482 - DNA, 20 bp, Artificial Sequence
  Description of Artificial Sequence: Synthetic oligonucleotide
  Target: LAMA2; (+) strand; PAM type: YTN; PAM sequence: TTT
ctaattcaactttgttttta

SEQ ID NO: 356483 - DNA, 20 bp, Artificial Sequence
  Description of Artificial Sequence: Synthetic oligonucleotide
  Target: LAMA2; (+) strand; PAM type: YTN; PAM sequence: TTC
taattcaactttgtttttaa

SEQ ID NO: 356484 - DNA, 20 bp, Artificial Sequence
  Description of Artificial Sequence: Synthetic oligonucleotide
  Target: LAMA2; (+) strand; PAM type: YTN; PAM sequence: CTA
attcaactttgtttttaaag

SEQ ID NO: 356485 - DNA, 20 bp, Artificial Sequence
  Description of Artificial Sequence: Synthetic oligonucleotide
  Target: LAMA2; (+) strand; PAM type: YTN; PAM sequence: TTC
aactttgtttttaaagggaa

SEQ ID NO: 356486 - DNA, 20 bp, Artificial Sequence
  Description of Artificial Sequence: Synthetic oligonucleotide
  Target: LAMA2; (+) strand; PAM type: YTN; PAM sequence: CTT
tgtttttaaagggaaaagag

SEQ ID NO: 356487 - DNA, 20 bp, Artificial Sequence
  Description of Artificial Sequence: Synthetic oligonucleotide
  Target: LAMA2; (+) strand; PAM type: YTN; PAM sequence: TTT
gtttttaaagggaaaagaga

SEQ ID NO: 356488 - DNA, 20 bp, Artificial Sequence
  Description of Artificial Sequence: Synthetic oligonucleotide
  Target: LAMA2; (+) strand; PAM type: YTN; PAM sequence: TTG
tttttaaagggaaaagagaa

SEQ ID NO: 356489 - DNA, 20 bp, Artificial Sequence
  Description of Artificial Sequence: Synthetic oligonucleotide
  Target: LAMA2; (+) strand; PAM type: YTN; PAM sequence: TTT
ttaaagggaaaagagaacta

SEQ ID NO: 356490 - DNA, 20 bp, Artificial Sequence
  Description of Artificial Sequence: Synthetic oligonucleotide
  Target: LAMA2; (+) strand; PAM type: YTN; PAM sequence: TTT
taaagggaaaagagaactaa

SEQ ID NO: 356491 - DNA, 20 bp, Artificial Sequence
  Description of Artificial Sequence: Synthetic oligonucleotide
  Target: LAMA2; (+) strand; PAM type: YTN; PAM sequence: TTT
aaagggaaaagagaactaaa

SEQ ID NO: 356492 - DNA, 20 bp, Artificial Sequence
  Description of Artificial Sequence: Synthetic oligonucleotide
  Target: LAMA2; (+) strand; PAM type: YTN; PAM sequence: TTA
aagggaaaagagaactaaag

SEQ ID NO: 356493 - DNA, 20 bp, Artificial Sequence
  Description of Artificial Sequence: Synthetic oligonucleotide
  Target: LAMA2; (+) strand; PAM type: YTN; PAM sequence: CTA
aagaaaaaaaagacagccat

SEQ ID NO: 356494 - DNA, 20 bp, Artificial Sequence
  Description of Artificial Sequence: Synthetic oligonucleotide
  Target: LAMA2; (+) strand; PAM type: YTN; PAM sequence: TTT
tttgtagcgtaggccacaac

SEQ ID NO: 356495 - DNA, 20 bp, Artificial Sequence
  Description of Artificial Sequence: Synthetic oligonucleotide
  Target: LAMA2; (+) strand; PAM type: YTN; PAM sequence: TTT
ttgtagcgtaggccacaaca

SEQ ID NO: 356496 - DNA, 20 bp, Artificial Sequence
  Description of Artificial Sequence: Synthetic oligonucleotide
  Target: LAMA2; (+) strand; PAM type: YTN; PAM sequence: TTT
tgtagcgtaggccacaacat

SEQ ID NO: 356497 - DNA, 20 bp, Artificial Sequence
  Description of Artificial Sequence: Synthetic oligonucleotide
  Target: LAMA2; (+) strand; PAM type: YTN; PAM sequence: TTT
gtagcgtaggccacaacatt

SEQ ID NO: 356498 - DNA, 20 bp, Artificial Sequence
  Description of Artificial Sequence: Synthetic oligonucleotide
  Target: LAMA2; (+) strand; PAM type: YTN; PAM sequence: TTG
tagcgtaggccacaacattg

SEQ ID NO: 356499 - DNA, 20 bp, Artificial Sequence
  Description of Artificial Sequence: Synthetic oligonucleotide
  Target: LAMA2; (+) strand; PAM type: YTN; PAM sequence: TTG
agctatgttcaaaggaaata

SEQ ID NO: 356500 - DNA, 20 bp, Artificial Sequence
  Description of Artificial Sequence: Synthetic oligonucleotide
  Target: LAMA2; (+) strand; PAM type: YTN; PAM sequence: CTA
tgttcaaaggaaatagatgt

SEQ ID NO: 356501 - DNA, 20 bp, Artificial Sequence
  Description of Artificial Sequence: Synthetic oligonucleotide
  Target: LAMA2; (+) strand; PAM type: YTN; PAM sequence: TTC
aaaggaaatagatgtctaaa

SEQ ID NO: 356502 - DNA, 20 bp, Artificial Sequence
  Description of Artificial Sequence: Synthetic oligonucleotide
  Target: LAMA2; (+) strand; PAM type: YTN; PAM sequence: CTA
aagcacacatttcttcctaa

SEQ ID NO: 356503 - DNA, 20 bp, Artificial Sequence
  Description of Artificial Sequence: Synthetic oligonucleotide
  Target: LAMA2; (+) strand; PAM type: YTN; PAM sequence: TTT
cttcctaaaagaatgaaaat

SEQ ID NO: 356504 - DNA, 20 bp, Artificial Sequence
  Description of Artificial Sequence: Synthetic oligonucleotide
  Target: LAMA2; (+) strand; PAM type: YTN; PAM sequence: TTC
ttcctaaaagaatgaaaatt

SEQ ID NO: 356505 - DNA, 20 bp, Artificial Sequence
  Description of Artificial Sequence: Synthetic oligonucleotide
  Target: LAMA2; (+) strand; PAM type: YTN; PAM sequence: CTT
cctaaaagaatgaaaattgg

SEQ ID NO: 356506 - DNA, 20 bp, Artificial Sequence
  Description of Artificial Sequence: Synthetic oligonucleotide
  Target: LAMA2; (+) strand; PAM type: YTN; PAM sequence: TTC
ctaaaagaatgaaaattggt

SEQ ID NO: 356507 - DNA, 20 bp, Artificial Sequence
  Description of Artificial Sequence: Synthetic oligonucleotide
  Target: LAMA2; (+) strand; PAM type: YTN; PAM sequence: CTA
aaagaatgaaaattggttct

SEQ ID NO: 356508 - DNA, 20 bp, Artificial Sequence
  Description of Artificial Sequence: Synthetic oligonucleotide
  Target: LAMA2; (+) strand; PAM type: YTN; PAM sequence: TTG
gttctttgggaacaaaaata

SEQ ID NO: 356509 - DNA, 20 bp, Artificial Sequence
  Description of Artificial Sequence: Synthetic oligonucleotide
  Target: LAMA2; (+) strand; PAM type: YTN; PAM sequence: TTC
tttgggaacaaaaatatcat

SEQ ID NO: 356510 - DNA, 20 bp, Artificial Sequence
  Description of Artificial Sequence: Synthetic oligonucleotide
  Target: LAMA2; (+) strand; PAM type: YTN; PAM sequence: CTT
tgggaacaaaaatatcatat

SEQ ID NO: 356511 - DNA, 20 bp, Artificial Sequence
  Description of Artificial Sequence: Synthetic oligonucleotide
  Target: LAMA2; (+) strand; PAM type: YTN; PAM sequence: TTT
gggaacaaaaatatcatatt

SEQ ID NO: 356512 - DNA, 20 bp, Artificial Sequence
  Description of Artificial Sequence: Synthetic oligonucleotide
  Target: LAMA2; (+) strand; PAM type: YTN; PAM sequence: TTG
ggaacaaaaatatcatattg

SEQ ID NO: 356513 - DNA, 20 bp, Artificial Sequence
  Description of Artificial Sequence: Synthetic oligonucleotide
  Target: LAMA2; (+) strand; PAM type: YTN; PAM sequence: TTG
attttatgtaaaggcaaaca

SEQ ID NO: 356514 - DNA, 20 bp, Artificial Sequence
  Description of Artificial Sequence: Synthetic oligonucleotide
  Target: LAMA2; (+) strand; PAM type: YTN; PAM sequence: TTT
tatgtaaaggcaaacattca

SEQ ID NO: 356515 - DNA, 20 bp, Artificial Sequence
  Description of Artificial Sequence: Synthetic oligonucleotide
  Target: LAMA2; (+) strand; PAM type: YTN; PAM sequence: TTT
atgtaaaggcaaacattcac

SEQ ID NO: 356516 - DNA, 20 bp, Artificial Sequence
  Description of Artificial Sequence: Synthetic oligonucleotide
  Target: LAMA2; (+) strand; PAM type: YTN; PAM sequence: TTA
tgtaaaggcaaacattcaca

SEQ ID NO: 356517 - DNA, 20 bp, Artificial Sequence
  Description of Artificial Sequence: Synthetic oligonucleotide
  Target: LAMA2; (+) strand; PAM type: YTN; PAM sequence: TTC
acatggtgcatctgtacata

SEQ ID NO: 356518 - DNA, 20 bp, Artificial Sequence
  Description of Artificial Sequence: Synthetic oligonucleotide
  Target: LAMA2; (+) strand; PAM type: YTN; PAM sequence: CTG
tacataaaatatatctggag

SEQ ID NO: 356519 - DNA, 20 bp, Artificial Sequence
  Description of Artificial Sequence: Synthetic oligonucleotide
  Target: LAMA2; (+) strand; PAM type: YTN; PAM sequence: CTG
gagtattaaagtttcatggt

SEQ ID NO: 356520 - DNA, 20 bp, Artificial Sequence
  Description of Artificial Sequence: Synthetic oligonucleotide
  Target: LAMA2; (+) strand; PAM type: YTN; PAM sequence: TTA
aagtttcatggtggggatga

SEQ ID NO: 356521 - DNA, 20 bp, Artificial Sequence
  Description of Artificial Sequence: Synthetic oligonucleotide
  Target: LAMA2; (+) strand; PAM type: YTN; PAM sequence: TTT
catggtggggatgattatga

SEQ ID NO: 356522 - DNA, 20 bp, Artificial Sequence
  Description of Artificial Sequence: Synthetic oligonucleotide
  Target: LAMA2; (+) strand; PAM type: YTN; PAM sequence: TTC
atggtggggatgattatgaa

SEQ ID NO: 356523 - DNA, 20 bp, Artificial Sequence
  Description of Artificial Sequence: Synthetic oligonucleotide
  Target: LAMA2; (+) strand; PAM type: YTN; PAM sequence: TTA
tgaaaaaatgactatatagg

SEQ ID NO: 356524 - DNA, 20 bp, Artificial Sequence
  Description of Artificial Sequence: Synthetic oligonucleotide
  Target: LAMA2; (+) strand; PAM type: YTN; PAM sequence: CTA
tataggctccatagggacat

SEQ ID NO: 356525 - DNA, 20 bp, Artificial Sequence
  Description of Artificial Sequence: Synthetic oligonucleotide
  Target: LAMA2; (+) strand; PAM type: YTN; PAM sequence: CTC
catagggacatgatgataaa

SEQ ID NO: 356526 - DNA, 20 bp, Artificial Sequence
  Description of Artificial Sequence: Synthetic oligonucleotide
  Target: LAMA2; (+) strand; PAM type: YTN; PAM sequence: TTA
agtagattgaaaacactagt

SEQ ID NO: 356527 - DNA, 20 bp, Artificial Sequence
  Description of Artificial Sequence: Synthetic oligonucleotide
  Target: LAMA2; (+) strand; PAM type: YTN; PAM sequence: TTG
aaaacactagtctaaagtga

SEQ ID NO: 356528 - DNA, 20 bp, Artificial Sequence
  Description of Artificial Sequence: Synthetic oligonucleotide
  Target: LAMA2; (+) strand; PAM type: YTN; PAM sequence: CTA
gtctaaagtgaagtgatgtg

SEQ ID NO: 356529 - DNA, 20 bp, Artificial Sequence
  Description of Artificial Sequence: Synthetic oligonucleotide
  Target: LAMA2; (+) strand; PAM type: YTN; PAM sequence: CTA
aagtgaagtgatgtgtttta

SEQ ID NO: 356530 - DNA, 20 bp, Artificial Sequence
  Description of Artificial Sequence: Synthetic oligonucleotide
  Target: LAMA2; (+) strand; PAM type: YTN; PAM sequence: TTT
taatatcataatatgtgaga

SEQ ID NO: 356531 - DNA, 20 bp, Artificial Sequence
  Description of Artificial Sequence: Synthetic oligonucleotide
  Target: LAMA2; (+) strand; PAM type: YTN; PAM sequence: TTT
aatatcataatatgtgagaa

SEQ ID NO: 356532 - DNA, 20 bp, Artificial Sequence
  Description of Artificial Sequence: Synthetic oligonucleotide
  Target: LAMA2; (+) strand; PAM type: YTN; PAM sequence: TTA
atatcataatatgtgagaat

SEQ ID NO: 356533 - DNA, 20 bp, Artificial Sequence
  Description of Artificial Sequence: Synthetic oligonucleotide
  Target: LAMA2; (+) strand; PAM type: YTN; PAM sequence: TTT
acgtatggattatttacaat

SEQ ID NO: 356534 - DNA, 20 bp, Artificial Sequence
  Description of Artificial Sequence: Synthetic oligonucleotide
  Target: LAMA2; (+) strand; PAM type: YTN; PAM sequence: TTA
cgtatggattatttacaatg

SEQ ID NO: 356535 - DNA, 20 bp, Artificial Sequence
  Description of Artificial Sequence: Synthetic oligonucleotide
  Target: LAMA2; (+) strand; PAM type: YTN; PAM sequence: TTA
tttacaatggaaaaatgact

SEQ ID NO: 356536 - DNA, 20 bp, Artificial Sequence
  Description of Artificial Sequence: Synthetic oligonucleotide
  Target: LAMA2; (+) strand; PAM type: YTN; PAM sequence: TTT
acaatggaaaaatgactatt

SEQ ID NO: 356537 - DNA, 20 bp, Artificial Sequence
  Description of Artificial Sequence: Synthetic oligonucleotide
  Target: LAMA2; (+) strand; PAM type: YTN; PAM sequence: TTA
caatggaaaaatgactatta

SEQ ID NO: 356538 - DNA, 20 bp, Artificial Sequence
  Description of Artificial Sequence: Synthetic oligonucleotide
  Target: LAMA2; (+) strand; PAM type: YTN; PAM sequence: CTA
ttatagttcatatttcattt

SEQ ID NO: 356539 - DNA, 20 bp, Artificial Sequence
  Description of Artificial Sequence: Synthetic oligonucleotide
  Target: LAMA2; (+) strand; PAM type: YTN; PAM sequence: TTA
tagttcatatttcattttat

SEQ ID NO: 356540 - DNA, 20 bp, Artificial Sequence
  Description of Artificial Sequence: Synthetic oligonucleotide
  Target: LAMA2; (+) strand; PAM type: YTN; PAM sequence: TTC
atatttcattttattaatgt

SEQ ID NO: 356541 - DNA, 20 bp, Artificial Sequence
  Description of Artificial Sequence: Synthetic oligonucleotide
  Target: LAMA2; (+) strand; PAM type: YTN; PAM sequence: TTT
cattttattaatgtaattga

SEQ ID NO: 356542 - DNA, 20 bp, Artificial Sequence
  Description of Artificial Sequence: Synthetic oligonucleotide
  Target: LAMA2; (+) strand; PAM type: YTN; PAM sequence: TTC
attttattaatgtaattgat

SEQ ID NO: 356543 - DNA, 20 bp, Artificial Sequence
  Description of Artificial Sequence: Synthetic oligonucleotide
  Target: LAMA2; (+) strand; PAM type: YTN; PAM sequence: TTT
tattaatgtaattgattaga

SEQ ID NO: 356544 - DNA, 20 bp, Artificial Sequence
  Description of Artificial Sequence: Synthetic oligonucleotide
  Target: LAMA2; (+) strand; PAM type: YTN; PAM sequence: TTT
attaatgtaattgattagaa

SEQ ID NO: 356545 - DNA, 20 bp, Artificial Sequence
  Description of Artificial Sequence: Synthetic oligonucleotide
  Target: LAMA2; (+) strand; PAM type: YTN; PAM sequence: TTA
ttaatgtaattgattagaat

SEQ ID NO: 356546 - DNA, 20 bp, Artificial Sequence
  Description of Artificial Sequence: Synthetic oligonucleotide
  Target: LAMA2; (+) strand; PAM type: YTN; PAM sequence: TTA
atgtaattgattagaataat

SEQ ID NO: 356547 - DNA, 20 bp, Artificial Sequence
  Description of Artificial Sequence: Synthetic oligonucleotide
  Target: LAMA2; (+) strand; PAM type: YTN; PAM sequence: TTG
attagaataatggtatagaa

SEQ ID NO: 356548 - DNA, 20 bp, Artificial Sequence
  Description of Artificial Sequence: Synthetic oligonucleotide
  Target: LAMA2; (+) strand; PAM type: YTN; PAM sequence: TTA
gaataatggtatagaaatag

SEQ ID NO: 356549 - DNA, 20 bp, Artificial Sequence
  Description of Artificial Sequence: Synthetic oligonucleotide
  Target: LAMA2; (+) strand; PAM type: YTN; PAM sequence: TTT
ggttttaagaaaatatggtg

SEQ ID NO: 356550 - DNA, 20 bp, Artificial Sequence
  Description of Artificial Sequence: Synthetic oligonucleotide
  Target: LAMA2; (+) strand; PAM type: YTN; PAM sequence: TTG
gttttaagaaaatatggtga

SEQ ID NO: 356551 - DNA, 20 bp, Artificial Sequence
  Description of Artificial Sequence: Synthetic oligonucleotide
  Target: LAMA2; (+) strand; PAM type: YTN; PAM sequence: TTT
taagaaaatatggtgatata

SEQ ID NO: 356552 - DNA, 20 bp, Artificial Sequence
  Description of Artificial Sequence: Synthetic oligonucleotide
  Target: LAMA2; (+) strand; PAM type: YTN; PAM sequence: TTT
aagaaaatatggtgatataa

SEQ ID NO: 356553 - DNA, 20 bp, Artificial Sequence
  Description of Artificial Sequence: Synthetic oligonucleotide
  Target: LAMA2; (+) strand; PAM type: YTN; PAM sequence: TTA
agaaaatatggtgatataag

SEQ ID NO: 356554 - DNA, 20 bp, Artificial Sequence
  Description of Artificial Sequence: Synthetic oligonucleotide
  Target: LAMA2; (+) strand; PAM type: YTN; PAM sequence: TTA
atttctagagtggaagtctg

SEQ ID NO: 356555 - DNA, 20 bp, Artificial Sequence
  Description of Artificial Sequence: Synthetic oligonucleotide
  Target: LAMA2; (+) strand; PAM type: YTN; PAM sequence: TTT
ctagagtggaagtctgtagc

SEQ ID NO: 356556 - DNA, 20 bp, Artificial Sequence
  Description of Artificial Sequence: Synthetic oligonucleotide
  Target: LAMA2; (+) strand; PAM type: YTN; PAM sequence: TTC
tagagtggaagtctgtagcg

SEQ ID NO: 356557 - DNA, 20 bp, Artificial Sequence
  Description of Artificial Sequence: Synthetic oligonucleotide
  Target: LAMA2; (+) strand; PAM type: YTN; PAM sequence: CTA
gagtggaagtctgtagcgtt

SEQ ID NO: 356558 - DNA, 20 bp, Artificial Sequence
  Description of Artificial Sequence: Synthetic oligonucleotide
  Target: LAMA2; (+) strand; PAM type: YTN; PAM sequence: CTG
tagcgttctagaaattaccg

SEQ ID NO: 356559 - DNA, 20 bp, Artificial Sequence
  Description of Artificial Sequence: Synthetic oligonucleotide
  Target: LAMA2; (+) strand; PAM type: YTN; PAM sequence: TTC
tagaaattaccgtgttttat

SEQ ID NO: 356560 - DNA, 20 bp, Artificial Sequence
  Description of Artificial Sequence: Synthetic oligonucleotide
  Target: LAMA2; (+) strand; PAM type: YTN; PAM sequence: CTA
gaaattaccgtgttttatag

SEQ ID NO: 356561 - DNA, 20 bp, Artificial Sequence
  Description of Artificial Sequence: Synthetic oligonucleotide
  Target: LAMA2; (+) strand; PAM type: YTN; PAM sequence: TTA
ccgtgttttataggctgtag

SEQ ID NO: 356562 - DNA, 20 bp, Artificial Sequence
  Description of Artificial Sequence: Synthetic oligonucleotide
  Target: LAMA2; (+) strand; PAM type: YTN; PAM sequence: TTT
tataggctgtagtgtgaaaa

SEQ ID NO: 356563 - DNA, 20 bp, Artificial Sequence
  Description of Artificial Sequence: Synthetic oligonucleotide
  Target: LAMA2; (+) strand; PAM type: YTN; PAM sequence: TTT
ataggctgtagtgtgaaaat

SEQ ID NO: 356564 - DNA, 20 bp, Artificial Sequence
  Description of Artificial Sequence: Synthetic oligonucleotide
  Target: LAMA2; (+) strand; PAM type: YTN; PAM sequence: TTA
taggctgtagtgtgaaaatt

SEQ ID NO: 356565 - DNA, 20 bp, Artificial Sequence
  Description of Artificial Sequence: Synthetic oligonucleotide
  Target: LAMA2; (+) strand; PAM type: YTN; PAM sequence: CTG
tagtgtgaaaattatcatta

SEQ ID NO: 356566 - DNA, 20 bp, Artificial Sequence
  Description of Artificial Sequence: Synthetic oligonucleotide
  Target: LAMA2; (+) strand; PAM type: YTN; PAM sequence: TTA
tcattaaatacgcaaattga

SEQ ID NO: 356567 - DNA, 20 bp, Artificial Sequence
  Description of Artificial Sequence: Synthetic oligonucleotide
  Target: LAMA2; (+) strand; PAM type: YTN; PAM sequence: TTA
aatacgcaaattgaaaagaa

SEQ ID NO: 356568 - DNA, 20 bp, Artificial Sequence
  Description of Artificial Sequence: Synthetic oligonucleotide
  Target: LAMA2; (+) strand; PAM type: YTN; PAM sequence: TTG
aaaagaatcactaatggact

SEQ ID NO: 356569 - DNA, 20 bp, Artificial Sequence
  Description of Artificial Sequence: Synthetic oligonucleotide
  Target: LAMA2; (+) strand; PAM type: YTN; PAM sequence: CTA
atggactctatacaaataaa

SEQ ID NO: 356570 - DNA, 20 bp, Artificial Sequence
  Description of Artificial Sequence: Synthetic oligonucleotide
  Target: LAMA2; (+) strand; PAM type: YTN; PAM sequence: CTC
tatacaaataaagtgttaaa

SEQ ID NO: 356571 - DNA, 20 bp, Artificial Sequence
  Description of Artificial Sequence: Synthetic oligonucleotide
  Target: LAMA2; (+) strand; PAM type: YTN; PAM sequence: CTA
tacaaataaagtgttaaaat

SEQ ID NO: 356572 - DNA, 20 bp, Artificial Sequence
  Description of Artificial Sequence: Synthetic oligonucleotide
  Target: LAMA2; (+) strand; PAM type: YTN; PAM sequence: TTA
aaatgaatttattggatcaa

SEQ ID NO: 356573 - DNA, 20 bp, Artificial Sequence
  Description of Artificial Sequence: Synthetic oligonucleotide
  Target: LAMA2; (+) strand; PAM type: YTN; PAM sequence: TTT
attggatcaataggagcttc

SEQ ID NO: 356574 - DNA, 20 bp, Artificial Sequence
  Description of Artificial Sequence: Synthetic oligonucleotide
  Target: LAMA2; (+) strand; PAM type: YTN; PAM sequence: TTA
ttggatcaataggagcttcc

SEQ ID NO: 356575 - DNA, 20 bp, Artificial Sequence
  Description of Artificial Sequence: Synthetic oligonucleotide
  Target: LAMA2; (+) strand; PAM type: YTN; PAM sequence: TTG
gatcaataggagcttcccag

SEQ ID NO: 356576 - DNA, 20 bp, Artificial Sequence
  Description of Artificial Sequence: Synthetic oligonucleotide
  Target: LAMA2; (+) strand; PAM type: YTN; PAM sequence: CTT
cccagtaggaatgctgagag

SEQ ID NO: 356577 - DNA, 20 bp, Artificial Sequence
  Description of Artificial Sequence: Synthetic oligonucleotide
  Target: LAMA2; (+) strand; PAM type: YTN; PAM sequence: TTC
ccagtaggaatgctgagagg

SEQ ID NO: 356578 - DNA, 20 bp, Artificial Sequence
  Description of Artificial Sequence: Synthetic oligonucleotide
  Target: LAMA2; (+) strand; PAM type: YTN; PAM sequence: CTG
agaggtttaatagattagac

SEQ ID NO: 356579 - DNA, 20 bp, Artificial Sequence
  Description of Artificial Sequence: Synthetic oligonucleotide
  Target: LAMA2; (+) strand; PAM type: YTN; PAM sequence: TTT
aatagattagactccatttt

SEQ ID NO: 356580 - DNA, 20 bp, Artificial Sequence
  Description of Artificial Sequence: Synthetic oligonucleotide
  Target: LAMA2; (+) strand; PAM type: YTN; PAM sequence: TTA
atagattagactccattttg

SEQ ID NO: 356581 - DNA, 20 bp, Artificial Sequence
  Description of Artificial Sequence: Synthetic oligonucleotide
  Target: LAMA2; (+) strand; PAM type: YTN; PAM sequence: TTA
gactccattttgtttagatt

SEQ ID NO: 356582 - DNA, 20 bp, Artificial Sequence
  Description of Artificial Sequence: Synthetic oligonucleotide
  Target: LAMA2; (+) strand; PAM type: YTN; PAM sequence: CTC
cattttgtttagattaacag

SEQ ID NO: 356583 - DNA, 20 bp, Artificial Sequence
  Description of Artificial Sequence: Synthetic oligonucleotide
  Target: LAMA2; (+) strand; PAM type: YTN; PAM sequence: TTT
tgtttagattaacagttaaa

SEQ ID NO: 356584 - DNA, 20 bp, Artificial Sequence
  Description of Artificial Sequence: Synthetic oligonucleotide
  Target: LAMA2; (+) strand; PAM type: YTN; PAM sequence: TTT
gtttagattaacagttaaaa

SEQ ID NO: 356585 - DNA, 20 bp, Artificial Sequence
  Description of Artificial Sequence: Synthetic oligonucleotide
  Target: LAMA2; (+) strand; PAM type: YTN; PAM sequence: TTG
tttagattaacagttaaaac

SEQ ID NO: 356586 - DNA, 20 bp, Artificial Sequence
  Description of Artificial Sequence: Synthetic oligonucleotide
  Target: LAMA2; (+) strand; PAM type: YTN; PAM sequence: TTT
agattaacagttaaaacaac

SEQ ID NO: 356587 - DNA, 20 bp, Artificial Sequence
  Description of Artificial Sequence: Synthetic oligonucleotide
  Target: LAMA2; (+) strand; PAM type: YTN; PAM sequence: TTA
gattaacagttaaaacaact

SEQ ID NO: 356588 - DNA, 20 bp, Artificial Sequence
  Description of Artificial Sequence: Synthetic oligonucleotide
  Target: LAMA2; (+) strand; PAM type: YTN; PAM sequence: TTA
acagttaaaacaactttaaa

SEQ ID NO: 356589 - DNA, 20 bp, Artificial Sequence
  Description of Artificial Sequence: Synthetic oligonucleotide
  Target: LAMA2; (+) strand; PAM type: YTN; PAM sequence: TTA
aaacaactttaaaaattttt

SEQ ID NO: 356590 - DNA, 20 bp, Artificial Sequence
  Description of Artificial Sequence: Synthetic oligonucleotide
  Target: LAMA2; (+) strand; PAM type: YTN; PAM sequence: CTT
taaaaatttttattaaatta

SEQ ID NO: 356591 - DNA, 20 bp, Artificial Sequence
  Description of Artificial Sequence: Synthetic oligonucleotide
  Target: LAMA2; (+) strand; PAM type: YTN; PAM sequence: TTT
aaaaatttttattaaattat

SEQ ID NO: 356592 - DNA, 20 bp, Artificial Sequence
  Description of Artificial Sequence: Synthetic oligonucleotide
  Target: LAMA2; (+) strand; PAM type: YTN; PAM sequence: TTA
aaaatttttattaaattatg

SEQ ID NO: 356593 - DNA, 20 bp, Artificial Sequence
  Description of Artificial Sequence: Synthetic oligonucleotide
  Target: LAMA2; (+) strand; PAM type: YTN; PAM sequence: TTT
ttattaaattatgtttttgc

SEQ ID NO: 356594 - DNA, 20 bp, Artificial Sequence
  Description of Artificial Sequence: Synthetic oligonucleotide
  Target: LAMA2; (+) strand; PAM type: YTN; PAM sequence: TTT
tattaaattatgtttttgca

SEQ ID NO: 356595 - DNA, 20 bp, Artificial Sequence
  Description of Artificial Sequence: Synthetic oligonucleotide
  Target: LAMA2; (+) strand; PAM type: YTN; PAM sequence: TTT
attaaattatgtttttgcaa

SEQ ID NO: 356596 - DNA, 20 bp, Artificial Sequence
  Description of Artificial Sequence: Synthetic oligonucleotide
  Target: LAMA2; (+) strand; PAM type: YTN; PAM sequence: TTA
ttaaattatgtttttgcaac

SEQ ID NO: 356597 - DNA, 20 bp, Artificial Sequence
  Description of Artificial Sequence: Synthetic oligonucleotide
  Target: LAMA2; (+) strand; PAM type: YTN; PAM sequence: TTA
aattatgtttttgcaaccat

SEQ ID NO: 356598 - DNA, 20 bp, Artificial Sequence
  Description of Artificial Sequence: Synthetic oligonucleotide
  Target: LAMA2; (+) strand; PAM type: YTN; PAM sequence: TTA
tgtttttgcaaccattgaag

SEQ ID NO: 356599 - DNA, 20 bp, Artificial Sequence
  Description of Artificial Sequence: Synthetic oligonucleotide
  Target: LAMA2; (+) strand; PAM type: YTN; PAM sequence: TTT
ttgcaaccattgaagtatag

SEQ ID NO: 356600 - DNA, 20 bp, Artificial Sequence
  Description of Artificial Sequence: Synthetic oligonucleotide
  Target: LAMA2; (+) strand; PAM type: YTN; PAM sequence: TTT
tgcaaccattgaagtataga

SEQ ID NO: 356601 - DNA, 20 bp, Artificial Sequence
  Description of Artificial Sequence: Synthetic oligonucleotide
  Target: LAMA2; (+) strand; PAM type: YTN; PAM sequence: TTT
gcaaccattgaagtatagat

SEQ ID NO: 356602 - DNA, 20 bp, Artificial Sequence
  Description of Artificial Sequence: Synthetic oligonucleotide
  Target: LAMA2; (+) strand; PAM type: YTN; PAM sequence: TTG
caaccattgaagtatagata

SEQ ID NO: 356603 - DNA, 20 bp, Artificial Sequence
  Description of Artificial Sequence: Synthetic oligonucleotide
  Target: LAMA2; (+) strand; PAM type: YTN; PAM sequence: TTG
aagtatagataaacaaaaaa

SEQ ID NO: 356604 - DNA, 20 bp, Artificial Sequence
  Description of Artificial Sequence: Synthetic oligonucleotide
  Target: LAMA2; (+) strand; PAM type: YTN; PAM sequence: TTA
attatatgttaataactttt

SEQ ID NO: 356605 - DNA, 20 bp, Artificial Sequence
  Description of Artificial Sequence: Synthetic oligonucleotide
  Target: LAMA2; (+) strand; PAM type: YTN; PAM sequence: TTA
tatgttaataactttttaaa

SEQ ID NO: 356606 - DNA, 20 bp, Artificial Sequence
  Description of Artificial Sequence: Synthetic oligonucleotide
  Target: LAMA2; (+) strand; PAM type: YTN; PAM sequence: TTA
ataactttttaaaattcatc

SEQ ID NO: 356607 - DNA, 20 bp, Artificial Sequence
  Description of Artificial Sequence: Synthetic oligonucleotide
  Target: LAMA2; (+) strand; PAM type: YTN; PAM sequence: CTT
tttaaaattcatcagtacaa

SEQ ID NO: 356608 - DNA, 20 bp, Artificial Sequence
  Description of Artificial Sequence: Synthetic oligonucleotide
  Target: LAMA2; (+) strand; PAM type: YTN; PAM sequence: TTT
ttaaaattcatcagtacaaa

SEQ ID NO: 356609 - DNA, 20 bp, Artificial Sequence
  Description of Artificial Sequence: Synthetic oligonucleotide
  Target: LAMA2; (+) strand; PAM type: YTN; PAM sequence: TTT
taaaattcatcagtacaaat

SEQ ID NO: 356610 - DNA, 20 bp, Artificial Sequence
  Description of Artificial Sequence: Synthetic oligonucleotide
  Target: LAMA2; (+) strand; PAM type: YTN; PAM sequence: TTT
aaaattcatcagtacaaata

SEQ ID NO: 356611 - DNA, 20 bp, Artificial Sequence
  Description of Artificial Sequence: Synthetic oligonucleotide
  Target: LAMA2; (+) strand; PAM type: YTN; PAM sequence: TTA
aaattcatcagtacaaataa

SEQ ID NO: 356612 - DNA, 20 bp, Artificial Sequence
  Description of Artificial Sequence: Synthetic oligonucleotide
  Target: LAMA2; (+) strand; PAM type: YTN; PAM sequence: TTC
atcagtacaaataaattata

SEQ ID NO: 356613 - DNA, 20 bp, Artificial Sequence
  Description of Artificial Sequence: Synthetic oligonucleotide
  Target: LAMA2; (+) strand; PAM type: YTN; PAM sequence: TTA
tagaatcataaaggaaaata

SEQ ID NO: 356614 - DNA, 20 bp, Artificial Sequence
  Description of Artificial Sequence: Synthetic oligonucleotide
  Target: LAMA2; (+) strand; PAM type: YTN; PAM sequence: CTC
atgatgattaaaataacatt

SEQ ID NO: 356615 - DNA, 20 bp, Artificial Sequence
  Description of Artificial Sequence: Synthetic oligonucleotide
  Target: LAMA2; (+) strand; PAM type: YTN; PAM sequence: TTA
aaataacattcagtctggaa

SEQ ID NO: 356616 - DNA, 20 bp, Artificial Sequence
  Description of Artificial Sequence: Synthetic oligonucleotide
  Target: LAMA2; (+) strand; PAM type: YTN; PAM sequence: TTC
agtctggaaggtacaaaact

SEQ ID NO: 356617 - DNA, 20 bp, Artificial Sequence
  Description of Artificial Sequence: Synthetic oligonucleotide
  Target: LAMA2; (+) strand; PAM type: YTN; PAM sequence: CTG
gaaggtacaaaacttttacc

SEQ ID NO: 356618 - DNA, 20 bp, Artificial Sequence
  Description of Artificial Sequence: Synthetic oligonucleotide
  Target: LAMA2; (+) strand; PAM type: YTN; PAM sequence: CTT
ttaccttcatcattcgatat

SEQ ID NO: 356619 - DNA, 20 bp, Artificial Sequence
  Description of Artificial Sequence: Synthetic oligonucleotide
  Target: LAMA2; (+) strand; PAM type: YTN; PAM sequence: TTT
taccttcatcattcgatatt

SEQ ID NO: 356620 - DNA, 20 bp, Artificial Sequence
  Description of Artificial Sequence: Synthetic oligonucleotide
  Target: LAMA2; (+) strand; PAM type: YTN; PAM sequence: TTT
accttcatcattcgatattt

SEQ ID NO: 356621 - DNA, 20 bp, Artificial Sequence
  Description of Artificial Sequence: Synthetic oligonucleotide
  Target: LAMA2; (+) strand; PAM type: YTN; PAM sequence: TTA
ccttcatcattcgatattta

SEQ ID NO: 356622 - DNA, 20 bp, Artificial Sequence
  Description of Artificial Sequence: Synthetic oligonucleotide
  Target: LAMA2; (+) strand; PAM type: YTN; PAM sequence: CTT
catcattcgatatttaggtt

SEQ ID NO: 356623 - DNA, 20 bp, Artificial Sequence
  Description of Artificial Sequence: Synthetic oligonucleotide
  Target: LAMA2; (+) strand; PAM type: YTN; PAM sequence: TTC
atcattcgatatttaggttc

SEQ ID NO: 356624 - DNA, 20 bp, Artificial Sequence
  Description of Artificial Sequence: Synthetic oligonucleotide
  Target: LAMA2; (+) strand; PAM type: YTN; PAM sequence: TTC
gatatttaggttcaattata

SEQ ID NO: 356625 - DNA, 20 bp, Artificial Sequence
  Description of Artificial Sequence: Synthetic oligonucleotide
  Target: LAMA2; (+) strand; PAM type: YTN; PAM sequence: TTT
aggttcaattatattcccat

SEQ ID NO: 356626 - DNA, 20 bp, Artificial Sequence
  Description of Artificial Sequence: Synthetic oligonucleotide
  Target: LAMA2; (+) strand; PAM type: YTN; PAM sequence: TTA
ggttcaattatattcccatc

SEQ ID NO: 356627 - DNA, 20 bp, Artificial Sequence
  Description of Artificial Sequence: Synthetic oligonucleotide
  Target: LAMA2; (+) strand; PAM type: YTN; PAM sequence: TTC
aattatattcccatctatgc

SEQ ID NO: 356628 - DNA, 20 bp, Artificial Sequence
  Description of Artificial Sequence: Synthetic oligonucleotide
  Target: LAMA2; (+) strand; PAM type: YTN; PAM sequence: TTA
tattcccatctatgctttag

SEQ ID NO: 356629 - DNA, 20 bp, Artificial Sequence
  Description of Artificial Sequence: Synthetic oligonucleotide
  Target: LAMA2; (+) strand; PAM type: YTN; PAM sequence: TTC
ccatctatgctttagggact

SEQ ID NO: 356630 - DNA, 20 bp, Artificial Sequence
  Description of Artificial Sequence: Synthetic oligonucleotide
  Target: LAMA2; (+) strand; PAM type: YTN; PAM sequence: CTA
tgctttagggactgaattgg

SEQ ID NO: 356631 - DNA, 20 bp, Artificial Sequence
  Description of Artificial Sequence: Synthetic oligonucleotide
  Target: LAMA2; (+) strand; PAM type: YTN; PAM sequence: CTT
tagggactgaattggatggt

SEQ ID NO: 356632 - DNA, 20 bp, Artificial Sequence
  Description of Artificial Sequence: Synthetic oligonucleotide
  Target: LAMA2; (+) strand; PAM type: YTN; PAM sequence: TTT
agggactgaattggatggtg

SEQ ID NO: 356633 - DNA, 20 bp, Artificial Sequence
  Description of Artificial Sequence: Synthetic oligonucleotide
  Target: LAMA2; (+) strand; PAM type: YTN; PAM sequence: TTA
gggactgaattggatggtgg

SEQ ID NO: 356634 - DNA, 20 bp, Artificial Sequence
  Description of Artificial Sequence: Synthetic oligonucleotide
  Target: LAMA2; (+) strand; PAM type: YTN; PAM sequence: CTG
aattggatggtggtaataag

SEQ ID NO: 356635 - DNA, 20 bp, Artificial Sequence
  Description of Artificial Sequence: Synthetic oligonucleotide
  Target: LAMA2; (+) strand; PAM type: YTN; PAM sequence: TTG
gatggtggtaataaggtata

SEQ ID NO: 356636 - DNA, 20 bp, Artificial Sequence
  Description of Artificial Sequence: Synthetic oligonucleotide
  Target: LAMA2; (+) strand; PAM type: YTN; PAM sequence: CTG
tgccaatcttatggatggca

SEQ ID NO: 356637 - DNA, 20 bp, Artificial Sequence
  Description of Artificial Sequence: Synthetic oligonucleotide
  Target: LAMA2; (+) strand; PAM type: YTN; PAM sequence: CTT
atggatggcaagaaaagaac

SEQ ID NO: 356638 - DNA, 20 bp, Artificial Sequence
  Description of Artificial Sequence: Synthetic oligonucleotide
  Target: LAMA2; (+) strand; PAM type: YTN; PAM sequence: TTA
tggatggcaagaaaagaaca

SEQ ID NO: 356639 - DNA, 20 bp, Artificial Sequence
  Description of Artificial Sequence: Synthetic oligonucleotide
  Target: LAMA2; (+) strand; PAM type: YTN; PAM sequence: TTA
tggttttactgtgtgtattt

SEQ ID NO: 356640 - DNA, 20 bp, Artificial Sequence
  Description of Artificial Sequence: Synthetic oligonucleotide
  Target: LAMA2; (+) strand; PAM type: YTN; PAM sequence: TTT
tactgtgtgtatttatttat

SEQ ID NO: 356641 - DNA, 20 bp, Artificial Sequence
  Description of Artificial Sequence: Synthetic oligonucleotide
  Target: LAMA2; (+) strand; PAM type: YTN; PAM sequence: TTT
actgtgtgtatttatttatt

SEQ ID NO: 356642 - DNA, 20 bp, Artificial Sequence
  Description of Artificial Sequence: Synthetic oligonucleotide
  Target: LAMA2; (+) strand; PAM type: YTN; PAM sequence: TTA
ctgtgtgtatttatttattt

SEQ ID NO: 356643 - DNA, 20 bp, Artificial Sequence
  Description of Artificial Sequence: Synthetic oligonucleotide
  Target: LAMA2; (+) strand; PAM type: YTN; PAM sequence: CTG
tgtgtatttatttatttatt

SEQ ID NO: 356644 - DNA, 20 bp, Artificial Sequence
  Description of Artificial Sequence: Synthetic oligonucleotide
  Target: LAMA2; (+) strand; PAM type: YTN; PAM sequence: TTT
atttatttatttatttcaat

SEQ ID NO: 356645 - DNA, 20 bp, Artificial Sequence
  Description of Artificial Sequence: Synthetic oligonucleotide
  Target: LAMA2; (+) strand; PAM type: YTN; PAM sequence: TTA
tttatttatttatttcaata

SEQ ID NO: 356646 - DNA, 20 bp, Artificial Sequence
  Description of Artificial Sequence: Synthetic oligonucleotide
  Target: LAMA2; (+) strand; PAM type: YTN; PAM sequence: TTT
atttatttatttcaataaat

SEQ ID NO: 356647 - DNA, 20 bp, Artificial Sequence
  Description of Artificial Sequence: Synthetic oligonucleotide
  Target: LAMA2; (+) strand; PAM type: YTN; PAM sequence: TTA
tttatttatttcaataaatg

SEQ ID NO: 356648 - DNA, 20 bp, Artificial Sequence
  Description of Artificial Sequence: Synthetic oligonucleotide
  Target: LAMA2; (+) strand; PAM type: YTN; PAM sequence: TTT
atttatttcaataaatgccc

SEQ ID NO: 356649 - DNA, 20 bp, Artificial Sequence
  Description of Artificial Sequence: Synthetic oligonucleotide
  Target: LAMA2; (+) strand; PAM type: YTN; PAM sequence: TTA
tttatttcaataaatgccct

SEQ ID NO: 356650 - DNA, 20 bp, Artificial Sequence
  Description of Artificial Sequence: Synthetic oligonucleotide
  Target: LAMA2; (+) strand; PAM type: YTN; PAM sequence: TTT
atttcaataaatgcccttta

SEQ ID NO: 356651 - DNA, 20 bp, Artificial Sequence
  Description of Artificial Sequence: Synthetic oligonucleotide
  Target: LAMA2; (+) strand; PAM type: YTN; PAM sequence: TTA
tttcaataaatgccctttag

SEQ ID NO: 356652 - DNA, 20 bp, Artificial Sequence
  Description of Artificial Sequence: Synthetic oligonucleotide
  Target: LAMA2; (+) strand; PAM type: YTN; PAM sequence: TTT
caataaatgccctttagtag

SEQ ID NO: 356653 - DNA, 20 bp, Artificial Sequence
  Description of Artificial Sequence: Synthetic oligonucleotide
  Target: LAMA2; (+) strand; PAM type: YTN; PAM sequence: TTC
aataaatgccctttagtaga

SEQ ID NO: 356654 - DNA, 20 bp, Artificial Sequence
  Description of Artificial Sequence: Synthetic oligonucleotide
  Target: LAMA2; (+) strand; PAM type: YTN; PAM sequence: CTT
tagtagatatttttacatct

SEQ ID NO: 356655 - DNA, 20 bp, Artificial Sequence
  Description of Artificial Sequence: Synthetic oligonucleotide
  Target: LAMA2; (+) strand; PAM type: YTN; PAM sequence: TTT
agtagatatttttacatctg

SEQ ID NO: 356656 - DNA, 20 bp, Artificial Sequence
  Description of Artificial Sequence: Synthetic oligonucleotide
  Target: LAMA2; (+) strand; PAM type: YTN; PAM sequence: TTA
gtagatatttttacatctgg

SEQ ID NO: 356657 - DNA, 20 bp, Artificial Sequence
  Description of Artificial Sequence: Synthetic oligonucleotide
  Target: LAMA2; (+) strand; PAM type: YTN; PAM sequence: TTT
ttacatctggagacattctc

SEQ ID NO: 356658 - DNA, 20 bp, Artificial Sequence
  Description of Artificial Sequence: Synthetic oligonucleotide
  Target: LAMA2; (+) strand; PAM type: YTN; PAM sequence: TTT
tacatctggagacattctca

SEQ ID NO: 356659 - DNA, 20 bp, Artificial Sequence
  Description of Artificial Sequence: Synthetic oligonucleotide
  Target: LAMA2; (+) strand; PAM type: YTN; PAM sequence: TTT
acatctggagacattctcac

SEQ ID NO: 356660 - DNA, 20 bp, Artificial Sequence
  Description of Artificial Sequence: Synthetic oligonucleotide
  Target: LAMA2; (+) strand; PAM type: YTN; PAM sequence: TTA
catctggagacattctcaca

SEQ ID NO: 356661 - DNA, 20 bp, Artificial Sequence
  Description of Artificial Sequence: Synthetic oligonucleotide
  Target: LAMA2; (+) strand; PAM type: YTN; PAM sequence: CTG
gagacattctcacatctgga

SEQ ID NO: 356662 - DNA, 20 bp, Artificial Sequence
  Description of Artificial Sequence: Synthetic oligonucleotide
  Target: LAMA2; (+) strand; PAM type: YTN; PAM sequence: TTC
tcacatctggaagaggacac

SEQ ID NO: 356663 - DNA, 20 bp, Artificial Sequence
  Description of Artificial Sequence: Synthetic oligonucleotide
  Target: LAMA2; (+) strand; PAM type: YTN; PAM sequence: CTC
acatctggaagaggacactg

SEQ ID NO: 356664 - DNA, 20 bp, Artificial Sequence
  Description of Artificial Sequence: Synthetic oligonucleotide
  Target: LAMA2; (+) strand; PAM type: YTN; PAM sequence: CTG
gaagaggacactgcaacagt

SEQ ID NO: 356665 - DNA, 20 bp, Artificial Sequence
  Description of Artificial Sequence: Synthetic oligonucleotide
  Target: LAMA2; (+) strand; PAM type: YTN; PAM sequence: CTG
caacagtagcctattttaat

SEQ ID NO: 356666 - DNA, 20 bp, Artificial Sequence
  Description of Artificial Sequence: Synthetic oligonucleotide
  Target: LAMA2; (+) strand; PAM type: YTN; PAM sequence: CTA
ttttaatcttgtcatgaaaa

SEQ ID NO: 356667 - DNA, 20 bp, Artificial Sequence
  Description of Artificial Sequence: Synthetic oligonucleotide
  Target: LAMA2; (+) strand; PAM type: YTN; PAM sequence: TTT
taatcttgtcatgaaaatct

SEQ ID NO: 356668 - DNA, 20 bp, Artificial Sequence
  Description of Artificial Sequence: Synthetic oligonucleotide
  Target: LAMA2; (+) strand; PAM type: YTN; PAM sequence: TTT
aatcttgtcatgaaaatctt

SEQ ID NO: 356669 - DNA, 20 bp, Artificial Sequence
  Description of Artificial Sequence: Synthetic oligonucleotide
  Target: LAMA2; (+) strand; PAM type: YTN; PAM sequence: TTA
atcttgtcatgaaaatcttg

SEQ ID NO: 356670 - DNA, 20 bp, Artificial Sequence
  Description of Artificial Sequence: Synthetic oligonucleotide
  Target: LAMA2; (+) strand; PAM type: YTN; PAM sequence: CTT
gtcatgaaaatcttgggata

SEQ ID NO: 356671 - DNA, 20 bp, Artificial Sequence
  Description of Artificial Sequence: Synthetic oligonucleotide
  Target: LAMA2; (+) strand; PAM type: YTN; PAM sequence: TTG
tcatgaaaatcttgggatac

SEQ ID NO: 356672 - DNA, 20 bp, Artificial Sequence
  Description of Artificial Sequence: Synthetic oligonucleotide
  Target: LAMA2; (+) strand; PAM type: YTN; PAM sequence: CTT
gggatacatcttttttgctc

SEQ ID NO: 356673 - DNA, 20 bp, Artificial Sequence
  Description of Artificial Sequence: Synthetic oligonucleotide
  Target: LAMA2; (+) strand; PAM type: YTN; PAM sequence: TTG
ggatacatcttttttgctca

SEQ ID NO: 356674 - DNA, 20 bp, Artificial Sequence
  Description of Artificial Sequence: Synthetic oligonucleotide
  Target: LAMA2; (+) strand; PAM type: YTN; PAM sequence: CTT
ttttgctcaactccctggtt

SEQ ID NO: 356675 - DNA, 20 bp, Artificial Sequence
  Description of Artificial Sequence: Synthetic oligonucleotide
  Target: LAMA2; (+) strand; PAM type: YTN; PAM sequence: TTT
tttgctcaactccctggttt

SEQ ID NO: 356676 - DNA, 20 bp, Artificial Sequence
  Description of Artificial Sequence: Synthetic oligonucleotide
  Target: LAMA2; (+) strand; PAM type: YTN; PAM sequence: TTT
ttgctcaactccctggtttt

SEQ ID NO: 356677 - DNA, 20 bp, Artificial Sequence
  Description of Artificial Sequence: Synthetic oligonucleotide
  Target: LAMA2; (+) strand; PAM type: YTN; PAM sequence: TTT
tgctcaactccctggttttt

SEQ ID NO: 356678 - DNA, 20 bp, Artificial Sequence
  Description of Artificial Sequence: Synthetic oligonucleotide
  Target: LAMA2; (+) strand; PAM type: YTN; PAM sequence: TTT
gctcaactccctggtttttc

SEQ ID NO: 356679 - DNA, 20 bp, Artificial Sequence
  Description of Artificial Sequence: Synthetic oligonucleotide
  Target: LAMA2; (+) strand; PAM type: YTN; PAM sequence: TTG
ctcaactccctggtttttct

SEQ ID NO: 356680 - DNA, 20 bp, Artificial Sequence
  Description of Artificial Sequence: Synthetic oligonucleotide
  Target: LAMA2; (+) strand; PAM type: YTN; PAM sequence: CTC
aactccctggtttttctgtc

SEQ ID NO: 356681 - DNA, 20 bp, Artificial Sequence
  Description of Artificial Sequence: Synthetic oligonucleotide
  Target: LAMA2; (+) strand; PAM type: YTN; PAM sequence: CTC
cctggtttttctgtcttatt

SEQ ID NO: 356682 - DNA, 20 bp, Artificial Sequence
  Description of Artificial Sequence: Synthetic oligonucleotide
  Target: LAMA2; (+) strand; PAM type: YTN; PAM sequence: CTG
gtttttctgtcttatttttt

SEQ ID NO: 356683 - DNA, 20 bp, Artificial Sequence
  Description of Artificial Sequence: Synthetic oligonucleotide
  Target: LAMA2; (+) strand; PAM type: YTN; PAM sequence: TTT
ttctgtcttatttttttctt

SEQ ID NO: 356684 - DNA, 20 bp, Artificial Sequence
  Description of Artificial Sequence: Synthetic oligonucleotide
  Target: LAMA2; (+) strand; PAM type: YTN; PAM sequence: TTT
tctgtcttatttttttcttc

SEQ ID NO: 356685 - DNA, 20 bp, Artificial Sequence
  Description of Artificial Sequence: Synthetic oligonucleotide
  Target: LAMA2; (+) strand; PAM type: YTN; PAM sequence: TTT
ctgtcttatttttttcttcg

SEQ ID NO: 356686 - DNA, 20 bp, Artificial Sequence
  Description of Artificial Sequence: Synthetic oligonucleotide
  Target: LAMA2; (+) strand; PAM type: YTN; PAM sequence: TTC
tgtcttatttttttcttcgg

SEQ ID NO: 356687 - DNA, 20 bp, Artificial Sequence
  Description of Artificial Sequence: Synthetic oligonucleotide
  Target: LAMA2; (+) strand; PAM type: YTN; PAM sequence: CTG
tcttatttttttcttcgggg

SEQ ID NO: 356688 - DNA, 20 bp, Artificial Sequence
  Description of Artificial Sequence: Synthetic oligonucleotide
  Target: LAMA2; (+) strand; PAM type: YTN; PAM sequence: CTT
atttttttcttcggggcata

SEQ ID NO: 356689 - DNA, 20 bp, Artificial Sequence
  Description of Artificial Sequence: Synthetic oligonucleotide
  Target: LAMA2; (+) strand; PAM type: YTN; PAM sequence: TTA
tttttttcttcggggcatag

SEQ ID NO: 356690 - DNA, 20 bp, Artificial Sequence
  Description of Artificial Sequence: Synthetic oligonucleotide
  Target: LAMA2; (+) strand; PAM type: YTN; PAM sequence: TTT
ttttcttcggggcatagtgg

SEQ ID NO: 356691 - DNA, 20 bp, Artificial Sequence
  Description of Artificial Sequence: Synthetic oligonucleotide
  Target: LAMA2; (+) strand; PAM type: YTN; PAM sequence: TTT
tttcttcggggcatagtgga

SEQ ID NO: 356692 - DNA, 20 bp, Artificial Sequence
  Description of Artificial Sequence: Synthetic oligonucleotide
  Target: LAMA2; (+) strand; PAM type: YTN; PAM sequence: TTT
ttcttcggggcatagtggac

SEQ ID NO: 356693 - DNA, 20 bp, Artificial Sequence
  Description of Artificial Sequence: Synthetic oligonucleotide
  Target: LAMA2; (+) strand; PAM type: YTN; PAM sequence: TTT
tcttcggggcatagtggaca

SEQ ID NO: 356694 - DNA, 20 bp, Artificial Sequence
  Description of Artificial Sequence: Synthetic oligonucleotide
  Target: LAMA2; (+) strand; PAM type: YTN; PAM sequence: TTT
cttcggggcatagtggacac

SEQ ID NO: 356695 - DNA, 20 bp, Artificial Sequence
  Description of Artificial Sequence: Synthetic oligonucleotide
  Target: LAMA2; (+) strand; PAM type: YTN; PAM sequence: TTC
ttcggggcatagtggacact

SEQ ID NO: 356696 - DNA, 20 bp, Artificial Sequence
  Description of Artificial Sequence: Synthetic oligonucleotide
  Target: LAMA2; (+) strand; PAM type: YTN; PAM sequence: CTT
cggggcatagtggacactgg

SEQ ID NO: 356697 - DNA, 20 bp, Artificial Sequence
  Description of Artificial Sequence: Synthetic oligonucleotide
  Target: LAMA2; (+) strand; PAM type: YTN; PAM sequence: TTC
ggggcatagtggacactggt

SEQ ID NO: 356698 - DNA, 20 bp, Artificial Sequence
  Description of Artificial Sequence: Synthetic oligonucleotide
  Target: LAMA2; (+) strand; PAM type: YTN; PAM sequence: CTG
gtgatgaatttggtgtcaga

SEQ ID NO: 356699 - DNA, 20 bp, Artificial Sequence
  Description of Artificial Sequence: Synthetic oligonucleotide
  Target: LAMA2; (+) strand; PAM type: YTN; PAM sequence: TTT
ggtgtcagatccagaacatg

SEQ ID NO: 356700 - DNA, 20 bp, Artificial Sequence
  Description of Artificial Sequence: Synthetic oligonucleotide
  Target: LAMA2; (+) strand; PAM type: YTN; PAM sequence: TTG
gtgtcagatccagaacatgt

SEQ ID NO: 356701 - DNA, 20 bp, Artificial Sequence
  Description of Artificial Sequence: Synthetic oligonucleotide
  Target: LAMA2; (+) strand; PAM type: YTN; PAM sequence: TTG
tctgtacccctcttacagca

SEQ ID NO: 356702 - DNA, 20 bp, Artificial Sequence
  Description of Artificial Sequence: Synthetic oligonucleotide
  Target: LAMA2; (+) strand; PAM type: YTN; PAM sequence: CTG
tacccctcttacagcagtga

SEQ ID NO: 356703 - DNA, 20 bp, Artificial Sequence
  Description of Artificial Sequence: Synthetic oligonucleotide
  Target: LAMA2; (+) strand; PAM type: YTN; PAM sequence: CTC
ttacagcagtgattttcttc

SEQ ID NO: 356704 - DNA, 20 bp, Artificial Sequence
  Description of Artificial Sequence: Synthetic oligonucleotide
  Target: LAMA2; (+) strand; PAM type: YTN; PAM sequence: CTT
acagcagtgattttcttcca

SEQ ID NO: 356705 - DNA, 20 bp, Artificial Sequence
  Description of Artificial Sequence: Synthetic oligonucleotide
  Target: LAMA2; (+) strand; PAM type: YTN; PAM sequence: TTA
cagcagtgattttcttccac

SEQ ID NO: 356706 - DNA, 20 bp, Artificial Sequence
  Description of Artificial Sequence: Synthetic oligonucleotide
  Target: LAMA2; (+) strand; PAM type: YTN; PAM sequence: TTT
tcttccaccttgtaatataa

SEQ ID NO: 356707 - DNA, 20 bp, Artificial Sequence
  Description of Artificial Sequence: Synthetic oligonucleotide
  Target: LAMA2; (+) strand; PAM type: YTN; PAM sequence: TTT
cttccaccttgtaatataat

SEQ ID NO: 356708 - DNA, 20 bp, Artificial Sequence
  Description of Artificial Sequence: Synthetic oligonucleotide
  Target: LAMA2; (+) strand; PAM type: YTN; PAM sequence: TTC
ttccaccttgtaatataatt

SEQ ID NO: 356709 - DNA, 20 bp, Artificial Sequence
  Description of Artificial Sequence: Synthetic oligonucleotide
  Target: LAMA2; (+) strand; PAM type: YTN; PAM sequence: CTT
ccaccttgtaatataattat

SEQ ID NO: 356710 - DNA, 20 bp, Artificial Sequence
  Description of Artificial Sequence: Synthetic oligonucleotide
  Target: LAMA2; (+) strand; PAM type: YTN; PAM sequence: TTC
caccttgtaatataattatc

SEQ ID NO: 356711 - DNA, 20 bp, Artificial Sequence
  Description of Artificial Sequence: Synthetic oligonucleotide
  Target: LAMA2; (+) strand; PAM type: YTN; PAM sequence: CTT
gtaatataattatctgaagt

SEQ ID NO: 356712 - DNA, 20 bp, Artificial Sequence
  Description of Artificial Sequence: Synthetic oligonucleotide
  Target: LAMA2; (+) strand; PAM type: YTN; PAM sequence: TTG
taatataattatctgaagtc

SEQ ID NO: 356713 - DNA, 20 bp, Artificial Sequence
  Description of Artificial Sequence: Synthetic oligonucleotide
  Target: LAMA2; (+) strand; PAM type: YTN; PAM sequence: TTA
tctgaagtccgcctcatcag

SEQ ID NO: 356714 - DNA, 20 bp, Artificial Sequence
  Description of Artificial Sequence: Synthetic oligonucleotide
  Target: LAMA2; (+) strand; PAM type: YTN; PAM sequence: CTG
aagtccgcctcatcagaaag

SEQ ID NO: 356715 - DNA, 20 bp, Artificial Sequence
  Description of Artificial Sequence: Synthetic oligonucleotide
  Target: LAMA2; (+) strand; PAM type: YTN; PAM sequence: CTC
atcagaaagtacatagggaa

SEQ ID NO: 356716 - DNA, 20 bp, Artificial Sequence
  Description of Artificial Sequence: Synthetic oligonucleotide
  Target: LAMA2; (+) strand; PAM type: YTN; PAM sequence: CTA
tcgtgactctatttctccaa

SEQ ID NO: 356717 - DNA, 20 bp, Artificial Sequence
  Description of Artificial Sequence: Synthetic oligonucleotide
  Target: LAMA2; (+) strand; PAM type: YTN; PAM sequence: CTC
tatttctccaagtagaaact

SEQ ID NO: 356718 - DNA, 20 bp, Artificial Sequence
  Description of Artificial Sequence: Synthetic oligonucleotide
  Target: LAMA2; (+) strand; PAM type: YTN; PAM sequence: CTA
tttctccaagtagaaactgt

SEQ ID NO: 356719 - DNA, 20 bp, Artificial Sequence
  Description of Artificial Sequence: Synthetic oligonucleotide
  Target: LAMA2; (+) strand; PAM type: YTN; PAM sequence: TTT
ctccaagtagaaactgtgct

SEQ ID NO: 356720 - DNA, 20 bp, Artificial Sequence
  Description of Artificial Sequence: Synthetic oligonucleotide
  Target: LAMA2; (+) strand; PAM type: YTN; PAM sequence: TTC
tccaagtagaaactgtgcta

SEQ ID NO: 356721 - DNA, 20 bp, Artificial Sequence
  Description of Artificial Sequence: Synthetic oligonucleotide
  Target: LAMA2; (+) strand; PAM type: YTN; PAM sequence: CTC
caagtagaaactgtgctaag

SEQ ID NO: 356722 - DNA, 20 bp, Artificial Sequence
  Description of Artificial Sequence: Synthetic oligonucleotide
  Target: LAMA2; (+) strand; PAM type: YTN; PAM sequence: CTG
tgctaagggaactaaagcaa

SEQ ID NO: 356723 - DNA, 20 bp, Artificial Sequence
  Description of Artificial Sequence: Synthetic oligonucleotide
  Target: LAMA2; (+) strand; PAM type: YTN; PAM sequence: CTA
agggaactaaagcaaaaaag

SEQ ID NO: 356724 - DNA, 20 bp, Artificial Sequence
  Description of Artificial Sequence: Synthetic oligonucleotide
  Target: LAMA2; (+) strand; PAM type: YTN; PAM sequence: CTA
aagcaaaaaagaaaattcct

SEQ ID NO: 356725 - DNA, 20 bp, Artificial Sequence
  Description of Artificial Sequence: Synthetic oligonucleotide
  Target: LAMA2; (+) strand; PAM type: YTN; PAM sequence: TTC
ctacttcctttgctataatc

SEQ ID NO: 356726 - DNA, 20 bp, Artificial Sequence
  Description of Artificial Sequence: Synthetic oligonucleotide
  Target: LAMA2; (+) strand; PAM type: YTN; PAM sequence: CTA
cttcctttgctataatcctc

SEQ ID NO: 356727 - DNA, 20 bp, Artificial Sequence
  Description of Artificial Sequence: Synthetic oligonucleotide
  Target: LAMA2; (+) strand; PAM type: YTN; PAM sequence: CTT
cctttgctataatcctcttg

SEQ ID NO: 356728 - DNA, 20 bp, Artificial Sequence
  Description of Artificial Sequence: Synthetic oligonucleotide
  Target: LAMA2; (+) strand; PAM type: YTN; PAM sequence: TTC
ctttgctataatcctcttga

SEQ ID NO: 356729 - DNA, 20 bp, Artificial Sequence
  Description of Artificial Sequence: Synthetic oligonucleotide
  Target: LAMA2; (+) strand; PAM type: YTN; PAM sequence: CTT
tgctataatcctcttgaggg

SEQ ID NO: 356730 - DNA, 20 bp, Artificial Sequence
  Description of Artificial Sequence: Synthetic oligonucleotide
  Target: LAMA2; (+) strand; PAM type: YTN; PAM sequence: TTT
gctataatcctcttgagggc

SEQ ID NO: 356731 - DNA, 20 bp, Artificial Sequence
  Description of Artificial Sequence: Synthetic oligonucleotide
  Target: LAMA2; (+) strand; PAM type: YTN; PAM sequence: TTG
ctataatcctcttgagggca

SEQ ID NO: 356732 - DNA, 20 bp, Artificial Sequence
  Description of Artificial Sequence: Synthetic oligonucleotide
  Target: LAMA2; (+) strand; PAM type: YTN; PAM sequence: CTA
taatcctcttgagggcattt

SEQ ID NO: 356733 - DNA, 20 bp, Artificial Sequence
  Description of Artificial Sequence: Synthetic oligonucleotide
  Target: LAMA2; (+) strand; PAM type: YTN; PAM sequence: CTC
ttgagggcatttttatattc

SEQ ID NO: 356734 - DNA, 20 bp, Artificial Sequence
  Description of Artificial Sequence: Synthetic oligonucleotide
  Target: LAMA2; (+) strand; PAM type: YTN; PAM sequence: CTT
gagggcatttttatattccc

SEQ ID NO: 356735 - DNA, 20 bp, Artificial Sequence
  Description of Artificial Sequence: Synthetic oligonucleotide
  Target: LAMA2; (+) strand; PAM type: YTN; PAM sequence: TTG
agggcatttttatattccct

SEQ ID NO: 356736 - DNA, 20 bp, Artificial Sequence
  Description of Artificial Sequence: Synthetic oligonucleotide
  Target: LAMA2; (+) strand; PAM type: YTN; PAM sequence: TTT
ttatattccctgtgatatct

SEQ ID NO: 356737 - DNA, 20 bp, Artificial Sequence
  Description of Artificial Sequence: Synthetic oligonucleotide
  Target: LAMA2; (+) strand; PAM type: YTN; PAM sequence: TTT
tatattccctgtgatatctc

SEQ ID NO: 356738 - DNA, 20 bp, Artificial Sequence
  Description of Artificial Sequence: Synthetic oligonucleotide
  Target: LAMA2; (+) strand; PAM type: YTN; PAM sequence: TTT
atattccctgtgatatctca

SEQ ID NO: 356739 - DNA, 20 bp, Artificial Sequence
  Description of Artificial Sequence: Synthetic oligonucleotide
  Target: LAMA2; (+) strand; PAM type: YTN; PAM sequence: TTA
tattccctgtgatatctcat

SEQ ID NO: 356740 - DNA, 20 bp, Artificial Sequence
  Description of Artificial Sequence: Synthetic oligonucleotide
  Target: LAMA2; (+) strand; PAM type: YTN; PAM sequence: TTC
cctgtgatatctcatatgtc

SEQ ID NO: 356741 - DNA, 20 bp, Artificial Sequence
  Description of Artificial Sequence: Synthetic oligonucleotide
  Target: LAMA2; (+) strand; PAM type: YTN; PAM sequence: CTG
tgatatctcatatgtcttgt

SEQ ID NO: 356742 - DNA, 20 bp, Artificial Sequence
  Description of Artificial Sequence: Synthetic oligonucleotide
  Target: LAMA2; (+) strand; PAM type: YTN; PAM sequence: CTC
atatgtcttgtatatagtag

SEQ ID NO: 356743 - DNA, 20 bp, Artificial Sequence
  Description of Artificial Sequence: Synthetic oligonucleotide
  Target: LAMA2; (+) strand; PAM type: YTN; PAM sequence: CTT
gtatatagtagttcagctat

SEQ ID NO: 356744 - DNA, 20 bp, Artificial Sequence
  Description of Artificial Sequence: Synthetic oligonucleotide
  Target: LAMA2; (+) strand; PAM type: YTN; PAM sequence: TTG
tatatagtagttcagctatg

SEQ ID NO: 356745 - DNA, 20 bp, Artificial Sequence
  Description of Artificial Sequence: Synthetic oligonucleotide
  Target: LAMA2; (+) strand; PAM type: YTN; PAM sequence: TTC
agctatgagttgatgaacga

SEQ ID NO: 356746 - DNA, 20 bp, Artificial Sequence
  Description of Artificial Sequence: Synthetic oligonucleotide
  Target: LAMA2; (+) strand; PAM type: YTN; PAM sequence: CTA
tgagttgatgaacgaataat

SEQ ID NO: 356747 - DNA, 20 bp, Artificial Sequence
  Description of Artificial Sequence: Synthetic oligonucleotide
  Target: LAMA2; (+) strand; PAM type: YTN; PAM sequence: TTG
atgaacgaataatataaaga

SEQ ID NO: 356748 - DNA, 20 bp, Artificial Sequence
  Description of Artificial Sequence: Synthetic oligonucleotide
  Target: LAMA2; (+) strand; PAM type: YTN; PAM sequence: TTT
attaataatttgatattgat

SEQ ID NO: 356749 - DNA, 20 bp, Artificial Sequence
  Description of Artificial Sequence: Synthetic oligonucleotide
  Target: LAMA2; (+) strand; PAM type: YTN; PAM sequence: TTA
ttaataatttgatattgata

SEQ ID NO: 356750 - DNA, 20 bp, Artificial Sequence
  Description of Artificial Sequence: Synthetic oligonucleotide
  Target: LAMA2; (+) strand; PAM type: YTN; PAM sequence: TTA
ataatttgatattgataaca

SEQ ID NO: 356751 - DNA, 20 bp, Artificial Sequence
  Description of Artificial Sequence: Synthetic oligonucleotide
  Target: LAMA2; (+) strand; PAM type: YTN; PAM sequence: TTT
gatattgataacagaggaag

SEQ ID NO: 356752 - DNA, 20 bp, Artificial Sequence
  Description of Artificial Sequence: Synthetic oligonucleotide
  Target: LAMA2; (+) strand; PAM type: YTN; PAM sequence: TTG
atattgataacagaggaagt

SEQ ID NO: 356753 - DNA, 20 bp, Artificial Sequence
  Description of Artificial Sequence: Synthetic oligonucleotide
  Target: LAMA2; (+) strand; PAM type: YTN; PAM sequence: TTG
ataacagaggaagttaaatt

SEQ ID NO: 356754 - DNA, 20 bp, Artificial Sequence
  Description of Artificial Sequence: Synthetic oligonucleotide
  Target: LAMA2; (+) strand; PAM type: YTN; PAM sequence: TTA
aattattcaaagagctcaac

SEQ ID NO: 356755 - DNA, 20 bp, Artificial Sequence
  Description of Artificial Sequence: Synthetic oligonucleotide
  Target: LAMA2; (+) strand; PAM type: YTN; PAM sequence: TTA
ttcaaagagctcaaccataa

SEQ ID NO: 356756 - DNA, 20 bp, Artificial Sequence
  Description of Artificial Sequence: Synthetic oligonucleotide
  Target: LAMA2; (+) strand; PAM type: YTN; PAM sequence: TTC
aaagagctcaaccataaagc

SEQ ID NO: 356757 - DNA, 20 bp, Artificial Sequence
  Description of Artificial Sequence: Synthetic oligonucleotide
  Target: LAMA2; (+) strand; PAM type: YTN; PAM sequence: CTC
aaccataaagcagatggctt

SEQ ID NO: 356758 - DNA, 20 bp, Artificial Sequence
  Description of Artificial Sequence: Synthetic oligonucleotide
  Target: LAMA2; (+) strand; PAM type: YTN; PAM sequence: CTT
cactttcaagctgggaatca

SEQ ID NO: 356759 - DNA, 20 bp, Artificial Sequence
  Description of Artificial Sequence: Synthetic oligonucleotide
  Target: LAMA2; (+) strand; PAM type: YTN; PAM sequence: TTC
actttcaagctgggaatcaa

SEQ ID NO: 356760 - DNA, 20 bp, Artificial Sequence
  Description of Artificial Sequence: Synthetic oligonucleotide
  Target: LAMA2; (+) strand; PAM type: YTN; PAM sequence: CTT
tcaagctgggaatcaaaaaa

SEQ ID NO: 356761 - DNA, 20 bp, Artificial Sequence
  Description of Artificial Sequence: Synthetic oligonucleotide
  Target: LAMA2; (+) strand; PAM type: YTN; PAM sequence: TTT
caagctgggaatcaaaaaac

SEQ ID NO: 356762 - DNA, 20 bp, Artificial Sequence
  Description of Artificial Sequence: Synthetic oligonucleotide
  Target: LAMA2; (+) strand; PAM type: YTN; PAM sequence: TTC
aagctgggaatcaaaaaact

SEQ ID NO: 356763 - DNA, 20 bp, Artificial Sequence
  Description of Artificial Sequence: Synthetic oligonucleotide
  Target: LAMA2; (+) strand; PAM type: YTN; PAM sequence: CTG
ggaatcaaaaaactttaagt

SEQ ID NO: 356764 - DNA, 20 bp, Artificial Sequence
  Description of Artificial Sequence: Synthetic oligonucleotide
  Target: LAMA2; (+) strand; PAM type: YTN; PAM sequence: CTT
taagtgctagaatattcatg

SEQ ID NO: 356765 - DNA, 20 bp, Artificial Sequence
  Description of Artificial Sequence: Synthetic oligonucleotide
  Target: LAMA2; (+) strand; PAM type: YTN; PAM sequence: TTT
aagtgctagaatattcatgt

SEQ ID NO: 356766 - DNA, 20 bp, Artificial Sequence
  Description of Artificial Sequence: Synthetic oligonucleotide
  Target: LAMA2; (+) strand; PAM type: YTN; PAM sequence: TTA
agtgctagaatattcatgtc

SEQ ID NO: 356767 - DNA, 20 bp, Artificial Sequence
  Description of Artificial Sequence: Synthetic oligonucleotide
  Target: LAMA2; (+) strand; PAM type: YTN; PAM sequence: CTA
gaatattcatgtcaagagga

SEQ ID NO: 356768 - DNA, 20 bp, Artificial Sequence
  Description of Artificial Sequence: Synthetic oligonucleotide
  Target: LAMA2; (+) strand; PAM type: YTN; PAM sequence: TTC
atgtcaagaggatcttccaa

SEQ ID NO: 356769 - DNA, 20 bp, Artificial Sequence
  Description of Artificial Sequence: Synthetic oligonucleotide
  Target: LAMA2; (+) strand; PAM type: YTN; PAM sequence: CTT
ccaagaataagccaggaatg

SEQ ID NO: 356770 - DNA, 20 bp, Artificial Sequence
  Description of Artificial Sequence: Synthetic oligonucleotide
  Target: LAMA2; (+) strand; PAM type: YTN; PAM sequence: TTC
caagaataagccaggaatgc

SEQ ID NO: 356771 - DNA, 20 bp, Artificial Sequence
  Description of Artificial Sequence: Synthetic oligonucleotide
  Target: LAMA2; (+) strand; PAM type: YTN; PAM sequence: TTA
ggggctgactcatggatgac

SEQ ID NO: 356772 - DNA, 20 bp, Artificial Sequence
  Description of Artificial Sequence: Synthetic oligonucleotide
  Target: LAMA2; (+) strand; PAM type: YTN; PAM sequence: CTG
actcatggatgacaatggtc

SEQ ID NO: 356773 - DNA, 20 bp, Artificial Sequence
  Description of Artificial Sequence: Synthetic oligonucleotide
  Target: LAMA2; (+) strand; PAM type: YTN; PAM sequence: CTC
atggatgacaatggtcgatg

SEQ ID NO: 356774 - DNA, 20 bp, Artificial Sequence
  Description of Artificial Sequence: Synthetic oligonucleotide
  Target: LAMA2; (+) strand; PAM type: YTN; PAM sequence: TTT
tgaaaaaacaatgatgtccc

SEQ ID NO: 356775 - DNA, 20 bp, Artificial Sequence
  Description of Artificial Sequence: Synthetic oligonucleotide
  Target: LAMA2; (+) strand; PAM type: YTN; PAM sequence: TTT
gaaaaaacaatgatgtccct

SEQ ID NO: 356776 - DNA, 20 bp, Artificial Sequence
  Description of Artificial Sequence: Synthetic oligonucleotide
  Target: LAMA2; (+) strand; PAM type: YTN; PAM sequence: TTG
aaaaaacaatgatgtccctg

SEQ ID NO: 356777 - DNA, 20 bp, Artificial Sequence
  Description of Artificial Sequence: Synthetic oligonucleotide
  Target: LAMA2; (+) strand; PAM type: YTN; PAM sequence: CTG
gggacacatagaaagaattg

SEQ ID NO: 356778 - DNA, 20 bp, Artificial Sequence
  Description of Artificial Sequence: Synthetic oligonucleotide
  Target: LAMA2; (+) strand; PAM type: YTN; PAM sequence: TTG
gaactagactgtcaagatca

SEQ ID NO: 356779 - DNA, 20 bp, Artificial Sequence
  Description of Artificial Sequence: Synthetic oligonucleotide
  Target: LAMA2; (+) strand; PAM type: YTN; PAM sequence: CTA
gactgtcaagatcatatata

SEQ ID NO: 356780 - DNA, 20 bp, Artificial Sequence
  Description of Artificial Sequence: Synthetic oligonucleotide
  Target: LAMA2; (+) strand; PAM type: YTN; PAM sequence: CTG
tcaagatcatatatattaac

SEQ ID NO: 356781 - DNA, 20 bp, Artificial Sequence
  Description of Artificial Sequence: Synthetic oligonucleotide
  Target: LAMA2; (+) strand; PAM type: YTN; PAM sequence: TTA
acaagctaatagaaggcggg

SEQ ID NO: 356782 - DNA, 20 bp, Artificial Sequence
  Description of Artificial Sequence: Synthetic oligonucleotide
  Target: LAMA2; (+) strand; PAM type: YTN; PAM sequence: CTA
atagaaggcgggaaattttg

SEQ ID NO: 356783 - DNA, 20 bp, Artificial Sequence
  Description of Artificial Sequence: Synthetic oligonucleotide
  Target: LAMA2; (+) strand; PAM type: YTN; PAM sequence: TTT
tggtctctatgaaaatgtgc

SEQ ID NO: 356784 - DNA, 20 bp, Artificial Sequence
  Description of Artificial Sequence: Synthetic oligonucleotide
  Target: LAMA2; (+) strand; PAM type: YTN; PAM sequence: TTT
ggtctctatgaaaatgtgca

SEQ ID NO: 356785 - DNA, 20 bp, Artificial Sequence
  Description of Artificial Sequence: Synthetic oligonucleotide
  Target: LAMA2; (+) strand; PAM type: YTN; PAM sequence: TTG
gtctctatgaaaatgtgcac

SEQ ID NO: 356786 - DNA, 20 bp, Artificial Sequence
  Description of Artificial Sequence: Synthetic oligonucleotide
  Target: LAMA2; (+) strand; PAM type: YTN; PAM sequence: CTC
tatgaaaatgtgcacaaaag

SEQ ID NO: 356787 - DNA, 20 bp, Artificial Sequence
  Description of Artificial Sequence: Synthetic oligonucleotide
  Target: LAMA2; (+) strand; PAM type: YTN; PAM sequence: CTA
tgaaaatgtgcacaaaagtc

SEQ ID NO: 356788 - DNA, 20 bp, Artificial Sequence
  Description of Artificial Sequence: Synthetic oligonucleotide
  Target: LAMA2; (+) strand; PAM type: YTN; PAM sequence: CTA
tacttctgtgtttgaactgt

SEQ ID NO: 356789 - DNA, 20 bp, Artificial Sequence
  Description of Artificial Sequence: Synthetic oligonucleotide
  Target: LAMA2; (+) strand; PAM type: YTN; PAM sequence: CTT
ctgtgtttgaactgtgctac

SEQ ID NO: 356790 - DNA, 20 bp, Artificial Sequence
  Description of Artificial Sequence: Synthetic oligonucleotide
  Target: LAMA2; (+) strand; PAM type: YTN; PAM sequence: TTC
tgtgtttgaactgtgctact

SEQ ID NO: 356791 - DNA, 20 bp, Artificial Sequence
  Description of Artificial Sequence: Synthetic oligonucleotide
  Target: LAMA2; (+) strand; PAM type: YTN; PAM sequence: CTG
tgtttgaactgtgctactct

SEQ ID NO: 356792 - DNA, 20 bp, Artificial Sequence
  Description of Artificial Sequence: Synthetic oligonucleotide
  Target: LAMA2; (+) strand; PAM type: YTN; PAM sequence: TTT
gaactgtgctactctaaatt

SEQ ID NO: 356793 - DNA, 20 bp, Artificial Sequence
  Description of Artificial Sequence: Synthetic oligonucleotide
  Target: LAMA2; (+) strand; PAM type: YTN; PAM sequence: TTG
aactgtgctactctaaatta

SEQ ID NO: 356794 - DNA, 20 bp, Artificial Sequence
  Description of Artificial Sequence: Synthetic oligonucleotide
  Target: LAMA2; (+) strand; PAM type: YTN; PAM sequence: CTG
tgctactctaaattatataa

SEQ ID NO: 356795 - DNA, 20 bp, Artificial Sequence
  Description of Artificial Sequence: Synthetic oligonucleotide
  Target: LAMA2; (+) strand; PAM type: YTN; PAM sequence: CTA
ctctaaattatataaaatat

SEQ ID NO: 356796 - DNA, 20 bp, Artificial Sequence
  Description of Artificial Sequence: Synthetic oligonucleotide
  Target: LAMA2; (+) strand; PAM type: YTN; PAM sequence: CTC
taaattatataaaatatact

SEQ ID NO: 356797 - DNA, 20 bp, Artificial Sequence
  Description of Artificial Sequence: Synthetic oligonucleotide
  Target: LAMA2; (+) strand; PAM type: YTN; PAM sequence: CTA
aattatataaaatatactct

SEQ ID NO: 356798 - DNA, 20 bp, Artificial Sequence
  Description of Artificial Sequence: Synthetic oligonucleotide
  Target: LAMA2; (+) strand; PAM type: YTN; PAM sequence: TTA
tataaaatatactctataat

SEQ ID NO: 356799 - DNA, 20 bp, Artificial Sequence
  Description of Artificial Sequence: Synthetic oligonucleotide
  Target: LAMA2; (+) strand; PAM type: YTN; PAM sequence: CTC
tataatgtagtaaagaaaga

SEQ ID NO: 356800 - DNA, 20 bp, Artificial Sequence
  Description of Artificial Sequence: Synthetic oligonucleotide
  Target: LAMA2; (+) strand; PAM type: YTN; PAM sequence: CTA
taatgtagtaaagaaagatt

SEQ ID NO: 356801 - DNA, 20 bp, Artificial Sequence
  Description of Artificial Sequence: Synthetic oligonucleotide
  Target: LAMA2; (+) strand; PAM type: YTN; PAM sequence: TTT
ctttatgccaatgtctcaca

SEQ ID NO: 356802 - DNA, 20 bp, Artificial Sequence
  Description of Artificial Sequence: Synthetic oligonucleotide
  Target: LAMA2; (+) strand; PAM type: YTN; PAM sequence: TTC
tttatgccaatgtctcacat

SEQ ID NO: 356803 - DNA, 20 bp, Artificial Sequence
  Description of Artificial Sequence: Synthetic oligonucleotide
  Target: LAMA2; (+) strand; PAM type: YTN; PAM sequence: CTT
tatgccaatgtctcacattt

SEQ ID NO: 356804 - DNA, 20 bp, Artificial Sequence
  Description of Artificial Sequence: Synthetic oligonucleotide
  Target: LAMA2; (+) strand; PAM type: YTN; PAM sequence: TTT
atgccaatgtctcacatttt

SEQ ID NO: 356805 - DNA, 20 bp, Artificial Sequence
  Description of Artificial Sequence: Synthetic oligonucleotide
  Target: LAMA2; (+) strand; PAM type: YTN; PAM sequence: TTA
tgccaatgtctcacatttta

SEQ ID NO: 356806 - DNA, 20 bp, Artificial Sequence
  Description of Artificial Sequence: Synthetic oligonucleotide
  Target: LAMA2; (+) strand; PAM type: YTN; PAM sequence: CTC
acattttatagacattttac

SEQ ID NO: 356807 - DNA, 20 bp, Artificial Sequence
  Description of Artificial Sequence: Synthetic oligonucleotide
  Target: LAMA2; (+) strand; PAM type: YTN; PAM sequence: TTT
tatagacattttacctgcta

SEQ ID NO: 356808 - DNA, 20 bp, Artificial Sequence
  Description of Artificial Sequence: Synthetic oligonucleotide
  Target: LAMA2; (+) strand; PAM type: YTN; PAM sequence: TTT
atagacattttacctgctac

SEQ ID NO: 356809 - DNA, 20 bp, Artificial Sequence
  Description of Artificial Sequence: Synthetic oligonucleotide
  Target: LAMA2; (+) strand; PAM type: YTN; PAM sequence: TTA
tagacattttacctgctact

SEQ ID NO: 356810 - DNA, 20 bp, Artificial Sequence
  Description of Artificial Sequence: Synthetic oligonucleotide
  Target: LAMA2; (+) strand; PAM type: YTN; PAM sequence: TTT
tacctgctactgtcaactta

SEQ ID NO: 356811 - DNA, 20 bp, Artificial Sequence
  Description of Artificial Sequence: Synthetic oligonucleotide
  Target: LAMA2; (+) strand; PAM type: YTN; PAM sequence: TTT
acctgctactgtcaacttaa

SEQ ID NO: 356812 - DNA, 20 bp, Artificial Sequence
  Description of Artificial Sequence: Synthetic oligonucleotide
  Target: LAMA2; (+) strand; PAM type: YTN; PAM sequence: TTA
cctgctactgtcaacttaag

SEQ ID NO: 356813 - DNA, 20 bp, Artificial Sequence
  Description of Artificial Sequence: Synthetic oligonucleotide
  Target: LAMA2; (+) strand; PAM type: YTN; PAM sequence: CTG
ctactgtcaacttaagttac

SEQ ID NO: 356814 - DNA, 20 bp, Artificial Sequence
  Description of Artificial Sequence: Synthetic oligonucleotide
  Target: LAMA2; (+) strand; PAM type: YTN; PAM sequence: CTA
ctgtcaacttaagttactca

SEQ ID NO: 356815 - DNA, 20 bp, Artificial Sequence
  Description of Artificial Sequence: Synthetic oligonucleotide
  Target: LAMA2; (+) strand; PAM type: YTN; PAM sequence: CTG
tcaacttaagttactcaagt

SEQ ID NO: 356816 - DNA, 20 bp, Artificial Sequence
  Description of Artificial Sequence: Synthetic oligonucleotide
  Target: LAMA2; (+) strand; PAM type: YTN; PAM sequence: CTT
aagttactcaagtatagttc

SEQ ID NO: 356817 - DNA, 20 bp, Artificial Sequence
  Description of Artificial Sequence: Synthetic oligonucleotide
  Target: LAMA2; (+) strand; PAM type: YTN; PAM sequence: TTA
agttactcaagtatagttct

SEQ ID NO: 356818 - DNA, 20 bp, Artificial Sequence
  Description of Artificial Sequence: Synthetic oligonucleotide
  Target: LAMA2; (+) strand; PAM type: YTN; PAM sequence: TTA
ctcaagtatagttctgttga

SEQ ID NO: 356819 - DNA, 20 bp, Artificial Sequence
  Description of Artificial Sequence: Synthetic oligonucleotide
  Target: LAMA2; (+) strand; PAM type: YTN; PAM sequence: CTC
aagtatagttctgttgattt

SEQ ID NO: 356820 - DNA, 20 bp, Artificial Sequence
  Description of Artificial Sequence: Synthetic oligonucleotide
  Target: LAMA2; (+) strand; PAM type: YTN; PAM sequence: TTC
tgttgatttatctcctaatg

SEQ ID NO: 356821 - DNA, 20 bp, Artificial Sequence
  Description of Artificial Sequence: Synthetic oligonucleotide
  Target: LAMA2; (+) strand; PAM type: YTN; PAM sequence: CTG
ttgatttatctcctaatgaa

SEQ ID NO: 356822 - DNA, 20 bp, Artificial Sequence
  Description of Artificial Sequence: Synthetic oligonucleotide
  Target: LAMA2; (+) strand; PAM type: YTN; PAM sequence: TTG
atttatctcctaatgaacaa

SEQ ID NO: 356823 - DNA, 20 bp, Artificial Sequence
  Description of Artificial Sequence: Synthetic oligonucleotide
  Target: LAMA2; (+) strand; PAM type: YTN; PAM sequence: TTT
atctcctaatgaacaaccgc

SEQ ID NO: 356824 - DNA, 20 bp, Artificial Sequence
  Description of Artificial Sequence: Synthetic oligonucleotide
  Target: LAMA2; (+) strand; PAM type: YTN; PAM sequence: TTA
tctcctaatgaacaaccgct

SEQ ID NO: 356825 - DNA, 20 bp, Artificial Sequence
  Description of Artificial Sequence: Synthetic oligonucleotide
  Target: LAMA2; (+) strand; PAM type: YTN; PAM sequence: CTC
ctaatgaacaaccgctaatg

SEQ ID NO: 356826 - DNA, 20 bp, Artificial Sequence
  Description of Artificial Sequence: Synthetic oligonucleotide
  Target: LAMA2; (+) strand; PAM type: YTN; PAM sequence: CTA
atgaacaaccgctaatgact

SEQ ID NO: 356827 - DNA, 20 bp, Artificial Sequence
  Description of Artificial Sequence: Synthetic oligonucleotide
  Target: LAMA2; (+) strand; PAM type: YTN; PAM sequence: CTA
atgacttaccaattcctaag

SEQ ID NO: 356828 - DNA, 20 bp, Artificial Sequence
  Description of Artificial Sequence: Synthetic oligonucleotide
  Target: LAMA2; (+) strand; PAM type: YTN; PAM sequence: CTT
accaattcctaaggaatatc

SEQ ID NO: 356829 - DNA, 20 bp, Artificial Sequence
  Description of Artificial Sequence: Synthetic oligonucleotide
  Target: LAMA2; (+) strand; PAM type: YTN; PAM sequence: TTA
ccaattcctaaggaatatct

SEQ ID NO: 356830 - DNA, 20 bp, Artificial Sequence
  Description of Artificial Sequence: Synthetic oligonucleotide
  Target: LAMA2; (+) strand; PAM type: YTN; PAM sequence: TTC
ctaaggaatatctcttagga

SEQ ID NO: 356831 - DNA, 20 bp, Artificial Sequence
  Description of Artificial Sequence: Synthetic oligonucleotide
  Target: LAMA2; (+) strand; PAM type: YTN; PAM sequence: CTA
aggaatatctcttaggatgg

SEQ ID NO: 356832 - DNA, 20 bp, Artificial Sequence
  Description of Artificial Sequence: Synthetic oligonucleotide
  Target: LAMA2; (+) strand; PAM type: YTN; PAM sequence: CTC
ttaggatggactttctgagg

SEQ ID NO: 356833 - DNA, 20 bp, Artificial Sequence
  Description of Artificial Sequence: Synthetic oligonucleotide
  Target: LAMA2; (+) strand; PAM type: YTN; PAM sequence: CTT
aggatggactttctgagggc

SEQ ID NO: 356834 - DNA, 20 bp, Artificial Sequence
  Description of Artificial Sequence: Synthetic oligonucleotide
  Target: LAMA2; (+) strand; PAM type: YTN; PAM sequence: TTA
ggatggactttctgagggca

SEQ ID NO: 356835 - DNA, 20 bp, Artificial Sequence
  Description of Artificial Sequence: Synthetic oligonucleotide
  Target: LAMA2; (+) strand; PAM type: YTN; PAM sequence: CTT
tctgagggcagggccctgga

SEQ ID NO: 356836 - DNA, 20 bp, Artificial Sequence
  Description of Artificial Sequence: Synthetic oligonucleotide
  Target: LAMA2; (+) strand; PAM type: YTN; PAM sequence: TTT
ctgagggcagggccctggat

SEQ ID NO: 356837 - DNA, 20 bp, Artificial Sequence
  Description of Artificial Sequence: Synthetic oligonucleotide
  Target: LAMA2; (+) strand; PAM type: YTN; PAM sequence: TTC
tgagggcagggccctggatc

SEQ ID NO: 356838 - DNA, 20 bp, Artificial Sequence
  Description of Artificial Sequence: Synthetic oligonucleotide
  Target: LAMA2; (+) strand; PAM type: YTN; PAM sequence: CTG
agggcagggccctggatctc

SEQ ID NO: 356839 - DNA, 20 bp, Artificial Sequence
  Description of Artificial Sequence: Synthetic oligonucleotide
  Target: LAMA2; (+) strand; PAM type: YTN; PAM sequence: CTG
gatctcaagtaccaagtgaa

SEQ ID NO: 356840 - DNA, 20 bp, Artificial Sequence
  Description of Artificial Sequence: Synthetic oligonucleotide
  Target: LAMA2; (+) strand; PAM type: YTN; PAM sequence: CTC
aagtaccaagtgaagttcta

SEQ ID NO: 356841 - DNA, 20 bp, Artificial Sequence
  Description of Artificial Sequence: Synthetic oligonucleotide
  Target: LAMA2; (+) strand; PAM type: YTN; PAM sequence: TTC
tagcatacaggaagtattaa

SEQ ID NO: 356842 - DNA, 20 bp, Artificial Sequence
  Description of Artificial Sequence: Synthetic oligonucleotide
  Target: LAMA2; (+) strand; PAM type: YTN; PAM sequence: CTA
gcatacaggaagtattaaat

SEQ ID NO: 356843 - DNA, 20 bp, Artificial Sequence
  Description of Artificial Sequence: Synthetic oligonucleotide
  Target: LAMA2; (+) strand; PAM type: YTN; PAM sequence: TTA
aatacaggctgagtatccct

SEQ ID NO: 356844 - DNA, 20 bp, Artificial Sequence
  Description of Artificial Sequence: Synthetic oligonucleotide
  Target: LAMA2; (+) strand; PAM type: YTN; PAM sequence: CTG
agtatcccttatccaaaatg

SEQ ID NO: 356845 - DNA, 20 bp, Artificial Sequence
  Description of Artificial Sequence: Synthetic oligonucleotide
  Target: LAMA2; (+) strand; PAM type: YTN; PAM sequence: CTT
atccaaaatgcttgagacca

SEQ ID NO: 356846 - DNA, 20 bp, Artificial Sequence
  Description of Artificial Sequence: Synthetic oligonucleotide
  Target: LAMA2; (+) strand; PAM type: YTN; PAM sequence: TTA
tccaaaatgcttgagaccag

SEQ ID NO: 356847 - DNA, 20 bp, Artificial Sequence
  Description of Artificial Sequence: Synthetic oligonucleotide
  Target: LAMA2; (+) strand; PAM type: YTN; PAM sequence: CTT
gagaccagaaatgtttccga

SEQ ID NO: 356848 - DNA, 20 bp, Artificial Sequence
  Description of Artificial Sequence: Synthetic oligonucleotide
  Target: LAMA2; (+) strand; PAM type: YTN; PAM sequence: TTG
agaccagaaatgtttccgat

SEQ ID NO: 356849 - DNA, 20 bp, Artificial Sequence
  Description of Artificial Sequence: Synthetic oligonucleotide
  Target: LAMA2; (+) strand; PAM type: YTN; PAM sequence: TTT
ccgatttggtattttttcgg

SEQ ID NO: 356850 - DNA, 20 bp, Artificial Sequence
  Description of Artificial Sequence: Synthetic oligonucleotide
  Target: LAMA2; (+) strand; PAM type: YTN; PAM sequence: TTC
cgatttggtattttttcgga

SEQ ID NO: 356851 - DNA, 20 bp, Artificial Sequence
  Description of Artificial Sequence: Synthetic oligonucleotide
  Target: LAMA2; (+) strand; PAM type: YTN; PAM sequence: TTT
ggtattttttcggattttgg

SEQ ID NO: 356852 - DNA, 20 bp, Artificial Sequence
  Description of Artificial Sequence: Synthetic oligonucleotide
  Target: LAMA2; (+) strand; PAM type: YTN; PAM sequence: TTG
gtattttttcggattttgga

SEQ ID NO: 356853 - DNA, 20 bp, Artificial Sequence
  Description of Artificial Sequence: Synthetic oligonucleotide
  Target: LAMA2; (+) strand; PAM type: YTN; PAM sequence: TTT
tttcggattttggaatattt

SEQ ID NO: 356854 - DNA, 20 bp, Artificial Sequence
  Description of Artificial Sequence: Synthetic oligonucleotide
  Target: LAMA2; (+) strand; PAM type: YTN; PAM sequence: TTT
ttcggattttggaatatttg

SEQ ID NO: 356855 - DNA, 20 bp, Artificial Sequence
  Description of Artificial Sequence: Synthetic oligonucleotide
  Target: LAMA2; (+) strand; PAM type: YTN; PAM sequence: TTT
tcggattttggaatatttgc

SEQ ID NO: 356856 - DNA, 20 bp, Artificial Sequence
  Description of Artificial Sequence: Synthetic oligonucleotide
  Target: LAMA2; (+) strand; PAM type: YTN; PAM sequence: TTT
cggattttggaatatttgca

SEQ ID NO: 356857 - DNA, 20 bp, Artificial Sequence
  Description of Artificial Sequence: Synthetic oligonucleotide
  Target: LAMA2; (+) strand; PAM type: YTN; PAM sequence: TTC
ggattttggaatatttgcag

SEQ ID NO: 356858 - DNA, 20 bp, Artificial Sequence
  Description of Artificial Sequence: Synthetic oligonucleotide
  Target: LAMA2; (+) strand; PAM type: YTN; PAM sequence: TTT
tggaatatttgcagaataca

SEQ ID NO: 356859 - DNA, 20 bp, Artificial Sequence
  Description of Artificial Sequence: Synthetic oligonucleotide
  Target: LAMA2; (+) strand; PAM type: YTN; PAM sequence: TTT
ggaatatttgcagaatacat

SEQ ID NO: 356860 - DNA, 20 bp, Artificial Sequence
  Description of Artificial Sequence: Synthetic oligonucleotide
  Target: LAMA2; (+) strand; PAM type: YTN; PAM sequence: TTG
gaatatttgcagaatacata

SEQ ID NO: 356861 - DNA, 20 bp, Artificial Sequence
  Description of Artificial Sequence: Synthetic oligonucleotide
  Target: LAMA2; (+) strand; PAM type: YTN; PAM sequence: TTT
gcagaatacatactggctga

SEQ ID NO: 356862 - DNA, 20 bp, Artificial Sequence
  Description of Artificial Sequence: Synthetic oligonucleotide
  Target: LAMA2; (+) strand; PAM type: YTN; PAM sequence: TTG
cagaatacatactggctgat

SEQ ID NO: 356863 - DNA, 20 bp, Artificial Sequence
  Description of Artificial Sequence: Synthetic oligonucleotide
  Target: LAMA2; (+) strand; PAM type: YTN; PAM sequence: CTG
gctgatcattcctaatcaga

SEQ ID NO: 356864 - DNA, 20 bp, Artificial Sequence
  Description of Artificial Sequence: Synthetic oligonucleotide
  Target: LAMA2; (+) strand; PAM type: YTN; PAM sequence: CTG
atcattcctaatcagaaaat

SEQ ID NO: 356865 - DNA, 20 bp, Artificial Sequence
  Description of Artificial Sequence: Synthetic oligonucleotide
  Target: LAMA2; (+) strand; PAM type: YTN; PAM sequence: TTC
ctaatcagaaaatccaaaat

SEQ ID NO: 356866 - DNA, 20 bp, Artificial Sequence
  Description of Artificial Sequence: Synthetic oligonucleotide
  Target: LAMA2; (+) strand; PAM type: YTN; PAM sequence: CTA
atcagaaaatccaaaatctg

SEQ ID NO: 356867 - DNA, 20 bp, Artificial Sequence
  Description of Artificial Sequence: Synthetic oligonucleotide
  Target: LAMA2; (+) strand; PAM type: YTN; PAM sequence: CTG
aaatgctctagtgaacattc

SEQ ID NO: 356868 - DNA, 20 bp, Artificial Sequence
  Description of Artificial Sequence: Synthetic oligonucleotide
  Target: LAMA2; (+) strand; PAM type: YTN; PAM sequence: CTC
tagtgaacattccatttgag

SEQ ID NO: 356869 - DNA, 20 bp, Artificial Sequence
  Description of Artificial Sequence: Synthetic oligonucleotide
  Target: LAMA2; (+) strand; PAM type: YTN; PAM sequence: CTA
gtgaacattccatttgagca

SEQ ID NO: 356870 - DNA, 20 bp, Artificial Sequence
  Description of Artificial Sequence: Synthetic oligonucleotide
  Target: LAMA2; (+) strand; PAM type: YTN; PAM sequence: TTC
catttgagcatcatataggt

SEQ ID NO: 356871 - DNA, 20 bp, Artificial Sequence
  Description of Artificial Sequence: Synthetic oligonucleotide
  Target: LAMA2; (+) strand; PAM type: YTN; PAM sequence: TTT
gagcatcatataggtgcccc

SEQ ID NO: 356872 - DNA, 20 bp, Artificial Sequence
  Description of Artificial Sequence: Synthetic oligonucleotide
  Target: LAMA2; (+) strand; PAM type: YTN; PAM sequence: TTG
agcatcatataggtgccccc

SEQ ID NO: 356873 - DNA, 20 bp, Artificial Sequence
  Description of Artificial Sequence: Synthetic oligonucleotide
  Target: LAMA2; (+) strand; PAM type: YTN; PAM sequence: TTT
caaattttgaaacatttaag

SEQ ID NO: 356874 - DNA, 20 bp, Artificial Sequence
  Description of Artificial Sequence: Synthetic oligonucleotide
  Target: LAMA2; (+) strand; PAM type: YTN; PAM sequence: TTC
aaattttgaaacatttaaga

SEQ ID NO: 356875 - DNA, 20 bp, Artificial Sequence
  Description of Artificial Sequence: Synthetic oligonucleotide
  Target: LAMA2; (+) strand; PAM type: YTN; PAM sequence: TTT
tgaaacatttaagattttgg

SEQ ID NO: 356876 - DNA, 20 bp, Artificial Sequence
  Description of Artificial Sequence: Synthetic oligonucleotide
  Target: LAMA2; (+) strand; PAM type: YTN; PAM sequence: TTT
gaaacatttaagattttgga

SEQ ID NO: 356877 - DNA, 20 bp, Artificial Sequence
  Description of Artificial Sequence: Synthetic oligonucleotide
  Target: LAMA2; (+) strand; PAM type: YTN; PAM sequence: TTG
aaacatttaagattttggat

SEQ ID NO: 356878 - DNA, 20 bp, Artificial Sequence
  Description of Artificial Sequence: Synthetic oligonucleotide
  Target: LAMA2; (+) strand; PAM type: YTN; PAM sequence: TTT
aagattttggattttctgat

SEQ ID NO: 356879 - DNA, 20 bp, Artificial Sequence
  Description of Artificial Sequence: Synthetic oligonucleotide
  Target: LAMA2; (+) strand; PAM type: YTN; PAM sequence: TTA
agattttggattttctgatt

SEQ ID NO: 356880 - DNA, 20 bp, Artificial Sequence
  Description of Artificial Sequence: Synthetic oligonucleotide
  Target: LAMA2; (+) strand; PAM type: YTN; PAM sequence: TTT
tggattttctgattagggat

SEQ ID NO: 356881 - DNA, 20 bp, Artificial Sequence
  Description of Artificial Sequence: Synthetic oligonucleotide
  Target: LAMA2; (+) strand; PAM type: YTN; PAM sequence: TTT
ggattttctgattagggatg

SEQ ID NO: 356882 - DNA, 20 bp, Artificial Sequence
  Description of Artificial Sequence: Synthetic oligonucleotide
  Target: LAMA2; (+) strand; PAM type: YTN; PAM sequence: TTG
gattttctgattagggatgc

SEQ ID NO: 356883 - DNA, 20 bp, Artificial Sequence
  Description of Artificial Sequence: Synthetic oligonucleotide
  Target: LAMA2; (+) strand; PAM type: YTN; PAM sequence: TTT
tctgattagggatgctcaac

SEQ ID NO: 356884 - DNA, 20 bp, Artificial Sequence
  Description of Artificial Sequence: Synthetic oligonucleotide
  Target: LAMA2; (+) strand; PAM type: YTN; PAM sequence: TTT
ctgattagggatgctcaacc

SEQ ID NO: 356885 - DNA, 20 bp, Artificial Sequence
  Description of Artificial Sequence: Synthetic oligonucleotide
  Target: LAMA2; (+) strand; PAM type: YTN; PAM sequence: TTC
tgattagggatgctcaacct

SEQ ID NO: 356886 - DNA, 20 bp, Artificial Sequence
  Description of Artificial Sequence: Synthetic oligonucleotide
  Target: LAMA2; (+) strand; PAM type: YTN; PAM sequence: CTG
attagggatgctcaacctgc

SEQ ID NO: 356887 - DNA, 20 bp, Artificial Sequence
  Description of Artificial Sequence: Synthetic oligonucleotide
  Target: LAMA2; (+) strand; PAM type: YTN; PAM sequence: TTA
gggatgctcaacctgcacat

SEQ ID NO: 356888 - DNA, 20 bp, Artificial Sequence
  Description of Artificial Sequence: Synthetic oligonucleotide
  Target: LAMA2; (+) strand; PAM type: YTN; PAM sequence: CTC
aacctgcacatttgtcttga

SEQ ID NO: 356889 - DNA, 20 bp, Artificial Sequence
  Description of Artificial Sequence: Synthetic oligonucleotide
  Target: LAMA2; (+) strand; PAM type: YTN; PAM sequence: CTG
cacatttgtcttgaaaaata

SEQ ID NO: 356890 - DNA, 20 bp, Artificial Sequence
  Description of Artificial Sequence: Synthetic oligonucleotide
  Target: LAMA2; (+) strand; PAM type: YTN; PAM sequence: TTT
gtcttgaaaaataaataatg

SEQ ID NO: 356891 - DNA, 20 bp, Artificial Sequence
  Description of Artificial Sequence: Synthetic oligonucleotide
  Target: LAMA2; (+) strand; PAM type: YTN; PAM sequence: TTG
tcttgaaaaataaataatga

SEQ ID NO: 356892 - DNA, 20 bp, Artificial Sequence
  Description of Artificial Sequence: Synthetic oligonucleotide
  Target: LAMA2; (+) strand; PAM type: YTN; PAM sequence: CTT
gaaaaataaataatgaataa

SEQ ID NO: 356893 - DNA, 20 bp, Artificial Sequence
  Description of Artificial Sequence: Synthetic oligonucleotide
  Target: LAMA2; (+) strand; PAM type: YTN; PAM sequence: TTG
aaaaataaataatgaataaa

SEQ ID NO: 356894 - DNA, 20 bp, Artificial Sequence
  Description of Artificial Sequence: Synthetic oligonucleotide
  Target: LAMA2; (+) strand; PAM type: YTN; PAM sequence: CTC
caacttttaaaatgaattct

SEQ ID NO: 356895 - DNA, 20 bp, Artificial Sequence
  Description of Artificial Sequence: Synthetic oligonucleotide
  Target: LAMA2; (+) strand; PAM type: YTN; PAM sequence: CTT
ttaaaatgaattcttgttcc

SEQ ID NO: 356896 - DNA, 20 bp, Artificial Sequence
  Description of Artificial Sequence: Synthetic oligonucleotide
  Target: LAMA2; (+) strand; PAM type: YTN; PAM sequence: TTT
taaaatgaattcttgttccc

SEQ ID NO: 356897 - DNA, 20 bp, Artificial Sequence
  Description of Artificial Sequence: Synthetic oligonucleotide
  Target: LAMA2; (+) strand; PAM type: YTN; PAM sequence: TTT
aaaatgaattcttgttccca

SEQ ID NO: 356898 - DNA, 20 bp, Artificial Sequence
  Description of Artificial Sequence: Synthetic oligonucleotide
  Target: LAMA2; (+) strand; PAM type: YTN; PAM sequence: TTA
aaatgaattcttgttcccaa

SEQ ID NO: 356899 - DNA, 20 bp, Artificial Sequence
  Description of Artificial Sequence: Synthetic oligonucleotide
  Target: LAMA2; (+) strand; PAM type: YTN; PAM sequence: TTC
ttgttcccaatgtctttgct

SEQ ID NO: 356900 - DNA, 20 bp, Artificial Sequence
  Description of Artificial Sequence: Synthetic oligonucleotide
  Target: LAMA2; (+) strand; PAM type: YTN; PAM sequence: CTT
gttcccaatgtctttgctaa

SEQ ID NO: 356901 - DNA, 20 bp, Artificial Sequence
  Description of Artificial Sequence: Synthetic oligonucleotide
  Target: LAMA2; (+) strand; PAM type: YTN; PAM sequence: TTG
ttcccaatgtctttgctaac

SEQ ID NO: 356902 - DNA, 20 bp, Artificial Sequence
  Description of Artificial Sequence: Synthetic oligonucleotide
  Target: LAMA2; (+) strand; PAM type: YTN; PAM sequence: TTC
ccaatgtctttgctaacatc

SEQ ID NO: 356903 - DNA, 20 bp, Artificial Sequence
  Description of Artificial Sequence: Synthetic oligonucleotide
  Target: LAMA2; (+) strand; PAM type: YTN; PAM sequence: CTT
tgctaacatcggtctctcat

SEQ ID NO: 356904 - DNA, 20 bp, Artificial Sequence
  Description of Artificial Sequence: Synthetic oligonucleotide
  Target: LAMA2; (+) strand; PAM type: YTN; PAM sequence: TTT
gctaacatcggtctctcatt

SEQ ID NO: 356905 - DNA, 20 bp, Artificial Sequence
  Description of Artificial Sequence: Synthetic oligonucleotide
  Target: LAMA2; (+) strand; PAM type: YTN; PAM sequence: TTG
ctaacatcggtctctcattc

SEQ ID NO: 356906 - DNA, 20 bp, Artificial Sequence
  Description of Artificial Sequence: Synthetic oligonucleotide
  Target: LAMA2; (+) strand; PAM type: YTN; PAM sequence: CTA
acatcggtctctcattctat

SEQ ID NO: 356907 - DNA, 20 bp, Artificial Sequence
  Description of Artificial Sequence: Synthetic oligonucleotide
  Target: LAMA2; (+) strand; PAM type: YTN; PAM sequence: CTC
tcattctatctatgtccaca

SEQ ID NO: 356908 - DNA, 20 bp, Artificial Sequence
  Description of Artificial Sequence: Synthetic oligonucleotide
  Target: LAMA2; (+) strand; PAM type: YTN; PAM sequence: CTC
attctatctatgtccacaag

SEQ ID NO: 356909 - DNA, 20 bp, Artificial Sequence
  Description of Artificial Sequence: Synthetic oligonucleotide
  Target: LAMA2; (+) strand; PAM type: YTN; PAM sequence: TTC
tatctatgtccacaagttga

SEQ ID NO: 356910 - DNA, 20 bp, Artificial Sequence
  Description of Artificial Sequence: Synthetic oligonucleotide
  Target: LAMA2; (+) strand; PAM type: YTN; PAM sequence: CTA
tctatgtccacaagttgaat

SEQ ID NO: 356911 - DNA, 20 bp, Artificial Sequence
  Description of Artificial Sequence: Synthetic oligonucleotide
  Target: LAMA2; (+) strand; PAM type: YTN; PAM sequence: CTA
tgtccacaagttgaattttt

SEQ ID NO: 356912 - DNA, 20 bp, Artificial Sequence
  Description of Artificial Sequence: Synthetic oligonucleotide
  Target: LAMA2; (+) strand; PAM type: YTN; PAM sequence: TTG
aatttttaaaccatgcttca

SEQ ID NO: 356913 - DNA, 20 bp, Artificial Sequence
  Description of Artificial Sequence: Synthetic oligonucleotide
  Target: LAMA2; (+) strand; PAM type: YTN; PAM sequence: TTT
ttaaaccatgcttcaaggat

SEQ ID NO: 356914 - DNA, 20 bp, Artificial Sequence
  Description of Artificial Sequence: Synthetic oligonucleotide
  Target: LAMA2; (+) strand; PAM type: YTN; PAM sequence: TTT
taaaccatgcttcaaggatc

SEQ ID NO: 356915 - DNA, 20 bp, Artificial Sequence
  Description of Artificial Sequence: Synthetic oligonucleotide
  Target: LAMA2; (+) strand; PAM type: YTN; PAM sequence: TTT
aaaccatgcttcaaggatca

SEQ ID NO: 356916 - DNA, 20 bp, Artificial Sequence
  Description of Artificial Sequence: Synthetic oligonucleotide
  Target: LAMA2; (+) strand; PAM type: YTN; PAM sequence: TTA
aaccatgcttcaaggatcag

SEQ ID NO: 356917 - DNA, 20 bp, Artificial Sequence
  Description of Artificial Sequence: Synthetic oligonucleotide
  Target: LAMA2; (+) strand; PAM type: YTN; PAM sequence: CTT
caaggatcaggtcaaactcc

SEQ ID NO: 356918 - DNA, 20 bp, Artificial Sequence
  Description of Artificial Sequence: Synthetic oligonucleotide
  Target: LAMA2; (+) strand; PAM type: YTN; PAM sequence: TTC
aaggatcaggtcaaactcca

SEQ ID NO: 356919 - DNA, 20 bp, Artificial Sequence
  Description of Artificial Sequence: Synthetic oligonucleotide
  Target: LAMA2; (+) strand; PAM type: YTN; PAM sequence: CTC
cactcctgtcataaagcttc

SEQ ID NO: 356920 - DNA, 20 bp, Artificial Sequence
  Description of Artificial Sequence: Synthetic oligonucleotide
  Target: LAMA2; (+) strand; PAM type: YTN; PAM sequence: CTC
ctgtcataaagcttccttaa

SEQ ID NO: 356921 - DNA, 20 bp, Artificial Sequence
  Description of Artificial Sequence: Synthetic oligonucleotide
  Target: LAMA2; (+) strand; PAM type: YTN; PAM sequence: CTG
tcataaagcttccttaagcc

SEQ ID NO: 356922 - DNA, 20 bp, Artificial Sequence
  Description of Artificial Sequence: Synthetic oligonucleotide
  Target: LAMA2; (+) strand; PAM type: YTN; PAM sequence: CTT
ccttaagccttatagcaaaa

SEQ ID NO: 356923 - DNA, 20 bp, Artificial Sequence
  Description of Artificial Sequence: Synthetic oligonucleotide
  Target: LAMA2; (+) strand; PAM type: YTN; PAM sequence: TTC
cttaagccttatagcaaaaa

SEQ ID NO: 356924 - DNA, 20 bp, Artificial Sequence
  Description of Artificial Sequence: Synthetic oligonucleotide
  Target: LAMA2; (+) strand; PAM type: YTN; PAM sequence: CTT
aagccttatagcaaaaatta

SEQ ID NO: 356925 - DNA, 20 bp, Artificial Sequence
  Description of Artificial Sequence: Synthetic oligonucleotide
  Target: LAMA2; (+) strand; PAM type: YTN; PAM sequence: TTA
agccttatagcaaaaattag

SEQ ID NO: 356926 - DNA, 20 bp, Artificial Sequence
  Description of Artificial Sequence: Synthetic oligonucleotide
  Target: LAMA2; (+) strand; PAM type: YTN; PAM sequence: CTT
atagcaaaaattagtgcttc

SEQ ID NO: 356927 - DNA, 20 bp, Artificial Sequence
  Description of Artificial Sequence: Synthetic oligonucleotide
  Target: LAMA2; (+) strand; PAM type: YTN; PAM sequence: TTA
tagcaaaaattagtgcttcc

SEQ ID NO: 356928 - DNA, 20 bp, Artificial Sequence
  Description of Artificial Sequence: Synthetic oligonucleotide
  Target: LAMA2; (+) strand; PAM type: YTN; PAM sequence: TTA
gtgcttcctctatgttcccg

SEQ ID NO: 356929 - DNA, 20 bp, Artificial Sequence
  Description of Artificial Sequence: Synthetic oligonucleotide
  Target: LAMA2; (+) strand; PAM type: YTN; PAM sequence: CTT
cctctatgttcccgtaatta

SEQ ID NO: 356930 - DNA, 20 bp, Artificial Sequence
  Description of Artificial Sequence: Synthetic oligonucleotide
  Target: LAMA2; (+) strand; PAM type: YTN; PAM sequence: TTC
ctctatgttcccgtaattat

SEQ ID NO: 356931 - DNA, 20 bp, Artificial Sequence
  Description of Artificial Sequence: Synthetic oligonucleotide
  Target: LAMA2; (+) strand; PAM type: YTN; PAM sequence: CTC
tatgttcccgtaattattta

SEQ ID NO: 356932 - DNA, 20 bp, Artificial Sequence
  Description of Artificial Sequence: Synthetic oligonucleotide
  Target: LAMA2; (+) strand; PAM type: YTN; PAM sequence: CTA
tgttcccgtaattatttatt

SEQ ID NO: 356933 - DNA, 20 bp, Artificial Sequence
  Description of Artificial Sequence: Synthetic oligonucleotide
  Target: LAMA2; (+) strand; PAM type: YTN; PAM sequence: TTC
ccgtaattatttatttctca

SEQ ID NO: 356934 - DNA, 20 bp, Artificial Sequence
  Description of Artificial Sequence: Synthetic oligonucleotide
  Target: LAMA2; (+) strand; PAM type: YTN; PAM sequence: TTA
tttatttctcagatgcactt

SEQ ID NO: 356935 - DNA, 20 bp, Artificial Sequence
  Description of Artificial Sequence: Synthetic oligonucleotide
  Target: LAMA2; (+) strand; PAM type: YTN; PAM sequence: TTT
atttctcagatgcacttacc

SEQ ID NO: 356936 - DNA, 20 bp, Artificial Sequence
  Description of Artificial Sequence: Synthetic oligonucleotide
  Target: LAMA2; (+) strand; PAM type: YTN; PAM sequence: TTA
tttctcagatgcacttacca

SEQ ID NO: 356937 - DNA, 20 bp, Artificial Sequence
  Description of Artificial Sequence: Synthetic oligonucleotide
  Target: LAMA2; (+) strand; PAM type: YTN; PAM sequence: TTT
ctcagatgcacttaccatat

SEQ ID NO: 356938 - DNA, 20 bp, Artificial Sequence
  Description of Artificial Sequence: Synthetic oligonucleotide
  Target: LAMA2; (+) strand; PAM type: YTN; PAM sequence: TTC
tcagatgcacttaccatatt

SEQ ID NO: 356939 - DNA, 20 bp, Artificial Sequence
  Description of Artificial Sequence: Synthetic oligonucleotide
  Target: LAMA2; (+) strand; PAM type: YTN; PAM sequence: CTC
agatgcacttaccatattcc

SEQ ID NO: 356940 - DNA, 20 bp, Artificial Sequence
  Description of Artificial Sequence: Synthetic oligonucleotide
  Target: LAMA2; (+) strand; PAM type: YTN; PAM sequence: CTT
accatattccaccttgcatt

SEQ ID NO: 356941 - DNA, 20 bp, Artificial Sequence
  Description of Artificial Sequence: Synthetic oligonucleotide
  Target: LAMA2; (+) strand; PAM type: YTN; PAM sequence: TTA
ccatattccaccttgcatta

SEQ ID NO: 356942 - DNA, 20 bp, Artificial Sequence
  Description of Artificial Sequence: Synthetic oligonucleotide
  Target: LAMA2; (+) strand; PAM type: YTN; PAM sequence: TTC
caccttgcattatagttgat

SEQ ID NO: 356943 - DNA, 20 bp, Artificial Sequence
  Description of Artificial Sequence: Synthetic oligonucleotide
  Target: LAMA2; (+) strand; PAM type: YTN; PAM sequence: CTT
gcattatagttgattgtgag

SEQ ID NO: 356944 - DNA, 20 bp, Artificial Sequence
  Description of Artificial Sequence: Synthetic oligonucleotide
  Target: LAMA2; (+) strand; PAM type: YTN; PAM sequence: TTG
cattatagttgattgtgagt

SEQ ID NO: 356945 - DNA, 20 bp, Artificial Sequence
  Description of Artificial Sequence: Synthetic oligonucleotide
  Target: LAMA2; (+) strand; PAM type: YTN; PAM sequence: TTA
tagttgattgtgagtatatc

SEQ ID NO: 356946 - DNA, 20 bp, Artificial Sequence
  Description of Artificial Sequence: Synthetic oligonucleotide
  Target: LAMA2; (+) strand; PAM type: YTN; PAM sequence: TTG
attgtgagtatatcttttta

SEQ ID NO: 356947 - DNA, 20 bp, Artificial Sequence
  Description of Artificial Sequence: Synthetic oligonucleotide
  Target: LAMA2; (+) strand; PAM type: YTN; PAM sequence: TTG
tgagtatatctttttaccca

SEQ ID NO: 356948 - DNA, 20 bp, Artificial Sequence
  Description of Artificial Sequence: Synthetic oligonucleotide
  Target: LAMA2; (+) strand; PAM type: YTN; PAM sequence: CTT
tttacccaactagatattgg

SEQ ID NO: 356949 - DNA, 20 bp, Artificial Sequence
  Description of Artificial Sequence: Synthetic oligonucleotide
  Target: LAMA2; (+) strand; PAM type: YTN; PAM sequence: TTT
ttacccaactagatattggc

SEQ ID NO: 356950 - DNA, 20 bp, Artificial Sequence
  Description of Artificial Sequence: Synthetic oligonucleotide
  Target: LAMA2; (+) strand; PAM type: YTN; PAM sequence: TTT
tacccaactagatattggcc

SEQ ID NO: 356951 - DNA, 20 bp, Artificial Sequence
  Description of Artificial Sequence: Synthetic oligonucleotide
  Target: LAMA2; (+) strand; PAM type: YTN; PAM sequence: TTT
acccaactagatattggcct

SEQ ID NO: 356952 - DNA, 20 bp, Artificial Sequence
  Description of Artificial Sequence: Synthetic oligonucleotide
  Target: LAMA2; (+) strand; PAM type: YTN; PAM sequence: TTA
cccaactagatattggcctt

SEQ ID NO: 356953 - DNA, 20 bp, Artificial Sequence
  Description of Artificial Sequence: Synthetic oligonucleotide
  Target: LAMA2; (+) strand; PAM type: YTN; PAM sequence: CTA
gatattggcctttaaagaca

SEQ ID NO: 356954 - DNA, 20 bp, Artificial Sequence
  Description of Artificial Sequence: Synthetic oligonucleotide
  Target: LAMA2; (+) strand; PAM type: YTN; PAM sequence: TTG
gcctttaaagacagacttat

SEQ ID NO: 356955 - DNA, 20 bp, Artificial Sequence
  Description of Artificial Sequence: Synthetic oligonucleotide
  Target: LAMA2; (+) strand; PAM type: YTN; PAM sequence: CTT
taaagacagacttatttaaa

SEQ ID NO: 356956 - DNA, 20 bp, Artificial Sequence
  Description of Artificial Sequence: Synthetic oligonucleotide
  Target: LAMA2; (+) strand; PAM type: YTN; PAM sequence: TTT
aaagacagacttatttaaag

SEQ ID NO: 356957 - DNA, 20 bp, Artificial Sequence
  Description of Artificial Sequence: Synthetic oligonucleotide
  Target: LAMA2; (+) strand; PAM type: YTN; PAM sequence: TTA
aagacagacttatttaaaga

SEQ ID NO: 356958 - DNA, 20 bp, Artificial Sequence
  Description of Artificial Sequence: Synthetic oligonucleotide
  Target: LAMA2; (+) strand; PAM type: YTN; PAM sequence: CTT
atttaaagacagaccttgac

SEQ ID NO: 356959 - DNA, 20 bp, Artificial Sequence
  Description of Artificial Sequence: Synthetic oligonucleotide
  Target: LAMA2; (+) strand; PAM type: YTN; PAM sequence: TTA
tttaaagacagaccttgact

SEQ ID NO: 356960 - DNA, 20 bp, Artificial Sequence
  Description of Artificial Sequence: Synthetic oligonucleotide
  Target: LAMA2; (+) strand; PAM type: YTN; PAM sequence: TTT
aaagacagaccttgacttat

SEQ ID NO: 356961 - DNA, 20 bp, Artificial Sequence
  Description of Artificial Sequence: Synthetic oligonucleotide
  Target: LAMA2; (+) strand; PAM type: YTN; PAM sequence: TTA
aagacagaccttgacttatt

SEQ ID NO: 356962 - DNA, 20 bp, Artificial Sequence
  Description of Artificial Sequence: Synthetic oligonucleotide
  Target: LAMA2; (+) strand; PAM type: YTN; PAM sequence: CTT
gacttatttatcttcatagt

SEQ ID NO: 356963 - DNA, 20 bp, Artificial Sequence
  Description of Artificial Sequence: Synthetic oligonucleotide
  Target: LAMA2; (+) strand; PAM type: YTN; PAM sequence: TTG
acttatttatcttcatagtg

SEQ ID NO: 356964 - DNA, 20 bp, Artificial Sequence
  Description of Artificial Sequence: Synthetic oligonucleotide
  Target: LAMA2; (+) strand; PAM type: YTN; PAM sequence: CTT
atttatcttcatagtgccta

SEQ ID NO: 356965 - DNA, 20 bp, Artificial Sequence
  Description of Artificial Sequence: Synthetic oligonucleotide
  Target: LAMA2; (+) strand; PAM type: YTN; PAM sequence: TTA
tttatcttcatagtgcctag

SEQ ID NO: 356966 - DNA, 20 bp, Artificial Sequence
  Description of Artificial Sequence: Synthetic oligonucleotide
  Target: LAMA2; (+) strand; PAM type: YTN; PAM sequence: TTT
atcttcatagtgcctagaat

SEQ ID NO: 356967 - DNA, 20 bp, Artificial Sequence
  Description of Artificial Sequence: Synthetic oligonucleotide
  Target: LAMA2; (+) strand; PAM type: YTN; PAM sequence: TTA
tcttcatagtgcctagaatt

SEQ ID NO: 356968 - DNA, 20 bp, Artificial Sequence
  Description of Artificial Sequence: Synthetic oligonucleotide
  Target: LAMA2; (+) strand; PAM type: YTN; PAM sequence: CTT
catagtgcctagaattccta

SEQ ID NO: 356969 - DNA, 20 bp, Artificial Sequence
  Description of Artificial Sequence: Synthetic oligonucleotide
  Target: LAMA2; (+) strand; PAM type: YTN; PAM sequence: TTC
atagtgcctagaattcctac

SEQ ID NO: 356970 - DNA, 20 bp, Artificial Sequence
  Description of Artificial Sequence: Synthetic oligonucleotide
  Target: LAMA2; (+) strand; PAM type: YTN; PAM sequence: CTA
gaattcctaccctaatgtgt

SEQ ID NO: 356971 - DNA, 20 bp, Artificial Sequence
  Description of Artificial Sequence: Synthetic oligonucleotide
  Target: LAMA2; (+) strand; PAM type: YTN; PAM sequence: TTC
ctaccctaatgtgttgcttc

SEQ ID NO: 356972 - DNA, 20 bp, Artificial Sequence
  Description of Artificial Sequence: Synthetic oligonucleotide
  Target: LAMA2; (+) strand; PAM type: YTN; PAM sequence: CTA
ccctaatgtgttgcttcagg

SEQ ID NO: 356973 - DNA, 20 bp, Artificial Sequence
  Description of Artificial Sequence: Synthetic oligonucleotide
  Target: LAMA2; (+) strand; PAM type: YTN; PAM sequence: CTA
atgtgttgcttcaggttatt

SEQ ID NO: 356974 - DNA, 20 bp, Artificial Sequence
  Description of Artificial Sequence: Synthetic oligonucleotide
  Target: LAMA2; (+) strand; PAM type: YTN; PAM sequence: TTG
cttcaggttattaaataaaa

SEQ ID NO: 356975 - DNA, 20 bp, Artificial Sequence
  Description of Artificial Sequence: Synthetic oligonucleotide
  Target: LAMA2; (+) strand; PAM type: YTN; PAM sequence: CTT
caggttattaaataaaattg

SEQ ID NO: 356976 - DNA, 20 bp, Artificial Sequence
  Description of Artificial Sequence: Synthetic oligonucleotide
  Target: LAMA2; (+) strand; PAM type: YTN; PAM sequence: TTC
aggttattaaataaaattga

SEQ ID NO: 356977 - DNA, 20 bp, Artificial Sequence
  Description of Artificial Sequence: Synthetic oligonucleotide
  Target: LAMA2; (+) strand; PAM type: YTN; PAM sequence: TTA
ttaaataaaattgaatgtga

SEQ ID NO: 356978 - DNA, 20 bp, Artificial Sequence
  Description of Artificial Sequence: Synthetic oligonucleotide
  Target: LAMA2; (+) strand; PAM type: YTN; PAM sequence: TTA
aataaaattgaatgtgaaat

SEQ ID NO: 356979 - DNA, 20 bp, Artificial Sequence
  Description of Artificial Sequence: Synthetic oligonucleotide
  Target: LAMA2; (+) strand; PAM type: YTN; PAM sequence: TTG
aatgtgaaattatttaatca

SEQ ID NO: 356980 - DNA, 20 bp, Artificial Sequence
  Description of Artificial Sequence: Synthetic oligonucleotide
  Target: LAMA2; (+) strand; PAM type: YTN; PAM sequence: TTA
tttaatcatattttttcaag

SEQ ID NO: 356981 - DNA, 20 bp, Artificial Sequence
  Description of Artificial Sequence: Synthetic oligonucleotide
  Target: LAMA2; (+) strand; PAM type: YTN; PAM sequence: TTT
aatcatattttttcaaggtc

SEQ ID NO: 356982 - DNA, 20 bp, Artificial Sequence
  Description of Artificial Sequence: Synthetic oligonucleotide
  Target: LAMA2; (+) strand; PAM type: YTN; PAM sequence: TTA
atcatattttttcaaggtca

SEQ ID NO: 356983 - DNA, 20 bp, Artificial Sequence
  Description of Artificial Sequence: Synthetic oligonucleotide
  Target: LAMA2; (+) strand; PAM type: YTN; PAM sequence: TTT
tttcaaggtcattttactag

SEQ ID NO: 356984 - DNA, 20 bp, Artificial Sequence
  Description of Artificial Sequence: Synthetic oligonucleotide
  Target: LAMA2; (+) strand; PAM type: YTN; PAM sequence: TTT
ttcaaggtcattttactagg

SEQ ID NO: 356985 - DNA, 20 bp, Artificial Sequence
  Description of Artificial Sequence: Synthetic oligonucleotide
  Target: LAMA2; (+) strand; PAM type: YTN; PAM sequence: TTT
tcaaggtcattttactaggc

SEQ ID NO: 356986 - DNA, 20 bp, Artificial Sequence
  Description of Artificial Sequence: Synthetic oligonucleotide
  Target: LAMA2; (+) strand; PAM type: YTN; PAM sequence: TTT
caaggtcattttactaggct

SEQ ID NO: 356987 - DNA, 20 bp, Artificial Sequence
  Description of Artificial Sequence: Synthetic oligonucleotide
  Target: LAMA2; (+) strand; PAM type: YTN; PAM sequence: TTC
aaggtcattttactaggcta

SEQ ID NO: 356988 - DNA, 20 bp, Artificial Sequence
  Description of Artificial Sequence: Synthetic oligonucleotide
  Target: LAMA2; (+) strand; PAM type: YTN; PAM sequence: TTT
tactaggctaaaatggagct

SEQ ID NO: 356989 - DNA, 20 bp, Artificial Sequence
  Description of Artificial Sequence: Synthetic oligonucleotide
  Target: LAMA2; (+) strand; PAM type: YTN; PAM sequence: TTT
actaggctaaaatggagcta

SEQ ID NO: 356990 - DNA, 20 bp, Artificial Sequence
  Description of Artificial Sequence: Synthetic oligonucleotide
  Target: LAMA2; (+) strand; PAM type: YTN; PAM sequence: TTA
ctaggctaaaatggagctaa

SEQ ID NO: 356991 - DNA, 20 bp, Artificial Sequence
  Description of Artificial Sequence: Synthetic oligonucleotide
  Target: LAMA2; (+) strand; PAM type: YTN; PAM sequence: CTA
ggctaaaatggagctaagga

SEQ ID NO: 356992 - DNA, 20 bp, Artificial Sequence
  Description of Artificial Sequence: Synthetic oligonucleotide
  Target: LAMA2; (+) strand; PAM type: YTN; PAM sequence: CTA
aaatggagctaaggaaaatg

SEQ ID NO: 356993 - DNA, 20 bp, Artificial Sequence
  Description of Artificial Sequence: Synthetic oligonucleotide
  Target: LAMA2; (+) strand; PAM type: YTN; PAM sequence: CTA
aggaaaatgtagctaatgtc

SEQ ID NO: 356994 - DNA, 20 bp, Artificial Sequence
  Description of Artificial Sequence: Synthetic oligonucleotide
  Target: LAMA2; (+) strand; PAM type: YTN; PAM sequence: CTA
atgtctgcaaatttctaatt

SEQ ID NO: 356995 - DNA, 20 bp, Artificial Sequence
  Description of Artificial Sequence: Synthetic oligonucleotide
  Target: LAMA2; (+) strand; PAM type: YTN; PAM sequence: CTG
caaatttctaattgttgaac

SEQ ID NO: 356996 - DNA, 20 bp, Artificial Sequence
  Description of Artificial Sequence: Synthetic oligonucleotide
  Target: LAMA2; (+) strand; PAM type: YTN; PAM sequence: TTT
ctaattgttgaacttagtct

SEQ ID NO: 356997 - DNA, 20 bp, Artificial Sequence
  Description of Artificial Sequence: Synthetic oligonucleotide
  Target: LAMA2; (+) strand; PAM type: YTN; PAM sequence: TTC
taattgttgaacttagtctg

SEQ ID NO: 356998 - DNA, 20 bp, Artificial Sequence
  Description of Artificial Sequence: Synthetic oligonucleotide
  Target: LAMA2; (+) strand; PAM type: YTN; PAM sequence: CTA
attgttgaacttagtctgaa

SEQ ID NO: 356999 - DNA, 20 bp, Artificial Sequence
  Description of Artificial Sequence: Synthetic oligonucleotide
  Target: LAMA2; (+) strand; PAM type: YTN; PAM sequence: TTG
ttgaacttagtctgaatctc

SEQ ID NO: 357000 - DNA, 20 bp, Artificial Sequence
  Description of Artificial Sequence: Synthetic oligonucleotide
  Target: LAMA2; (+) strand; PAM type: YTN; PAM sequence: TTG
aacttagtctgaatctcaga

SEQ ID NO: 357001 - DNA, 20 bp, Artificial Sequence
  Description of Artificial Sequence: Synthetic oligonucleotide
  Target: LAMA2; (+) strand; PAM type: YTN; PAM sequence: CTT
agtctgaatctcagaatagt

SEQ ID NO: 357002 - DNA, 20 bp, Artificial Sequence
  Description of Artificial Sequence: Synthetic oligonucleotide
  Target: LAMA2; (+) strand; PAM type: YTN; PAM sequence: TTA
gtctgaatctcagaatagtg

SEQ ID NO: 357003 - DNA, 20 bp, Artificial Sequence
  Description of Artificial Sequence: Synthetic oligonucleotide
  Target: LAMA2; (+) strand; PAM type: YTN; PAM sequence: CTG
aatctcagaatagtggcatt

SEQ ID NO: 357004 - DNA, 20 bp, Artificial Sequence
  Description of Artificial Sequence: Synthetic oligonucleotide
  Target: LAMA2; (+) strand; PAM type: YTN; PAM sequence: CTC
agaatagtggcattataagc

SEQ ID NO: 357005 - DNA, 20 bp, Artificial Sequence
  Description of Artificial Sequence: Synthetic oligonucleotide
  Target: LAMA2; (+) strand; PAM type: YTN; PAM sequence: TTA
taagctttcaaattagagta

SEQ ID NO: 357006 - DNA, 20 bp, Artificial Sequence
  Description of Artificial Sequence: Synthetic oligonucleotide
  Target: LAMA2; (+) strand; PAM type: YTN; PAM sequence: CTT
tcaaattagagtaaatgaaa

SEQ ID NO: 357007 - DNA, 20 bp, Artificial Sequence
  Description of Artificial Sequence: Synthetic oligonucleotide
  Target: LAMA2; (+) strand; PAM type: YTN; PAM sequence: TTT
caaattagagtaaatgaaaa

SEQ ID NO: 357008 - DNA, 20 bp, Artificial Sequence
  Description of Artificial Sequence: Synthetic oligonucleotide
  Target: LAMA2; (+) strand; PAM type: YTN; PAM sequence: TTC
aaattagagtaaatgaaaag

SEQ ID NO: 357009 - DNA, 20 bp, Artificial Sequence
  Description of Artificial Sequence: Synthetic oligonucleotide
  Target: LAMA2; (+) strand; PAM type: YTN; PAM sequence: TTA
gagtaaatgaaaagtagatt

SEQ ID NO: 357010 - DNA, 20 bp, Artificial Sequence
  Description of Artificial Sequence: Synthetic oligonucleotide
  Target: LAMA2; (+) strand; PAM type: YTN; PAM sequence: TTA
gaccaagcgcataagaacac

SEQ ID NO: 357011 - DNA, 20 bp, Artificial Sequence
  Description of Artificial Sequence: Synthetic oligonucleotide
  Target: LAMA2; (+) strand; PAM type: YTN; PAM sequence: CTG
tactgtgtcctcaacgggat

SEQ ID NO: 357012 - DNA, 20 bp, Artificial Sequence
  Description of Artificial Sequence: Synthetic oligonucleotide
  Target: LAMA2; (+) strand; PAM type: YTN; PAM sequence: CTG
tgtcctcaacgggataaact

SEQ ID NO: 357013 - DNA, 20 bp, Artificial Sequence
  Description of Artificial Sequence: Synthetic oligonucleotide
  Target: LAMA2; (+) strand; PAM type: YTN; PAM sequence: CTC
aacgggataaactaaatcat

SEQ ID NO: 357014 - DNA, 20 bp, Artificial Sequence
  Description of Artificial Sequence: Synthetic oligonucleotide
  Target: LAMA2; (+) strand; PAM type: YTN; PAM sequence: CTA
aatcataattacagatatgt

SEQ ID NO: 357015 - DNA, 20 bp, Artificial Sequence
  Description of Artificial Sequence: Synthetic oligonucleotide
  Target: LAMA2; (+) strand; PAM type: YTN; PAM sequence: TTA
cagatatgtttcatctttct

SEQ ID NO: 357016 - DNA, 20 bp, Artificial Sequence
  Description of Artificial Sequence: Synthetic oligonucleotide
  Target: LAMA2; (+) strand; PAM type: YTN; PAM sequence: TTT
catctttcttgcctttatac

SEQ ID NO: 357017 - DNA, 20 bp, Artificial Sequence
  Description of Artificial Sequence: Synthetic oligonucleotide
  Target: LAMA2; (+) strand; PAM type: YTN; PAM sequence: TTC
atctttcttgcctttatact

SEQ ID NO: 357018 - DNA, 20 bp, Artificial Sequence
  Description of Artificial Sequence: Synthetic oligonucleotide
  Target: LAMA2; (+) strand; PAM type: YTN; PAM sequence: CTT
tcttgcctttatactctttt

SEQ ID NO: 357019 - DNA, 20 bp, Artificial Sequence
  Description of Artificial Sequence: Synthetic oligonucleotide
  Target: LAMA2; (+) strand; PAM type: YTN; PAM sequence: TTT
cttgcctttatactcttttg

SEQ ID NO: 357020 - DNA, 20 bp, Artificial Sequence
  Description of Artificial Sequence: Synthetic oligonucleotide
  Target: LAMA2; (+) strand; PAM type: YTN; PAM sequence: TTC
ttgcctttatactcttttga

SEQ ID NO: 357021 - DNA, 20 bp, Artificial Sequence
  Description of Artificial Sequence: Synthetic oligonucleotide
  Target: LAMA2; (+) strand; PAM type: YTN; PAM sequence: CTT
gcctttatactcttttgaag

SEQ ID NO: 357022 - DNA, 20 bp, Artificial Sequence
  Description of Artificial Sequence: Synthetic oligonucleotide
  Target: LAMA2; (+) strand; PAM type: YTN; PAM sequence: TTG
cctttatactcttttgaaga

SEQ ID NO: 357023 - DNA, 20 bp, Artificial Sequence
  Description of Artificial Sequence: Synthetic oligonucleotide
  Target: LAMA2; (+) strand; PAM type: YTN; PAM sequence: CTT
tatactcttttgaagatgct

SEQ ID NO: 357024 - DNA, 20 bp, Artificial Sequence
  Description of Artificial Sequence: Synthetic oligonucleotide
  Target: LAMA2; (+) strand; PAM type: YTN; PAM sequence: TTT
atactcttttgaagatgctc

SEQ ID NO: 357025 - DNA, 20 bp, Artificial Sequence
  Description of Artificial Sequence: Synthetic oligonucleotide
  Target: LAMA2; (+) strand; PAM type: YTN; PAM sequence: TTA
tactcttttgaagatgctct

SEQ ID NO: 357026 - DNA, 20 bp, Artificial Sequence
  Description of Artificial Sequence: Synthetic oligonucleotide
  Target: LAMA2; (+) strand; PAM type: YTN; PAM sequence: CTC
ttttgaagatgctctcaact

SEQ ID NO: 357027 - DNA, 20 bp, Artificial Sequence
  Description of Artificial Sequence: Synthetic oligonucleotide
  Target: LAMA2; (+) strand; PAM type: YTN; PAM sequence: CTT
ttgaagatgctctcaacttc

SEQ ID NO: 357028 - DNA, 20 bp, Artificial Sequence
  Description of Artificial Sequence: Synthetic oligonucleotide
  Target: LAMA2; (+) strand; PAM type: YTN; PAM sequence: TTT
tgaagatgctctcaacttca

SEQ ID NO: 357029 - DNA, 20 bp, Artificial Sequence
  Description of Artificial Sequence: Synthetic oligonucleotide
  Target: LAMA2; (+) strand; PAM type: YTN; PAM sequence: TTT
gaagatgctctcaacttcag

SEQ ID NO: 357030 - DNA, 20 bp, Artificial Sequence
  Description of Artificial Sequence: Synthetic oligonucleotide
  Target: LAMA2; (+) strand; PAM type: YTN; PAM sequence: TTG
aagatgctctcaacttcagt

SEQ ID NO: 357031 - DNA, 20 bp, Artificial Sequence
  Description of Artificial Sequence: Synthetic oligonucleotide
  Target: LAMA2; (+) strand; PAM type: YTN; PAM sequence: CTC
tcaacttcagtgctttgggg

SEQ ID NO: 357032 - DNA, 20 bp, Artificial Sequence
  Description of Artificial Sequence: Synthetic oligonucleotide
  Target: LAMA2; (+) strand; PAM type: YTN; PAM sequence: CTC
aacttcagtgctttggggat

SEQ ID NO: 357033 - DNA, 20 bp, Artificial Sequence
  Description of Artificial Sequence: Synthetic oligonucleotide
  Target: LAMA2; (+) strand; PAM type: YTN; PAM sequence: CTT
cagtgctttggggatttatt

SEQ ID NO: 357034 - DNA, 20 bp, Artificial Sequence
  Description of Artificial Sequence: Synthetic oligonucleotide
  Target: LAMA2; (+) strand; PAM type: YTN; PAM sequence: TTC
agtgctttggggatttattt

SEQ ID NO: 357035 - DNA, 20 bp, Artificial Sequence
  Description of Artificial Sequence: Synthetic oligonucleotide
  Target: LAMA2; (+) strand; PAM type: YTN; PAM sequence: CTT
tggggatttatttgtcactg

SEQ ID NO: 357036 - DNA, 20 bp, Artificial Sequence
  Description of Artificial Sequence: Synthetic oligonucleotide
  Target: LAMA2; (+) strand; PAM type: YTN; PAM sequence: TTT
ggggatttatttgtcactgt

SEQ ID NO: 357037 - DNA, 20 bp, Artificial Sequence
  Description of Artificial Sequence: Synthetic oligonucleotide
  Target: LAMA2; (+) strand; PAM type: YTN; PAM sequence: TTG
gggatttatttgtcactgta

SEQ ID NO: 357038 - DNA, 20 bp, Artificial Sequence
  Description of Artificial Sequence: Synthetic oligonucleotide
  Target: LAMA2; (+) strand; PAM type: YTN; PAM sequence: TTT
atttgtcactgtaagtctga

SEQ ID NO: 357039 - DNA, 20 bp, Artificial Sequence
  Description of Artificial Sequence: Synthetic oligonucleotide
  Target: LAMA2; (+) strand; PAM type: YTN; PAM sequence: TTA
tttgtcactgtaagtctgaa

SEQ ID NO: 357040 - DNA, 20 bp, Artificial Sequence
  Description of Artificial Sequence: Synthetic oligonucleotide
  Target: LAMA2; (+) strand; PAM type: YTN; PAM sequence: TTT
gtcactgtaagtctgaaatt

SEQ ID NO: 357041 - DNA, 20 bp, Artificial Sequence
  Description of Artificial Sequence: Synthetic oligonucleotide
  Target: LAMA2; (+) strand; PAM type: YTN; PAM sequence: TTG
tcactgtaagtctgaaatta

SEQ ID NO: 357042 - DNA, 20 bp, Artificial Sequence
  Description of Artificial Sequence: Synthetic oligonucleotide
  Target: LAMA2; (+) strand; PAM type: YTN; PAM sequence: CTG
taagtctgaaattagtttga

SEQ ID NO: 357043 - DNA, 20 bp, Artificial Sequence
  Description of Artificial Sequence: Synthetic oligonucleotide
  Target: LAMA2; (+) strand; PAM type: YTN; PAM sequence: CTG
aaattagtttgattagtttt

SEQ ID NO: 357044 - DNA, 20 bp, Artificial Sequence
  Description of Artificial Sequence: Synthetic oligonucleotide
  Target: LAMA2; (+) strand; PAM type: YTN; PAM sequence: TTA
gtttgattagttttgctgat

SEQ ID NO: 357045 - DNA, 20 bp, Artificial Sequence
  Description of Artificial Sequence: Synthetic oligonucleotide
  Target: LAMA2; (+) strand; PAM type: YTN; PAM sequence: TTT
gattagttttgctgatatct

SEQ ID NO: 357046 - DNA, 20 bp, Artificial Sequence
  Description of Artificial Sequence: Synthetic oligonucleotide
  Target: LAMA2; (+) strand; PAM type: YTN; PAM sequence: TTG
attagttttgctgatatcta

SEQ ID NO: 357047 - DNA, 20 bp, Artificial Sequence
  Description of Artificial Sequence: Synthetic oligonucleotide
  Target: LAMA2; (+) strand; PAM type: YTN; PAM sequence: TTA
gttttgctgatatctatcat

SEQ ID NO: 357048 - DNA, 20 bp, Artificial Sequence
  Description of Artificial Sequence: Synthetic oligonucleotide
  Target: LAMA2; (+) strand; PAM type: YTN; PAM sequence: TTT
tgctgatatctatcatttca

SEQ ID NO: 357049 - DNA, 20 bp, Artificial Sequence
  Description of Artificial Sequence: Synthetic oligonucleotide
  Target: LAMA2; (+) strand; PAM type: YTN; PAM sequence: TTT
gctgatatctatcatttcaa

SEQ ID NO: 357050 - DNA, 20 bp, Artificial Sequence
  Description of Artificial Sequence: Synthetic oligonucleotide
  Target: LAMA2; (+) strand; PAM type: YTN; PAM sequence: TTG
ctgatatctatcatttcaaa

SEQ ID NO: 357051 - DNA, 20 bp, Artificial Sequence
  Description of Artificial Sequence: Synthetic oligonucleotide
  Target: LAMA2; (+) strand; PAM type: YTN; PAM sequence: CTG
atatctatcatttcaaaatg

SEQ ID NO: 357052 - DNA, 20 bp, Artificial Sequence
  Description of Artificial Sequence: Synthetic oligonucleotide
  Target: LAMA2; (+) strand; PAM type: YTN; PAM sequence: CTA
tcatttcaaaatgtctgaaa

SEQ ID NO: 357053 - DNA, 20 bp, Artificial Sequence
  Description of Artificial Sequence: Synthetic oligonucleotide
  Target: LAMA2; (+) strand; PAM type: YTN; PAM sequence: TTT
caaaatgtctgaaatctgcc

SEQ ID NO: 357054 - DNA, 20 bp, Artificial Sequence
  Description of Artificial Sequence: Synthetic oligonucleotide
  Target: LAMA2; (+) strand; PAM type: YTN; PAM sequence: TTC
aaaatgtctgaaatctgcct

SEQ ID NO: 357055 - DNA, 20 bp, Artificial Sequence
  Description of Artificial Sequence: Synthetic oligonucleotide
  Target: LAMA2; (+) strand; PAM type: YTN; PAM sequence: CTG
aaatctgccttaaaaagtaa

SEQ ID NO: 357056 - DNA, 20 bp, Artificial Sequence
  Description of Artificial Sequence: Synthetic oligonucleotide
  Target: LAMA2; (+) strand; PAM type: YTN; PAM sequence: CTG
ccttaaaaagtaagctggca

SEQ ID NO: 357057 - DNA, 20 bp, Artificial Sequence
  Description of Artificial Sequence: Synthetic oligonucleotide
  Target: LAMA2; (+) strand; PAM type: YTN; PAM sequence: CTT
aaaaagtaagctggcacaaa

SEQ ID NO: 357058 - DNA, 20 bp, Artificial Sequence
  Description of Artificial Sequence: Synthetic oligonucleotide
  Target: LAMA2; (+) strand; PAM type: YTN; PAM sequence: TTA
aaaagtaagctggcacaaat

SEQ ID NO: 357059 - DNA, 20 bp, Artificial Sequence
  Description of Artificial Sequence: Synthetic oligonucleotide
  Target: LAMA2; (+) strand; PAM type: YTN; PAM sequence: CTG
gcacaaatcttggggcagtg

SEQ ID NO: 357060 - DNA, 20 bp, Artificial Sequence
  Description of Artificial Sequence: Synthetic oligonucleotide
  Target: LAMA2; (+) strand; PAM type: YTN; PAM sequence: CTT
ggggcagtgcttattaaggt

SEQ ID NO: 357061 - DNA, 20 bp, Artificial Sequence
  Description of Artificial Sequence: Synthetic oligonucleotide
  Target: LAMA2; (+) strand; PAM type: YTN; PAM sequence: TTG
gggcagtgcttattaaggtt

SEQ ID NO: 357062 - DNA, 20 bp, Artificial Sequence
  Description of Artificial Sequence: Synthetic oligonucleotide
  Target: LAMA2; (+) strand; PAM type: YTN; PAM sequence: CTT
attaaggttcccacatagaa

SEQ ID NO: 357063 - DNA, 20 bp, Artificial Sequence
  Description of Artificial Sequence: Synthetic oligonucleotide
  Target: LAMA2; (+) strand; PAM type: YTN; PAM sequence: TTA
ttaaggttcccacatagaag

SEQ ID NO: 357064 - DNA, 20 bp, Artificial Sequence
  Description of Artificial Sequence: Synthetic oligonucleotide
  Target: LAMA2; (+) strand; PAM type: YTN; PAM sequence: TTA
aggttcccacatagaagtgg

SEQ ID NO: 357065 - DNA, 20 bp, Artificial Sequence
  Description of Artificial Sequence: Synthetic oligonucleotide
  Target: LAMA2; (+) strand; PAM type: YTN; PAM sequence: TTC
ccacatagaagtggctgagt

SEQ ID NO: 357066 - DNA, 20 bp, Artificial Sequence
  Description of Artificial Sequence: Synthetic oligonucleotide
  Target: LAMA2; (+) strand; PAM type: YTN; PAM sequence: CTG
agtttgtaaatgagtcatag

SEQ ID NO: 357067 - DNA, 20 bp, Artificial Sequence
  Description of Artificial Sequence: Synthetic oligonucleotide
  Target: LAMA2; (+) strand; PAM type: YTN; PAM sequence: TTT
gtaaatgagtcatagaaatt

SEQ ID NO: 357068 - DNA, 20 bp, Artificial Sequence
  Description of Artificial Sequence: Synthetic oligonucleotide
  Target: LAMA2; (+) strand; PAM type: YTN; PAM sequence: TTG
taaatgagtcatagaaattc

SEQ ID NO: 357069 - DNA, 20 bp, Artificial Sequence
  Description of Artificial Sequence: Synthetic oligonucleotide
  Target: LAMA2; (+) strand; PAM type: YTN; PAM sequence: TTC
agtatcaaaaagttaattta

SEQ ID NO: 357070 - DNA, 20 bp, Artificial Sequence
  Description of Artificial Sequence: Synthetic oligonucleotide
  Target: LAMA2; (+) strand; PAM type: YTN; PAM sequence: TTA
atttaaaacaaattattctc

SEQ ID NO: 357071 - DNA, 20 bp, Artificial Sequence
  Description of Artificial Sequence: Synthetic oligonucleotide
  Target: LAMA2; (+) strand; PAM type: YTN; PAM sequence: TTT
aaaacaaattattctcttgg

SEQ ID NO: 357072 - DNA, 20 bp, Artificial Sequence
  Description of Artificial Sequence: Synthetic oligonucleotide
  Target: LAMA2; (+) strand; PAM type: YTN; PAM sequence: TTA
aaacaaattattctcttgga

SEQ ID NO: 357073 - DNA, 20 bp, Artificial Sequence
  Description of Artificial Sequence: Synthetic oligonucleotide
  Target: LAMA2; (+) strand; PAM type: YTN; PAM sequence: TTA
ttctcttggatataaggagg

SEQ ID NO: 357074 - DNA, 20 bp, Artificial Sequence
  Description of Artificial Sequence: Synthetic oligonucleotide
  Target: LAMA2; (+) strand; PAM type: YTN; PAM sequence: TTC
tcttggatataaggaggact

SEQ ID NO: 357075 - DNA, 20 bp, Artificial Sequence
  Description of Artificial Sequence: Synthetic oligonucleotide
  Target: LAMA2; (+) strand; PAM type: YTN; PAM sequence: CTC
ttggatataaggaggactgc

SEQ ID NO: 357076 - DNA, 20 bp, Artificial Sequence
  Description of Artificial Sequence: Synthetic oligonucleotide
  Target: LAMA2; (+) strand; PAM type: YTN; PAM sequence: CTT
ggatataaggaggactgctt

SEQ ID NO: 357077 - DNA, 20 bp, Artificial Sequence
  Description of Artificial Sequence: Synthetic oligonucleotide
  Target: LAMA2; (+) strand; PAM type: YTN; PAM sequence: TTG
gatataaggaggactgcttt

SEQ ID NO: 357078 - DNA, 20 bp, Artificial Sequence
  Description of Artificial Sequence: Synthetic oligonucleotide
  Target: LAMA2; (+) strand; PAM type: YTN; PAM sequence: CTG
ctttgtttattcttaaattt

SEQ ID NO: 357079 - DNA, 20 bp, Artificial Sequence
  Description of Artificial Sequence: Synthetic oligonucleotide
  Target: LAMA2; (+) strand; PAM type: YTN; PAM sequence: CTT
tgtttattcttaaatttttc

SEQ ID NO: 357080 - DNA, 20 bp, Artificial Sequence
  Description of Artificial Sequence: Synthetic oligonucleotide
  Target: LAMA2; (+) strand; PAM type: YTN; PAM sequence: TTT
gtttattcttaaatttttct

SEQ ID NO: 357081 - DNA, 20 bp, Artificial Sequence
  Description of Artificial Sequence: Synthetic oligonucleotide
  Target: LAMA2; (+) strand; PAM type: YTN; PAM sequence: TTG
tttattcttaaatttttctc

SEQ ID NO: 357082 - DNA, 20 bp, Artificial Sequence
  Description of Artificial Sequence: Synthetic oligonucleotide
  Target: LAMA2; (+) strand; PAM type: YTN; PAM sequence: TTT
attcttaaatttttctcctt

SEQ ID NO: 357083 - DNA, 20 bp, Artificial Sequence
  Description of Artificial Sequence: Synthetic oligonucleotide
  Target: LAMA2; (+) strand; PAM type: YTN; PAM sequence: TTA
ttcttaaatttttctcctta

SEQ ID NO: 357084 - DNA, 20 bp, Artificial Sequence
  Description of Artificial Sequence: Synthetic oligonucleotide
  Target: LAMA2; (+) strand; PAM type: YTN; PAM sequence: TTC
ttaaatttttctccttactt

SEQ ID NO: 357085 - DNA, 20 bp, Artificial Sequence
  Description of Artificial Sequence: Synthetic oligonucleotide
  Target: LAMA2; (+) strand; PAM type: YTN; PAM sequence: CTT
aaatttttctccttacttct

SEQ ID NO: 357086 - DNA, 20 bp, Artificial Sequence
  Description of Artificial Sequence: Synthetic oligonucleotide
  Target: LAMA2; (+) strand; PAM type: YTN; PAM sequence: TTA
aatttttctccttacttctt

SEQ ID NO: 357087 - DNA, 20 bp, Artificial Sequence
  Description of Artificial Sequence: Synthetic oligonucleotide
  Target: LAMA2; (+) strand; PAM type: YTN; PAM sequence: TTT
ttctccttacttcttcatgc

SEQ ID NO: 357088 - DNA, 20 bp, Artificial Sequence
  Description of Artificial Sequence: Synthetic oligonucleotide
  Target: LAMA2; (+) strand; PAM type: YTN; PAM sequence: TTT
tctccttacttcttcatgct

SEQ ID NO: 357089 - DNA, 20 bp, Artificial Sequence
  Description of Artificial Sequence: Synthetic oligonucleotide
  Target: LAMA2; (+) strand; PAM type: YTN; PAM sequence: TTT
ctccttacttcttcatgcta

SEQ ID NO: 357090 - DNA, 20 bp, Artificial Sequence
  Description of Artificial Sequence: Synthetic oligonucleotide
  Target: LAMA2; (+) strand; PAM type: YTN; PAM sequence: TTC
tccttacttcttcatgctat

SEQ ID NO: 357091 - DNA, 20 bp, Artificial Sequence
  Description of Artificial Sequence: Synthetic oligonucleotide
  Target: LAMA2; (+) strand; PAM type: YTN; PAM sequence: CTC
cttacttcttcatgctattt

SEQ ID NO: 357092 - DNA, 20 bp, Artificial Sequence
  Description of Artificial Sequence: Synthetic oligonucleotide
  Target: LAMA2; (+) strand; PAM type: YTN; PAM sequence: CTT
acttcttcatgctatttttc

SEQ ID NO: 357093 - DNA, 20 bp, Artificial Sequence
  Description of Artificial Sequence: Synthetic oligonucleotide
  Target: LAMA2; (+) strand; PAM type: YTN; PAM sequence: TTA
cttcttcatgctatttttct

SEQ ID NO: 357094 - DNA, 20 bp, Artificial Sequence
  Description of Artificial Sequence: Synthetic oligonucleotide
  Target: LAMA2; (+) strand; PAM type: YTN; PAM sequence: CTT
cttcatgctatttttctctt

SEQ ID NO: 357095 - DNA, 20 bp, Artificial Sequence
  Description of Artificial Sequence: Synthetic oligonucleotide
  Target: LAMA2; (+) strand; PAM type: YTN; PAM sequence: TTC
ttcatgctatttttctcttc

SEQ ID NO: 357096 - DNA, 20 bp, Artificial Sequence
  Description of Artificial Sequence: Synthetic oligonucleotide
  Target: LAMA2; (+) strand; PAM type: YTN; PAM sequence: CTT
catgctatttttctcttctc

SEQ ID NO: 357097 - DNA, 20 bp, Artificial Sequence
  Description of Artificial Sequence: Synthetic oligonucleotide
  Target: LAMA2; (+) strand; PAM type: YTN; PAM sequence: TTC
atgctatttttctcttctct

SEQ ID NO: 357098 - DNA, 20 bp, Artificial Sequence
  Description of Artificial Sequence: Synthetic oligonucleotide
  Target: LAMA2; (+) strand; PAM type: YTN; PAM sequence: CTA
tttttctcttctcttctgat

SEQ ID NO: 357099 - DNA, 20 bp, Artificial Sequence
  Description of Artificial Sequence: Synthetic oligonucleotide
  Target: LAMA2; (+) strand; PAM type: YTN; PAM sequence: TTT
ttctcttctcttctgatttt

SEQ ID NO: 357100 - DNA, 20 bp, Artificial Sequence
  Description of Artificial Sequence: Synthetic oligonucleotide
  Target: LAMA2; (+) strand; PAM type: YTN; PAM sequence: TTT
tctcttctcttctgattttc

SEQ ID NO: 357101 - DNA, 20 bp, Artificial Sequence
  Description of Artificial Sequence: Synthetic oligonucleotide
  Target: LAMA2; (+) strand; PAM type: YTN; PAM sequence: TTT
ctcttctcttctgattttcc

SEQ ID NO: 357102 - DNA, 20 bp, Artificial Sequence
  Description of Artificial Sequence: Synthetic oligonucleotide
  Target: LAMA2; (+) strand; PAM type: YTN; PAM sequence: TTC
tcttctcttctgattttcct

SEQ ID NO: 357103 - DNA, 20 bp, Artificial Sequence
  Description of Artificial Sequence: Synthetic oligonucleotide
  Target: LAMA2; (+) strand; PAM type: YTN; PAM sequence: CTC
ttctcttctgattttcctta

SEQ ID NO: 357104 - DNA, 20 bp, Artificial Sequence
  Description of Artificial Sequence: Synthetic oligonucleotide
  Target: LAMA2; (+) strand; PAM type: YTN; PAM sequence: CTT
ctcttctgattttccttata

SEQ ID NO: 357105 - DNA, 20 bp, Artificial Sequence
  Description of Artificial Sequence: Synthetic oligonucleotide
  Target: LAMA2; (+) strand; PAM type: YTN; PAM sequence: TTC
tcttctgattttccttatat

SEQ ID NO: 357106 - DNA, 20 bp, Artificial Sequence
  Description of Artificial Sequence: Synthetic oligonucleotide
  Target: LAMA2; (+) strand; PAM type: YTN; PAM sequence: CTC
ttctgattttccttatatgt

SEQ ID NO: 357107 - DNA, 20 bp, Artificial Sequence
  Description of Artificial Sequence: Synthetic oligonucleotide
  Target: LAMA2; (+) strand; PAM type: YTN; PAM sequence: CTT
ctgattttccttatatgttc

SEQ ID NO: 357108 - DNA, 20 bp, Artificial Sequence
  Description of Artificial Sequence: Synthetic oligonucleotide
  Target: LAMA2; (+) strand; PAM type: YTN; PAM sequence: TTC
tgattttccttatatgttct

SEQ ID NO: 357109 - DNA, 20 bp, Artificial Sequence
  Description of Artificial Sequence: Synthetic oligonucleotide
  Target: LAMA2; (+) strand; PAM type: YTN; PAM sequence: CTG
attttccttatatgttctca

SEQ ID NO: 357110 - DNA, 20 bp, Artificial Sequence
  Description of Artificial Sequence: Synthetic oligonucleotide
  Target: LAMA2; (+) strand; PAM type: YTN; PAM sequence: TTT
tccttatatgttctcagatt

SEQ ID NO: 357111 - DNA, 20 bp, Artificial Sequence
  Description of Artificial Sequence: Synthetic oligonucleotide
  Target: LAMA2; (+) strand; PAM type: YTN; PAM sequence: TTT
ccttatatgttctcagattt

SEQ ID NO: 357112 - DNA, 20 bp, Artificial Sequence
  Description of Artificial Sequence: Synthetic oligonucleotide
  Target: LAMA2; (+) strand; PAM type: YTN; PAM sequence: TTC
cttatatgttctcagatttt

SEQ ID NO: 357113 - DNA, 20 bp, Artificial Sequence
  Description of Artificial Sequence: Synthetic oligonucleotide
  Target: LAMA2; (+) strand; PAM type: YTN; PAM sequence: CTT
atatgttctcagattttatc

SEQ ID NO: 357114 - DNA, 20 bp, Artificial Sequence
  Description of Artificial Sequence: Synthetic oligonucleotide
  Target: LAMA2; (+) strand; PAM type: YTN; PAM sequence: TTA
tatgttctcagattttatca

SEQ ID NO: 357115 - DNA, 20 bp, Artificial Sequence
  Description of Artificial Sequence: Synthetic oligonucleotide
  Target: LAMA2; (+) strand; PAM type: YTN; PAM sequence: TTC
tcagattttatcatccctat

SEQ ID NO: 357116 - DNA, 20 bp, Artificial Sequence
  Description of Artificial Sequence: Synthetic oligonucleotide
  Target: LAMA2; (+) strand; PAM type: YTN; PAM sequence: CTC
agattttatcatccctatct

SEQ ID NO: 357117 - DNA, 20 bp, Artificial Sequence
  Description of Artificial Sequence: Synthetic oligonucleotide
  Target: LAMA2; (+) strand; PAM type: YTN; PAM sequence: TTT
tatcatccctatcttctgct

SEQ ID NO: 357118 - DNA, 20 bp, Artificial Sequence
  Description of Artificial Sequence: Synthetic oligonucleotide
  Target: LAMA2; (+) strand; PAM type: YTN; PAM sequence: TTT
atcatccctatcttctgctc

SEQ ID NO: 357119 - DNA, 20 bp, Artificial Sequence
  Description of Artificial Sequence: Synthetic oligonucleotide
  Target: LAMA2; (+) strand; PAM type: YTN; PAM sequence: TTA
tcatccctatcttctgctca

SEQ ID NO: 357120 - DNA, 20 bp, Artificial Sequence
  Description of Artificial Sequence: Synthetic oligonucleotide
  Target: LAMA2; (+) strand; PAM type: YTN; PAM sequence: CTA
tcttctgctcaatctgggtt

SEQ ID NO: 357121 - DNA, 20 bp, Artificial Sequence
  Description of Artificial Sequence: Synthetic oligonucleotide
  Target: LAMA2; (+) strand; PAM type: YTN; PAM sequence: CTT
ctgctcaatctgggtttgtt

SEQ ID NO: 357122 - DNA, 20 bp, Artificial Sequence
  Description of Artificial Sequence: Synthetic oligonucleotide
  Target: LAMA2; (+) strand; PAM type: YTN; PAM sequence: TTC
tgctcaatctgggtttgttt

SEQ ID NO: 357123 - DNA, 20 bp, Artificial Sequence
  Description of Artificial Sequence: Synthetic oligonucleotide
  Target: LAMA2; (+) strand; PAM type: YTN; PAM sequence: CTG
ctcaatctgggtttgtttaa

SEQ ID NO: 357124 - DNA, 20 bp, Artificial Sequence
  Description of Artificial Sequence: Synthetic oligonucleotide
  Target: LAMA2; (+) strand; PAM type: YTN; PAM sequence: CTC
aatctgggtttgtttaaagt

SEQ ID NO: 357125 - DNA, 20 bp, Artificial Sequence
  Description of Artificial Sequence: Synthetic oligonucleotide
  Target: LAMA2; (+) strand; PAM type: YTN; PAM sequence: CTG
ggtttgtttaaagtgttttt

SEQ ID NO: 357126 - DNA, 20 bp, Artificial Sequence
  Description of Artificial Sequence: Synthetic oligonucleotide
  Target: LAMA2; (+) strand; PAM type: YTN; PAM sequence: TTT
gtttaaagtgtttttattca

SEQ ID NO: 357127 - DNA, 20 bp, Artificial Sequence
  Description of Artificial Sequence: Synthetic oligonucleotide
  Target: LAMA2; (+) strand; PAM type: YTN; PAM sequence: TTG
tttaaagtgtttttattcag

SEQ ID NO: 357128 - DNA, 20 bp, Artificial Sequence
  Description of Artificial Sequence: Synthetic oligonucleotide
  Target: LAMA2; (+) strand; PAM type: YTN; PAM sequence: TTT
aaagtgtttttattcagctc

SEQ ID NO: 357129 - DNA, 20 bp, Artificial Sequence
  Description of Artificial Sequence: Synthetic oligonucleotide
  Target: LAMA2; (+) strand; PAM type: YTN; PAM sequence: TTA
aagtgtttttattcagctcg

SEQ ID NO: 357130 - DNA, 20 bp, Artificial Sequence
  Description of Artificial Sequence: Synthetic oligonucleotide
  Target: LAMA2; (+) strand; PAM type: YTN; PAM sequence: TTT
ttattcagctcgtactatgc

SEQ ID NO: 357131 - DNA, 20 bp, Artificial Sequence
  Description of Artificial Sequence: Synthetic oligonucleotide
  Target: LAMA2; (+) strand; PAM type: YTN; PAM sequence: TTT
tattcagctcgtactatgcg

SEQ ID NO: 357132 - DNA, 20 bp, Artificial Sequence
  Description of Artificial Sequence: Synthetic oligonucleotide
  Target: LAMA2; (+) strand; PAM type: YTN; PAM sequence: TTT
attcagctcgtactatgcgt

SEQ ID NO: 357133 - DNA, 20 bp, Artificial Sequence
  Description of Artificial Sequence: Synthetic oligonucleotide
  Target: LAMA2; (+) strand; PAM type: YTN; PAM sequence: TTA
ttcagctcgtactatgcgta

SEQ ID NO: 357134 - DNA, 20 bp, Artificial Sequence
  Description of Artificial Sequence: Synthetic oligonucleotide
  Target: LAMA2; (+) strand; PAM type: YTN; PAM sequence: TTC
agctcgtactatgcgtatag

SEQ ID NO: 357135 - DNA, 20 bp, Artificial Sequence
  Description of Artificial Sequence: Synthetic oligonucleotide
  Target: LAMA2; (+) strand; PAM type: YTN; PAM sequence: CTC
gtactatgcgtatagcactt

SEQ ID NO: 357136 - DNA, 20 bp, Artificial Sequence
  Description of Artificial Sequence: Synthetic oligonucleotide
  Target: LAMA2; (+) strand; PAM type: YTN; PAM sequence: CTA
tgcgtatagcactttgctat

SEQ ID NO: 357137 - DNA, 20 bp, Artificial Sequence
  Description of Artificial Sequence: Synthetic oligonucleotide
  Target: LAMA2; (+) strand; PAM type: YTN; PAM sequence: CTT
tgctatgcatgaaaaacatg

SEQ ID NO: 357138 - DNA, 20 bp, Artificial Sequence
  Description of Artificial Sequence: Synthetic oligonucleotide
  Target: LAMA2; (+) strand; PAM type: YTN; PAM sequence: TTT
gctatgcatgaaaaacatga

SEQ ID NO: 357139 - DNA, 20 bp, Artificial Sequence
  Description of Artificial Sequence: Synthetic oligonucleotide
  Target: LAMA2; (+) strand; PAM type: YTN; PAM sequence: TTG
ctatgcatgaaaaacatgac

SEQ ID NO: 357140 - DNA, 20 bp, Artificial Sequence
  Description of Artificial Sequence: Synthetic oligonucleotide
  Target: LAMA2; (+) strand; PAM type: YTN; PAM sequence: CTA
tgcatgaaaaacatgactgc

SEQ ID NO: 357141 - DNA, 20 bp, Artificial Sequence
  Description of Artificial Sequence: Synthetic oligonucleotide
  Target: LAMA2; (+) strand; PAM type: YTN; PAM sequence: CTG
ccaagagatttatttgaact

SEQ ID NO: 357142 - DNA, 20 bp, Artificial Sequence
  Description of Artificial Sequence: Synthetic oligonucleotide
  Target: LAMA2; (+) strand; PAM type: YTN; PAM sequence: TTT
atttgaacttaataaatttt

SEQ ID NO: 357143 - DNA, 20 bp, Artificial Sequence
  Description of Artificial Sequence: Synthetic oligonucleotide
  Target: LAMA2; (+) strand; PAM type: YTN; PAM sequence: TTA
tttgaacttaataaatttta

SEQ ID NO: 357144 - DNA, 20 bp, Artificial Sequence
  Description of Artificial Sequence: Synthetic oligonucleotide
  Target: LAMA2; (+) strand; PAM type: YTN; PAM sequence: TTT
gaacttaataaattttatga

SEQ ID NO: 357145 - DNA, 20 bp, Artificial Sequence
  Description of Artificial Sequence: Synthetic oligonucleotide
  Target: LAMA2; (+) strand; PAM type: YTN; PAM sequence: TTG
aacttaataaattttatgaa

SEQ ID NO: 357146 - DNA, 20 bp, Artificial Sequence
  Description of Artificial Sequence: Synthetic oligonucleotide
  Target: LAMA2; (+) strand; PAM type: YTN; PAM sequence: CTT
aataaattttatgaagctaa

SEQ ID NO: 357147 - DNA, 20 bp, Artificial Sequence
  Description of Artificial Sequence: Synthetic oligonucleotide
  Target: LAMA2; (+) strand; PAM type: YTN; PAM sequence: TTA
ataaattttatgaagctaat

SEQ ID NO: 357148 - DNA, 20 bp, Artificial Sequence
  Description of Artificial Sequence: Synthetic oligonucleotide
  Target: LAMA2; (+) strand; PAM type: YTN; PAM sequence: TTT
tatgaagctaatgctcagtg

SEQ ID NO: 357149 - DNA, 20 bp, Artificial Sequence
  Description of Artificial Sequence: Synthetic oligonucleotide
  Target: LAMA2; (+) strand; PAM type: YTN; PAM sequence: TTT
atgaagctaatgctcagtgc

SEQ ID NO: 357150 - DNA, 20 bp, Artificial Sequence
  Description of Artificial Sequence: Synthetic oligonucleotide
  Target: LAMA2; (+) strand; PAM type: YTN; PAM sequence: TTA
tgaagctaatgctcagtgct

SEQ ID NO: 357151 - DNA, 20 bp, Artificial Sequence
  Description of Artificial Sequence: Synthetic oligonucleotide
  Target: LAMA2; (+) strand; PAM type: YTN; PAM sequence: CTA
atgctcagtgctgtaccagg

SEQ ID NO: 357152 - DNA, 20 bp, Artificial Sequence
  Description of Artificial Sequence: Synthetic oligonucleotide
  Target: LAMA2; (+) strand; PAM type: YTN; PAM sequence: CTC
agtgctgtaccaggaaccat

SEQ ID NO: 357153 - DNA, 20 bp, Artificial Sequence
  Description of Artificial Sequence: Synthetic oligonucleotide
  Target: LAMA2; (+) strand; PAM type: YTN; PAM sequence: CTG
taccaggaaccatgttattt

SEQ ID NO: 357154 - DNA, 20 bp, Artificial Sequence
  Description of Artificial Sequence: Synthetic oligonucleotide
  Target: LAMA2; (+) strand; PAM type: YTN; PAM sequence: TTA
ttttctcagactataaagtt

SEQ ID NO: 357155 - DNA, 20 bp, Artificial Sequence
  Description of Artificial Sequence: Synthetic oligonucleotide
  Target: LAMA2; (+) strand; PAM type: YTN; PAM sequence: TTT
tctcagactataaagttagt

SEQ ID NO: 357156 - DNA, 20 bp, Artificial Sequence
  Description of Artificial Sequence: Synthetic oligonucleotide
  Target: LAMA2; (+) strand; PAM type: YTN; PAM sequence: TTT
ctcagactataaagttagta

SEQ ID NO: 357157 - DNA, 20 bp, Artificial Sequence
  Description of Artificial Sequence: Synthetic oligonucleotide
  Target: LAMA2; (+) strand; PAM type: YTN; PAM sequence: TTC
tcagactataaagttagtaa

SEQ ID NO: 357158 - DNA, 20 bp, Artificial Sequence
  Description of Artificial Sequence: Synthetic oligonucleotide
  Target: LAMA2; (+) strand; PAM type: YTN; PAM sequence: CTC
agactataaagttagtaaga

SEQ ID NO: 357159 - DNA, 20 bp, Artificial Sequence
  Description of Artificial Sequence: Synthetic oligonucleotide
  Target: LAMA2; (+) strand; PAM type: YTN; PAM sequence: CTA
taaagttagtaagacagaat

SEQ ID NO: 357160 - DNA, 20 bp, Artificial Sequence
  Description of Artificial Sequence: Synthetic oligonucleotide
  Target: LAMA2; (+) strand; PAM type: YTN; PAM sequence: TTA
gtaagacagaatttctacct

SEQ ID NO: 357161 - DNA, 20 bp, Artificial Sequence
  Description of Artificial Sequence: Synthetic oligonucleotide
  Target: LAMA2; (+) strand; PAM type: YTN; PAM sequence: TTT
ctacctctgaatagattatg

SEQ ID NO: 357162 - DNA, 20 bp, Artificial Sequence
  Description of Artificial Sequence: Synthetic oligonucleotide
  Target: LAMA2; (+) strand; PAM type: YTN; PAM sequence: TTC
tacctctgaatagattatgg

SEQ ID NO: 357163 - DNA, 20 bp, Artificial Sequence
  Description of Artificial Sequence: Synthetic oligonucleotide
  Target: LAMA2; (+) strand; PAM type: YTN; PAM sequence: CTA
cctctgaatagattatggta

SEQ ID NO: 357164 - DNA, 20 bp, Artificial Sequence
  Description of Artificial Sequence: Synthetic oligonucleotide
  Target: LAMA2; (+) strand; PAM type: YTN; PAM sequence: CTC
tgaatagattatggtagata

SEQ ID NO: 357165 - DNA, 20 bp, Artificial Sequence
  Description of Artificial Sequence: Synthetic oligonucleotide
  Target: LAMA2; (+) strand; PAM type: YTN; PAM sequence: CTG
aatagattatggtagatagc

SEQ ID NO: 357166 - DNA, 20 bp, Artificial Sequence
  Description of Artificial Sequence: Synthetic oligonucleotide
  Target: LAMA2; (+) strand; PAM type: YTN; PAM sequence: TTA
tggtagatagctagagagaa

SEQ ID NO: 357167 - DNA, 20 bp, Artificial Sequence
  Description of Artificial Sequence: Synthetic oligonucleotide
  Target: LAMA2; (+) strand; PAM type: YTN; PAM sequence: CTA
gagagaacaatctttgagca

SEQ ID NO: 357168 - DNA, 20 bp, Artificial Sequence
  Description of Artificial Sequence: Synthetic oligonucleotide
  Target: LAMA2; (+) strand; PAM type: YTN; PAM sequence: CTT
tgagcaatacttttttgtgg

SEQ ID NO: 357169 - DNA, 20 bp, Artificial Sequence
  Description of Artificial Sequence: Synthetic oligonucleotide
  Target: LAMA2; (+) strand; PAM type: YTN; PAM sequence: TTT
gagcaatacttttttgtggt

SEQ ID NO: 357170 - DNA, 20 bp, Artificial Sequence
  Description of Artificial Sequence: Synthetic oligonucleotide
  Target: LAMA2; (+) strand; PAM type: YTN; PAM sequence: TTG
agcaatacttttttgtggtt

SEQ ID NO: 357171 - DNA, 20 bp, Artificial Sequence
  Description of Artificial Sequence: Synthetic oligonucleotide
  Target: LAMA2; (+) strand; PAM type: YTN; PAM sequence: CTT
ttttgtggttgtgatagggt

SEQ ID NO: 357172 - DNA, 20 bp, Artificial Sequence
  Description of Artificial Sequence: Synthetic oligonucleotide
  Target: LAMA2; (+) strand; PAM type: YTN; PAM sequence: TTT
tttgtggttgtgatagggta

SEQ ID NO: 357173 - DNA, 20 bp, Artificial Sequence
  Description of Artificial Sequence: Synthetic oligonucleotide
  Target: LAMA2; (+) strand; PAM type: YTN; PAM sequence: TTT
ttgtggttgtgatagggtaa

SEQ ID NO: 357174 - DNA, 20 bp, Artificial Sequence
  Description of Artificial Sequence: Synthetic oligonucleotide
  Target: LAMA2; (+) strand; PAM type: YTN; PAM sequence: TTT
tgtggttgtgatagggtaat

SEQ ID NO: 357175 - DNA, 20 bp, Artificial Sequence
  Description of Artificial Sequence: Synthetic oligonucleotide
  Target: LAMA2; (+) strand; PAM type: YTN; PAM sequence: TTT
gtggttgtgatagggtaatg

SEQ ID NO: 357176 - DNA, 20 bp, Artificial Sequence
  Description of Artificial Sequence: Synthetic oligonucleotide
  Target: LAMA2; (+) strand; PAM type: YTN; PAM sequence: TTG
tggttgtgatagggtaatgt

SEQ ID NO: 357177 - DNA, 20 bp, Artificial Sequence
  Description of Artificial Sequence: Synthetic oligonucleotide
  Target: LAMA2; (+) strand; PAM type: YTN; PAM sequence: TTG
tgatagggtaatgtatacag

SEQ ID NO: 357178 - DNA, 20 bp, Artificial Sequence
  Description of Artificial Sequence: Synthetic oligonucleotide
  Target: LAMA2; (+) strand; PAM type: YTN; PAM sequence: CTA
catggagagagaagttagtt

SEQ ID NO: 357179 - DNA, 20 bp, Artificial Sequence
  Description of Artificial Sequence: Synthetic oligonucleotide
  Target: LAMA2; (+) strand; PAM type: YTN; PAM sequence: TTA
gttgtccaagggaatttttt

SEQ ID NO: 357180 - DNA, 20 bp, Artificial Sequence
  Description of Artificial Sequence: Synthetic oligonucleotide
  Target: LAMA2; (+) strand; PAM type: YTN; PAM sequence: TTG
tccaagggaattttttaaaa

SEQ ID NO: 357181 - DNA, 20 bp, Artificial Sequence
  Description of Artificial Sequence: Synthetic oligonucleotide
  Target: LAMA2; (+) strand; PAM type: YTN; PAM sequence: TTT
tttaaaaagcctcagtattg

SEQ ID NO: 357182 - DNA, 20 bp, Artificial Sequence
  Description of Artificial Sequence: Synthetic oligonucleotide
  Target: LAMA2; (+) strand; PAM type: YTN; PAM sequence: TTT
ttaaaaagcctcagtattga

SEQ ID NO: 357183 - DNA, 20 bp, Artificial Sequence
  Description of Artificial Sequence: Synthetic oligonucleotide
  Target: LAMA2; (+) strand; PAM type: YTN; PAM sequence: TTT
taaaaagcctcagtattgat

SEQ ID NO: 357184 - DNA, 20 bp, Artificial Sequence
  Description of Artificial Sequence: Synthetic oligonucleotide
  Target: LAMA2; (+) strand; PAM type: YTN; PAM sequence: TTT
aaaaagcctcagtattgata

SEQ ID NO: 357185 - DNA, 20 bp, Artificial Sequence
  Description of Artificial Sequence: Synthetic oligonucleotide
  Target: LAMA2; (+) strand; PAM type: YTN; PAM sequence: TTA
aaaagcctcagtattgataa

SEQ ID NO: 357186 - DNA, 20 bp, Artificial Sequence
  Description of Artificial Sequence: Synthetic oligonucleotide
  Target: LAMA2; (+) strand; PAM type: YTN; PAM sequence: CTC
agtattgataataagggaat

SEQ ID NO: 357187 - DNA, 20 bp, Artificial Sequence
  Description of Artificial Sequence: Synthetic oligonucleotide
  Target: LAMA2; (+) strand; PAM type: YTN; PAM sequence: TTG
ataataagggaattcaagga

SEQ ID NO: 357188 - DNA, 20 bp, Artificial Sequence
  Description of Artificial Sequence: Synthetic oligonucleotide
  Target: LAMA2; (+) strand; PAM type: YTN; PAM sequence: TTC
aaggaagaggggaaatgtag

SEQ ID NO: 357189 - DNA, 20 bp, Artificial Sequence
  Description of Artificial Sequence: Synthetic oligonucleotide
  Target: LAMA2; (+) strand; PAM type: YTN; PAM sequence: TTA
caaatctgtttcctggaaag

SEQ ID NO: 357190 - DNA, 20 bp, Artificial Sequence
  Description of Artificial Sequence: Synthetic oligonucleotide
  Target: LAMA2; (+) strand; PAM type: YTN; PAM sequence: CTG
tttcctggaaagcaggatgc

SEQ ID NO: 357191 - DNA, 20 bp, Artificial Sequence
  Description of Artificial Sequence: Synthetic oligonucleotide
  Target: LAMA2; (+) strand; PAM type: YTN; PAM sequence: TTT
cctggaaagcaggatgcctt

SEQ ID NO: 357192 - DNA, 20 bp, Artificial Sequence
  Description of Artificial Sequence: Synthetic oligonucleotide
  Target: LAMA2; (+) strand; PAM type: YTN; PAM sequence: TTC
ctggaaagcaggatgccttc

SEQ ID NO: 357193 - DNA, 20 bp, Artificial Sequence
  Description of Artificial Sequence: Synthetic oligonucleotide
  Target: LAMA2; (+) strand; PAM type: YTN; PAM sequence: CTG
gaaagcaggatgccttcctt

SEQ ID NO: 357194 - DNA, 20 bp, Artificial Sequence
  Description of Artificial Sequence: Synthetic oligonucleotide
  Target: LAMA2; (+) strand; PAM type: YTN; PAM sequence: CTT
cctttagaattattagttaa

SEQ ID NO: 357195 - DNA, 20 bp, Artificial Sequence
  Description of Artificial Sequence: Synthetic oligonucleotide
  Target: LAMA2; (+) strand; PAM type: YTN; PAM sequence: TTC
ctttagaattattagttaag

SEQ ID NO: 357196 - DNA, 20 bp, Artificial Sequence
  Description of Artificial Sequence: Synthetic oligonucleotide
  Target: LAMA2; (+) strand; PAM type: YTN; PAM sequence: CTT
tagaattattagttaagatt

SEQ ID NO: 357197 - DNA, 20 bp, Artificial Sequence
  Description of Artificial Sequence: Synthetic oligonucleotide
  Target: LAMA2; (+) strand; PAM type: YTN; PAM sequence: TTT
agaattattagttaagatta

SEQ ID NO: 357198 - DNA, 20 bp, Artificial Sequence
  Description of Artificial Sequence: Synthetic oligonucleotide
  Target: LAMA2; (+) strand; PAM type: YTN; PAM sequence: TTA
gaattattagttaagattaa

SEQ ID NO: 357199 - DNA, 20 bp, Artificial Sequence
  Description of Artificial Sequence: Synthetic oligonucleotide
  Target: LAMA2; (+) strand; PAM type: YTN; PAM sequence: TTA
ttagttaagattaaccactc

SEQ ID NO: 357200 - DNA, 20 bp, Artificial Sequence
  Description of Artificial Sequence: Synthetic oligonucleotide
  Target: LAMA2; (+) strand; PAM type: YTN; PAM sequence: TTA
gttaagattaaccactcttt

SEQ ID NO: 357201 - DNA, 20 bp, Artificial Sequence
  Description of Artificial Sequence: Synthetic oligonucleotide
  Target: LAMA2; (+) strand; PAM type: YTN; PAM sequence: TTA
agattaaccactctttaaat

SEQ ID NO: 357202 - DNA, 20 bp, Artificial Sequence
  Description of Artificial Sequence: Synthetic oligonucleotide
  Target: LAMA2; (+) strand; PAM type: YTN; PAM sequence: TTA
accactctttaaattgagag

SEQ ID NO: 357203 - DNA, 20 bp, Artificial Sequence
  Description of Artificial Sequence: Synthetic oligonucleotide
  Target: LAMA2; (+) strand; PAM type: YTN; PAM sequence: CTC
tttaaattgagagattatat

SEQ ID NO: 357204 - DNA, 20 bp, Artificial Sequence
  Description of Artificial Sequence: Synthetic oligonucleotide
  Target: LAMA2; (+) strand; PAM type: YTN; PAM sequence: CTT
taaattgagagattatatcc

SEQ ID NO: 357205 - DNA, 20 bp, Artificial Sequence
  Description of Artificial Sequence: Synthetic oligonucleotide
  Target: LAMA2; (+) strand; PAM type: YTN; PAM sequence: TTT
aaattgagagattatatcct

SEQ ID NO: 357206 - DNA, 20 bp, Artificial Sequence
  Description of Artificial Sequence: Synthetic oligonucleotide
  Target: LAMA2; (+) strand; PAM type: YTN; PAM sequence: TTA
aattgagagattatatcctt

SEQ ID NO: 357207 - DNA, 20 bp, Artificial Sequence
  Description of Artificial Sequence: Synthetic oligonucleotide
  Target: LAMA2; (+) strand; PAM type: YTN; PAM sequence: TTG
agagattatatccttccctg

SEQ ID NO: 357208 - DNA, 20 bp, Artificial Sequence
  Description of Artificial Sequence: Synthetic oligonucleotide
  Target: LAMA2; (+) strand; PAM type: YTN; PAM sequence: TTA
tatccttccctgtttttcat

SEQ ID NO: 357209 - DNA, 20 bp, Artificial Sequence
  Description of Artificial Sequence: Synthetic oligonucleotide
  Target: LAMA2; (+) strand; PAM type: YTN; PAM sequence: CTT
ccctgtttttcattatatgg

SEQ ID NO: 357210 - DNA, 20 bp, Artificial Sequence
  Description of Artificial Sequence: Synthetic oligonucleotide
  Target: LAMA2; (+) strand; PAM type: YTN; PAM sequence: TTC
cctgtttttcattatatggt

SEQ ID NO: 357211 - DNA, 20 bp, Artificial Sequence
  Description of Artificial Sequence: Synthetic oligonucleotide
  Target: LAMA2; (+) strand; PAM type: YTN; PAM sequence: CTG
tttttcattatatggtcagc

SEQ ID NO: 357212 - DNA, 20 bp, Artificial Sequence
  Description of Artificial Sequence: Synthetic oligonucleotide
  Target: LAMA2; (+) strand; PAM type: YTN; PAM sequence: TTT
ttcattatatggtcagcttt

SEQ ID NO: 357213 - DNA, 20 bp, Artificial Sequence
  Description of Artificial Sequence: Synthetic oligonucleotide
  Target: LAMA2; (+) strand; PAM type: YTN; PAM sequence: TTT
tcattatatggtcagctttc

SEQ ID NO: 357214 - DNA, 20 bp, Artificial Sequence
  Description of Artificial Sequence: Synthetic oligonucleotide
  Target: LAMA2; (+) strand; PAM type: YTN; PAM sequence: TTT
cattatatggtcagctttca

SEQ ID NO: 357215 - DNA, 20 bp, Artificial Sequence
  Description of Artificial Sequence: Synthetic oligonucleotide
  Target: LAMA2; (+) strand; PAM type: YTN; PAM sequence: TTC
attatatggtcagctttcac

SEQ ID NO: 357216 - DNA, 20 bp, Artificial Sequence
  Description of Artificial Sequence: Synthetic oligonucleotide
  Target: LAMA2; (+) strand; PAM type: YTN; PAM sequence: TTA
tatggtcagctttcactggc

SEQ ID NO: 357217 - DNA, 20 bp, Artificial Sequence
  Description of Artificial Sequence: Synthetic oligonucleotide
  Target: LAMA2; (+) strand; PAM type: YTN; PAM sequence: CTT
tcactggcctgagtccacat

SEQ ID NO: 357218 - DNA, 20 bp, Artificial Sequence
  Description of Artificial Sequence: Synthetic oligonucleotide
  Target: LAMA2; (+) strand; PAM type: YTN; PAM sequence: TTT
cactggcctgagtccacatt

SEQ ID NO: 357219 - DNA, 20 bp, Artificial Sequence
  Description of Artificial Sequence: Synthetic oligonucleotide
  Target: LAMA2; (+) strand; PAM type: YTN; PAM sequence: TTC
actggcctgagtccacattt

SEQ ID NO: 357220 - DNA, 20 bp, Artificial Sequence
  Description of Artificial Sequence: Synthetic oligonucleotide
  Target: LAMA2; (+) strand; PAM type: YTN; PAM sequence: CTG
gcctgagtccacattttaag

SEQ ID NO: 357221 - DNA, 20 bp, Artificial Sequence
  Description of Artificial Sequence: Synthetic oligonucleotide
  Target: LAMA2; (+) strand; PAM type: YTN; PAM sequence: CTG
agtccacattttaagctcaa

SEQ ID NO: 357222 - DNA, 20 bp, Artificial Sequence
  Description of Artificial Sequence: Synthetic oligonucleotide
  Target: LAMA2; (+) strand; PAM type: YTN; PAM sequence: TTT
taagctcaactatatacaaa

SEQ ID NO: 357223 - DNA, 20 bp, Artificial Sequence
  Description of Artificial Sequence: Synthetic oligonucleotide
  Target: LAMA2; (+) strand; PAM type: YTN; PAM sequence: TTT
aagctcaactatatacaaat

SEQ ID NO: 357224 - DNA, 20 bp, Artificial Sequence
  Description of Artificial Sequence: Synthetic oligonucleotide
  Target: LAMA2; (+) strand; PAM type: YTN; PAM sequence: TTA
agctcaactatatacaaata

SEQ ID NO: 357225 - DNA, 20 bp, Artificial Sequence
  Description of Artificial Sequence: Synthetic oligonucleotide
  Target: LAMA2; (+) strand; PAM type: YTN; PAM sequence: CTC
aactatatacaaataatttt

SEQ ID NO: 357226 - DNA, 20 bp, Artificial Sequence
  Description of Artificial Sequence: Synthetic oligonucleotide
  Target: LAMA2; (+) strand; PAM type: YTN; PAM sequence: CTA
tatacaaataatttttcagt

SEQ ID NO: 357227 - DNA, 20 bp, Artificial Sequence
  Description of Artificial Sequence: Synthetic oligonucleotide
  Target: LAMA2; (+) strand; PAM type: YTN; PAM sequence: TTT
ttcagtatactgagagtagg

SEQ ID NO: 357228 - DNA, 20 bp, Artificial Sequence
  Description of Artificial Sequence: Synthetic oligonucleotide
  Target: LAMA2; (+) strand; PAM type: YTN; PAM sequence: TTT
tcagtatactgagagtagga

SEQ ID NO: 357229 - DNA, 20 bp, Artificial Sequence
  Description of Artificial Sequence: Synthetic oligonucleotide
  Target: LAMA2; (+) strand; PAM type: YTN; PAM sequence: TTT
cagtatactgagagtaggat

SEQ ID NO: 357230 - DNA, 20 bp, Artificial Sequence
  Description of Artificial Sequence: Synthetic oligonucleotide
  Target: LAMA2; (+) strand; PAM type: YTN; PAM sequence: TTC
agtatactgagagtaggatt

SEQ ID NO: 357231 - DNA, 20 bp, Artificial Sequence
  Description of Artificial Sequence: Synthetic oligonucleotide
  Target: LAMA2; (+) strand; PAM type: YTN; PAM sequence: CTG
agagtaggattaatgaaacc

SEQ ID NO: 357232 - DNA, 20 bp, Artificial Sequence
  Description of Artificial Sequence: Synthetic oligonucleotide
  Target: LAMA2; (+) strand; PAM type: YTN; PAM sequence: TTA
atgaaaccagtctggagagc

SEQ ID NO: 357233 - DNA, 20 bp, Artificial Sequence
  Description of Artificial Sequence: Synthetic oligonucleotide
  Target: LAMA2; (+) strand; PAM type: YTN; PAM sequence: CTG
gagagcagtcacagaatgag

SEQ ID NO: 357234 - DNA, 20 bp, Artificial Sequence
  Description of Artificial Sequence: Synthetic oligonucleotide
  Target: LAMA2; (+) strand; PAM type: YTN; PAM sequence: CTT
tcccatagtatcactatgtg

SEQ ID NO: 357235 - DNA, 20 bp, Artificial Sequence
  Description of Artificial Sequence: Synthetic oligonucleotide
  Target: LAMA2; (+) strand; PAM type: YTN; PAM sequence: TTT
cccatagtatcactatgtga

SEQ ID NO: 357236 - DNA, 20 bp, Artificial Sequence
  Description of Artificial Sequence: Synthetic oligonucleotide
  Target: LAMA2; (+) strand; PAM type: YTN; PAM sequence: TTC
ccatagtatcactatgtgac

SEQ ID NO: 357237 - DNA, 20 bp, Artificial Sequence
  Description of Artificial Sequence: Synthetic oligonucleotide
  Target: LAMA2; (+) strand; PAM type: YTN; PAM sequence: CTA
tgtgactaactgattgtact

SEQ ID NO: 357238 - DNA, 20 bp, Artificial Sequence
  Description of Artificial Sequence: Synthetic oligonucleotide
  Target: LAMA2; (+) strand; PAM type: YTN; PAM sequence: CTA
actgattgtactgatgtgtt

SEQ ID NO: 357239 - DNA, 20 bp, Artificial Sequence
  Description of Artificial Sequence: Synthetic oligonucleotide
  Target: LAMA2; (+) strand; PAM type: YTN; PAM sequence: CTG
attgtactgatgtgttacag

SEQ ID NO: 357240 - DNA, 20 bp, Artificial Sequence
  Description of Artificial Sequence: Synthetic oligonucleotide
  Target: LAMA2; (+) strand; PAM type: YTN; PAM sequence: TTG
tactgatgtgttacagaaaa

SEQ ID NO: 357241 - DNA, 20 bp, Artificial Sequence
  Description of Artificial Sequence: Synthetic oligonucleotide
  Target: LAMA2; (+) strand; PAM type: YTN; PAM sequence: CTG
atgtgttacagaaaacactg

SEQ ID NO: 357242 - DNA, 20 bp, Artificial Sequence
  Description of Artificial Sequence: Synthetic oligonucleotide
  Target: LAMA2; (+) strand; PAM type: YTN; PAM sequence: TTA
cagaaaacactgtaaaaagt

SEQ ID NO: 357243 - DNA, 20 bp, Artificial Sequence
  Description of Artificial Sequence: Synthetic oligonucleotide
  Target: LAMA2; (+) strand; PAM type: YTN; PAM sequence: CTG
taaaaagttaaccagaggaa

SEQ ID NO: 357244 - DNA, 20 bp, Artificial Sequence
  Description of Artificial Sequence: Synthetic oligonucleotide
  Target: LAMA2; (+) strand; PAM type: YTN; PAM sequence: TTA
accagaggaaaactttgctt

SEQ ID NO: 357245 - DNA, 20 bp, Artificial Sequence
  Description of Artificial Sequence: Synthetic oligonucleotide
  Target: LAMA2; (+) strand; PAM type: YTN; PAM sequence: CTT
tgctttctactttatctgat

SEQ ID NO: 357246 - DNA, 20 bp, Artificial Sequence
  Description of Artificial Sequence: Synthetic oligonucleotide
  Target: LAMA2; (+) strand; PAM type: YTN; PAM sequence: TTT
gctttctactttatctgatc

SEQ ID NO: 357247 - DNA, 20 bp, Artificial Sequence
  Description of Artificial Sequence: Synthetic oligonucleotide
  Target: LAMA2; (+) strand; PAM type: YTN; PAM sequence: TTG
ctttctactttatctgatct

SEQ ID NO: 357248 - DNA, 20 bp, Artificial Sequence
  Description of Artificial Sequence: Synthetic oligonucleotide
  Target: LAMA2; (+) strand; PAM type: YTN; PAM sequence: CTT
tctactttatctgatcttta

SEQ ID NO: 357249 - DNA, 20 bp, Artificial Sequence
  Description of Artificial Sequence: Synthetic oligonucleotide
  Target: LAMA2; (+) strand; PAM type: YTN; PAM sequence: TTT
ctactttatctgatctttac

SEQ ID NO: 357250 - DNA, 20 bp, Artificial Sequence
  Description of Artificial Sequence: Synthetic oligonucleotide
  Target: LAMA2; (+) strand; PAM type: YTN; PAM sequence: TTC
tactttatctgatctttacc

SEQ ID NO: 357251 - DNA, 20 bp, Artificial Sequence
  Description of Artificial Sequence: Synthetic oligonucleotide
  Target: LAMA2; (+) strand; PAM type: YTN; PAM sequence: CTA
ctttatctgatctttacccc

SEQ ID NO: 357252 - DNA, 20 bp, Artificial Sequence
  Description of Artificial Sequence: Synthetic oligonucleotide
  Target: LAMA2; (+) strand; PAM type: YTN; PAM sequence: CTT
tatctgatctttaccccagt

SEQ ID NO: 357253 - DNA, 20 bp, Artificial Sequence
  Description of Artificial Sequence: Synthetic oligonucleotide
  Target: LAMA2; (+) strand; PAM type: YTN; PAM sequence: TTT
atctgatctttaccccagtt

SEQ ID NO: 357254 - DNA, 20 bp, Artificial Sequence
  Description of Artificial Sequence: Synthetic oligonucleotide
  Target: LAMA2; (+) strand; PAM type: YTN; PAM sequence: TTA
tctgatctttaccccagttt

SEQ ID NO: 357255 - DNA, 20 bp, Artificial Sequence
  Description of Artificial Sequence: Synthetic oligonucleotide
  Target: LAMA2; (+) strand; PAM type: YTN; PAM sequence: CTG
atctttaccccagtttctct

SEQ ID NO: 357256 - DNA, 20 bp, Artificial Sequence
  Description of Artificial Sequence: Synthetic oligonucleotide
  Target: LAMA2; (+) strand; PAM type: YTN; PAM sequence: CTT
taccccagtttctctacctg

SEQ ID NO: 357257 - DNA, 20 bp, Artificial Sequence
  Description of Artificial Sequence: Synthetic oligonucleotide
  Target: LAMA2; (+) strand; PAM type: YTN; PAM sequence: TTT
accccagtttctctacctgt

SEQ ID NO: 357258 - DNA, 20 bp, Artificial Sequence
  Description of Artificial Sequence: Synthetic oligonucleotide
  Target: LAMA2; (+) strand; PAM type: YTN; PAM sequence: TTA
ccccagtttctctacctgtc

SEQ ID NO: 357259 - DNA, 20 bp, Artificial Sequence
  Description of Artificial Sequence: Synthetic oligonucleotide
  Target: LAMA2; (+) strand; PAM type: YTN; PAM sequence: TTT
ctctacctgtcaaattccta

SEQ ID NO: 357260 - DNA, 20 bp, Artificial Sequence
  Description of Artificial Sequence: Synthetic oligonucleotide
  Target: LAMA2; (+) strand; PAM type: YTN; PAM sequence: TTC
tctacctgtcaaattcctat

SEQ ID NO: 357261 - DNA, 20 bp, Artificial Sequence
  Description of Artificial Sequence: Synthetic oligonucleotide
  Target: LAMA2; (+) strand; PAM type: YTN; PAM sequence: CTC
tacctgtcaaattcctatgc

SEQ ID NO: 357262 - DNA, 20 bp, Artificial Sequence
  Description of Artificial Sequence: Synthetic oligonucleotide
  Target: LAMA2; (+) strand; PAM type: YTN; PAM sequence: CTA
cctgtcaaattcctatgctt

SEQ ID NO: 357263 - DNA, 20 bp, Artificial Sequence
  Description of Artificial Sequence: Synthetic oligonucleotide
  Target: LAMA2; (+) strand; PAM type: YTN; PAM sequence: CTG
tcaaattcctatgcttgcct

SEQ ID NO: 357264 - DNA, 20 bp, Artificial Sequence
  Description of Artificial Sequence: Synthetic oligonucleotide
  Target: LAMA2; (+) strand; PAM type: YTN; PAM sequence: TTC
ctatgcttgcctcaaatgta

SEQ ID NO: 357265 - DNA, 20 bp, Artificial Sequence
  Description of Artificial Sequence: Synthetic oligonucleotide
  Target: LAMA2; (+) strand; PAM type: YTN; PAM sequence: CTA
tgcttgcctcaaatgtacat

SEQ ID NO: 357266 - DNA, 20 bp, Artificial Sequence
  Description of Artificial Sequence: Synthetic oligonucleotide
  Target: LAMA2; (+) strand; PAM type: YTN; PAM sequence: CTT
gcctcaaatgtacatatttt

SEQ ID NO: 357267 - DNA, 20 bp, Artificial Sequence
  Description of Artificial Sequence: Synthetic oligonucleotide
  Target: LAMA2; (+) strand; PAM type: YTN; PAM sequence: TTG
cctcaaatgtacatattttt

SEQ ID NO: 357268 - DNA, 20 bp, Artificial Sequence
  Description of Artificial Sequence: Synthetic oligonucleotide
  Target: LAMA2; (+) strand; PAM type: YTN; PAM sequence: CTC
aaatgtacatatttttaatc

SEQ ID NO: 357269 - DNA, 20 bp, Artificial Sequence
  Description of Artificial Sequence: Synthetic oligonucleotide
  Target: LAMA2; (+) strand; PAM type: YTN; PAM sequence: TTT
ttaatctgaaatgtgaaaag

SEQ ID NO: 357270 - DNA, 20 bp, Artificial Sequence
  Description of Artificial Sequence: Synthetic oligonucleotide
  Target: LAMA2; (+) strand; PAM type: YTN; PAM sequence: TTT
taatctgaaatgtgaaaagt

SEQ ID NO: 357271 - DNA, 20 bp, Artificial Sequence
  Description of Artificial Sequence: Synthetic oligonucleotide
  Target: LAMA2; (+) strand; PAM type: YTN; PAM sequence: TTT
aatctgaaatgtgaaaagta

SEQ ID NO: 357272 - DNA, 20 bp, Artificial Sequence
  Description of Artificial Sequence: Synthetic oligonucleotide
  Target: LAMA2; (+) strand; PAM type: YTN; PAM sequence: TTA
atctgaaatgtgaaaagtat

SEQ ID NO: 357273 - DNA, 20 bp, Artificial Sequence
  Description of Artificial Sequence: Synthetic oligonucleotide
  Target: LAMA2; (+) strand; PAM type: YTN; PAM sequence: CTG
aaatgtgaaaagtatttata

SEQ ID NO: 357274 - DNA, 20 bp, Artificial Sequence
  Description of Artificial Sequence: Synthetic oligonucleotide
  Target: LAMA2; (+) strand; PAM type: YTN; PAM sequence: TTT
ataactggtgtaatatcaat

SEQ ID NO: 357275 - DNA, 20 bp, Artificial Sequence
  Description of Artificial Sequence: Synthetic oligonucleotide
  Target: LAMA2; (+) strand; PAM type: YTN; PAM sequence: TTA
taactggtgtaatatcaatg

SEQ ID NO: 357276 - DNA, 20 bp, Artificial Sequence
  Description of Artificial Sequence: Synthetic oligonucleotide
  Target: LAMA2; (+) strand; PAM type: YTN; PAM sequence: CTG
gtgtaatatcaatgttctat

SEQ ID NO: 357277 - DNA, 20 bp, Artificial Sequence
  Description of Artificial Sequence: Synthetic oligonucleotide
  Target: LAMA2; (+) strand; PAM type: YTN; PAM sequence: TTC
tattatacatccatgcatta

SEQ ID NO: 357278 - DNA, 20 bp, Artificial Sequence
  Description of Artificial Sequence: Synthetic oligonucleotide
  Target: LAMA2; (+) strand; PAM type: YTN; PAM sequence: CTA
ttatacatccatgcattaat

SEQ ID NO: 357279 - DNA, 20 bp, Artificial Sequence
  Description of Artificial Sequence: Synthetic oligonucleotide
  Target: LAMA2; (+) strand; PAM type: YTN; PAM sequence: TTA
tacatccatgcattaatgtc

SEQ ID NO: 357280 - DNA, 20 bp, Artificial Sequence
  Description of Artificial Sequence: Synthetic oligonucleotide
  Target: LAMA2; (+) strand; PAM type: YTN; PAM sequence: TTA
atgtctttaattttaccatg

SEQ ID NO: 357281 - DNA, 20 bp, Artificial Sequence
  Description of Artificial Sequence: Synthetic oligonucleotide
  Target: LAMA2; (+) strand; PAM type: YTN; PAM sequence: CTT
taattttaccatgaaattaa

SEQ ID NO: 357282 - DNA, 20 bp, Artificial Sequence
  Description of Artificial Sequence: Synthetic oligonucleotide
  Target: LAMA2; (+) strand; PAM type: YTN; PAM sequence: TTT
aattttaccatgaaattaaa

SEQ ID NO: 357283 - DNA, 20 bp, Artificial Sequence
  Description of Artificial Sequence: Synthetic oligonucleotide
  Target: LAMA2; (+) strand; PAM type: YTN; PAM sequence: TTA
attttaccatgaaattaaat

SEQ ID NO: 357284 - DNA, 20 bp, Artificial Sequence
  Description of Artificial Sequence: Synthetic oligonucleotide
  Target: LAMA2; (+) strand; PAM type: YTN; PAM sequence: TTT
taccatgaaattaaatgaag

SEQ ID NO: 357285 - DNA, 20 bp, Artificial Sequence
  Description of Artificial Sequence: Synthetic oligonucleotide
  Target: LAMA2; (+) strand; PAM type: YTN; PAM sequence: TTT
accatgaaattaaatgaagt

SEQ ID NO: 357286 - DNA, 20 bp, Artificial Sequence
  Description of Artificial Sequence: Synthetic oligonucleotide
  Target: LAMA2; (+) strand; PAM type: YTN; PAM sequence: TTA
ccatgaaattaaatgaagta

SEQ ID NO: 357287 - DNA, 20 bp, Artificial Sequence
  Description of Artificial Sequence: Synthetic oligonucleotide
  Target: LAMA2; (+) strand; PAM type: YTN; PAM sequence: TTA
aatgaagtacctcaataaca

SEQ ID NO: 357288 - DNA, 20 bp, Artificial Sequence
  Description of Artificial Sequence: Synthetic oligonucleotide
  Target: LAMA2; (+) strand; PAM type: YTN; PAM sequence: CTC
aataacagaacagtgaactt

SEQ ID NO: 357289 - DNA, 20 bp, Artificial Sequence
  Description of Artificial Sequence: Synthetic oligonucleotide
  Target: LAMA2; (+) strand; PAM type: YTN; PAM sequence: CTT
taaatgaagtagctcaataa

SEQ ID NO: 357290 - DNA, 20 bp, Artificial Sequence
  Description of Artificial Sequence: Synthetic oligonucleotide
  Target: LAMA2; (+) strand; PAM type: YTN; PAM sequence: TTT
aaatgaagtagctcaataac

SEQ ID NO: 357291 - DNA, 20 bp, Artificial Sequence
  Description of Artificial Sequence: Synthetic oligonucleotide
  Target: LAMA2; (+) strand; PAM type: YTN; PAM sequence: TTA
aatgaagtagctcaataaca

SEQ ID NO: 357292 - DNA, 20 bp, Artificial Sequence
  Description of Artificial Sequence: Synthetic oligonucleotide
  Target: LAMA2; (+) strand; PAM type: YTN; PAM sequence: CTC
aataacagaacagtgaacct

SEQ ID NO: 357293 - DNA, 20 bp, Artificial Sequence
  Description of Artificial Sequence: Synthetic oligonucleotide
  Target: LAMA2; (+) strand; PAM type: YTN; PAM sequence: CTA
actggccccattttagtcaa

SEQ ID NO: 357294 - DNA, 20 bp, Artificial Sequence
  Description of Artificial Sequence: Synthetic oligonucleotide
  Target: LAMA2; (+) strand; PAM type: YTN; PAM sequence: CTG
gccccattttagtcaatcta

SEQ ID NO: 357295 - DNA, 20 bp, Artificial Sequence
  Description of Artificial Sequence: Synthetic oligonucleotide
  Target: LAMA2; (+) strand; PAM type: YTN; PAM sequence: TTT
tagtcaatctaatgcattcc

SEQ ID NO: 357296 - DNA, 20 bp, Artificial Sequence
  Description of Artificial Sequence: Synthetic oligonucleotide
  Target: LAMA2; (+) strand; PAM type: YTN; PAM sequence: TTT
agtcaatctaatgcattcct

SEQ ID NO: 357297 - DNA, 20 bp, Artificial Sequence
  Description of Artificial Sequence: Synthetic oligonucleotide
  Target: LAMA2; (+) strand; PAM type: YTN; PAM sequence: TTA
gtcaatctaatgcattcctg

SEQ ID NO: 357298 - DNA, 20 bp, Artificial Sequence
  Description of Artificial Sequence: Synthetic oligonucleotide
  Target: LAMA2; (+) strand; PAM type: YTN; PAM sequence: CTA
atgcattcctgcacaggtat

SEQ ID NO: 357299 - DNA, 20 bp, Artificial Sequence
  Description of Artificial Sequence: Synthetic oligonucleotide
  Target: LAMA2; (+) strand; PAM type: YTN; PAM sequence: TTC
ctgcacaggtatttatcatg

SEQ ID NO: 357300 - DNA, 20 bp, Artificial Sequence
  Description of Artificial Sequence: Synthetic oligonucleotide
  Target: LAMA2; (+) strand; PAM type: YTN; PAM sequence: CTG
cacaggtatttatcatgaca

SEQ ID NO: 357301 - DNA, 20 bp, Artificial Sequence
  Description of Artificial Sequence: Synthetic oligonucleotide
  Target: LAMA2; (+) strand; PAM type: YTN; PAM sequence: TTT
atcatgacatttactctaca

SEQ ID NO: 357302 - DNA, 20 bp, Artificial Sequence
  Description of Artificial Sequence: Synthetic oligonucleotide
  Target: LAMA2; (+) strand; PAM type: YTN; PAM sequence: TTA
tcatgacatttactctacac

SEQ ID NO: 357303 - DNA, 20 bp, Artificial Sequence
  Description of Artificial Sequence: Synthetic oligonucleotide
  Target: LAMA2; (+) strand; PAM type: YTN; PAM sequence: TTT
actctacactcaacctacat

SEQ ID NO: 357304 - DNA, 20 bp, Artificial Sequence
  Description of Artificial Sequence: Synthetic oligonucleotide
  Target: LAMA2; (+) strand; PAM type: YTN; PAM sequence: TTA
ctctacactcaacctacatg

SEQ ID NO: 357305 - DNA, 20 bp, Artificial Sequence
  Description of Artificial Sequence: Synthetic oligonucleotide
  Target: LAMA2; (+) strand; PAM type: YTN; PAM sequence: CTC
tacactcaacctacatgaag

SEQ ID NO: 357306 - DNA, 20 bp, Artificial Sequence
  Description of Artificial Sequence: Synthetic oligonucleotide
  Target: LAMA2; (+) strand; PAM type: YTN; PAM sequence: CTA
cactcaacctacatgaagat

SEQ ID NO: 357307 - DNA, 20 bp, Artificial Sequence
  Description of Artificial Sequence: Synthetic oligonucleotide
  Target: LAMA2; (+) strand; PAM type: YTN; PAM sequence: CTC
aacctacatgaagatcaaca

SEQ ID NO: 357308 - DNA, 20 bp, Artificial Sequence
  Description of Artificial Sequence: Synthetic oligonucleotide
  Target: LAMA2; (+) strand; PAM type: YTN; PAM sequence: CTA
catgaagatcaacatagtca

SEQ ID NO: 357309 - DNA, 20 bp, Artificial Sequence
  Description of Artificial Sequence: Synthetic oligonucleotide
  Target: LAMA2; (+) strand; PAM type: YTN; PAM sequence: CTT
ttacgagagtagatttgcat

SEQ ID NO: 357310 - DNA, 20 bp, Artificial Sequence
  Description of Artificial Sequence: Synthetic oligonucleotide
  Target: LAMA2; (+) strand; PAM type: YTN; PAM sequence: TTT
tacgagagtagatttgcatc

SEQ ID NO: 357311 - DNA, 20 bp, Artificial Sequence
  Description of Artificial Sequence: Synthetic oligonucleotide
  Target: LAMA2; (+) strand; PAM type: YTN; PAM sequence: TTT
acgagagtagatttgcatcc

SEQ ID NO: 357312 - DNA, 20 bp, Artificial Sequence
  Description of Artificial Sequence: Synthetic oligonucleotide
  Target: LAMA2; (+) strand; PAM type: YTN; PAM sequence: TTA
cgagagtagatttgcatcca

SEQ ID NO: 357313 - DNA, 20 bp, Artificial Sequence
  Description of Artificial Sequence: Synthetic oligonucleotide
  Target: LAMA2; (+) strand; PAM type: YTN; PAM sequence: TTT
gcatccatccaataatcttt

SEQ ID NO: 357314 - DNA, 20 bp, Artificial Sequence
  Description of Artificial Sequence: Synthetic oligonucleotide
  Target: LAMA2; (+) strand; PAM type: YTN; PAM sequence: TTG
catccatccaataatctttc

SEQ ID NO: 357315 - DNA, 20 bp, Artificial Sequence
  Description of Artificial Sequence: Synthetic oligonucleotide
  Target: LAMA2; (+) strand; PAM type: YTN; PAM sequence: CTT
tctcaccagtgtaattagaa

SEQ ID NO: 357316 - DNA, 20 bp, Artificial Sequence
  Description of Artificial Sequence: Synthetic oligonucleotide
  Target: LAMA2; (+) strand; PAM type: YTN; PAM sequence: TTT
ctcaccagtgtaattagaaa

SEQ ID NO: 357317 - DNA, 20 bp, Artificial Sequence
  Description of Artificial Sequence: Synthetic oligonucleotide
  Target: LAMA2; (+) strand; PAM type: YTN; PAM sequence: TTC
tcaccagtgtaattagaaag

SEQ ID NO: 357318 - DNA, 20 bp, Artificial Sequence
  Description of Artificial Sequence: Synthetic oligonucleotide
  Target: LAMA2; (+) strand; PAM type: YTN; PAM sequence: CTC
accagtgtaattagaaagga

SEQ ID NO: 357319 - DNA, 20 bp, Artificial Sequence
  Description of Artificial Sequence: Synthetic oligonucleotide
  Target: LAMA2; (+) strand; PAM type: YTN; PAM sequence: TTA
gaaaggatacagcttaacac

SEQ ID NO: 357320 - DNA, 20 bp, Artificial Sequence
  Description of Artificial Sequence: Synthetic oligonucleotide
  Target: LAMA2; (+) strand; PAM type: YTN; PAM sequence: CTT
aacacatagcttttgagcag

SEQ ID NO: 357321 - DNA, 20 bp, Artificial Sequence
  Description of Artificial Sequence: Synthetic oligonucleotide
  Target: LAMA2; (+) strand; PAM type: YTN; PAM sequence: TTA
acacatagcttttgagcaga

SEQ ID NO: 357322 - DNA, 20 bp, Artificial Sequence
  Description of Artificial Sequence: Synthetic oligonucleotide
  Target: LAMA2; (+) strand; PAM type: YTN; PAM sequence: CTT
ttgagcagatttttaaaaat

SEQ ID NO: 357323 - DNA, 20 bp, Artificial Sequence
  Description of Artificial Sequence: Synthetic oligonucleotide
  Target: LAMA2; (+) strand; PAM type: YTN; PAM sequence: TTT
tgagcagatttttaaaaata

SEQ ID NO: 357324 - DNA, 20 bp, Artificial Sequence
  Description of Artificial Sequence: Synthetic oligonucleotide
  Target: LAMA2; (+) strand; PAM type: YTN; PAM sequence: TTT
gagcagatttttaaaaatat

SEQ ID NO: 357325 - DNA, 20 bp, Artificial Sequence
  Description of Artificial Sequence: Synthetic oligonucleotide
  Target: LAMA2; (+) strand; PAM type: YTN; PAM sequence: TTG
agcagatttttaaaaatatc

SEQ ID NO: 357326 - DNA, 20 bp, Artificial Sequence
  Description of Artificial Sequence: Synthetic oligonucleotide
  Target: LAMA2; (+) strand; PAM type: YTN; PAM sequence: TTT
ttaaaaatatcattatacgt

SEQ ID NO: 357327 - DNA, 20 bp, Artificial Sequence
  Description of Artificial Sequence: Synthetic oligonucleotide
  Target: LAMA2; (+) strand; PAM type: YTN; PAM sequence: TTT
taaaaatatcattatacgtt

SEQ ID NO: 357328 - DNA, 20 bp, Artificial Sequence
  Description of Artificial Sequence: Synthetic oligonucleotide
  Target: LAMA2; (+) strand; PAM type: YTN; PAM sequence: TTT
aaaaatatcattatacgtta

SEQ ID NO: 357329 - DNA, 20 bp, Artificial Sequence
  Description of Artificial Sequence: Synthetic oligonucleotide
  Target: LAMA2; (+) strand; PAM type: YTN; PAM sequence: TTA
aaaatatcattatacgttaa

SEQ ID NO: 357330 - DNA, 20 bp, Artificial Sequence
  Description of Artificial Sequence: Synthetic oligonucleotide
  Target: LAMA2; (+) strand; PAM type: YTN; PAM sequence: TTA
tacgttaaatatagttgaga

SEQ ID NO: 357331 - DNA, 20 bp, Artificial Sequence
  Description of Artificial Sequence: Synthetic oligonucleotide
  Target: LAMA2; (+) strand; PAM type: YTN; PAM sequence: TTA
aatatagttgagagggtaaa

SEQ ID NO: 357332 - DNA, 20 bp, Artificial Sequence
  Description of Artificial Sequence: Synthetic oligonucleotide
  Target: LAMA2; (+) strand; PAM type: YTN; PAM sequence: TTG
agagggtaaaatgaagaatg

SEQ ID NO: 357333 - DNA, 20 bp, Artificial Sequence
  Description of Artificial Sequence: Synthetic oligonucleotide
  Target: LAMA2; (+) strand; PAM type: YTN; PAM sequence: TTA
atattttccttatacagaca

SEQ ID NO: 357334 - DNA, 20 bp, Artificial Sequence
  Description of Artificial Sequence: Synthetic oligonucleotide
  Target: LAMA2; (+) strand; PAM type: YTN; PAM sequence: TTT
tccttatacagacatggacg

SEQ ID NO: 357335 - DNA, 20 bp, Artificial Sequence
  Description of Artificial Sequence: Synthetic oligonucleotide
  Target: LAMA2; (+) strand; PAM type: YTN; PAM sequence: TTT
ccttatacagacatggacgc

SEQ ID NO: 357336 - DNA, 20 bp, Artificial Sequence
  Description of Artificial Sequence: Synthetic oligonucleotide
  Target: LAMA2; (+) strand; PAM type: YTN; PAM sequence: TTC
cttatacagacatggacgca

SEQ ID NO: 357337 - DNA, 20 bp, Artificial Sequence
  Description of Artificial Sequence: Synthetic oligonucleotide
  Target: LAMA2; (+) strand; PAM type: YTN; PAM sequence: CTT
atacagacatggacgcagct

SEQ ID NO: 357338 - DNA, 20 bp, Artificial Sequence
  Description of Artificial Sequence: Synthetic oligonucleotide
  Target: LAMA2; (+) strand; PAM type: YTN; PAM sequence: TTA
tacagacatggacgcagctc

SEQ ID NO: 357339 - DNA, 20 bp, Artificial Sequence
  Description of Artificial Sequence: Synthetic oligonucleotide
  Target: LAMA2; (+) strand; PAM type: YTN; PAM sequence: CTC
ataatgttgaaggatacctc

SEQ ID NO: 357340 - DNA, 20 bp, Artificial Sequence
  Description of Artificial Sequence: Synthetic oligonucleotide
  Target: LAMA2; (+) strand; PAM type: YTN; PAM sequence: TTG
aaggatacctctgttgctga

SEQ ID NO: 357341 - DNA, 20 bp, Artificial Sequence
  Description of Artificial Sequence: Synthetic oligonucleotide
  Target: LAMA2; (+) strand; PAM type: YTN; PAM sequence: CTC
tgttgctgatacatctcttt

SEQ ID NO: 357342 - DNA, 20 bp, Artificial Sequence
  Description of Artificial Sequence: Synthetic oligonucleotide
  Target: LAMA2; (+) strand; PAM type: YTN; PAM sequence: CTG
ttgctgatacatctctttat

SEQ ID NO: 357343 - DNA, 20 bp, Artificial Sequence
  Description of Artificial Sequence: Synthetic oligonucleotide
  Target: LAMA2; (+) strand; PAM type: YTN; PAM sequence: TTG
ctgatacatctctttatttg

SEQ ID NO: 357344 - DNA, 20 bp, Artificial Sequence
  Description of Artificial Sequence: Synthetic oligonucleotide
  Target: LAMA2; (+) strand; PAM type: YTN; PAM sequence: CTG
atacatctctttatttgcag

SEQ ID NO: 357345 - DNA, 20 bp, Artificial Sequence
  Description of Artificial Sequence: Synthetic oligonucleotide
  Target: LAMA2; (+) strand; PAM type: YTN; PAM sequence: CTC
tttatttgcaggaaaatgtt

SEQ ID NO: 357346 - DNA, 20 bp, Artificial Sequence
  Description of Artificial Sequence: Synthetic oligonucleotide
  Target: LAMA2; (+) strand; PAM type: YTN; PAM sequence: CTT
tatttgcaggaaaatgttga

SEQ ID NO: 357347 - DNA, 20 bp, Artificial Sequence
  Description of Artificial Sequence: Synthetic oligonucleotide
  Target: LAMA2; (+) strand; PAM type: YTN; PAM sequence: TTT
atttgcaggaaaatgttgaa

SEQ ID NO: 357348 - DNA, 20 bp, Artificial Sequence
  Description of Artificial Sequence: Synthetic oligonucleotide
  Target: LAMA2; (+) strand; PAM type: YTN; PAM sequence: TTA
tttgcaggaaaatgttgaag

SEQ ID NO: 357349 - DNA, 20 bp, Artificial Sequence
  Description of Artificial Sequence: Synthetic oligonucleotide
  Target: LAMA2; (+) strand; PAM type: YTN; PAM sequence: TTT
gcaggaaaatgttgaaggag

SEQ ID NO: 357350 - DNA, 20 bp, Artificial Sequence
  Description of Artificial Sequence: Synthetic oligonucleotide
  Target: LAMA2; (+) strand; PAM type: YTN; PAM sequence: TTG
caggaaaatgttgaaggagg

SEQ ID NO: 357351 - DNA, 20 bp, Artificial Sequence
  Description of Artificial Sequence: Synthetic oligonucleotide
  Target: LAMA2; (+) strand; PAM type: YTN; PAM sequence: TTG
aaggaggagactgtagtcgt

SEQ ID NO: 357352 - DNA, 20 bp, Artificial Sequence
  Description of Artificial Sequence: Synthetic oligonucleotide
  Target: LAMA2; (+) strand; PAM type: YTN; PAM sequence: CTG
tagtcgttgcaaatccggct

SEQ ID NO: 357353 - DNA, 20 bp, Artificial Sequence
  Description of Artificial Sequence: Synthetic oligonucleotide
  Target: LAMA2; (+) strand; PAM type: YTN; PAM sequence: TTG
caaatccggcttcttcaatt

SEQ ID NO: 357354 - DNA, 20 bp, Artificial Sequence
  Description of Artificial Sequence: Synthetic oligonucleotide
  Target: LAMA2; (+) strand; PAM type: YTN; PAM sequence: CTT
cttcaatttgcaagaggata

SEQ ID NO: 357355 - DNA, 20 bp, Artificial Sequence
  Description of Artificial Sequence: Synthetic oligonucleotide
  Target: LAMA2; (+) strand; PAM type: YTN; PAM sequence: TTC
ttcaatttgcaagaggataa

SEQ ID NO: 357356 - DNA, 20 bp, Artificial Sequence
  Description of Artificial Sequence: Synthetic oligonucleotide
  Target: LAMA2; (+) strand; PAM type: YTN; PAM sequence: CTT
caatttgcaagaggataatt

SEQ ID NO: 357357 - DNA, 20 bp, Artificial Sequence
  Description of Artificial Sequence: Synthetic oligonucleotide
  Target: LAMA2; (+) strand; PAM type: YTN; PAM sequence: TTC
aatttgcaagaggataattg

SEQ ID NO: 357358 - DNA, 20 bp, Artificial Sequence
  Description of Artificial Sequence: Synthetic oligonucleotide
  Target: LAMA2; (+) strand; PAM type: YTN; PAM sequence: TTT
gcaagaggataattggaaag

SEQ ID NO: 357359 - DNA, 20 bp, Artificial Sequence
  Description of Artificial Sequence: Synthetic oligonucleotide
  Target: LAMA2; (+) strand; PAM type: YTN; PAM sequence: TTG
caagaggataattggaaagg

SEQ ID NO: 357360 - DNA, 20 bp, Artificial Sequence
  Description of Artificial Sequence: Synthetic oligonucleotide
  Target: LAMA2; (+) strand; PAM type: YTN; PAM sequence: TTG
gaaaggctgcgatgagtgtt

SEQ ID NO: 357361 - DNA, 20 bp, Artificial Sequence
  Description of Artificial Sequence: Synthetic oligonucleotide
  Target: LAMA2; (+) strand; PAM type: YTN; PAM sequence: CTG
cgatgagtgtttctgttcag

SEQ ID NO: 357362 - DNA, 20 bp, Artificial Sequence
  Description of Artificial Sequence: Synthetic oligonucleotide
  Target: LAMA2; (+) strand; PAM type: YTN; PAM sequence: TTT
ctgttcaggggtttcaaaca

SEQ ID NO: 357363 - DNA, 20 bp, Artificial Sequence
  Description of Artificial Sequence: Synthetic oligonucleotide
  Target: LAMA2; (+) strand; PAM type: YTN; PAM sequence: TTC
tgttcaggggtttcaaacag

SEQ ID NO: 357364 - DNA, 20 bp, Artificial Sequence
  Description of Artificial Sequence: Synthetic oligonucleotide
  Target: LAMA2; (+) strand; PAM type: YTN; PAM sequence: CTG
ttcaggggtttcaaacagat

SEQ ID NO: 357365 - DNA, 20 bp, Artificial Sequence
  Description of Artificial Sequence: Synthetic oligonucleotide
  Target: LAMA2; (+) strand; PAM type: YTN; PAM sequence: TTC
aggggtttcaaacagatgtc

SEQ ID NO: 357366 - DNA, 20 bp, Artificial Sequence
  Description of Artificial Sequence: Synthetic oligonucleotide
  Target: LAMA2; (+) strand; PAM type: YTN; PAM sequence: TTT
caaacagatgtcagagttcc

SEQ ID NO: 357367 - DNA, 20 bp, Artificial Sequence
  Description of Artificial Sequence: Synthetic oligonucleotide
  Target: LAMA2; (+) strand; PAM type: YTN; PAM sequence: TTC
aaacagatgtcagagttcct

SEQ ID NO: 357368 - DNA, 20 bp, Artificial Sequence
  Description of Artificial Sequence: Synthetic oligonucleotide
  Target: LAMA2; (+) strand; PAM type: YTN; PAM sequence: TTC
ctactggacctatggcaaag

SEQ ID NO: 357369 - DNA, 20 bp, Artificial Sequence
  Description of Artificial Sequence: Synthetic oligonucleotide
  Target: LAMA2; (+) strand; PAM type: YTN; PAM sequence: CTA
ctggacctatggcaaagtaa

SEQ ID NO: 357370 - DNA, 20 bp, Artificial Sequence
  Description of Artificial Sequence: Synthetic oligonucleotide
  Target: LAMA2; (+) strand; PAM type: YTN; PAM sequence: CTG
gacctatggcaaagtaagca

SEQ ID NO: 357371 - DNA, 20 bp, Artificial Sequence
  Description of Artificial Sequence: Synthetic oligonucleotide
  Target: LAMA2; (+) strand; PAM type: YTN; PAM sequence: CTA
tggcaaagtaagcaagcacc

SEQ ID NO: 357372 - DNA, 20 bp, Artificial Sequence
  Description of Artificial Sequence: Synthetic oligonucleotide
  Target: LAMA2; (+) strand; PAM type: YTN; PAM sequence: TTT
ggttctgtttgctgccccag

SEQ ID NO: 357373 - DNA, 20 bp, Artificial Sequence
  Description of Artificial Sequence: Synthetic oligonucleotide
  Target: LAMA2; (+) strand; PAM type: YTN; PAM sequence: TTG
gttctgtttgctgccccagc

SEQ ID NO: 357374 - DNA, 20 bp, Artificial Sequence
  Description of Artificial Sequence: Synthetic oligonucleotide
  Target: LAMA2; (+) strand; PAM type: YTN; PAM sequence: TTC
tgtttgctgccccagcagcc

SEQ ID NO: 357375 - DNA, 20 bp, Artificial Sequence
  Description of Artificial Sequence: Synthetic oligonucleotide
  Target: LAMA2; (+) strand; PAM type: YTN; PAM sequence: CTG
tttgctgccccagcagcctt

SEQ ID NO: 357376 - DNA, 20 bp, Artificial Sequence
  Description of Artificial Sequence: Synthetic oligonucleotide
  Target: LAMA2; (+) strand; PAM type: YTN; PAM sequence: TTT
gctgccccagcagccttctt

SEQ ID NO: 357377 - DNA, 20 bp, Artificial Sequence
  Description of Artificial Sequence: Synthetic oligonucleotide
  Target: LAMA2; (+) strand; PAM type: YTN; PAM sequence: TTG
ctgccccagcagccttcttt

SEQ ID NO: 357378 - DNA, 20 bp, Artificial Sequence
  Description of Artificial Sequence: Synthetic oligonucleotide
  Target: LAMA2; (+) strand; PAM type: YTN; PAM sequence: CTG
ccccagcagccttctttgtt

SEQ ID NO: 357379 - DNA, 20 bp, Artificial Sequence
  Description of Artificial Sequence: Synthetic oligonucleotide
  Target: LAMA2; (+) strand; PAM type: YTN; PAM sequence: CTT
ctttgttgctttcatcgttg

SEQ ID NO: 357380 - DNA, 20 bp, Artificial Sequence
  Description of Artificial Sequence: Synthetic oligonucleotide
  Target: LAMA2; (+) strand; PAM type: YTN; PAM sequence: TTC
tttgttgctttcatcgttgt

SEQ ID NO: 357381 - DNA, 20 bp, Artificial Sequence
  Description of Artificial Sequence: Synthetic oligonucleotide
  Target: LAMA2; (+) strand; PAM type: YTN; PAM sequence: CTT
tgttgctttcatcgttgttc

SEQ ID NO: 357382 - DNA, 20 bp, Artificial Sequence
  Description of Artificial Sequence: Synthetic oligonucleotide
  Target: LAMA2; (+) strand; PAM type: YTN; PAM sequence: TTT
gttgctttcatcgttgttct

SEQ ID NO: 357383 - DNA, 20 bp, Artificial Sequence
  Description of Artificial Sequence: Synthetic oligonucleotide
  Target: LAMA2; (+) strand; PAM type: YTN; PAM sequence: TTG
ttgctttcatcgttgttctt

SEQ ID NO: 357384 - DNA, 20 bp, Artificial Sequence
  Description of Artificial Sequence: Synthetic oligonucleotide
  Target: LAMA2; (+) strand; PAM type: YTN; PAM sequence: TTG
ctttcatcgttgttcttttg

SEQ ID NO: 357385 - DNA, 20 bp, Artificial Sequence
  Description of Artificial Sequence: Synthetic oligonucleotide
  Target: LAMA2; (+) strand; PAM type: YTN; PAM sequence: CTT
tcatcgttgttcttttgtat

SEQ ID NO: 357386 - DNA, 20 bp, Artificial Sequence
  Description of Artificial Sequence: Synthetic oligonucleotide
  Target: LAMA2; (+) strand; PAM type: YTN; PAM sequence: TTT
catcgttgttcttttgtatg

SEQ ID NO: 357387 - DNA, 20 bp, Artificial Sequence
  Description of Artificial Sequence: Synthetic oligonucleotide
  Target: LAMA2; (+) strand; PAM type: YTN; PAM sequence: TTC
atcgttgttcttttgtatga

SEQ ID NO: 357388 - DNA, 20 bp, Artificial Sequence
  Description of Artificial Sequence: Synthetic oligonucleotide
  Target: LAMA2; (+) strand; PAM type: YTN; PAM sequence: TTG
ttcttttgtatgaacagttt

SEQ ID NO: 357389 - DNA, 20 bp, Artificial Sequence
  Description of Artificial Sequence: Synthetic oligonucleotide
  Target: LAMA2; (+) strand; PAM type: YTN; PAM sequence: TTC
ttttgtatgaacagtttctg

SEQ ID NO: 357390 - DNA, 20 bp, Artificial Sequence
  Description of Artificial Sequence: Synthetic oligonucleotide
  Target: LAMA2; (+) strand; PAM type: YTN; PAM sequence: CTT
ttgtatgaacagtttctgat

SEQ ID NO: 357391 - DNA, 20 bp, Artificial Sequence
  Description of Artificial Sequence: Synthetic oligonucleotide
  Target: LAMA2; (+) strand; PAM type: YTN; PAM sequence: TTT
tgtatgaacagtttctgata

SEQ ID NO: 357392 - DNA, 20 bp, Artificial Sequence
  Description of Artificial Sequence: Synthetic oligonucleotide
  Target: LAMA2; (+) strand; PAM type: YTN; PAM sequence: TTT
gtatgaacagtttctgatag

SEQ ID NO: 357393 - DNA, 20 bp, Artificial Sequence
  Description of Artificial Sequence: Synthetic oligonucleotide
  Target: LAMA2; (+) strand; PAM type: YTN; PAM sequence: TTG
tatgaacagtttctgatagt

SEQ ID NO: 357394 - DNA, 20 bp, Artificial Sequence
  Description of Artificial Sequence: Synthetic oligonucleotide
  Target: LAMA2; (+) strand; PAM type: YTN; PAM sequence: TTT
ctgatagtgaacttctacat

SEQ ID NO: 357395 - DNA, 20 bp, Artificial Sequence
  Description of Artificial Sequence: Synthetic oligonucleotide
  Target: LAMA2; (+) strand; PAM type: YTN; PAM sequence: TTC
tgatagtgaacttctacata

SEQ ID NO: 357396 - DNA, 20 bp, Artificial Sequence
  Description of Artificial Sequence: Synthetic oligonucleotide
  Target: LAMA2; (+) strand; PAM type: YTN; PAM sequence: CTG
atagtgaacttctacataaa

SEQ ID NO: 357397 - DNA, 20 bp, Artificial Sequence
  Description of Artificial Sequence: Synthetic oligonucleotide
  Target: LAMA2; (+) strand; PAM type: YTN; PAM sequence: CTT
ctacataaagttacaggaag

SEQ ID NO: 357398 - DNA, 20 bp, Artificial Sequence
  Description of Artificial Sequence: Synthetic oligonucleotide
  Target: LAMA2; (+) strand; PAM type: YTN; PAM sequence: TTC
tacataaagttacaggaaga

SEQ ID NO: 357399 - DNA, 20 bp, Artificial Sequence
  Description of Artificial Sequence: Synthetic oligonucleotide
  Target: LAMA2; (+) strand; PAM type: YTN; PAM sequence: CTA
cataaagttacaggaagaag

SEQ ID NO: 357400 - DNA, 20 bp, Artificial Sequence
  Description of Artificial Sequence: Synthetic oligonucleotide
  Target: LAMA2; (+) strand; PAM type: YTN; PAM sequence: TTA
caggaagaagtaatggaatt

SEQ ID NO: 357401 - DNA, 20 bp, Artificial Sequence
  Description of Artificial Sequence: Synthetic oligonucleotide
  Target: LAMA2; (+) strand; PAM type: YTN; PAM sequence: TTT
tcttcaaatgctgttgtgta

SEQ ID NO: 357402 - DNA, 20 bp, Artificial Sequence
  Description of Artificial Sequence: Synthetic oligonucleotide
  Target: LAMA2; (+) strand; PAM type: YTN; PAM sequence: TTT
cttcaaatgctgttgtgtat

SEQ ID NO: 357403 - DNA, 20 bp, Artificial Sequence
  Description of Artificial Sequence: Synthetic oligonucleotide
  Target: LAMA2; (+) strand; PAM type: YTN; PAM sequence: TTC
ttcaaatgctgttgtgtatt

SEQ ID NO: 357404 - DNA, 20 bp, Artificial Sequence
  Description of Artificial Sequence: Synthetic oligonucleotide
  Target: LAMA2; (+) strand; PAM type: YTN; PAM sequence: CTT
caaatgctgttgtgtatttt

SEQ ID NO: 357405 - DNA, 20 bp, Artificial Sequence
  Description of Artificial Sequence: Synthetic oligonucleotide
  Target: LAMA2; (+) strand; PAM type: YTN; PAM sequence: TTC
aaatgctgttgtgtattttt

SEQ ID NO: 357406 - DNA, 20 bp, Artificial Sequence
  Description of Artificial Sequence: Synthetic oligonucleotide
  Target: LAMA2; (+) strand; PAM type: YTN; PAM sequence: CTG
ttgtgtatttttgctcaaag

SEQ ID NO: 357407 - DNA, 20 bp, Artificial Sequence
  Description of Artificial Sequence: Synthetic oligonucleotide
  Target: LAMA2; (+) strand; PAM type: YTN; PAM sequence: TTG
tgtatttttgctcaaagcct

SEQ ID NO: 357408 - DNA, 20 bp, Artificial Sequence
  Description of Artificial Sequence: Synthetic oligonucleotide
  Target: LAMA2; (+) strand; PAM type: YTN; PAM sequence: TTT
ttgctcaaagcctttgaggt

SEQ ID NO: 357409 - DNA, 20 bp, Artificial Sequence
  Description of Artificial Sequence: Synthetic oligonucleotide
  Target: LAMA2; (+) strand; PAM type: YTN; PAM sequence: TTT
tgctcaaagcctttgaggtt

SEQ ID NO: 357410 - DNA, 20 bp, Artificial Sequence
  Description of Artificial Sequence: Synthetic oligonucleotide
  Target: LAMA2; (+) strand; PAM type: YTN; PAM sequence: TTT
gctcaaagcctttgaggttg

SEQ ID NO: 357411 - DNA, 20 bp, Artificial Sequence
  Description of Artificial Sequence: Synthetic oligonucleotide
  Target: LAMA2; (+) strand; PAM type: YTN; PAM sequence: TTG
ctcaaagcctttgaggttgt

SEQ ID NO: 357412 - DNA, 20 bp, Artificial Sequence
  Description of Artificial Sequence: Synthetic oligonucleotide
  Target: LAMA2; (+) strand; PAM type: YTN; PAM sequence: CTC
aaagcctttgaggttgtatt

SEQ ID NO: 357413 - DNA, 20 bp, Artificial Sequence
  Description of Artificial Sequence: Synthetic oligonucleotide
  Target: LAMA2; (+) strand; PAM type: YTN; PAM sequence: CTT
tgaggttgtatttgtaatat

SEQ ID NO: 357414 - DNA, 20 bp, Artificial Sequence
  Description of Artificial Sequence: Synthetic oligonucleotide
  Target: LAMA2; (+) strand; PAM type: YTN; PAM sequence: TTT
gaggttgtatttgtaatatt

SEQ ID NO: 357415 - DNA, 20 bp, Artificial Sequence
  Description of Artificial Sequence: Synthetic oligonucleotide
  Target: LAMA2; (+) strand; PAM type: YTN; PAM sequence: TTG
aggttgtatttgtaatattg

SEQ ID NO: 357416 - DNA, 20 bp, Artificial Sequence
  Description of Artificial Sequence: Synthetic oligonucleotide
  Target: LAMA2; (+) strand; PAM type: YTN; PAM sequence: TTG
tatttgtaatattgtgtaga

SEQ ID NO: 357417 - DNA, 20 bp, Artificial Sequence
  Description of Artificial Sequence: Synthetic oligonucleotide
  Target: LAMA2; (+) strand; PAM type: YTN; PAM sequence: TTT
gtaatattgtgtagactgga

SEQ ID NO: 357418 - DNA, 20 bp, Artificial Sequence
  Description of Artificial Sequence: Synthetic oligonucleotide
  Target: LAMA2; (+) strand; PAM type: YTN; PAM sequence: TTG
taatattgtgtagactggaa

SEQ ID NO: 357419 - DNA, 20 bp, Artificial Sequence
  Description of Artificial Sequence: Synthetic oligonucleotide
  Target: LAMA2; (+) strand; PAM type: YTN; PAM sequence: TTG
tgtagactggaatttcttag

SEQ ID NO: 357420 - DNA, 20 bp, Artificial Sequence
  Description of Artificial Sequence: Synthetic oligonucleotide
  Target: LAMA2; (+) strand; PAM type: YTN; PAM sequence: CTG
gaatttcttagaataggtag

SEQ ID NO: 357421 - DNA, 20 bp, Artificial Sequence
  Description of Artificial Sequence: Synthetic oligonucleotide
  Target: LAMA2; (+) strand; PAM type: YTN; PAM sequence: TTT
cttagaataggtagacatag

SEQ ID NO: 357422 - DNA, 20 bp, Artificial Sequence
  Description of Artificial Sequence: Synthetic oligonucleotide
  Target: LAMA2; (+) strand; PAM type: YTN; PAM sequence: TTC
ttagaataggtagacatagt

SEQ ID NO: 357423 - DNA, 20 bp, Artificial Sequence
  Description of Artificial Sequence: Synthetic oligonucleotide
  Target: LAMA2; (+) strand; PAM type: YTN; PAM sequence: CTT
agaataggtagacatagtct

SEQ ID NO: 357424 - DNA, 20 bp, Artificial Sequence
  Description of Artificial Sequence: Synthetic oligonucleotide
  Target: LAMA2; (+) strand; PAM type: YTN; PAM sequence: TTA
gaataggtagacatagtctt

SEQ ID NO: 357425 - DNA, 20 bp, Artificial Sequence
  Description of Artificial Sequence: Synthetic oligonucleotide
  Target: LAMA2; (+) strand; PAM type: YTN; PAM sequence: CTT
tttagtgtccatgattactc

SEQ ID NO: 357426 - DNA, 20 bp, Artificial Sequence
  Description of Artificial Sequence: Synthetic oligonucleotide
  Target: LAMA2; (+) strand; PAM type: YTN; PAM sequence: TTT
ttagtgtccatgattactct

SEQ ID NO: 357427 - DNA, 20 bp, Artificial Sequence
  Description of Artificial Sequence: Synthetic oligonucleotide
  Target: LAMA2; (+) strand; PAM type: YTN; PAM sequence: TTT
tagtgtccatgattactcta

SEQ ID NO: 357428 - DNA, 20 bp, Artificial Sequence
  Description of Artificial Sequence: Synthetic oligonucleotide
  Target: LAMA2; (+) strand; PAM type: YTN; PAM sequence: TTT
agtgtccatgattactctat

SEQ ID NO: 357429 - DNA, 20 bp, Artificial Sequence
  Description of Artificial Sequence: Synthetic oligonucleotide
  Target: LAMA2; (+) strand; PAM type: YTN; PAM sequence: TTA
gtgtccatgattactctatg

SEQ ID NO: 357430 - DNA, 20 bp, Artificial Sequence
  Description of Artificial Sequence: Synthetic oligonucleotide
  Target: LAMA2; (+) strand; PAM type: YTN; PAM sequence: TTA
ctctatgaaacaataatgca

SEQ ID NO: 357431 - DNA, 20 bp, Artificial Sequence
  Description of Artificial Sequence: Synthetic oligonucleotide
  Target: LAMA2; (+) strand; PAM type: YTN; PAM sequence: CTC
tatgaaacaataatgcaatt

SEQ ID NO: 357432 - DNA, 20 bp, Artificial Sequence
  Description of Artificial Sequence: Synthetic oligonucleotide
  Target: LAMA2; (+) strand; PAM type: YTN; PAM sequence: CTA
tgaaacaataatgcaattaa

SEQ ID NO: 357433 - DNA, 20 bp, Artificial Sequence
  Description of Artificial Sequence: Synthetic oligonucleotide
  Target: LAMA2; (+) strand; PAM type: YTN; PAM sequence: TTA
aggtttcaactccaagggtg

SEQ ID NO: 357434 - DNA, 20 bp, Artificial Sequence
  Description of Artificial Sequence: Synthetic oligonucleotide
  Target: LAMA2; (+) strand; PAM type: YTN; PAM sequence: TTT
caactccaagggtgcatgat

SEQ ID NO: 357435 - DNA, 20 bp, Artificial Sequence
  Description of Artificial Sequence: Synthetic oligonucleotide
  Target: LAMA2; (+) strand; PAM type: YTN; PAM sequence: TTC
aactccaagggtgcatgatt

SEQ ID NO: 357436 - DNA, 20 bp, Artificial Sequence
  Description of Artificial Sequence: Synthetic oligonucleotide
  Target: LAMA2; (+) strand; PAM type: YTN; PAM sequence: CTC
caagggtgcatgatttaaga

SEQ ID NO: 357437 - DNA, 20 bp, Artificial Sequence
  Description of Artificial Sequence: Synthetic oligonucleotide
  Target: LAMA2; (+) strand; PAM type: YTN; PAM sequence: TTT
aagagagaaaacactacatt

SEQ ID NO: 357438 - DNA, 20 bp, Artificial Sequence
  Description of Artificial Sequence: Synthetic oligonucleotide
  Target: LAMA2; (+) strand; PAM type: YTN; PAM sequence: TTA
agagagaaaacactacattg

SEQ ID NO: 357439 - DNA, 20 bp, Artificial Sequence
  Description of Artificial Sequence: Synthetic oligonucleotide
  Target: LAMA2; (+) strand; PAM type: YTN; PAM sequence: CTA
cattgtgatatgaattatat

SEQ ID NO: 357440 - DNA, 20 bp, Artificial Sequence
  Description of Artificial Sequence: Synthetic oligonucleotide
  Target: LAMA2; (+) strand; PAM type: YTN; PAM sequence: TTG
tgatatgaattatattttcc

SEQ ID NO: 357441 - DNA, 20 bp, Artificial Sequence
  Description of Artificial Sequence: Synthetic oligonucleotide
  Target: LAMA2; (+) strand; PAM type: YTN; PAM sequence: TTA
tattttccattactagtatg

SEQ ID NO: 357442 - DNA, 20 bp, Artificial Sequence
  Description of Artificial Sequence: Synthetic oligonucleotide
  Target: LAMA2; (+) strand; PAM type: YTN; PAM sequence: TTT
tccattactagtatgttcgt

SEQ ID NO: 357443 - DNA, 20 bp, Artificial Sequence
  Description of Artificial Sequence: Synthetic oligonucleotide
  Target: LAMA2; (+) strand; PAM type: YTN; PAM sequence: TTT
ccattactagtatgttcgta

SEQ ID NO: 357444 - DNA, 20 bp, Artificial Sequence
  Description of Artificial Sequence: Synthetic oligonucleotide
  Target: LAMA2; (+) strand; PAM type: YTN; PAM sequence: TTC
cattactagtatgttcgtat

SEQ ID NO: 357445 - DNA, 20 bp, Artificial Sequence
  Description of Artificial Sequence: Synthetic oligonucleotide
  Target: LAMA2; (+) strand; PAM type: YTN; PAM sequence: TTA
ctagtatgttcgtatgcaag

SEQ ID NO: 357446 - DNA, 20 bp, Artificial Sequence
  Description of Artificial Sequence: Synthetic oligonucleotide
  Target: LAMA2; (+) strand; PAM type: YTN; PAM sequence: CTA
gtatgttcgtatgcaagttg

SEQ ID NO: 357447 - DNA, 20 bp, Artificial Sequence
  Description of Artificial Sequence: Synthetic oligonucleotide
  Target: LAMA2; (+) strand; PAM type: YTN; PAM sequence: TTC
gtatgcaagttgagaaaaac

SEQ ID NO: 357448 - DNA, 20 bp, Artificial Sequence
  Description of Artificial Sequence: Synthetic oligonucleotide
  Target: LAMA2; (+) strand; PAM type: YTN; PAM sequence: TTG
agaaaaactctgtatcatct

SEQ ID NO: 357449 - DNA, 20 bp, Artificial Sequence
  Description of Artificial Sequence: Synthetic oligonucleotide
  Target: LAMA2; (+) strand; PAM type: YTN; PAM sequence: CTC
tgtatcatctgtatacataa

SEQ ID NO: 357450 - DNA, 20 bp, Artificial Sequence
  Description of Artificial Sequence: Synthetic oligonucleotide
  Target: LAMA2; (+) strand; PAM type: YTN; PAM sequence: CTG
tatcatctgtatacataata

SEQ ID NO: 357451 - DNA, 20 bp, Artificial Sequence
  Description of Artificial Sequence: Synthetic oligonucleotide
  Target: LAMA2; (+) strand; PAM type: YTN; PAM sequence: CTG
tatacataatacatattatc

SEQ ID NO: 357452 - DNA, 20 bp, Artificial Sequence
  Description of Artificial Sequence: Synthetic oligonucleotide
  Target: LAMA2; (+) strand; PAM type: YTN; PAM sequence: TTA
tccaccaacgctttagttac

SEQ ID NO: 357453 - DNA, 20 bp, Artificial Sequence
  Description of Artificial Sequence: Synthetic oligonucleotide
  Target: LAMA2; (+) strand; PAM type: YTN; PAM sequence: CTT
tagttactatttgatgttgc

SEQ ID NO: 357454 - DNA, 20 bp, Artificial Sequence
  Description of Artificial Sequence: Synthetic oligonucleotide
  Target: LAMA2; (+) strand; PAM type: YTN; PAM sequence: TTT
agttactatttgatgttgcc

SEQ ID NO: 357455 - DNA, 20 bp, Artificial Sequence
  Description of Artificial Sequence: Synthetic oligonucleotide
  Target: LAMA2; (+) strand; PAM type: YTN; PAM sequence: TTA
gttactatttgatgttgcct

SEQ ID NO: 357456 - DNA, 20 bp, Artificial Sequence
  Description of Artificial Sequence: Synthetic oligonucleotide
  Target: LAMA2; (+) strand; PAM type: YTN; PAM sequence: TTA
ctatttgatgttgcctaggc

SEQ ID NO: 357457 - DNA, 20 bp, Artificial Sequence
  Description of Artificial Sequence: Synthetic oligonucleotide
  Target: LAMA2; (+) strand; PAM type: YTN; PAM sequence: CTA
tttgatgttgcctaggctct

SEQ ID NO: 357458 - DNA, 20 bp, Artificial Sequence
  Description of Artificial Sequence: Synthetic oligonucleotide
  Target: LAMA2; (+) strand; PAM type: YTN; PAM sequence: TTT
gatgttgcctaggctctttc

SEQ ID NO: 357459 - DNA, 20 bp, Artificial Sequence
  Description of Artificial Sequence: Synthetic oligonucleotide
  Target: LAMA2; (+) strand; PAM type: YTN; PAM sequence: TTG
atgttgcctaggctctttca

SEQ ID NO: 357460 - DNA, 20 bp, Artificial Sequence
  Description of Artificial Sequence: Synthetic oligonucleotide
  Target: LAMA2; (+) strand; PAM type: YTN; PAM sequence: TTG
cctaggctctttcattatta

SEQ ID NO: 357461 - DNA, 20 bp, Artificial Sequence
  Description of Artificial Sequence: Synthetic oligonucleotide
  Target: LAMA2; (+) strand; PAM type: YTN; PAM sequence: CTA
ggctctttcattattaaaag

SEQ ID NO: 357462 - DNA, 20 bp, Artificial Sequence
  Description of Artificial Sequence: Synthetic oligonucleotide
  Target: LAMA2; (+) strand; PAM type: YTN; PAM sequence: CTC
tttcattattaaaaggggac

SEQ ID NO: 357463 - DNA, 20 bp, Artificial Sequence
  Description of Artificial Sequence: Synthetic oligonucleotide
  Target: LAMA2; (+) strand; PAM type: YTN; PAM sequence: CTT
tcattattaaaaggggacat

SEQ ID NO: 357464 - DNA, 20 bp, Artificial Sequence
  Description of Artificial Sequence: Synthetic oligonucleotide
  Target: LAMA2; (+) strand; PAM type: YTN; PAM sequence: TTT
cattattaaaaggggacatt

SEQ ID NO: 357465 - DNA, 20 bp, Artificial Sequence
  Description of Artificial Sequence: Synthetic oligonucleotide
  Target: LAMA2; (+) strand; PAM type: YTN; PAM sequence: TTC
attattaaaaggggacatta

SEQ ID NO: 357466 - DNA, 20 bp, Artificial Sequence
  Description of Artificial Sequence: Synthetic oligonucleotide
  Target: LAMA2; (+) strand; PAM type: YTN; PAM sequence: TTA
ttaaaaggggacattaaata

SEQ ID NO: 357467 - DNA, 20 bp, Artificial Sequence
  Description of Artificial Sequence: Synthetic oligonucleotide
  Target: LAMA2; (+) strand; PAM type: YTN; PAM sequence: TTA
aaaggggacattaaatatag

SEQ ID NO: 357468 - DNA, 20 bp, Artificial Sequence
  Description of Artificial Sequence: Synthetic oligonucleotide
  Target: LAMA2; (+) strand; PAM type: YTN; PAM sequence: TTA
aatataggcaataccttcat

SEQ ID NO: 357469 - DNA, 20 bp, Artificial Sequence
  Description of Artificial Sequence: Synthetic oligonucleotide
  Target: LAMA2; (+) strand; PAM type: YTN; PAM sequence: CTT
cattctgagttggtttgaaa

SEQ ID NO: 357470 - DNA, 20 bp, Artificial Sequence
  Description of Artificial Sequence: Synthetic oligonucleotide
  Target: LAMA2; (+) strand; PAM type: YTN; PAM sequence: TTC
attctgagttggtttgaaaa

SEQ ID NO: 357471 - DNA, 20 bp, Artificial Sequence
  Description of Artificial Sequence: Synthetic oligonucleotide
  Target: LAMA2; (+) strand; PAM type: YTN; PAM sequence: TTC
tgagttggtttgaaaaatta

SEQ ID NO: 357472 - DNA, 20 bp, Artificial Sequence
  Description of Artificial Sequence: Synthetic oligonucleotide
  Target: LAMA2; (+) strand; PAM type: YTN; PAM sequence: CTG
agttggtttgaaaaattatt

SEQ ID NO: 357473 - DNA, 20 bp, Artificial Sequence
  Description of Artificial Sequence: Synthetic oligonucleotide
  Target: LAMA2; (+) strand; PAM type: YTN; PAM sequence: TTG
gtttgaaaaattattactta

SEQ ID NO: 357474 - DNA, 20 bp, Artificial Sequence
  Description of Artificial Sequence: Synthetic oligonucleotide
  Target: LAMA2; (+) strand; PAM type: YTN; PAM sequence: TTT
gaaaaattattacttaaact

SEQ ID NO: 357475 - DNA, 20 bp, Artificial Sequence
  Description of Artificial Sequence: Synthetic oligonucleotide
  Target: LAMA2; (+) strand; PAM type: YTN; PAM sequence: TTG
aaaaattattacttaaacta

SEQ ID NO: 357476 - DNA, 20 bp, Artificial Sequence
  Description of Artificial Sequence: Synthetic oligonucleotide
  Target: LAMA2; (+) strand; PAM type: YTN; PAM sequence: TTA
ttacttaaactatttaatag

SEQ ID NO: 357477 - DNA, 20 bp, Artificial Sequence
  Description of Artificial Sequence: Synthetic oligonucleotide
  Target: LAMA2; (+) strand; PAM type: YTN; PAM sequence: TTA
cttaaactatttaatagcaa

SEQ ID NO: 357478 - DNA, 20 bp, Artificial Sequence
  Description of Artificial Sequence: Synthetic oligonucleotide
  Target: LAMA2; (+) strand; PAM type: YTN; PAM sequence: CTT
aaactatttaatagcaactg

SEQ ID NO: 357479 - DNA, 20 bp, Artificial Sequence
  Description of Artificial Sequence: Synthetic oligonucleotide
  Target: LAMA2; (+) strand; PAM type: YTN; PAM sequence: TTA
aactatttaatagcaactga

SEQ ID NO: 357480 - DNA, 20 bp, Artificial Sequence
  Description of Artificial Sequence: Synthetic oligonucleotide
  Target: LAMA2; (+) strand; PAM type: YTN; PAM sequence: CTA
tttaatagcaactgaaattt

SEQ ID NO: 357481 - DNA, 20 bp, Artificial Sequence
  Description of Artificial Sequence: Synthetic oligonucleotide
  Target: LAMA2; (+) strand; PAM type: YTN; PAM sequence: TTT
aatagcaactgaaattttct

SEQ ID NO: 357482 - DNA, 20 bp, Artificial Sequence
  Description of Artificial Sequence: Synthetic oligonucleotide
  Target: LAMA2; (+) strand; PAM type: YTN; PAM sequence: TTA
atagcaactgaaattttctt

SEQ ID NO: 357483 - DNA, 20 bp, Artificial Sequence
  Description of Artificial Sequence: Synthetic oligonucleotide
  Target: LAMA2; (+) strand; PAM type: YTN; PAM sequence: CTG
aaattttctttctttaacgt

SEQ ID NO: 357484 - DNA, 20 bp, Artificial Sequence
  Description of Artificial Sequence: Synthetic oligonucleotide
  Target: LAMA2; (+) strand; PAM type: YTN; PAM sequence: TTT
tctttctttaacgtaaatgt

SEQ ID NO: 357485 - DNA, 20 bp, Artificial Sequence
  Description of Artificial Sequence: Synthetic oligonucleotide
  Target: LAMA2; (+) strand; PAM type: YTN; PAM sequence: TTT
ctttctttaacgtaaatgtg

SEQ ID NO: 357486 - DNA, 20 bp, Artificial Sequence
  Description of Artificial Sequence: Synthetic oligonucleotide
  Target: LAMA2; (+) strand; PAM type: YTN; PAM sequence: TTC
tttctttaacgtaaatgtgt

SEQ ID NO: 357487 - DNA, 20 bp, Artificial Sequence
  Description of Artificial Sequence: Synthetic oligonucleotide
  Target: LAMA2; (+) strand; PAM type: YTN; PAM sequence: CTT
tctttaacgtaaatgtgttt

SEQ ID NO: 357488 - DNA, 20 bp, Artificial Sequence
  Description of Artificial Sequence: Synthetic oligonucleotide
  Target: LAMA2; (+) strand; PAM type: YTN; PAM sequence: TTT
ctttaacgtaaatgtgttta

SEQ ID NO: 357489 - DNA, 20 bp, Artificial Sequence
  Description of Artificial Sequence: Synthetic oligonucleotide
  Target: LAMA2; (+) strand; PAM type: YTN; PAM sequence: TTC
tttaacgtaaatgtgtttac

SEQ ID NO: 357490 - DNA, 20 bp, Artificial Sequence
  Description of Artificial Sequence: Synthetic oligonucleotide
  Target: LAMA2; (+) strand; PAM type: YTN; PAM sequence: CTT
taacgtaaatgtgtttacct

SEQ ID NO: 357491 - DNA, 20 bp, Artificial Sequence
  Description of Artificial Sequence: Synthetic oligonucleotide
  Target: LAMA2; (+) strand; PAM type: YTN; PAM sequence: TTT
aacgtaaatgtgtttacctt

SEQ ID NO: 357492 - DNA, 20 bp, Artificial Sequence
  Description of Artificial Sequence: Synthetic oligonucleotide
  Target: LAMA2; (+) strand; PAM type: YTN; PAM sequence: TTA
acgtaaatgtgtttaccttt

SEQ ID NO: 357493 - DNA, 20 bp, Artificial Sequence
  Description of Artificial Sequence: Synthetic oligonucleotide
  Target: LAMA2; (+) strand; PAM type: YTN; PAM sequence: TTT
acctttctaacttcactgcc

SEQ ID NO: 357494 - DNA, 20 bp, Artificial Sequence
  Description of Artificial Sequence: Synthetic oligonucleotide
  Target: LAMA2; (+) strand; PAM type: YTN; PAM sequence: TTA
cctttctaacttcactgcct

SEQ ID NO: 357495 - DNA, 20 bp, Artificial Sequence
  Description of Artificial Sequence: Synthetic oligonucleotide
  Target: LAMA2; (+) strand; PAM type: YTN; PAM sequence: CTT
tctaacttcactgcctacac

SEQ ID NO: 357496 - DNA, 20 bp, Artificial Sequence
  Description of Artificial Sequence: Synthetic oligonucleotide
  Target: LAMA2; (+) strand; PAM type: YTN; PAM sequence: TTT
ctaacttcactgcctacact

SEQ ID NO: 357497 - DNA, 20 bp, Artificial Sequence
  Description of Artificial Sequence: Synthetic oligonucleotide
  Target: LAMA2; (+) strand; PAM type: YTN; PAM sequence: TTC
taacttcactgcctacacta

SEQ ID NO: 357498 - DNA, 20 bp, Artificial Sequence
  Description of Artificial Sequence: Synthetic oligonucleotide
  Target: LAMA2; (+) strand; PAM type: YTN; PAM sequence: CTA
acttcactgcctacactacc

SEQ ID NO: 357499 - DNA, 20 bp, Artificial Sequence
  Description of Artificial Sequence: Synthetic oligonucleotide
  Target: LAMA2; (+) strand; PAM type: YTN; PAM sequence: CTT
cactgcctacactacccact

SEQ ID NO: 357500 - DNA, 20 bp, Artificial Sequence
  Description of Artificial Sequence: Synthetic oligonucleotide
  Target: LAMA2; (+) strand; PAM type: YTN; PAM sequence: TTC
actgcctacactacccactg

SEQ ID NO: 357501 - DNA, 20 bp, Artificial Sequence
  Description of Artificial Sequence: Synthetic oligonucleotide
  Target: LAMA2; (+) strand; PAM type: YTN; PAM sequence: CTG
cctacactacccactgcctt

SEQ ID NO: 357502 - DNA, 20 bp, Artificial Sequence
  Description of Artificial Sequence: Synthetic oligonucleotide
  Target: LAMA2; (+) strand; PAM type: YTN; PAM sequence: CTA
cactacccactgccttttca

SEQ ID NO: 357503 - DNA, 20 bp, Artificial Sequence
  Description of Artificial Sequence: Synthetic oligonucleotide
  Target: LAMA2; (+) strand; PAM type: YTN; PAM sequence: CTA
cccactgccttttcaaatct

SEQ ID NO: 357504 - DNA, 20 bp, Artificial Sequence
  Description of Artificial Sequence: Synthetic oligonucleotide
  Target: LAMA2; (+) strand; PAM type: YTN; PAM sequence: CTG
ccttttcaaatctgtgcaaa

SEQ ID NO: 357505 - DNA, 20 bp, Artificial Sequence
  Description of Artificial Sequence: Synthetic oligonucleotide
  Target: LAMA2; (+) strand; PAM type: YTN; PAM sequence: CTT
ttcaaatctgtgcaaagagc

SEQ ID NO: 357506 - DNA, 20 bp, Artificial Sequence
  Description of Artificial Sequence: Synthetic oligonucleotide
  Target: LAMA2; (+) strand; PAM type: YTN; PAM sequence: TTT
tcaaatctgtgcaaagagca

SEQ ID NO: 357507 - DNA, 20 bp, Artificial Sequence
  Description of Artificial Sequence: Synthetic oligonucleotide
  Target: LAMA2; (+) strand; PAM type: YTN; PAM sequence: TTT
caaatctgtgcaaagagcat

SEQ ID NO: 357508 - DNA, 20 bp, Artificial Sequence
  Description of Artificial Sequence: Synthetic oligonucleotide
  Target: LAMA2; (+) strand; PAM type: YTN; PAM sequence: TTC
aaatctgtgcaaagagcatg

SEQ ID NO: 357509 - DNA, 20 bp, Artificial Sequence
  Description of Artificial Sequence: Synthetic oligonucleotide
  Target: LAMA2; (+) strand; PAM type: YTN; PAM sequence: CTG
tgcaaagagcatgttgtctc

SEQ ID NO: 357510 - DNA, 20 bp, Artificial Sequence
  Description of Artificial Sequence: Synthetic oligonucleotide
  Target: LAMA2; (+) strand; PAM type: YTN; PAM sequence: TTG
tctccctatacagaaaagtg

SEQ ID NO: 357511 - DNA, 20 bp, Artificial Sequence
  Description of Artificial Sequence: Synthetic oligonucleotide
  Target: LAMA2; (+) strand; PAM type: YTN; PAM sequence: CTC
cctatacagaaaagtgtcag

SEQ ID NO: 357512 - DNA, 20 bp, Artificial Sequence
  Description of Artificial Sequence: Synthetic oligonucleotide
  Target: LAMA2; (+) strand; PAM type: YTN; PAM sequence: CTA
tacagaaaagtgtcagagga

SEQ ID NO: 357513 - DNA, 20 bp, Artificial Sequence
  Description of Artificial Sequence: Synthetic oligonucleotide
  Target: LAMA2; (+) strand; PAM type: YTN; PAM sequence: CTT
ctgggaatttcacacagcct

SEQ ID NO: 357514 - DNA, 20 bp, Artificial Sequence
  Description of Artificial Sequence: Synthetic oligonucleotide
  Target: LAMA2; (+) strand; PAM type: YTN; PAM sequence: TTC
tgggaatttcacacagcctg

SEQ ID NO: 357515 - DNA, 20 bp, Artificial Sequence
  Description of Artificial Sequence: Synthetic oligonucleotide
  Target: LAMA2; (+) strand; PAM type: YTN; PAM sequence: CTG
ggaatttcacacagcctgtg

SEQ ID NO: 357516 - DNA, 20 bp, Artificial Sequence
  Description of Artificial Sequence: Synthetic oligonucleotide
  Target: LAMA2; (+) strand; PAM type: YTN; PAM sequence: TTT
cacacagcctgtgtggctgg

SEQ ID NO: 357517 - DNA, 20 bp, Artificial Sequence
  Description of Artificial Sequence: Synthetic oligonucleotide
  Target: LAMA2; (+) strand; PAM type: YTN; PAM sequence: TTC
acacagcctgtgtggctgga

SEQ ID NO: 357518 - DNA, 20 bp, Artificial Sequence
  Description of Artificial Sequence: Synthetic oligonucleotide
  Target: LAMA2; (+) strand; PAM type: YTN; PAM sequence: CTG
tgtggctggacttaagagtg

SEQ ID NO: 357519 - DNA, 20 bp, Artificial Sequence
  Description of Artificial Sequence: Synthetic oligonucleotide
  Target: LAMA2; (+) strand; PAM type: YTN; PAM sequence: CTG
gacttaagagtgcagaatgg

SEQ ID NO: 357520 - DNA, 20 bp, Artificial Sequence
  Description of Artificial Sequence: Synthetic oligonucleotide
  Target: LAMA2; (+) strand; PAM type: YTN; PAM sequence: CTT
aagagtgcagaatggtagga

SEQ ID NO: 357521 - DNA, 20 bp, Artificial Sequence
  Description of Artificial Sequence: Synthetic oligonucleotide
  Target: LAMA2; (+) strand; PAM type: YTN; PAM sequence: TTA
agagtgcagaatggtaggaa

SEQ ID NO: 357522 - DNA, 20 bp, Artificial Sequence
  Description of Artificial Sequence: Synthetic oligonucleotide
  Target: LAMA2; (+) strand; PAM type: YTN; PAM sequence: CTG
gagagagaaagaagtctaga

SEQ ID NO: 357523 - DNA, 20 bp, Artificial Sequence
  Description of Artificial Sequence: Synthetic oligonucleotide
  Target: LAMA2; (+) strand; PAM type: YTN; PAM sequence: CTA
gacgggggaatgagaatcta

SEQ ID NO: 357524 - DNA, 20 bp, Artificial Sequence
  Description of Artificial Sequence: Synthetic oligonucleotide
  Target: LAMA2; (+) strand; PAM type: YTN; PAM sequence: CTA
gaacttatagggttgaatat

SEQ ID NO: 357525 - DNA, 20 bp, Artificial Sequence
  Description of Artificial Sequence: Synthetic oligonucleotide
  Target: LAMA2; (+) strand; PAM type: YTN; PAM sequence: CTT
atagggttgaatatactaag

SEQ ID NO: 357526 - DNA, 20 bp, Artificial Sequence
  Description of Artificial Sequence: Synthetic oligonucleotide
  Target: LAMA2; (+) strand; PAM type: YTN; PAM sequence: TTA
tagggttgaatatactaaga

SEQ ID NO: 357527 - DNA, 20 bp, Artificial Sequence
  Description of Artificial Sequence: Synthetic oligonucleotide
  Target: LAMA2; (+) strand; PAM type: YTN; PAM sequence: TTG
aatatactaagaatttgaga

SEQ ID NO: 357528 - DNA, 20 bp, Artificial Sequence
  Description of Artificial Sequence: Synthetic oligonucleotide
  Target: LAMA2; (+) strand; PAM type: YTN; PAM sequence: CTA
agaatttgagatattttact

SEQ ID NO: 357529 - DNA, 20 bp, Artificial Sequence
  Description of Artificial Sequence: Synthetic oligonucleotide
  Target: LAMA2; (+) strand; PAM type: YTN; PAM sequence: TTT
gagatattttacttggagtg

SEQ ID NO: 357530 - DNA, 20 bp, Artificial Sequence
  Description of Artificial Sequence: Synthetic oligonucleotide
  Target: LAMA2; (+) strand; PAM type: YTN; PAM sequence: TTG
agatattttacttggagtgt

SEQ ID NO: 357531 - DNA, 20 bp, Artificial Sequence
  Description of Artificial Sequence: Synthetic oligonucleotide
  Target: LAMA2; (+) strand; PAM type: YTN; PAM sequence: TTT
tacttggagtgtcattgaag

SEQ ID NO: 357532 - DNA, 20 bp, Artificial Sequence
  Description of Artificial Sequence: Synthetic oligonucleotide
  Target: LAMA2; (+) strand; PAM type: YTN; PAM sequence: TTT
acttggagtgtcattgaaga

SEQ ID NO: 357533 - DNA, 20 bp, Artificial Sequence
  Description of Artificial Sequence: Synthetic oligonucleotide
  Target: LAMA2; (+) strand; PAM type: YTN; PAM sequence: TTA
cttggagtgtcattgaagaa

SEQ ID NO: 357534 - DNA, 20 bp, Artificial Sequence
  Description of Artificial Sequence: Synthetic oligonucleotide
  Target: LAMA2; (+) strand; PAM type: YTN; PAM sequence: CTT
ggagtgtcattgaagaaatt

SEQ ID NO: 357535 - DNA, 20 bp, Artificial Sequence
  Description of Artificial Sequence: Synthetic oligonucleotide
  Target: LAMA2; (+) strand; PAM type: YTN; PAM sequence: TTG
gagtgtcattgaagaaattt

SEQ ID NO: 357536 - DNA, 20 bp, Artificial Sequence
  Description of Artificial Sequence: Synthetic oligonucleotide
  Target: LAMA2; (+) strand; PAM type: YTN; PAM sequence: TTG
aagaaatttaagctaaagac

SEQ ID NO: 357537 - DNA, 20 bp, Artificial Sequence
  Description of Artificial Sequence: Synthetic oligonucleotide
  Target: LAMA2; (+) strand; PAM type: YTN; PAM sequence: TTT
aagctaaagactgacattat

SEQ ID NO: 357538 - DNA, 20 bp, Artificial Sequence
  Description of Artificial Sequence: Synthetic oligonucleotide
  Target: LAMA2; (+) strand; PAM type: YTN; PAM sequence: TTA
agctaaagactgacattatc

SEQ ID NO: 357539 - DNA, 20 bp, Artificial Sequence
  Description of Artificial Sequence: Synthetic oligonucleotide
  Target: LAMA2; (+) strand; PAM type: YTN; PAM sequence: CTA
aagactgacattatcagagt

SEQ ID NO: 357540 - DNA, 20 bp, Artificial Sequence
  Description of Artificial Sequence: Synthetic oligonucleotide
  Target: LAMA2; (+) strand; PAM type: YTN; PAM sequence: CTG
acattatcagagttgtgttt

SEQ ID NO: 357541 - DNA, 20 bp, Artificial Sequence
  Description of Artificial Sequence: Synthetic oligonucleotide
  Target: LAMA2; (+) strand; PAM type: YTN; PAM sequence: TTA
tcagagttgtgttttataaa

SEQ ID NO: 357542 - DNA, 20 bp, Artificial Sequence
  Description of Artificial Sequence: Synthetic oligonucleotide
  Target: LAMA2; (+) strand; PAM type: YTN; PAM sequence: TTG
tgttttataaagactactat

SEQ ID NO: 357543 - DNA, 20 bp, Artificial Sequence
  Description of Artificial Sequence: Synthetic oligonucleotide
  Target: LAMA2; (+) strand; PAM type: YTN; PAM sequence: TTT
tataaagactactatttaga

SEQ ID NO: 357544 - DNA, 20 bp, Artificial Sequence
  Description of Artificial Sequence: Synthetic oligonucleotide
  Target: LAMA2; (+) strand; PAM type: YTN; PAM sequence: TTT
ataaagactactatttagat

SEQ ID NO: 357545 - DNA, 20 bp, Artificial Sequence
  Description of Artificial Sequence: Synthetic oligonucleotide
  Target: LAMA2; (+) strand; PAM type: YTN; PAM sequence: TTA
taaagactactatttagata

SEQ ID NO: 357546 - DNA, 20 bp, Artificial Sequence
  Description of Artificial Sequence: Synthetic oligonucleotide
  Target: LAMA2; (+) strand; PAM type: YTN; PAM sequence: CTA
ctatttagataaactatttc

SEQ ID NO: 357547 - DNA, 20 bp, Artificial Sequence
  Description of Artificial Sequence: Synthetic oligonucleotide
  Target: LAMA2; (+) strand; PAM type: YTN; PAM sequence: CTA
tttagataaactatttccta

SEQ ID NO: 357548 - DNA, 20 bp, Artificial Sequence
  Description of Artificial Sequence: Synthetic oligonucleotide
  Target: LAMA2; (+) strand; PAM type: YTN; PAM sequence: TTT
agataaactatttcctaaac

SEQ ID NO: 357549 - DNA, 20 bp, Artificial Sequence
  Description of Artificial Sequence: Synthetic oligonucleotide
  Target: LAMA2; (+) strand; PAM type: YTN; PAM sequence: TTA
gataaactatttcctaaaca

SEQ ID NO: 357550 - DNA, 20 bp, Artificial Sequence
  Description of Artificial Sequence: Synthetic oligonucleotide
  Target: LAMA2; (+) strand; PAM type: YTN; PAM sequence: CTA
tttcctaaacacttcttcct

SEQ ID NO: 357551 - DNA, 20 bp, Artificial Sequence
  Description of Artificial Sequence: Synthetic oligonucleotide
  Target: LAMA2; (+) strand; PAM type: YTN; PAM sequence: TTT
cctaaacacttcttcctttc

SEQ ID NO: 357552 - DNA, 20 bp, Artificial Sequence
  Description of Artificial Sequence: Synthetic oligonucleotide
  Target: LAMA2; (+) strand; PAM type: YTN; PAM sequence: TTC
ctaaacacttcttcctttca

SEQ ID NO: 357553 - DNA, 20 bp, Artificial Sequence
  Description of Artificial Sequence: Synthetic oligonucleotide
  Target: LAMA2; (+) strand; PAM type: YTN; PAM sequence: CTA
aacacttcttcctttcaact

SEQ ID NO: 357554 - DNA, 20 bp, Artificial Sequence
  Description of Artificial Sequence: Synthetic oligonucleotide
  Target: LAMA2; (+) strand; PAM type: YTN; PAM sequence: CTT
cttcctttcaactttaatca

SEQ ID NO: 357555 - DNA, 20 bp, Artificial Sequence
  Description of Artificial Sequence: Synthetic oligonucleotide
  Target: LAMA2; (+) strand; PAM type: YTN; PAM sequence: TTC
ttcctttcaactttaatcag

SEQ ID NO: 357556 - DNA, 20 bp, Artificial Sequence
  Description of Artificial Sequence: Synthetic oligonucleotide
  Target: LAMA2; (+) strand; PAM type: YTN; PAM sequence: CTT
cctttcaactttaatcagtg

SEQ ID NO: 357557 - DNA, 20 bp, Artificial Sequence
  Description of Artificial Sequence: Synthetic oligonucleotide
  Target: LAMA2; (+) strand; PAM type: YTN; PAM sequence: TTC
ctttcaactttaatcagtga

SEQ ID NO: 357558 - DNA, 20 bp, Artificial Sequence
  Description of Artificial Sequence: Synthetic oligonucleotide
  Target: LAMA2; (+) strand; PAM type: YTN; PAM sequence: CTT
tcaactttaatcagtgaact

SEQ ID NO: 357559 - DNA, 20 bp, Artificial Sequence
  Description of Artificial Sequence: Synthetic oligonucleotide
  Target: LAMA2; (+) strand; PAM type: YTN; PAM sequence: TTT
caactttaatcagtgaacta

SEQ ID NO: 357560 - DNA, 20 bp, Artificial Sequence
  Description of Artificial Sequence: Synthetic oligonucleotide
  Target: LAMA2; (+) strand; PAM type: YTN; PAM sequence: TTC
aactttaatcagtgaactaa

SEQ ID NO: 357561 - DNA, 20 bp, Artificial Sequence
  Description of Artificial Sequence: Synthetic oligonucleotide
  Target: LAMA2; (+) strand; PAM type: YTN; PAM sequence: CTT
taatcagtgaactaatcctg

SEQ ID NO: 357562 - DNA, 20 bp, Artificial Sequence
  Description of Artificial Sequence: Synthetic oligonucleotide
  Target: LAMA2; (+) strand; PAM type: YTN; PAM sequence: TTT
aatcagtgaactaatcctga

SEQ ID NO: 357563 - DNA, 20 bp, Artificial Sequence
  Description of Artificial Sequence: Synthetic oligonucleotide
  Target: LAMA2; (+) strand; PAM type: YTN; PAM sequence: TTA
atcagtgaactaatcctgaa

SEQ ID NO: 357564 - DNA, 20 bp, Artificial Sequence
  Description of Artificial Sequence: Synthetic oligonucleotide
  Target: LAMA2; (+) strand; PAM type: YTN; PAM sequence: CTA
atcctgaacagagctataaa

SEQ ID NO: 357565 - DNA, 20 bp, Artificial Sequence
  Description of Artificial Sequence: Synthetic oligonucleotide
  Target: LAMA2; (+) strand; PAM type: YTN; PAM sequence: CTG
aacagagctataaaatattt

SEQ ID NO: 357566 - DNA, 20 bp, Artificial Sequence
  Description of Artificial Sequence: Synthetic oligonucleotide
  Target: LAMA2; (+) strand; PAM type: YTN; PAM sequence: CTA
taaaatattttctctgcctg

SEQ ID NO: 357567 - DNA, 20 bp, Artificial Sequence
  Description of Artificial Sequence: Synthetic oligonucleotide
  Target: LAMA2; (+) strand; PAM type: YTN; PAM sequence: TTT
tctctgcctgcagtgctttt

SEQ ID NO: 357568 - DNA, 20 bp, Artificial Sequence
  Description of Artificial Sequence: Synthetic oligonucleotide
  Target: LAMA2; (+) strand; PAM type: YTN; PAM sequence: TTT
ctctgcctgcagtgctttta

SEQ ID NO: 357569 - DNA, 20 bp, Artificial Sequence
  Description of Artificial Sequence: Synthetic oligonucleotide
  Target: LAMA2; (+) strand; PAM type: YTN; PAM sequence: TTC
tctgcctgcagtgcttttaa

SEQ ID NO: 357570 - DNA, 20 bp, Artificial Sequence
  Description of Artificial Sequence: Synthetic oligonucleotide
  Target: LAMA2; (+) strand; PAM type: YTN; PAM sequence: CTC
tgcctgcagtgcttttaagt

SEQ ID NO: 357571 - DNA, 20 bp, Artificial Sequence
  Description of Artificial Sequence: Synthetic oligonucleotide
  Target: LAMA2; (+) strand; PAM type: YTN; PAM sequence: CTG
cctgcagtgcttttaagtca

SEQ ID NO: 357572 - DNA, 20 bp, Artificial Sequence
  Description of Artificial Sequence: Synthetic oligonucleotide
  Target: LAMA2; (+) strand; PAM type: YTN; PAM sequence: CTG
cagtgcttttaagtcaagcc

SEQ ID NO: 357573 - DNA, 20 bp, Artificial Sequence
  Description of Artificial Sequence: Synthetic oligonucleotide
  Target: LAMA2; (+) strand; PAM type: YTN; PAM sequence: CTT
ttaagtcaagcctcatatta

SEQ ID NO: 357574 - DNA, 20 bp, Artificial Sequence
  Description of Artificial Sequence: Synthetic oligonucleotide
  Target: LAMA2; (+) strand; PAM type: YTN; PAM sequence: TTT
taagtcaagcctcatattat

SEQ ID NO: 357575 - DNA, 20 bp, Artificial Sequence
  Description of Artificial Sequence: Synthetic oligonucleotide
  Target: LAMA2; (+) strand; PAM type: YTN; PAM sequence: TTT
aagtcaagcctcatattatg

SEQ ID NO: 357576 - DNA, 20 bp, Artificial Sequence
  Description of Artificial Sequence: Synthetic oligonucleotide
  Target: LAMA2; (+) strand; PAM type: YTN; PAM sequence: TTA
agtcaagcctcatattatga

SEQ ID NO: 357577 - DNA, 20 bp, Artificial Sequence
  Description of Artificial Sequence: Synthetic oligonucleotide
  Target: LAMA2; (+) strand; PAM type: YTN; PAM sequence: CTC
atattatgaaatattatcta

SEQ ID NO: 357578 - DNA, 20 bp, Artificial Sequence
  Description of Artificial Sequence: Synthetic oligonucleotide
  Target: LAMA2; (+) strand; PAM type: YTN; PAM sequence: TTA
tgaaatattatctatacgtt

SEQ ID NO: 357579 - DNA, 20 bp, Artificial Sequence
  Description of Artificial Sequence: Synthetic oligonucleotide
  Target: LAMA2; (+) strand; PAM type: YTN; PAM sequence: TTA
tctatacgttatcaactgta

SEQ ID NO: 357580 - DNA, 20 bp, Artificial Sequence
  Description of Artificial Sequence: Synthetic oligonucleotide
  Target: LAMA2; (+) strand; PAM type: YTN; PAM sequence: CTA
tacgttatcaactgtattgc

SEQ ID NO: 357581 - DNA, 20 bp, Artificial Sequence
  Description of Artificial Sequence: Synthetic oligonucleotide
  Target: LAMA2; (+) strand; PAM type: YTN; PAM sequence: TTA
tcaactgtattgctttcaga

SEQ ID NO: 357582 - DNA, 20 bp, Artificial Sequence
  Description of Artificial Sequence: Synthetic oligonucleotide
  Target: LAMA2; (+) strand; PAM type: YTN; PAM sequence: CTG
tattgctttcagagcagact

SEQ ID NO: 357583 - DNA, 20 bp, Artificial Sequence
  Description of Artificial Sequence: Synthetic oligonucleotide
  Target: LAMA2; (+) strand; PAM type: YTN; PAM sequence: TTG
ctttcagagcagacttcaaa

SEQ ID NO: 357584 - DNA, 20 bp, Artificial Sequence
  Description of Artificial Sequence: Synthetic oligonucleotide
  Target: LAMA2; (+) strand; PAM type: YTN; PAM sequence: CTT
tcagagcagacttcaaagaa

SEQ ID NO: 357585 - DNA, 20 bp, Artificial Sequence
  Description of Artificial Sequence: Synthetic oligonucleotide
  Target: LAMA2; (+) strand; PAM type: YTN; PAM sequence: TTT
cagagcagacttcaaagaat

SEQ ID NO: 357586 - DNA, 20 bp, Artificial Sequence
  Description of Artificial Sequence: Synthetic oligonucleotide
  Target: LAMA2; (+) strand; PAM type: YTN; PAM sequence: TTC
agagcagacttcaaagaatc

SEQ ID NO: 357587 - DNA, 20 bp, Artificial Sequence
  Description of Artificial Sequence: Synthetic oligonucleotide
  Target: LAMA2; (+) strand; PAM type: YTN; PAM sequence: CTT
caaagaatcaaccacagatg

SEQ ID NO: 357588 - DNA, 20 bp, Artificial Sequence
  Description of Artificial Sequence: Synthetic oligonucleotide
  Target: LAMA2; (+) strand; PAM type: YTN; PAM sequence: TTC
aaagaatcaaccacagatgg

SEQ ID NO: 357589 - DNA, 20 bp, Artificial Sequence
  Description of Artificial Sequence: Synthetic oligonucleotide
  Target: LAMA2; (+) strand; PAM type: YTN; PAM sequence: CTA
gtctaacttcctcttttgtt

SEQ ID NO: 357590 - DNA, 20 bp, Artificial Sequence
  Description of Artificial Sequence: Synthetic oligonucleotide
  Target: LAMA2; (+) strand; PAM type: YTN; PAM sequence: CTA
acttcctcttttgtttataa

SEQ ID NO: 357591 - DNA, 20 bp, Artificial Sequence
  Description of Artificial Sequence: Synthetic oligonucleotide
  Target: LAMA2; (+) strand; PAM type: YTN; PAM sequence: CTT
cctcttttgtttataaagtc

SEQ ID NO: 357592 - DNA, 20 bp, Artificial Sequence
  Description of Artificial Sequence: Synthetic oligonucleotide
  Target: LAMA2; (+) strand; PAM type: YTN; PAM sequence: TTC
ctcttttgtttataaagtcc

SEQ ID NO: 357593 - DNA, 20 bp, Artificial Sequence
  Description of Artificial Sequence: Synthetic oligonucleotide
  Target: LAMA2; (+) strand; PAM type: YTN; PAM sequence: CTC
ttttgtttataaagtcccac

SEQ ID NO: 357594 - DNA, 20 bp, Artificial Sequence
  Description of Artificial Sequence: Synthetic oligonucleotide
  Target: LAMA2; (+) strand; PAM type: YTN; PAM sequence: CTT
ttgtttataaagtcccaccc

SEQ ID NO: 357595 - DNA, 20 bp, Artificial Sequence
  Description of Artificial Sequence: Synthetic oligonucleotide
  Target: LAMA2; (+) strand; PAM type: YTN; PAM sequence: TTT
tgtttataaagtcccacccc

SEQ ID NO: 357596 - DNA, 20 bp, Artificial Sequence
  Description of Artificial Sequence: Synthetic oligonucleotide
  Target: LAMA2; (+) strand; PAM type: YTN; PAM sequence: TTT
gtttataaagtcccacccca

SEQ ID NO: 357597 - DNA, 20 bp, Artificial Sequence
  Description of Artificial Sequence: Synthetic oligonucleotide
  Target: LAMA2; (+) strand; PAM type: YTN; PAM sequence: TTG
tttataaagtcccaccccac

SEQ ID NO: 357598 - DNA, 20 bp, Artificial Sequence
  Description of Artificial Sequence: Synthetic oligonucleotide
  Target: LAMA2; (+) strand; PAM type: YTN; PAM sequence: TTT
ataaagtcccaccccaccct

SEQ ID NO: 357599 - DNA, 20 bp, Artificial Sequence
  Description of Artificial Sequence: Synthetic oligonucleotide
  Target: LAMA2; (+) strand; PAM type: YTN; PAM sequence: TTA
taaagtcccaccccaccctc

SEQ ID NO: 357600 - DNA, 20 bp, Artificial Sequence
  Description of Artificial Sequence: Synthetic oligonucleotide
  Target: LAMA2; (+) strand; PAM type: YTN; PAM sequence: CTC
cagactgccccactgataga

SEQ ID NO: 357601 - DNA, 20 bp, Artificial Sequence
  Description of Artificial Sequence: Synthetic oligonucleotide
  Target: LAMA2; (+) strand; PAM type: YTN; PAM sequence: CTG
ccccactgatagatcaaagt

SEQ ID NO: 357602 - DNA, 20 bp, Artificial Sequence
  Description of Artificial Sequence: Synthetic oligonucleotide
  Target: LAMA2; (+) strand; PAM type: YTN; PAM sequence: CTG
atagatcaaagtttcatagc

SEQ ID NO: 357603 - DNA, 20 bp, Artificial Sequence
  Description of Artificial Sequence: Synthetic oligonucleotide
  Target: LAMA2; (+) strand; PAM type: YTN; PAM sequence: TTT
catagccagccaaggggcag

SEQ ID NO: 357604 - DNA, 20 bp, Artificial Sequence
  Description of Artificial Sequence: Synthetic oligonucleotide
  Target: LAMA2; (+) strand; PAM type: YTN; PAM sequence: TTC
atagccagccaaggggcaga

SEQ ID NO: 357605 - DNA, 20 bp, Artificial Sequence
  Description of Artificial Sequence: Synthetic oligonucleotide
  Target: LAMA2; (+) strand; PAM type: YTN; PAM sequence: CTG
gtactcaagctttgatcatc

SEQ ID NO: 357606 - DNA, 20 bp, Artificial Sequence
  Description of Artificial Sequence: Synthetic oligonucleotide
  Target: LAMA2; (+) strand; PAM type: YTN; PAM sequence: CTC
aagctttgatcatcagatgc

SEQ ID NO: 357607 - DNA, 20 bp, Artificial Sequence
  Description of Artificial Sequence: Synthetic oligonucleotide
  Target: LAMA2; (+) strand; PAM type: YTN; PAM sequence: CTT
tgatcatcagatgctagaga

SEQ ID NO: 357608 - DNA, 20 bp, Artificial Sequence
  Description of Artificial Sequence: Synthetic oligonucleotide
  Target: LAMA2; (+) strand; PAM type: YTN; PAM sequence: TTT
gatcatcagatgctagagac

SEQ ID NO: 357609 - DNA, 20 bp, Artificial Sequence
  Description of Artificial Sequence: Synthetic oligonucleotide
  Target: LAMA2; (+) strand; PAM type: YTN; PAM sequence: TTG
atcatcagatgctagagaca

SEQ ID NO: 357610 - DNA, 20 bp, Artificial Sequence
  Description of Artificial Sequence: Synthetic oligonucleotide
  Target: LAMA2; (+) strand; PAM type: YTN; PAM sequence: CTA
gagacacagaatcccattca

SEQ ID NO: 357611 - DNA, 20 bp, Artificial Sequence
  Description of Artificial Sequence: Synthetic oligonucleotide
  Target: LAMA2; (+) strand; PAM type: YTN; PAM sequence: TTC
aactgtcttacaatgcctca

SEQ ID NO: 357612 - DNA, 20 bp, Artificial Sequence
  Description of Artificial Sequence: Synthetic oligonucleotide
  Target: LAMA2; (+) strand; PAM type: YTN; PAM sequence: CTG
tcttacaatgcctcaagggt

SEQ ID NO: 357613 - DNA, 20 bp, Artificial Sequence
  Description of Artificial Sequence: Synthetic oligonucleotide
  Target: LAMA2; (+) strand; PAM type: YTN; PAM sequence: CTT
acaatgcctcaagggtgacg

SEQ ID NO: 357614 - DNA, 20 bp, Artificial Sequence
  Description of Artificial Sequence: Synthetic oligonucleotide
  Target: LAMA2; (+) strand; PAM type: YTN; PAM sequence: TTA
caatgcctcaagggtgacgt

SEQ ID NO: 357615 - DNA, 20 bp, Artificial Sequence
  Description of Artificial Sequence: Synthetic oligonucleotide
  Target: LAMA2; (+) strand; PAM type: YTN; PAM sequence: CTC
aagggtgacgttagaaaggg

SEQ ID NO: 357616 - DNA, 20 bp, Artificial Sequence
  Description of Artificial Sequence: Synthetic oligonucleotide
  Target: LAMA2; (+) strand; PAM type: YTN; PAM sequence: TTA
gaaagggaagaaatgcaagg

SEQ ID NO: 357617 - DNA, 20 bp, Artificial Sequence
  Description of Artificial Sequence: Synthetic oligonucleotide
  Target: LAMA2; (+) strand; PAM type: YTN; PAM sequence: TTA
cttgttgtccagaaagtcaa

SEQ ID NO: 357618 - DNA, 20 bp, Artificial Sequence
  Description of Artificial Sequence: Synthetic oligonucleotide
  Target: LAMA2; (+) strand; PAM type: YTN; PAM sequence: CTT
gttgtccagaaagtcaacag

SEQ ID NO: 357619 - DNA, 20 bp, Artificial Sequence
  Description of Artificial Sequence: Synthetic oligonucleotide
  Target: LAMA2; (+) strand; PAM type: YTN; PAM sequence: TTG
ttgtccagaaagtcaacagg

SEQ ID NO: 357620 - DNA, 20 bp, Artificial Sequence
  Description of Artificial Sequence: Synthetic oligonucleotide
  Target: LAMA2; (+) strand; PAM type: YTN; PAM sequence: TTG
tccagaaagtcaacaggttg

SEQ ID NO: 357621 - DNA, 20 bp, Artificial Sequence
  Description of Artificial Sequence: Synthetic oligonucleotide
  Target: LAMA2; (+) strand; PAM type: YTN; PAM sequence: TTG
tacctggtttctatttctca

SEQ ID NO: 357622 - DNA, 20 bp, Artificial Sequence
  Description of Artificial Sequence: Synthetic oligonucleotide
  Target: LAMA2; (+) strand; PAM type: YTN; PAM sequence: CTG
gtttctatttctcatttaac

SEQ ID NO: 357623 - DNA, 20 bp, Artificial Sequence
  Description of Artificial Sequence: Synthetic oligonucleotide
  Target: LAMA2; (+) strand; PAM type: YTN; PAM sequence: TTT
ctatttctcatttaactaag

SEQ ID NO: 357624 - DNA, 20 bp, Artificial Sequence
  Description of Artificial Sequence: Synthetic oligonucleotide
  Target: LAMA2; (+) strand; PAM type: YTN; PAM sequence: TTC
tatttctcatttaactaagg

SEQ ID NO: 357625 - DNA, 20 bp, Artificial Sequence
  Description of Artificial Sequence: Synthetic oligonucleotide
  Target: LAMA2; (+) strand; PAM type: YTN; PAM sequence: CTA
tttctcatttaactaaggga

SEQ ID NO: 357626 - DNA, 20 bp, Artificial Sequence
  Description of Artificial Sequence: Synthetic oligonucleotide
  Target: LAMA2; (+) strand; PAM type: YTN; PAM sequence: TTT
ctcatttaactaagggaatt

SEQ ID NO: 357627 - DNA, 20 bp, Artificial Sequence
  Description of Artificial Sequence: Synthetic oligonucleotide
  Target: LAMA2; (+) strand; PAM type: YTN; PAM sequence: TTC
tcatttaactaagggaattg

SEQ ID NO: 357628 - DNA, 20 bp, Artificial Sequence
  Description of Artificial Sequence: Synthetic oligonucleotide
  Target: LAMA2; (+) strand; PAM type: YTN; PAM sequence: CTC
atttaactaagggaattgca

SEQ ID NO: 357629 - DNA, 20 bp, Artificial Sequence
  Description of Artificial Sequence: Synthetic oligonucleotide
  Target: LAMA2; (+) strand; PAM type: YTN; PAM sequence: TTT
aactaagggaattgcagtga

SEQ ID NO: 357630 - DNA, 20 bp, Artificial Sequence
  Description of Artificial Sequence: Synthetic oligonucleotide
  Target: LAMA2; (+) strand; PAM type: YTN; PAM sequence: TTA
actaagggaattgcagtgat

SEQ ID NO: 357631 - DNA, 20 bp, Artificial Sequence
  Description of Artificial Sequence: Synthetic oligonucleotide
  Target: LAMA2; (+) strand; PAM type: YTN; PAM sequence: CTA
agggaattgcagtgattcca

SEQ ID NO: 357632 - DNA, 20 bp, Artificial Sequence
  Description of Artificial Sequence: Synthetic oligonucleotide
  Target: LAMA2; (+) strand; PAM type: YTN; PAM sequence: TTG
cagtgattccacagctttgg

SEQ ID NO: 357633 - DNA, 20 bp, Artificial Sequence
  Description of Artificial Sequence: Synthetic oligonucleotide
  Target: LAMA2; (+) strand; PAM type: YTN; PAM sequence: TTC
cacagctttgggataagcag

SEQ ID NO: 357634 - DNA, 20 bp, Artificial Sequence
  Description of Artificial Sequence: Synthetic oligonucleotide
  Target: LAMA2; (+) strand; PAM type: YTN; PAM sequence: CTT
tgggataagcagagtcaaat

SEQ ID NO: 357635 - DNA, 20 bp, Artificial Sequence
  Description of Artificial Sequence: Synthetic oligonucleotide
  Target: LAMA2; (+) strand; PAM type: YTN; PAM sequence: TTT
gggataagcagagtcaaata

SEQ ID NO: 357636 - DNA, 20 bp, Artificial Sequence
  Description of Artificial Sequence: Synthetic oligonucleotide
  Target: LAMA2; (+) strand; PAM type: YTN; PAM sequence: TTG
ggataagcagagtcaaatag

SEQ ID NO: 357637 - DNA, 20 bp, Artificial Sequence
  Description of Artificial Sequence: Synthetic oligonucleotide
  Target: LAMA2; (+) strand; PAM type: YTN; PAM sequence: CTA
tgaagaaattttaaaaaata

SEQ ID NO: 357638 - DNA, 20 bp, Artificial Sequence
  Description of Artificial Sequence: Synthetic oligonucleotide
  Target: LAMA2; (+) strand; PAM type: YTN; PAM sequence: TTT
taaaaaatatttcagccaca

SEQ ID NO: 357639 - DNA, 20 bp, Artificial Sequence
  Description of Artificial Sequence: Synthetic oligonucleotide
  Target: LAMA2; (+) strand; PAM type: YTN; PAM sequence: TTT
aaaaaatatttcagccacat

SEQ ID NO: 357640 - DNA, 20 bp, Artificial Sequence
  Description of Artificial Sequence: Synthetic oligonucleotide
  Target: LAMA2; (+) strand; PAM type: YTN; PAM sequence: TTA
aaaaatatttcagccacata

SEQ ID NO: 357641 - DNA, 20 bp, Artificial Sequence
  Description of Artificial Sequence: Synthetic oligonucleotide
  Target: LAMA2; (+) strand; PAM type: YTN; PAM sequence: TTT
cagccacatagagtcaccct

SEQ ID NO: 357642 - DNA, 20 bp, Artificial Sequence
  Description of Artificial Sequence: Synthetic oligonucleotide
  Target: LAMA2; (+) strand; PAM type: YTN; PAM sequence: TTC
agccacatagagtcaccctt

SEQ ID NO: 357643 - DNA, 20 bp, Artificial Sequence
  Description of Artificial Sequence: Synthetic oligonucleotide
  Target: LAMA2; (+) strand; PAM type: YTN; PAM sequence: CTT
agcattctgcttcccatcac

SEQ ID NO: 357644 - DNA, 20 bp, Artificial Sequence
  Description of Artificial Sequence: Synthetic oligonucleotide
  Target: LAMA2; (+) strand; PAM type: YTN; PAM sequence: TTA
gcattctgcttcccatcacc

SEQ ID NO: 357645 - DNA, 20 bp, Artificial Sequence
  Description of Artificial Sequence: Synthetic oligonucleotide
  Target: LAMA2; (+) strand; PAM type: YTN; PAM sequence: TTC
tgcttcccatcacccacaac

SEQ ID NO: 357646 - DNA, 20 bp, Artificial Sequence
  Description of Artificial Sequence: Synthetic oligonucleotide
  Target: LAMA2; (+) strand; PAM type: YTN; PAM sequence: CTG
cttcccatcacccacaacat

SEQ ID NO: 357647 - DNA, 20 bp, Artificial Sequence
  Description of Artificial Sequence: Synthetic oligonucleotide
  Target: LAMA2; (+) strand; PAM type: YTN; PAM sequence: CTT
cccatcacccacaacatgaa

SEQ ID NO: 357648 - DNA, 20 bp, Artificial Sequence
  Description of Artificial Sequence: Synthetic oligonucleotide
  Target: LAMA2; (+) strand; PAM type: YTN; PAM sequence: TTC
ccatcacccacaacatgaag

SEQ ID NO: 357649 - DNA, 20 bp, Artificial Sequence
  Description of Artificial Sequence: Synthetic oligonucleotide
  Target: LAMA2; (+) strand; PAM type: YTN; PAM sequence: CTC
atgcatgtctagtaggttcc

SEQ ID NO: 357650 - DNA, 20 bp, Artificial Sequence
  Description of Artificial Sequence: Synthetic oligonucleotide
  Target: LAMA2; (+) strand; PAM type: YTN; PAM sequence: CTA
gtaggttcctggtagctggt

SEQ ID NO: 357651 - DNA, 20 bp, Artificial Sequence
  Description of Artificial Sequence: Synthetic oligonucleotide
  Target: LAMA2; (+) strand; PAM type: YTN; PAM sequence: TTC
ctggtagctggtaccctaag

SEQ ID NO: 357652 - DNA, 20 bp, Artificial Sequence
  Description of Artificial Sequence: Synthetic oligonucleotide
  Target: LAMA2; (+) strand; PAM type: YTN; PAM sequence: CTG
gtagctggtaccctaagccc

SEQ ID NO: 357653 - DNA, 20 bp, Artificial Sequence
  Description of Artificial Sequence: Synthetic oligonucleotide
  Target: LAMA2; (+) strand; PAM type: YTN; PAM sequence: CTG
gtaccctaagccctcagtaa

SEQ ID NO: 357654 - DNA, 20 bp, Artificial Sequence
  Description of Artificial Sequence: Synthetic oligonucleotide
  Target: LAMA2; (+) strand; PAM type: YTN; PAM sequence: CTA
agccctcagtaatcagtgtt

SEQ ID NO: 357655 - DNA, 20 bp, Artificial Sequence
  Description of Artificial Sequence: Synthetic oligonucleotide
  Target: LAMA2; (+) strand; PAM type: YTN; PAM sequence: CTC
agtaatcagtgttttgtcct

SEQ ID NO: 357656 - DNA, 20 bp, Artificial Sequence
  Description of Artificial Sequence: Synthetic oligonucleotide
  Target: LAMA2; (+) strand; PAM type: YTN; PAM sequence: TTT
tgtcctgactaggtaggatg

SEQ ID NO: 357657 - DNA, 20 bp, Artificial Sequence
  Description of Artificial Sequence: Synthetic oligonucleotide
  Target: LAMA2; (+) strand; PAM type: YTN; PAM sequence: TTT
gtcctgactaggtaggatgc

SEQ ID NO: 357658 - DNA, 20 bp, Artificial Sequence
  Description of Artificial Sequence: Synthetic oligonucleotide
  Target: LAMA2; (+) strand; PAM type: YTN; PAM sequence: TTG
tcctgactaggtaggatgct

SEQ ID NO: 357659 - DNA, 20 bp, Artificial Sequence
  Description of Artificial Sequence: Synthetic oligonucleotide
  Target: LAMA2; (+) strand; PAM type: YTN; PAM sequence: CTG
actaggtaggatgctttaaa

SEQ ID NO: 357660 - DNA, 20 bp, Artificial Sequence
  Description of Artificial Sequence: Synthetic oligonucleotide
  Target: LAMA2; (+) strand; PAM type: YTN; PAM sequence: CTA
ggtaggatgctttaaattag

SEQ ID NO: 357661 - DNA, 20 bp, Artificial Sequence
  Description of Artificial Sequence: Synthetic oligonucleotide
  Target: LAMA2; (+) strand; PAM type: YTN; PAM sequence: CTT
taaattagaggtgtagctgt

SEQ ID NO: 357662 - DNA, 20 bp, Artificial Sequence
  Description of Artificial Sequence: Synthetic oligonucleotide
  Target: LAMA2; (+) strand; PAM type: YTN; PAM sequence: TTT
aaattagaggtgtagctgta

SEQ ID NO: 357663 - DNA, 20 bp, Artificial Sequence
  Description of Artificial Sequence: Synthetic oligonucleotide
  Target: LAMA2; (+) strand; PAM type: YTN; PAM sequence: TTA
aattagaggtgtagctgtag

SEQ ID NO: 357664 - DNA, 20 bp, Artificial Sequence
  Description of Artificial Sequence: Synthetic oligonucleotide
  Target: LAMA2; (+) strand; PAM type: YTN; PAM sequence: TTA
gaggtgtagctgtaggcctg

SEQ ID NO: 357665 - DNA, 20 bp, Artificial Sequence
  Description of Artificial Sequence: Synthetic oligonucleotide
  Target: LAMA2; (+) strand; PAM type: YTN; PAM sequence: CTG
taggcctgaccttggctgaa

SEQ ID NO: 357666 - DNA, 20 bp, Artificial Sequence
  Description of Artificial Sequence: Synthetic oligonucleotide
  Target: LAMA2; (+) strand; PAM type: YTN; PAM sequence: CTG
accttggctgaagcataaag

SEQ ID NO: 357667 - DNA, 20 bp, Artificial Sequence
  Description of Artificial Sequence: Synthetic oligonucleotide
  Target: LAMA2; (+) strand; PAM type: YTN; PAM sequence: CTT
ggctgaagcataaagatgta

SEQ ID NO: 357668 - DNA, 20 bp, Artificial Sequence
  Description of Artificial Sequence: Synthetic oligonucleotide
  Target: LAMA2; (+) strand; PAM type: YTN; PAM sequence: TTG
gctgaagcataaagatgtaa

SEQ ID NO: 357669 - DNA, 20 bp, Artificial Sequence
  Description of Artificial Sequence: Synthetic oligonucleotide
  Target: LAMA2; (+) strand; PAM type: YTN; PAM sequence: CTG
aagcataaagatgtaaaaac

SEQ ID NO: 357670 - DNA, 20 bp, Artificial Sequence
  Description of Artificial Sequence: Synthetic oligonucleotide
  Target: LAMA2; (+) strand; PAM type: YTN; PAM sequence: TTA
tgcattcccagattcctcct

SEQ ID NO: 357671 - DNA, 20 bp, Artificial Sequence
  Description of Artificial Sequence: Synthetic oligonucleotide
  Target: LAMA2; (+) strand; PAM type: YTN; PAM sequence: TTC
ccagattcctcctttaaggt

SEQ ID NO: 357672 - DNA, 20 bp, Artificial Sequence
  Description of Artificial Sequence: Synthetic oligonucleotide
  Target: LAMA2; (+) strand; PAM type: YTN; PAM sequence: TTC
ctcctttaaggttccttcca

SEQ ID NO: 357673 - DNA, 20 bp, Artificial Sequence
  Description of Artificial Sequence: Synthetic oligonucleotide
  Target: LAMA2; (+) strand; PAM type: YTN; PAM sequence: CTC
ctttaaggttccttccattt

SEQ ID NO: 357674 - DNA, 20 bp, Artificial Sequence
  Description of Artificial Sequence: Synthetic oligonucleotide
  Target: LAMA2; (+) strand; PAM type: YTN; PAM sequence: CTT
taaggttccttccatttctg

SEQ ID NO: 357675 - DNA, 20 bp, Artificial Sequence
  Description of Artificial Sequence: Synthetic oligonucleotide
  Target: LAMA2; (+) strand; PAM type: YTN; PAM sequence: TTT
aaggttccttccatttctgg

SEQ ID NO: 357676 - DNA, 20 bp, Artificial Sequence
  Description of Artificial Sequence: Synthetic oligonucleotide
  Target: LAMA2; (+) strand; PAM type: YTN; PAM sequence: TTA
aggttccttccatttctggg

SEQ ID NO: 357677 - DNA, 20 bp, Artificial Sequence
  Description of Artificial Sequence: Synthetic oligonucleotide
  Target: LAMA2; (+) strand; PAM type: YTN; PAM sequence: TTC
cttccatttctgggccaggg

SEQ ID NO: 357678 - DNA, 20 bp, Artificial Sequence
  Description of Artificial Sequence: Synthetic oligonucleotide
  Target: LAMA2; (+) strand; PAM type: YTN; PAM sequence: CTT
ccatttctgggccagggatc

SEQ ID NO: 357679 - DNA, 20 bp, Artificial Sequence
  Description of Artificial Sequence: Synthetic oligonucleotide
  Target: LAMA2; (+) strand; PAM type: YTN; PAM sequence: TTC
catttctgggccagggatct

SEQ ID NO: 357680 - DNA, 20 bp, Artificial Sequence
  Description of Artificial Sequence: Synthetic oligonucleotide
  Target: LAMA2; (+) strand; PAM type: YTN; PAM sequence: TTT
ctgggccagggatctaggct

SEQ ID NO: 357681 - DNA, 20 bp, Artificial Sequence
  Description of Artificial Sequence: Synthetic oligonucleotide
  Target: LAMA2; (+) strand; PAM type: YTN; PAM sequence: TTC
tgggccagggatctaggctg

SEQ ID NO: 357682 - DNA, 20 bp, Artificial Sequence
  Description of Artificial Sequence: Synthetic oligonucleotide
  Target: LAMA2; (+) strand; PAM type: YTN; PAM sequence: CTG
ggccagggatctaggctgta

SEQ ID NO: 357683 - DNA, 20 bp, Artificial Sequence
  Description of Artificial Sequence: Synthetic oligonucleotide
  Target: LAMA2; (+) strand; PAM type: YTN; PAM sequence: CTA
ggctgtaggtccccacagca

SEQ ID NO: 357684 - DNA, 20 bp, Artificial Sequence
  Description of Artificial Sequence: Synthetic oligonucleotide
  Target: LAMA2; (+) strand; PAM type: YTN; PAM sequence: CTG
taggtccccacagcacttct

SEQ ID NO: 357685 - DNA, 20 bp, Artificial Sequence
  Description of Artificial Sequence: Synthetic oligonucleotide
  Target: LAMA2; (+) strand; PAM type: YTN; PAM sequence: CTT
ctgaccctatctgaaggaat

SEQ ID NO: 357686 - DNA, 20 bp, Artificial Sequence
  Description of Artificial Sequence: Synthetic oligonucleotide
  Target: LAMA2; (+) strand; PAM type: YTN; PAM sequence: TTC
tgaccctatctgaaggaata

SEQ ID NO: 357687 - DNA, 20 bp, Artificial Sequence
  Description of Artificial Sequence: Synthetic oligonucleotide
  Target: LAMA2; (+) strand; PAM type: YTN; PAM sequence: CTG
accctatctgaaggaataca

SEQ ID NO: 357688 - DNA, 20 bp, Artificial Sequence
  Description of Artificial Sequence: Synthetic oligonucleotide
  Target: LAMA2; (+) strand; PAM type: YTN; PAM sequence: CTA
tctgaaggaatacatacagt

SEQ ID NO: 357689 - DNA, 20 bp, Artificial Sequence
  Description of Artificial Sequence: Synthetic oligonucleotide
  Target: LAMA2; (+) strand; PAM type: YTN; PAM sequence: CTG
aaggaatacatacagtattg

SEQ ID NO: 357690 - DNA, 20 bp, Artificial Sequence
  Description of Artificial Sequence: Synthetic oligonucleotide
  Target: LAMA2; (+) strand; PAM type: YTN; PAM sequence: TTG
ccaggtgttgtcatagcacc

SEQ ID NO: 357691 - DNA, 20 bp, Artificial Sequence
  Description of Artificial Sequence: Synthetic oligonucleotide
  Target: LAMA2; (+) strand; PAM type: YTN; PAM sequence: TTG
tcatagcaccaaggctggtg

SEQ ID NO: 357692 - DNA, 20 bp, Artificial Sequence
  Description of Artificial Sequence: Synthetic oligonucleotide
  Target: LAMA2; (+) strand; PAM type: YTN; PAM sequence: CTG
gtgggttcaaatatccttaa

SEQ ID NO: 357693 - DNA, 20 bp, Artificial Sequence
  Description of Artificial Sequence: Synthetic oligonucleotide
  Target: LAMA2; (+) strand; PAM type: YTN; PAM sequence: TTC
aaatatccttaagcctcaaa

SEQ ID NO: 357694 - DNA, 20 bp, Artificial Sequence
  Description of Artificial Sequence: Synthetic oligonucleotide
  Target: LAMA2; (+) strand; PAM type: YTN; PAM sequence: CTT
aagcctcaaagtagaaattt

SEQ ID NO: 357695 - DNA, 20 bp, Artificial Sequence
  Description of Artificial Sequence: Synthetic oligonucleotide
  Target: LAMA2; (+) strand; PAM type: YTN; PAM sequence: TTA
agcctcaaagtagaaatttt

SEQ ID NO: 357696 - DNA, 20 bp, Artificial Sequence
  Description of Artificial Sequence: Synthetic oligonucleotide
  Target: LAMA2; (+) strand; PAM type: YTN; PAM sequence: CTC
aaagtagaaattttaaaaag

SEQ ID NO: 357697 - DNA, 20 bp, Artificial Sequence
  Description of Artificial Sequence: Synthetic oligonucleotide
  Target: LAMA2; (+) strand; PAM type: YTN; PAM sequence: TTT
taaaaagtgggaggggtgga

SEQ ID NO: 357698 - DNA, 20 bp, Artificial Sequence
  Description of Artificial Sequence: Synthetic oligonucleotide
  Target: LAMA2; (+) strand; PAM type: YTN; PAM sequence: TTT
aaaaagtgggaggggtggaa

SEQ ID NO: 357699 - DNA, 20 bp, Artificial Sequence
  Description of Artificial Sequence: Synthetic oligonucleotide
  Target: LAMA2; (+) strand; PAM type: YTN; PAM sequence: TTA
aaaagtgggaggggtggaaa

SEQ ID NO: 357700 - DNA, 20 bp, Artificial Sequence
  Description of Artificial Sequence: Synthetic oligonucleotide
  Target: LAMA2; (+) strand; PAM type: YTN; PAM sequence: CTG
aatgaaacaccacctttcag

SEQ ID NO: 357701 - DNA, 20 bp, Artificial Sequence
  Description of Artificial Sequence: Synthetic oligonucleotide
  Target: LAMA2; (+) strand; PAM type: YTN; PAM sequence: CTT
tcaggtacttgcatagtttc

SEQ ID NO: 357702 - DNA, 20 bp, Artificial Sequence
  Description of Artificial Sequence: Synthetic oligonucleotide
  Target: LAMA2; (+) strand; PAM type: YTN; PAM sequence: TTT
caggtacttgcatagtttct

SEQ ID NO: 357703 - DNA, 20 bp, Artificial Sequence
  Description of Artificial Sequence: Synthetic oligonucleotide
  Target: LAMA2; (+) strand; PAM type: YTN; PAM sequence: TTC
aggtacttgcatagtttctt

SEQ ID NO: 357704 - DNA, 20 bp, Artificial Sequence
  Description of Artificial Sequence: Synthetic oligonucleotide
  Target: LAMA2; (+) strand; PAM type: YTN; PAM sequence: CTT
gcatagtttctttctttttc

SEQ ID NO: 357705 - DNA, 20 bp, Artificial Sequence
  Description of Artificial Sequence: Synthetic oligonucleotide
  Target: LAMA2; (+) strand; PAM type: YTN; PAM sequence: TTG
catagtttctttctttttcc

SEQ ID NO: 357706 - DNA, 20 bp, Artificial Sequence
  Description of Artificial Sequence: Synthetic oligonucleotide
  Target: LAMA2; (+) strand; PAM type: YTN; PAM sequence: TTT
ctttctttttccctctgcat

SEQ ID NO: 357707 - DNA, 20 bp, Artificial Sequence
  Description of Artificial Sequence: Synthetic oligonucleotide
  Target: LAMA2; (+) strand; PAM type: YTN; PAM sequence: TTC
tttctttttccctctgcatt

SEQ ID NO: 357708 - DNA, 20 bp, Artificial Sequence
  Description of Artificial Sequence: Synthetic oligonucleotide
  Target: LAMA2; (+) strand; PAM type: YTN; PAM sequence: CTT
tctttttccctctgcattac

SEQ ID NO: 357709 - DNA, 20 bp, Artificial Sequence
  Description of Artificial Sequence: Synthetic oligonucleotide
  Target: LAMA2; (+) strand; PAM type: YTN; PAM sequence: TTT
ctttttccctctgcattaca

SEQ ID NO: 357710 - DNA, 20 bp, Artificial Sequence
  Description of Artificial Sequence: Synthetic oligonucleotide
  Target: LAMA2; (+) strand; PAM type: YTN; PAM sequence: TTC
tttttccctctgcattacaa

SEQ ID NO: 357711 - DNA, 20 bp, Artificial Sequence
  Description of Artificial Sequence: Synthetic oligonucleotide
  Target: LAMA2; (+) strand; PAM type: YTN; PAM sequence: CTT
tttccctctgcattacaaat

SEQ ID NO: 357712 - DNA, 20 bp, Artificial Sequence
  Description of Artificial Sequence: Synthetic oligonucleotide
  Target: LAMA2; (+) strand; PAM type: YTN; PAM sequence: TTT
ttccctctgcattacaaata

SEQ ID NO: 357713 - DNA, 20 bp, Artificial Sequence
  Description of Artificial Sequence: Synthetic oligonucleotide
  Target: LAMA2; (+) strand; PAM type: YTN; PAM sequence: TTT
tccctctgcattacaaatac

SEQ ID NO: 357714 - DNA, 20 bp, Artificial Sequence
  Description of Artificial Sequence: Synthetic oligonucleotide
  Target: LAMA2; (+) strand; PAM type: YTN; PAM sequence: TTT
ccctctgcattacaaataca

SEQ ID NO: 357715 - DNA, 20 bp, Artificial Sequence
  Description of Artificial Sequence: Synthetic oligonucleotide
  Target: LAMA2; (+) strand; PAM type: YTN; PAM sequence: TTC
cctctgcattacaaatacat

SEQ ID NO: 357716 - DNA, 20 bp, Artificial Sequence
  Description of Artificial Sequence: Synthetic oligonucleotide
  Target: LAMA2; (+) strand; PAM type: YTN; PAM sequence: CTC
tgcattacaaatacatacgc

SEQ ID NO: 357717 - DNA, 20 bp, Artificial Sequence
  Description of Artificial Sequence: Synthetic oligonucleotide
  Target: LAMA2; (+) strand; PAM type: YTN; PAM sequence: CTG
cattacaaatacatacgcaa

SEQ ID NO: 357718 - DNA, 20 bp, Artificial Sequence
  Description of Artificial Sequence: Synthetic oligonucleotide
  Target: LAMA2; (+) strand; PAM type: YTN; PAM sequence: TTA
caaatacatacgcaatactt

SEQ ID NO: 357719 - DNA, 20 bp, Artificial Sequence
  Description of Artificial Sequence: Synthetic oligonucleotide
  Target: LAMA2; (+) strand; PAM type: YTN; PAM sequence: CTT
tttcaggttgttttttccaa

SEQ ID NO: 357720 - DNA, 20 bp, Artificial Sequence
  Description of Artificial Sequence: Synthetic oligonucleotide
  Target: LAMA2; (+) strand; PAM type: YTN; PAM sequence: TTT
ttcaggttgttttttccaaa

SEQ ID NO: 357721 - DNA, 20 bp, Artificial Sequence
  Description of Artificial Sequence: Synthetic oligonucleotide
  Target: LAMA2; (+) strand; PAM type: YTN; PAM sequence: TTT
tcaggttgttttttccaaaa

SEQ ID NO: 357722 - DNA, 20 bp, Artificial Sequence
  Description of Artificial Sequence: Synthetic oligonucleotide
  Target: LAMA2; (+) strand; PAM type: YTN; PAM sequence: TTT
caggttgttttttccaaaag

SEQ ID NO: 357723 - DNA, 20 bp, Artificial Sequence
  Description of Artificial Sequence: Synthetic oligonucleotide
  Target: LAMA2; (+) strand; PAM type: YTN; PAM sequence: TTC
aggttgttttttccaaaagc

SEQ ID NO: 357724 - DNA, 20 bp, Artificial Sequence
  Description of Artificial Sequence: Synthetic oligonucleotide
  Target: LAMA2; (+) strand; PAM type: YTN; PAM sequence: TTG
ttttttccaaaagcaacaat

SEQ ID NO: 357725 - DNA, 20 bp, Artificial Sequence
  Description of Artificial Sequence: Synthetic oligonucleotide
  Target: LAMA2; (+) strand; PAM type: YTN; PAM sequence: TTT
tttccaaaagcaacaataaa

SEQ ID NO: 357726 - DNA, 20 bp, Artificial Sequence
  Description of Artificial Sequence: Synthetic oligonucleotide
  Target: LAMA2; (+) strand; PAM type: YTN; PAM sequence: TTT
ttccaaaagcaacaataaac

SEQ ID NO: 357727 - DNA, 20 bp, Artificial Sequence
  Description of Artificial Sequence: Synthetic oligonucleotide
  Target: LAMA2; (+) strand; PAM type: YTN; PAM sequence: TTT
tccaaaagcaacaataaact

SEQ ID NO: 357728 - DNA, 20 bp, Artificial Sequence
  Description of Artificial Sequence: Synthetic oligonucleotide
  Target: LAMA2; (+) strand; PAM type: YTN; PAM sequence: TTT
ccaaaagcaacaataaacta

SEQ ID NO: 357729 - DNA, 20 bp, Artificial Sequence
  Description of Artificial Sequence: Synthetic oligonucleotide
  Target: LAMA2; (+) strand; PAM type: YTN; PAM sequence: TTC
caaaagcaacaataaactac

SEQ ID NO: 357730 - DNA, 20 bp, Artificial Sequence
  Description of Artificial Sequence: Synthetic oligonucleotide
  Target: LAMA2; (+) strand; PAM type: YTN; PAM sequence: CTA
ctagtggagtaaaaaatacg

SEQ ID NO: 357731 - DNA, 20 bp, Artificial Sequence
  Description of Artificial Sequence: Synthetic oligonucleotide
  Target: LAMA2; (+) strand; PAM type: YTN; PAM sequence: CTA
gtggagtaaaaaatacggaa

SEQ ID NO: 357732 - DNA, 20 bp, Artificial Sequence
  Description of Artificial Sequence: Synthetic oligonucleotide
  Target: LAMA2; (+) strand; PAM type: YTN; PAM sequence: CTG
aaagtccaactgtttgatta

SEQ ID NO: 357733 - DNA, 20 bp, Artificial Sequence
  Description of Artificial Sequence: Synthetic oligonucleotide
  Target: LAMA2; (+) strand; PAM type: YTN; PAM sequence: CTG
tttgattaagtgtatgttat

SEQ ID NO: 357734 - DNA, 20 bp, Artificial Sequence
  Description of Artificial Sequence: Synthetic oligonucleotide
  Target: LAMA2; (+) strand; PAM type: YTN; PAM sequence: TTT
gattaagtgtatgttataac

SEQ ID NO: 357735 - DNA, 20 bp, Artificial Sequence
  Description of Artificial Sequence: Synthetic oligonucleotide
  Target: LAMA2; (+) strand; PAM type: YTN; PAM sequence: TTG
attaagtgtatgttataacc

SEQ ID NO: 357736 - DNA, 20 bp, Artificial Sequence
  Description of Artificial Sequence: Synthetic oligonucleotide
  Target: LAMA2; (+) strand; PAM type: YTN; PAM sequence: TTA
agtgtatgttataaccattg

SEQ ID NO: 357737 - DNA, 20 bp, Artificial Sequence
  Description of Artificial Sequence: Synthetic oligonucleotide
  Target: LAMA2; (+) strand; PAM type: YTN; PAM sequence: TTA
taaccattgtatgactttga

SEQ ID NO: 357738 - DNA, 20 bp, Artificial Sequence
  Description of Artificial Sequence: Synthetic oligonucleotide
  Target: LAMA2; (+) strand; PAM type: YTN; PAM sequence: TTG
tatgactttgagtgaatttc

SEQ ID NO: 357739 - DNA, 20 bp, Artificial Sequence
  Description of Artificial Sequence: Synthetic oligonucleotide
  Target: LAMA2; (+) strand; PAM type: YTN; PAM sequence: CTT
tgagtgaatttctattttta

SEQ ID NO: 357740 - DNA, 20 bp, Artificial Sequence
  Description of Artificial Sequence: Synthetic oligonucleotide
  Target: LAMA2; (+) strand; PAM type: YTN; PAM sequence: TTT
gagtgaatttctatttttaa

SEQ ID NO: 357741 - DNA, 20 bp, Artificial Sequence
  Description of Artificial Sequence: Synthetic oligonucleotide
  Target: LAMA2; (+) strand; PAM type: YTN; PAM sequence: TTG
agtgaatttctatttttaag

SEQ ID NO: 357742 - DNA, 20 bp, Artificial Sequence
  Description of Artificial Sequence: Synthetic oligonucleotide
  Target: LAMA2; (+) strand; PAM type: YTN; PAM sequence: TTT
ctatttttaagaaagtggta

SEQ ID NO: 357743 - DNA, 20 bp, Artificial Sequence
  Description of Artificial Sequence: Synthetic oligonucleotide
  Target: LAMA2; (+) strand; PAM type: YTN; PAM sequence: TTC
tatttttaagaaagtggtat

SEQ ID NO: 357744 - DNA, 20 bp, Artificial Sequence
  Description of Artificial Sequence: Synthetic oligonucleotide
  Target: LAMA2; (+) strand; PAM type: YTN; PAM sequence: CTA
tttttaagaaagtggtattt

SEQ ID NO: 357745 - DNA, 20 bp, Artificial Sequence
  Description of Artificial Sequence: Synthetic oligonucleotide
  Target: LAMA2; (+) strand; PAM type: YTN; PAM sequence: TTT
ttaagaaagtggtatttgga

SEQ ID NO: 357746 - DNA, 20 bp, Artificial Sequence
  Description of Artificial Sequence: Synthetic oligonucleotide
  Target: LAMA2; (+) strand; PAM type: YTN; PAM sequence: TTT
taagaaagtggtatttggaa

SEQ ID NO: 357747 - DNA, 20 bp, Artificial Sequence
  Description of Artificial Sequence: Synthetic oligonucleotide
  Target: LAMA2; (+) strand; PAM type: YTN; PAM sequence: TTT
aagaaagtggtatttggaac

SEQ ID NO: 357748 - DNA, 20 bp, Artificial Sequence
  Description of Artificial Sequence: Synthetic oligonucleotide
  Target: LAMA2; (+) strand; PAM type: YTN; PAM sequence: TTA
agaaagtggtatttggaacc

SEQ ID NO: 357749 - DNA, 20 bp, Artificial Sequence
  Description of Artificial Sequence: Synthetic oligonucleotide
  Target: LAMA2; (+) strand; PAM type: YTN; PAM sequence: TTT
ggaaccacaattttttaaaa

SEQ ID NO: 357750 - DNA, 20 bp, Artificial Sequence
  Description of Artificial Sequence: Synthetic oligonucleotide
  Target: LAMA2; (+) strand; PAM type: YTN; PAM sequence: TTG
gaaccacaattttttaaaaa

SEQ ID NO: 357751 - DNA, 20 bp, Artificial Sequence
  Description of Artificial Sequence: Synthetic oligonucleotide
  Target: LAMA2; (+) strand; PAM type: YTN; PAM sequence: TTT
tttaaaaagcataggttcaa

SEQ ID NO: 357752 - DNA, 20 bp, Artificial Sequence
  Description of Artificial Sequence: Synthetic oligonucleotide
  Target: LAMA2; (+) strand; PAM type: YTN; PAM sequence: TTT
ttaaaaagcataggttcaat

SEQ ID NO: 357753 - DNA, 20 bp, Artificial Sequence
  Description of Artificial Sequence: Synthetic oligonucleotide
  Target: LAMA2; (+) strand; PAM type: YTN; PAM sequence: TTT
taaaaagcataggttcaatg

SEQ ID NO: 357754 - DNA, 20 bp, Artificial Sequence
  Description of Artificial Sequence: Synthetic oligonucleotide
  Target: LAMA2; (+) strand; PAM type: YTN; PAM sequence: TTT
aaaaagcataggttcaatga

SEQ ID NO: 357755 - DNA, 20 bp, Artificial Sequence
  Description of Artificial Sequence: Synthetic oligonucleotide
  Target: LAMA2; (+) strand; PAM type: YTN; PAM sequence: TTA
aaaagcataggttcaatgaa

SEQ ID NO: 357756 - DNA, 20 bp, Artificial Sequence
  Description of Artificial Sequence: Synthetic oligonucleotide
  Target: LAMA2; (+) strand; PAM type: YTN; PAM sequence: TTC
aatgaaaacagattattata

SEQ ID NO: 357757 - DNA, 20 bp, Artificial Sequence
  Description of Artificial Sequence: Synthetic oligonucleotide
  Target: LAMA2; (+) strand; PAM type: YTN; PAM sequence: TTA
ttatagaataccttggaaac

SEQ ID NO: 357758 - DNA, 20 bp, Artificial Sequence
  Description of Artificial Sequence: Synthetic oligonucleotide
  Target: LAMA2; (+) strand; PAM type: YTN; PAM sequence: TTA
tagaataccttggaaactcc

SEQ ID NO: 357759 - DNA, 20 bp, Artificial Sequence
  Description of Artificial Sequence: Synthetic oligonucleotide
  Target: LAMA2; (+) strand; PAM type: YTN; PAM sequence: CTT
ggaaactcctagaaacatca

SEQ ID NO: 357760 - DNA, 20 bp, Artificial Sequence
  Description of Artificial Sequence: Synthetic oligonucleotide
  Target: LAMA2; (+) strand; PAM type: YTN; PAM sequence: TTG
gaaactcctagaaacatcaa

SEQ ID NO: 357761 - DNA, 20 bp, Artificial Sequence
  Description of Artificial Sequence: Synthetic oligonucleotide
  Target: LAMA2; (+) strand; PAM type: YTN; PAM sequence: CTC
ctagaaacatcaaggaaaaa

SEQ ID NO: 357762 - DNA, 20 bp, Artificial Sequence
  Description of Artificial Sequence: Synthetic oligonucleotide
  Target: LAMA2; (+) strand; PAM type: YTN; PAM sequence: CTA
gaaacatcaaggaaaaaaaa

SEQ ID NO: 357763 - DNA, 20 bp, Artificial Sequence
  Description of Artificial Sequence: Synthetic oligonucleotide
  Target: LAMA2; (+) strand; PAM type: YTN; PAM sequence: CTA
tgtgagtacatataatatgt

SEQ ID NO: 357764 - DNA, 20 bp, Artificial Sequence
  Description of Artificial Sequence: Synthetic oligonucleotide
  Target: LAMA2; (+) strand; PAM type: YTN; PAM sequence: CTA
atgatattcataatgctcag

SEQ ID NO: 357765 - DNA, 20 bp, Artificial Sequence
  Description of Artificial Sequence: Synthetic oligonucleotide
  Target: LAMA2; (+) strand; PAM type: YTN; PAM sequence: TTC
ataatgctcaggtttttttc

SEQ ID NO: 357766 - DNA, 20 bp, Artificial Sequence
  Description of Artificial Sequence: Synthetic oligonucleotide
  Target: LAMA2; (+) strand; PAM type: YTN; PAM sequence: CTC
aggtttttttctaaatgttt

SEQ ID NO: 357767 - DNA, 20 bp, Artificial Sequence
  Description of Artificial Sequence: Synthetic oligonucleotide
  Target: LAMA2; (+) strand; PAM type: YTN; PAM sequence: TTT
ttttctaaatgtttgtggtt

SEQ ID NO: 357768 - DNA, 20 bp, Artificial Sequence
  Description of Artificial Sequence: Synthetic oligonucleotide
  Target: LAMA2; (+) strand; PAM type: YTN; PAM sequence: TTT
tttctaaatgtttgtggttt

SEQ ID NO: 357769 - DNA, 20 bp, Artificial Sequence
  Description of Artificial Sequence: Synthetic oligonucleotide
  Target: LAMA2; (+) strand; PAM type: YTN; PAM sequence: TTT
ttctaaatgtttgtggtttg

SEQ ID NO: 357770 - DNA, 20 bp, Artificial Sequence
  Description of Artificial Sequence: Synthetic oligonucleotide
  Target: LAMA2; (+) strand; PAM type: YTN; PAM sequence: TTT
tctaaatgtttgtggtttgg

SEQ ID NO: 357771 - DNA, 20 bp, Artificial Sequence
  Description of Artificial Sequence: Synthetic oligonucleotide
  Target: LAMA2; (+) strand; PAM type: YTN; PAM sequence: TTT
ctaaatgtttgtggtttggt

SEQ ID NO: 357772 - DNA, 20 bp, Artificial Sequence
  Description of Artificial Sequence: Synthetic oligonucleotide
  Target: LAMA2; (+) strand; PAM type: YTN; PAM sequence: TTC
taaatgtttgtggtttggtt

SEQ ID NO: 357773 - DNA, 20 bp, Artificial Sequence
  Description of Artificial Sequence: Synthetic oligonucleotide
  Target: LAMA2; (+) strand; PAM type: YTN; PAM sequence: CTA
aatgtttgtggtttggtttt

SEQ ID NO: 357774 - DNA, 20 bp, Artificial Sequence
  Description of Artificial Sequence: Synthetic oligonucleotide
  Target: LAMA2; (+) strand; PAM type: YTN; PAM sequence: TTT
gtggtttggttttttttgtt

SEQ ID NO: 357775 - DNA, 20 bp, Artificial Sequence
  Description of Artificial Sequence: Synthetic oligonucleotide
  Target: LAMA2; (+) strand; PAM type: YTN; PAM sequence: TTG
tggtttggttttttttgttt

SEQ ID NO: 357776 - DNA, 20 bp, Artificial Sequence
  Description of Artificial Sequence: Synthetic oligonucleotide
  Target: LAMA2; (+) strand; PAM type: YTN; PAM sequence: TTT
ggttttttttgtttttaatt

SEQ ID NO: 357777 - DNA, 20 bp, Artificial Sequence
  Description of Artificial Sequence: Synthetic oligonucleotide
  Target: LAMA2; (+) strand; PAM type: YTN; PAM sequence: TTG
gttttttttgtttttaattt

SEQ ID NO: 357778 - DNA, 20 bp, Artificial Sequence
  Description of Artificial Sequence: Synthetic oligonucleotide
  Target: LAMA2; (+) strand; PAM type: YTN; PAM sequence: TTT
tttttgtttttaatttccaa

SEQ ID NO: 357779 - DNA, 20 bp, Artificial Sequence
  Description of Artificial Sequence: Synthetic oligonucleotide
  Target: LAMA2; (+) strand; PAM type: YTN; PAM sequence: TTT
ttttgtttttaatttccaaa

SEQ ID NO: 357780 - DNA, 20 bp, Artificial Sequence
  Description of Artificial Sequence: Synthetic oligonucleotide
  Target: LAMA2; (+) strand; PAM type: YTN; PAM sequence: TTT
tttgtttttaatttccaaaa

SEQ ID NO: 357781 - DNA, 20 bp, Artificial Sequence
  Description of Artificial Sequence: Synthetic oligonucleotide
  Target: LAMA2; (+) strand; PAM type: YTN; PAM sequence: TTT
ttgtttttaatttccaaaag

SEQ ID NO: 357782 - DNA, 20 bp, Artificial Sequence
  Description of Artificial Sequence: Synthetic oligonucleotide
  Target: LAMA2; (+) strand; PAM type: YTN; PAM sequence: TTT
tgtttttaatttccaaaagt

SEQ ID NO: 357783 - DNA, 20 bp, Artificial Sequence
  Description of Artificial Sequence: Synthetic oligonucleotide
  Target: LAMA2; (+) strand; PAM type: YTN; PAM sequence: TTT
gtttttaatttccaaaagtg

SEQ ID NO: 357784 - DNA, 20 bp, Artificial Sequence
  Description of Artificial Sequence: Synthetic oligonucleotide
  Target: LAMA2; (+) strand; PAM type: YTN; PAM sequence: TTG
tttttaatttccaaaagtgg

SEQ ID NO: 357785 - DNA, 20 bp, Artificial Sequence
  Description of Artificial Sequence: Synthetic oligonucleotide
  Target: LAMA2; (+) strand; PAM type: YTN; PAM sequence: TTT
ttaatttccaaaagtggaca

SEQ ID NO: 357786 - DNA, 20 bp, Artificial Sequence
  Description of Artificial Sequence: Synthetic oligonucleotide
  Target: LAMA2; (+) strand; PAM type: YTN; PAM sequence: TTT
taatttccaaaagtggacac

SEQ ID NO: 357787 - DNA, 20 bp, Artificial Sequence
  Description of Artificial Sequence: Synthetic oligonucleotide
  Target: LAMA2; (+) strand; PAM type: YTN; PAM sequence: TTT
aatttccaaaagtggacacg

SEQ ID NO: 357788 - DNA, 20 bp, Artificial Sequence
  Description of Artificial Sequence: Synthetic oligonucleotide
  Target: LAMA2; (+) strand; PAM type: YTN; PAM sequence: TTA
atttccaaaagtggacacga

SEQ ID NO: 357789 - DNA, 20 bp, Artificial Sequence
  Description of Artificial Sequence: Synthetic oligonucleotide
  Target: LAMA2; (+) strand; PAM type: YTN; PAM sequence: TTT
ccaaaagtggacacgaccag

SEQ ID NO: 357790 - DNA, 20 bp, Artificial Sequence
  Description of Artificial Sequence: Synthetic oligonucleotide
  Target: LAMA2; (+) strand; PAM type: YTN; PAM sequence: TTC
caaaagtggacacgaccagg

SEQ ID NO: 357791 - DNA, 20 bp, Artificial Sequence
  Description of Artificial Sequence: Synthetic oligonucleotide
  Target: LAMA2; (+) strand; PAM type: YTN; PAM sequence: CTG
atagatattttttaaaaatt

SEQ ID NO: 357792 - DNA, 20 bp, Artificial Sequence
  Description of Artificial Sequence: Synthetic oligonucleotide
  Target: LAMA2; (+) strand; PAM type: YTN; PAM sequence: TTT
tttaaaaattaatgatgact

SEQ ID NO: 357793 - DNA, 20 bp, Artificial Sequence
  Description of Artificial Sequence: Synthetic oligonucleotide
  Target: LAMA2; (+) strand; PAM type: YTN; PAM sequence: TTT
ttaaaaattaatgatgactg

SEQ ID NO: 357794 - DNA, 20 bp, Artificial Sequence
  Description of Artificial Sequence: Synthetic oligonucleotide
  Target: LAMA2; (+) strand; PAM type: YTN; PAM sequence: TTT
taaaaattaatgatgactgt

SEQ ID NO: 357795 - DNA, 20 bp, Artificial Sequence
  Description of Artificial Sequence: Synthetic oligonucleotide
  Target: LAMA2; (+) strand; PAM type: YTN; PAM sequence: TTT
aaaaattaatgatgactgtg

SEQ ID NO: 357796 - DNA, 20 bp, Artificial Sequence
  Description of Artificial Sequence: Synthetic oligonucleotide
  Target: LAMA2; (+) strand; PAM type: YTN; PAM sequence: TTA
aaaattaatgatgactgtgt

SEQ ID NO: 357797 - DNA, 20 bp, Artificial Sequence
  Description of Artificial Sequence: Synthetic oligonucleotide
  Target: LAMA2; (+) strand; PAM type: YTN; PAM sequence: TTA
atgatgactgtgtgttttct

SEQ ID NO: 357798 - DNA, 20 bp, Artificial Sequence
  Description of Artificial Sequence: Synthetic oligonucleotide
  Target: LAMA2; (+) strand; PAM type: YTN; PAM sequence: CTG
tgtgttttctctaagataca

SEQ ID NO: 357799 - DNA, 20 bp, Artificial Sequence
  Description of Artificial Sequence: Synthetic oligonucleotide
  Target: LAMA2; (+) strand; PAM type: YTN; PAM sequence: TTT
tctctaagatacaagatatg

SEQ ID NO: 357800 - DNA, 20 bp, Artificial Sequence
  Description of Artificial Sequence: Synthetic oligonucleotide
  Target: LAMA2; (+) strand; PAM type: YTN; PAM sequence: TTT
ctctaagatacaagatatga

SEQ ID NO: 357801 - DNA, 20 bp, Artificial Sequence
  Description of Artificial Sequence: Synthetic oligonucleotide
  Target: LAMA2; (+) strand; PAM type: YTN; PAM sequence: TTC
tctaagatacaagatatgag

SEQ ID NO: 357802 - DNA, 20 bp, Artificial Sequence
  Description of Artificial Sequence: Synthetic oligonucleotide
  Target: LAMA2; (+) strand; PAM type: YTN; PAM sequence: CTC
taagatacaagatatgagtg

SEQ ID NO: 357803 - DNA, 20 bp, Artificial Sequence
  Description of Artificial Sequence: Synthetic oligonucleotide
  Target: LAMA2; (+) strand; PAM type: YTN; PAM sequence: CTA
agatacaagatatgagtggc

SEQ ID NO: 357804 - DNA, 20 bp, Artificial Sequence
  Description of Artificial Sequence: Synthetic oligonucleotide
  Target: LAMA2; (+) strand; PAM type: YTN; PAM sequence: CTG
gtatctgactgaccttcctg

SEQ ID NO: 357805 - DNA, 20 bp, Artificial Sequence
  Description of Artificial Sequence: Synthetic oligonucleotide
  Target: LAMA2; (+) strand; PAM type: YTN; PAM sequence: CTG
actgaccttcctggccgcat

SEQ ID NO: 357806 - DNA, 20 bp, Artificial Sequence
  Description of Artificial Sequence: Synthetic oligonucleotide
  Target: LAMA2; (+) strand; PAM type: YTN; PAM sequence: CTG
accttcctggccgcattcga

SEQ ID NO: 357807 - DNA, 20 bp, Artificial Sequence
  Description of Artificial Sequence: Synthetic oligonucleotide
  Target: LAMA2; (+) strand; PAM type: YTN; PAM sequence: CTT
cctggccgcattcgagtggc

SEQ ID NO: 357808 - DNA, 20 bp, Artificial Sequence
  Description of Artificial Sequence: Synthetic oligonucleotide
  Target: LAMA2; (+) strand; PAM type: YTN; PAM sequence: TTC
ctggccgcattcgagtggct

SEQ ID NO: 357809 - DNA, 20 bp, Artificial Sequence
  Description of Artificial Sequence: Synthetic oligonucleotide
  Target: LAMA2; (+) strand; PAM type: YTN; PAM sequence: CTG
gccgcattcgagtggctccc

SEQ ID NO: 357810 - DNA, 20 bp, Artificial Sequence
  Description of Artificial Sequence: Synthetic oligonucleotide
  Target: LAMA2; (+) strand; PAM type: YTN; PAM sequence: TTC
gagtggctccccagcaggac

SEQ ID NO: 357811 - DNA, 20 bp, Artificial Sequence
  Description of Artificial Sequence: Synthetic oligonucleotide
  Target: LAMA2; (+) strand; PAM type: YTN; PAM sequence: CTC
cccagcaggacgacttggac

SEQ ID NO: 357812 - DNA, 20 bp, Artificial Sequence
  Description of Artificial Sequence: Synthetic oligonucleotide
  Target: LAMA2; (+) strand; PAM type: YTN; PAM sequence: CTT
ggactcacctcagcagatca

SEQ ID NO: 357813 - DNA, 20 bp, Artificial Sequence
  Description of Artificial Sequence: Synthetic oligonucleotide
  Target: LAMA2; (+) strand; PAM type: YTN; PAM sequence: TTG
gactcacctcagcagatcag

SEQ ID NO: 357814 - DNA, 20 bp, Artificial Sequence
  Description of Artificial Sequence: Synthetic oligonucleotide
  Target: LAMA2; (+) strand; PAM type: YTN; PAM sequence: CTC
acctcagcagatcagcatca

SEQ ID NO: 357815 - DNA, 20 bp, Artificial Sequence
  Description of Artificial Sequence: Synthetic oligonucleotide
  Target: LAMA2; (+) strand; PAM type: YTN; PAM sequence: CTC
agcagatcagcatcagtaac

SEQ ID NO: 357816 - DNA, 20 bp, Artificial Sequence
  Description of Artificial Sequence: Synthetic oligonucleotide
  Target: LAMA2; (+) strand; PAM type: YTN; PAM sequence: CTG
ccgcacagctactactggag

SEQ ID NO: 357817 - DNA, 20 bp, Artificial Sequence
  Description of Artificial Sequence: Synthetic oligonucleotide
  Target: LAMA2; (+) strand; PAM type: YTN; PAM sequence: CTA
ctactggagcgcgccggctc

SEQ ID NO: 357818 - DNA, 20 bp, Artificial Sequence
  Description of Artificial Sequence: Synthetic oligonucleotide
  Target: LAMA2; (+) strand; PAM type: YTN; PAM sequence: CTA
ctggagcgcgccggctccct

SEQ ID NO: 357819 - DNA, 20 bp, Artificial Sequence
  Description of Artificial Sequence: Synthetic oligonucleotide
  Target: LAMA2; (+) strand; PAM type: YTN; PAM sequence: CTG
gagcgcgccggctccctatc

SEQ ID NO: 357820 - DNA, 20 bp, Artificial Sequence
  Description of Artificial Sequence: Synthetic oligonucleotide
  Target: LAMA2; (+) strand; PAM type: YTN; PAM sequence: CTC
cctatctgggaaacaaagta

SEQ ID NO: 357821 - DNA, 20 bp, Artificial Sequence
  Description of Artificial Sequence: Synthetic oligonucleotide
  Target: LAMA2; (+) strand; PAM type: YTN; PAM sequence: CTA
tctgggaaacaaagtaagtc

SEQ ID NO: 357822 - DNA, 20 bp, Artificial Sequence
  Description of Artificial Sequence: Synthetic oligonucleotide
  Target: LAMA2; (+) strand; PAM type: YTN; PAM sequence: CTG
ggaaacaaagtaagtccacg

SEQ ID NO: 357823 - DNA, 20 bp, Artificial Sequence
  Description of Artificial Sequence: Synthetic oligonucleotide
  Target: LAMA2; (+) strand; PAM type: YTN; PAM sequence: CTT
gcttcccgctattctgcttt

SEQ ID NO: 357824 - DNA, 20 bp, Artificial Sequence
  Description of Artificial Sequence: Synthetic oligonucleotide
  Target: LAMA2; (+) strand; PAM type: YTN; PAM sequence: TTG
cttcccgctattctgcttta

SEQ ID NO: 357825 - DNA, 20 bp, Artificial Sequence
  Description of Artificial Sequence: Synthetic oligonucleotide
  Target: LAMA2; (+) strand; PAM type: YTN; PAM sequence: CTT
cccgctattctgctttaact

SEQ ID NO: 357826 - DNA, 20 bp, Artificial Sequence
  Description of Artificial Sequence: Synthetic oligonucleotide
  Target: LAMA2; (+) strand; PAM type: YTN; PAM sequence: TTC
ccgctattctgctttaactg

SEQ ID NO: 357827 - DNA, 20 bp, Artificial Sequence
  Description of Artificial Sequence: Synthetic oligonucleotide
  Target: LAMA2; (+) strand; PAM type: YTN; PAM sequence: CTA
ttctgctttaactgactgat

SEQ ID NO: 357828 - DNA, 20 bp, Artificial Sequence
  Description of Artificial Sequence: Synthetic oligonucleotide
  Target: LAMA2; (+) strand; PAM type: YTN; PAM sequence: TTC
tgctttaactgactgatcgt

SEQ ID NO: 357829 - DNA, 20 bp, Artificial Sequence
  Description of Artificial Sequence: Synthetic oligonucleotide
  Target: LAMA2; (+) strand; PAM type: YTN; PAM sequence: CTG
ctttaactgactgatcgtga

SEQ ID NO: 357830 - DNA, 20 bp, Artificial Sequence
  Description of Artificial Sequence: Synthetic oligonucleotide
  Target: LAMA2; (+) strand; PAM type: YTN; PAM sequence: CTT
taactgactgatcgtgagaa

SEQ ID NO: 357831 - DNA, 20 bp, Artificial Sequence
  Description of Artificial Sequence: Synthetic oligonucleotide
  Target: LAMA2; (+) strand; PAM type: YTN; PAM sequence: TTT
aactgactgatcgtgagaat

SEQ ID NO: 357832 - DNA, 20 bp, Artificial Sequence
  Description of Artificial Sequence: Synthetic oligonucleotide
  Target: LAMA2; (+) strand; PAM type: YTN; PAM sequence: TTA
actgactgatcgtgagaatg

SEQ ID NO: 357833 - DNA, 20 bp, Artificial Sequence
  Description of Artificial Sequence: Synthetic oligonucleotide
  Target: LAMA2; (+) strand; PAM type: YTN; PAM sequence: CTG
actgatcgtgagaatgggtt

SEQ ID NO: 357834 - DNA, 20 bp, Artificial Sequence
  Description of Artificial Sequence: Synthetic oligonucleotide
  Target: LAMA2; (+) strand; PAM type: YTN; PAM sequence: CTG
atcgtgagaatgggttttag

SEQ ID NO: 357835 - DNA, 20 bp, Artificial Sequence
  Description of Artificial Sequence: Synthetic oligonucleotide
  Target: LAMA2; (+) strand; PAM type: YTN; PAM sequence: TTT
tagttggtaattcttttaaa

SEQ ID NO: 357836 - DNA, 20 bp, Artificial Sequence
  Description of Artificial Sequence: Synthetic oligonucleotide
  Target: LAMA2; (+) strand; PAM type: YTN; PAM sequence: TTT
agttggtaattcttttaaag

SEQ ID NO: 357837 - DNA, 20 bp, Artificial Sequence
  Description of Artificial Sequence: Synthetic oligonucleotide
  Target: LAMA2; (+) strand; PAM type: YTN; PAM sequence: TTA
gttggtaattcttttaaaga

SEQ ID NO: 357838 - DNA, 20 bp, Artificial Sequence
  Description of Artificial Sequence: Synthetic oligonucleotide
  Target: LAMA2; (+) strand; PAM type: YTN; PAM sequence: TTG
gtaattcttttaaagaaaga

SEQ ID NO: 357839 - DNA, 20 bp, Artificial Sequence
  Description of Artificial Sequence: Synthetic oligonucleotide
  Target: LAMA2; (+) strand; PAM type: YTN; PAM sequence: TTC
ttttaaagaaagacaaaatc

SEQ ID NO: 357840 - DNA, 20 bp, Artificial Sequence
  Description of Artificial Sequence: Synthetic oligonucleotide
  Target: LAMA2; (+) strand; PAM type: YTN; PAM sequence: CTT
ttaaagaaagacaaaatcaa

SEQ ID NO: 357841 - DNA, 20 bp, Artificial Sequence
  Description of Artificial Sequence: Synthetic oligonucleotide
  Target: LAMA2; (+) strand; PAM type: YTN; PAM sequence: TTT
taaagaaagacaaaatcaaa

SEQ ID NO: 357842 - DNA, 20 bp, Artificial Sequence
  Description of Artificial Sequence: Synthetic oligonucleotide
  Target: LAMA2; (+) strand; PAM type: YTN; PAM sequence: TTT
aaagaaagacaaaatcaaat

SEQ ID NO: 357843 - DNA, 20 bp, Artificial Sequence
  Description of Artificial Sequence: Synthetic oligonucleotide
  Target: LAMA2; (+) strand; PAM type: YTN; PAM sequence: TTA
aagaaagacaaaatcaaata

SEQ ID NO: 357844 - DNA, 20 bp, Artificial Sequence
  Description of Artificial Sequence: Synthetic oligonucleotide
  Target: LAMA2; (+) strand; PAM type: YTN; PAM sequence: CTG
aattggattgccagaaccag

SEQ ID NO: 357845 - DNA, 20 bp, Artificial Sequence
  Description of Artificial Sequence: Synthetic oligonucleotide
  Target: LAMA2; (+) strand; PAM type: YTN; PAM sequence: TTG
gattgccagaaccagctaaa

SEQ ID NO: 357846 - DNA, 20 bp, Artificial Sequence
  Description of Artificial Sequence: Synthetic oligonucleotide
  Target: LAMA2; (+) strand; PAM type: YTN; PAM sequence: TTG
ccagaaccagctaaatcaca

SEQ ID NO: 357847 - DNA, 20 bp, Artificial Sequence
  Description of Artificial Sequence: Synthetic oligonucleotide
  Target: LAMA2; (+) strand; PAM type: YTN; PAM sequence: CTA
aatcacattgagttgggcgt

SEQ ID NO: 357848 - DNA, 20 bp, Artificial Sequence
  Description of Artificial Sequence: Synthetic oligonucleotide
  Target: LAMA2; (+) strand; PAM type: YTN; PAM sequence: TTG
agttgggcgtttcttccatg

SEQ ID NO: 357849 - DNA, 20 bp, Artificial Sequence
  Description of Artificial Sequence: Synthetic oligonucleotide
  Target: LAMA2; (+) strand; PAM type: YTN; PAM sequence: TTG
ggcgtttcttccatgttgca

SEQ ID NO: 357850 - DNA, 20 bp, Artificial Sequence
  Description of Artificial Sequence: Synthetic oligonucleotide
  Target: LAMA2; (+) strand; PAM type: YTN; PAM sequence: TTT
cttccatgttgcacaagacc

SEQ ID NO: 357851 - DNA, 20 bp, Artificial Sequence
  Description of Artificial Sequence: Synthetic oligonucleotide
  Target: LAMA2; (+) strand; PAM type: YTN; PAM sequence: TTC
ttccatgttgcacaagacct

SEQ ID NO: 357852 - DNA, 20 bp, Artificial Sequence
  Description of Artificial Sequence: Synthetic oligonucleotide
  Target: LAMA2; (+) strand; PAM type: YTN; PAM sequence: CTT
ccatgttgcacaagacctta

SEQ ID NO: 357853 - DNA, 20 bp, Artificial Sequence
  Description of Artificial Sequence: Synthetic oligonucleotide
  Target: LAMA2; (+) strand; PAM type: YTN; PAM sequence: TTC
catgttgcacaagaccttaa

SEQ ID NO: 357854 - DNA, 20 bp, Artificial Sequence
  Description of Artificial Sequence: Synthetic oligonucleotide
  Target: LAMA2; (+) strand; PAM type: YTN; PAM sequence: TTG
cacaagaccttaaagagcca

SEQ ID NO: 357855 - DNA, 20 bp, Artificial Sequence
  Description of Artificial Sequence: Synthetic oligonucleotide
  Target: LAMA2; (+) strand; PAM type: YTN; PAM sequence: CTT
aaagagccacggcatcctta

SEQ ID NO: 357856 - DNA, 20 bp, Artificial Sequence
  Description of Artificial Sequence: Synthetic oligonucleotide
  Target: LAMA2; (+) strand; PAM type: YTN; PAM sequence: TTA
aagagccacggcatccttaa

SEQ ID NO: 357857 - DNA, 20 bp, Artificial Sequence
  Description of Artificial Sequence: Synthetic oligonucleotide
  Target: LAMA2; (+) strand; PAM type: YTN; PAM sequence: CTT
aatatgcaactttgtatagc

SEQ ID NO: 357858 - DNA, 20 bp, Artificial Sequence
  Description of Artificial Sequence: Synthetic oligonucleotide
  Target: LAMA2; (+) strand; PAM type: YTN; PAM sequence: TTA
atatgcaactttgtatagct

SEQ ID NO: 357859 - DNA, 20 bp, Artificial Sequence
  Description of Artificial Sequence: Synthetic oligonucleotide
  Target: LAMA2; (+) strand; PAM type: YTN; PAM sequence: CTT
tgtatagctgatgttctatg

SEQ ID NO: 357860 - DNA, 20 bp, Artificial Sequence
  Description of Artificial Sequence: Synthetic oligonucleotide
  Target: LAMA2; (+) strand; PAM type: YTN; PAM sequence: TTT
gtatagctgatgttctatgt

SEQ ID NO: 357861 - DNA, 20 bp, Artificial Sequence
  Description of Artificial Sequence: Synthetic oligonucleotide
  Target: LAMA2; (+) strand; PAM type: YTN; PAM sequence: TTG
tatagctgatgttctatgta

SEQ ID NO: 357862 - DNA, 20 bp, Artificial Sequence
  Description of Artificial Sequence: Synthetic oligonucleotide
  Target: LAMA2; (+) strand; PAM type: YTN; PAM sequence: CTG
atgttctatgtaaacttttt

SEQ ID NO: 357863 - DNA, 20 bp, Artificial Sequence
  Description of Artificial Sequence: Synthetic oligonucleotide
  Target: LAMA2; (+) strand; PAM type: YTN; PAM sequence: TTC
tatgtaaactttttgaatgg

SEQ ID NO: 357864 - DNA, 20 bp, Artificial Sequence
  Description of Artificial Sequence: Synthetic oligonucleotide
  Target: LAMA2; (+) strand; PAM type: YTN; PAM sequence: CTA
tgtaaactttttgaatgggc

SEQ ID NO: 357865 - DNA, 20 bp, Artificial Sequence
  Description of Artificial Sequence: Synthetic oligonucleotide
  Target: LAMA2; (+) strand; PAM type: YTN; PAM sequence: CTT
tttgaatgggcaaataaatt

SEQ ID NO: 357866 - DNA, 20 bp, Artificial Sequence
  Description of Artificial Sequence: Synthetic oligonucleotide
  Target: LAMA2; (+) strand; PAM type: YTN; PAM sequence: TTT
ttgaatgggcaaataaatta

SEQ ID NO: 357867 - DNA, 20 bp, Artificial Sequence
  Description of Artificial Sequence: Synthetic oligonucleotide
  Target: LAMA2; (+) strand; PAM type: YTN; PAM sequence: TTT
tgaatgggcaaataaattaa

SEQ ID NO: 357868 - DNA, 20 bp, Artificial Sequence
  Description of Artificial Sequence: Synthetic oligonucleotide
  Target: LAMA2; (+) strand; PAM type: YTN; PAM sequence: TTT
gaatgggcaaataaattaat

SEQ ID NO: 357869 - DNA, 20 bp, Artificial Sequence
  Description of Artificial Sequence: Synthetic oligonucleotide
  Target: LAMA2; (+) strand; PAM type: YTN; PAM sequence: TTG
aatgggcaaataaattaatg

SEQ ID NO: 357870 - DNA, 20 bp, Artificial Sequence
  Description of Artificial Sequence: Synthetic oligonucleotide
  Target: LAMA2; (+) strand; PAM type: YTN; PAM sequence: TTA
atgaagccgctagtgtattt

SEQ ID NO: 357871 - DNA, 20 bp, Artificial Sequence
  Description of Artificial Sequence: Synthetic oligonucleotide
  Target: LAMA2; (+) strand; PAM type: YTN; PAM sequence: CTA
gtgtattttcgtaaagcaaa

SEQ ID NO: 357872 - DNA, 20 bp, Artificial Sequence
  Description of Artificial Sequence: Synthetic oligonucleotide
  Target: LAMA2; (+) strand; PAM type: YTN; PAM sequence: TTT
tcgtaaagcaaattataggt

SEQ ID NO: 357873 - DNA, 20 bp, Artificial Sequence
  Description of Artificial Sequence: Synthetic oligonucleotide
  Target: LAMA2; (+) strand; PAM type: YTN; PAM sequence: TTT
cgtaaagcaaattataggta

SEQ ID NO: 357874 - DNA, 20 bp, Artificial Sequence
  Description of Artificial Sequence: Synthetic oligonucleotide
  Target: LAMA2; (+) strand; PAM type: YTN; PAM sequence: TTC
gtaaagcaaattataggtat

SEQ ID NO: 357875 - DNA, 20 bp, Artificial Sequence
  Description of Artificial Sequence: Synthetic oligonucleotide
  Target: LAMA2; (+) strand; PAM type: YTN; PAM sequence: TTA
taggtattggaagaaactgt

SEQ ID NO: 357876 - DNA, 20 bp, Artificial Sequence
  Description of Artificial Sequence: Synthetic oligonucleotide
  Target: LAMA2; (+) strand; PAM type: YTN; PAM sequence: TTG
gaagaaactgtgttgtgttt

SEQ ID NO: 357877 - DNA, 20 bp, Artificial Sequence
  Description of Artificial Sequence: Synthetic oligonucleotide
  Target: LAMA2; (+) strand; PAM type: YTN; PAM sequence: CTG
tgttgtgtttatgtgaaaag

SEQ ID NO: 357878 - DNA, 20 bp, Artificial Sequence
  Description of Artificial Sequence: Synthetic oligonucleotide
  Target: LAMA2; (+) strand; PAM type: YTN; PAM sequence: TTG
tgtttatgtgaaaagagctg

SEQ ID NO: 357879 - DNA, 20 bp, Artificial Sequence
  Description of Artificial Sequence: Synthetic oligonucleotide
  Target: LAMA2; (+) strand; PAM type: YTN; PAM sequence: TTT
atgtgaaaagagctgttttc

SEQ ID NO: 357880 - DNA, 20 bp, Artificial Sequence
  Description of Artificial Sequence: Synthetic oligonucleotide
  Target: LAMA2; (+) strand; PAM type: YTN; PAM sequence: TTA
tgtgaaaagagctgttttct

SEQ ID NO: 357881 - DNA, 20 bp, Artificial Sequence
  Description of Artificial Sequence: Synthetic oligonucleotide
  Target: LAMA2; (+) strand; PAM type: YTN; PAM sequence: CTG
ttttctggagttgtctgtgg

SEQ ID NO: 357882 - DNA, 20 bp, Artificial Sequence
  Description of Artificial Sequence: Synthetic oligonucleotide
  Target: LAMA2; (+) strand; PAM type: YTN; PAM sequence: TTT
tctggagttgtctgtggtgg

SEQ ID NO: 357883 - DNA, 20 bp, Artificial Sequence
  Description of Artificial Sequence: Synthetic oligonucleotide
  Target: LAMA2; (+) strand; PAM type: YTN; PAM sequence: TTT
ctggagttgtctgtggtggg

SEQ ID NO: 357884 - DNA, 20 bp, Artificial Sequence
  Description of Artificial Sequence: Synthetic oligonucleotide
  Target: LAMA2; (+) strand; PAM type: YTN; PAM sequence: TTC
tggagttgtctgtggtggga

SEQ ID NO: 357885 - DNA, 20 bp, Artificial Sequence
  Description of Artificial Sequence: Synthetic oligonucleotide
  Target: LAMA2; (+) strand; PAM type: YTN; PAM sequence: CTG
gagttgtctgtggtgggata

SEQ ID NO: 357886 - DNA, 20 bp, Artificial Sequence
  Description of Artificial Sequence: Synthetic oligonucleotide
  Target: LAMA2; (+) strand; PAM type: YTN; PAM sequence: TTG
tctgtggtgggatacttact

SEQ ID NO: 357887 - DNA, 20 bp, Artificial Sequence
  Description of Artificial Sequence: Synthetic oligonucleotide
  Target: LAMA2; (+) strand; PAM type: YTN; PAM sequence: CTG
tggtgggatacttactaaag

SEQ ID NO: 357888 - DNA, 20 bp, Artificial Sequence
  Description of Artificial Sequence: Synthetic oligonucleotide
  Target: LAMA2; (+) strand; PAM type: YTN; PAM sequence: CTT
actaaagtttttctcatcgg

SEQ ID NO: 357889 - DNA, 20 bp, Artificial Sequence
  Description of Artificial Sequence: Synthetic oligonucleotide
  Target: LAMA2; (+) strand; PAM type: YTN; PAM sequence: TTA
ctaaagtttttctcatcggt

SEQ ID NO: 357890 - DNA, 20 bp, Artificial Sequence
  Description of Artificial Sequence: Synthetic oligonucleotide
  Target: LAMA2; (+) strand; PAM type: YTN; PAM sequence: CTA
aagtttttctcatcggtttc

SEQ ID NO: 357891 - DNA, 20 bp, Artificial Sequence
  Description of Artificial Sequence: Synthetic oligonucleotide
  Target: LAMA2; (+) strand; PAM type: YTN; PAM sequence: TTT
ttctcatcggtttctatttc

SEQ ID NO: 357892 - DNA, 20 bp, Artificial Sequence
  Description of Artificial Sequence: Synthetic oligonucleotide
  Target: LAMA2; (+) strand; PAM type: YTN; PAM sequence: TTT
tctcatcggtttctatttca

SEQ ID NO: 357893 - DNA, 20 bp, Artificial Sequence
  Description of Artificial Sequence: Synthetic oligonucleotide
  Target: LAMA2; (+) strand; PAM type: YTN; PAM sequence: TTT
ctcatcggtttctatttcat

SEQ ID NO: 357894 - DNA, 20 bp, Artificial Sequence
  Description of Artificial Sequence: Synthetic oligonucleotide
  Target: LAMA2; (+) strand; PAM type: YTN; PAM sequence: TTC
tcatcggtttctatttcatt

SEQ ID NO: 357895 - DNA, 20 bp, Artificial Sequence
  Description of Artificial Sequence: Synthetic oligonucleotide
  Target: LAMA2; (+) strand; PAM type: YTN; PAM sequence: CTC
atcggtttctatttcatttc

SEQ ID NO: 357896 - DNA, 20 bp, Artificial Sequence
  Description of Artificial Sequence: Synthetic oligonucleotide
  Target: LAMA2; (+) strand; PAM type: YTN; PAM sequence: TTT
ctatttcatttcaaaactga

SEQ ID NO: 357897 - DNA, 20 bp, Artificial Sequence
  Description of Artificial Sequence: Synthetic oligonucleotide
  Target: LAMA2; (+) strand; PAM type: YTN; PAM sequence: TTC
tatttcatttcaaaactgat

SEQ ID NO: 357898 - DNA, 20 bp, Artificial Sequence
  Description of Artificial Sequence: Synthetic oligonucleotide
  Target: LAMA2; (+) strand; PAM type: YTN; PAM sequence: CTA
tttcatttcaaaactgatac

SEQ ID NO: 357899 - DNA, 20 bp, Artificial Sequence
  Description of Artificial Sequence: Synthetic oligonucleotide
  Target: LAMA2; (+) strand; PAM type: YTN; PAM sequence: TTT
catttcaaaactgatactca

SEQ ID NO: 357900 - DNA, 20 bp, Artificial Sequence
  Description of Artificial Sequence: Synthetic oligonucleotide
  Target: LAMA2; (+) strand; PAM type: YTN; PAM sequence: TTC
atttcaaaactgatactcag

SEQ ID NO: 357901 - DNA, 20 bp, Artificial Sequence
  Description of Artificial Sequence: Synthetic oligonucleotide
  Target: LAMA2; (+) strand; PAM type: YTN; PAM sequence: TTT
caaaactgatactcaggaga

SEQ ID NO: 357902 - DNA, 20 bp, Artificial Sequence
  Description of Artificial Sequence: Synthetic oligonucleotide
  Target: LAMA2; (+) strand; PAM type: YTN; PAM sequence: TTC
aaaactgatactcaggagat

SEQ ID NO: 357903 - DNA, 20 bp, Artificial Sequence
  Description of Artificial Sequence: Synthetic oligonucleotide
  Target: LAMA2; (+) strand; PAM type: YTN; PAM sequence: CTG
atactcaggagatttacttt

SEQ ID NO: 357904 - DNA, 20 bp, Artificial Sequence
  Description of Artificial Sequence: Synthetic oligonucleotide
  Target: LAMA2; (+) strand; PAM type: YTN; PAM sequence: CTC
aggagatttacttttccttc

SEQ ID NO: 357905 - DNA, 20 bp, Artificial Sequence
  Description of Artificial Sequence: Synthetic oligonucleotide
  Target: LAMA2; (+) strand; PAM type: YTN; PAM sequence: TTT
acttttccttctacctgata

SEQ ID NO: 357906 - DNA, 20 bp, Artificial Sequence
  Description of Artificial Sequence: Synthetic oligonucleotide
  Target: LAMA2; (+) strand; PAM type: YTN; PAM sequence: TTA
cttttccttctacctgatat

SEQ ID NO: 357907 - DNA, 20 bp, Artificial Sequence
  Description of Artificial Sequence: Synthetic oligonucleotide
  Target: LAMA2; (+) strand; PAM type: YTN; PAM sequence: CTT
ttccttctacctgatatgaa

SEQ ID NO: 357908 - DNA, 20 bp, Artificial Sequence
  Description of Artificial Sequence: Synthetic oligonucleotide
  Target: LAMA2; (+) strand; PAM type: YTN; PAM sequence: TTT
tccttctacctgatatgaat

SEQ ID NO: 357909 - DNA, 20 bp, Artificial Sequence
  Description of Artificial Sequence: Synthetic oligonucleotide
  Target: LAMA2; (+) strand; PAM type: YTN; PAM sequence: TTT
ccttctacctgatatgaatg

SEQ ID NO: 357910 - DNA, 20 bp, Artificial Sequence
  Description of Artificial Sequence: Synthetic oligonucleotide
  Target: LAMA2; (+) strand; PAM type: YTN; PAM sequence: TTC
cttctacctgatatgaatgt

SEQ ID NO: 357911 - DNA, 20 bp, Artificial Sequence
  Description of Artificial Sequence: Synthetic oligonucleotide
  Target: LAMA2; (+) strand; PAM type: YTN; PAM sequence: CTT
ctacctgatatgaatgttaa

SEQ ID NO: 357912 - DNA, 20 bp, Artificial Sequence
  Description of Artificial Sequence: Synthetic oligonucleotide
  Target: LAMA2; (+) strand; PAM type: YTN; PAM sequence: TTC
tacctgatatgaatgttaat

SEQ ID NO: 357913 - DNA, 20 bp, Artificial Sequence
  Description of Artificial Sequence: Synthetic oligonucleotide
  Target: LAMA2; (+) strand; PAM type: YTN; PAM sequence: CTA
cctgatatgaatgttaattg

SEQ ID NO: 357914 - DNA, 20 bp, Artificial Sequence
  Description of Artificial Sequence: Synthetic oligonucleotide
  Target: LAMA2; (+) strand; PAM type: YTN; PAM sequence: CTG
atatgaatgttaattggaaa

SEQ ID NO: 357915 - DNA, 20 bp, Artificial Sequence
  Description of Artificial Sequence: Synthetic oligonucleotide
  Target: LAMA2; (+) strand; PAM type: YTN; PAM sequence: TTA
attggaaaagaaatgtatta

SEQ ID NO: 357916 - DNA, 20 bp, Artificial Sequence
  Description of Artificial Sequence: Synthetic oligonucleotide
  Target: LAMA2; (+) strand; PAM type: YTN; PAM sequence: TTG
gaaaagaaatgtattacata

SEQ ID NO: 357917 - DNA, 20 bp, Artificial Sequence
  Description of Artificial Sequence: Synthetic oligonucleotide
  Target: LAMA2; (+) strand; PAM type: YTN; PAM sequence: TTA
cataactaattaaatgcttg

SEQ ID NO: 357918 - DNA, 20 bp, Artificial Sequence
  Description of Artificial Sequence: Synthetic oligonucleotide
  Target: LAMA2; (+) strand; PAM type: YTN; PAM sequence: CTA
attaaatgcttgccatgagg

SEQ ID NO: 357919 - DNA, 20 bp, Artificial Sequence
  Description of Artificial Sequence: Synthetic oligonucleotide
  Target: LAMA2; (+) strand; PAM type: YTN; PAM sequence: TTA
aatgcttgccatgaggctta

SEQ ID NO: 357920 - DNA, 20 bp, Artificial Sequence
  Description of Artificial Sequence: Synthetic oligonucleotide
  Target: LAMA2; (+) strand; PAM type: YTN; PAM sequence: CTT
gccatgaggcttatgtaaac

SEQ ID NO: 357921 - DNA, 20 bp, Artificial Sequence
  Description of Artificial Sequence: Synthetic oligonucleotide
  Target: LAMA2; (+) strand; PAM type: YTN; PAM sequence: TTG
ccatgaggcttatgtaaaca

SEQ ID NO: 357922 - DNA, 20 bp, Artificial Sequence
  Description of Artificial Sequence: Synthetic oligonucleotide
  Target: LAMA2; (+) strand; PAM type: YTN; PAM sequence: CTT
atgtaaacaacatatttgct

SEQ ID NO: 357923 - DNA, 20 bp, Artificial Sequence
  Description of Artificial Sequence: Synthetic oligonucleotide
  Target: LAMA2; (+) strand; PAM type: YTN; PAM sequence: TTA
tgtaaacaacatatttgctg

SEQ ID NO: 357924 - DNA, 20 bp, Artificial Sequence
  Description of Artificial Sequence: Synthetic oligonucleotide
  Target: LAMA2; (+) strand; PAM type: YTN; PAM sequence: TTT
gctggagctcaggcagaaac

SEQ ID NO: 357925 - DNA, 20 bp, Artificial Sequence
  Description of Artificial Sequence: Synthetic oligonucleotide
  Target: LAMA2; (+) strand; PAM type: YTN; PAM sequence: TTG
ctggagctcaggcagaaact

SEQ ID NO: 357926 - DNA, 20 bp, Artificial Sequence
  Description of Artificial Sequence: Synthetic oligonucleotide
  Target: LAMA2; (+) strand; PAM type: YTN; PAM sequence: CTG
gagctcaggcagaaactacc

SEQ ID NO: 357927 - DNA, 20 bp, Artificial Sequence
  Description of Artificial Sequence: Synthetic oligonucleotide
  Target: LAMA2; (+) strand; PAM type: YTN; PAM sequence: CTC
aggcagaaactaccctaaaa

SEQ ID NO: 357928 - DNA, 20 bp, Artificial Sequence
  Description of Artificial Sequence: Synthetic oligonucleotide
  Target: LAMA2; (+) strand; PAM type: YTN; PAM sequence: CTA
ccctaaaagtgccagattgg

SEQ ID NO: 357929 - DNA, 20 bp, Artificial Sequence
  Description of Artificial Sequence: Synthetic oligonucleotide
  Target: LAMA2; (+) strand; PAM type: YTN; PAM sequence: CTA
aaagtgccagattggaagca

SEQ ID NO: 357930 - DNA, 20 bp, Artificial Sequence
  Description of Artificial Sequence: Synthetic oligonucleotide
  Target: LAMA2; (+) strand; PAM type: YTN; PAM sequence: TTG
gaagcacgtttgttttaaag

SEQ ID NO: 357931 - DNA, 20 bp, Artificial Sequence
  Description of Artificial Sequence: Synthetic oligonucleotide
  Target: LAMA2; (+) strand; PAM type: YTN; PAM sequence: TTT
gttttaaagcccacacatat

SEQ ID NO: 357932 - DNA, 20 bp, Artificial Sequence
  Description of Artificial Sequence: Synthetic oligonucleotide
  Target: LAMA2; (+) strand; PAM type: YTN; PAM sequence: TTG
ttttaaagcccacacatatg

SEQ ID NO: 357933 - DNA, 20 bp, Artificial Sequence
  Description of Artificial Sequence: Synthetic oligonucleotide
  Target: LAMA2; (+) strand; PAM type: YTN; PAM sequence: TTT
taaagcccacacatatgtaa

SEQ ID NO: 357934 - DNA, 20 bp, Artificial Sequence
  Description of Artificial Sequence: Synthetic oligonucleotide
  Target: LAMA2; (+) strand; PAM type: YTN; PAM sequence: TTT
aaagcccacacatatgtaaa

SEQ ID NO: 357935 - DNA, 20 bp, Artificial Sequence
  Description of Artificial Sequence: Synthetic oligonucleotide
  Target: LAMA2; (+) strand; PAM type: YTN; PAM sequence: TTA
aagcccacacatatgtaaaa

SEQ ID NO: 357936 - DNA, 20 bp, Artificial Sequence
  Description of Artificial Sequence: Synthetic oligonucleotide
  Target: LAMA2; (+) strand; PAM type: YTN; PAM sequence: CTC
agaaatacaggcttattttt

SEQ ID NO: 357937 - DNA, 20 bp, Artificial Sequence
  Description of Artificial Sequence: Synthetic oligonucleotide
  Target: LAMA2; (+) strand; PAM type: YTN; PAM sequence: CTT
atttttttctgttgtggatt

SEQ ID NO: 357938 - DNA, 20 bp, Artificial Sequence
  Description of Artificial Sequence: Synthetic oligonucleotide
  Target: LAMA2; (+) strand; PAM type: YTN; PAM sequence: TTA
tttttttctgttgtggatta

SEQ ID NO: 357939 - DNA, 20 bp, Artificial Sequence
  Description of Artificial Sequence: Synthetic oligonucleotide
  Target: LAMA2; (+) strand; PAM type: YTN; PAM sequence: TTT
ttttctgttgtggattactt

SEQ ID NO: 357940 - DNA, 20 bp, Artificial Sequence
  Description of Artificial Sequence: Synthetic oligonucleotide
  Target: LAMA2; (+) strand; PAM type: YTN; PAM sequence: TTT
tttctgttgtggattacttc

SEQ ID NO: 357941 - DNA, 20 bp, Artificial Sequence
  Description of Artificial Sequence: Synthetic oligonucleotide
  Target: LAMA2; (+) strand; PAM type: YTN; PAM sequence: TTT
ttctgttgtggattacttct

SEQ ID NO: 357942 - DNA, 20 bp, Artificial Sequence
  Description of Artificial Sequence: Synthetic oligonucleotide
  Target: LAMA2; (+) strand; PAM type: YTN; PAM sequence: TTT
tctgttgtggattacttcta

SEQ ID NO: 357943 - DNA, 20 bp, Artificial Sequence
  Description of Artificial Sequence: Synthetic oligonucleotide
  Target: LAMA2; (+) strand; PAM type: YTN; PAM sequence: TTT
ctgttgtggattacttctat

SEQ ID NO: 357944 - DNA, 20 bp, Artificial Sequence
  Description of Artificial Sequence: Synthetic oligonucleotide
  Target: LAMA2; (+) strand; PAM type: YTN; PAM sequence: TTC
tgttgtggattacttctatc

SEQ ID NO: 357945 - DNA, 20 bp, Artificial Sequence
  Description of Artificial Sequence: Synthetic oligonucleotide
  Target: LAMA2; (+) strand; PAM type: YTN; PAM sequence: CTG
ttgtggattacttctatcta

SEQ ID NO: 357946 - DNA, 20 bp, Artificial Sequence
  Description of Artificial Sequence: Synthetic oligonucleotide
  Target: LAMA2; (+) strand; PAM type: YTN; PAM sequence: TTG
tggattacttctatctagat

SEQ ID NO: 357947 - DNA, 20 bp, Artificial Sequence
  Description of Artificial Sequence: Synthetic oligonucleotide
  Target: LAMA2; (+) strand; PAM type: YTN; PAM sequence: TTA
cttctatctagatagatatc

SEQ ID NO: 357948 - DNA, 20 bp, Artificial Sequence
  Description of Artificial Sequence: Synthetic oligonucleotide
  Target: LAMA2; (+) strand; PAM type: YTN; PAM sequence: CTT
ctatctagatagatatcctg

SEQ ID NO: 357949 - DNA, 20 bp, Artificial Sequence
  Description of Artificial Sequence: Synthetic oligonucleotide
  Target: LAMA2; (+) strand; PAM type: YTN; PAM sequence: TTC
tatctagatagatatcctgg

SEQ ID NO: 357950 - DNA, 20 bp, Artificial Sequence
  Description of Artificial Sequence: Synthetic oligonucleotide
  Target: LAMA2; (+) strand; PAM type: YTN; PAM sequence: CTA
tctagatagatatcctgggg

SEQ ID NO: 357951 - DNA, 20 bp, Artificial Sequence
  Description of Artificial Sequence: Synthetic oligonucleotide
  Target: LAMA2; (+) strand; PAM type: YTN; PAM sequence: CTA
gatagatatcctggggttta

SEQ ID NO: 357952 - DNA, 20 bp, Artificial Sequence
  Description of Artificial Sequence: Synthetic oligonucleotide
  Target: LAMA2; (+) strand; PAM type: YTN; PAM sequence: CTG
gggtttagaattttatttta

SEQ ID NO: 357953 - DNA, 20 bp, Artificial Sequence
  Description of Artificial Sequence: Synthetic oligonucleotide
  Target: LAMA2; (+) strand; PAM type: YTN; PAM sequence: TTT
agaattttattttatcttgc

SEQ ID NO: 357954 - DNA, 20 bp, Artificial Sequence
  Description of Artificial Sequence: Synthetic oligonucleotide
  Target: LAMA2; (+) strand; PAM type: YTN; PAM sequence: TTA
gaattttattttatcttgcc

SEQ ID NO: 357955 - DNA, 20 bp, Artificial Sequence
  Description of Artificial Sequence: Synthetic oligonucleotide
  Target: LAMA2; (+) strand; PAM type: YTN; PAM sequence: TTT
tattttatcttgcctaatac

SEQ ID NO: 357956 - DNA, 20 bp, Artificial Sequence
  Description of Artificial Sequence: Synthetic oligonucleotide
  Target: LAMA2; (+) strand; PAM type: YTN; PAM sequence: TTT
attttatcttgcctaatact

SEQ ID NO: 357957 - DNA, 20 bp, Artificial Sequence
  Description of Artificial Sequence: Synthetic oligonucleotide
  Target: LAMA2; (+) strand; PAM type: YTN; PAM sequence: TTA
ttttatcttgcctaatactt

SEQ ID NO: 357958 - DNA, 20 bp, Artificial Sequence
  Description of Artificial Sequence: Synthetic oligonucleotide
  Target: LAMA2; (+) strand; PAM type: YTN; PAM sequence: TTT
tatcttgcctaatactttgt

SEQ ID NO: 357959 - DNA, 20 bp, Artificial Sequence
  Description of Artificial Sequence: Synthetic oligonucleotide
  Target: LAMA2; (+) strand; PAM type: YTN; PAM sequence: TTT
atcttgcctaatactttgtt

SEQ ID NO: 357960 - DNA, 20 bp, Artificial Sequence
  Description of Artificial Sequence: Synthetic oligonucleotide
  Target: LAMA2; (+) strand; PAM type: YTN; PAM sequence: TTA
tcttgcctaatactttgttg

SEQ ID NO: 357961 - DNA, 20 bp, Artificial Sequence
  Description of Artificial Sequence: Synthetic oligonucleotide
  Target: LAMA2; (+) strand; PAM type: YTN; PAM sequence: CTT
gcctaatactttgttggaaa

SEQ ID NO: 357962 - DNA, 20 bp, Artificial Sequence
  Description of Artificial Sequence: Synthetic oligonucleotide
  Target: LAMA2; (+) strand; PAM type: YTN; PAM sequence: TTG
cctaatactttgttggaaac

SEQ ID NO: 357963 - DNA, 20 bp, Artificial Sequence
  Description of Artificial Sequence: Synthetic oligonucleotide
  Target: LAMA2; (+) strand; PAM type: YTN; PAM sequence: CTA
atactttgttggaaacaaaa

SEQ ID NO: 357964 - DNA, 20 bp, Artificial Sequence
  Description of Artificial Sequence: Synthetic oligonucleotide
  Target: LAMA2; (+) strand; PAM type: YTN; PAM sequence: CTT
tgttggaaacaaaatttggt

SEQ ID NO: 357965 - DNA, 20 bp, Artificial Sequence
  Description of Artificial Sequence: Synthetic oligonucleotide
  Target: LAMA2; (+) strand; PAM type: YTN; PAM sequence: TTT
gttggaaacaaaatttggtg

SEQ ID NO: 357966 - DNA, 20 bp, Artificial Sequence
  Description of Artificial Sequence: Synthetic oligonucleotide
  Target: LAMA2; (+) strand; PAM type: YTN; PAM sequence: TTG
ttggaaacaaaatttggtga

SEQ ID NO: 357967 - DNA, 20 bp, Artificial Sequence
  Description of Artificial Sequence: Synthetic oligonucleotide
  Target: LAMA2; (+) strand; PAM type: YTN; PAM sequence: TTG
gaaacaaaatttggtgactt

SEQ ID NO: 357968 - DNA, 20 bp, Artificial Sequence
  Description of Artificial Sequence: Synthetic oligonucleotide
  Target: LAMA2; (+) strand; PAM type: YTN; PAM sequence: TTT
ggtgacttatttataaacgt

SEQ ID NO: 357969 - DNA, 20 bp, Artificial Sequence
  Description of Artificial Sequence: Synthetic oligonucleotide
  Target: LAMA2; (+) strand; PAM type: YTN; PAM sequence: TTG
gtgacttatttataaacgtg

SEQ ID NO: 357970 - DNA, 20 bp, Artificial Sequence
  Description of Artificial Sequence: Synthetic oligonucleotide
  Target: LAMA2; (+) strand; PAM type: YTN; PAM sequence: CTT
atttataaacgtgaatactt

SEQ ID NO: 357971 - DNA, 20 bp, Artificial Sequence
  Description of Artificial Sequence: Synthetic oligonucleotide
  Target: LAMA2; (+) strand; PAM type: YTN; PAM sequence: TTA
tttataaacgtgaatacttg

SEQ ID NO: 357972 - DNA, 20 bp, Artificial Sequence
  Description of Artificial Sequence: Synthetic oligonucleotide
  Target: LAMA2; (+) strand; PAM type: YTN; PAM sequence: TTT
ataaacgtgaatacttgctt

SEQ ID NO: 357973 - DNA, 20 bp, Artificial Sequence
  Description of Artificial Sequence: Synthetic oligonucleotide
  Target: LAMA2; (+) strand; PAM type: YTN; PAM sequence: TTA
taaacgtgaatacttgcttg

SEQ ID NO: 357974 - DNA, 20 bp, Artificial Sequence
  Description of Artificial Sequence: Synthetic oligonucleotide
  Target: LAMA2; (+) strand; PAM type: YTN; PAM sequence: CTT
gcttgttctgtgaaagttaa

SEQ ID NO: 357975 - DNA, 20 bp, Artificial Sequence
  Description of Artificial Sequence: Synthetic oligonucleotide
  Target: LAMA2; (+) strand; PAM type: YTN; PAM sequence: TTG
cttgttctgtgaaagttaat

SEQ ID NO: 357976 - DNA, 20 bp, Artificial Sequence
  Description of Artificial Sequence: Synthetic oligonucleotide
  Target: LAMA2; (+) strand; PAM type: YTN; PAM sequence: CTT
gttctgtgaaagttaatacc

SEQ ID NO: 357977 - DNA, 20 bp, Artificial Sequence
  Description of Artificial Sequence: Synthetic oligonucleotide
  Target: LAMA2; (+) strand; PAM type: YTN; PAM sequence: TTG
ttctgtgaaagttaatacct

SEQ ID NO: 357978 - DNA, 20 bp, Artificial Sequence
  Description of Artificial Sequence: Synthetic oligonucleotide
  Target: LAMA2; (+) strand; PAM type: YTN; PAM sequence: TTC
tgtgaaagttaataccttct

SEQ ID NO: 357979 - DNA, 20 bp, Artificial Sequence
  Description of Artificial Sequence: Synthetic oligonucleotide
  Target: LAMA2; (+) strand; PAM type: YTN; PAM sequence: CTG
tgaaagttaataccttctca

SEQ ID NO: 357980 - DNA, 20 bp, Artificial Sequence
  Description of Artificial Sequence: Synthetic oligonucleotide
  Target: LAMA2; (+) strand; PAM type: YTN; PAM sequence: TTA
ataccttctcagctgatagt

SEQ ID NO: 357981 - DNA, 20 bp, Artificial Sequence
  Description of Artificial Sequence: Synthetic oligonucleotide
  Target: LAMA2; (+) strand; PAM type: YTN; PAM sequence: CTT
ctcagctgatagttaaaata

SEQ ID NO: 357982 - DNA, 20 bp, Artificial Sequence
  Description of Artificial Sequence: Synthetic oligonucleotide
  Target: LAMA2; (+) strand; PAM type: YTN; PAM sequence: TTC
tcagctgatagttaaaatac

SEQ ID NO: 357983 - DNA, 20 bp, Artificial Sequence
  Description of Artificial Sequence: Synthetic oligonucleotide
  Target: LAMA2; (+) strand; PAM type: YTN; PAM sequence: CTC
agctgatagttaaaatacct

SEQ ID NO: 357984 - DNA, 20 bp, Artificial Sequence
  Description of Artificial Sequence: Synthetic oligonucleotide
  Target: LAMA2; (+) strand; PAM type: YTN; PAM sequence: CTG
atagttaaaatacctgatca

SEQ ID NO: 357985 - DNA, 20 bp, Artificial Sequence
  Description of Artificial Sequence: Synthetic oligonucleotide
  Target: LAMA2; (+) strand; PAM type: YTN; PAM sequence: TTA
aaatacctgatcacaccaga

SEQ ID NO: 357986 - DNA, 20 bp, Artificial Sequence
  Description of Artificial Sequence: Synthetic oligonucleotide
  Target: LAMA2; (+) strand; PAM type: YTN; PAM sequence: CTG
atcacaccagaaggtgtgat

SEQ ID NO: 357987 - DNA, 20 bp, Artificial Sequence
  Description of Artificial Sequence: Synthetic oligonucleotide
  Target: LAMA2; (+) strand; PAM type: YTN; PAM sequence: CTT
cctaaattaatgttgtttaa

SEQ ID NO: 357988 - DNA, 20 bp, Artificial Sequence
  Description of Artificial Sequence: Synthetic oligonucleotide
  Target: LAMA2; (+) strand; PAM type: YTN; PAM sequence: TTC
ctaaattaatgttgtttaag

SEQ ID NO: 357989 - DNA, 20 bp, Artificial Sequence
  Description of Artificial Sequence: Synthetic oligonucleotide
  Target: LAMA2; (+) strand; PAM type: YTN; PAM sequence: CTA
aattaatgttgtttaagcct

SEQ ID NO: 357990 - DNA, 20 bp, Artificial Sequence
  Description of Artificial Sequence: Synthetic oligonucleotide
  Target: LAMA2; (+) strand; PAM type: YTN; PAM sequence: TTA
atgttgtttaagcctagttt

SEQ ID NO: 357991 - DNA, 20 bp, Artificial Sequence
  Description of Artificial Sequence: Synthetic oligonucleotide
  Target: LAMA2; (+) strand; PAM type: YTN; PAM sequence: TTG
tttaagcctagtttacacct

SEQ ID NO: 357992 - DNA, 20 bp, Artificial Sequence
  Description of Artificial Sequence: Synthetic oligonucleotide
  Target: LAMA2; (+) strand; PAM type: YTN; PAM sequence: TTT
aagcctagtttacacctaac

SEQ ID NO: 357993 - DNA, 20 bp, Artificial Sequence
  Description of Artificial Sequence: Synthetic oligonucleotide
  Target: LAMA2; (+) strand; PAM type: YTN; PAM sequence: TTA
agcctagtttacacctaaca

SEQ ID NO: 357994 - DNA, 20 bp, Artificial Sequence
  Description of Artificial Sequence: Synthetic oligonucleotide
  Target: LAMA2; (+) strand; PAM type: YTN; PAM sequence: CTA
gtttacacctaacaaaatat

SEQ ID NO: 357995 - DNA, 20 bp, Artificial Sequence
  Description of Artificial Sequence: Synthetic oligonucleotide
  Target: LAMA2; (+) strand; PAM type: YTN; PAM sequence: TTT
acacctaacaaaatatagca

SEQ ID NO: 357996 - DNA, 20 bp, Artificial Sequence
  Description of Artificial Sequence: Synthetic oligonucleotide
  Target: LAMA2; (+) strand; PAM type: YTN; PAM sequence: TTA
cacctaacaaaatatagcat

SEQ ID NO: 357997 - DNA, 20 bp, Artificial Sequence
  Description of Artificial Sequence: Synthetic oligonucleotide
  Target: LAMA2; (+) strand; PAM type: YTN; PAM sequence: CTA
acaaaatatagcattattta

SEQ ID NO: 357998 - DNA, 20 bp, Artificial Sequence
  Description of Artificial Sequence: Synthetic oligonucleotide
  Target: LAMA2; (+) strand; PAM type: YTN; PAM sequence: TTA
tttatgaagaaatcataatt

SEQ ID NO: 357999 - DNA, 20 bp, Artificial Sequence
  Description of Artificial Sequence: Synthetic oligonucleotide
  Target: LAMA2; (+) strand; PAM type: YTN; PAM sequence: TTT
atgaagaaatcataattgat

SEQ ID NO: 358000 - DNA, 20 bp, Artificial Sequence
  Description of Artificial Sequence: Synthetic oligonucleotide
  Target: LAMA2; (+) strand; PAM type: YTN; PAM sequence: TTA
tgaagaaatcataattgatt

SEQ ID NO: 358001 - DNA, 20 bp, Artificial Sequence
  Description of Artificial Sequence: Synthetic oligonucleotide
  Target: LAMA2; (+) strand; PAM type: YTN; PAM sequence: TTG
attaagcaaataaaagtatg

SEQ ID NO: 358002 - DNA, 20 bp, Artificial Sequence
  Description of Artificial Sequence: Synthetic oligonucleotide
  Target: LAMA2; (+) strand; PAM type: YTN; PAM sequence: TTA
agcaaataaaagtatgttta

SEQ ID NO: 358003 - DNA, 20 bp, Artificial Sequence
  Description of Artificial Sequence: Synthetic oligonucleotide
  Target: LAMA2; (+) strand; PAM type: YTN; PAM sequence: TTT
atagtcagtggttttcttgc

SEQ ID NO: 358004 - DNA, 20 bp, Artificial Sequence
  Description of Artificial Sequence: Synthetic oligonucleotide
  Target: LAMA2; (+) strand; PAM type: YTN; PAM sequence: TTA
tagtcagtggttttcttgca

SEQ ID NO: 358005 - DNA, 20 bp, Artificial Sequence
  Description of Artificial Sequence: Synthetic oligonucleotide
  Target: LAMA2; (+) strand; PAM type: YTN; PAM sequence: TTT
tcttgcatgacatgtgagta

SEQ ID NO: 358006 - DNA, 20 bp, Artificial Sequence
  Description of Artificial Sequence: Synthetic oligonucleotide
  Target: LAMA2; (+) strand; PAM type: YTN; PAM sequence: TTT
cttgcatgacatgtgagtat

SEQ ID NO: 358007 - DNA, 20 bp, Artificial Sequence
  Description of Artificial Sequence: Synthetic oligonucleotide
  Target: LAMA2; (+) strand; PAM type: YTN; PAM sequence: TTC
ttgcatgacatgtgagtatt

SEQ ID NO: 358008 - DNA, 20 bp, Artificial Sequence
  Description of Artificial Sequence: Synthetic oligonucleotide
  Target: LAMA2; (+) strand; PAM type: YTN; PAM sequence: CTT
gcatgacatgtgagtattga

SEQ ID NO: 358009 - DNA, 20 bp, Artificial Sequence
  Description of Artificial Sequence: Synthetic oligonucleotide
  Target: LAMA2; (+) strand; PAM type: YTN; PAM sequence: TTG
catgacatgtgagtattgaa

SEQ ID NO: 358010 - DNA, 20 bp, Artificial Sequence
  Description of Artificial Sequence: Synthetic oligonucleotide
  Target: LAMA2; (+) strand; PAM type: YTN; PAM sequence: TTG
aaatagaaaaacttagtatc

SEQ ID NO: 358011 - DNA, 20 bp, Artificial Sequence
  Description of Artificial Sequence: Synthetic oligonucleotide
  Target: LAMA2; (+) strand; PAM type: YTN; PAM sequence: CTT
agtatctcatatgctactca

SEQ ID NO: 358012 - DNA, 20 bp, Artificial Sequence
  Description of Artificial Sequence: Synthetic oligonucleotide
  Target: LAMA2; (+) strand; PAM type: YTN; PAM sequence: TTA
gtatctcatatgctactcag

SEQ ID NO: 358013 - DNA, 20 bp, Artificial Sequence
  Description of Artificial Sequence: Synthetic oligonucleotide
  Target: LAMA2; (+) strand; PAM type: YTN; PAM sequence: CTC
atatgctactcagtgaatgg

SEQ ID NO: 358014 - DNA, 20 bp, Artificial Sequence
  Description of Artificial Sequence: Synthetic oligonucleotide
  Target: LAMA2; (+) strand; PAM type: YTN; PAM sequence: CTA
ctcagtgaatgggaactggt

SEQ ID NO: 358015 - DNA, 20 bp, Artificial Sequence
  Description of Artificial Sequence: Synthetic oligonucleotide
  Target: LAMA2; (+) strand; PAM type: YTN; PAM sequence: CTC
agtgaatgggaactggtggt

SEQ ID NO: 358016 - DNA, 20 bp, Artificial Sequence
  Description of Artificial Sequence: Synthetic oligonucleotide
  Target: LAMA2; (+) strand; PAM type: YTN; PAM sequence: CTG
gtggtgttggctggttgaaa

SEQ ID NO: 358017 - DNA, 20 bp, Artificial Sequence
  Description of Artificial Sequence: Synthetic oligonucleotide
  Target: LAMA2; (+) strand; PAM type: YTN; PAM sequence: TTG
gctggttgaaacacttttaa

SEQ ID NO: 358018 - DNA, 20 bp, Artificial Sequence
  Description of Artificial Sequence: Synthetic oligonucleotide
  Target: LAMA2; (+) strand; PAM type: YTN; PAM sequence: CTG
gttgaaacacttttaactta

SEQ ID NO: 358019 - DNA, 20 bp, Artificial Sequence
  Description of Artificial Sequence: Synthetic oligonucleotide
  Target: LAMA2; (+) strand; PAM type: YTN; PAM sequence: TTG
aaacacttttaacttatggc

SEQ ID NO: 358020 - DNA, 20 bp, Artificial Sequence
  Description of Artificial Sequence: Synthetic oligonucleotide
  Target: LAMA2; (+) strand; PAM type: YTN; PAM sequence: CTT
ttaacttatggccagtttct

SEQ ID NO: 358021 - DNA, 20 bp, Artificial Sequence
  Description of Artificial Sequence: Synthetic oligonucleotide
  Target: LAMA2; (+) strand; PAM type: YTN; PAM sequence: TTT
taacttatggccagtttctt

SEQ ID NO: 358022 - DNA, 20 bp, Artificial Sequence
  Description of Artificial Sequence: Synthetic oligonucleotide
  Target: LAMA2; (+) strand; PAM type: YTN; PAM sequence: TTT
aacttatggccagtttctta

SEQ ID NO: 358023 - DNA, 20 bp, Artificial Sequence
  Description of Artificial Sequence: Synthetic oligonucleotide
  Target: LAMA2; (+) strand; PAM type: YTN; PAM sequence: TTA
acttatggccagtttcttat

SEQ ID NO: 358024 - DNA, 20 bp, Artificial Sequence
  Description of Artificial Sequence: Synthetic oligonucleotide
  Target: LAMA2; (+) strand; PAM type: YTN; PAM sequence: CTT
atggccagtttcttatattt

SEQ ID NO: 358025 - DNA, 20 bp, Artificial Sequence
  Description of Artificial Sequence: Synthetic oligonucleotide
  Target: LAMA2; (+) strand; PAM type: YTN; PAM sequence: TTA
tggccagtttcttatattta

SEQ ID NO: 358026 - DNA, 20 bp, Artificial Sequence
  Description of Artificial Sequence: Synthetic oligonucleotide
  Target: LAMA2; (+) strand; PAM type: YTN; PAM sequence: TTT
cttatatttaacagaactct

SEQ ID NO: 358027 - DNA, 20 bp, Artificial Sequence
  Description of Artificial Sequence: Synthetic oligonucleotide
  Target: LAMA2; (+) strand; PAM type: YTN; PAM sequence: TTC
ttatatttaacagaactctg

SEQ ID NO: 358028 - DNA, 20 bp, Artificial Sequence
  Description of Artificial Sequence: Synthetic oligonucleotide
  Target: LAMA2; (+) strand; PAM type: YTN; PAM sequence: CTT
atatttaacagaactctgaa

SEQ ID NO: 358029 - DNA, 20 bp, Artificial Sequence
  Description of Artificial Sequence: Synthetic oligonucleotide
  Target: LAMA2; (+) strand; PAM type: YTN; PAM sequence: TTA
tatttaacagaactctgaat

SEQ ID NO: 358030 - DNA, 20 bp, Artificial Sequence
  Description of Artificial Sequence: Synthetic oligonucleotide
  Target: LAMA2; (+) strand; PAM type: YTN; PAM sequence: TTT
aacagaactctgaatgctat

SEQ ID NO: 358031 - DNA, 20 bp, Artificial Sequence
  Description of Artificial Sequence: Synthetic oligonucleotide
  Target: LAMA2; (+) strand; PAM type: YTN; PAM sequence: TTA
acagaactctgaatgctatt

SEQ ID NO: 358032 - DNA, 20 bp, Artificial Sequence
  Description of Artificial Sequence: Synthetic oligonucleotide
  Target: LAMA2; (+) strand; PAM type: YTN; PAM sequence: CTC
tgaatgctattacaaaaaat

SEQ ID NO: 358033 - DNA, 20 bp, Artificial Sequence
  Description of Artificial Sequence: Synthetic oligonucleotide
  Target: LAMA2; (+) strand; PAM type: YTN; PAM sequence: CTG
aatgctattacaaaaaatgt

SEQ ID NO: 358034 - DNA, 20 bp, Artificial Sequence
  Description of Artificial Sequence: Synthetic oligonucleotide
  Target: LAMA2; (+) strand; PAM type: YTN; PAM sequence: CTA
ttacaaaaaatgtgtaaatg

SEQ ID NO: 358035 - DNA, 20 bp, Artificial Sequence
  Description of Artificial Sequence: Synthetic oligonucleotide
  Target: LAMA2; (+) strand; PAM type: YTN; PAM sequence: TTA
caaaaaatgtgtaaatgtct

SEQ ID NO: 358036 - DNA, 20 bp, Artificial Sequence
  Description of Artificial Sequence: Synthetic oligonucleotide
  Target: LAMA2; (+) strand; PAM type: YTN; PAM sequence: CTA
aaagacattttcaatgaaca

SEQ ID NO: 358037 - DNA, 20 bp, Artificial Sequence
  Description of Artificial Sequence: Synthetic oligonucleotide
  Target: LAMA2; (+) strand; PAM type: YTN; PAM sequence: TTT
tcaatgaacatgtattttaa

SEQ ID NO: 358038 - DNA, 20 bp, Artificial Sequence
  Description of Artificial Sequence: Synthetic oligonucleotide
  Target: LAMA2; (+) strand; PAM type: YTN; PAM sequence: TTT
caatgaacatgtattttaag

SEQ ID NO: 358039 - DNA, 20 bp, Artificial Sequence
  Description of Artificial Sequence: Synthetic oligonucleotide
  Target: LAMA2; (+) strand; PAM type: YTN; PAM sequence: TTC
aatgaacatgtattttaaga

SEQ ID NO: 358040 - DNA, 20 bp, Artificial Sequence
  Description of Artificial Sequence: Synthetic oligonucleotide
  Target: LAMA2; (+) strand; PAM type: YTN; PAM sequence: TTT
taagagacagagtatgttgc

SEQ ID NO: 358041 - DNA, 20 bp, Artificial Sequence
  Description of Artificial Sequence: Synthetic oligonucleotide
  Target: LAMA2; (+) strand; PAM type: YTN; PAM sequence: TTT
aagagacagagtatgttgca

SEQ ID NO: 358042 - DNA, 20 bp, Artificial Sequence
  Description of Artificial Sequence: Synthetic oligonucleotide
  Target: LAMA2; (+) strand; PAM type: YTN; PAM sequence: TTA
agagacagagtatgttgcat

SEQ ID NO: 358043 - DNA, 20 bp, Artificial Sequence
  Description of Artificial Sequence: Synthetic oligonucleotide
  Target: LAMA2; (+) strand; PAM type: YTN; PAM sequence: TTG
cataaaattcaatagctgta

SEQ ID NO: 358044 - DNA, 20 bp, Artificial Sequence
  Description of Artificial Sequence: Synthetic oligonucleotide
  Target: LAMA2; (+) strand; PAM type: YTN; PAM sequence: TTC
aatagctgtaaaataaaaat

SEQ ID NO: 358045 - DNA, 20 bp, Artificial Sequence
  Description of Artificial Sequence: Synthetic oligonucleotide
  Target: LAMA2; (+) strand; PAM type: YTN; PAM sequence: CTG
taaaataaaaatcgaattaa

SEQ ID NO: 358046 - DNA, 20 bp, Artificial Sequence
  Description of Artificial Sequence: Synthetic oligonucleotide
  Target: LAMA2; (+) strand; PAM type: YTN; PAM sequence: TTA
aacttttatttgcaaggccc

SEQ ID NO: 358047 - DNA, 20 bp, Artificial Sequence
  Description of Artificial Sequence: Synthetic oligonucleotide
  Target: LAMA2; (+) strand; PAM type: YTN; PAM sequence: CTT
ttatttgcaaggccctttac

SEQ ID NO: 358048 - DNA, 20 bp, Artificial Sequence
  Description of Artificial Sequence: Synthetic oligonucleotide
  Target: LAMA2; (+) strand; PAM type: YTN; PAM sequence: TTT
tatttgcaaggccctttaca

SEQ ID NO: 358049 - DNA, 20 bp, Artificial Sequence
  Description of Artificial Sequence: Synthetic oligonucleotide
  Target: LAMA2; (+) strand; PAM type: YTN; PAM sequence: TTT
atttgcaaggccctttacag

SEQ ID NO: 358050 - DNA, 20 bp, Artificial Sequence
  Description of Artificial Sequence: Synthetic oligonucleotide
  Target: LAMA2; (+) strand; PAM type: YTN; PAM sequence: TTA
tttgcaaggccctttacagc

SEQ ID NO: 358051 - DNA, 20 bp, Artificial Sequence
  Description of Artificial Sequence: Synthetic oligonucleotide
  Target: LAMA2; (+) strand; PAM type: YTN; PAM sequence: TTT
gcaaggccctttacagcaag

SEQ ID NO: 358052 - DNA, 20 bp, Artificial Sequence
  Description of Artificial Sequence: Synthetic oligonucleotide
  Target: LAMA2; (+) strand; PAM type: YTN; PAM sequence: TTG
caaggccctttacagcaaga

SEQ ID NO: 358053 - DNA, 20 bp, Artificial Sequence
  Description of Artificial Sequence: Synthetic oligonucleotide
  Target: LAMA2; (+) strand; PAM type: YTN; PAM sequence: CTT
tacagcaagaagtcatttta

SEQ ID NO: 358054 - DNA, 20 bp, Artificial Sequence
  Description of Artificial Sequence: Synthetic oligonucleotide
  Target: LAMA2; (+) strand; PAM type: YTN; PAM sequence: TTT
acagcaagaagtcattttat

SEQ ID NO: 358055 - DNA, 20 bp, Artificial Sequence
  Description of Artificial Sequence: Synthetic oligonucleotide
  Target: LAMA2; (+) strand; PAM type: YTN; PAM sequence: TTA
cagcaagaagtcattttatc

SEQ ID NO: 358056 - DNA, 20 bp, Artificial Sequence
  Description of Artificial Sequence: Synthetic oligonucleotide
  Target: LAMA2; (+) strand; PAM type: YTN; PAM sequence: TTT
tatcctattctatttaggaa

SEQ ID NO: 358057 - DNA, 20 bp, Artificial Sequence
  Description of Artificial Sequence: Synthetic oligonucleotide
  Target: LAMA2; (+) strand; PAM type: YTN; PAM sequence: TTT
atcctattctatttaggaaa

SEQ ID NO: 358058 - DNA, 20 bp, Artificial Sequence
  Description of Artificial Sequence: Synthetic oligonucleotide
  Target: LAMA2; (+) strand; PAM type: YTN; PAM sequence: TTA
tcctattctatttaggaaac

SEQ ID NO: 358059 - DNA, 20 bp, Artificial Sequence
  Description of Artificial Sequence: Synthetic oligonucleotide
  Target: LAMA2; (+) strand; PAM type: YTN; PAM sequence: CTA
ttctatttaggaaactctgg

SEQ ID NO: 358060 - DNA, 20 bp, Artificial Sequence
  Description of Artificial Sequence: Synthetic oligonucleotide
  Target: LAMA2; (+) strand; PAM type: YTN; PAM sequence: TTC
tatttaggaaactctggtat

SEQ ID NO: 358061 - DNA, 20 bp, Artificial Sequence
  Description of Artificial Sequence: Synthetic oligonucleotide
  Target: LAMA2; (+) strand; PAM type: YTN; PAM sequence: CTA
tttaggaaactctggtattc

SEQ ID NO: 358062 - DNA, 20 bp, Artificial Sequence
  Description of Artificial Sequence: Synthetic oligonucleotide
  Target: LAMA2; (+) strand; PAM type: YTN; PAM sequence: TTT
aggaaactctggtattccca

SEQ ID NO: 358063 - DNA, 20 bp, Artificial Sequence
  Description of Artificial Sequence: Synthetic oligonucleotide
  Target: LAMA2; (+) strand; PAM type: YTN; PAM sequence: TTA
ggaaactctggtattcccaa

SEQ ID NO: 358064 - DNA, 20 bp, Artificial Sequence
  Description of Artificial Sequence: Synthetic oligonucleotide
  Target: LAMA2; (+) strand; PAM type: YTN; PAM sequence: CTC
tggtattcccaaaagaacaa

SEQ ID NO: 358065 - DNA, 20 bp, Artificial Sequence
  Description of Artificial Sequence: Synthetic oligonucleotide
  Target: LAMA2; (+) strand; PAM type: YTN; PAM sequence: CTG
gtattcccaaaagaacaaaa

SEQ ID NO: 358066 - DNA, 20 bp, Artificial Sequence
  Description of Artificial Sequence: Synthetic oligonucleotide
  Target: LAMA2; (+) strand; PAM type: YTN; PAM sequence: TTC
ccaaaagaacaaaacagcac

SEQ ID NO: 358067 - DNA, 20 bp, Artificial Sequence
  Description of Artificial Sequence: Synthetic oligonucleotide
  Target: LAMA2; (+) strand; PAM type: YTN; PAM sequence: CTT
gaatttctactgcttaaaat

SEQ ID NO: 358068 - DNA, 20 bp, Artificial Sequence
  Description of Artificial Sequence: Synthetic oligonucleotide
  Target: LAMA2; (+) strand; PAM type: YTN; PAM sequence: TTG
aatttctactgcttaaaatt

SEQ ID NO: 358069 - DNA, 20 bp, Artificial Sequence
  Description of Artificial Sequence: Synthetic oligonucleotide
  Target: LAMA2; (+) strand; PAM type: YTN; PAM sequence: TTT
ctactgcttaaaattgccaa

SEQ ID NO: 358070 - DNA, 20 bp, Artificial Sequence
  Description of Artificial Sequence: Synthetic oligonucleotide
  Target: LAMA2; (+) strand; PAM type: YTN; PAM sequence: TTC
tactgcttaaaattgccaaa

SEQ ID NO: 358071 - DNA, 20 bp, Artificial Sequence
  Description of Artificial Sequence: Synthetic oligonucleotide
  Target: LAMA2; (+) strand; PAM type: YTN; PAM sequence: CTA
ctgcttaaaattgccaaaaa

SEQ ID NO: 358072 - DNA, 20 bp, Artificial Sequence
  Description of Artificial Sequence: Synthetic oligonucleotide
  Target: LAMA2; (+) strand; PAM type: YTN; PAM sequence: CTG
cttaaaattgccaaaaaaat

SEQ ID NO: 358073 - DNA, 20 bp, Artificial Sequence
  Description of Artificial Sequence: Synthetic oligonucleotide
  Target: LAMA2; (+) strand; PAM type: YTN; PAM sequence: CTT
aaaattgccaaaaaaatata

SEQ ID NO: 358074 - DNA, 20 bp, Artificial Sequence
  Description of Artificial Sequence: Synthetic oligonucleotide
  Target: LAMA2; (+) strand; PAM type: YTN; PAM sequence: TTA
aaattgccaaaaaaatataa

SEQ ID NO: 358075 - DNA, 20 bp, Artificial Sequence
  Description of Artificial Sequence: Synthetic oligonucleotide
  Target: LAMA2; (+) strand; PAM type: YTN; PAM sequence: TTG
ccaaaaaaatataaaaatat

SEQ ID NO: 358076 - DNA, 20 bp, Artificial Sequence
  Description of Artificial Sequence: Synthetic oligonucleotide
  Target: LAMA2; (+) strand; PAM type: YTN; PAM sequence: CTG
tcaatttaaaaaaaaaacaa

SEQ ID NO: 358077 - DNA, 20 bp, Artificial Sequence
  Description of Artificial Sequence: Synthetic oligonucleotide
  Target: LAMA2; (+) strand; PAM type: YTN; PAM sequence: TTT
aaaaaaaaaacaactgagag

SEQ ID NO: 358078 - DNA, 20 bp, Artificial Sequence
  Description of Artificial Sequence: Synthetic oligonucleotide
  Target: LAMA2; (+) strand; PAM type: YTN; PAM sequence: TTA
aaaaaaaaacaactgagagc

SEQ ID NO: 358079 - DNA, 20 bp, Artificial Sequence
  Description of Artificial Sequence: Synthetic oligonucleotide
  Target: LAMA2; (+) strand; PAM type: YTN; PAM sequence: CTG
agagctccaagaagagcctt

SEQ ID NO: 358080 - DNA, 20 bp, Artificial Sequence
  Description of Artificial Sequence: Synthetic oligonucleotide
  Target: LAMA2; (+) strand; PAM type: YTN; PAM sequence: CTC
caagaagagccttaggtcaa

SEQ ID NO: 358081 - DNA, 20 bp, Artificial Sequence
  Description of Artificial Sequence: Synthetic oligonucleotide
  Target: LAMA2; (+) strand; PAM type: YTN; PAM sequence: CTT
aggtcaaaattggatgaatt

SEQ ID NO: 358082 - DNA, 20 bp, Artificial Sequence
  Description of Artificial Sequence: Synthetic oligonucleotide
  Target: LAMA2; (+) strand; PAM type: YTN; PAM sequence: TTA
ggtcaaaattggatgaattt

SEQ ID NO: 358083 - DNA, 20 bp, Artificial Sequence
  Description of Artificial Sequence: Synthetic oligonucleotide
  Target: LAMA2; (+) strand; PAM type: YTN; PAM sequence: TTG
gatgaatttcagaggcctta

SEQ ID NO: 358084 - DNA, 20 bp, Artificial Sequence
  Description of Artificial Sequence: Synthetic oligonucleotide
  Target: LAMA2; (+) strand; PAM type: YTN; PAM sequence: TTT
cagaggccttatttcttata

SEQ ID NO: 358085 - DNA, 20 bp, Artificial Sequence
  Description of Artificial Sequence: Synthetic oligonucleotide
  Target: LAMA2; (+) strand; PAM type: YTN; PAM sequence: TTC
agaggccttatttcttatat

SEQ ID NO: 358086 - DNA, 20 bp, Artificial Sequence
  Description of Artificial Sequence: Synthetic oligonucleotide
  Target: LAMA2; (+) strand; PAM type: YTN; PAM sequence: CTT
atttcttatatgatggcaac

SEQ ID NO: 358087 - DNA, 20 bp, Artificial Sequence
  Description of Artificial Sequence: Synthetic oligonucleotide
  Target: LAMA2; (+) strand; PAM type: YTN; PAM sequence: TTA
tttcttatatgatggcaaca

SEQ ID NO: 358088 - DNA, 20 bp, Artificial Sequence
  Description of Artificial Sequence: Synthetic oligonucleotide
  Target: LAMA2; (+) strand; PAM type: YTN; PAM sequence: TTT
cttatatgatggcaacactt

SEQ ID NO: 358089 - DNA, 20 bp, Artificial Sequence
  Description of Artificial Sequence: Synthetic oligonucleotide
  Target: LAMA2; (+) strand; PAM type: YTN; PAM sequence: TTC
ttatatgatggcaacactta

SEQ ID NO: 358090 - DNA, 20 bp, Artificial Sequence
  Description of Artificial Sequence: Synthetic oligonucleotide
  Target: LAMA2; (+) strand; PAM type: YTN; PAM sequence: CTT
atatgatggcaacacttaat

SEQ ID NO: 358091 - DNA, 20 bp, Artificial Sequence
  Description of Artificial Sequence: Synthetic oligonucleotide
  Target: LAMA2; (+) strand; PAM type: YTN; PAM sequence: TTA
tatgatggcaacacttaatt

SEQ ID NO: 358092 - DNA, 20 bp, Artificial Sequence
  Description of Artificial Sequence: Synthetic oligonucleotide
  Target: LAMA2; (+) strand; PAM type: YTN; PAM sequence: CTT
aattaaagtagcttataata

SEQ ID NO: 358093 - DNA, 20 bp, Artificial Sequence
  Description of Artificial Sequence: Synthetic oligonucleotide
  Target: LAMA2; (+) strand; PAM type: YTN; PAM sequence: TTA
attaaagtagcttataatag

SEQ ID NO: 358094 - DNA, 20 bp, Artificial Sequence
  Description of Artificial Sequence: Synthetic oligonucleotide
  Target: LAMA2; (+) strand; PAM type: YTN; PAM sequence: TTA
aagtagcttataatagaaat

SEQ ID NO: 358095 - DNA, 20 bp, Artificial Sequence
  Description of Artificial Sequence: Synthetic oligonucleotide
  Target: LAMA2; (+) strand; PAM type: YTN; PAM sequence: CTT
ataatagaaatattctttac

SEQ ID NO: 358096 - DNA, 20 bp, Artificial Sequence
  Description of Artificial Sequence: Synthetic oligonucleotide
  Target: LAMA2; (+) strand; PAM type: YTN; PAM sequence: TTA
taatagaaatattctttacc

SEQ ID NO: 358097 - DNA, 20 bp, Artificial Sequence
  Description of Artificial Sequence: Synthetic oligonucleotide
  Target: LAMA2; (+) strand; PAM type: YTN; PAM sequence: TTC
tttaccagattttccatcct

SEQ ID NO: 358098 - DNA, 20 bp, Artificial Sequence
  Description of Artificial Sequence: Synthetic oligonucleotide
  Target: LAMA2; (+) strand; PAM type: YTN; PAM sequence: CTT
taccagattttccatccttt

SEQ ID NO: 358099 - DNA, 20 bp, Artificial Sequence
  Description of Artificial Sequence: Synthetic oligonucleotide
  Target: LAMA2; (+) strand; PAM type: YTN; PAM sequence: TTT
accagattttccatcctttc

SEQ ID NO: 358100 - DNA, 20 bp, Artificial Sequence
  Description of Artificial Sequence: Synthetic oligonucleotide
  Target: LAMA2; (+) strand; PAM type: YTN; PAM sequence: TTA
ccagattttccatcctttct

SEQ ID NO: 358101 - DNA, 20 bp, Artificial Sequence
  Description of Artificial Sequence: Synthetic oligonucleotide
  Target: LAMA2; (+) strand; PAM type: YTN; PAM sequence: TTT
tccatcctttcttctttggt

SEQ ID NO: 358102 - DNA, 20 bp, Artificial Sequence
  Description of Artificial Sequence: Synthetic oligonucleotide
  Target: LAMA2; (+) strand; PAM type: YTN; PAM sequence: TTT
ccatcctttcttctttggtc

SEQ ID NO: 358103 - DNA, 20 bp, Artificial Sequence
  Description of Artificial Sequence: Synthetic oligonucleotide
  Target: LAMA2; (+) strand; PAM type: YTN; PAM sequence: TTC
catcctttcttctttggtca

SEQ ID NO: 358104 - DNA, 20 bp, Artificial Sequence
  Description of Artificial Sequence: Synthetic oligonucleotide
  Target: LAMA2; (+) strand; PAM type: YTN; PAM sequence: CTT
tcttctttggtcatatgcat

SEQ ID NO: 358105 - DNA, 20 bp, Artificial Sequence
  Description of Artificial Sequence: Synthetic oligonucleotide
  Target: LAMA2; (+) strand; PAM type: YTN; PAM sequence: TTT
cttctttggtcatatgcatt

SEQ ID NO: 358106 - DNA, 20 bp, Artificial Sequence
  Description of Artificial Sequence: Synthetic oligonucleotide
  Target: LAMA2; (+) strand; PAM type: YTN; PAM sequence: TTC
ttctttggtcatatgcattt

SEQ ID NO: 358107 - DNA, 20 bp, Artificial Sequence
  Description of Artificial Sequence: Synthetic oligonucleotide
  Target: LAMA2; (+) strand; PAM type: YTN; PAM sequence: CTT
ctttggtcatatgcattttt

SEQ ID NO: 358108 - DNA, 20 bp, Artificial Sequence
  Description of Artificial Sequence: Synthetic oligonucleotide
  Target: LAMA2; (+) strand; PAM type: YTN; PAM sequence: TTC
tttggtcatatgcatttttt

SEQ ID NO: 358109 - DNA, 20 bp, Artificial Sequence
  Description of Artificial Sequence: Synthetic oligonucleotide
  Target: LAMA2; (+) strand; PAM type: YTN; PAM sequence: CTT
tggtcatatgcatttttttt

SEQ ID NO: 358110 - DNA, 20 bp, Artificial Sequence
  Description of Artificial Sequence: Synthetic oligonucleotide
  Target: LAMA2; (+) strand; PAM type: YTN; PAM sequence: TTT
ggtcatatgcattttttttt

SEQ ID NO: 358111 - DNA, 20 bp, Artificial Sequence
  Description of Artificial Sequence: Synthetic oligonucleotide
  Target: LAMA2; (+) strand; PAM type: YTN; PAM sequence: TTG
gtcatatgcatttttttttc

SEQ ID NO: 358112 - DNA, 20 bp, Artificial Sequence
  Description of Artificial Sequence: Synthetic oligonucleotide
  Target: LAMA2; (+) strand; PAM type: YTN; PAM sequence: TTT
ttttttctgttggctgacaa

SEQ ID NO: 358113 - DNA, 20 bp, Artificial Sequence
  Description of Artificial Sequence: Synthetic oligonucleotide
  Target: LAMA2; (+) strand; PAM type: YTN; PAM sequence: TTT
tttttctgttggctgacaat

SEQ ID NO: 358114 - DNA, 20 bp, Artificial Sequence
  Description of Artificial Sequence: Synthetic oligonucleotide
  Target: LAMA2; (+) strand; PAM type: YTN; PAM sequence: TTT
ttttctgttggctgacaatc

SEQ ID NO: 358115 - DNA, 20 bp, Artificial Sequence
  Description of Artificial Sequence: Synthetic oligonucleotide
  Target: LAMA2; (+) strand; PAM type: YTN; PAM sequence: TTT
tttctgttggctgacaatca

SEQ ID NO: 358116 - DNA, 20 bp, Artificial Sequence
  Description of Artificial Sequence: Synthetic oligonucleotide
  Target: LAMA2; (+) strand; PAM type: YTN; PAM sequence: TTT
ttctgttggctgacaatcaa

SEQ ID NO: 358117 - DNA, 20 bp, Artificial Sequence
  Description of Artificial Sequence: Synthetic oligonucleotide
  Target: LAMA2; (+) strand; PAM type: YTN; PAM sequence: TTT
tctgttggctgacaatcaaa

SEQ ID NO: 358118 - DNA, 20 bp, Artificial Sequence
  Description of Artificial Sequence: Synthetic oligonucleotide
  Target: LAMA2; (+) strand; PAM type: YTN; PAM sequence: TTT
ctgttggctgacaatcaaac

SEQ ID NO: 358119 - DNA, 20 bp, Artificial Sequence
  Description of Artificial Sequence: Synthetic oligonucleotide
  Target: LAMA2; (+) strand; PAM type: YTN; PAM sequence: TTC
tgttggctgacaatcaaact

SEQ ID NO: 358120 - DNA, 20 bp, Artificial Sequence
  Description of Artificial Sequence: Synthetic oligonucleotide
  Target: LAMA2; (+) strand; PAM type: YTN; PAM sequence: CTG
ttggctgacaatcaaactga

SEQ ID NO: 358121 - DNA, 20 bp, Artificial Sequence
  Description of Artificial Sequence: Synthetic oligonucleotide
  Target: LAMA2; (+) strand; PAM type: YTN; PAM sequence: TTG
gctgacaatcaaactgacag

SEQ ID NO: 358122 - DNA, 20 bp, Artificial Sequence
  Description of Artificial Sequence: Synthetic oligonucleotide
  Target: LAMA2; (+) strand; PAM type: YTN; PAM sequence: CTG
acaatcaaactgacagaagg

SEQ ID NO: 358123 - DNA, 20 bp, Artificial Sequence
  Description of Artificial Sequence: Synthetic oligonucleotide
  Target: LAMA2; (+) strand; PAM type: YTN; PAM sequence: CTG
acagaaggaaagcaagcaaa

SEQ ID NO: 358124 - DNA, 20 bp, Artificial Sequence
  Description of Artificial Sequence: Synthetic oligonucleotide
  Target: LAMA2; (+) strand; PAM type: YTN; PAM sequence: TTC
ggtagaatcagaacaaagaa

SEQ ID NO: 358125 - DNA, 20 bp, Artificial Sequence
  Description of Artificial Sequence: Synthetic oligonucleotide
  Target: LAMA2; (+) strand; PAM type: YTN; PAM sequence: TTT
ggacatcccattagtagttg

SEQ ID NO: 358126 - DNA, 20 bp, Artificial Sequence
  Description of Artificial Sequence: Synthetic oligonucleotide
  Target: LAMA2; (+) strand; PAM type: YTN; PAM sequence: TTG
gacatcccattagtagttgt

SEQ ID NO: 358127 - DNA, 20 bp, Artificial Sequence
  Description of Artificial Sequence: Synthetic oligonucleotide
  Target: LAMA2; (+) strand; PAM type: YTN; PAM sequence: TTA
gtagttgttggttcccgaag

SEQ ID NO: 358128 - DNA, 20 bp, Artificial Sequence
  Description of Artificial Sequence: Synthetic oligonucleotide
  Target: LAMA2; (+) strand; PAM type: YTN; PAM sequence: TTG
ttggttcccgaagataactt

SEQ ID NO: 358129 - DNA, 20 bp, Artificial Sequence
  Description of Artificial Sequence: Synthetic oligonucleotide
  Target: LAMA2; (+) strand; PAM type: YTN; PAM sequence: TTG
gttcccgaagataacttccc

SEQ ID NO: 358130 - DNA, 20 bp, Artificial Sequence
  Description of Artificial Sequence: Synthetic oligonucleotide
  Target: LAMA2; (+) strand; PAM type: YTN; PAM sequence: TTC
ccgaagataacttcccttat

SEQ ID NO: 358131 - DNA, 20 bp, Artificial Sequence
  Description of Artificial Sequence: Synthetic oligonucleotide
  Target: LAMA2; (+) strand; PAM type: YTN; PAM sequence: CTT
cccttatcctggctgaaata

SEQ ID NO: 358132 - DNA, 20 bp, Artificial Sequence
  Description of Artificial Sequence: Synthetic oligonucleotide
  Target: LAMA2; (+) strand; PAM type: YTN; PAM sequence: TTC
ccttatcctggctgaaatat

SEQ ID NO: 358133 - DNA, 20 bp, Artificial Sequence
  Description of Artificial Sequence: Synthetic oligonucleotide
  Target: LAMA2; (+) strand; PAM type: YTN; PAM sequence: CTT
atcctggctgaaatattttt

SEQ ID NO: 358134 - DNA, 20 bp, Artificial Sequence
  Description of Artificial Sequence: Synthetic oligonucleotide
  Target: LAMA2; (+) strand; PAM type: YTN; PAM sequence: TTA
tcctggctgaaatatttttc

SEQ ID NO: 358135 - DNA, 20 bp, Artificial Sequence
  Description of Artificial Sequence: Synthetic oligonucleotide
  Target: LAMA2; (+) strand; PAM type: YTN; PAM sequence: CTG
gctgaaatatttttcttata

SEQ ID NO: 358136 - DNA, 20 bp, Artificial Sequence
  Description of Artificial Sequence: Synthetic oligonucleotide
  Target: LAMA2; (+) strand; PAM type: YTN; PAM sequence: CTG
aaatatttttcttataaccc

SEQ ID NO: 358137 - DNA, 20 bp, Artificial Sequence
  Description of Artificial Sequence: Synthetic oligonucleotide
  Target: LAMA2; (+) strand; PAM type: YTN; PAM sequence: TTT
ttcttataacccacagtgaa

SEQ ID NO: 358138 - DNA, 20 bp, Artificial Sequence
  Description of Artificial Sequence: Synthetic oligonucleotide
  Target: LAMA2; (+) strand; PAM type: YTN; PAM sequence: TTT
tcttataacccacagtgaag

SEQ ID NO: 358139 - DNA, 20 bp, Artificial Sequence
  Description of Artificial Sequence: Synthetic oligonucleotide
  Target: LAMA2; (+) strand; PAM type: YTN; PAM sequence: TTT
cttataacccacagtgaagc

SEQ ID NO: 358140 - DNA, 20 bp, Artificial Sequence
  Description of Artificial Sequence: Synthetic oligonucleotide
  Target: LAMA2; (+) strand; PAM type: YTN; PAM sequence: TTC
ttataacccacagtgaagct

SEQ ID NO: 358141 - DNA, 20 bp, Artificial Sequence
  Description of Artificial Sequence: Synthetic oligonucleotide
  Target: LAMA2; (+) strand; PAM type: YTN; PAM sequence: CTT
ataacccacagtgaagctct

SEQ ID NO: 358142 - DNA, 20 bp, Artificial Sequence
  Description of Artificial Sequence: Synthetic oligonucleotide
  Target: LAMA2; (+) strand; PAM type: YTN; PAM sequence: TTA
taacccacagtgaagctctt

SEQ ID NO: 358143 - DNA, 20 bp, Artificial Sequence
  Description of Artificial Sequence: Synthetic oligonucleotide
  Target: LAMA2; (+) strand; PAM type: YTN; PAM sequence: CTC
ttcatattcccctaccgatc

SEQ ID NO: 358144 - DNA, 20 bp, Artificial Sequence
  Description of Artificial Sequence: Synthetic oligonucleotide
  Target: LAMA2; (+) strand; PAM type: YTN; PAM sequence: CTT
catattcccctaccgatcat

SEQ ID NO: 358145 - DNA, 20 bp, Artificial Sequence
  Description of Artificial Sequence: Synthetic oligonucleotide
  Target: LAMA2; (+) strand; PAM type: YTN; PAM sequence: TTC
atattcccctaccgatcatt

SEQ ID NO: 358146 - DNA, 20 bp, Artificial Sequence
  Description of Artificial Sequence: Synthetic oligonucleotide
  Target: LAMA2; (+) strand; PAM type: YTN; PAM sequence: TTC
ccctaccgatcattttcaca

SEQ ID NO: 358147 - DNA, 20 bp, Artificial Sequence
  Description of Artificial Sequence: Synthetic oligonucleotide
  Target: LAMA2; (+) strand; PAM type: YTN; PAM sequence: CTA
ccgatcattttcacatcaaa

SEQ ID NO: 358148 - DNA, 20 bp, Artificial Sequence
  Description of Artificial Sequence: Synthetic oligonucleotide
  Target: LAMA2; (+) strand; PAM type: YTN; PAM sequence: TTT
tcacatcaaaacactgttct

SEQ ID NO: 358149 - DNA, 20 bp, Artificial Sequence
  Description of Artificial Sequence: Synthetic oligonucleotide
  Target: LAMA2; (+) strand; PAM type: YTN; PAM sequence: TTT
cacatcaaaacactgttctt

SEQ ID NO: 358150 - DNA, 20 bp, Artificial Sequence
  Description of Artificial Sequence: Synthetic oligonucleotide
  Target: LAMA2; (+) strand; PAM type: YTN; PAM sequence: TTC
acatcaaaacactgttcttg

SEQ ID NO: 358151 - DNA, 20 bp, Artificial Sequence
  Description of Artificial Sequence: Synthetic oligonucleotide
  Target: LAMA2; (+) strand; PAM type: YTN; PAM sequence: CTG
ttcttgcctgtactgccgtt

SEQ ID NO: 358152 - DNA, 20 bp, Artificial Sequence
  Description of Artificial Sequence: Synthetic oligonucleotide
  Target: LAMA2; (+) strand; PAM type: YTN; PAM sequence: TTC
ttgcctgtactgccgtttcc

SEQ ID NO: 358153 - DNA, 20 bp, Artificial Sequence
  Description of Artificial Sequence: Synthetic oligonucleotide
  Target: LAMA2; (+) strand; PAM type: YTN; PAM sequence: CTT
gcctgtactgccgtttccat

SEQ ID NO: 358154 - DNA, 20 bp, Artificial Sequence
  Description of Artificial Sequence: Synthetic oligonucleotide
  Target: LAMA2; (+) strand; PAM type: YTN; PAM sequence: TTG
cctgtactgccgtttccatt

SEQ ID NO: 358155 - DNA, 20 bp, Artificial Sequence
  Description of Artificial Sequence: Synthetic oligonucleotide
  Target: LAMA2; (+) strand; PAM type: YTN; PAM sequence: CTG
tactgccgtttccattcagt

SEQ ID NO: 358156 - DNA, 20 bp, Artificial Sequence
  Description of Artificial Sequence: Synthetic oligonucleotide
  Target: LAMA2; (+) strand; PAM type: YTN; PAM sequence: CTG
ccgtttccattcagtgaaca

SEQ ID NO: 358157 - DNA, 20 bp, Artificial Sequence
  Description of Artificial Sequence: Synthetic oligonucleotide
  Target: LAMA2; (+) strand; PAM type: YTN; PAM sequence: TTT
ccattcagtgaacaaaataa

SEQ ID NO: 358158 - DNA, 20 bp, Artificial Sequence
  Description of Artificial Sequence: Synthetic oligonucleotide
  Target: LAMA2; (+) strand; PAM type: YTN; PAM sequence: TTC
cattcagtgaacaaaataac

SEQ ID NO: 358159 - DNA, 20 bp, Artificial Sequence
  Description of Artificial Sequence: Synthetic oligonucleotide
  Target: LAMA2; (+) strand; PAM type: YTN; PAM sequence: TTC
agtgaacaaaataacattaa

SEQ ID NO: 358160 - DNA, 20 bp, Artificial Sequence
  Description of Artificial Sequence: Synthetic oligonucleotide
  Target: LAMA2; (+) strand; PAM type: YTN; PAM sequence: TTA
acagggtgtgcaaattgttt

SEQ ID NO: 358161 - DNA, 20 bp, Artificial Sequence
  Description of Artificial Sequence: Synthetic oligonucleotide
  Target: LAMA2; (+) strand; PAM type: YTN; PAM sequence: TTG
tttgaatacggaggacattt

SEQ ID NO: 358162 - DNA, 20 bp, Artificial Sequence
  Description of Artificial Sequence: Synthetic oligonucleotide
  Target: LAMA2; (+) strand; PAM type: YTN; PAM sequence: TTT
gaatacggaggacattttta

SEQ ID NO: 358163 - DNA, 20 bp, Artificial Sequence
  Description of Artificial Sequence: Synthetic oligonucleotide
  Target: LAMA2; (+) strand; PAM type: YTN; PAM sequence: TTG
aatacggaggacatttttaa

SEQ ID NO: 358164 - DNA, 20 bp, Artificial Sequence
  Description of Artificial Sequence: Synthetic oligonucleotide
  Target: LAMA2; (+) strand; PAM type: YTN; PAM sequence: TTT
ttaatgtaacgtggaagccc

SEQ ID NO: 358165 - DNA, 20 bp, Artificial Sequence
  Description of Artificial Sequence: Synthetic oligonucleotide
  Target: LAMA2; (+) strand; PAM type: YTN; PAM sequence: TTT
taatgtaacgtggaagccct

SEQ ID NO: 358166 - DNA, 20 bp, Artificial Sequence
  Description of Artificial Sequence: Synthetic oligonucleotide
  Target: LAMA2; (+) strand; PAM type: YTN; PAM sequence: TTT
aatgtaacgtggaagccctt

SEQ ID NO: 358167 - DNA, 20 bp, Artificial Sequence
  Description of Artificial Sequence: Synthetic oligonucleotide
  Target: LAMA2; (+) strand; PAM type: YTN; PAM sequence: TTA
atgtaacgtggaagcccttg

SEQ ID NO: 358168 - DNA, 20 bp, Artificial Sequence
  Description of Artificial Sequence: Synthetic oligonucleotide
  Target: LAMA2; (+) strand; PAM type: YTN; PAM sequence: CTT
ggtggtttactgtcaggcat

SEQ ID NO: 358169 - DNA, 20 bp, Artificial Sequence
  Description of Artificial Sequence: Synthetic oligonucleotide
  Target: LAMA2; (+) strand; PAM type: YTN; PAM sequence: TTG
gtggtttactgtcaggcatc

SEQ ID NO: 358170 - DNA, 20 bp, Artificial Sequence
  Description of Artificial Sequence: Synthetic oligonucleotide
  Target: LAMA2; (+) strand; PAM type: YTN; PAM sequence: TTT
actgtcaggcatctcagtat

SEQ ID NO: 358171 - DNA, 20 bp, Artificial Sequence
  Description of Artificial Sequence: Synthetic oligonucleotide
  Target: LAMA2; (+) strand; PAM type: YTN; PAM sequence: TTA
ctgtcaggcatctcagtatg

SEQ ID NO: 358172 - DNA, 20 bp, Artificial Sequence
  Description of Artificial Sequence: Synthetic oligonucleotide
  Target: LAMA2; (+) strand; PAM type: YTN; PAM sequence: CTG
tcaggcatctcagtatgaat

SEQ ID NO: 358173 - DNA, 20 bp, Artificial Sequence
  Description of Artificial Sequence: Synthetic oligonucleotide
  Target: LAMA2; (+) strand; PAM type: YTN; PAM sequence: CTC
agtatgaatgaaacaatttg

SEQ ID NO: 358174 - DNA, 20 bp, Artificial Sequence
  Description of Artificial Sequence: Synthetic oligonucleotide
  Target: LAMA2; (+) strand; PAM type: YTN; PAM sequence: TTT
gccttaataactgaaccatg

SEQ ID NO: 358175 - DNA, 20 bp, Artificial Sequence
  Description of Artificial Sequence: Synthetic oligonucleotide
  Target: LAMA2; (+) strand; PAM type: YTN; PAM sequence: TTG
ccttaataactgaaccatgt

SEQ ID NO: 358176 - DNA, 20 bp, Artificial Sequence
  Description of Artificial Sequence: Synthetic oligonucleotide
  Target: LAMA2; (+) strand; PAM type: YTN; PAM sequence: CTT
aataactgaaccatgtaaat

SEQ ID NO: 358177 - DNA, 20 bp, Artificial Sequence
  Description of Artificial Sequence: Synthetic oligonucleotide
  Target: LAMA2; (+) strand; PAM type: YTN; PAM sequence: TTA
ataactgaaccatgtaaatt

SEQ ID NO: 358178 - DNA, 20 bp, Artificial Sequence
  Description of Artificial Sequence: Synthetic oligonucleotide
  Target: LAMA2; (+) strand; PAM type: YTN; PAM sequence: CTG
aaccatgtaaatttttgata

SEQ ID NO: 358179 - DNA, 20 bp, Artificial Sequence
  Description of Artificial Sequence: Synthetic oligonucleotide
  Target: LAMA2; (+) strand; PAM type: YTN; PAM sequence: TTT
ttgatactacaataatactg

SEQ ID NO: 358180 - DNA, 20 bp, Artificial Sequence
  Description of Artificial Sequence: Synthetic oligonucleotide
  Target: LAMA2; (+) strand; PAM type: YTN; PAM sequence: TTT
tgatactacaataatactgc

SEQ ID NO: 358181 - DNA, 20 bp, Artificial Sequence
  Description of Artificial Sequence: Synthetic oligonucleotide
  Target: LAMA2; (+) strand; PAM type: YTN; PAM sequence: TTT
gatactacaataatactgca

SEQ ID NO: 358182 - DNA, 20 bp, Artificial Sequence
  Description of Artificial Sequence: Synthetic oligonucleotide
  Target: LAMA2; (+) strand; PAM type: YTN; PAM sequence: TTG
atactacaataatactgcaa

SEQ ID NO: 358183 - DNA, 20 bp, Artificial Sequence
  Description of Artificial Sequence: Synthetic oligonucleotide
  Target: LAMA2; (+) strand; PAM type: YTN; PAM sequence: CTA
caataatactgcaagctctc

SEQ ID NO: 358184 - DNA, 20 bp, Artificial Sequence
  Description of Artificial Sequence: Synthetic oligonucleotide
  Target: LAMA2; (+) strand; PAM type: YTN; PAM sequence: CTG
caagctctcagaaattacca

SEQ ID NO: 358185 - DNA, 20 bp, Artificial Sequence
  Description of Artificial Sequence: Synthetic oligonucleotide
  Target: LAMA2; (+) strand; PAM type: YTN; PAM sequence: CTC
tcagaaattaccacagtaca

SEQ ID NO: 358186 - DNA, 20 bp, Artificial Sequence
  Description of Artificial Sequence: Synthetic oligonucleotide
  Target: LAMA2; (+) strand; PAM type: YTN; PAM sequence: CTC
agaaattaccacagtacatc

SEQ ID NO: 358187 - DNA, 20 bp, Artificial Sequence
  Description of Artificial Sequence: Synthetic oligonucleotide
  Target: LAMA2; (+) strand; PAM type: YTN; PAM sequence: TTA
ccacagtacatcttaactgt

SEQ ID NO: 358188 - DNA, 20 bp, Artificial Sequence
  Description of Artificial Sequence: Synthetic oligonucleotide
  Target: LAMA2; (+) strand; PAM type: YTN; PAM sequence: CTT
aactgtcatgtcacatcacg

SEQ ID NO: 358189 - DNA, 20 bp, Artificial Sequence
  Description of Artificial Sequence: Synthetic oligonucleotide
  Target: LAMA2; (+) strand; PAM type: YTN; PAM sequence: TTA
actgtcatgtcacatcacgt

SEQ ID NO: 358190 - DNA, 20 bp, Artificial Sequence
  Description of Artificial Sequence: Synthetic oligonucleotide
  Target: LAMA2; (+) strand; PAM type: YTN; PAM sequence: CTG
tcatgtcacatcacgtaaat

SEQ ID NO: 358191 - DNA, 20 bp, Artificial Sequence
  Description of Artificial Sequence: Synthetic oligonucleotide
  Target: LAMA2; (+) strand; PAM type: YTN; PAM sequence: TTA
tagtcatgatgacatgctta

SEQ ID NO: 358192 - DNA, 20 bp, Artificial Sequence
  Description of Artificial Sequence: Synthetic oligonucleotide
  Target: LAMA2; (+) strand; PAM type: YTN; PAM sequence: CTT
agcttggttgatttaatatc

SEQ ID NO: 358193 - DNA, 20 bp, Artificial Sequence
  Description of Artificial Sequence: Synthetic oligonucleotide
  Target: LAMA2; (+) strand; PAM type: YTN; PAM sequence: TTA
gcttggttgatttaatatct

SEQ ID NO: 358194 - DNA, 20 bp, Artificial Sequence
  Description of Artificial Sequence: Synthetic oligonucleotide
  Target: LAMA2; (+) strand; PAM type: YTN; PAM sequence: CTT
ggttgatttaatatcttgct

SEQ ID NO: 358195 - DNA, 20 bp, Artificial Sequence
  Description of Artificial Sequence: Synthetic oligonucleotide
  Target: LAMA2; (+) strand; PAM type: YTN; PAM sequence: TTG
gttgatttaatatcttgcta

SEQ ID NO: 358196 - DNA, 20 bp, Artificial Sequence
  Description of Artificial Sequence: Synthetic oligonucleotide
  Target: LAMA2; (+) strand; PAM type: YTN; PAM sequence: TTG
atttaatatcttgctaagga

SEQ ID NO: 358197 - DNA, 20 bp, Artificial Sequence
  Description of Artificial Sequence: Synthetic oligonucleotide
  Target: LAMA2; (+) strand; PAM type: YTN; PAM sequence: TTT
aatatcttgctaaggaagtg

SEQ ID NO: 358198 - DNA, 20 bp, Artificial Sequence
  Description of Artificial Sequence: Synthetic oligonucleotide
  Target: LAMA2; (+) strand; PAM type: YTN; PAM sequence: TTA
atatcttgctaaggaagtgg

SEQ ID NO: 358199 - DNA, 20 bp, Artificial Sequence
  Description of Artificial Sequence: Synthetic oligonucleotide
  Target: LAMA2; (+) strand; PAM type: YTN; PAM sequence: CTT
gctaaggaagtggaaaattg

SEQ ID NO: 358200 - DNA, 20 bp, Artificial Sequence
  Description of Artificial Sequence: Synthetic oligonucleotide
  Target: LAMA2; (+) strand; PAM type: YTN; PAM sequence: TTG
ctaaggaagtggaaaattgt

SEQ ID NO: 358201 - DNA, 20 bp, Artificial Sequence
  Description of Artificial Sequence: Synthetic oligonucleotide
  Target: LAMA2; (+) strand; PAM type: YTN; PAM sequence: CTA
aggaagtggaaaattgtagg

SEQ ID NO: 358202 - DNA, 20 bp, Artificial Sequence
  Description of Artificial Sequence: Synthetic oligonucleotide
  Target: LAMA2; (+) strand; PAM type: YTN; PAM sequence: TTG
tagggccttgttggtaaatt

SEQ ID NO: 358203 - DNA, 20 bp, Artificial Sequence
  Description of Artificial Sequence: Synthetic oligonucleotide
  Target: LAMA2; (+) strand; PAM type: YTN; PAM sequence: CTT
gttggtaaattcaataaagc

SEQ ID NO: 358204 - DNA, 20 bp, Artificial Sequence
  Description of Artificial Sequence: Synthetic oligonucleotide
  Target: LAMA2; (+) strand; PAM type: YTN; PAM sequence: TTG
ttggtaaattcaataaagcc

SEQ ID NO: 358205 - DNA, 20 bp, Artificial Sequence
  Description of Artificial Sequence: Synthetic oligonucleotide
  Target: LAMA2; (+) strand; PAM type: YTN; PAM sequence: TTG
gtaaattcaataaagccact

SEQ ID NO: 358206 - DNA, 20 bp, Artificial Sequence
  Description of Artificial Sequence: Synthetic oligonucleotide
  Target: LAMA2; (+) strand; PAM type: YTN; PAM sequence: TTC
aataaagccacttttctaaa

SEQ ID NO: 358207 - DNA, 20 bp, Artificial Sequence
  Description of Artificial Sequence: Synthetic oligonucleotide
  Target: LAMA2; (+) strand; PAM type: YTN; PAM sequence: CTT
ttctaaatagttgaggctaa

SEQ ID NO: 358208 - DNA, 20 bp, Artificial Sequence
  Description of Artificial Sequence: Synthetic oligonucleotide
  Target: LAMA2; (+) strand; PAM type: YTN; PAM sequence: TTT
tctaaatagttgaggctaaa

SEQ ID NO: 358209 - DNA, 20 bp, Artificial Sequence
  Description of Artificial Sequence: Synthetic oligonucleotide
  Target: LAMA2; (+) strand; PAM type: YTN; PAM sequence: TTT
ctaaatagttgaggctaaat

SEQ ID NO: 358210 - DNA, 20 bp, Artificial Sequence
  Description of Artificial Sequence: Synthetic oligonucleotide
  Target: LAMA2; (+) strand; PAM type: YTN; PAM sequence: TTC
taaatagttgaggctaaatt

SEQ ID NO: 358211 - DNA, 20 bp, Artificial Sequence
  Description of Artificial Sequence: Synthetic oligonucleotide
  Target: LAMA2; (+) strand; PAM type: YTN; PAM sequence: CTA
aatagttgaggctaaattct

SEQ ID NO: 358212 - DNA, 20 bp, Artificial Sequence
  Description of Artificial Sequence: Synthetic oligonucleotide
  Target: LAMA2; (+) strand; PAM type: YTN; PAM sequence: TTG
aggctaaattctttaccagt

SEQ ID NO: 358213 - DNA, 20 bp, Artificial Sequence
  Description of Artificial Sequence: Synthetic oligonucleotide
  Target: LAMA2; (+) strand; PAM type: YTN; PAM sequence: CTA
aattctttaccagtaattgc

SEQ ID NO: 358214 - DNA, 20 bp, Artificial Sequence
  Description of Artificial Sequence: Synthetic oligonucleotide
  Target: LAMA2; (+) strand; PAM type: YTN; PAM sequence: TTC
tttaccagtaattgctgttc

SEQ ID NO: 358215 - DNA, 20 bp, Artificial Sequence
  Description of Artificial Sequence: Synthetic oligonucleotide
  Target: LAMA2; (+) strand; PAM type: YTN; PAM sequence: CTT
taccagtaattgctgttcga

SEQ ID NO: 358216 - DNA, 20 bp, Artificial Sequence
  Description of Artificial Sequence: Synthetic oligonucleotide
  Target: LAMA2; (+) strand; PAM type: YTN; PAM sequence: TTT
accagtaattgctgttcgaa

SEQ ID NO: 358217 - DNA, 20 bp, Artificial Sequence
  Description of Artificial Sequence: Synthetic oligonucleotide
  Target: LAMA2; (+) strand; PAM type: YTN; PAM sequence: TTA
ccagtaattgctgttcgaat

SEQ ID NO: 358218 - DNA, 20 bp, Artificial Sequence
  Description of Artificial Sequence: Synthetic oligonucleotide
  Target: LAMA2; (+) strand; PAM type: YTN; PAM sequence: TTG
ctgttcgaatcagaaccatt

SEQ ID NO: 358219 - DNA, 20 bp, Artificial Sequence
  Description of Artificial Sequence: Synthetic oligonucleotide
  Target: LAMA2; (+) strand; PAM type: YTN; PAM sequence: CTG
ttcgaatcagaaccattgcc

SEQ ID NO: 358220 - DNA, 20 bp, Artificial Sequence
  Description of Artificial Sequence: Synthetic oligonucleotide
  Target: LAMA2; (+) strand; PAM type: YTN; PAM sequence: TTC
gaatcagaaccattgccaga

SEQ ID NO: 358221 - DNA, 20 bp, Artificial Sequence
  Description of Artificial Sequence: Synthetic oligonucleotide
  Target: LAMA2; (+) strand; PAM type: YTN; PAM sequence: TTG
ccagaatctgacagaaatag

SEQ ID NO: 358222 - DNA, 20 bp, Artificial Sequence
  Description of Artificial Sequence: Synthetic oligonucleotide
  Target: LAMA2; (+) strand; PAM type: YTN; PAM sequence: CTG
acagaaatagcgtatcaaga

SEQ ID NO: 358223 - DNA, 20 bp, Artificial Sequence
  Description of Artificial Sequence: Synthetic oligonucleotide
  Target: LAMA2; (+) strand; PAM type: YTN; PAM sequence: CTG
cttaaatattgaattttatt

SEQ ID NO: 358224 - DNA, 20 bp, Artificial Sequence
  Description of Artificial Sequence: Synthetic oligonucleotide
  Target: LAMA2; (+) strand; PAM type: YTN; PAM sequence: CTT
aaatattgaattttatttac

SEQ ID NO: 358225 - DNA, 20 bp, Artificial Sequence
  Description of Artificial Sequence: Synthetic oligonucleotide
  Target: LAMA2; (+) strand; PAM type: YTN; PAM sequence: TTA
aatattgaattttatttaca

SEQ ID NO: 358226 - DNA, 20 bp, Artificial Sequence
  Description of Artificial Sequence: Synthetic oligonucleotide
  Target: LAMA2; (+) strand; PAM type: YTN; PAM sequence: TTG
aattttatttacatccatga

SEQ ID NO: 358227 - DNA, 20 bp, Artificial Sequence
  Description of Artificial Sequence: Synthetic oligonucleotide
  Target: LAMA2; (+) strand; PAM type: YTN; PAM sequence: TTT
tatttacatccatgaccagg

SEQ ID NO: 358228 - DNA, 20 bp, Artificial Sequence
  Description of Artificial Sequence: Synthetic oligonucleotide
  Target: LAMA2; (+) strand; PAM type: YTN; PAM sequence: TTT
atttacatccatgaccagga

SEQ ID NO: 358229 - DNA, 20 bp, Artificial Sequence
  Description of Artificial Sequence: Synthetic oligonucleotide
  Target: LAMA2; (+) strand; PAM type: YTN; PAM sequence: TTA
tttacatccatgaccaggag

SEQ ID NO: 358230 - DNA, 20 bp, Artificial Sequence
  Description of Artificial Sequence: Synthetic oligonucleotide
  Target: LAMA2; (+) strand; PAM type: YTN; PAM sequence: TTT
acatccatgaccaggagtct

SEQ ID NO: 358231 - DNA, 20 bp, Artificial Sequence
  Description of Artificial Sequence: Synthetic oligonucleotide
  Target: LAMA2; (+) strand; PAM type: YTN; PAM sequence: TTA
catccatgaccaggagtcta

SEQ ID NO: 358232 - DNA, 20 bp, Artificial Sequence
  Description of Artificial Sequence: Synthetic oligonucleotide
  Target: LAMA2; (+) strand; PAM type: YTN; PAM sequence: CTA
tggtacataatccttcctct

SEQ ID NO: 358233 - DNA, 20 bp, Artificial Sequence
  Description of Artificial Sequence: Synthetic oligonucleotide
  Target: LAMA2; (+) strand; PAM type: YTN; PAM sequence: CTT
cctctgcttttttagtgtta

SEQ ID NO: 358234 - DNA, 20 bp, Artificial Sequence
  Description of Artificial Sequence: Synthetic oligonucleotide
  Target: LAMA2; (+) strand; PAM type: YTN; PAM sequence: TTC
ctctgcttttttagtgttat

SEQ ID NO: 358235 - DNA, 20 bp, Artificial Sequence
  Description of Artificial Sequence: Synthetic oligonucleotide
  Target: LAMA2; (+) strand; PAM type: YTN; PAM sequence: CTC
tgcttttttagtgttatttc

SEQ ID NO: 358236 - DNA, 20 bp, Artificial Sequence
  Description of Artificial Sequence: Synthetic oligonucleotide
  Target: LAMA2; (+) strand; PAM type: YTN; PAM sequence: CTG
cttttttagtgttatttcct

SEQ ID NO: 358237 - DNA, 20 bp, Artificial Sequence
  Description of Artificial Sequence: Synthetic oligonucleotide
  Target: LAMA2; (+) strand; PAM type: YTN; PAM sequence: CTT
ttttagtgttatttcctaat

SEQ ID NO: 358238 - DNA, 20 bp, Artificial Sequence
  Description of Artificial Sequence: Synthetic oligonucleotide
  Target: LAMA2; (+) strand; PAM type: YTN; PAM sequence: TTT
tttagtgttatttcctaatt

SEQ ID NO: 358239 - DNA, 20 bp, Artificial Sequence
  Description of Artificial Sequence: Synthetic oligonucleotide
  Target: LAMA2; (+) strand; PAM type: YTN; PAM sequence: TTT
ttagtgttatttcctaattg

SEQ ID NO: 358240 - DNA, 20 bp, Artificial Sequence
  Description of Artificial Sequence: Synthetic oligonucleotide
  Target: LAMA2; (+) strand; PAM type: YTN; PAM sequence: TTT
tagtgttatttcctaattgg

SEQ ID NO: 358241 - DNA, 20 bp, Artificial Sequence
  Description of Artificial Sequence: Synthetic oligonucleotide
  Target: LAMA2; (+) strand; PAM type: YTN; PAM sequence: TTT
agtgttatttcctaattgga

SEQ ID NO: 358242 - DNA, 20 bp, Artificial Sequence
  Description of Artificial Sequence: Synthetic oligonucleotide
  Target: LAMA2; (+) strand; PAM type: YTN; PAM sequence: TTA
gtgttatttcctaattggaa

SEQ ID NO: 358243 - DNA, 20 bp, Artificial Sequence
  Description of Artificial Sequence: Synthetic oligonucleotide
  Target: LAMA2; (+) strand; PAM type: YTN; PAM sequence: TTA
tttcctaattggaaaaaatt

SEQ ID NO: 358244 - DNA, 20 bp, Artificial Sequence
  Description of Artificial Sequence: Synthetic oligonucleotide
  Target: LAMA2; (+) strand; PAM type: YTN; PAM sequence: TTT
cctaattggaaaaaattatg

SEQ ID NO: 358245 - DNA, 20 bp, Artificial Sequence
  Description of Artificial Sequence: Synthetic oligonucleotide
  Target: LAMA2; (+) strand; PAM type: YTN; PAM sequence: TTC
ctaattggaaaaaattatga

SEQ ID NO: 358246 - DNA, 20 bp, Artificial Sequence
  Description of Artificial Sequence: Synthetic oligonucleotide
  Target: LAMA2; (+) strand; PAM type: YTN; PAM sequence: CTA
attggaaaaaattatgagat

SEQ ID NO: 358247 - DNA, 20 bp, Artificial Sequence
  Description of Artificial Sequence: Synthetic oligonucleotide
  Target: LAMA2; (+) strand; PAM type: YTN; PAM sequence: TTG
gaaaaaattatgagatgcta

SEQ ID NO: 358248 - DNA, 20 bp, Artificial Sequence
  Description of Artificial Sequence: Synthetic oligonucleotide
  Target: LAMA2; (+) strand; PAM type: YTN; PAM sequence: TTA
tgagatgctattagcttttc

SEQ ID NO: 358249 - DNA, 20 bp, Artificial Sequence
  Description of Artificial Sequence: Synthetic oligonucleotide
  Target: LAMA2; (+) strand; PAM type: YTN; PAM sequence: CTA
ttagcttttcctaaatattt

SEQ ID NO: 358250 - DNA, 20 bp, Artificial Sequence
  Description of Artificial Sequence: Synthetic oligonucleotide
  Target: LAMA2; (+) strand; PAM type: YTN; PAM sequence: TTA
gcttttcctaaatatttata

SEQ ID NO: 358251 - DNA, 20 bp, Artificial Sequence
  Description of Artificial Sequence: Synthetic oligonucleotide
  Target: LAMA2; (+) strand; PAM type: YTN; PAM sequence: CTT
ttcctaaatatttatataca

SEQ ID NO: 358252 - DNA, 20 bp, Artificial Sequence
  Description of Artificial Sequence: Synthetic oligonucleotide
  Target: LAMA2; (+) strand; PAM type: YTN; PAM sequence: TTT
tcctaaatatttatatacag

SEQ ID NO: 358253 - DNA, 20 bp, Artificial Sequence
  Description of Artificial Sequence: Synthetic oligonucleotide
  Target: LAMA2; (+) strand; PAM type: YTN; PAM sequence: TTT
cctaaatatttatatacaga

SEQ ID NO: 358254 - DNA, 20 bp, Artificial Sequence
  Description of Artificial Sequence: Synthetic oligonucleotide
  Target: LAMA2; (+) strand; PAM type: YTN; PAM sequence: TTC
ctaaatatttatatacagac

SEQ ID NO: 358255 - DNA, 20 bp, Artificial Sequence
  Description of Artificial Sequence: Synthetic oligonucleotide
  Target: LAMA2; (+) strand; PAM type: YTN; PAM sequence: CTA
aatatttatatacagacttt

SEQ ID NO: 358256 - DNA, 20 bp, Artificial Sequence
  Description of Artificial Sequence: Synthetic oligonucleotide
  Target: LAMA2; (+) strand; PAM type: YTN; PAM sequence: TTT
atatacagactttcaaacat

SEQ ID NO: 358257 - DNA, 20 bp, Artificial Sequence
  Description of Artificial Sequence: Synthetic oligonucleotide
  Target: LAMA2; (+) strand; PAM type: YTN; PAM sequence: TTA
tatacagactttcaaacatt

SEQ ID NO: 358258 - DNA, 20 bp, Artificial Sequence
  Description of Artificial Sequence: Synthetic oligonucleotide
  Target: LAMA2; (+) strand; PAM type: YTN; PAM sequence: CTT
tcaaacattttccaagttgc

SEQ ID NO: 358259 - DNA, 20 bp, Artificial Sequence
  Description of Artificial Sequence: Synthetic oligonucleotide
  Target: LAMA2; (+) strand; PAM type: YTN; PAM sequence: TTT
caaacattttccaagttgct

SEQ ID NO: 358260 - DNA, 20 bp, Artificial Sequence
  Description of Artificial Sequence: Synthetic oligonucleotide
  Target: LAMA2; (+) strand; PAM type: YTN; PAM sequence: TTC
aaacattttccaagttgctt

SEQ ID NO: 358261 - DNA, 20 bp, Artificial Sequence
  Description of Artificial Sequence: Synthetic oligonucleotide
  Target: LAMA2; (+) strand; PAM type: YTN; PAM sequence: TTT
tccaagttgcttggttataa

SEQ ID NO: 358262 - DNA, 20 bp, Artificial Sequence
  Description of Artificial Sequence: Synthetic oligonucleotide
  Target: LAMA2; (+) strand; PAM type: YTN; PAM sequence: TTT
ccaagttgcttggttataag

SEQ ID NO: 358263 - DNA, 20 bp, Artificial Sequence
  Description of Artificial Sequence: Synthetic oligonucleotide
  Target: LAMA2; (+) strand; PAM type: YTN; PAM sequence: TTC
caagttgcttggttataagg

SEQ ID NO: 358264 - DNA, 20 bp, Artificial Sequence
  Description of Artificial Sequence: Synthetic oligonucleotide
  Target: LAMA2; (+) strand; PAM type: YTN; PAM sequence: TTG
cttggttataaggcttcttc

SEQ ID NO: 358265 - DNA, 20 bp, Artificial Sequence
  Description of Artificial Sequence: Synthetic oligonucleotide
  Target: LAMA2; (+) strand; PAM type: YTN; PAM sequence: CTT
ggttataaggcttcttctaa

SEQ ID NO: 358266 - DNA, 20 bp, Artificial Sequence
  Description of Artificial Sequence: Synthetic oligonucleotide
  Target: LAMA2; (+) strand; PAM type: YTN; PAM sequence: TTG
gttataaggcttcttctaac

SEQ ID NO: 358267 - DNA, 20 bp, Artificial Sequence
  Description of Artificial Sequence: Synthetic oligonucleotide
  Target: LAMA2; (+) strand; PAM type: YTN; PAM sequence: TTA
taaggcttcttctaacagaa

SEQ ID NO: 358268 - DNA, 20 bp, Artificial Sequence
  Description of Artificial Sequence: Synthetic oligonucleotide
  Target: LAMA2; (+) strand; PAM type: YTN; PAM sequence: CTT
cttctaacagaagggcgata

SEQ ID NO: 358269 - DNA, 20 bp, Artificial Sequence
  Description of Artificial Sequence: Synthetic oligonucleotide
  Target: LAMA2; (+) strand; PAM type: YTN; PAM sequence: TTC
ttctaacagaagggcgatat

SEQ ID NO: 358270 - DNA, 20 bp, Artificial Sequence
  Description of Artificial Sequence: Synthetic oligonucleotide
  Target: LAMA2; (+) strand; PAM type: YTN; PAM sequence: CTT
ctaacagaagggcgatatgc

SEQ ID NO: 358271 - DNA, 20 bp, Artificial Sequence
  Description of Artificial Sequence: Synthetic oligonucleotide
  Target: LAMA2; (+) strand; PAM type: YTN; PAM sequence: TTC
taacagaagggcgatatgct

SEQ ID NO: 358272 - DNA, 20 bp, Artificial Sequence
  Description of Artificial Sequence: Synthetic oligonucleotide
  Target: LAMA2; (+) strand; PAM type: YTN; PAM sequence: CTA
acagaagggcgatatgctgt

SEQ ID NO: 358273 - DNA, 20 bp, Artificial Sequence
  Description of Artificial Sequence: Synthetic oligonucleotide
  Target: LAMA2; (+) strand; PAM type: YTN; PAM sequence: CTG
tgcatgttctcttataatgg

SEQ ID NO: 358274 - DNA, 20 bp, Artificial Sequence
  Description of Artificial Sequence: Synthetic oligonucleotide
  Target: LAMA2; (+) strand; PAM type: YTN; PAM sequence: TTC
tcttataatggagatgccac

SEQ ID NO: 358275 - DNA, 20 bp, Artificial Sequence
  Description of Artificial Sequence: Synthetic oligonucleotide
  Target: LAMA2; (+) strand; PAM type: YTN; PAM sequence: CTC
ttataatggagatgccacat

SEQ ID NO: 358276 - DNA, 20 bp, Artificial Sequence
  Description of Artificial Sequence: Synthetic oligonucleotide
  Target: LAMA2; (+) strand; PAM type: YTN; PAM sequence: CTT
ataatggagatgccacatgc

SEQ ID NO: 358277 - DNA, 20 bp, Artificial Sequence
  Description of Artificial Sequence: Synthetic oligonucleotide
  Target: LAMA2; (+) strand; PAM type: YTN; PAM sequence: TTA
taatggagatgccacatgct

SEQ ID NO: 358278 - DNA, 20 bp, Artificial Sequence
  Description of Artificial Sequence: Synthetic oligonucleotide
  Target: LAMA2; (+) strand; PAM type: YTN; PAM sequence: CTG
ttattctttttttaggagcc

SEQ ID NO: 358279 - DNA, 20 bp, Artificial Sequence
  Description of Artificial Sequence: Synthetic oligonucleotide
  Target: LAMA2; (+) strand; PAM type: YTN; PAM sequence: TTA
ttctttttttaggagcctaa

SEQ ID NO: 358280 - DNA, 20 bp, Artificial Sequence
  Description of Artificial Sequence: Synthetic oligonucleotide
  Target: LAMA2; (+) strand; PAM type: YTN; PAM sequence: TTC
tttttttaggagcctaatcc

SEQ ID NO: 358281 - DNA, 20 bp, Artificial Sequence
  Description of Artificial Sequence: Synthetic oligonucleotide
  Target: LAMA2; (+) strand; PAM type: YTN; PAM sequence: CTT
tttttaggagcctaatccca

SEQ ID NO: 358282 - DNA, 20 bp, Artificial Sequence
  Description of Artificial Sequence: Synthetic oligonucleotide
  Target: LAMA2; (+) strand; PAM type: YTN; PAM sequence: TTT
ttttaggagcctaatcccaa

SEQ ID NO: 358283 - DNA, 20 bp, Artificial Sequence
  Description of Artificial Sequence: Synthetic oligonucleotide
  Target: LAMA2; (+) strand; PAM type: YTN; PAM sequence: TTT
tttaggagcctaatcccaaa

SEQ ID NO: 358284 - DNA, 20 bp, Artificial Sequence
  Description of Artificial Sequence: Synthetic oligonucleotide
  Target: LAMA2; (+) strand; PAM type: YTN; PAM sequence: TTT
ttaggagcctaatcccaaat

SEQ ID NO: 358285 - DNA, 20 bp, Artificial Sequence
  Description of Artificial Sequence: Synthetic oligonucleotide
  Target: LAMA2; (+) strand; PAM type: YTN; PAM sequence: TTT
taggagcctaatcccaaata

SEQ ID NO: 358286 - DNA, 20 bp, Artificial Sequence
  Description of Artificial Sequence: Synthetic oligonucleotide
  Target: LAMA2; (+) strand; PAM type: YTN; PAM sequence: TTT
aggagcctaatcccaaataa

SEQ ID NO: 358287 - DNA, 20 bp, Artificial Sequence
  Description of Artificial Sequence: Synthetic oligonucleotide
  Target: LAMA2; (+) strand; PAM type: YTN; PAM sequence: TTA
ggagcctaatcccaaataat

SEQ ID NO: 358288 - DNA, 20 bp, Artificial Sequence
  Description of Artificial Sequence: Synthetic oligonucleotide
  Target: LAMA2; (+) strand; PAM type: YTN; PAM sequence: CTA
atcccaaataataaaagtgg

SEQ ID NO: 358289 - DNA, 20 bp, Artificial Sequence
  Description of Artificial Sequence: Synthetic oligonucleotide
  Target: LAMA2; (+) strand; PAM type: YTN; PAM sequence: CTC
acatgggacacatttttgct

SEQ ID NO: 358290 - DNA, 20 bp, Artificial Sequence
  Description of Artificial Sequence: Synthetic oligonucleotide
  Target: LAMA2; (+) strand; PAM type: YTN; PAM sequence: TTT
ttgctaacatggatgtctgc

SEQ ID NO: 358291 - DNA, 20 bp, Artificial Sequence
  Description of Artificial Sequence: Synthetic oligonucleotide
  Target: LAMA2; (+) strand; PAM type: YTN; PAM sequence: TTT
tgctaacatggatgtctgcc

SEQ ID NO: 358292 - DNA, 20 bp, Artificial Sequence
  Description of Artificial Sequence: Synthetic oligonucleotide
  Target: LAMA2; (+) strand; PAM type: YTN; PAM sequence: TTT
gctaacatggatgtctgcct

SEQ ID NO: 358293 - DNA, 20 bp, Artificial Sequence
  Description of Artificial Sequence: Synthetic oligonucleotide
  Target: LAMA2; (+) strand; PAM type: YTN; PAM sequence: TTG
ctaacatggatgtctgcctg

SEQ ID NO: 358294 - DNA, 20 bp, Artificial Sequence
  Description of Artificial Sequence: Synthetic oligonucleotide
  Target: LAMA2; (+) strand; PAM type: YTN; PAM sequence: CTA
acatggatgtctgcctggtt

SEQ ID NO: 358295 - DNA, 20 bp, Artificial Sequence
  Description of Artificial Sequence: Synthetic oligonucleotide
  Target: LAMA2; (+) strand; PAM type: YTN; PAM sequence: CTG
cctggttgtaataaaactca

SEQ ID NO: 358296 - DNA, 20 bp, Artificial Sequence
  Description of Artificial Sequence: Synthetic oligonucleotide
  Target: LAMA2; (+) strand; PAM type: YTN; PAM sequence: CTG
gttgtaataaaactcaagaa

SEQ ID NO: 358297 - DNA, 20 bp, Artificial Sequence
  Description of Artificial Sequence: Synthetic oligonucleotide
  Target: LAMA2; (+) strand; PAM type: YTN; PAM sequence: TTG
taataaaactcaagaatact

SEQ ID NO: 358298 - DNA, 20 bp, Artificial Sequence
  Description of Artificial Sequence: Synthetic oligonucleotide
  Target: LAMA2; (+) strand; PAM type: YTN; PAM sequence: CTC
aagaatactagccaatttag

SEQ ID NO: 358299 - DNA, 20 bp, Artificial Sequence
  Description of Artificial Sequence: Synthetic oligonucleotide
  Target: LAMA2; (+) strand; PAM type: YTN; PAM sequence: CTA
gccaatttagcaaaggagtg

SEQ ID NO: 358300 - DNA, 20 bp, Artificial Sequence
  Description of Artificial Sequence: Synthetic oligonucleotide
  Target: LAMA2; (+) strand; PAM type: YTN; PAM sequence: TTT
agcaaaggagtgctttgtat

SEQ ID NO: 358301 - DNA, 20 bp, Artificial Sequence
  Description of Artificial Sequence: Synthetic oligonucleotide
  Target: LAMA2; (+) strand; PAM type: YTN; PAM sequence: TTA
gcaaaggagtgctttgtatc

SEQ ID NO: 358302 - DNA, 20 bp, Artificial Sequence
  Description of Artificial Sequence: Synthetic oligonucleotide
  Target: LAMA2; (+) strand; PAM type: YTN; PAM sequence: CTT
tgtatcctgtgaaacatttt

SEQ ID NO: 358303 - DNA, 20 bp, Artificial Sequence
  Description of Artificial Sequence: Synthetic oligonucleotide
  Target: LAMA2; (+) strand; PAM type: YTN; PAM sequence: TTT
gtatcctgtgaaacattttt

SEQ ID NO: 358304 - DNA, 20 bp, Artificial Sequence
  Description of Artificial Sequence: Synthetic oligonucleotide
  Target: LAMA2; (+) strand; PAM type: YTN; PAM sequence: TTG
tatcctgtgaaacatttttc

SEQ ID NO: 358305 - DNA, 20 bp, Artificial Sequence
  Description of Artificial Sequence: Synthetic oligonucleotide
  Target: LAMA2; (+) strand; PAM type: YTN; PAM sequence: CTG
tgaaacatttttcacatttt

SEQ ID NO: 358306 - DNA, 20 bp, Artificial Sequence
  Description of Artificial Sequence: Synthetic oligonucleotide
  Target: LAMA2; (+) strand; PAM type: YTN; PAM sequence: TTT
ttcacatttttactgttttg

SEQ ID NO: 358307 - DNA, 20 bp, Artificial Sequence
  Description of Artificial Sequence: Synthetic oligonucleotide
  Target: LAMA2; (+) strand; PAM type: YTN; PAM sequence: TTT
tcacatttttactgttttgg

SEQ ID NO: 358308 - DNA, 20 bp, Artificial Sequence
  Description of Artificial Sequence: Synthetic oligonucleotide
  Target: LAMA2; (+) strand; PAM type: YTN; PAM sequence: TTT
cacatttttactgttttgga

SEQ ID NO: 358309 - DNA, 20 bp, Artificial Sequence
  Description of Artificial Sequence: Synthetic oligonucleotide
  Target: LAMA2; (+) strand; PAM type: YTN; PAM sequence: TTC
acatttttactgttttggaa

SEQ ID NO: 358310 - DNA, 20 bp, Artificial Sequence
  Description of Artificial Sequence: Synthetic oligonucleotide
  Target: LAMA2; (+) strand; PAM type: YTN; PAM sequence: TTT
ttactgttttggaataatga

SEQ ID NO: 358311 - DNA, 20 bp, Artificial Sequence
  Description of Artificial Sequence: Synthetic oligonucleotide
  Target: LAMA2; (+) strand; PAM type: YTN; PAM sequence: TTT
tactgttttggaataatgaa

SEQ ID NO: 358312 - DNA, 20 bp, Artificial Sequence
  Description of Artificial Sequence: Synthetic oligonucleotide
  Target: LAMA2; (+) strand; PAM type: YTN; PAM sequence: TTT
actgttttggaataatgaag

SEQ ID NO: 358313 - DNA, 20 bp, Artificial Sequence
  Description of Artificial Sequence: Synthetic oligonucleotide
  Target: LAMA2; (+) strand; PAM type: YTN; PAM sequence: TTA
ctgttttggaataatgaagt

SEQ ID NO: 358314 - DNA, 20 bp, Artificial Sequence
  Description of Artificial Sequence: Synthetic oligonucleotide
  Target: LAMA2; (+) strand; PAM type: YTN; PAM sequence: CTG
ttttggaataatgaagtata

SEQ ID NO: 358315 - DNA, 20 bp, Artificial Sequence
  Description of Artificial Sequence: Synthetic oligonucleotide
  Target: LAMA2; (+) strand; PAM type: YTN; PAM sequence: TTT
tggaataatgaagtataagt

SEQ ID NO: 358316 - DNA, 20 bp, Artificial Sequence
  Description of Artificial Sequence: Synthetic oligonucleotide
  Target: LAMA2; (+) strand; PAM type: YTN; PAM sequence: TTT
ggaataatgaagtataagta

SEQ ID NO: 358317 - DNA, 20 bp, Artificial Sequence
  Description of Artificial Sequence: Synthetic oligonucleotide
  Target: LAMA2; (+) strand; PAM type: YTN; PAM sequence: TTG
gaataatgaagtataagtaa

SEQ ID NO: 358318 - DNA, 20 bp, Artificial Sequence
  Description of Artificial Sequence: Synthetic oligonucleotide
  Target: LAMA2; (+) strand; PAM type: YTN; PAM sequence: TTA
taagtgtatgtgtggataat

SEQ ID NO: 358319 - DNA, 20 bp, Artificial Sequence
  Description of Artificial Sequence: Synthetic oligonucleotide
  Target: LAMA2; (+) strand; PAM type: YTN; PAM sequence: CTA
ggaaaacttagcacgttttt

SEQ ID NO: 358320 - DNA, 20 bp, Artificial Sequence
  Description of Artificial Sequence: Synthetic oligonucleotide
  Target: LAMA2; (+) strand; PAM type: YTN; PAM sequence: CTT
agcacgtttttatactttct

SEQ ID NO: 358321 - DNA, 20 bp, Artificial Sequence
  Description of Artificial Sequence: Synthetic oligonucleotide
  Target: LAMA2; (+) strand; PAM type: YTN; PAM sequence: TTA
gcacgtttttatactttcta

SEQ ID NO: 358322 - DNA, 20 bp, Artificial Sequence
  Description of Artificial Sequence: Synthetic oligonucleotide
  Target: LAMA2; (+) strand; PAM type: YTN; PAM sequence: TTT
ttatactttctatttttgaa

SEQ ID NO: 358323 - DNA, 20 bp, Artificial Sequence
  Description of Artificial Sequence: Synthetic oligonucleotide
  Target: LAMA2; (+) strand; PAM type: YTN; PAM sequence: TTT
tatactttctatttttgaaa

SEQ ID NO: 358324 - DNA, 20 bp, Artificial Sequence
  Description of Artificial Sequence: Synthetic oligonucleotide
  Target: LAMA2; (+) strand; PAM type: YTN; PAM sequence: TTT
atactttctatttttgaaat

SEQ ID NO: 358325 - DNA, 20 bp, Artificial Sequence
  Description of Artificial Sequence: Synthetic oligonucleotide
  Target: LAMA2; (+) strand; PAM type: YTN; PAM sequence: TTA
tactttctatttttgaaatt

SEQ ID NO: 358326 - DNA, 20 bp, Artificial Sequence
  Description of Artificial Sequence: Synthetic oligonucleotide
  Target: LAMA2; (+) strand; PAM type: YTN; PAM sequence: CTT
tctatttttgaaattcccac

SEQ ID NO: 358327 - DNA, 20 bp, Artificial Sequence
  Description of Artificial Sequence: Synthetic oligonucleotide
  Target: LAMA2; (+) strand; PAM type: YTN; PAM sequence: TTT
ctatttttgaaattcccaca

SEQ ID NO: 358328 - DNA, 20 bp, Artificial Sequence
  Description of Artificial Sequence: Synthetic oligonucleotide
  Target: LAMA2; (+) strand; PAM type: YTN; PAM sequence: TTC
tatttttgaaattcccacag

SEQ ID NO: 358329 - DNA, 20 bp, Artificial Sequence
  Description of Artificial Sequence: Synthetic oligonucleotide
  Target: LAMA2; (+) strand; PAM type: YTN; PAM sequence: CTA
tttttgaaattcccacagtc

SEQ ID NO: 358330 - DNA, 20 bp, Artificial Sequence
  Description of Artificial Sequence: Synthetic oligonucleotide
  Target: LAMA2; (+) strand; PAM type: YTN; PAM sequence: TTT
ttgaaattcccacagtctca

SEQ ID NO: 358331 - DNA, 20 bp, Artificial Sequence
  Description of Artificial Sequence: Synthetic oligonucleotide
  Target: LAMA2; (+) strand; PAM type: YTN; PAM sequence: TTT
tgaaattcccacagtctcag

SEQ ID NO: 358332 - DNA, 20 bp, Artificial Sequence
  Description of Artificial Sequence: Synthetic oligonucleotide
  Target: LAMA2; (+) strand; PAM type: YTN; PAM sequence: TTT
gaaattcccacagtctcagc

SEQ ID NO: 358333 - DNA, 20 bp, Artificial Sequence
  Description of Artificial Sequence: Synthetic oligonucleotide
  Target: LAMA2; (+) strand; PAM type: YTN; PAM sequence: TTG
aaattcccacagtctcagct

SEQ ID NO: 358334 - DNA, 20 bp, Artificial Sequence
  Description of Artificial Sequence: Synthetic oligonucleotide
  Target: LAMA2; (+) strand; PAM type: YTN; PAM sequence: TTC
ccacagtctcagctaggagt

SEQ ID NO: 358335 - DNA, 20 bp, Artificial Sequence
  Description of Artificial Sequence: Synthetic oligonucleotide
  Target: LAMA2; (+) strand; PAM type: YTN; PAM sequence: CTC
agctaggagttgttcctcca

SEQ ID NO: 358336 - DNA, 20 bp, Artificial Sequence
  Description of Artificial Sequence: Synthetic oligonucleotide
  Target: LAMA2; (+) strand; PAM type: YTN; PAM sequence: CTA
ggagttgttcctccaatttt

SEQ ID NO: 358337 - DNA, 20 bp, Artificial Sequence
  Description of Artificial Sequence: Synthetic oligonucleotide
  Target: LAMA2; (+) strand; PAM type: YTN; PAM sequence: TTG
ttcctccaattttttcccct

SEQ ID NO: 358338 - DNA, 20 bp, Artificial Sequence
  Description of Artificial Sequence: Synthetic oligonucleotide
  Target: LAMA2; (+) strand; PAM type: YTN; PAM sequence: TTC
ctccaattttttcccctatg

SEQ ID NO: 358339 - DNA, 20 bp, Artificial Sequence
  Description of Artificial Sequence: Synthetic oligonucleotide
  Target: LAMA2; (+) strand; PAM type: YTN; PAM sequence: CTC
caattttttcccctatgtac

SEQ ID NO: 358340 - DNA, 20 bp, Artificial Sequence
  Description of Artificial Sequence: Synthetic oligonucleotide
  Target: LAMA2; (+) strand; PAM type: YTN; PAM sequence: TTT
tttcccctatgtaccagtga

SEQ ID NO: 358341 - DNA, 20 bp, Artificial Sequence
  Description of Artificial Sequence: Synthetic oligonucleotide
  Target: LAMA2; (+) strand; PAM type: YTN; PAM sequence: TTT
ttcccctatgtaccagtgaa

SEQ ID NO: 358342 - DNA, 20 bp, Artificial Sequence
  Description of Artificial Sequence: Synthetic oligonucleotide
  Target: LAMA2; (+) strand; PAM type: YTN; PAM sequence: TTT
tcccctatgtaccagtgaat

SEQ ID NO: 358343 - DNA, 20 bp, Artificial Sequence
  Description of Artificial Sequence: Synthetic oligonucleotide
  Target: LAMA2; (+) strand; PAM type: YTN; PAM sequence: TTT
cccctatgtaccagtgaata

SEQ ID NO: 358344 - DNA, 20 bp, Artificial Sequence
  Description of Artificial Sequence: Synthetic oligonucleotide
  Target: LAMA2; (+) strand; PAM type: YTN; PAM sequence: TTC
ccctatgtaccagtgaatat

SEQ ID NO: 358345 - DNA, 20 bp, Artificial Sequence
  Description of Artificial Sequence: Synthetic oligonucleotide
  Target: LAMA2; (+) strand; PAM type: YTN; PAM sequence: CTA
tgtaccagtgaatatttggc

SEQ ID NO: 358346 - DNA, 20 bp, Artificial Sequence
  Description of Artificial Sequence: Synthetic oligonucleotide
  Target: LAMA2; (+) strand; PAM type: YTN; PAM sequence: TTT
ggcacaactggcagaatcaa

SEQ ID NO: 358347 - DNA, 20 bp, Artificial Sequence
  Description of Artificial Sequence: Synthetic oligonucleotide
  Target: LAMA2; (+) strand; PAM type: YTN; PAM sequence: TTG
gcacaactggcagaatcaag

SEQ ID NO: 358348 - DNA, 20 bp, Artificial Sequence
  Description of Artificial Sequence: Synthetic oligonucleotide
  Target: LAMA2; (+) strand; PAM type: YTN; PAM sequence: CTG
gcagaatcaagtgttaattt

SEQ ID NO: 358349 - DNA, 20 bp, Artificial Sequence
  Description of Artificial Sequence: Synthetic oligonucleotide
  Target: LAMA2; (+) strand; PAM type: YTN; PAM sequence: TTA
attttcccgcctcgttcttg

SEQ ID NO: 358350 - DNA, 20 bp, Artificial Sequence
  Description of Artificial Sequence: Synthetic oligonucleotide
  Target: LAMA2; (+) strand; PAM type: YTN; PAM sequence: TTT
tcccgcctcgttcttgatag

SEQ ID NO: 358351 - DNA, 20 bp, Artificial Sequence
  Description of Artificial Sequence: Synthetic oligonucleotide
  Target: LAMA2; (+) strand; PAM type: YTN; PAM sequence: TTT
cccgcctcgttcttgatagt

SEQ ID NO: 358352 - DNA, 20 bp, Artificial Sequence
  Description of Artificial Sequence: Synthetic oligonucleotide
  Target: LAMA2; (+) strand; PAM type: YTN; PAM sequence: TTC
ccgcctcgttcttgatagtc

SEQ ID NO: 358353 - DNA, 20 bp, Artificial Sequence
  Description of Artificial Sequence: Synthetic oligonucleotide
  Target: LAMA2; (+) strand; PAM type: YTN; PAM sequence: CTC
gttcttgatagtcaaagaga

SEQ ID NO: 358354 - DNA, 20 bp, Artificial Sequence
  Description of Artificial Sequence: Synthetic oligonucleotide
  Target: LAMA2; (+) strand; PAM type: YTN; PAM sequence: TTC
ttgatagtcaaagagaatta

SEQ ID NO: 358355 - DNA, 20 bp, Artificial Sequence
  Description of Artificial Sequence: Synthetic oligonucleotide
  Target: LAMA2; (+) strand; PAM type: YTN; PAM sequence: CTT
gatagtcaaagagaattaaa

SEQ ID NO: 358356 - DNA, 20 bp, Artificial Sequence
  Description of Artificial Sequence: Synthetic oligonucleotide
  Target: LAMA2; (+) strand; PAM type: YTN; PAM sequence: TTG
atagtcaaagagaattaaat

SEQ ID NO: 358357 - DNA, 20 bp, Artificial Sequence
  Description of Artificial Sequence: Synthetic oligonucleotide
  Target: LAMA2; (+) strand; PAM type: YTN; PAM sequence: TTA
aatcaggcacccacagggct

SEQ ID NO: 358358 - DNA, 20 bp, Artificial Sequence
  Description of Artificial Sequence: Synthetic oligonucleotide
  Target: LAMA2; (+) strand; PAM type: YTN; PAM sequence: CTA
tcctaggtgcatttcatttt

SEQ ID NO: 358359 - DNA, 20 bp, Artificial Sequence
  Description of Artificial Sequence: Synthetic oligonucleotide
  Target: LAMA2; (+) strand; PAM type: YTN; PAM sequence: CTA
ggtgcatttcattttcaaaa

SEQ ID NO: 358360 - DNA, 20 bp, Artificial Sequence
  Description of Artificial Sequence: Synthetic oligonucleotide
  Target: LAMA2; (+) strand; PAM type: YTN; PAM sequence: TTT
cattttcaaaatgcttggca

SEQ ID NO: 358361 - DNA, 20 bp, Artificial Sequence
  Description of Artificial Sequence: Synthetic oligonucleotide
  Target: LAMA2; (+) strand; PAM type: YTN; PAM sequence: TTC
attttcaaaatgcttggcaa

SEQ ID NO: 358362 - DNA, 20 bp, Artificial Sequence
  Description of Artificial Sequence: Synthetic oligonucleotide
  Target: LAMA2; (+) strand; PAM type: YTN; PAM sequence: TTT
tcaaaatgcttggcaaatgt

SEQ ID NO: 358363 - DNA, 20 bp, Artificial Sequence
  Description of Artificial Sequence: Synthetic oligonucleotide
  Target: LAMA2; (+) strand; PAM type: YTN; PAM sequence: TTT
caaaatgcttggcaaatgtt

SEQ ID NO: 358364 - DNA, 20 bp, Artificial Sequence
  Description of Artificial Sequence: Synthetic oligonucleotide
  Target: LAMA2; (+) strand; PAM type: YTN; PAM sequence: TTC
aaaatgcttggcaaatgtta

SEQ ID NO: 358365 - DNA, 20 bp, Artificial Sequence
  Description of Artificial Sequence: Synthetic oligonucleotide
  Target: LAMA2; (+) strand; PAM type: YTN; PAM sequence: CTT
ggcaaatgttaatgcttggt

SEQ ID NO: 358366 - DNA, 20 bp, Artificial Sequence
  Description of Artificial Sequence: Synthetic oligonucleotide
  Target: LAMA2; (+) strand; PAM type: YTN; PAM sequence: TTG
gcaaatgttaatgcttggtt

SEQ ID NO: 358367 - DNA, 20 bp, Artificial Sequence
  Description of Artificial Sequence: Synthetic oligonucleotide
  Target: LAMA2; (+) strand; PAM type: YTN; PAM sequence: TTA
atgcttggttttagggcatt

SEQ ID NO: 358368 - DNA, 20 bp, Artificial Sequence
  Description of Artificial Sequence: Synthetic oligonucleotide
  Target: LAMA2; (+) strand; PAM type: YTN; PAM sequence: CTT
ggttttagggcatttgttta

SEQ ID NO: 358369 - DNA, 20 bp, Artificial Sequence
  Description of Artificial Sequence: Synthetic oligonucleotide
  Target: LAMA2; (+) strand; PAM type: YTN; PAM sequence: TTG
gttttagggcatttgtttaa

SEQ ID NO: 358370 - DNA, 20 bp, Artificial Sequence
  Description of Artificial Sequence: Synthetic oligonucleotide
  Target: LAMA2; (+) strand; PAM type: YTN; PAM sequence: TTT
tagggcatttgtttaagcaa

SEQ ID NO: 358371 - DNA, 20 bp, Artificial Sequence
  Description of Artificial Sequence: Synthetic oligonucleotide
  Target: LAMA2; (+) strand; PAM type: YTN; PAM sequence: TTT
agggcatttgtttaagcaac

SEQ ID NO: 358372 - DNA, 20 bp, Artificial Sequence
  Description of Artificial Sequence: Synthetic oligonucleotide
  Target: LAMA2; (+) strand; PAM type: YTN; PAM sequence: TTA
gggcatttgtttaagcaact

SEQ ID NO: 358373 - DNA, 20 bp, Artificial Sequence
  Description of Artificial Sequence: Synthetic oligonucleotide
  Target: LAMA2; (+) strand; PAM type: YTN; PAM sequence: TTT
gtttaagcaactaggcagca

SEQ ID NO: 358374 - DNA, 20 bp, Artificial Sequence
  Description of Artificial Sequence: Synthetic oligonucleotide
  Target: LAMA2; (+) strand; PAM type: YTN; PAM sequence: TTG
tttaagcaactaggcagcag

SEQ ID NO: 358375 - DNA, 20 bp, Artificial Sequence
  Description of Artificial Sequence: Synthetic oligonucleotide
  Target: LAMA2; (+) strand; PAM type: YTN; PAM sequence: TTT
aagcaactaggcagcagtgg

SEQ ID NO: 358376 - DNA, 20 bp, Artificial Sequence
  Description of Artificial Sequence: Synthetic oligonucleotide
  Target: LAMA2; (+) strand; PAM type: YTN; PAM sequence: TTA
agcaactaggcagcagtgga

SEQ ID NO: 358377 - DNA, 20 bp, Artificial Sequence
  Description of Artificial Sequence: Synthetic oligonucleotide
  Target: LAMA2; (+) strand; PAM type: YTN; PAM sequence: CTA
ggcagcagtggaaagagcta

SEQ ID NO: 358378 - DNA, 20 bp, Artificial Sequence
  Description of Artificial Sequence: Synthetic oligonucleotide
  Target: LAMA2; (+) strand; PAM type: YTN; PAM sequence: CTA
gaggacaaagaatcctgctg

SEQ ID NO: 358379 - DNA, 20 bp, Artificial Sequence
  Description of Artificial Sequence: Synthetic oligonucleotide
  Target: LAMA2; (+) strand; PAM type: YTN; PAM sequence: CTG
ctggtttgctgcaggctaca

SEQ ID NO: 358380 - DNA, 20 bp, Artificial Sequence
  Description of Artificial Sequence: Synthetic oligonucleotide
  Target: LAMA2; (+) strand; PAM type: YTN; PAM sequence: CTG
gtttgctgcaggctacagct

SEQ ID NO: 358381 - DNA, 20 bp, Artificial Sequence
  Description of Artificial Sequence: Synthetic oligonucleotide
  Target: LAMA2; (+) strand; PAM type: YTN; PAM sequence: TTT
gctgcaggctacagctattc

SEQ ID NO: 358382 - DNA, 20 bp, Artificial Sequence
  Description of Artificial Sequence: Synthetic oligonucleotide
  Target: LAMA2; (+) strand; PAM type: YTN; PAM sequence: TTG
ctgcaggctacagctattca

SEQ ID NO: 358383 - DNA, 20 bp, Artificial Sequence
  Description of Artificial Sequence: Synthetic oligonucleotide
  Target: LAMA2; (+) strand; PAM type: YTN; PAM sequence: CTG
caggctacagctattcagaa

SEQ ID NO: 358384 - DNA, 20 bp, Artificial Sequence
  Description of Artificial Sequence: Synthetic oligonucleotide
  Target: LAMA2; (+) strand; PAM type: YTN; PAM sequence: CTA
cagctattcagaaacagttt

SEQ ID NO: 358385 - DNA, 20 bp, Artificial Sequence
  Description of Artificial Sequence: Synthetic oligonucleotide
  Target: LAMA2; (+) strand; PAM type: YTN; PAM sequence: CTA
ttcagaaacagtttgggaat

SEQ ID NO: 358386 - DNA, 20 bp, Artificial Sequence
  Description of Artificial Sequence: Synthetic oligonucleotide
  Target: LAMA2; (+) strand; PAM type: YTN; PAM sequence: TTC
agaaacagtttgggaatttc

SEQ ID NO: 358387 - DNA, 20 bp, Artificial Sequence
  Description of Artificial Sequence: Synthetic oligonucleotide
  Target: LAMA2; (+) strand; PAM type: YTN; PAM sequence: TTT
gggaatttcagagttgggat

SEQ ID NO: 358388 - DNA, 20 bp, Artificial Sequence
  Description of Artificial Sequence: Synthetic oligonucleotide
  Target: LAMA2; (+) strand; PAM type: YTN; PAM sequence: TTG
ggaatttcagagttgggata

SEQ ID NO: 358389 - DNA, 20 bp, Artificial Sequence
  Description of Artificial Sequence: Synthetic oligonucleotide
  Target: LAMA2; (+) strand; PAM type: YTN; PAM sequence: TTT
cagagttgggataatttact

SEQ ID NO: 358390 - DNA, 20 bp, Artificial Sequence
  Description of Artificial Sequence: Synthetic oligonucleotide
  Target: LAMA2; (+) strand; PAM type: YTN; PAM sequence: TTC
agagttgggataatttactg

SEQ ID NO: 358391 - DNA, 20 bp, Artificial Sequence
  Description of Artificial Sequence: Synthetic oligonucleotide
  Target: LAMA2; (+) strand; PAM type: YTN; PAM sequence: TTG
ggataatttactgccctagt

SEQ ID NO: 358392 - DNA, 20 bp, Artificial Sequence
  Description of Artificial Sequence: Synthetic oligonucleotide
  Target: LAMA2; (+) strand; PAM type: YTN; PAM sequence: TTT
actgccctagtaaactaagt

SEQ ID NO: 358393 - DNA, 20 bp, Artificial Sequence
  Description of Artificial Sequence: Synthetic oligonucleotide
  Target: LAMA2; (+) strand; PAM type: YTN; PAM sequence: TTA
ctgccctagtaaactaagtg

SEQ ID NO: 358394 - DNA, 20 bp, Artificial Sequence
  Description of Artificial Sequence: Synthetic oligonucleotide
  Target: LAMA2; (+) strand; PAM type: YTN; PAM sequence: CTG
ccctagtaaactaagtgcta

SEQ ID NO: 358395 - DNA, 20 bp, Artificial Sequence
  Description of Artificial Sequence: Synthetic oligonucleotide
  Target: LAMA2; (+) strand; PAM type: YTN; PAM sequence: CTA
gtaaactaagtgctactgga

SEQ ID NO: 358396 - DNA, 20 bp, Artificial Sequence
  Description of Artificial Sequence: Synthetic oligonucleotide
  Target: LAMA2; (+) strand; PAM type: YTN; PAM sequence: CTA
agtgctactggaacattgca

SEQ ID NO: 358397 - DNA, 20 bp, Artificial Sequence
  Description of Artificial Sequence: Synthetic oligonucleotide
  Target: LAMA2; (+) strand; PAM type: YTN; PAM sequence: CTA
ctggaacattgcaacagtca

SEQ ID NO: 358398 - DNA, 20 bp, Artificial Sequence
  Description of Artificial Sequence: Synthetic oligonucleotide
  Target: LAMA2; (+) strand; PAM type: YTN; PAM sequence: CTG
gaacattgcaacagtcattt

SEQ ID NO: 358399 - DNA, 20 bp, Artificial Sequence
  Description of Artificial Sequence: Synthetic oligonucleotide
  Target: LAMA2; (+) strand; PAM type: YTN; PAM sequence: TTG
caacagtcatttgcttaagg

SEQ ID NO: 358400 - DNA, 20 bp, Artificial Sequence
  Description of Artificial Sequence: Synthetic oligonucleotide
  Target: LAMA2; (+) strand; PAM type: YTN; PAM sequence: TTT
gcttaaggttgccctagtgg

SEQ ID NO: 358401 - DNA, 20 bp, Artificial Sequence
  Description of Artificial Sequence: Synthetic oligonucleotide
  Target: LAMA2; (+) strand; PAM type: YTN; PAM sequence: TTG
cttaaggttgccctagtggt

SEQ ID NO: 358402 - DNA, 20 bp, Artificial Sequence
  Description of Artificial Sequence: Synthetic oligonucleotide
  Target: LAMA2; (+) strand; PAM type: YTN; PAM sequence: CTT
aaggttgccctagtggtctg

SEQ ID NO: 358403 - DNA, 20 bp, Artificial Sequence
  Description of Artificial Sequence: Synthetic oligonucleotide
  Target: LAMA2; (+) strand; PAM type: YTN; PAM sequence: TTA
aggttgccctagtggtctga

SEQ ID NO: 358404 - DNA, 20 bp, Artificial Sequence
  Description of Artificial Sequence: Synthetic oligonucleotide
  Target: LAMA2; (+) strand; PAM type: YTN; PAM sequence: TTG
ccctagtggtctgaaatagt

SEQ ID NO: 358405 - DNA, 20 bp, Artificial Sequence
  Description of Artificial Sequence: Synthetic oligonucleotide
  Target: LAMA2; (+) strand; PAM type: YTN; PAM sequence: CTA
gtggtctgaaatagttgagg

SEQ ID NO: 358406 - DNA, 20 bp, Artificial Sequence
  Description of Artificial Sequence: Synthetic oligonucleotide
  Target: LAMA2; (+) strand; PAM type: YTN; PAM sequence: CTG
aaatagttgaggcagcttcc

SEQ ID NO: 358407 - DNA, 20 bp, Artificial Sequence
  Description of Artificial Sequence: Synthetic oligonucleotide
  Target: LAMA2; (+) strand; PAM type: YTN; PAM sequence: TTG
aggcagcttccaaaagcaat

SEQ ID NO: 358408 - DNA, 20 bp, Artificial Sequence
  Description of Artificial Sequence: Synthetic oligonucleotide
  Target: LAMA2; (+) strand; PAM type: YTN; PAM sequence: CTT
ccaaaagcaattctctttgc

SEQ ID NO: 358409 - DNA, 20 bp, Artificial Sequence
  Description of Artificial Sequence: Synthetic oligonucleotide
  Target: LAMA2; (+) strand; PAM type: YTN; PAM sequence: TTC
caaaagcaattctctttgca

SEQ ID NO: 358410 - DNA, 20 bp, Artificial Sequence
  Description of Artificial Sequence: Synthetic oligonucleotide
  Target: LAMA2; (+) strand; PAM type: YTN; PAM sequence: TTC
tctttgcatctgtaaagttc

SEQ ID NO: 358411 - DNA, 20 bp, Artificial Sequence
  Description of Artificial Sequence: Synthetic oligonucleotide
  Target: LAMA2; (+) strand; PAM type: YTN; PAM sequence: CTC
tttgcatctgtaaagttctg

SEQ ID NO: 358412 - DNA, 20 bp, Artificial Sequence
  Description of Artificial Sequence: Synthetic oligonucleotide
  Target: LAMA2; (+) strand; PAM type: YTN; PAM sequence: CTT
tgcatctgtaaagttctggg

SEQ ID NO: 358413 - DNA, 20 bp, Artificial Sequence
  Description of Artificial Sequence: Synthetic oligonucleotide
  Target: LAMA2; (+) strand; PAM type: YTN; PAM sequence: TTT
gcatctgtaaagttctggga

SEQ ID NO: 358414 - DNA, 20 bp, Artificial Sequence
  Description of Artificial Sequence: Synthetic oligonucleotide
  Target: LAMA2; (+) strand; PAM type: YTN; PAM sequence: TTG
catctgtaaagttctgggag

SEQ ID NO: 358415 - DNA, 20 bp, Artificial Sequence
  Description of Artificial Sequence: Synthetic oligonucleotide
  Target: LAMA2; (+) strand; PAM type: YTN; PAM sequence: CTG
taaagttctgggagaagcta

SEQ ID NO: 358416 - DNA, 20 bp, Artificial Sequence
  Description of Artificial Sequence: Synthetic oligonucleotide
  Target: LAMA2; (+) strand; PAM type: YTN; PAM sequence: TTC
tgggagaagctagcttggct

SEQ ID NO: 358417 - DNA, 20 bp, Artificial Sequence
  Description of Artificial Sequence: Synthetic oligonucleotide
  Target: LAMA2; (+) strand; PAM type: YTN; PAM sequence: CTG
ggagaagctagcttggcttg

SEQ ID NO: 358418 - DNA, 20 bp, Artificial Sequence
  Description of Artificial Sequence: Synthetic oligonucleotide
  Target: LAMA2; (+) strand; PAM type: YTN; PAM sequence: CTA
gcttggcttgtctgctgttc

SEQ ID NO: 358419 - DNA, 20 bp, Artificial Sequence
  Description of Artificial Sequence: Synthetic oligonucleotide
  Target: LAMA2; (+) strand; PAM type: YTN; PAM sequence: CTT
ggcttgtctgctgttcctgc

SEQ ID NO: 358420 - DNA, 20 bp, Artificial Sequence
  Description of Artificial Sequence: Synthetic oligonucleotide
  Target: LAMA2; (+) strand; PAM type: YTN; PAM sequence: TTG
gcttgtctgctgttcctgca

SEQ ID NO: 358421 - DNA, 20 bp, Artificial Sequence
  Description of Artificial Sequence: Synthetic oligonucleotide
  Target: LAMA2; (+) strand; PAM type: YTN; PAM sequence: CTT
gtctgctgttcctgcattac

SEQ ID NO: 358422 - DNA, 20 bp, Artificial Sequence
  Description of Artificial Sequence: Synthetic oligonucleotide
  Target: LAMA2; (+) strand; PAM type: YTN; PAM sequence: TTG
tctgctgttcctgcattacc

SEQ ID NO: 358423 - DNA, 20 bp, Artificial Sequence
  Description of Artificial Sequence: Synthetic oligonucleotide
  Target: LAMA2; (+) strand; PAM type: YTN; PAM sequence: CTG
ctgttcctgcattaccatta

SEQ ID NO: 358424 - DNA, 20 bp, Artificial Sequence
  Description of Artificial Sequence: Synthetic oligonucleotide
  Target: LAMA2; (+) strand; PAM type: YTN; PAM sequence: CTG
ttcctgcattaccattaagg

SEQ ID NO: 358425 - DNA, 20 bp, Artificial Sequence
  Description of Artificial Sequence: Synthetic oligonucleotide
  Target: LAMA2; (+) strand; PAM type: YTN; PAM sequence: TTC
ctgcattaccattaaggttt

SEQ ID NO: 358426 - DNA, 20 bp, Artificial Sequence
  Description of Artificial Sequence: Synthetic oligonucleotide
  Target: LAMA2; (+) strand; PAM type: YTN; PAM sequence: CTG
cattaccattaaggtttgaa

SEQ ID NO: 358427 - DNA, 20 bp, Artificial Sequence
  Description of Artificial Sequence: Synthetic oligonucleotide
  Target: LAMA2; (+) strand; PAM type: YTN; PAM sequence: TTA
ccattaaggtttgaaattct

SEQ ID NO: 358428 - DNA, 20 bp, Artificial Sequence
  Description of Artificial Sequence: Synthetic oligonucleotide
  Target: LAMA2; (+) strand; PAM type: YTN; PAM sequence: TTA
aggtttgaaattctctctct

SEQ ID NO: 358429 - DNA, 20 bp, Artificial Sequence
  Description of Artificial Sequence: Synthetic oligonucleotide
  Target: LAMA2; (+) strand; PAM type: YTN; PAM sequence: TTT
gaaattctctctctgaatat

SEQ ID NO: 358430 - DNA, 20 bp, Artificial Sequence
  Description of Artificial Sequence: Synthetic oligonucleotide
  Target: LAMA2; (+) strand; PAM type: YTN; PAM sequence: TTG
aaattctctctctgaatatt

SEQ ID NO: 358431 - DNA, 20 bp, Artificial Sequence
  Description of Artificial Sequence: Synthetic oligonucleotide
  Target: LAMA2; (+) strand; PAM type: YTN; PAM sequence: TTC
tctctctgaatattattaaa

SEQ ID NO: 358432 - DNA, 20 bp, Artificial Sequence
  Description of Artificial Sequence: Synthetic oligonucleotide
  Target: LAMA2; (+) strand; PAM type: YTN; PAM sequence: CTC
tctctgaatattattaaatt

SEQ ID NO: 358433 - DNA, 20 bp, Artificial Sequence
  Description of Artificial Sequence: Synthetic oligonucleotide
  Target: LAMA2; (+) strand; PAM type: YTN; PAM sequence: CTC
tctgaatattattaaattaa

SEQ ID NO: 358434 - DNA, 20 bp, Artificial Sequence
  Description of Artificial Sequence: Synthetic oligonucleotide
  Target: LAMA2; (+) strand; PAM type: YTN; PAM sequence: CTC
tgaatattattaaattaatc

SEQ ID NO: 358435 - DNA, 20 bp, Artificial Sequence
  Description of Artificial Sequence: Synthetic oligonucleotide
  Target: LAMA2; (+) strand; PAM type: YTN; PAM sequence: CTG
aatattattaaattaatctt

SEQ ID NO: 358436 - DNA, 20 bp, Artificial Sequence
  Description of Artificial Sequence: Synthetic oligonucleotide
  Target: LAMA2; (+) strand; PAM type: YTN; PAM sequence: TTA
ttaaattaatcttatgtgat

SEQ ID NO: 358437 - DNA, 20 bp, Artificial Sequence
  Description of Artificial Sequence: Synthetic oligonucleotide
  Target: LAMA2; (+) strand; PAM type: YTN; PAM sequence: TTA
aattaatcttatgtgatttg

SEQ ID NO: 358438 - DNA, 20 bp, Artificial Sequence
  Description of Artificial Sequence: Synthetic oligonucleotide
  Target: LAMA2; (+) strand; PAM type: YTN; PAM sequence: TTA
atcttatgtgatttgttctt

SEQ ID NO: 358439 - DNA, 20 bp, Artificial Sequence
  Description of Artificial Sequence: Synthetic oligonucleotide
  Target: LAMA2; (+) strand; PAM type: YTN; PAM sequence: CTT
atgtgatttgttctttacca

SEQ ID NO: 358440 - DNA, 20 bp, Artificial Sequence
  Description of Artificial Sequence: Synthetic oligonucleotide
  Target: LAMA2; (+) strand; PAM type: YTN; PAM sequence: TTA
tgtgatttgttctttaccaa

SEQ ID NO: 358441 - DNA, 20 bp, Artificial Sequence
  Description of Artificial Sequence: Synthetic oligonucleotide
  Target: LAMA2; (+) strand; PAM type: YTN; PAM sequence: TTT
gttctttaccaaaacctgct

SEQ ID NO: 358442 - DNA, 20 bp, Artificial Sequence
  Description of Artificial Sequence: Synthetic oligonucleotide
  Target: LAMA2; (+) strand; PAM type: YTN; PAM sequence: TTG
ttctttaccaaaacctgctt

SEQ ID NO: 358443 - DNA, 20 bp, Artificial Sequence
  Description of Artificial Sequence: Synthetic oligonucleotide
  Target: LAMA2; (+) strand; PAM type: YTN; PAM sequence: TTC
tttaccaaaacctgcttatt

SEQ ID NO: 358444 - DNA, 20 bp, Artificial Sequence
  Description of Artificial Sequence: Synthetic oligonucleotide
  Target: LAMA2; (+) strand; PAM type: YTN; PAM sequence: CTT
taccaaaacctgcttatttt

SEQ ID NO: 358445 - DNA, 20 bp, Artificial Sequence
  Description of Artificial Sequence: Synthetic oligonucleotide
  Target: LAMA2; (+) strand; PAM type: YTN; PAM sequence: TTT
accaaaacctgcttattttc

SEQ ID NO: 358446 - DNA, 20 bp, Artificial Sequence
  Description of Artificial Sequence: Synthetic oligonucleotide
  Target: LAMA2; (+) strand; PAM type: YTN; PAM sequence: TTA
ccaaaacctgcttattttct

SEQ ID NO: 358447 - DNA, 20 bp, Artificial Sequence
  Description of Artificial Sequence: Synthetic oligonucleotide
  Target: LAMA2; (+) strand; PAM type: YTN; PAM sequence: CTG
cttattttctacagcattat

SEQ ID NO: 358448 - DNA, 20 bp, Artificial Sequence
  Description of Artificial Sequence: Synthetic oligonucleotide
  Target: LAMA2; (+) strand; PAM type: YTN; PAM sequence: CTT
attttctacagcattatgct

SEQ ID NO: 358449 - DNA, 20 bp, Artificial Sequence
  Description of Artificial Sequence: Synthetic oligonucleotide
  Target: LAMA2; (+) strand; PAM type: YTN; PAM sequence: TTA
ttttctacagcattatgcta

SEQ ID NO: 358450 - DNA, 20 bp, Artificial Sequence
  Description of Artificial Sequence: Synthetic oligonucleotide
  Target: LAMA2; (+) strand; PAM type: YTN; PAM sequence: TTT
tctacagcattatgctatct

SEQ ID NO: 358451 - DNA, 20 bp, Artificial Sequence
  Description of Artificial Sequence: Synthetic oligonucleotide
  Target: LAMA2; (+) strand; PAM type: YTN; PAM sequence: TTT
ctacagcattatgctatctt

SEQ ID NO: 358452 - DNA, 20 bp, Artificial Sequence
  Description of Artificial Sequence: Synthetic oligonucleotide
  Target: LAMA2; (+) strand; PAM type: YTN; PAM sequence: TTC
tacagcattatgctatcttt

SEQ ID NO: 358453 - DNA, 20 bp, Artificial Sequence
  Description of Artificial Sequence: Synthetic oligonucleotide
  Target: LAMA2; (+) strand; PAM type: YTN; PAM sequence: CTA
cagcattatgctatctttct

SEQ ID NO: 358454 - DNA, 20 bp, Artificial Sequence
  Description of Artificial Sequence: Synthetic oligonucleotide
  Target: LAMA2; (+) strand; PAM type: YTN; PAM sequence: TTA
tgctatctttctgtttctag

SEQ ID NO: 358455 - DNA, 20 bp, Artificial Sequence
  Description of Artificial Sequence: Synthetic oligonucleotide
  Target: LAMA2; (+) strand; PAM type: YTN; PAM sequence: CTA
tctttctgtttctagcttag

SEQ ID NO: 358456 - DNA, 20 bp, Artificial Sequence
  Description of Artificial Sequence: Synthetic oligonucleotide
  Target: LAMA2; (+) strand; PAM type: YTN; PAM sequence: CTT
tctgtttctagcttagagaa

SEQ ID NO: 358457 - DNA, 20 bp, Artificial Sequence
  Description of Artificial Sequence: Synthetic oligonucleotide
  Target: LAMA2; (+) strand; PAM type: YTN; PAM sequence: TTT
ctgtttctagcttagagaag

SEQ ID NO: 358458 - DNA, 20 bp, Artificial Sequence
  Description of Artificial Sequence: Synthetic oligonucleotide
  Target: LAMA2; (+) strand; PAM type: YTN; PAM sequence: TTC
tgtttctagcttagagaagc

SEQ ID NO: 358459 - DNA, 20 bp, Artificial Sequence
  Description of Artificial Sequence: Synthetic oligonucleotide
  Target: LAMA2; (+) strand; PAM type: YTN; PAM sequence: CTG
tttctagcttagagaagcct

SEQ ID NO: 358460 - DNA, 20 bp, Artificial Sequence
  Description of Artificial Sequence: Synthetic oligonucleotide
  Target: LAMA2; (+) strand; PAM type: YTN; PAM sequence: TTT
ctagcttagagaagccttta

SEQ ID NO: 358461 - DNA, 20 bp, Artificial Sequence
  Description of Artificial Sequence: Synthetic oligonucleotide
  Target: LAMA2; (+) strand; PAM type: YTN; PAM sequence: TTC
tagcttagagaagcctttaa

SEQ ID NO: 358462 - DNA, 20 bp, Artificial Sequence
  Description of Artificial Sequence: Synthetic oligonucleotide
  Target: LAMA2; (+) strand; PAM type: YTN; PAM sequence: CTA
gcttagagaagcctttaaat

SEQ ID NO: 358463 - DNA, 20 bp, Artificial Sequence
  Description of Artificial Sequence: Synthetic oligonucleotide
  Target: LAMA2; (+) strand; PAM type: YTN; PAM sequence: CTT
agagaagcctttaaatttgt

SEQ ID NO: 358464 - DNA, 20 bp, Artificial Sequence
  Description of Artificial Sequence: Synthetic oligonucleotide
  Target: LAMA2; (+) strand; PAM type: YTN; PAM sequence: TTA
gagaagcctttaaatttgtt

SEQ ID NO: 358465 - DNA, 20 bp, Artificial Sequence
  Description of Artificial Sequence: Synthetic oligonucleotide
  Target: LAMA2; (+) strand; PAM type: YTN; PAM sequence: CTT
taaatttgttcatatagttg

SEQ ID NO: 358466 - DNA, 20 bp, Artificial Sequence
  Description of Artificial Sequence: Synthetic oligonucleotide
  Target: LAMA2; (+) strand; PAM type: YTN; PAM sequence: TTT
aaatttgttcatatagttgc

SEQ ID NO: 358467 - DNA, 20 bp, Artificial Sequence
  Description of Artificial Sequence: Synthetic oligonucleotide
  Target: LAMA2; (+) strand; PAM type: YTN; PAM sequence: TTA
aatttgttcatatagttgcc

SEQ ID NO: 358468 - DNA, 20 bp, Artificial Sequence
  Description of Artificial Sequence: Synthetic oligonucleotide
  Target: LAMA2; (+) strand; PAM type: YTN; PAM sequence: TTT
gttcatatagttgccaagaa

SEQ ID NO: 358469 - DNA, 20 bp, Artificial Sequence
  Description of Artificial Sequence: Synthetic oligonucleotide
  Target: LAMA2; (+) strand; PAM type: YTN; PAM sequence: TTG
ttcatatagttgccaagaat

SEQ ID NO: 358470 - DNA, 20 bp, Artificial Sequence
  Description of Artificial Sequence: Synthetic oligonucleotide
  Target: LAMA2; (+) strand; PAM type: YTN; PAM sequence: TTC
atatagttgccaagaatacc

SEQ ID NO: 358471 - DNA, 20 bp, Artificial Sequence
  Description of Artificial Sequence: Synthetic oligonucleotide
  Target: LAMA2; (+) strand; PAM type: YTN; PAM sequence: TTG
ccaagaatacctatagtcta

SEQ ID NO: 358472 - DNA, 20 bp, Artificial Sequence
  Description of Artificial Sequence: Synthetic oligonucleotide
  Target: LAMA2; (+) strand; PAM type: YTN; PAM sequence: CTA
tagtctagtttaagatgcac

SEQ ID NO: 358473 - DNA, 20 bp, Artificial Sequence
  Description of Artificial Sequence: Synthetic oligonucleotide
  Target: LAMA2; (+) strand; PAM type: YTN; PAM sequence: CTA
gtttaagatgcacattagga

SEQ ID NO: 358474 - DNA, 20 bp, Artificial Sequence
  Description of Artificial Sequence: Synthetic oligonucleotide
  Target: LAMA2; (+) strand; PAM type: YTN; PAM sequence: TTT
aagatgcacattaggagagt

SEQ ID NO: 358475 - DNA, 20 bp, Artificial Sequence
  Description of Artificial Sequence: Synthetic oligonucleotide
  Target: LAMA2; (+) strand; PAM type: YTN; PAM sequence: TTA
agatgcacattaggagagtc

SEQ ID NO: 358476 - DNA, 20 bp, Artificial Sequence
  Description of Artificial Sequence: Synthetic oligonucleotide
  Target: LAMA2; (+) strand; PAM type: YTN; PAM sequence: TTA
ggagagtctgctgacataat

SEQ ID NO: 358477 - DNA, 20 bp, Artificial Sequence
  Description of Artificial Sequence: Synthetic oligonucleotide
  Target: LAMA2; (+) strand; PAM type: YTN; PAM sequence: CTG
ctgacataatagcatctggc

SEQ ID NO: 358478 - DNA, 20 bp, Artificial Sequence
  Description of Artificial Sequence: Synthetic oligonucleotide
  Target: LAMA2; (+) strand; PAM type: YTN; PAM sequence: CTG
acataatagcatctggcttc

SEQ ID NO: 358479 - DNA, 20 bp, Artificial Sequence
  Description of Artificial Sequence: Synthetic oligonucleotide
  Target: LAMA2; (+) strand; PAM type: YTN; PAM sequence: CTG
gcttctaaaagtaatctctg

SEQ ID NO: 358480 - DNA, 20 bp, Artificial Sequence
  Description of Artificial Sequence: Synthetic oligonucleotide
  Target: LAMA2; (+) strand; PAM type: YTN; PAM sequence: CTT
ctaaaagtaatctctggtaa

SEQ ID NO: 358481 - DNA, 20 bp, Artificial Sequence
  Description of Artificial Sequence: Synthetic oligonucleotide
  Target: LAMA2; (+) strand; PAM type: YTN; PAM sequence: TTC
taaaagtaatctctggtaaa

SEQ ID NO: 358482 - DNA, 20 bp, Artificial Sequence
  Description of Artificial Sequence: Synthetic oligonucleotide
  Target: LAMA2; (+) strand; PAM type: YTN; PAM sequence: CTA
aaagtaatctctggtaaact

SEQ ID NO: 358483 - DNA, 20 bp, Artificial Sequence
  Description of Artificial Sequence: Synthetic oligonucleotide
  Target: LAMA2; (+) strand; PAM type: YTN; PAM sequence: CTC
tggtaaactcttttgttttg

SEQ ID NO: 358484 - DNA, 20 bp, Artificial Sequence
  Description of Artificial Sequence: Synthetic oligonucleotide
  Target: LAMA2; (+) strand; PAM type: YTN; PAM sequence: CTG
gtaaactcttttgttttgtt

SEQ ID NO: 358485 - DNA, 20 bp, Artificial Sequence
  Description of Artificial Sequence: Synthetic oligonucleotide
  Target: LAMA2; (+) strand; PAM type: YTN; PAM sequence: CTC
ttttgttttgttgttcttgc

SEQ ID NO: 358486 - DNA, 20 bp, Artificial Sequence
  Description of Artificial Sequence: Synthetic oligonucleotide
  Target: LAMA2; (+) strand; PAM type: YTN; PAM sequence: CTT
ttgttttgttgttcttgctt

SEQ ID NO: 358487 - DNA, 20 bp, Artificial Sequence
  Description of Artificial Sequence: Synthetic oligonucleotide
  Target: LAMA2; (+) strand; PAM type: YTN; PAM sequence: TTT
tgttttgttgttcttgcttg

SEQ ID NO: 358488 - DNA, 20 bp, Artificial Sequence
  Description of Artificial Sequence: Synthetic oligonucleotide
  Target: LAMA2; (+) strand; PAM type: YTN; PAM sequence: TTT
gttttgttgttcttgcttga

SEQ ID NO: 358489 - DNA, 20 bp, Artificial Sequence
  Description of Artificial Sequence: Synthetic oligonucleotide
  Target: LAMA2; (+) strand; PAM type: YTN; PAM sequence: TTG
ttttgttgttcttgcttgac

SEQ ID NO: 358490 - DNA, 20 bp, Artificial Sequence
  Description of Artificial Sequence: Synthetic oligonucleotide
  Target: LAMA2; (+) strand; PAM type: YTN; PAM sequence: TTT
tgttgttcttgcttgacttt

SEQ ID NO: 358491 - DNA, 20 bp, Artificial Sequence
  Description of Artificial Sequence: Synthetic oligonucleotide
  Target: LAMA2; (+) strand; PAM type: YTN; PAM sequence: TTT
gttgttcttgcttgactttc

SEQ ID NO: 358492 - DNA, 20 bp, Artificial Sequence
  Description of Artificial Sequence: Synthetic oligonucleotide
  Target: LAMA2; (+) strand; PAM type: YTN; PAM sequence: TTG
ttgttcttgcttgactttcc

SEQ ID NO: 358493 - DNA, 20 bp, Artificial Sequence
  Description of Artificial Sequence: Synthetic oligonucleotide
  Target: LAMA2; (+) strand; PAM type: YTN; PAM sequence: TTG
ttcttgcttgactttccatt

SEQ ID NO: 358494 - DNA, 20 bp, Artificial Sequence
  Description of Artificial Sequence: Synthetic oligonucleotide
  Target: LAMA2; (+) strand; PAM type: YTN; PAM sequence: TTC
ttgcttgactttccattcta

SEQ ID NO: 358495 - DNA, 20 bp, Artificial Sequence
  Description of Artificial Sequence: Synthetic oligonucleotide
  Target: LAMA2; (+) strand; PAM type: YTN; PAM sequence: CTT
gcttgactttccattctact

SEQ ID NO: 358496 - DNA, 20 bp, Artificial Sequence
  Description of Artificial Sequence: Synthetic oligonucleotide
  Target: LAMA2; (+) strand; PAM type: YTN; PAM sequence: TTG
cttgactttccattctactt

SEQ ID NO: 358497 - DNA, 20 bp, Artificial Sequence
  Description of Artificial Sequence: Synthetic oligonucleotide
  Target: LAMA2; (+) strand; PAM type: YTN; PAM sequence: CTT
gactttccattctacttcac

SEQ ID NO: 358498 - DNA, 20 bp, Artificial Sequence
  Description of Artificial Sequence: Synthetic oligonucleotide
  Target: LAMA2; (+) strand; PAM type: YTN; PAM sequence: TTG
actttccattctacttcacg

SEQ ID NO: 358499 - DNA, 20 bp, Artificial Sequence
  Description of Artificial Sequence: Synthetic oligonucleotide
  Target: LAMA2; (+) strand; PAM type: YTN; PAM sequence: CTT
tccattctacttcacggatc

SEQ ID NO: 358500 - DNA, 20 bp, Artificial Sequence
  Description of Artificial Sequence: Synthetic oligonucleotide
  Target: LAMA2; (+) strand; PAM type: YTN; PAM sequence: TTT
ccattctacttcacggatct

SEQ ID NO: 358501 - DNA, 20 bp, Artificial Sequence
  Description of Artificial Sequence: Synthetic oligonucleotide
  Target: LAMA2; (+) strand; PAM type: YTN; PAM sequence: TTC
cattctacttcacggatctc

SEQ ID NO: 358502 - DNA, 20 bp, Artificial Sequence
  Description of Artificial Sequence: Synthetic oligonucleotide
  Target: LAMA2; (+) strand; PAM type: YTN; PAM sequence: TTC
tacttcacggatctcaaatt

SEQ ID NO: 358503 - DNA, 20 bp, Artificial Sequence
  Description of Artificial Sequence: Synthetic oligonucleotide
  Target: LAMA2; (+) strand; PAM type: YTN; PAM sequence: CTA
cttcacggatctcaaattaa

SEQ ID NO: 358504 - DNA, 20 bp, Artificial Sequence
  Description of Artificial Sequence: Synthetic oligonucleotide
  Target: LAMA2; (+) strand; PAM type: YTN; PAM sequence: CTT
cacggatctcaaattaaagc

SEQ ID NO: 358505 - DNA, 20 bp, Artificial Sequence
  Description of Artificial Sequence: Synthetic oligonucleotide
  Target: LAMA2; (+) strand; PAM type: YTN; PAM sequence: TTC
acggatctcaaattaaagct

SEQ ID NO: 358506 - DNA, 20 bp, Artificial Sequence
  Description of Artificial Sequence: Synthetic oligonucleotide
  Target: LAMA2; (+) strand; PAM type: YTN; PAM sequence: CTC
aaattaaagctatagatttg

SEQ ID NO: 358507 - DNA, 20 bp, Artificial Sequence
  Description of Artificial Sequence: Synthetic oligonucleotide
  Target: LAMA2; (+) strand; PAM type: YTN; PAM sequence: TTA
aagctatagatttgaagaag

SEQ ID NO: 358508 - DNA, 20 bp, Artificial Sequence
  Description of Artificial Sequence: Synthetic oligonucleotide
  Target: LAMA2; (+) strand; PAM type: YTN; PAM sequence: CTA
tagatttgaagaaggaaact

SEQ ID NO: 358509 - DNA, 20 bp, Artificial Sequence
  Description of Artificial Sequence: Synthetic oligonucleotide
  Target: LAMA2; (+) strand; PAM type: YTN; PAM sequence: TTT
gaagaaggaaactgatattt

SEQ ID NO: 358510 - DNA, 20 bp, Artificial Sequence
  Description of Artificial Sequence: Synthetic oligonucleotide
  Target: LAMA2; (+) strand; PAM type: YTN; PAM sequence: TTG
aagaaggaaactgatatttg

SEQ ID NO: 358511 - DNA, 20 bp, Artificial Sequence
  Description of Artificial Sequence: Synthetic oligonucleotide
  Target: LAMA2; (+) strand; PAM type: YTN; PAM sequence: CTG
atatttgagatttgtaggac

SEQ ID NO: 358512 - DNA, 20 bp, Artificial Sequence
  Description of Artificial Sequence: Synthetic oligonucleotide
  Target: LAMA2; (+) strand; PAM type: YTN; PAM sequence: TTT
gagatttgtaggacagggta

SEQ ID NO: 358513 - DNA, 20 bp, Artificial Sequence
  Description of Artificial Sequence: Synthetic oligonucleotide
  Target: LAMA2; (+) strand; PAM type: YTN; PAM sequence: TTG
agatttgtaggacagggtag

SEQ ID NO: 358514 - DNA, 20 bp, Artificial Sequence
  Description of Artificial Sequence: Synthetic oligonucleotide
  Target: LAMA2; (+) strand; PAM type: YTN; PAM sequence: TTT
gtaggacagggtagatctca

SEQ ID NO: 358515 - DNA, 20 bp, Artificial Sequence
  Description of Artificial Sequence: Synthetic oligonucleotide
  Target: LAMA2; (+) strand; PAM type: YTN; PAM sequence: TTG
taggacagggtagatctcat

SEQ ID NO: 358516 - DNA, 20 bp, Artificial Sequence
  Description of Artificial Sequence: Synthetic oligonucleotide
  Target: LAMA2; (+) strand; PAM type: YTN; PAM sequence: CTC
atcatataaaagaagctcaa

SEQ ID NO: 358517 - DNA, 20 bp, Artificial Sequence
  Description of Artificial Sequence: Synthetic oligonucleotide
  Target: LAMA2; (+) strand; PAM type: YTN; PAM sequence: CTC
aacaaataccttgtaattga

SEQ ID NO: 358518 - DNA, 20 bp, Artificial Sequence
  Description of Artificial Sequence: Synthetic oligonucleotide
  Target: LAMA2; (+) strand; PAM type: YTN; PAM sequence: CTT
gtaattgatgctacatgctt

SEQ ID NO: 358519 - DNA, 20 bp, Artificial Sequence
  Description of Artificial Sequence: Synthetic oligonucleotide
  Target: LAMA2; (+) strand; PAM type: YTN; PAM sequence: TTG
taattgatgctacatgctta

SEQ ID NO: 358520 - DNA, 20 bp, Artificial Sequence
  Description of Artificial Sequence: Synthetic oligonucleotide
  Target: LAMA2; (+) strand; PAM type: YTN; PAM sequence: TTG
atgctacatgcttaacacaa

SEQ ID NO: 358521 - DNA, 20 bp, Artificial Sequence
  Description of Artificial Sequence: Synthetic oligonucleotide
  Target: LAMA2; (+) strand; PAM type: YTN; PAM sequence: CTA
catgcttaacacaaacaaac

SEQ ID NO: 358522 - DNA, 20 bp, Artificial Sequence
  Description of Artificial Sequence: Synthetic oligonucleotide
  Target: LAMA2; (+) strand; PAM type: YTN; PAM sequence: CTT
aacacaaacaaacaaaactc

SEQ ID NO: 358523 - DNA, 20 bp, Artificial Sequence
  Description of Artificial Sequence: Synthetic oligonucleotide
  Target: LAMA2; (+) strand; PAM type: YTN; PAM sequence: TTA
acacaaacaaacaaaactct

SEQ ID NO: 358524 - DNA, 20 bp, Artificial Sequence
  Description of Artificial Sequence: Synthetic oligonucleotide
  Target: LAMA2; (+) strand; PAM type: YTN; PAM sequence: CTC
taagaaattgttttttttag

SEQ ID NO: 358525 - DNA, 20 bp, Artificial Sequence
  Description of Artificial Sequence: Synthetic oligonucleotide
  Target: LAMA2; (+) strand; PAM type: YTN; PAM sequence: CTA
agaaattgttttttttaggt

SEQ ID NO: 358526 - DNA, 20 bp, Artificial Sequence
  Description of Artificial Sequence: Synthetic oligonucleotide
  Target: LAMA2; (+) strand; PAM type: YTN; PAM sequence: TTG
ttttttttaggttgctcaga

SEQ ID NO: 358527 - DNA, 20 bp, Artificial Sequence
  Description of Artificial Sequence: Synthetic oligonucleotide
  Target: LAMA2; (+) strand; PAM type: YTN; PAM sequence: TTT
tttttaggttgctcagaaat

SEQ ID NO: 358528 - DNA, 20 bp, Artificial Sequence
  Description of Artificial Sequence: Synthetic oligonucleotide
  Target: LAMA2; (+) strand; PAM type: YTN; PAM sequence: TTT
ttttaggttgctcagaaatg

SEQ ID NO: 358529 - DNA, 20 bp, Artificial Sequence
  Description of Artificial Sequence: Synthetic oligonucleotide
  Target: LAMA2; (+) strand; PAM type: YTN; PAM sequence: TTT
tttaggttgctcagaaatgc

SEQ ID NO: 358530 - DNA, 20 bp, Artificial Sequence
  Description of Artificial Sequence: Synthetic oligonucleotide
  Target: LAMA2; (+) strand; PAM type: YTN; PAM sequence: TTT
ttaggttgctcagaaatgcc

SEQ ID NO: 358531 - DNA, 20 bp, Artificial Sequence
  Description of Artificial Sequence: Synthetic oligonucleotide
  Target: LAMA2; (+) strand; PAM type: YTN; PAM sequence: TTT
taggttgctcagaaatgccc

SEQ ID NO: 358532 - DNA, 20 bp, Artificial Sequence
  Description of Artificial Sequence: Synthetic oligonucleotide
  Target: LAMA2; (+) strand; PAM type: YTN; PAM sequence: TTT
aggttgctcagaaatgccca

SEQ ID NO: 358533 - DNA, 20 bp, Artificial Sequence
  Description of Artificial Sequence: Synthetic oligonucleotide
  Target: LAMA2; (+) strand; PAM type: YTN; PAM sequence: TTA
ggttgctcagaaatgcccat

SEQ ID NO: 358534 - DNA, 20 bp, Artificial Sequence
  Description of Artificial Sequence: Synthetic oligonucleotide
  Target: LAMA2; (+) strand; PAM type: YTN; PAM sequence: TTG
ctcagaaatgcccattgagt

SEQ ID NO: 358535 - DNA, 20 bp, Artificial Sequence
  Description of Artificial Sequence: Synthetic oligonucleotide
  Target: LAMA2; (+) strand; PAM type: YTN; PAM sequence: CTC
agaaatgcccattgagttgg

SEQ ID NO: 358536 - DNA, 20 bp, Artificial Sequence
  Description of Artificial Sequence: Synthetic oligonucleotide
  Target: LAMA2; (+) strand; PAM type: YTN; PAM sequence: TTG
agttggatttgtgggagttg

SEQ ID NO: 358537 - DNA, 20 bp, Artificial Sequence
  Description of Artificial Sequence: Synthetic oligonucleotide
  Target: LAMA2; (+) strand; PAM type: YTN; PAM sequence: TTG
gatttgtgggagttgaaaga

SEQ ID NO: 358538 - DNA, 20 bp, Artificial Sequence
  Description of Artificial Sequence: Synthetic oligonucleotide
  Target: LAMA2; (+) strand; PAM type: YTN; PAM sequence: TTT
gtgggagttgaaagatgaat

SEQ ID NO: 358539 - DNA, 20 bp, Artificial Sequence
  Description of Artificial Sequence: Synthetic oligonucleotide
  Target: LAMA2; (+) strand; PAM type: YTN; PAM sequence: TTG
tgggagttgaaagatgaatt

SEQ ID NO: 358540 - DNA, 20 bp, Artificial Sequence
  Description of Artificial Sequence: Synthetic oligonucleotide
  Target: LAMA2; (+) strand; PAM type: YTN; PAM sequence: TTG
aaagatgaattctgtcttgc

SEQ ID NO: 358541 - DNA, 20 bp, Artificial Sequence
  Description of Artificial Sequence: Synthetic oligonucleotide
  Target: LAMA2; (+) strand; PAM type: YTN; PAM sequence: TTC
tgtcttgctttacaaaataa

SEQ ID NO: 358542 - DNA, 20 bp, Artificial Sequence
  Description of Artificial Sequence: Synthetic oligonucleotide
  Target: LAMA2; (+) strand; PAM type: YTN; PAM sequence: CTG
tcttgctttacaaaataatt

SEQ ID NO: 358543 - DNA, 20 bp, Artificial Sequence
  Description of Artificial Sequence: Synthetic oligonucleotide
  Target: LAMA2; (+) strand; PAM type: YTN; PAM sequence: CTT
gctttacaaaataattaaaa

SEQ ID NO: 358544 - DNA, 20 bp, Artificial Sequence
  Description of Artificial Sequence: Synthetic oligonucleotide
  Target: LAMA2; (+) strand; PAM type: YTN; PAM sequence: TTG
ctttacaaaataattaaaaa

SEQ ID NO: 358545 - DNA, 20 bp, Artificial Sequence
  Description of Artificial Sequence: Synthetic oligonucleotide
  Target: LAMA2; (+) strand; PAM type: YTN; PAM sequence: CTT
tacaaaataattaaaaactc

SEQ ID NO: 358546 - DNA, 20 bp, Artificial Sequence
  Description of Artificial Sequence: Synthetic oligonucleotide
  Target: LAMA2; (+) strand; PAM type: YTN; PAM sequence: TTT
acaaaataattaaaaactcg

SEQ ID NO: 358547 - DNA, 20 bp, Artificial Sequence
  Description of Artificial Sequence: Synthetic oligonucleotide
  Target: LAMA2; (+) strand; PAM type: YTN; PAM sequence: TTA
caaaataattaaaaactcgc

SEQ ID NO: 358548 - DNA, 20 bp, Artificial Sequence
  Description of Artificial Sequence: Synthetic oligonucleotide
  Target: LAMA2; (+) strand; PAM type: YTN; PAM sequence: TTA
aaaactcgctaacaaatatg

SEQ ID NO: 358549 - DNA, 20 bp, Artificial Sequence
  Description of Artificial Sequence: Synthetic oligonucleotide
  Target: LAMA2; (+) strand; PAM type: YTN; PAM sequence: CTC
gctaacaaatatgttccact

SEQ ID NO: 358550 - DNA, 20 bp, Artificial Sequence
  Description of Artificial Sequence: Synthetic oligonucleotide
  Target: LAMA2; (+) strand; PAM type: YTN; PAM sequence: CTA
acaaatatgttccactctcc

SEQ ID NO: 358551 - DNA, 20 bp, Artificial Sequence
  Description of Artificial Sequence: Synthetic oligonucleotide
  Target: LAMA2; (+) strand; PAM type: YTN; PAM sequence: TTC
cactctcctttgagcagcat

SEQ ID NO: 358552 - DNA, 20 bp, Artificial Sequence
  Description of Artificial Sequence: Synthetic oligonucleotide
  Target: LAMA2; (+) strand; PAM type: YTN; PAM sequence: CTC
tcctttgagcagcatatttt

SEQ ID NO: 358553 - DNA, 20 bp, Artificial Sequence
  Description of Artificial Sequence: Synthetic oligonucleotide
  Target: LAMA2; (+) strand; PAM type: YTN; PAM sequence: CTC
ctttgagcagcatattttgt

SEQ ID NO: 358554 - DNA, 20 bp, Artificial Sequence
  Description of Artificial Sequence: Synthetic oligonucleotide
  Target: LAMA2; (+) strand; PAM type: YTN; PAM sequence: CTT
tgagcagcatattttgtgac

SEQ ID NO: 358555 - DNA, 20 bp, Artificial Sequence
  Description of Artificial Sequence: Synthetic oligonucleotide
  Target: LAMA2; (+) strand; PAM type: YTN; PAM sequence: TTT
gagcagcatattttgtgact

SEQ ID NO: 358556 - DNA, 20 bp, Artificial Sequence
  Description of Artificial Sequence: Synthetic oligonucleotide
  Target: LAMA2; (+) strand; PAM type: YTN; PAM sequence: TTG
agcagcatattttgtgactt

SEQ ID NO: 358557 - DNA, 20 bp, Artificial Sequence
  Description of Artificial Sequence: Synthetic oligonucleotide
  Target: LAMA2; (+) strand; PAM type: YTN; PAM sequence: TTT
tgtgacttctttgctccata

SEQ ID NO: 358558 - DNA, 20 bp, Artificial Sequence
  Description of Artificial Sequence: Synthetic oligonucleotide
  Target: LAMA2; (+) strand; PAM type: YTN; PAM sequence: TTT
gtgacttctttgctccatag

SEQ ID NO: 358559 - DNA, 20 bp, Artificial Sequence
  Description of Artificial Sequence: Synthetic oligonucleotide
  Target: LAMA2; (+) strand; PAM type: YTN; PAM sequence: TTG
tgacttctttgctccatagt

SEQ ID NO: 358560 - DNA, 20 bp, Artificial Sequence
  Description of Artificial Sequence: Synthetic oligonucleotide
  Target: LAMA2; (+) strand; PAM type: YTN; PAM sequence: CTT
ctttgctccatagtcctcaa

SEQ ID NO: 358561 - DNA, 20 bp, Artificial Sequence
  Description of Artificial Sequence: Synthetic oligonucleotide
  Target: LAMA2; (+) strand; PAM type: YTN; PAM sequence: TTC
tttgctccatagtcctcaaa

SEQ ID NO: 358562 - DNA, 20 bp, Artificial Sequence
  Description of Artificial Sequence: Synthetic oligonucleotide
  Target: LAMA2; (+) strand; PAM type: YTN; PAM sequence: CTT
tgctccatagtcctcaaaat

SEQ ID NO: 358563 - DNA, 20 bp, Artificial Sequence
  Description of Artificial Sequence: Synthetic oligonucleotide
  Target: LAMA2; (+) strand; PAM type: YTN; PAM sequence: TTT
gctccatagtcctcaaaatt

SEQ ID NO: 358564 - DNA, 20 bp, Artificial Sequence
  Description of Artificial Sequence: Synthetic oligonucleotide
  Target: LAMA2; (+) strand; PAM type: YTN; PAM sequence: TTG
ctccatagtcctcaaaatta

SEQ ID NO: 358565 - DNA, 20 bp, Artificial Sequence
  Description of Artificial Sequence: Synthetic oligonucleotide
  Target: LAMA2; (+) strand; PAM type: YTN; PAM sequence: CTC
catagtcctcaaaattattc

SEQ ID NO: 358566 - DNA, 20 bp, Artificial Sequence
  Description of Artificial Sequence: Synthetic oligonucleotide
  Target: LAMA2; (+) strand; PAM type: YTN; PAM sequence: CTC
aaaattattcagaagtggag

SEQ ID NO: 358567 - DNA, 20 bp, Artificial Sequence
  Description of Artificial Sequence: Synthetic oligonucleotide
  Target: LAMA2; (+) strand; PAM type: YTN; PAM sequence: TTA
ttcagaagtggagttcaaac

SEQ ID NO: 358568 - DNA, 20 bp, Artificial Sequence
  Description of Artificial Sequence: Synthetic oligonucleotide
  Target: LAMA2; (+) strand; PAM type: YTN; PAM sequence: TTC
agaagtggagttcaaacccc

SEQ ID NO: 358569 - DNA, 20 bp, Artificial Sequence
  Description of Artificial Sequence: Synthetic oligonucleotide
  Target: LAMA2; (+) strand; PAM type: YTN; PAM sequence: TTC
aaacccctcctcgccatcca

SEQ ID NO: 358570 - DNA, 20 bp, Artificial Sequence
  Description of Artificial Sequence: Synthetic oligonucleotide
  Target: LAMA2; (+) strand; PAM type: YTN; PAM sequence: CTC
ctcgccatccataacttcct

SEQ ID NO: 358571 - DNA, 20 bp, Artificial Sequence
  Description of Artificial Sequence: Synthetic oligonucleotide
  Target: LAMA2; (+) strand; PAM type: YTN; PAM sequence: CTC
gccatccataacttcctcct

SEQ ID NO: 358572 - DNA, 20 bp, Artificial Sequence
  Description of Artificial Sequence: Synthetic oligonucleotide
  Target: LAMA2; (+) strand; PAM type: YTN; PAM sequence: CTT
cctcctatttaaatcttgga

SEQ ID NO: 358573 - DNA, 20 bp, Artificial Sequence
  Description of Artificial Sequence: Synthetic oligonucleotide
  Target: LAMA2; (+) strand; PAM type: YTN; PAM sequence: TTC
ctcctatttaaatcttggat

SEQ ID NO: 358574 - DNA, 20 bp, Artificial Sequence
  Description of Artificial Sequence: Synthetic oligonucleotide
  Target: LAMA2; (+) strand; PAM type: YTN; PAM sequence: CTC
ctatttaaatcttggattaa

SEQ ID NO: 358575 - DNA, 20 bp, Artificial Sequence
  Description of Artificial Sequence: Synthetic oligonucleotide
  Target: LAMA2; (+) strand; PAM type: YTN; PAM sequence: CTA
tttaaatcttggattaaatg

SEQ ID NO: 358576 - DNA, 20 bp, Artificial Sequence
  Description of Artificial Sequence: Synthetic oligonucleotide
  Target: LAMA2; (+) strand; PAM type: YTN; PAM sequence: TTT
aaatcttggattaaatgggt

SEQ ID NO: 358577 - DNA, 20 bp, Artificial Sequence
  Description of Artificial Sequence: Synthetic oligonucleotide
  Target: LAMA2; (+) strand; PAM type: YTN; PAM sequence: TTA
aatcttggattaaatgggtt

SEQ ID NO: 358578 - DNA, 20 bp, Artificial Sequence
  Description of Artificial Sequence: Synthetic oligonucleotide
  Target: LAMA2; (+) strand; PAM type: YTN; PAM sequence: CTT
ggattaaatgggttagttaa

SEQ ID NO: 358579 - DNA, 20 bp, Artificial Sequence
  Description of Artificial Sequence: Synthetic oligonucleotide
  Target: LAMA2; (+) strand; PAM type: YTN; PAM sequence: TTG
gattaaatgggttagttaag

SEQ ID NO: 358580 - DNA, 20 bp, Artificial Sequence
  Description of Artificial Sequence: Synthetic oligonucleotide
  Target: LAMA2; (+) strand; PAM type: YTN; PAM sequence: TTA
aatgggttagttaagaagat

SEQ ID NO: 358581 - DNA, 20 bp, Artificial Sequence
  Description of Artificial Sequence: Synthetic oligonucleotide
  Target: LAMA2; (+) strand; PAM type: YTN; PAM sequence: TTA
gttaagaagatcattatgca

SEQ ID NO: 358582 - DNA, 20 bp, Artificial Sequence
  Description of Artificial Sequence: Synthetic oligonucleotide
  Target: LAMA2; (+) strand; PAM type: YTN; PAM sequence: TTA
agaagatcattatgcaagtg

SEQ ID NO: 358583 - DNA, 20 bp, Artificial Sequence
  Description of Artificial Sequence: Synthetic oligonucleotide
  Target: LAMA2; (+) strand; PAM type: YTN; PAM sequence: TTA
tgcaagtgaagaatggtatg

SEQ ID NO: 358584 - DNA, 20 bp, Artificial Sequence
  Description of Artificial Sequence: Synthetic oligonucleotide
  Target: LAMA2; (+) strand; PAM type: YTN; PAM sequence: CTA
taaaagtaaataggataaat

SEQ ID NO: 358585 - DNA, 20 bp, Artificial Sequence
  Description of Artificial Sequence: Synthetic oligonucleotide
  Target: LAMA2; (+) strand; PAM type: YTN; PAM sequence: CTG
tggttgattttttattccat

SEQ ID NO: 358586 - DNA, 20 bp, Artificial Sequence
  Description of Artificial Sequence: Synthetic oligonucleotide
  Target: LAMA2; (+) strand; PAM type: YTN; PAM sequence: TTG
attttttattccataaatca

SEQ ID NO: 358587 - DNA, 20 bp, Artificial Sequence
  Description of Artificial Sequence: Synthetic oligonucleotide
  Target: LAMA2; (+) strand; PAM type: YTN; PAM sequence: TTT
tttattccataaatcagatc

SEQ ID NO: 358588 - DNA, 20 bp, Artificial Sequence
  Description of Artificial Sequence: Synthetic oligonucleotide
  Target: LAMA2; (+) strand; PAM type: YTN; PAM sequence: TTT
ttattccataaatcagatcc

SEQ ID NO: 358589 - DNA, 20 bp, Artificial Sequence
  Description of Artificial Sequence: Synthetic oligonucleotide
  Target: LAMA2; (+) strand; PAM type: YTN; PAM sequence: TTT
tattccataaatcagatccc

SEQ ID NO: 358590 - DNA, 20 bp, Artificial Sequence
  Description of Artificial Sequence: Synthetic oligonucleotide
  Target: LAMA2; (+) strand; PAM type: YTN; PAM sequence: TTT
attccataaatcagatccca

SEQ ID NO: 358591 - DNA, 20 bp, Artificial Sequence
  Description of Artificial Sequence: Synthetic oligonucleotide
  Target: LAMA2; (+) strand; PAM type: YTN; PAM sequence: TTA
ttccataaatcagatcccat

SEQ ID NO: 358592 - DNA, 20 bp, Artificial Sequence
  Description of Artificial Sequence: Synthetic oligonucleotide
  Target: LAMA2; (+) strand; PAM type: YTN; PAM sequence: TTC
cataaatcagatcccatcaa

SEQ ID NO: 358593 - DNA, 20 bp, Artificial Sequence
  Description of Artificial Sequence: Synthetic oligonucleotide
  Target: LAMA2; (+) strand; PAM type: YTN; PAM sequence: CTA
acttggcaatggagtagaac

SEQ ID NO: 358594 - DNA, 20 bp, Artificial Sequence
  Description of Artificial Sequence: Synthetic oligonucleotide
  Target: LAMA2; (+) strand; PAM type: YTN; PAM sequence: CTT
ggcaatggagtagaaccagg

SEQ ID NO: 358595 - DNA, 20 bp, Artificial Sequence
  Description of Artificial Sequence: Synthetic oligonucleotide
  Target: LAMA2; (+) strand; PAM type: YTN; PAM sequence: TTG
gcaatggagtagaaccagga

SEQ ID NO: 358596 - DNA, 20 bp, Artificial Sequence
  Description of Artificial Sequence: Synthetic oligonucleotide
  Target: LAMA2; (+) strand; PAM type: YTN; PAM sequence: TTT
gctgcctagaataaactgaa

SEQ ID NO: 358597 - DNA, 20 bp, Artificial Sequence
  Description of Artificial Sequence: Synthetic oligonucleotide
  Target: LAMA2; (+) strand; PAM type: YTN; PAM sequence: TTG
ctgcctagaataaactgaat

SEQ ID NO: 358598 - DNA, 20 bp, Artificial Sequence
  Description of Artificial Sequence: Synthetic oligonucleotide
  Target: LAMA2; (+) strand; PAM type: YTN; PAM sequence: CTG
cctagaataaactgaatgaa

SEQ ID NO: 358599 - DNA, 20 bp, Artificial Sequence
  Description of Artificial Sequence: Synthetic oligonucleotide
  Target: LAMA2; (+) strand; PAM type: YTN; PAM sequence: CTA
gaataaactgaatgaatttg

SEQ ID NO: 358600 - DNA, 20 bp, Artificial Sequence
  Description of Artificial Sequence: Synthetic oligonucleotide
  Target: LAMA2; (+) strand; PAM type: YTN; PAM sequence: CTG
aatgaatttgtaaaccaaaa

SEQ ID NO: 358601 - DNA, 20 bp, Artificial Sequence
  Description of Artificial Sequence: Synthetic oligonucleotide
  Target: LAMA2; (+) strand; PAM type: YTN; PAM sequence: TTT
gtaaaccaaaaataaaattc

SEQ ID NO: 358602 - DNA, 20 bp, Artificial Sequence
  Description of Artificial Sequence: Synthetic oligonucleotide
  Target: LAMA2; (+) strand; PAM type: YTN; PAM sequence: TTG
taaaccaaaaataaaattct

SEQ ID NO: 358603 - DNA, 20 bp, Artificial Sequence
  Description of Artificial Sequence: Synthetic oligonucleotide
  Target: LAMA2; (+) strand; PAM type: YTN; PAM sequence: TTC
taagacccctgactgaacgg

SEQ ID NO: 358604 - DNA, 20 bp, Artificial Sequence
  Description of Artificial Sequence: Synthetic oligonucleotide
  Target: LAMA2; (+) strand; PAM type: YTN; PAM sequence: CTA
agacccctgactgaacggac

SEQ ID NO: 358605 - DNA, 20 bp, Artificial Sequence
  Description of Artificial Sequence: Synthetic oligonucleotide
  Target: LAMA2; (+) strand; PAM type: YTN; PAM sequence: CTG
actgaacggacccccttctt

SEQ ID NO: 358606 - DNA, 20 bp, Artificial Sequence
  Description of Artificial Sequence: Synthetic oligonucleotide
  Target: LAMA2; (+) strand; PAM type: YTN; PAM sequence: CTG
aacggacccccttcttggcc

SEQ ID NO: 358607 - DNA, 20 bp, Artificial Sequence
  Description of Artificial Sequence: Synthetic oligonucleotide
  Target: LAMA2; (+) strand; PAM type: YTN; PAM sequence: CTT
cttggccaagggaatcccaa

SEQ ID NO: 358608 - DNA, 20 bp, Artificial Sequence
  Description of Artificial Sequence: Synthetic oligonucleotide
  Target: LAMA2; (+) strand; PAM type: YTN; PAM sequence: TTC
ttggccaagggaatcccaaa

SEQ ID NO: 358609 - DNA, 20 bp, Artificial Sequence
  Description of Artificial Sequence: Synthetic oligonucleotide
  Target: LAMA2; (+) strand; PAM type: YTN; PAM sequence: CTT
ggccaagggaatcccaaaga

SEQ ID NO: 358610 - DNA, 20 bp, Artificial Sequence
  Description of Artificial Sequence: Synthetic oligonucleotide
  Target: LAMA2; (+) strand; PAM type: YTN; PAM sequence: TTG
gccaagggaatcccaaagaa

SEQ ID NO: 358611 - DNA, 20 bp, Artificial Sequence
  Description of Artificial Sequence: Synthetic oligonucleotide
  Target: LAMA2; (+) strand; PAM type: YTN; PAM sequence: CTA
aagaaacctgaacatcatgg

SEQ ID NO: 358612 - DNA, 20 bp, Artificial Sequence
  Description of Artificial Sequence: Synthetic oligonucleotide
  Target: LAMA2; (+) strand; PAM type: YTN; PAM sequence: CTG
aacatcatgggaagggacga

SEQ ID NO: 358613 - DNA, 20 bp, Artificial Sequence
  Description of Artificial Sequence: Synthetic oligonucleotide
  Target: LAMA2; (+) strand; PAM type: YTN; PAM sequence: TTA
cacattcctcattataccct

SEQ ID NO: 358614 - DNA, 20 bp, Artificial Sequence
  Description of Artificial Sequence: Synthetic oligonucleotide
  Target: LAMA2; (+) strand; PAM type: YTN; PAM sequence: TTC
ctcattataccctgctccct

SEQ ID NO: 358615 - DNA, 20 bp, Artificial Sequence
  Description of Artificial Sequence: Synthetic oligonucleotide
  Target: LAMA2; (+) strand; PAM type: YTN; PAM sequence: CTC
attataccctgctccctttg

SEQ ID NO: 358616 - DNA, 20 bp, Artificial Sequence
  Description of Artificial Sequence: Synthetic oligonucleotide
  Target: LAMA2; (+) strand; PAM type: YTN; PAM sequence: TTA
taccctgctccctttggagt

SEQ ID NO: 358617 - DNA, 20 bp, Artificial Sequence
  Description of Artificial Sequence: Synthetic oligonucleotide
  Target: LAMA2; (+) strand; PAM type: YTN; PAM sequence: CTG
ctccctttggagtttagaca

SEQ ID NO: 358618 - DNA, 20 bp, Artificial Sequence
  Description of Artificial Sequence: Synthetic oligonucleotide
  Target: LAMA2; (+) strand; PAM type: YTN; PAM sequence: CTC
cctttggagtttagacacca

SEQ ID NO: 358619 - DNA, 20 bp, Artificial Sequence
  Description of Artificial Sequence: Synthetic oligonucleotide
  Target: LAMA2; (+) strand; PAM type: YTN; PAM sequence: CTT
tggagtttagacaccacaga

SEQ ID NO: 358620 - DNA, 20 bp, Artificial Sequence
  Description of Artificial Sequence: Synthetic oligonucleotide
  Target: LAMA2; (+) strand; PAM type: YTN; PAM sequence: TTT
ggagtttagacaccacagac

SEQ ID NO: 358621 - DNA, 20 bp, Artificial Sequence
  Description of Artificial Sequence: Synthetic oligonucleotide
  Target: LAMA2; (+) strand; PAM type: YTN; PAM sequence: TTG
gagtttagacaccacagacc

SEQ ID NO: 358622 - DNA, 20 bp, Artificial Sequence
  Description of Artificial Sequence: Synthetic oligonucleotide
  Target: LAMA2; (+) strand; PAM type: YTN; PAM sequence: TTT
agacaccacagaccaacagt

SEQ ID NO: 358623 - DNA, 20 bp, Artificial Sequence
  Description of Artificial Sequence: Synthetic oligonucleotide
  Target: LAMA2; (+) strand; PAM type: YTN; PAM sequence: TTA
gacaccacagaccaacagta

SEQ ID NO: 358624 - DNA, 20 bp, Artificial Sequence
  Description of Artificial Sequence: Synthetic oligonucleotide
  Target: LAMA2; (+) strand; PAM type: YTN; PAM sequence: TTA
aaacagagattttaaaactg

SEQ ID NO: 358625 - DNA, 20 bp, Artificial Sequence
  Description of Artificial Sequence: Synthetic oligonucleotide
  Target: LAMA2; (+) strand; PAM type: YTN; PAM sequence: TTT
taaaactgactagacagaca

SEQ ID NO: 358626 - DNA, 20 bp, Artificial Sequence
  Description of Artificial Sequence: Synthetic oligonucleotide
  Target: LAMA2; (+) strand; PAM type: YTN; PAM sequence: TTT
aaaactgactagacagacac

SEQ ID NO: 358627 - DNA, 20 bp, Artificial Sequence
  Description of Artificial Sequence: Synthetic oligonucleotide
  Target: LAMA2; (+) strand; PAM type: YTN; PAM sequence: TTA
aaactgactagacagacact

SEQ ID NO: 358628 - DNA, 20 bp, Artificial Sequence
  Description of Artificial Sequence: Synthetic oligonucleotide
  Target: LAMA2; (+) strand; PAM type: YTN; PAM sequence: CTG
actagacagacactttacag

SEQ ID NO: 358629 - DNA, 20 bp, Artificial Sequence
  Description of Artificial Sequence: Synthetic oligonucleotide
  Target: LAMA2; (+) strand; PAM type: YTN; PAM sequence: CTA
gacagacactttacagcaac

SEQ ID NO: 358630 - DNA, 20 bp, Artificial Sequence
  Description of Artificial Sequence: Synthetic oligonucleotide
  Target: LAMA2; (+) strand; PAM type: YTN; PAM sequence: CTT
tacagcaacaagataccaaa

SEQ ID NO: 358631 - DNA, 20 bp, Artificial Sequence
  Description of Artificial Sequence: Synthetic oligonucleotide
  Target: LAMA2; (+) strand; PAM type: YTN; PAM sequence: TTT
acagcaacaagataccaaat

SEQ ID NO: 358632 - DNA, 20 bp, Artificial Sequence
  Description of Artificial Sequence: Synthetic oligonucleotide
  Target: LAMA2; (+) strand; PAM type: YTN; PAM sequence: TTA
cagcaacaagataccaaatt

SEQ ID NO: 358633 - DNA, 20 bp, Artificial Sequence
  Description of Artificial Sequence: Synthetic oligonucleotide
  Target: LAMA2; (+) strand; PAM type: YTN; PAM sequence: TTC
taacctcactctggtatagc

SEQ ID NO: 358634 - DNA, 20 bp, Artificial Sequence
  Description of Artificial Sequence: Synthetic oligonucleotide
  Target: LAMA2; (+) strand; PAM type: YTN; PAM sequence: CTA
acctcactctggtatagcat

SEQ ID NO: 358635 - DNA, 20 bp, Artificial Sequence
  Description of Artificial Sequence: Synthetic oligonucleotide
  Target: LAMA2; (+) strand; PAM type: YTN; PAM sequence: CTC
actctggtatagcataacat

SEQ ID NO: 358636 - DNA, 20 bp, Artificial Sequence
  Description of Artificial Sequence: Synthetic oligonucleotide
  Target: LAMA2; (+) strand; PAM type: YTN; PAM sequence: CTC
tggtatagcataacataaca

SEQ ID NO: 358637 - DNA, 20 bp, Artificial Sequence
  Description of Artificial Sequence: Synthetic oligonucleotide
  Target: LAMA2; (+) strand; PAM type: YTN; PAM sequence: CTG
gtatagcataacataacaga

SEQ ID NO: 358638 - DNA, 20 bp, Artificial Sequence
  Description of Artificial Sequence: Synthetic oligonucleotide
  Target: LAMA2; (+) strand; PAM type: YTN; PAM sequence: CTA
aaagaaatcaaagtatttta

SEQ ID NO: 358639 - DNA, 20 bp, Artificial Sequence
  Description of Artificial Sequence: Synthetic oligonucleotide
  Target: LAMA2; (+) strand; PAM type: YTN; PAM sequence: TTT
tataccaaaatatatttatt

SEQ ID NO: 358640 - DNA, 20 bp, Artificial Sequence
  Description of Artificial Sequence: Synthetic oligonucleotide
  Target: LAMA2; (+) strand; PAM type: YTN; PAM sequence: TTT
ataccaaaatatatttattt

SEQ ID NO: 358641 - DNA, 20 bp, Artificial Sequence
  Description of Artificial Sequence: Synthetic oligonucleotide
  Target: LAMA2; (+) strand; PAM type: YTN; PAM sequence: TTA
taccaaaatatatttatttg

SEQ ID NO: 358642 - DNA, 20 bp, Artificial Sequence
  Description of Artificial Sequence: Synthetic oligonucleotide
  Target: LAMA2; (+) strand; PAM type: YTN; PAM sequence: TTT
atttgacatattctgaaatg

SEQ ID NO: 358643 - DNA, 20 bp, Artificial Sequence
  Description of Artificial Sequence: Synthetic oligonucleotide
  Target: LAMA2; (+) strand; PAM type: YTN; PAM sequence: TTA
tttgacatattctgaaatga

SEQ ID NO: 358644 - DNA, 20 bp, Artificial Sequence
  Description of Artificial Sequence: Synthetic oligonucleotide
  Target: LAMA2; (+) strand; PAM type: YTN; PAM sequence: TTT
gacatattctgaaatgacct

SEQ ID NO: 358645 - DNA, 20 bp, Artificial Sequence
  Description of Artificial Sequence: Synthetic oligonucleotide
  Target: LAMA2; (+) strand; PAM type: YTN; PAM sequence: TTG
acatattctgaaatgacctt

SEQ ID NO: 358646 - DNA, 20 bp, Artificial Sequence
  Description of Artificial Sequence: Synthetic oligonucleotide
  Target: LAMA2; (+) strand; PAM type: YTN; PAM sequence: TTC
tgaaatgaccttgcaaagct

SEQ ID NO: 358647 - DNA, 20 bp, Artificial Sequence
  Description of Artificial Sequence: Synthetic oligonucleotide
  Target: LAMA2; (+) strand; PAM type: YTN; PAM sequence: CTG
aaatgaccttgcaaagctgt

SEQ ID NO: 358648 - DNA, 20 bp, Artificial Sequence
  Description of Artificial Sequence: Synthetic oligonucleotide
  Target: LAMA2; (+) strand; PAM type: YTN; PAM sequence: CTT
gcaaagctgtctcttgggga

SEQ ID NO: 358649 - DNA, 20 bp, Artificial Sequence
  Description of Artificial Sequence: Synthetic oligonucleotide
  Target: LAMA2; (+) strand; PAM type: YTN; PAM sequence: TTG
caaagctgtctcttggggaa

SEQ ID NO: 358650 - DNA, 20 bp, Artificial Sequence
  Description of Artificial Sequence: Synthetic oligonucleotide
  Target: LAMA2; (+) strand; PAM type: YTN; PAM sequence: CTG
tctcttggggaaatttgcat

SEQ ID NO: 358651 - DNA, 20 bp, Artificial Sequence
  Description of Artificial Sequence: Synthetic oligonucleotide
  Target: LAMA2; (+) strand; PAM type: YTN; PAM sequence: CTC
ttggggaaatttgcattcta

SEQ ID NO: 358652 - DNA, 20 bp, Artificial Sequence
  Description of Artificial Sequence: Synthetic oligonucleotide
  Target: LAMA2; (+) strand; PAM type: YTN; PAM sequence: CTT
ggggaaatttgcattctata

SEQ ID NO: 358653 - DNA, 20 bp, Artificial Sequence
  Description of Artificial Sequence: Synthetic oligonucleotide
  Target: LAMA2; (+) strand; PAM type: YTN; PAM sequence: TTG
gggaaatttgcattctatag

SEQ ID NO: 358654 - DNA, 20 bp, Artificial Sequence
  Description of Artificial Sequence: Synthetic oligonucleotide
  Target: LAMA2; (+) strand; PAM type: YTN; PAM sequence: TTT
gcattctatagagaatctcc

SEQ ID NO: 358655 - DNA, 20 bp, Artificial Sequence
  Description of Artificial Sequence: Synthetic oligonucleotide
  Target: LAMA2; (+) strand; PAM type: YTN; PAM sequence: TTG
cattctatagagaatctcct

SEQ ID NO: 358656 - DNA, 20 bp, Artificial Sequence
  Description of Artificial Sequence: Synthetic oligonucleotide
  Target: LAMA2; (+) strand; PAM type: YTN; PAM sequence: TTC
tatagagaatctccttccct

SEQ ID NO: 358657 - DNA, 20 bp, Artificial Sequence
  Description of Artificial Sequence: Synthetic oligonucleotide
  Target: LAMA2; (+) strand; PAM type: YTN; PAM sequence: CTA
tagagaatctccttccctta

SEQ ID NO: 358658 - DNA, 20 bp, Artificial Sequence
  Description of Artificial Sequence: Synthetic oligonucleotide
  Target: LAMA2; (+) strand; PAM type: YTN; PAM sequence: CTC
cttcccttactaagtctttt

SEQ ID NO: 358659 - DNA, 20 bp, Artificial Sequence
  Description of Artificial Sequence: Synthetic oligonucleotide
  Target: LAMA2; (+) strand; PAM type: YTN; PAM sequence: CTT
cccttactaagtcttttctg

SEQ ID NO: 358660 - DNA, 20 bp, Artificial Sequence
  Description of Artificial Sequence: Synthetic oligonucleotide
  Target: LAMA2; (+) strand; PAM type: YTN; PAM sequence: TTC
ccttactaagtcttttctgg

SEQ ID NO: 358661 - DNA, 20 bp, Artificial Sequence
  Description of Artificial Sequence: Synthetic oligonucleotide
  Target: LAMA2; (+) strand; PAM type: YTN; PAM sequence: CTT
actaagtcttttctggagag

SEQ ID NO: 358662 - DNA, 20 bp, Artificial Sequence
  Description of Artificial Sequence: Synthetic oligonucleotide
  Target: LAMA2; (+) strand; PAM type: YTN; PAM sequence: TTA
ctaagtcttttctggagagt

SEQ ID NO: 358663 - DNA, 20 bp, Artificial Sequence
  Description of Artificial Sequence: Synthetic oligonucleotide
  Target: LAMA2; (+) strand; PAM type: YTN; PAM sequence: CTA
agtcttttctggagagtcag

SEQ ID NO: 358664 - DNA, 20 bp, Artificial Sequence
  Description of Artificial Sequence: Synthetic oligonucleotide
  Target: LAMA2; (+) strand; PAM type: YTN; PAM sequence: CTT
ttctggagagtcagatacct

SEQ ID NO: 358665 - DNA, 20 bp, Artificial Sequence
  Description of Artificial Sequence: Synthetic oligonucleotide
  Target: LAMA2; (+) strand; PAM type: YTN; PAM sequence: TTT
tctggagagtcagatacctt

SEQ ID NO: 358666 - DNA, 20 bp, Artificial Sequence
  Description of Artificial Sequence: Synthetic oligonucleotide
  Target: LAMA2; (+) strand; PAM type: YTN; PAM sequence: TTT
ctggagagtcagataccttt

SEQ ID NO: 358667 - DNA, 20 bp, Artificial Sequence
  Description of Artificial Sequence: Synthetic oligonucleotide
  Target: LAMA2; (+) strand; PAM type: YTN; PAM sequence: TTC
tggagagtcagatacctttt

SEQ ID NO: 358668 - DNA, 20 bp, Artificial Sequence
  Description of Artificial Sequence: Synthetic oligonucleotide
  Target: LAMA2; (+) strand; PAM type: YTN; PAM sequence: CTG
gagagtcagataccttttaa

SEQ ID NO: 358669 - DNA, 20 bp, Artificial Sequence
  Description of Artificial Sequence: Synthetic oligonucleotide
  Target: LAMA2; (+) strand; PAM type: YTN; PAM sequence: CTT
ttaaggtctggcaagagaca

SEQ ID NO: 358670 - DNA, 20 bp, Artificial Sequence
  Description of Artificial Sequence: Synthetic oligonucleotide
  Target: LAMA2; (+) strand; PAM type: YTN; PAM sequence: TTT
taaggtctggcaagagacat

SEQ ID NO: 358671 - DNA, 20 bp, Artificial Sequence
  Description of Artificial Sequence: Synthetic oligonucleotide
  Target: LAMA2; (+) strand; PAM type: YTN; PAM sequence: TTT
aaggtctggcaagagacatt

SEQ ID NO: 358672 - DNA, 20 bp, Artificial Sequence
  Description of Artificial Sequence: Synthetic oligonucleotide
  Target: LAMA2; (+) strand; PAM type: YTN; PAM sequence: TTA
aggtctggcaagagacattc

SEQ ID NO: 358673 - DNA, 20 bp, Artificial Sequence
  Description of Artificial Sequence: Synthetic oligonucleotide
  Target: LAMA2; (+) strand; PAM type: YTN; PAM sequence: CTG
gcaagagacattcaccatca

SEQ ID NO: 358674 - DNA, 20 bp, Artificial Sequence
  Description of Artificial Sequence: Synthetic oligonucleotide
  Target: LAMA2; (+) strand; PAM type: YTN; PAM sequence: TTC
accatcagcctgctacttta

SEQ ID NO: 358675 - DNA, 20 bp, Artificial Sequence
  Description of Artificial Sequence: Synthetic oligonucleotide
  Target: LAMA2; (+) strand; PAM type: YTN; PAM sequence: CTG
ctactttaccctactacctt

SEQ ID NO: 358676 - DNA, 20 bp, Artificial Sequence
  Description of Artificial Sequence: Synthetic oligonucleotide
  Target: LAMA2; (+) strand; PAM type: YTN; PAM sequence: CTA
ctttaccctactaccttgag

SEQ ID NO: 358677 - DNA, 20 bp, Artificial Sequence
  Description of Artificial Sequence: Synthetic oligonucleotide
  Target: LAMA2; (+) strand; PAM type: YTN; PAM sequence: CTT
taccctactaccttgaggct

SEQ ID NO: 358678 - DNA, 20 bp, Artificial Sequence
  Description of Artificial Sequence: Synthetic oligonucleotide
  Target: LAMA2; (+) strand; PAM type: YTN; PAM sequence: TTT
accctactaccttgaggctt

SEQ ID NO: 358679 - DNA, 20 bp, Artificial Sequence
  Description of Artificial Sequence: Synthetic oligonucleotide
  Target: LAMA2; (+) strand; PAM type: YTN; PAM sequence: TTA
ccctactaccttgaggcttc

SEQ ID NO: 358680 - DNA, 20 bp, Artificial Sequence
  Description of Artificial Sequence: Synthetic oligonucleotide
  Target: LAMA2; (+) strand; PAM type: YTN; PAM sequence: CTA
ctaccttgaggcttcatcta

SEQ ID NO: 358681 - DNA, 20 bp, Artificial Sequence
  Description of Artificial Sequence: Synthetic oligonucleotide
  Target: LAMA2; (+) strand; PAM type: YTN; PAM sequence: CTA
ccttgaggcttcatctacat

SEQ ID NO: 358682 - DNA, 20 bp, Artificial Sequence
  Description of Artificial Sequence: Synthetic oligonucleotide
  Target: LAMA2; (+) strand; PAM type: YTN; PAM sequence: CTT
gaggcttcatctacatgaca

SEQ ID NO: 358683 - DNA, 20 bp, Artificial Sequence
  Description of Artificial Sequence: Synthetic oligonucleotide
  Target: LAMA2; (+) strand; PAM type: YTN; PAM sequence: TTG
aggcttcatctacatgacaa

SEQ ID NO: 358684 - DNA, 20 bp, Artificial Sequence
  Description of Artificial Sequence: Synthetic oligonucleotide
  Target: LAMA2; (+) strand; PAM type: YTN; PAM sequence: CTT
catctacatgacaagaaccg

SEQ ID NO: 358685 - DNA, 20 bp, Artificial Sequence
  Description of Artificial Sequence: Synthetic oligonucleotide
  Target: LAMA2; (+) strand; PAM type: YTN; PAM sequence: TTC
atctacatgacaagaaccgt

SEQ ID NO: 358686 - DNA, 20 bp, Artificial Sequence
  Description of Artificial Sequence: Synthetic oligonucleotide
  Target: LAMA2; (+) strand; PAM type: YTN; PAM sequence: CTA
catgacaagaaccgtggctt

SEQ ID NO: 358687 - DNA, 20 bp, Artificial Sequence
  Description of Artificial Sequence: Synthetic oligonucleotide
  Target: LAMA2; (+) strand; PAM type: YTN; PAM sequence: CTT
ccacaacccactctcttaac

SEQ ID NO: 358688 - DNA, 20 bp, Artificial Sequence
  Description of Artificial Sequence: Synthetic oligonucleotide
  Target: LAMA2; (+) strand; PAM type: YTN; PAM sequence: TTC
cacaacccactctcttaact

SEQ ID NO: 358689 - DNA, 20 bp, Artificial Sequence
  Description of Artificial Sequence: Synthetic oligonucleotide
  Target: LAMA2; (+) strand; PAM type: YTN; PAM sequence: CTC
tcttaactcaagctgacttc

SEQ ID NO: 358690 - DNA, 20 bp, Artificial Sequence
  Description of Artificial Sequence: Synthetic oligonucleotide
  Target: LAMA2; (+) strand; PAM type: YTN; PAM sequence: CTC
ttaactcaagctgacttcaa

SEQ ID NO: 358691 - DNA, 20 bp, Artificial Sequence
  Description of Artificial Sequence: Synthetic oligonucleotide
  Target: LAMA2; (+) strand; PAM type: YTN; PAM sequence: CTT
aactcaagctgacttcaact

SEQ ID NO: 358692 - DNA, 20 bp, Artificial Sequence
  Description of Artificial Sequence: Synthetic oligonucleotide
  Target: LAMA2; (+) strand; PAM type: YTN; PAM sequence: TTA
actcaagctgacttcaactg

SEQ ID NO: 358693 - DNA, 20 bp, Artificial Sequence
  Description of Artificial Sequence: Synthetic oligonucleotide
  Target: LAMA2; (+) strand; PAM type: YTN; PAM sequence: CTC
aagctgacttcaactgttca

SEQ ID NO: 358694 - DNA, 20 bp, Artificial Sequence
  Description of Artificial Sequence: Synthetic oligonucleotide
  Target: LAMA2; (+) strand; PAM type: YTN; PAM sequence: CTG
acttcaactgttcaggcaga

SEQ ID NO: 358695 - DNA, 20 bp, Artificial Sequence
  Description of Artificial Sequence: Synthetic oligonucleotide
  Target: LAMA2; (+) strand; PAM type: YTN; PAM sequence: CTT
caactgttcaggcagaattt

SEQ ID NO: 358696 - DNA, 20 bp, Artificial Sequence
  Description of Artificial Sequence: Synthetic oligonucleotide
  Target: LAMA2; (+) strand; PAM type: YTN; PAM sequence: TTC
aactgttcaggcagaatttt

SEQ ID NO: 358697 - DNA, 20 bp, Artificial Sequence
  Description of Artificial Sequence: Synthetic oligonucleotide
  Target: LAMA2; (+) strand; PAM type: YTN; PAM sequence: CTG
ttcaggcagaattttactct

SEQ ID NO: 358698 - DNA, 20 bp, Artificial Sequence
  Description of Artificial Sequence: Synthetic oligonucleotide
  Target: LAMA2; (+) strand; PAM type: YTN; PAM sequence: TTC
aggcagaattttactctttc

SEQ ID NO: 358699 - DNA, 20 bp, Artificial Sequence
  Description of Artificial Sequence: Synthetic oligonucleotide
  Target: LAMA2; (+) strand; PAM type: YTN; PAM sequence: TTT
tactctttcgaccaattgcc

SEQ ID NO: 358700 - DNA, 20 bp, Artificial Sequence
  Description of Artificial Sequence: Synthetic oligonucleotide
  Target: LAMA2; (+) strand; PAM type: YTN; PAM sequence: TTT
actctttcgaccaattgcca

SEQ ID NO: 358701 - DNA, 20 bp, Artificial Sequence
  Description of Artificial Sequence: Synthetic oligonucleotide
  Target: LAMA2; (+) strand; PAM type: YTN; PAM sequence: TTA
ctctttcgaccaattgccag

SEQ ID NO: 358702 - DNA, 20 bp, Artificial Sequence
  Description of Artificial Sequence: Synthetic oligonucleotide
  Target: LAMA2; (+) strand; PAM type: YTN; PAM sequence: CTC
tttcgaccaattgccagtca

SEQ ID NO: 358703 - DNA, 20 bp, Artificial Sequence
  Description of Artificial Sequence: Synthetic oligonucleotide
  Target: LAMA2; (+) strand; PAM type: YTN; PAM sequence: CTT
tcgaccaattgccagtcaga

SEQ ID NO: 358704 - DNA, 20 bp, Artificial Sequence
  Description of Artificial Sequence: Synthetic oligonucleotide
  Target: LAMA2; (+) strand; PAM type: YTN; PAM sequence: TTT
cgaccaattgccagtcagaa

SEQ ID NO: 358705 - DNA, 20 bp, Artificial Sequence
  Description of Artificial Sequence: Synthetic oligonucleotide
  Target: LAMA2; (+) strand; PAM type: YTN; PAM sequence: TTC
gaccaattgccagtcagaaa

SEQ ID NO: 358706 - DNA, 20 bp, Artificial Sequence
  Description of Artificial Sequence: Synthetic oligonucleotide
  Target: LAMA2; (+) strand; PAM type: YTN; PAM sequence: TTG
ccagtcagaaaatctttgaa

SEQ ID NO: 358707 - DNA, 20 bp, Artificial Sequence
  Description of Artificial Sequence: Synthetic oligonucleotide
  Target: LAMA2; (+) strand; PAM type: YTN; PAM sequence: CTT
tgaatccatcaatgacttgg

SEQ ID NO: 358708 - DNA, 20 bp, Artificial Sequence
  Description of Artificial Sequence: Synthetic oligonucleotide
  Target: LAMA2; (+) strand; PAM type: YTN; PAM sequence: TTT
gaatccatcaatgacttgga

SEQ ID NO: 358709 - DNA, 20 bp, Artificial Sequence
  Description of Artificial Sequence: Synthetic oligonucleotide
  Target: LAMA2; (+) strand; PAM type: YTN; PAM sequence: TTG
aatccatcaatgacttggaa

SEQ ID NO: 358710 - DNA, 20 bp, Artificial Sequence
  Description of Artificial Sequence: Synthetic oligonucleotide
  Target: LAMA2; (+) strand; PAM type: YTN; PAM sequence: CTT
ggaagcccccacctcgcttc

SEQ ID NO: 358711 - DNA, 20 bp, Artificial Sequence
  Description of Artificial Sequence: Synthetic oligonucleotide
  Target: LAMA2; (+) strand; PAM type: YTN; PAM sequence: TTG
gaagcccccacctcgcttca

SEQ ID NO: 358712 - DNA, 20 bp, Artificial Sequence
  Description of Artificial Sequence: Synthetic oligonucleotide
  Target: LAMA2; (+) strand; PAM type: YTN; PAM sequence: CTC
gcttcaagatgtcctacttt

SEQ ID NO: 358713 - DNA, 20 bp, Artificial Sequence
  Description of Artificial Sequence: Synthetic oligonucleotide
  Target: LAMA2; (+) strand; PAM type: YTN; PAM sequence: CTT
caagatgtcctacttttctg

SEQ ID NO: 358714 - DNA, 20 bp, Artificial Sequence
  Description of Artificial Sequence: Synthetic oligonucleotide
  Target: LAMA2; (+) strand; PAM type: YTN; PAM sequence: TTC
aagatgtcctacttttctgg

SEQ ID NO: 358715 - DNA, 20 bp, Artificial Sequence
  Description of Artificial Sequence: Synthetic oligonucleotide
  Target: LAMA2; (+) strand; PAM type: YTN; PAM sequence: CTA
cttttctgggccgaaccaat

SEQ ID NO: 358716 - DNA, 20 bp, Artificial Sequence
  Description of Artificial Sequence: Synthetic oligonucleotide
  Target: LAMA2; (+) strand; PAM type: YTN; PAM sequence: CTT
ttctgggccgaaccaatgtg

SEQ ID NO: 358717 - DNA, 20 bp, Artificial Sequence
  Description of Artificial Sequence: Synthetic oligonucleotide
  Target: LAMA2; (+) strand; PAM type: YTN; PAM sequence: TTT
tctgggccgaaccaatgtgt

SEQ ID NO: 358718 - DNA, 20 bp, Artificial Sequence
  Description of Artificial Sequence: Synthetic oligonucleotide
  Target: LAMA2; (+) strand; PAM type: YTN; PAM sequence: TTT
ctgggccgaaccaatgtgta

SEQ ID NO: 358719 - DNA, 20 bp, Artificial Sequence
  Description of Artificial Sequence: Synthetic oligonucleotide
  Target: LAMA2; (+) strand; PAM type: YTN; PAM sequence: TTC
tgggccgaaccaatgtgtaa

SEQ ID NO: 358720 - DNA, 20 bp, Artificial Sequence
  Description of Artificial Sequence: Synthetic oligonucleotide
  Target: LAMA2; (+) strand; PAM type: YTN; PAM sequence: CTG
ggccgaaccaatgtgtaact

SEQ ID NO: 358721 - DNA, 20 bp, Artificial Sequence
  Description of Artificial Sequence: Synthetic oligonucleotide
  Target: LAMA2; (+) strand; PAM type: YTN; PAM sequence: CTT
agtactggtgtatgtctttg

SEQ ID NO: 358722 - DNA, 20 bp, Artificial Sequence
  Description of Artificial Sequence: Synthetic oligonucleotide
  Target: LAMA2; (+) strand; PAM type: YTN; PAM sequence: TTA
gtactggtgtatgtctttgc

SEQ ID NO: 358723 - DNA, 20 bp, Artificial Sequence
  Description of Artificial Sequence: Synthetic oligonucleotide
  Target: LAMA2; (+) strand; PAM type: YTN; PAM sequence: CTG
gtgtatgtctttgcctgcaa

SEQ ID NO: 358724 - DNA, 20 bp, Artificial Sequence
  Description of Artificial Sequence: Synthetic oligonucleotide
  Target: LAMA2; (+) strand; PAM type: YTN; PAM sequence: CTT
tgcctgcaactttcgtctcc

SEQ ID NO: 358725 - DNA, 20 bp, Artificial Sequence
  Description of Artificial Sequence: Synthetic oligonucleotide
  Target: LAMA2; (+) strand; PAM type: YTN; PAM sequence: TTT
gcctgcaactttcgtctccc

SEQ ID NO: 358726 - DNA, 20 bp, Artificial Sequence
  Description of Artificial Sequence: Synthetic oligonucleotide
  Target: LAMA2; (+) strand; PAM type: YTN; PAM sequence: TTG
cctgcaactttcgtctccct

SEQ ID NO: 358727 - DNA, 20 bp, Artificial Sequence
  Description of Artificial Sequence: Synthetic oligonucleotide
  Target: LAMA2; (+) strand; PAM type: YTN; PAM sequence: CTG
caactttcgtctccctaaaa

SEQ ID NO: 358728 - DNA, 20 bp, Artificial Sequence
  Description of Artificial Sequence: Synthetic oligonucleotide
  Target: LAMA2; (+) strand; PAM type: YTN; PAM sequence: CTT
tcgtctccctaaaatatata

SEQ ID NO: 358729 - DNA, 20 bp, Artificial Sequence
  Description of Artificial Sequence: Synthetic oligonucleotide
  Target: LAMA2; (+) strand; PAM type: YTN; PAM sequence: TTT
cgtctccctaaaatatataa

SEQ ID NO: 358730 - DNA, 20 bp, Artificial Sequence
  Description of Artificial Sequence: Synthetic oligonucleotide
  Target: LAMA2; (+) strand; PAM type: YTN; PAM sequence: TTC
gtctccctaaaatatataac

SEQ ID NO: 358731 - DNA, 20 bp, Artificial Sequence
  Description of Artificial Sequence: Synthetic oligonucleotide
  Target: LAMA2; (+) strand; PAM type: YTN; PAM sequence: CTC
cctaaaatatataacgccaa

SEQ ID NO: 358732 - DNA, 20 bp, Artificial Sequence
  Description of Artificial Sequence: Synthetic oligonucleotide
  Target: LAMA2; (+) strand; PAM type: YTN; PAM sequence: CTA
aaatatataacgccaagctg

SEQ ID NO: 358733 - DNA, 20 bp, Artificial Sequence
  Description of Artificial Sequence: Synthetic oligonucleotide
  Target: LAMA2; (+) strand; PAM type: YTN; PAM sequence: CTG
taacccagtcatctttggca

SEQ ID NO: 358734 - DNA, 20 bp, Artificial Sequence
  Description of Artificial Sequence: Synthetic oligonucleotide
  Target: LAMA2; (+) strand; PAM type: YTN; PAM sequence: CTT
tggcacatattctcaggacc

SEQ ID NO: 358735 - DNA, 20 bp, Artificial Sequence
  Description of Artificial Sequence: Synthetic oligonucleotide
  Target: LAMA2; (+) strand; PAM type: YTN; PAM sequence: TTT
ggcacatattctcaggacct

SEQ ID NO: 358736 - DNA, 20 bp, Artificial Sequence
  Description of Artificial Sequence: Synthetic oligonucleotide
  Target: LAMA2; (+) strand; PAM type: YTN; PAM sequence: TTG
gcacatattctcaggacctc

SEQ ID NO: 358737 - DNA, 20 bp, Artificial Sequence
  Description of Artificial Sequence: Synthetic oligonucleotide
  Target: LAMA2; (+) strand; PAM type: YTN; PAM sequence: TTC
tcaggacctcctaaggctgt

SEQ ID NO: 358738 - DNA, 20 bp, Artificial Sequence
  Description of Artificial Sequence: Synthetic oligonucleotide
  Target: LAMA2; (+) strand; PAM type: YTN; PAM sequence: CTC
aggacctcctaaggctgtgt

SEQ ID NO: 358739 - DNA, 20 bp, Artificial Sequence
  Description of Artificial Sequence: Synthetic oligonucleotide
  Target: LAMA2; (+) strand; PAM type: YTN; PAM sequence: CTC
ctaaggctgtgtcacaggcc

SEQ ID NO: 358740 - DNA, 20 bp, Artificial Sequence
  Description of Artificial Sequence: Synthetic oligonucleotide
  Target: LAMA2; (+) strand; PAM type: YTN; PAM sequence: CTA
aggctgtgtcacaggccatg

SEQ ID NO: 358741 - DNA, 20 bp, Artificial Sequence
  Description of Artificial Sequence: Synthetic oligonucleotide
  Target: LAMA2; (+) strand; PAM type: YTN; PAM sequence: CTG
tgtcacaggccatggtcctt

SEQ ID NO: 358742 - DNA, 20 bp, Artificial Sequence
  Description of Artificial Sequence: Synthetic oligonucleotide
  Target: LAMA2; (+) strand; PAM type: YTN; PAM sequence: CTT
aaccttgccaaataaacctc

SEQ ID NO: 358743 - DNA, 20 bp, Artificial Sequence
  Description of Artificial Sequence: Synthetic oligonucleotide
  Target: LAMA2; (+) strand; PAM type: YTN; PAM sequence: TTA
accttgccaaataaacctct

SEQ ID NO: 358744 - DNA, 20 bp, Artificial Sequence
  Description of Artificial Sequence: Synthetic oligonucleotide
  Target: LAMA2; (+) strand; PAM type: YTN; PAM sequence: CTT
gccaaataaacctctaaatt

SEQ ID NO: 358745 - DNA, 20 bp, Artificial Sequence
  Description of Artificial Sequence: Synthetic oligonucleotide
  Target: LAMA2; (+) strand; PAM type: YTN; PAM sequence: TTG
ccaaataaacctctaaattg

SEQ ID NO: 358746 - DNA, 20 bp, Artificial Sequence
  Description of Artificial Sequence: Synthetic oligonucleotide
  Target: LAMA2; (+) strand; PAM type: YTN; PAM sequence: CTC
taaattgattgagacctgtt

SEQ ID NO: 358747 - DNA, 20 bp, Artificial Sequence
  Description of Artificial Sequence: Synthetic oligonucleotide
  Target: LAMA2; (+) strand; PAM type: YTN; PAM sequence: CTA
aattgattgagacctgtttc

SEQ ID NO: 358748 - DNA, 20 bp, Artificial Sequence
  Description of Artificial Sequence: Synthetic oligonucleotide
  Target: LAMA2; (+) strand; PAM type: YTN; PAM sequence: TTG
attgagacctgtttctgata

SEQ ID NO: 358749 - DNA, 20 bp, Artificial Sequence
  Description of Artificial Sequence: Synthetic oligonucleotide
  Target: LAMA2; (+) strand; PAM type: YTN; PAM sequence: TTG
agacctgtttctgatacttt

SEQ ID NO: 358750 - DNA, 20 bp, Artificial Sequence
  Description of Artificial Sequence: Synthetic oligonucleotide
  Target: LAMA2; (+) strand; PAM type: YTN; PAM sequence: CTG
tttctgatactttttggttt

SEQ ID NO: 358751 - DNA, 20 bp, Artificial Sequence
  Description of Artificial Sequence: Synthetic oligonucleotide
  Target: LAMA2; (+) strand; PAM type: YTN; PAM sequence: TTT
ctgatactttttggtttaca

SEQ ID NO: 358752 - DNA, 20 bp, Artificial Sequence
  Description of Artificial Sequence: Synthetic oligonucleotide
  Target: LAMA2; (+) strand; PAM type: YTN; PAM sequence: TTC
tgatactttttggtttacaa

SEQ ID NO: 358753 - DNA, 20 bp, Artificial Sequence
  Description of Artificial Sequence: Synthetic oligonucleotide
  Target: LAMA2; (+) strand; PAM type: YTN; PAM sequence: CTG
atactttttggtttacaaat

SEQ ID NO: 358754 - DNA, 20 bp, Artificial Sequence
  Description of Artificial Sequence: Synthetic oligonucleotide
  Target: LAMA2; (+) strand; PAM type: YTN; PAM sequence: CTT
tttggtttacaaattgttaa

SEQ ID NO: 358755 - DNA, 20 bp, Artificial Sequence
  Description of Artificial Sequence: Synthetic oligonucleotide
  Target: LAMA2; (+) strand; PAM type: YTN; PAM sequence: TTT
ttggtttacaaattgttaag

SEQ ID NO: 358756 - DNA, 20 bp, Artificial Sequence
  Description of Artificial Sequence: Synthetic oligonucleotide
  Target: LAMA2; (+) strand; PAM type: YTN; PAM sequence: TTT
tggtttacaaattgttaagg

SEQ ID NO: 358757 - DNA, 20 bp, Artificial Sequence
  Description of Artificial Sequence: Synthetic oligonucleotide
  Target: LAMA2; (+) strand; PAM type: YTN; PAM sequence: TTT
ggtttacaaattgttaagga

SEQ ID NO: 358758 - DNA, 20 bp, Artificial Sequence
  Description of Artificial Sequence: Synthetic oligonucleotide
  Target: LAMA2; (+) strand; PAM type: YTN; PAM sequence: TTG
gtttacaaattgttaaggat

SEQ ID NO: 358759 - DNA, 20 bp, Artificial Sequence
  Description of Artificial Sequence: Synthetic oligonucleotide
  Target: LAMA2; (+) strand; PAM type: YTN; PAM sequence: TTT
acaaattgttaaggataaat

SEQ ID NO: 358760 - DNA, 20 bp, Artificial Sequence
  Description of Artificial Sequence: Synthetic oligonucleotide
  Target: LAMA2; (+) strand; PAM type: YTN; PAM sequence: TTA
caaattgttaaggataaatg

SEQ ID NO: 358761 - DNA, 20 bp, Artificial Sequence
  Description of Artificial Sequence: Synthetic oligonucleotide
  Target: LAMA2; (+) strand; PAM type: YTN; PAM sequence: TTG
ttaaggataaatgagaaaat

SEQ ID NO: 358762 - DNA, 20 bp, Artificial Sequence
  Description of Artificial Sequence: Synthetic oligonucleotide
  Target: LAMA2; (+) strand; PAM type: YTN; PAM sequence: TTA
aggataaatgagaaaataag

SEQ ID NO: 358763 - DNA, 20 bp, Artificial Sequence
  Description of Artificial Sequence: Synthetic oligonucleotide
  Target: LAMA2; (+) strand; PAM type: YTN; PAM sequence: TTA
aaaaacaaaaaaaatcaagg

SEQ ID NO: 358764 - DNA, 20 bp, Artificial Sequence
  Description of Artificial Sequence: Synthetic oligonucleotide
  Target: LAMA2; (+) strand; PAM type: YTN; PAM sequence: CTC
atttatttcccatagctatg

SEQ ID NO: 358765 - DNA, 20 bp, Artificial Sequence
  Description of Artificial Sequence: Synthetic oligonucleotide
  Target: LAMA2; (+) strand; PAM type: YTN; PAM sequence: TTT
atttcccatagctatgatag

SEQ ID NO: 358766 - DNA, 20 bp, Artificial Sequence
  Description of Artificial Sequence: Synthetic oligonucleotide
  Target: LAMA2; (+) strand; PAM type: YTN; PAM sequence: TTA
tttcccatagctatgataga

SEQ ID NO: 358767 - DNA, 20 bp, Artificial Sequence
  Description of Artificial Sequence: Synthetic oligonucleotide
  Target: LAMA2; (+) strand; PAM type: YTN; PAM sequence: TTT
cccatagctatgatagaatc

SEQ ID NO: 358768 - DNA, 20 bp, Artificial Sequence
  Description of Artificial Sequence: Synthetic oligonucleotide
  Target: LAMA2; (+) strand; PAM type: YTN; PAM sequence: TTC
ccatagctatgatagaatct

SEQ ID NO: 358769 - DNA, 20 bp, Artificial Sequence
  Description of Artificial Sequence: Synthetic oligonucleotide
  Target: LAMA2; (+) strand; PAM type: YTN; PAM sequence: CTA
tgatagaatctgctgtgtaa

SEQ ID NO: 358770 - DNA, 20 bp, Artificial Sequence
  Description of Artificial Sequence: Synthetic oligonucleotide
  Target: LAMA2; (+) strand; PAM type: YTN; PAM sequence: CTG
ctgtgtaaaagtaacacaaa

SEQ ID NO: 358771 - DNA, 20 bp, Artificial Sequence
  Description of Artificial Sequence: Synthetic oligonucleotide
  Target: LAMA2; (+) strand; PAM type: YTN; PAM sequence: CTG
tgtaaaagtaacacaaatgc

SEQ ID NO: 358772 - DNA, 20 bp, Artificial Sequence
  Description of Artificial Sequence: Synthetic oligonucleotide
  Target: LAMA2; (+) strand; PAM type: YTN; PAM sequence: CTC
aaggtcaaacatagaaacct

SEQ ID NO: 358773 - DNA, 20 bp, Artificial Sequence
  Description of Artificial Sequence: Synthetic oligonucleotide
  Target: LAMA2; (+) strand; PAM type: YTN; PAM sequence: CTC
tgtcttacatatccgtcata

SEQ ID NO: 358774 - DNA, 20 bp, Artificial Sequence
  Description of Artificial Sequence: Synthetic oligonucleotide
  Target: LAMA2; (+) strand; PAM type: YTN; PAM sequence: CTG
tcttacatatccgtcataac

SEQ ID NO: 358775 - DNA, 20 bp, Artificial Sequence
  Description of Artificial Sequence: Synthetic oligonucleotide
  Target: LAMA2; (+) strand; PAM type: YTN; PAM sequence: CTT
acatatccgtcataacattc

SEQ ID NO: 358776 - DNA, 20 bp, Artificial Sequence
  Description of Artificial Sequence: Synthetic oligonucleotide
  Target: LAMA2; (+) strand; PAM type: YTN; PAM sequence: TTA
catatccgtcataacattct

SEQ ID NO: 358777 - DNA, 20 bp, Artificial Sequence
  Description of Artificial Sequence: Synthetic oligonucleotide
  Target: LAMA2; (+) strand; PAM type: YTN; PAM sequence: TTC
tcttgacgtttttcctaatt

SEQ ID NO: 358778 - DNA, 20 bp, Artificial Sequence
  Description of Artificial Sequence: Synthetic oligonucleotide
  Target: LAMA2; (+) strand; PAM type: YTN; PAM sequence: CTC
ttgacgtttttcctaattaa

SEQ ID NO: 358779 - DNA, 20 bp, Artificial Sequence
  Description of Artificial Sequence: Synthetic oligonucleotide
  Target: LAMA2; (+) strand; PAM type: YTN; PAM sequence: CTT
gacgtttttcctaattaaat

SEQ ID NO: 358780 - DNA, 20 bp, Artificial Sequence
  Description of Artificial Sequence: Synthetic oligonucleotide
  Target: LAMA2; (+) strand; PAM type: YTN; PAM sequence: TTG
acgtttttcctaattaaatt

SEQ ID NO: 358781 - DNA, 20 bp, Artificial Sequence
  Description of Artificial Sequence: Synthetic oligonucleotide
  Target: LAMA2; (+) strand; PAM type: YTN; PAM sequence: TTT
ttcctaattaaatttataaa

SEQ ID NO: 358782 - DNA, 20 bp, Artificial Sequence
  Description of Artificial Sequence: Synthetic oligonucleotide
  Target: LAMA2; (+) strand; PAM type: YTN; PAM sequence: TTT
tcctaattaaatttataaag

SEQ ID NO: 358783 - DNA, 20 bp, Artificial Sequence
  Description of Artificial Sequence: Synthetic oligonucleotide
  Target: LAMA2; (+) strand; PAM type: YTN; PAM sequence: TTT
cctaattaaatttataaagc

SEQ ID NO: 358784 - DNA, 20 bp, Artificial Sequence
  Description of Artificial Sequence: Synthetic oligonucleotide
  Target: LAMA2; (+) strand; PAM type: YTN; PAM sequence: TTC
ctaattaaatttataaagca

SEQ ID NO: 358785 - DNA, 20 bp, Artificial Sequence
  Description of Artificial Sequence: Synthetic oligonucleotide
  Target: LAMA2; (+) strand; PAM type: YTN; PAM sequence: CTA
attaaatttataaagcatta

SEQ ID NO: 358786 - DNA, 20 bp, Artificial Sequence
  Description of Artificial Sequence: Synthetic oligonucleotide
  Target: LAMA2; (+) strand; PAM type: YTN; PAM sequence: TTA
aatttataaagcattagttc

SEQ ID NO: 358787 - DNA, 20 bp, Artificial Sequence
  Description of Artificial Sequence: Synthetic oligonucleotide
  Target: LAMA2; (+) strand; PAM type: YTN; PAM sequence: TTT
ataaagcattagttctaatg

SEQ ID NO: 358788 - DNA, 20 bp, Artificial Sequence
  Description of Artificial Sequence: Synthetic oligonucleotide
  Target: LAMA2; (+) strand; PAM type: YTN; PAM sequence: TTA
taaagcattagttctaatgt

SEQ ID NO: 358789 - DNA, 20 bp, Artificial Sequence
  Description of Artificial Sequence: Synthetic oligonucleotide
  Target: LAMA2; (+) strand; PAM type: YTN; PAM sequence: TTA
gttctaatgttaaaaattgt

SEQ ID NO: 358790 - DNA, 20 bp, Artificial Sequence
  Description of Artificial Sequence: Synthetic oligonucleotide
  Target: LAMA2; (+) strand; PAM type: YTN; PAM sequence: TTC
taatgttaaaaattgttata

SEQ ID NO: 358791 - DNA, 20 bp, Artificial Sequence
  Description of Artificial Sequence: Synthetic oligonucleotide
  Target: LAMA2; (+) strand; PAM type: YTN; PAM sequence: CTA
atgttaaaaattgttatata

SEQ ID NO: 358792 - DNA, 20 bp, Artificial Sequence
  Description of Artificial Sequence: Synthetic oligonucleotide
  Target: LAMA2; (+) strand; PAM type: YTN; PAM sequence: TTA
aaaattgttatataaaaagc

SEQ ID NO: 358793 - DNA, 20 bp, Artificial Sequence
  Description of Artificial Sequence: Synthetic oligonucleotide
  Target: LAMA2; (+) strand; PAM type: YTN; PAM sequence: TTG
ttatataaaaagcattttaa

SEQ ID NO: 358794 - DNA, 20 bp, Artificial Sequence
  Description of Artificial Sequence: Synthetic oligonucleotide
  Target: LAMA2; (+) strand; PAM type: YTN; PAM sequence: TTA
tataaaaagcattttaatat

SEQ ID NO: 358795 - DNA, 20 bp, Artificial Sequence
  Description of Artificial Sequence: Synthetic oligonucleotide
  Target: LAMA2; (+) strand; PAM type: YTN; PAM sequence: TTT
taatattcacatgcatctgt

SEQ ID NO: 358796 - DNA, 20 bp, Artificial Sequence
  Description of Artificial Sequence: Synthetic oligonucleotide
  Target: LAMA2; (+) strand; PAM type: YTN; PAM sequence: TTT
aatattcacatgcatctgtc

SEQ ID NO: 358797 - DNA, 20 bp, Artificial Sequence
  Description of Artificial Sequence: Synthetic oligonucleotide
  Target: LAMA2; (+) strand; PAM type: YTN; PAM sequence: TTA
atattcacatgcatctgtct

SEQ ID NO: 358798 - DNA, 20 bp, Artificial Sequence
  Description of Artificial Sequence: Synthetic oligonucleotide
  Target: LAMA2; (+) strand; PAM type: YTN; PAM sequence: TTC
acatgcatctgtctacagtg

SEQ ID NO: 358799 - DNA, 20 bp, Artificial Sequence
  Description of Artificial Sequence: Synthetic oligonucleotide
  Target: LAMA2; (+) strand; PAM type: YTN; PAM sequence: CTG
tctacagtgttttacatttt

SEQ ID NO: 358800 - DNA, 20 bp, Artificial Sequence
  Description of Artificial Sequence: Synthetic oligonucleotide
  Target: LAMA2; (+) strand; PAM type: YTN; PAM sequence: CTA
cagtgttttacattttgttt

SEQ ID NO: 358801 - DNA, 20 bp, Artificial Sequence
  Description of Artificial Sequence: Synthetic oligonucleotide
  Target: LAMA2; (+) strand; PAM type: YTN; PAM sequence: TTT
tacattttgtttataattcg

SEQ ID NO: 358802 - DNA, 20 bp, Artificial Sequence
  Description of Artificial Sequence: Synthetic oligonucleotide
  Target: LAMA2; (+) strand; PAM type: YTN; PAM sequence: TTT
acattttgtttataattcgt

SEQ ID NO: 358803 - DNA, 20 bp, Artificial Sequence
  Description of Artificial Sequence: Synthetic oligonucleotide
  Target: LAMA2; (+) strand; PAM type: YTN; PAM sequence: TTA
cattttgtttataattcgtc

SEQ ID NO: 358804 - DNA, 20 bp, Artificial Sequence
  Description of Artificial Sequence: Synthetic oligonucleotide
  Target: LAMA2; (+) strand; PAM type: YTN; PAM sequence: TTT
tgtttataattcgtcaactg

SEQ ID NO: 358805 - DNA, 20 bp, Artificial Sequence
  Description of Artificial Sequence: Synthetic oligonucleotide
  Target: LAMA2; (+) strand; PAM type: YTN; PAM sequence: TTT
gtttataattcgtcaactga

SEQ ID NO: 358806 - DNA, 20 bp, Artificial Sequence
  Description of Artificial Sequence: Synthetic oligonucleotide
  Target: LAMA2; (+) strand; PAM type: YTN; PAM sequence: TTG
tttataattcgtcaactgaa

SEQ ID NO: 358807 - DNA, 20 bp, Artificial Sequence
  Description of Artificial Sequence: Synthetic oligonucleotide
  Target: LAMA2; (+) strand; PAM type: YTN; PAM sequence: TTT
ataattcgtcaactgaatga

SEQ ID NO: 358808 - DNA, 20 bp, Artificial Sequence
  Description of Artificial Sequence: Synthetic oligonucleotide
  Target: LAMA2; (+) strand; PAM type: YTN; PAM sequence: TTA
taattcgtcaactgaatgaa

SEQ ID NO: 358809 - DNA, 20 bp, Artificial Sequence
  Description of Artificial Sequence: Synthetic oligonucleotide
  Target: LAMA2; (+) strand; PAM type: YTN; PAM sequence: TTC
gtcaactgaatgaatactag

SEQ ID NO: 358810 - DNA, 20 bp, Artificial Sequence
  Description of Artificial Sequence: Synthetic oligonucleotide
  Target: LAMA2; (+) strand; PAM type: YTN; PAM sequence: CTG
aatgaatactagataggaga

SEQ ID NO: 358811 - DNA, 20 bp, Artificial Sequence
  Description of Artificial Sequence: Synthetic oligonucleotide
  Target: LAMA2; (+) strand; PAM type: YTN; PAM sequence: CTA
gataggagaatgttccattt

SEQ ID NO: 358812 - DNA, 20 bp, Artificial Sequence
  Description of Artificial Sequence: Synthetic oligonucleotide
  Target: LAMA2; (+) strand; PAM type: YTN; PAM sequence: TTC
catttaataaaaactcttga

SEQ ID NO: 358813 - DNA, 20 bp, Artificial Sequence
  Description of Artificial Sequence: Synthetic oligonucleotide
  Target: LAMA2; (+) strand; PAM type: YTN; PAM sequence: TTT
aataaaaactcttgagaaaa

SEQ ID NO: 358814 - DNA, 20 bp, Artificial Sequence
  Description of Artificial Sequence: Synthetic oligonucleotide
  Target: LAMA2; (+) strand; PAM type: YTN; PAM sequence: TTA
ataaaaactcttgagaaaaa

SEQ ID NO: 358815 - DNA, 20 bp, Artificial Sequence
  Description of Artificial Sequence: Synthetic oligonucleotide
  Target: LAMA2; (+) strand; PAM type: YTN; PAM sequence: CTC
ttgagaaaaataaaatagct

SEQ ID NO: 358816 - DNA, 20 bp, Artificial Sequence
  Description of Artificial Sequence: Synthetic oligonucleotide
  Target: LAMA2; (+) strand; PAM type: YTN; PAM sequence: CTT
gagaaaaataaaatagctta

SEQ ID NO: 358817 - DNA, 20 bp, Artificial Sequence
  Description of Artificial Sequence: Synthetic oligonucleotide
  Target: LAMA2; (+) strand; PAM type: YTN; PAM sequence: TTG
agaaaaataaaatagcttac

SEQ ID NO: 358818 - DNA, 20 bp, Artificial Sequence
  Description of Artificial Sequence: Synthetic oligonucleotide
  Target: LAMA2; (+) strand; PAM type: YTN; PAM sequence: CTT
acttaacagtaatttcaatg

SEQ ID NO: 358819 - DNA, 20 bp, Artificial Sequence
  Description of Artificial Sequence: Synthetic oligonucleotide
  Target: LAMA2; (+) strand; PAM type: YTN; PAM sequence: TTA
cttaacagtaatttcaatgt

SEQ ID NO: 358820 - DNA, 20 bp, Artificial Sequence
  Description of Artificial Sequence: Synthetic oligonucleotide
  Target: LAMA2; (+) strand; PAM type: YTN; PAM sequence: CTT
aacagtaatttcaatgtgag

SEQ ID NO: 358821 - DNA, 20 bp, Artificial Sequence
  Description of Artificial Sequence: Synthetic oligonucleotide
  Target: LAMA2; (+) strand; PAM type: YTN; PAM sequence: TTA
acagtaatttcaatgtgagt

SEQ ID NO: 358822 - DNA, 20 bp, Artificial Sequence
  Description of Artificial Sequence: Synthetic oligonucleotide
  Target: LAMA2; (+) strand; PAM type: YTN; PAM sequence: TTT
caatgtgagttggtttgtga

SEQ ID NO: 358823 - DNA, 20 bp, Artificial Sequence
  Description of Artificial Sequence: Synthetic oligonucleotide
  Target: LAMA2; (+) strand; PAM type: YTN; PAM sequence: TTC
aatgtgagttggtttgtgat

SEQ ID NO: 358824 - DNA, 20 bp, Artificial Sequence
  Description of Artificial Sequence: Synthetic oligonucleotide
  Target: LAMA2; (+) strand; PAM type: YTN; PAM sequence: TTG
gtttgtgatgtggttggcaa

SEQ ID NO: 358825 - DNA, 20 bp, Artificial Sequence
  Description of Artificial Sequence: Synthetic oligonucleotide
  Target: LAMA2; (+) strand; PAM type: YTN; PAM sequence: TTT
gtgatgtggttggcaacaaa

SEQ ID NO: 358826 - DNA, 20 bp, Artificial Sequence
  Description of Artificial Sequence: Synthetic oligonucleotide
  Target: LAMA2; (+) strand; PAM type: YTN; PAM sequence: TTG
tgatgtggttggcaacaaaa

SEQ ID NO: 358827 - DNA, 20 bp, Artificial Sequence
  Description of Artificial Sequence: Synthetic oligonucleotide
  Target: LAMA2; (+) strand; PAM type: YTN; PAM sequence: TTG
gcaacaaaacttacgtaatc

SEQ ID NO: 358828 - DNA, 20 bp, Artificial Sequence
  Description of Artificial Sequence: Synthetic oligonucleotide
  Target: LAMA2; (+) strand; PAM type: YTN; PAM sequence: CTT
acgtaatctagggctacatt

SEQ ID NO: 358829 - DNA, 20 bp, Artificial Sequence
  Description of Artificial Sequence: Synthetic oligonucleotide
  Target: LAMA2; (+) strand; PAM type: YTN; PAM sequence: TTA
cgtaatctagggctacattg

SEQ ID NO: 358830 - DNA, 20 bp, Artificial Sequence
  Description of Artificial Sequence: Synthetic oligonucleotide
  Target: LAMA2; (+) strand; PAM type: YTN; PAM sequence: CTA
gggctacattggcaggaatt

SEQ ID NO: 358831 - DNA, 20 bp, Artificial Sequence
  Description of Artificial Sequence: Synthetic oligonucleotide
  Target: LAMA2; (+) strand; PAM type: YTN; PAM sequence: CTA
cattggcaggaatttactgg

SEQ ID NO: 358832 - DNA, 20 bp, Artificial Sequence
  Description of Artificial Sequence: Synthetic oligonucleotide
  Target: LAMA2; (+) strand; PAM type: YTN; PAM sequence: TTG
gcaggaatttactggtcagg

SEQ ID NO: 358833 - DNA, 20 bp, Artificial Sequence
  Description of Artificial Sequence: Synthetic oligonucleotide
  Target: LAMA2; (+) strand; PAM type: YTN; PAM sequence: TTT
actggtcaggacaaaggagg

SEQ ID NO: 358834 - DNA, 20 bp, Artificial Sequence
  Description of Artificial Sequence: Synthetic oligonucleotide
  Target: LAMA2; (+) strand; PAM type: YTN; PAM sequence: TTA
ctggtcaggacaaaggaggt

SEQ ID NO: 358835 - DNA, 20 bp, Artificial Sequence
  Description of Artificial Sequence: Synthetic oligonucleotide
  Target: LAMA2; (+) strand; PAM type: YTN; PAM sequence: CTG
gtcaggacaaaggaggtagt

SEQ ID NO: 358836 - DNA, 20 bp, Artificial Sequence
  Description of Artificial Sequence: Synthetic oligonucleotide
  Target: LAMA2; (+) strand; PAM type: YTN; PAM sequence: TTT
atacagattctgcacaaaac

SEQ ID NO: 358837 - DNA, 20 bp, Artificial Sequence
  Description of Artificial Sequence: Synthetic oligonucleotide
  Target: LAMA2; (+) strand; PAM type: YTN; PAM sequence: TTA
tacagattctgcacaaaacg

SEQ ID NO: 358838 - DNA, 20 bp, Artificial Sequence
  Description of Artificial Sequence: Synthetic oligonucleotide
  Target: LAMA2; (+) strand; PAM type: YTN; PAM sequence: TTC
tgcacaaaacgcatgtcacc

SEQ ID NO: 358839 - DNA, 20 bp, Artificial Sequence
  Description of Artificial Sequence: Synthetic oligonucleotide
  Target: LAMA2; (+) strand; PAM type: YTN; PAM sequence: CTG
cacaaaacgcatgtcaccta

SEQ ID NO: 358840 - DNA, 20 bp, Artificial Sequence
  Description of Artificial Sequence: Synthetic oligonucleotide
  Target: LAMA2; (+) strand; PAM type: YTN; PAM sequence: CTA
atattattattaaatattat

SEQ ID NO: 358841 - DNA, 20 bp, Artificial Sequence
  Description of Artificial Sequence: Synthetic oligonucleotide
  Target: LAMA2; (+) strand; PAM type: YTN; PAM sequence: TTA
ttattaaatattattaaata

SEQ ID NO: 358842 - DNA, 20 bp, Artificial Sequence
  Description of Artificial Sequence: Synthetic oligonucleotide
  Target: LAMA2; (+) strand; PAM type: YTN; PAM sequence: TTA
ttaaatattattaaatatta

SEQ ID NO: 358843 - DNA, 20 bp, Artificial Sequence
  Description of Artificial Sequence: Synthetic oligonucleotide
  Target: LAMA2; (+) strand; PAM type: YTN; PAM sequence: TTA
aatattattaaatattatta

SEQ ID NO: 358844 - DNA, 20 bp, Artificial Sequence
  Description of Artificial Sequence: Synthetic oligonucleotide
  Target: LAMA2; (+) strand; PAM type: YTN; PAM sequence: TTA
ttaaatattattaatattta

SEQ ID NO: 358845 - DNA, 20 bp, Artificial Sequence
  Description of Artificial Sequence: Synthetic oligonucleotide
  Target: LAMA2; (+) strand; PAM type: YTN; PAM sequence: TTA
aatattattaatatttagct

SEQ ID NO: 358846 - DNA, 20 bp, Artificial Sequence
  Description of Artificial Sequence: Synthetic oligonucleotide
  Target: LAMA2; (+) strand; PAM type: YTN; PAM sequence: TTA
ttaatatttagcttacttgt

SEQ ID NO: 358847 - DNA, 20 bp, Artificial Sequence
  Description of Artificial Sequence: Synthetic oligonucleotide
  Target: LAMA2; (+) strand; PAM type: YTN; PAM sequence: TTA
atatttagcttacttgtgaa

SEQ ID NO: 358848 - DNA, 20 bp, Artificial Sequence
  Description of Artificial Sequence: Synthetic oligonucleotide
  Target: LAMA2; (+) strand; PAM type: YTN; PAM sequence: TTT
agcttacttgtgaatttctc

SEQ ID NO: 358849 - DNA, 20 bp, Artificial Sequence
  Description of Artificial Sequence: Synthetic oligonucleotide
  Target: LAMA2; (+) strand; PAM type: YTN; PAM sequence: TTA
gcttacttgtgaatttctct

SEQ ID NO: 358850 - DNA, 20 bp, Artificial Sequence
  Description of Artificial Sequence: Synthetic oligonucleotide
  Target: LAMA2; (+) strand; PAM type: YTN; PAM sequence: CTT
acttgtgaatttctcttttt

SEQ ID NO: 358851 - DNA, 20 bp, Artificial Sequence
  Description of Artificial Sequence: Synthetic oligonucleotide
  Target: LAMA2; (+) strand; PAM type: YTN; PAM sequence: TTA
cttgtgaatttctcttttta

SEQ ID NO: 358852 - DNA, 20 bp, Artificial Sequence
  Description of Artificial Sequence: Synthetic oligonucleotide
  Target: LAMA2; (+) strand; PAM type: YTN; PAM sequence: CTT
gtgaatttctctttttatct

SEQ ID NO: 358853 - DNA, 20 bp, Artificial Sequence
  Description of Artificial Sequence: Synthetic oligonucleotide
  Target: LAMA2; (+) strand; PAM type: YTN; PAM sequence: TTG
tgaatttctctttttatctt

SEQ ID NO: 358854 - DNA, 20 bp, Artificial Sequence
  Description of Artificial Sequence: Synthetic oligonucleotide
  Target: LAMA2; (+) strand; PAM type: YTN; PAM sequence: TTT
ctctttttatctttgttaat

SEQ ID NO: 358855 - DNA, 20 bp, Artificial Sequence
  Description of Artificial Sequence: Synthetic oligonucleotide
  Target: LAMA2; (+) strand; PAM type: YTN; PAM sequence: TTC
tctttttatctttgttaata

SEQ ID NO: 358856 - DNA, 20 bp, Artificial Sequence
  Description of Artificial Sequence: Synthetic oligonucleotide
  Target: LAMA2; (+) strand; PAM type: YTN; PAM sequence: CTC
tttttatctttgttaatata

SEQ ID NO: 358857 - DNA, 20 bp, Artificial Sequence
  Description of Artificial Sequence: Synthetic oligonucleotide
  Target: LAMA2; (+) strand; PAM type: YTN; PAM sequence: CTT
tttatctttgttaatataca

SEQ ID NO: 358858 - DNA, 20 bp, Artificial Sequence
  Description of Artificial Sequence: Synthetic oligonucleotide
  Target: LAMA2; (+) strand; PAM type: YTN; PAM sequence: TTT
ttatctttgttaatatacat

SEQ ID NO: 358859 - DNA, 20 bp, Artificial Sequence
  Description of Artificial Sequence: Synthetic oligonucleotide
  Target: LAMA2; (+) strand; PAM type: YTN; PAM sequence: TTT
tatctttgttaatatacatg

SEQ ID NO: 358860 - DNA, 20 bp, Artificial Sequence
  Description of Artificial Sequence: Synthetic oligonucleotide
  Target: LAMA2; (+) strand; PAM type: YTN; PAM sequence: TTT
atctttgttaatatacatga

SEQ ID NO: 358861 - DNA, 20 bp, Artificial Sequence
  Description of Artificial Sequence: Synthetic oligonucleotide
  Target: LAMA2; (+) strand; PAM type: YTN; PAM sequence: TTA
tctttgttaatatacatgac

SEQ ID NO: 358862 - DNA, 20 bp, Artificial Sequence
  Description of Artificial Sequence: Synthetic oligonucleotide
  Target: LAMA2; (+) strand; PAM type: YTN; PAM sequence: CTT
tgttaatatacatgacccaa

SEQ ID NO: 358863 - DNA, 20 bp, Artificial Sequence
  Description of Artificial Sequence: Synthetic oligonucleotide
  Target: LAMA2; (+) strand; PAM type: YTN; PAM sequence: TTT
gttaatatacatgacccaag

SEQ ID NO: 358864 - DNA, 20 bp, Artificial Sequence
  Description of Artificial Sequence: Synthetic oligonucleotide
  Target: LAMA2; (+) strand; PAM type: YTN; PAM sequence: TTG
ttaatatacatgacccaagt

SEQ ID NO: 358865 - DNA, 20 bp, Artificial Sequence
  Description of Artificial Sequence: Synthetic oligonucleotide
  Target: LAMA2; (+) strand; PAM type: YTN; PAM sequence: TTA
atatacatgacccaagtcat

SEQ ID NO: 358866 - DNA, 20 bp, Artificial Sequence
  Description of Artificial Sequence: Synthetic oligonucleotide
  Target: LAMA2; (+) strand; PAM type: YTN; PAM sequence: CTA
ataaaccaagaaatccaaat

SEQ ID NO: 358867 - DNA, 20 bp, Artificial Sequence
  Description of Artificial Sequence: Synthetic oligonucleotide
  Target: LAMA2; (+) strand; PAM type: YTN; PAM sequence: TTA
ggaagaaatagagccaggat

SEQ ID NO: 358868 - DNA, 20 bp, Artificial Sequence
  Description of Artificial Sequence: Synthetic oligonucleotide
  Target: LAMA2; (+) strand; PAM type: YTN; PAM sequence: TTA
caatccagatgtgtctatag

SEQ ID NO: 358869 - DNA, 20 bp, Artificial Sequence
  Description of Artificial Sequence: Synthetic oligonucleotide
  Target: LAMA2; (+) strand; PAM type: YTN; PAM sequence: CTA
tagcccattccagttaagca

SEQ ID NO: 358870 - DNA, 20 bp, Artificial Sequence
  Description of Artificial Sequence: Synthetic oligonucleotide
  Target: LAMA2; (+) strand; PAM type: YTN; PAM sequence: TTC
cagttaagcattttttcaat

SEQ ID NO: 358871 - DNA, 20 bp, Artificial Sequence
  Description of Artificial Sequence: Synthetic oligonucleotide
  Target: LAMA2; (+) strand; PAM type: YTN; PAM sequence: TTA
agcattttttcaatcagtta

SEQ ID NO: 358872 - DNA, 20 bp, Artificial Sequence
  Description of Artificial Sequence: Synthetic oligonucleotide
  Target: LAMA2; (+) strand; PAM type: YTN; PAM sequence: TTT
tttcaatcagttaagtttat

SEQ ID NO: 358873 - DNA, 20 bp, Artificial Sequence
  Description of Artificial Sequence: Synthetic oligonucleotide
  Target: LAMA2; (+) strand; PAM type: YTN; PAM sequence: TTT
ttcaatcagttaagtttatt

SEQ ID NO: 358874 - DNA, 20 bp, Artificial Sequence
  Description of Artificial Sequence: Synthetic oligonucleotide
  Target: LAMA2; (+) strand; PAM type: YTN; PAM sequence: TTT
tcaatcagttaagtttatta

SEQ ID NO: 358875 - DNA, 20 bp, Artificial Sequence
  Description of Artificial Sequence: Synthetic oligonucleotide
  Target: LAMA2; (+) strand; PAM type: YTN; PAM sequence: TTT
caatcagttaagtttattag

SEQ ID NO: 358876 - DNA, 20 bp, Artificial Sequence
  Description of Artificial Sequence: Synthetic oligonucleotide
  Target: LAMA2; (+) strand; PAM type: YTN; PAM sequence: TTC
aatcagttaagtttattagt

SEQ ID NO: 358877 - DNA, 20 bp, Artificial Sequence
  Description of Artificial Sequence: Synthetic oligonucleotide
  Target: LAMA2; (+) strand; PAM type: YTN; PAM sequence: TTA
agtttattagttcttgcaag

SEQ ID NO: 358878 - DNA, 20 bp, Artificial Sequence
  Description of Artificial Sequence: Synthetic oligonucleotide
  Target: LAMA2; (+) strand; PAM type: YTN; PAM sequence: TTT
attagttcttgcaaggcatt

SEQ ID NO: 358879 - DNA, 20 bp, Artificial Sequence
  Description of Artificial Sequence: Synthetic oligonucleotide
  Target: LAMA2; (+) strand; PAM type: YTN; PAM sequence: TTA
ttagttcttgcaaggcattg

SEQ ID NO: 358880 - DNA, 20 bp, Artificial Sequence
  Description of Artificial Sequence: Synthetic oligonucleotide
  Target: LAMA2; (+) strand; PAM type: YTN; PAM sequence: TTA
gttcttgcaaggcattgatc

SEQ ID NO: 358881 - DNA, 20 bp, Artificial Sequence
  Description of Artificial Sequence: Synthetic oligonucleotide
  Target: LAMA2; (+) strand; PAM type: YTN; PAM sequence: TTC
ttgcaaggcattgatctttg

SEQ ID NO: 358882 - DNA, 20 bp, Artificial Sequence
  Description of Artificial Sequence: Synthetic oligonucleotide
  Target: LAMA2; (+) strand; PAM type: YTN; PAM sequence: CTT
gcaaggcattgatctttgga

SEQ ID NO: 358883 - DNA, 20 bp, Artificial Sequence
  Description of Artificial Sequence: Synthetic oligonucleotide
  Target: LAMA2; (+) strand; PAM type: YTN; PAM sequence: TTG
caaggcattgatctttggaa

SEQ ID NO: 358884 - DNA, 20 bp, Artificial Sequence
  Description of Artificial Sequence: Synthetic oligonucleotide
  Target: LAMA2; (+) strand; PAM type: YTN; PAM sequence: TTG
atctttggaatagagatgct

SEQ ID NO: 358885 - DNA, 20 bp, Artificial Sequence
  Description of Artificial Sequence: Synthetic oligonucleotide
  Target: LAMA2; (+) strand; PAM type: YTN; PAM sequence: CTT
tggaatagagatgctgaagc

SEQ ID NO: 358886 - DNA, 20 bp, Artificial Sequence
  Description of Artificial Sequence: Synthetic oligonucleotide
  Target: LAMA2; (+) strand; PAM type: YTN; PAM sequence: TTT
ggaatagagatgctgaagca

SEQ ID NO: 358887 - DNA, 20 bp, Artificial Sequence
  Description of Artificial Sequence: Synthetic oligonucleotide
  Target: LAMA2; (+) strand; PAM type: YTN; PAM sequence: TTG
gaatagagatgctgaagcag

SEQ ID NO: 358888 - DNA, 20 bp, Artificial Sequence
  Description of Artificial Sequence: Synthetic oligonucleotide
  Target: LAMA2; (+) strand; PAM type: YTN; PAM sequence: CTG
aagcagcttattcaaaagaa

SEQ ID NO: 358889 - DNA, 20 bp, Artificial Sequence
  Description of Artificial Sequence: Synthetic oligonucleotide
  Target: LAMA2; (+) strand; PAM type: YTN; PAM sequence: CTT
attcaaaagaaagggaacga

SEQ ID NO: 358890 - DNA, 20 bp, Artificial Sequence
  Description of Artificial Sequence: Synthetic oligonucleotide
  Target: LAMA2; (+) strand; PAM type: YTN; PAM sequence: TTA
ttcaaaagaaagggaacgac

SEQ ID NO: 358891 - DNA, 20 bp, Artificial Sequence
  Description of Artificial Sequence: Synthetic oligonucleotide
  Target: LAMA2; (+) strand; PAM type: YTN; PAM sequence: TTC
aaaagaaagggaacgacaaa

SEQ ID NO: 358892 - DNA, 20 bp, Artificial Sequence
  Description of Artificial Sequence: Synthetic oligonucleotide
  Target: LAMA2; (+) strand; PAM type: YTN; PAM sequence: TTT
ataaaaatacaaatgaatga

SEQ ID NO: 358893 - DNA, 20 bp, Artificial Sequence
  Description of Artificial Sequence: Synthetic oligonucleotide
  Target: LAMA2; (+) strand; PAM type: YTN; PAM sequence: TTA
taaaaatacaaatgaatgag

SEQ ID NO: 358894 - DNA, 20 bp, Artificial Sequence
  Description of Artificial Sequence: Synthetic oligonucleotide
  Target: LAMA2; (+) strand; PAM type: YTN; PAM sequence: TTT
tttaaatggtttcaaagctc

SEQ ID NO: 358895 - DNA, 20 bp, Artificial Sequence
  Description of Artificial Sequence: Synthetic oligonucleotide
  Target: LAMA2; (+) strand; PAM type: YTN; PAM sequence: TTT
ttaaatggtttcaaagctct

SEQ ID NO: 358896 - DNA, 20 bp, Artificial Sequence
  Description of Artificial Sequence: Synthetic oligonucleotide
  Target: LAMA2; (+) strand; PAM type: YTN; PAM sequence: TTT
taaatggtttcaaagctctg

SEQ ID NO: 358897 - DNA, 20 bp, Artificial Sequence
  Description of Artificial Sequence: Synthetic oligonucleotide
  Target: LAMA2; (+) strand; PAM type: YTN; PAM sequence: TTT
aaatggtttcaaagctctgg

SEQ ID NO: 358898 - DNA, 20 bp, Artificial Sequence
  Description of Artificial Sequence: Synthetic oligonucleotide
  Target: LAMA2; (+) strand; PAM type: YTN; PAM sequence: TTA
aatggtttcaaagctctggc

SEQ ID NO: 358899 - DNA, 20 bp, Artificial Sequence
  Description of Artificial Sequence: Synthetic oligonucleotide
  Target: LAMA2; (+) strand; PAM type: YTN; PAM sequence: TTT
caaagctctggcaagattaa

SEQ ID NO: 358900 - DNA, 20 bp, Artificial Sequence
  Description of Artificial Sequence: Synthetic oligonucleotide
  Target: LAMA2; (+) strand; PAM type: YTN; PAM sequence: TTC
aaagctctggcaagattaat

SEQ ID NO: 358901 - DNA, 20 bp, Artificial Sequence
  Description of Artificial Sequence: Synthetic oligonucleotide
  Target: LAMA2; (+) strand; PAM type: YTN; PAM sequence: CTC
tggcaagattaatcaagcaa

SEQ ID NO: 358902 - DNA, 20 bp, Artificial Sequence
  Description of Artificial Sequence: Synthetic oligonucleotide
  Target: LAMA2; (+) strand; PAM type: YTN; PAM sequence: CTG
gcaagattaatcaagcaaaa

SEQ ID NO: 358903 - DNA, 20 bp, Artificial Sequence
  Description of Artificial Sequence: Synthetic oligonucleotide
  Target: LAMA2; (+) strand; PAM type: YTN; PAM sequence: TTA
atcaagcaaaacgtgggtaa

SEQ ID NO: 358904 - DNA, 20 bp, Artificial Sequence
  Description of Artificial Sequence: Synthetic oligonucleotide
  Target: LAMA2; (+) strand; PAM type: YTN; PAM sequence: TTT
tagaaatgtaaaaatgggca

SEQ ID NO: 358905 - DNA, 20 bp, Artificial Sequence
  Description of Artificial Sequence: Synthetic oligonucleotide
  Target: LAMA2; (+) strand; PAM type: YTN; PAM sequence: TTT
agaaatgtaaaaatgggcat

SEQ ID NO: 358906 - DNA, 20 bp, Artificial Sequence
  Description of Artificial Sequence: Synthetic oligonucleotide
  Target: LAMA2; (+) strand; PAM type: YTN; PAM sequence: TTA
gaaatgtaaaaatgggcata

SEQ ID NO: 358907 - DNA, 20 bp, Artificial Sequence
  Description of Artificial Sequence: Synthetic oligonucleotide
  Target: LAMA2; (+) strand; PAM type: YTN; PAM sequence: CTG
caattacttcaaaaataaac

SEQ ID NO: 358908 - DNA, 20 bp, Artificial Sequence
  Description of Artificial Sequence: Synthetic oligonucleotide
  Target: LAMA2; (+) strand; PAM type: YTN; PAM sequence: TTA
cttcaaaaataaacaaataa

SEQ ID NO: 358909 - DNA, 20 bp, Artificial Sequence
  Description of Artificial Sequence: Synthetic oligonucleotide
  Target: LAMA2; (+) strand; PAM type: YTN; PAM sequence: CTT
caaaaataaacaaataagga

SEQ ID NO: 358910 - DNA, 20 bp, Artificial Sequence
  Description of Artificial Sequence: Synthetic oligonucleotide
  Target: LAMA2; (+) strand; PAM type: YTN; PAM sequence: TTC
aaaaataaacaaataaggaa

SEQ ID NO: 358911 - DNA, 20 bp, Artificial Sequence
  Description of Artificial Sequence: Synthetic oligonucleotide
  Target: LAMA2; (+) strand; PAM type: YTN; PAM sequence: TTA
agagtattatgaaaatttac

SEQ ID NO: 358912 - DNA, 20 bp, Artificial Sequence
  Description of Artificial Sequence: Synthetic oligonucleotide
  Target: LAMA2; (+) strand; PAM type: YTN; PAM sequence: TTA
tgaaaatttacacacaataa

SEQ ID NO: 358913 - DNA, 20 bp, Artificial Sequence
  Description of Artificial Sequence: Synthetic oligonucleotide
  Target: LAMA2; (+) strand; PAM type: YTN; PAM sequence: TTT
acacacaataagaatacaat

SEQ ID NO: 358914 - DNA, 20 bp, Artificial Sequence
  Description of Artificial Sequence: Synthetic oligonucleotide
  Target: LAMA2; (+) strand; PAM type: YTN; PAM sequence: TTA
cacacaataagaatacaatt

SEQ ID NO: 358915 - DNA, 20 bp, Artificial Sequence
  Description of Artificial Sequence: Synthetic oligonucleotide
  Target: LAMA2; (+) strand; PAM type: YTN; PAM sequence: TTT
agaaaaaggaatatccttct

SEQ ID NO: 358916 - DNA, 20 bp, Artificial Sequence
  Description of Artificial Sequence: Synthetic oligonucleotide
  Target: LAMA2; (+) strand; PAM type: YTN; PAM sequence: TTA
gaaaaaggaatatccttcta

SEQ ID NO: 358917 - DNA, 20 bp, Artificial Sequence
  Description of Artificial Sequence: Synthetic oligonucleotide
  Target: LAMA2; (+) strand; PAM type: YTN; PAM sequence: CTT
ctaggaaaatgcaacttaaa

SEQ ID NO: 358918 - DNA, 20 bp, Artificial Sequence
  Description of Artificial Sequence: Synthetic oligonucleotide
  Target: LAMA2; (+) strand; PAM type: YTN; PAM sequence: TTC
taggaaaatgcaacttaaaa

SEQ ID NO: 358919 - DNA, 20 bp, Artificial Sequence
  Description of Artificial Sequence: Synthetic oligonucleotide
  Target: LAMA2; (+) strand; PAM type: YTN; PAM sequence: CTA
ggaaaatgcaacttaaaaaa

SEQ ID NO: 358920 - DNA, 20 bp, Artificial Sequence
  Description of Artificial Sequence: Synthetic oligonucleotide
  Target: LAMA2; (+) strand; PAM type: YTN; PAM sequence: CTT
aaaaaaactgactcaaagaa

SEQ ID NO: 358921 - DNA, 20 bp, Artificial Sequence
  Description of Artificial Sequence: Synthetic oligonucleotide
  Target: LAMA2; (+) strand; PAM type: YTN; PAM sequence: TTA
aaaaaactgactcaaagaaa

SEQ ID NO: 358922 - DNA, 20 bp, Artificial Sequence
  Description of Artificial Sequence: Synthetic oligonucleotide
  Target: LAMA2; (+) strand; PAM type: YTN; PAM sequence: CTG
actcaaagaaaaaaaatcta

SEQ ID NO: 358923 - DNA, 20 bp, Artificial Sequence
  Description of Artificial Sequence: Synthetic oligonucleotide
  Target: LAMA2; (+) strand; PAM type: YTN; PAM sequence: CTC
aaagaaaaaaaatctataat

SEQ ID NO: 358924 - DNA, 20 bp, Artificial Sequence
  Description of Artificial Sequence: Synthetic oligonucleotide
  Target: LAMA2; (+) strand; PAM type: YTN; PAM sequence: CTA
taatgtcagataaacattaa

SEQ ID NO: 358925 - DNA, 20 bp, Artificial Sequence
  Description of Artificial Sequence: Synthetic oligonucleotide
  Target: LAMA2; (+) strand; PAM type: YTN; PAM sequence: TTA
aagtaattgaatcagcagtc

SEQ ID NO: 358926 - DNA, 20 bp, Artificial Sequence
  Description of Artificial Sequence: Synthetic oligonucleotide
  Target: LAMA2; (+) strand; PAM type: YTN; PAM sequence: TTG
aatcagcagtcaaataaacc

SEQ ID NO: 358927 - DNA, 20 bp, Artificial Sequence
  Description of Artificial Sequence: Synthetic oligonucleotide
  Target: LAMA2; (+) strand; PAM type: YTN; PAM sequence: CTT
ccaatgaagttaactccaag

SEQ ID NO: 358928 - DNA, 20 bp, Artificial Sequence
  Description of Artificial Sequence: Synthetic oligonucleotide
  Target: LAMA2; (+) strand; PAM type: YTN; PAM sequence: TTC
caatgaagttaactccaagc

SEQ ID NO: 358929 - DNA, 20 bp, Artificial Sequence
  Description of Artificial Sequence: Synthetic oligonucleotide
  Target: LAMA2; (+) strand; PAM type: YTN; PAM sequence: TTA
actccaagcctattgatttg

SEQ ID NO: 358930 - DNA, 20 bp, Artificial Sequence
  Description of Artificial Sequence: Synthetic oligonucleotide
  Target: LAMA2; (+) strand; PAM type: YTN; PAM sequence: CTC
caagcctattgatttgcaag

SEQ ID NO: 358931 - DNA, 20 bp, Artificial Sequence
  Description of Artificial Sequence: Synthetic oligonucleotide
  Target: LAMA2; (+) strand; PAM type: YTN; PAM sequence: CTA
ttgatttgcaagtaatatca

SEQ ID NO: 358932 - DNA, 20 bp, Artificial Sequence
  Description of Artificial Sequence: Synthetic oligonucleotide
  Target: LAMA2; (+) strand; PAM type: YTN; PAM sequence: TTG
atttgcaagtaatatcaatc

SEQ ID NO: 358933 - DNA, 20 bp, Artificial Sequence
  Description of Artificial Sequence: Synthetic oligonucleotide
  Target: LAMA2; (+) strand; PAM type: YTN; PAM sequence: TTT
gcaagtaatatcaatcaaaa

SEQ ID NO: 358934 - DNA, 20 bp, Artificial Sequence
  Description of Artificial Sequence: Synthetic oligonucleotide
  Target: LAMA2; (+) strand; PAM type: YTN; PAM sequence: TTG
caagtaatatcaatcaaaat

SEQ ID NO: 358935 - DNA, 20 bp, Artificial Sequence
  Description of Artificial Sequence: Synthetic oligonucleotide
  Target: LAMA2; (+) strand; PAM type: YTN; PAM sequence: TTC
aaaaatttttaaaaatgcaa

SEQ ID NO: 358936 - DNA, 20 bp, Artificial Sequence
  Description of Artificial Sequence: Synthetic oligonucleotide
  Target: LAMA2; (+) strand; PAM type: YTN; PAM sequence: TTT
ttaaaaatgcaaaattatac

SEQ ID NO: 358937 - DNA, 20 bp, Artificial Sequence
  Description of Artificial Sequence: Synthetic oligonucleotide
  Target: LAMA2; (+) strand; PAM type: YTN; PAM sequence: TTT
taaaaatgcaaaattataca

SEQ ID NO: 358938 - DNA, 20 bp, Artificial Sequence
  Description of Artificial Sequence: Synthetic oligonucleotide
  Target: LAMA2; (+) strand; PAM type: YTN; PAM sequence: TTT
aaaaatgcaaaattatacaa

SEQ ID NO: 358939 - DNA, 20 bp, Artificial Sequence
  Description of Artificial Sequence: Synthetic oligonucleotide
  Target: LAMA2; (+) strand; PAM type: YTN; PAM sequence: TTA
aaaatgcaaaattatacaaa

SEQ ID NO: 358940 - DNA, 20 bp, Artificial Sequence
  Description of Artificial Sequence: Synthetic oligonucleotide
  Target: LAMA2; (+) strand; PAM type: YTN; PAM sequence: TTA
tacaaactttccagagaata

SEQ ID NO: 358941 - DNA, 20 bp, Artificial Sequence
  Description of Artificial Sequence: Synthetic oligonucleotide
  Target: LAMA2; (+) strand; PAM type: YTN; PAM sequence: CTT
tccagagaatagaacaactg

SEQ ID NO: 358942 - DNA, 20 bp, Artificial Sequence
  Description of Artificial Sequence: Synthetic oligonucleotide
  Target: LAMA2; (+) strand; PAM type: YTN; PAM sequence: TTT
ccagagaatagaacaactgg

SEQ ID NO: 358943 - DNA, 20 bp, Artificial Sequence
  Description of Artificial Sequence: Synthetic oligonucleotide
  Target: LAMA2; (+) strand; PAM type: YTN; PAM sequence: TTC
cagagaatagaacaactggg

SEQ ID NO: 358944 - DNA, 20 bp, Artificial Sequence
  Description of Artificial Sequence: Synthetic oligonucleotide
  Target: LAMA2; (+) strand; PAM type: YTN; PAM sequence: CTG
ggacgtactcctcacataat

SEQ ID NO: 358945 - DNA, 20 bp, Artificial Sequence
  Description of Artificial Sequence: Synthetic oligonucleotide
  Target: LAMA2; (+) strand; PAM type: YTN; PAM sequence: CTC
ctcacataattttatgtggc

SEQ ID NO: 358946 - DNA, 20 bp, Artificial Sequence
  Description of Artificial Sequence: Synthetic oligonucleotide
  Target: LAMA2; (+) strand; PAM type: YTN; PAM sequence: CTC
acataattttatgtggcttg

SEQ ID NO: 358947 - DNA, 20 bp, Artificial Sequence
  Description of Artificial Sequence: Synthetic oligonucleotide
  Target: LAMA2; (+) strand; PAM type: YTN; PAM sequence: TTT
tatgtggcttgatataaaat

SEQ ID NO: 358948 - DNA, 20 bp, Artificial Sequence
  Description of Artificial Sequence: Synthetic oligonucleotide
  Target: LAMA2; (+) strand; PAM type: YTN; PAM sequence: TTT
atgtggcttgatataaaatc

SEQ ID NO: 358949 - DNA, 20 bp, Artificial Sequence
  Description of Artificial Sequence: Synthetic oligonucleotide
  Target: LAMA2; (+) strand; PAM type: YTN; PAM sequence: TTA
tgtggcttgatataaaatct

SEQ ID NO: 358950 - DNA, 20 bp, Artificial Sequence
  Description of Artificial Sequence: Synthetic oligonucleotide
  Target: LAMA2; (+) strand; PAM type: YTN; PAM sequence: CTT
gatataaaatcttgacaaga

SEQ ID NO: 358951 - DNA, 20 bp, Artificial Sequence
  Description of Artificial Sequence: Synthetic oligonucleotide
  Target: LAMA2; (+) strand; PAM type: YTN; PAM sequence: TTG
atataaaatcttgacaagag

SEQ ID NO: 358952 - DNA, 20 bp, Artificial Sequence
  Description of Artificial Sequence: Synthetic oligonucleotide
  Target: LAMA2; (+) strand; PAM type: YTN; PAM sequence: CTT
gacaagaggactatgaagaa

SEQ ID NO: 358953 - DNA, 20 bp, Artificial Sequence
  Description of Artificial Sequence: Synthetic oligonucleotide
  Target: LAMA2; (+) strand; PAM type: YTN; PAM sequence: TTG
acaagaggactatgaagaag

SEQ ID NO: 358954 - DNA, 20 bp, Artificial Sequence
  Description of Artificial Sequence: Synthetic oligonucleotide
  Target: LAMA2; (+) strand; PAM type: YTN; PAM sequence: CTA
tgaagaagaaaacccctacc

SEQ ID NO: 358955 - DNA, 20 bp, Artificial Sequence
  Description of Artificial Sequence: Synthetic oligonucleotide
  Target: LAMA2; (+) strand; PAM type: YTN; PAM sequence: CTA
cccaaagtcactcatgaacg

SEQ ID NO: 358956 - DNA, 20 bp, Artificial Sequence
  Description of Artificial Sequence: Synthetic oligonucleotide
  Target: LAMA2; (+) strand; PAM type: YTN; PAM sequence: CTC
atgaacgtagatgaaaatat

SEQ ID NO: 358957 - DNA, 20 bp, Artificial Sequence
  Description of Artificial Sequence: Synthetic oligonucleotide
  Target: LAMA2; (+) strand; PAM type: YTN; PAM sequence: CTA
aataaaatattaacaaccca

SEQ ID NO: 358958 - DNA, 20 bp, Artificial Sequence
  Description of Artificial Sequence: Synthetic oligonucleotide
  Target: LAMA2; (+) strand; PAM type: YTN; PAM sequence: TTA
acaacccaaatccatcagtt

SEQ ID NO: 358959 - DNA, 20 bp, Artificial Sequence
  Description of Artificial Sequence: Synthetic oligonucleotide
  Target: LAMA2; (+) strand; PAM type: YTN; PAM sequence: TTT
ataaaaatagtcaggctaaa

SEQ ID NO: 358960 - DNA, 20 bp, Artificial Sequence
  Description of Artificial Sequence: Synthetic oligonucleotide
  Target: LAMA2; (+) strand; PAM type: YTN; PAM sequence: TTA
taaaaatagtcaggctaaat

SEQ ID NO: 358961 - DNA, 20 bp, Artificial Sequence
  Description of Artificial Sequence: Synthetic oligonucleotide
  Target: LAMA2; (+) strand; PAM type: YTN; PAM sequence: CTA
aattggccaagtggatttta

SEQ ID NO: 358962 - DNA, 20 bp, Artificial Sequence
  Description of Artificial Sequence: Synthetic oligonucleotide
  Target: LAMA2; (+) strand; PAM type: YTN; PAM sequence: TTG
gccaagtggattttatcatc

SEQ ID NO: 358963 - DNA, 20 bp, Artificial Sequence
  Description of Artificial Sequence: Synthetic oligonucleotide
  Target: LAMA2; (+) strand; PAM type: YTN; PAM sequence: TTT
tatcatccgtgtttgaggtt

SEQ ID NO: 358964 - DNA, 20 bp, Artificial Sequence
  Description of Artificial Sequence: Synthetic oligonucleotide
  Target: LAMA2; (+) strand; PAM type: YTN; PAM sequence: TTT
atcatccgtgtttgaggtta

SEQ ID NO: 358965 - DNA, 20 bp, Artificial Sequence
  Description of Artificial Sequence: Synthetic oligonucleotide
  Target: LAMA2; (+) strand; PAM type: YTN; PAM sequence: TTA
tcatccgtgtttgaggttac

SEQ ID NO: 358966 - DNA, 20 bp, Artificial Sequence
  Description of Artificial Sequence: Synthetic oligonucleotide
  Target: LAMA2; (+) strand; PAM type: YTN; PAM sequence: TTT
gaggttactttaaaattaga

SEQ ID NO: 358967 - DNA, 20 bp, Artificial Sequence
  Description of Artificial Sequence: Synthetic oligonucleotide
  Target: LAMA2; (+) strand; PAM type: YTN; PAM sequence: TTG
aggttactttaaaattagaa

SEQ ID NO: 358968 - DNA, 20 bp, Artificial Sequence
  Description of Artificial Sequence: Synthetic oligonucleotide
  Target: LAMA2; (+) strand; PAM type: YTN; PAM sequence: TTA
ctttaaaattagaaaaccag

SEQ ID NO: 358969 - DNA, 20 bp, Artificial Sequence
  Description of Artificial Sequence: Synthetic oligonucleotide
  Target: LAMA2; (+) strand; PAM type: YTN; PAM sequence: CTT
taaaattagaaaaccagttt

SEQ ID NO: 358970 - DNA, 20 bp, Artificial Sequence
  Description of Artificial Sequence: Synthetic oligonucleotide
  Target: LAMA2; (+) strand; PAM type: YTN; PAM sequence: TTT
aaaattagaaaaccagttta

SEQ ID NO: 358971 - DNA, 20 bp, Artificial Sequence
  Description of Artificial Sequence: Synthetic oligonucleotide
  Target: LAMA2; (+) strand; PAM type: YTN; PAM sequence: TTA
aaattagaaaaccagtttaa

SEQ ID NO: 358972 - DNA, 20 bp, Artificial Sequence
  Description of Artificial Sequence: Synthetic oligonucleotide
  Target: LAMA2; (+) strand; PAM type: YTN; PAM sequence: TTA
gaaaaccagtttaagtaatt

SEQ ID NO: 358973 - DNA, 20 bp, Artificial Sequence
  Description of Artificial Sequence: Synthetic oligonucleotide
  Target: LAMA2; (+) strand; PAM type: YTN; PAM sequence: TTT
aagtaattgaccatattgac

SEQ ID NO: 358974 - DNA, 20 bp, Artificial Sequence
  Description of Artificial Sequence: Synthetic oligonucleotide
  Target: LAMA2; (+) strand; PAM type: YTN; PAM sequence: TTA
agtaattgaccatattgact

SEQ ID NO: 358975 - DNA, 20 bp, Artificial Sequence
  Description of Artificial Sequence: Synthetic oligonucleotide
  Target: LAMA2; (+) strand; PAM type: YTN; PAM sequence: TTG
accatattgactgattaaaa

SEQ ID NO: 358976 - DNA, 20 bp, Artificial Sequence
  Description of Artificial Sequence: Synthetic oligonucleotide
  Target: LAMA2; (+) strand; PAM type: YTN; PAM sequence: TTG
actgattaaaagagaaaaaa

SEQ ID NO: 358977 - DNA, 20 bp, Artificial Sequence
  Description of Artificial Sequence: Synthetic oligonucleotide
  Target: LAMA2; (+) strand; PAM type: YTN; PAM sequence: CTG
attaaaagagaaaaaaatca

SEQ ID NO: 358978 - DNA, 20 bp, Artificial Sequence
  Description of Artificial Sequence: Synthetic oligonucleotide
  Target: LAMA2; (+) strand; PAM type: YTN; PAM sequence: TTA
aaagagaaaaaaatcaatta

SEQ ID NO: 358979 - DNA, 20 bp, Artificial Sequence
  Description of Artificial Sequence: Synthetic oligonucleotide
  Target: LAMA2; (+) strand; PAM type: YTN; PAM sequence: TTA
tctcaatagacacagaaaaa

SEQ ID NO: 358980 - DNA, 20 bp, Artificial Sequence
  Description of Artificial Sequence: Synthetic oligonucleotide
  Target: LAMA2; (+) strand; PAM type: YTN; PAM sequence: CTC
aatagacacagaaaaagaaa

SEQ ID NO: 358981 - DNA, 20 bp, Artificial Sequence
  Description of Artificial Sequence: Synthetic oligonucleotide
  Target: LAMA2; (+) strand; PAM type: YTN; PAM sequence: TTA
aacattcttcatgtctgaaa

SEQ ID NO: 358982 - DNA, 20 bp, Artificial Sequence
  Description of Artificial Sequence: Synthetic oligonucleotide
  Target: LAMA2; (+) strand; PAM type: YTN; PAM sequence: TTC
ttcatgtctgaaaaattttg

SEQ ID NO: 358983 - DNA, 20 bp, Artificial Sequence
  Description of Artificial Sequence: Synthetic oligonucleotide
  Target: LAMA2; (+) strand; PAM type: YTN; PAM sequence: CTT
catgtctgaaaaattttgaa

SEQ ID NO: 358984 - DNA, 20 bp, Artificial Sequence
  Description of Artificial Sequence: Synthetic oligonucleotide
  Target: LAMA2; (+) strand; PAM type: YTN; PAM sequence: TTC
atgtctgaaaaattttgaaa

SEQ ID NO: 358985 - DNA, 20 bp, Artificial Sequence
  Description of Artificial Sequence: Synthetic oligonucleotide
  Target: LAMA2; (+) strand; PAM type: YTN; PAM sequence: CTG
aaaaattttgaaaactagaa

SEQ ID NO: 358986 - DNA, 20 bp, Artificial Sequence
  Description of Artificial Sequence: Synthetic oligonucleotide
  Target: LAMA2; (+) strand; PAM type: YTN; PAM sequence: TTT
tgaaaactagaattggaaaa

SEQ ID NO: 358987 - DNA, 20 bp, Artificial Sequence
  Description of Artificial Sequence: Synthetic oligonucleotide
  Target: LAMA2; (+) strand; PAM type: YTN; PAM sequence: TTT
gaaaactagaattggaaaag

SEQ ID NO: 358988 - DNA, 20 bp, Artificial Sequence
  Description of Artificial Sequence: Synthetic oligonucleotide
  Target: LAMA2; (+) strand; PAM type: YTN; PAM sequence: TTG
aaaactagaattggaaaagc

SEQ ID NO: 358989 - DNA, 20 bp, Artificial Sequence
  Description of Artificial Sequence: Synthetic oligonucleotide
  Target: LAMA2; (+) strand; PAM type: YTN; PAM sequence: CTA
gaattggaaaagcactttaa

SEQ ID NO: 358990 - DNA, 20 bp, Artificial Sequence
  Description of Artificial Sequence: Synthetic oligonucleotide
  Target: LAMA2; (+) strand; PAM type: YTN; PAM sequence: TTG
gaaaagcactttaactgatg

SEQ ID NO: 358991 - DNA, 20 bp, Artificial Sequence
  Description of Artificial Sequence: Synthetic oligonucleotide
  Target: LAMA2; (+) strand; PAM type: YTN; PAM sequence: CTT
taactgatgaaggctatcta

SEQ ID NO: 358992 - DNA, 20 bp, Artificial Sequence
  Description of Artificial Sequence: Synthetic oligonucleotide
  Target: LAMA2; (+) strand; PAM type: YTN; PAM sequence: TTT
aactgatgaaggctatctac

SEQ ID NO: 358993 - DNA, 20 bp, Artificial Sequence
  Description of Artificial Sequence: Synthetic oligonucleotide
  Target: LAMA2; (+) strand; PAM type: YTN; PAM sequence: TTA
actgatgaaggctatctaca

SEQ ID NO: 358994 - DNA, 20 bp, Artificial Sequence
  Description of Artificial Sequence: Synthetic oligonucleotide
  Target: LAMA2; (+) strand; PAM type: YTN; PAM sequence: CTG
atgaaggctatctacataaa

SEQ ID NO: 358995 - DNA, 20 bp, Artificial Sequence
  Description of Artificial Sequence: Synthetic oligonucleotide
  Target: LAMA2; (+) strand; PAM type: YTN; PAM sequence: CTA
tctacataaaaatcaatagc

SEQ ID NO: 358996 - DNA, 20 bp, Artificial Sequence
  Description of Artificial Sequence: Synthetic oligonucleotide
  Target: LAMA2; (+) strand; PAM type: YTN; PAM sequence: CTA
cataaaaatcaatagcaaat

SEQ ID NO: 358997 - DNA, 20 bp, Artificial Sequence
  Description of Artificial Sequence: Synthetic oligonucleotide
  Target: LAMA2; (+) strand; PAM type: YTN; PAM sequence: CTT
atttaatataaaatgttcaa

SEQ ID NO: 358998 - DNA, 20 bp, Artificial Sequence
  Description of Artificial Sequence: Synthetic oligonucleotide
  Target: LAMA2; (+) strand; PAM type: YTN; PAM sequence: TTA
tttaatataaaatgttcaaa

SEQ ID NO: 358999 - DNA, 20 bp, Artificial Sequence
  Description of Artificial Sequence: Synthetic oligonucleotide
  Target: LAMA2; (+) strand; PAM type: YTN; PAM sequence: TTT
aatataaaatgttcaaagta

SEQ ID NO: 359000 - DNA, 20 bp, Artificial Sequence
  Description of Artificial Sequence: Synthetic oligonucleotide
  Target: LAMA2; (+) strand; PAM type: YTN; PAM sequence: TTA
atataaaatgttcaaagtat

SEQ ID NO: 359001 - DNA, 20 bp, Artificial Sequence
  Description of Artificial Sequence: Synthetic oligonucleotide
  Target: LAMA2; (+) strand; PAM type: YTN; PAM sequence: TTC
aaagtattgtttaagatcac

SEQ ID NO: 359002 - DNA, 20 bp, Artificial Sequence
  Description of Artificial Sequence: Synthetic oligonucleotide
  Target: LAMA2; (+) strand; PAM type: YTN; PAM sequence: TTG
tttaagatcacaaacatgaa

SEQ ID NO: 359003 - DNA, 20 bp, Artificial Sequence
  Description of Artificial Sequence: Synthetic oligonucleotide
  Target: LAMA2; (+) strand; PAM type: YTN; PAM sequence: TTT
aagatcacaaacatgaaaca

SEQ ID NO: 359004 - DNA, 20 bp, Artificial Sequence
  Description of Artificial Sequence: Synthetic oligonucleotide
  Target: LAMA2; (+) strand; PAM type: YTN; PAM sequence: TTA
agatcacaaacatgaaacaa

SEQ ID NO: 359005 - DNA, 20 bp, Artificial Sequence
  Description of Artificial Sequence: Synthetic oligonucleotide
  Target: LAMA2; (+) strand; PAM type: YTN; PAM sequence: TTC
tcactataacgactcccact

SEQ ID NO: 359006 - DNA, 20 bp, Artificial Sequence
  Description of Artificial Sequence: Synthetic oligonucleotide
  Target: LAMA2; (+) strand; PAM type: YTN; PAM sequence: CTC
actataacgactcccactta

SEQ ID NO: 359007 - DNA, 20 bp, Artificial Sequence
  Description of Artificial Sequence: Synthetic oligonucleotide
  Target: LAMA2; (+) strand; PAM type: YTN; PAM sequence: CTA
taacgactcccacttaacat

SEQ ID NO: 359008 - DNA, 20 bp, Artificial Sequence
  Description of Artificial Sequence: Synthetic oligonucleotide
  Target: LAMA2; (+) strand; PAM type: YTN; PAM sequence: CTC
ccacttaacattgtgctaga

SEQ ID NO: 359009 - DNA, 20 bp, Artificial Sequence
  Description of Artificial Sequence: Synthetic oligonucleotide
  Target: LAMA2; (+) strand; PAM type: YTN; PAM sequence: CTT
aacattgtgctagaagatgt

SEQ ID NO: 359010 - DNA, 20 bp, Artificial Sequence
  Description of Artificial Sequence: Synthetic oligonucleotide
  Target: LAMA2; (+) strand; PAM type: YTN; PAM sequence: TTA
acattgtgctagaagatgtg

SEQ ID NO: 359011 - DNA, 20 bp, Artificial Sequence
  Description of Artificial Sequence: Synthetic oligonucleotide
  Target: LAMA2; (+) strand; PAM type: YTN; PAM sequence: TTG
tgctagaagatgtggacagt

SEQ ID NO: 359012 - DNA, 20 bp, Artificial Sequence
  Description of Artificial Sequence: Synthetic oligonucleotide
  Target: LAMA2; (+) strand; PAM type: YTN; PAM sequence: CTA
gaagatgtggacagtgcagt

SEQ ID NO: 359013 - DNA, 20 bp, Artificial Sequence
  Description of Artificial Sequence: Synthetic oligonucleotide
  Target: LAMA2; (+) strand; PAM type: YTN; PAM sequence: CTC
acttatagatgatatactta

SEQ ID NO: 359014 - DNA, 20 bp, Artificial Sequence
  Description of Artificial Sequence: Synthetic oligonucleotide
  Target: LAMA2; (+) strand; PAM type: YTN; PAM sequence: CTT
atagatgatatacttatctg

SEQ ID NO: 359015 - DNA, 20 bp, Artificial Sequence
  Description of Artificial Sequence: Synthetic oligonucleotide
  Target: LAMA2; (+) strand; PAM type: YTN; PAM sequence: TTA
tagatgatatacttatctgc

SEQ ID NO: 359016 - DNA, 20 bp, Artificial Sequence
  Description of Artificial Sequence: Synthetic oligonucleotide
  Target: LAMA2; (+) strand; PAM type: YTN; PAM sequence: CTT
atctgcttgtaaaatcaaga

SEQ ID NO: 359017 - DNA, 20 bp, Artificial Sequence
  Description of Artificial Sequence: Synthetic oligonucleotide
  Target: LAMA2; (+) strand; PAM type: YTN; PAM sequence: TTA
tctgcttgtaaaatcaagag

SEQ ID NO: 359018 - DNA, 20 bp, Artificial Sequence
  Description of Artificial Sequence: Synthetic oligonucleotide
  Target: LAMA2; (+) strand; PAM type: YTN; PAM sequence: CTG
cttgtaaaatcaagagaatc

SEQ ID NO: 359019 - DNA, 20 bp, Artificial Sequence
  Description of Artificial Sequence: Synthetic oligonucleotide
  Target: LAMA2; (+) strand; PAM type: YTN; PAM sequence: CTT
gtaaaatcaagagaatctac

SEQ ID NO: 359020 - DNA, 20 bp, Artificial Sequence
  Description of Artificial Sequence: Synthetic oligonucleotide
  Target: LAMA2; (+) strand; PAM type: YTN; PAM sequence: TTG
taaaatcaagagaatctaca

SEQ ID NO: 359021 - DNA, 20 bp, Artificial Sequence
  Description of Artificial Sequence: Synthetic oligonucleotide
  Target: LAMA2; (+) strand; PAM type: YTN; PAM sequence: CTA
cagacaaattcttaatcagt

SEQ ID NO: 359022 - DNA, 20 bp, Artificial Sequence
  Description of Artificial Sequence: Synthetic oligonucleotide
  Target: LAMA2; (+) strand; PAM type: YTN; PAM sequence: TTC
ttaatcagtgagtcaataag

SEQ ID NO: 359023 - DNA, 20 bp, Artificial Sequence
  Description of Artificial Sequence: Synthetic oligonucleotide
  Target: LAMA2; (+) strand; PAM type: YTN; PAM sequence: CTT
aatcagtgagtcaataagga

SEQ ID NO: 359024 - DNA, 20 bp, Artificial Sequence
  Description of Artificial Sequence: Synthetic oligonucleotide
  Target: LAMA2; (+) strand; PAM type: YTN; PAM sequence: TTA
atcagtgagtcaataaggag

SEQ ID NO: 359025 - DNA, 20 bp, Artificial Sequence
  Description of Artificial Sequence: Synthetic oligonucleotide
  Target: LAMA2; (+) strand; PAM type: YTN; PAM sequence: CTA
tatgcaaaattaatatacaa

SEQ ID NO: 359026 - DNA, 20 bp, Artificial Sequence
  Description of Artificial Sequence: Synthetic oligonucleotide
  Target: LAMA2; (+) strand; PAM type: YTN; PAM sequence: TTA
atatacaaaagtcaatcatg

SEQ ID NO: 359027 - DNA, 20 bp, Artificial Sequence
  Description of Artificial Sequence: Synthetic oligonucleotide
  Target: LAMA2; (+) strand; PAM type: YTN; PAM sequence: TTT
ctttatatcaacaacacttt

SEQ ID NO: 359028 - DNA, 20 bp, Artificial Sequence
  Description of Artificial Sequence: Synthetic oligonucleotide
  Target: LAMA2; (+) strand; PAM type: YTN; PAM sequence: TTC
tttatatcaacaacactttt

SEQ ID NO: 359029 - DNA, 20 bp, Artificial Sequence
  Description of Artificial Sequence: Synthetic oligonucleotide
  Target: LAMA2; (+) strand; PAM type: YTN; PAM sequence: CTT
tatatcaacaacacttttca

SEQ ID NO: 359030 - DNA, 20 bp, Artificial Sequence
  Description of Artificial Sequence: Synthetic oligonucleotide
  Target: LAMA2; (+) strand; PAM type: YTN; PAM sequence: TTT
atatcaacaacacttttcaa

SEQ ID NO: 359031 - DNA, 20 bp, Artificial Sequence
  Description of Artificial Sequence: Synthetic oligonucleotide
  Target: LAMA2; (+) strand; PAM type: YTN; PAM sequence: TTA
tatcaacaacacttttcaaa

SEQ ID NO: 359032 - DNA, 20 bp, Artificial Sequence
  Description of Artificial Sequence: Synthetic oligonucleotide
  Target: LAMA2; (+) strand; PAM type: YTN; PAM sequence: CTT
ttcaaaaaaaatttttaaga

SEQ ID NO: 359033 - DNA, 20 bp, Artificial Sequence
  Description of Artificial Sequence: Synthetic oligonucleotide
  Target: LAMA2; (+) strand; PAM type: YTN; PAM sequence: TTT
tcaaaaaaaatttttaagag

SEQ ID NO: 359034 - DNA, 20 bp, Artificial Sequence
  Description of Artificial Sequence: Synthetic oligonucleotide
  Target: LAMA2; (+) strand; PAM type: YTN; PAM sequence: TTT
caaaaaaaatttttaagagg

SEQ ID NO: 359035 - DNA, 20 bp, Artificial Sequence
  Description of Artificial Sequence: Synthetic oligonucleotide
  Target: LAMA2; (+) strand; PAM type: YTN; PAM sequence: TTC
aaaaaaaatttttaagaggc

SEQ ID NO: 359036 - DNA, 20 bp, Artificial Sequence
  Description of Artificial Sequence: Synthetic oligonucleotide
  Target: LAMA2; (+) strand; PAM type: YTN; PAM sequence: TTT
ttaagaggccatgtataata

SEQ ID NO: 359037 - DNA, 20 bp, Artificial Sequence
  Description of Artificial Sequence: Synthetic oligonucleotide
  Target: LAMA2; (+) strand; PAM type: YTN; PAM sequence: TTT
taagaggccatgtataatag

SEQ ID NO: 359038 - DNA, 20 bp, Artificial Sequence
  Description of Artificial Sequence: Synthetic oligonucleotide
  Target: LAMA2; (+) strand; PAM type: YTN; PAM sequence: TTT
aagaggccatgtataatagc

SEQ ID NO: 359039 - DNA, 20 bp, Artificial Sequence
  Description of Artificial Sequence: Synthetic oligonucleotide
  Target: LAMA2; (+) strand; PAM type: YTN; PAM sequence: TTA
agaggccatgtataatagca

SEQ ID NO: 359040 - DNA, 20 bp, Artificial Sequence
  Description of Artificial Sequence: Synthetic oligonucleotide
  Target: LAMA2; (+) strand; PAM type: YTN; PAM sequence: TTA
aatttgtagggaaaagccaa

SEQ ID NO: 359041 - DNA, 20 bp, Artificial Sequence
  Description of Artificial Sequence: Synthetic oligonucleotide
  Target: LAMA2; (+) strand; PAM type: YTN; PAM sequence: TTT
gtagggaaaagccaatggcc

SEQ ID NO: 359042 - DNA, 20 bp, Artificial Sequence
  Description of Artificial Sequence: Synthetic oligonucleotide
  Target: LAMA2; (+) strand; PAM type: YTN; PAM sequence: TTG
tagggaaaagccaatggcca

SEQ ID NO: 359043 - DNA, 20 bp, Artificial Sequence
  Description of Artificial Sequence: Synthetic oligonucleotide
  Target: LAMA2; (+) strand; PAM type: YTN; PAM sequence: TTA
tagatggggtgcgatggctc

SEQ ID NO: 359044 - DNA, 20 bp, Artificial Sequence
  Description of Artificial Sequence: Synthetic oligonucleotide
  Target: LAMA2; (+) strand; PAM type: YTN; PAM sequence: CTC
acatatgtaatcccagcact

SEQ ID NO: 359045 - DNA, 20 bp, Artificial Sequence
  Description of Artificial Sequence: Synthetic oligonucleotide
  Target: LAMA2; (+) strand; PAM type: YTN; PAM sequence: CTT
tgggaggccaaggtaggtgg

SEQ ID NO: 359046 - DNA, 20 bp, Artificial Sequence
  Description of Artificial Sequence: Synthetic oligonucleotide
  Target: LAMA2; (+) strand; PAM type: YTN; PAM sequence: TTT
gggaggccaaggtaggtgga

SEQ ID NO: 359047 - DNA, 20 bp, Artificial Sequence
  Description of Artificial Sequence: Synthetic oligonucleotide
  Target: LAMA2; (+) strand; PAM type: YTN; PAM sequence: TTG
ggaggccaaggtaggtggat

SEQ ID NO: 359048 - DNA, 20 bp, Artificial Sequence
  Description of Artificial Sequence: Synthetic oligonucleotide
  Target: LAMA2; (+) strand; PAM type: YTN; PAM sequence: CTG
aggtcagaagttcgagacca

SEQ ID NO: 359049 - DNA, 20 bp, Artificial Sequence
  Description of Artificial Sequence: Synthetic oligonucleotide
  Target: LAMA2; (+) strand; PAM type: YTN; PAM sequence: TTC
gagaccaccctggccaacat

SEQ ID NO: 359050 - DNA, 20 bp, Artificial Sequence
  Description of Artificial Sequence: Synthetic oligonucleotide
  Target: LAMA2; (+) strand; PAM type: YTN; PAM sequence: CTG
gccaacatggcaaaaccctg

SEQ ID NO: 359051 - DNA, 20 bp, Artificial Sequence
  Description of Artificial Sequence: Synthetic oligonucleotide
  Target: LAMA2; (+) strand; PAM type: YTN; PAM sequence: CTG
tctctactaaaaatacaaaa

SEQ ID NO: 359052 - DNA, 20 bp, Artificial Sequence
  Description of Artificial Sequence: Synthetic oligonucleotide
  Target: LAMA2; (+) strand; PAM type: YTN; PAM sequence: CTC
tactaaaaatacaaaaatta

SEQ ID NO: 359053 - DNA, 20 bp, Artificial Sequence
  Description of Artificial Sequence: Synthetic oligonucleotide
  Target: LAMA2; (+) strand; PAM type: YTN; PAM sequence: CTA
ctaaaaatacaaaaattagc

SEQ ID NO: 359054 - DNA, 20 bp, Artificial Sequence
  Description of Artificial Sequence: Synthetic oligonucleotide
  Target: LAMA2; (+) strand; PAM type: YTN; PAM sequence: CTA
aaaatacaaaaattagccag

SEQ ID NO: 359055 - DNA, 20 bp, Artificial Sequence
  Description of Artificial Sequence: Synthetic oligonucleotide
  Target: LAMA2; (+) strand; PAM type: YTN; PAM sequence: TTA
gccaggtgtggtgacaaacg

SEQ ID NO: 359056 - DNA, 20 bp, Artificial Sequence
  Description of Artificial Sequence: Synthetic oligonucleotide
  Target: LAMA2; (+) strand; PAM type: YTN; PAM sequence: CTG
caatcccagctactcgggag

SEQ ID NO: 359057 - DNA, 20 bp, Artificial Sequence
  Description of Artificial Sequence: Synthetic oligonucleotide
  Target: LAMA2; (+) strand; PAM type: YTN; PAM sequence: CTA
ctcgggaggctgatgcaaga

SEQ ID NO: 359058 - DNA, 20 bp, Artificial Sequence
  Description of Artificial Sequence: Synthetic oligonucleotide
  Target: LAMA2; (+) strand; PAM type: YTN; PAM sequence: CTC
gggaggctgatgcaagagaa

SEQ ID NO: 359059 - DNA, 20 bp, Artificial Sequence
  Description of Artificial Sequence: Synthetic oligonucleotide
  Target: LAMA2; (+) strand; PAM type: YTN; PAM sequence: CTG
atgcaagagaattgcttgga

SEQ ID NO: 359060 - DNA, 20 bp, Artificial Sequence
  Description of Artificial Sequence: Synthetic oligonucleotide
  Target: LAMA2; (+) strand; PAM type: YTN; PAM sequence: TTG
cttggacccaggaggcagag

SEQ ID NO: 359061 - DNA, 20 bp, Artificial Sequence
  Description of Artificial Sequence: Synthetic oligonucleotide
  Target: LAMA2; (+) strand; PAM type: YTN; PAM sequence: CTT
ggacccaggaggcagaggct

SEQ ID NO: 359062 - DNA, 20 bp, Artificial Sequence
  Description of Artificial Sequence: Synthetic oligonucleotide
  Target: LAMA2; (+) strand; PAM type: YTN; PAM sequence: TTG
gacccaggaggcagaggctg

SEQ ID NO: 359063 - DNA, 20 bp, Artificial Sequence
  Description of Artificial Sequence: Synthetic oligonucleotide
  Target: LAMA2; (+) strand; PAM type: YTN; PAM sequence: CTG
cagtgagccaagattgggtc

SEQ ID NO: 359064 - DNA, 20 bp, Artificial Sequence
  Description of Artificial Sequence: Synthetic oligonucleotide
  Target: LAMA2; (+) strand; PAM type: YTN; PAM sequence: TTG
ggtcactgcactccagcctg

SEQ ID NO: 359065 - DNA, 20 bp, Artificial Sequence
  Description of Artificial Sequence: Synthetic oligonucleotide
  Target: LAMA2; (+) strand; PAM type: YTN; PAM sequence: CTG
cactccagcctggggcatag

SEQ ID NO: 359066 - DNA, 20 bp, Artificial Sequence
  Description of Artificial Sequence: Synthetic oligonucleotide
  Target: LAMA2; (+) strand; PAM type: YTN; PAM sequence: CTC
cagcctggggcatagagcga

SEQ ID NO: 359067 - DNA, 20 bp, Artificial Sequence
  Description of Artificial Sequence: Synthetic oligonucleotide
  Target: LAMA2; (+) strand; PAM type: YTN; PAM sequence: CTG
gggcatagagcgagaccctc

SEQ ID NO: 359068 - DNA, 20 bp, Artificial Sequence
  Description of Artificial Sequence: Synthetic oligonucleotide
  Target: LAMA2; (+) strand; PAM type: YTN; PAM sequence: CTC
tccaaaaatatatatataca

SEQ ID NO: 359069 - DNA, 20 bp, Artificial Sequence
  Description of Artificial Sequence: Synthetic oligonucleotide
  Target: LAMA2; (+) strand; PAM type: YTN; PAM sequence: CTC
caaaaatatatatatacacg

SEQ ID NO: 359070 - DNA, 20 bp, Artificial Sequence
  Description of Artificial Sequence: Synthetic oligonucleotide
  Target: LAMA2; (+) strand; PAM type: YTN; PAM sequence: TTT
agaaattctaaaggaaagaa

SEQ ID NO: 359071 - DNA, 20 bp, Artificial Sequence
  Description of Artificial Sequence: Synthetic oligonucleotide
  Target: LAMA2; (+) strand; PAM type: YTN; PAM sequence: TTA
gaaattctaaaggaaagaag

SEQ ID NO: 359072 - DNA, 20 bp, Artificial Sequence
  Description of Artificial Sequence: Synthetic oligonucleotide
  Target: LAMA2; (+) strand; PAM type: YTN; PAM sequence: TTC
taaaggaaagaagtggggct

SEQ ID NO: 359073 - DNA, 20 bp, Artificial Sequence
  Description of Artificial Sequence: Synthetic oligonucleotide
  Target: LAMA2; (+) strand; PAM type: YTN; PAM sequence: CTA
aaggaaagaagtggggcttt

SEQ ID NO: 359074 - DNA, 20 bp, Artificial Sequence
  Description of Artificial Sequence: Synthetic oligonucleotide
  Target: LAMA2; (+) strand; PAM type: YTN; PAM sequence: CTT
tttggaaagggattaggtca

SEQ ID NO: 359075 - DNA, 20 bp, Artificial Sequence
  Description of Artificial Sequence: Synthetic oligonucleotide
  Target: LAMA2; (+) strand; PAM type: YTN; PAM sequence: TTT
ttggaaagggattaggtcat

SEQ ID NO: 359076 - DNA, 20 bp, Artificial Sequence
  Description of Artificial Sequence: Synthetic oligonucleotide
  Target: LAMA2; (+) strand; PAM type: YTN; PAM sequence: TTT
tggaaagggattaggtcatg

SEQ ID NO: 359077 - DNA, 20 bp, Artificial Sequence
  Description of Artificial Sequence: Synthetic oligonucleotide
  Target: LAMA2; (+) strand; PAM type: YTN; PAM sequence: TTT
ggaaagggattaggtcatga

SEQ ID NO: 359078 - DNA, 20 bp, Artificial Sequence
  Description of Artificial Sequence: Synthetic oligonucleotide
  Target: LAMA2; (+) strand; PAM type: YTN; PAM sequence: TTG
gaaagggattaggtcatgag

SEQ ID NO: 359079 - DNA, 20 bp, Artificial Sequence
  Description of Artificial Sequence: Synthetic oligonucleotide
  Target: LAMA2; (+) strand; PAM type: YTN; PAM sequence: TTA
ggtcatgagggttctaatct

SEQ ID NO: 359080 - DNA, 20 bp, Artificial Sequence
  Description of Artificial Sequence: Synthetic oligonucleotide
  Target: LAMA2; (+) strand; PAM type: YTN; PAM sequence: TTC
taatctccatgaatggaatt

SEQ ID NO: 359081 - DNA, 20 bp, Artificial Sequence
  Description of Artificial Sequence: Synthetic oligonucleotide
  Target: LAMA2; (+) strand; PAM type: YTN; PAM sequence: CTA
atctccatgaatggaattaa

SEQ ID NO: 359082 - DNA, 20 bp, Artificial Sequence
  Description of Artificial Sequence: Synthetic oligonucleotide
  Target: LAMA2; (+) strand; PAM type: YTN; PAM sequence: CTC
catgaatggaattaatgccc

SEQ ID NO: 359083 - DNA, 20 bp, Artificial Sequence
  Description of Artificial Sequence: Synthetic oligonucleotide
  Target: LAMA2; (+) strand; PAM type: YTN; PAM sequence: TTA
atgcccttatgaaaatctta

SEQ ID NO: 359084 - DNA, 20 bp, Artificial Sequence
  Description of Artificial Sequence: Synthetic oligonucleotide
  Target: LAMA2; (+) strand; PAM type: YTN; PAM sequence: CTT
atgaaaatcttatctgatat

SEQ ID NO: 359085 - DNA, 20 bp, Artificial Sequence
  Description of Artificial Sequence: Synthetic oligonucleotide
  Target: LAMA2; (+) strand; PAM type: YTN; PAM sequence: TTA
tgaaaatcttatctgatata

SEQ ID NO: 359086 - DNA, 20 bp, Artificial Sequence
  Description of Artificial Sequence: Synthetic oligonucleotide
  Target: LAMA2; (+) strand; PAM type: YTN; PAM sequence: CTT
atctgatataaagagttagg

SEQ ID NO: 359087 - DNA, 20 bp, Artificial Sequence
  Description of Artificial Sequence: Synthetic oligonucleotide
  Target: LAMA2; (+) strand; PAM type: YTN; PAM sequence: TTA
tctgatataaagagttagga

SEQ ID NO: 359088 - DNA, 20 bp, Artificial Sequence
  Description of Artificial Sequence: Synthetic oligonucleotide
  Target: LAMA2; (+) strand; PAM type: YTN; PAM sequence: CTG
atataaagagttaggactta

SEQ ID NO: 359089 - DNA, 20 bp, Artificial Sequence
  Description of Artificial Sequence: Synthetic oligonucleotide
  Target: LAMA2; (+) strand; PAM type: YTN; PAM sequence: TTA
ggacttactttaaaagatat

SEQ ID NO: 359090 - DNA, 20 bp, Artificial Sequence
  Description of Artificial Sequence: Synthetic oligonucleotide
  Target: LAMA2; (+) strand; PAM type: YTN; PAM sequence: CTT
actttaaaagatataatgac

SEQ ID NO: 359091 - DNA, 20 bp, Artificial Sequence
  Description of Artificial Sequence: Synthetic oligonucleotide
  Target: LAMA2; (+) strand; PAM type: YTN; PAM sequence: TTA
ctttaaaagatataatgact

SEQ ID NO: 359092 - DNA, 20 bp, Artificial Sequence
  Description of Artificial Sequence: Synthetic oligonucleotide
  Target: LAMA2; (+) strand; PAM type: YTN; PAM sequence: CTT
taaaagatataatgactaag

SEQ ID NO: 359093 - DNA, 20 bp, Artificial Sequence
  Description of Artificial Sequence: Synthetic oligonucleotide
  Target: LAMA2; (+) strand; PAM type: YTN; PAM sequence: TTT
aaaagatataatgactaagg

SEQ ID NO: 359094 - DNA, 20 bp, Artificial Sequence
  Description of Artificial Sequence: Synthetic oligonucleotide
  Target: LAMA2; (+) strand; PAM type: YTN; PAM sequence: TTA
aaagatataatgactaaggc

SEQ ID NO: 359095 - DNA, 20 bp, Artificial Sequence
  Description of Artificial Sequence: Synthetic oligonucleotide
  Target: LAMA2; (+) strand; PAM type: YTN; PAM sequence: CTA
aggcaaaatgctatcagtgt

SEQ ID NO: 359096 - DNA, 20 bp, Artificial Sequence
  Description of Artificial Sequence: Synthetic oligonucleotide
  Target: LAMA2; (+) strand; PAM type: YTN; PAM sequence: CTA
tcagtgtgaaaataaaccaa

SEQ ID NO: 359097 - DNA, 20 bp, Artificial Sequence
  Description of Artificial Sequence: Synthetic oligonucleotide
  Target: LAMA2; (+) strand; PAM type: YTN; PAM sequence: CTG
aaaaaatagcccatagatat

SEQ ID NO: 359098 - DNA, 20 bp, Artificial Sequence
  Description of Artificial Sequence: Synthetic oligonucleotide
  Target: LAMA2; (+) strand; PAM type: YTN; PAM sequence: CTT
aacttttattgaaataggca

SEQ ID NO: 359099 - DNA, 20 bp, Artificial Sequence
  Description of Artificial Sequence: Synthetic oligonucleotide
  Target: LAMA2; (+) strand; PAM type: YTN; PAM sequence: TTA
acttttattgaaataggcat

SEQ ID NO: 359100 - DNA, 20 bp, Artificial Sequence
  Description of Artificial Sequence: Synthetic oligonucleotide
  Target: LAMA2; (+) strand; PAM type: YTN; PAM sequence: CTT
ttattgaaataggcattgca

SEQ ID NO: 359101 - DNA, 20 bp, Artificial Sequence
  Description of Artificial Sequence: Synthetic oligonucleotide
  Target: LAMA2; (+) strand; PAM type: YTN; PAM sequence: TTT
tattgaaataggcattgcag

SEQ ID NO: 359102 - DNA, 20 bp, Artificial Sequence
  Description of Artificial Sequence: Synthetic oligonucleotide
  Target: LAMA2; (+) strand; PAM type: YTN; PAM sequence: TTT
attgaaataggcattgcaga

SEQ ID NO: 359103 - DNA, 20 bp, Artificial Sequence
  Description of Artificial Sequence: Synthetic oligonucleotide
  Target: LAMA2; (+) strand; PAM type: YTN; PAM sequence: TTA
ttgaaataggcattgcagat

SEQ ID NO: 359104 - DNA, 20 bp, Artificial Sequence
  Description of Artificial Sequence: Synthetic oligonucleotide
  Target: LAMA2; (+) strand; PAM type: YTN; PAM sequence: TTG
aaataggcattgcagatcaa

SEQ ID NO: 359105 - DNA, 20 bp, Artificial Sequence
  Description of Artificial Sequence: Synthetic oligonucleotide
  Target: LAMA2; (+) strand; PAM type: YTN; PAM sequence: TTG
cagatcaatgacaatgggat

SEQ ID NO: 359106 - DNA, 20 bp, Artificial Sequence
  Description of Artificial Sequence: Synthetic oligonucleotide
  Target: LAMA2; (+) strand; PAM type: YTN; PAM sequence: CTA
tacagtaaatggtctggtac

SEQ ID NO: 359107 - DNA, 20 bp, Artificial Sequence
  Description of Artificial Sequence: Synthetic oligonucleotide
  Target: LAMA2; (+) strand; PAM type: YTN; PAM sequence: CTG
gtaccactgattatctagag

SEQ ID NO: 359108 - DNA, 20 bp, Artificial Sequence
  Description of Artificial Sequence: Synthetic oligonucleotide
  Target: LAMA2; (+) strand; PAM type: YTN; PAM sequence: CTG
attatctagagaaaaaaaat

SEQ ID NO: 359109 - DNA, 20 bp, Artificial Sequence
  Description of Artificial Sequence: Synthetic oligonucleotide
  Target: LAMA2; (+) strand; PAM type: YTN; PAM sequence: TTA
tctagagaaaaaaaataaaa

SEQ ID NO: 359110 - DNA, 20 bp, Artificial Sequence
  Description of Artificial Sequence: Synthetic oligonucleotide
  Target: LAMA2; (+) strand; PAM type: YTN; PAM sequence: CTA
gagaaaaaaaataaaatttc

SEQ ID NO: 359111 - DNA, 20 bp, Artificial Sequence
  Description of Artificial Sequence: Synthetic oligonucleotide
  Target: LAMA2; (+) strand; PAM type: YTN; PAM sequence: TTT
ctgcatccttactccacatt

SEQ ID NO: 359112 - DNA, 20 bp, Artificial Sequence
  Description of Artificial Sequence: Synthetic oligonucleotide
  Target: LAMA2; (+) strand; PAM type: YTN; PAM sequence: TTC
tgcatccttactccacatta

SEQ ID NO: 359113 - DNA, 20 bp, Artificial Sequence
  Description of Artificial Sequence: Synthetic oligonucleotide
  Target: LAMA2; (+) strand; PAM type: YTN; PAM sequence: CTG
catccttactccacattata

SEQ ID NO: 359114 - DNA, 20 bp, Artificial Sequence
  Description of Artificial Sequence: Synthetic oligonucleotide
  Target: LAMA2; (+) strand; PAM type: YTN; PAM sequence: CTT
actccacattatacataaaa

SEQ ID NO: 359115 - DNA, 20 bp, Artificial Sequence
  Description of Artificial Sequence: Synthetic oligonucleotide
  Target: LAMA2; (+) strand; PAM type: YTN; PAM sequence: TTA
ctccacattatacataaaaa

SEQ ID NO: 359116 - DNA, 20 bp, Artificial Sequence
  Description of Artificial Sequence: Synthetic oligonucleotide
  Target: LAMA2; (+) strand; PAM type: YTN; PAM sequence: CTC
cacattatacataaaaataa

SEQ ID NO: 359117 - DNA, 20 bp, Artificial Sequence
  Description of Artificial Sequence: Synthetic oligonucleotide
  Target: LAMA2; (+) strand; PAM type: YTN; PAM sequence: TTA
tacataaaaataaactcccc

SEQ ID NO: 359118 - DNA, 20 bp, Artificial Sequence
  Description of Artificial Sequence: Synthetic oligonucleotide
  Target: LAMA2; (+) strand; PAM type: YTN; PAM sequence: CTC
cccttgaaacaaatcataaa

SEQ ID NO: 359119 - DNA, 20 bp, Artificial Sequence
  Description of Artificial Sequence: Synthetic oligonucleotide
  Target: LAMA2; (+) strand; PAM type: YTN; PAM sequence: CTT
gaaacaaatcataaattttc

SEQ ID NO: 359120 - DNA, 20 bp, Artificial Sequence
  Description of Artificial Sequence: Synthetic oligonucleotide
  Target: LAMA2; (+) strand; PAM type: YTN; PAM sequence: TTG
aaacaaatcataaattttca

SEQ ID NO: 359121 - DNA, 20 bp, Artificial Sequence
  Description of Artificial Sequence: Synthetic oligonucleotide
  Target: LAMA2; (+) strand; PAM type: YTN; PAM sequence: TTT
tcaaaaattatgctaaagac

SEQ ID NO: 359122 - DNA, 20 bp, Artificial Sequence
  Description of Artificial Sequence: Synthetic oligonucleotide
  Target: LAMA2; (+) strand; PAM type: YTN; PAM sequence: TTT
caaaaattatgctaaagaca

SEQ ID NO: 359123 - DNA, 20 bp, Artificial Sequence
  Description of Artificial Sequence: Synthetic oligonucleotide
  Target: LAMA2; (+) strand; PAM type: YTN; PAM sequence: TTC
aaaaattatgctaaagacaa

SEQ ID NO: 359124 - DNA, 20 bp, Artificial Sequence
  Description of Artificial Sequence: Synthetic oligonucleotide
  Target: LAMA2; (+) strand; PAM type: YTN; PAM sequence: TTA
tgctaaagacaaacctttat

SEQ ID NO: 359125 - DNA, 20 bp, Artificial Sequence
  Description of Artificial Sequence: Synthetic oligonucleotide
  Target: LAMA2; (+) strand; PAM type: YTN; PAM sequence: CTA
aagacaaacctttataaaga

SEQ ID NO: 359126 - DNA, 20 bp, Artificial Sequence
  Description of Artificial Sequence: Synthetic oligonucleotide
  Target: LAMA2; (+) strand; PAM type: YTN; PAM sequence: CTT
tataaagacaacacattgag

SEQ ID NO: 359127 - DNA, 20 bp, Artificial Sequence
  Description of Artificial Sequence: Synthetic oligonucleotide
  Target: LAMA2; (+) strand; PAM type: YTN; PAM sequence: TTT
ataaagacaacacattgaga

SEQ ID NO: 359128 - DNA, 20 bp, Artificial Sequence
  Description of Artificial Sequence: Synthetic oligonucleotide
  Target: LAMA2; (+) strand; PAM type: YTN; PAM sequence: TTA
taaagacaacacattgagat

SEQ ID NO: 359129 - DNA, 20 bp, Artificial Sequence
  Description of Artificial Sequence: Synthetic oligonucleotide
  Target: LAMA2; (+) strand; PAM type: YTN; PAM sequence: TTG
agatttctgctcctgaccat

SEQ ID NO: 359130 - DNA, 20 bp, Artificial Sequence
  Description of Artificial Sequence: Synthetic oligonucleotide
  Target: LAMA2; (+) strand; PAM type: YTN; PAM sequence: TTT
ctgctcctgaccataattga

SEQ ID NO: 359131 - DNA, 20 bp, Artificial Sequence
  Description of Artificial Sequence: Synthetic oligonucleotide
  Target: LAMA2; (+) strand; PAM type: YTN; PAM sequence: TTC
tgctcctgaccataattgaa

SEQ ID NO: 359132 - DNA, 20 bp, Artificial Sequence
  Description of Artificial Sequence: Synthetic oligonucleotide
  Target: LAMA2; (+) strand; PAM type: YTN; PAM sequence: CTG
ctcctgaccataattgaata

SEQ ID NO: 359133 - DNA, 20 bp, Artificial Sequence
  Description of Artificial Sequence: Synthetic oligonucleotide
  Target: LAMA2; (+) strand; PAM type: YTN; PAM sequence: CTC
ctgaccataattgaataata

SEQ ID NO: 359134 - DNA, 20 bp, Artificial Sequence
  Description of Artificial Sequence: Synthetic oligonucleotide
  Target: LAMA2; (+) strand; PAM type: YTN; PAM sequence: CTG
accataattgaataatagta

SEQ ID NO: 359135 - DNA, 20 bp, Artificial Sequence
  Description of Artificial Sequence: Synthetic oligonucleotide
  Target: LAMA2; (+) strand; PAM type: YTN; PAM sequence: TTG
aataatagtatctagatttc

SEQ ID NO: 359136 - DNA, 20 bp, Artificial Sequence
  Description of Artificial Sequence: Synthetic oligonucleotide
  Target: LAMA2; (+) strand; PAM type: YTN; PAM sequence: CTA
gatttccttatctaccttaa

SEQ ID NO: 359137 - DNA, 20 bp, Artificial Sequence
  Description of Artificial Sequence: Synthetic oligonucleotide
  Target: LAMA2; (+) strand; PAM type: YTN; PAM sequence: TTT
ccttatctaccttaaacaac

SEQ ID NO: 359138 - DNA, 20 bp, Artificial Sequence
  Description of Artificial Sequence: Synthetic oligonucleotide
  Target: LAMA2; (+) strand; PAM type: YTN; PAM sequence: TTC
cttatctaccttaaacaaca

SEQ ID NO: 359139 - DNA, 20 bp, Artificial Sequence
  Description of Artificial Sequence: Synthetic oligonucleotide
  Target: LAMA2; (+) strand; PAM type: YTN; PAM sequence: CTT
atctaccttaaacaacaaca

SEQ ID NO: 359140 - DNA, 20 bp, Artificial Sequence
  Description of Artificial Sequence: Synthetic oligonucleotide
  Target: LAMA2; (+) strand; PAM type: YTN; PAM sequence: TTA
tctaccttaaacaacaacaa

SEQ ID NO: 359141 - DNA, 20 bp, Artificial Sequence
  Description of Artificial Sequence: Synthetic oligonucleotide
  Target: LAMA2; (+) strand; PAM type: YTN; PAM sequence: CTA
ccttaaacaacaacaaagcc

SEQ ID NO: 359142 - DNA, 20 bp, Artificial Sequence
  Description of Artificial Sequence: Synthetic oligonucleotide
  Target: LAMA2; (+) strand; PAM type: YTN; PAM sequence: CTT
aaacaacaacaaagcctgag

SEQ ID NO: 359143 - DNA, 20 bp, Artificial Sequence
  Description of Artificial Sequence: Synthetic oligonucleotide
  Target: LAMA2; (+) strand; PAM type: YTN; PAM sequence: TTA
aacaacaacaaagcctgagg

SEQ ID NO: 359144 - DNA, 20 bp, Artificial Sequence
  Description of Artificial Sequence: Synthetic oligonucleotide
  Target: LAMA2; (+) strand; PAM type: YTN; PAM sequence: CTG
agggggaaaaaatgtggaac

SEQ ID NO: 359145 - DNA, 20 bp, Artificial Sequence
  Description of Artificial Sequence: Synthetic oligonucleotide
  Target: LAMA2; (+) strand; PAM type: YTN; PAM sequence: TTT
ttagacactcttccacagat

SEQ ID NO: 359146 - DNA, 20 bp, Artificial Sequence
  Description of Artificial Sequence: Synthetic oligonucleotide
  Target: LAMA2; (+) strand; PAM type: YTN; PAM sequence: TTT
tagacactcttccacagata

SEQ ID NO: 359147 - DNA, 20 bp, Artificial Sequence
  Description of Artificial Sequence: Synthetic oligonucleotide
  Target: LAMA2; (+) strand; PAM type: YTN; PAM sequence: TTT
agacactcttccacagatag

SEQ ID NO: 359148 - DNA, 20 bp, Artificial Sequence
  Description of Artificial Sequence: Synthetic oligonucleotide
  Target: LAMA2; (+) strand; PAM type: YTN; PAM sequence: TTA
gacactcttccacagatagc

SEQ ID NO: 359149 - DNA, 20 bp, Artificial Sequence
  Description of Artificial Sequence: Synthetic oligonucleotide
  Target: LAMA2; (+) strand; PAM type: YTN; PAM sequence: CTC
ttccacagatagcataaaac

SEQ ID NO: 359150 - DNA, 20 bp, Artificial Sequence
  Description of Artificial Sequence: Synthetic oligonucleotide
  Target: LAMA2; (+) strand; PAM type: YTN; PAM sequence: CTT
ccacagatagcataaaactg

SEQ ID NO: 359151 - DNA, 20 bp, Artificial Sequence
  Description of Artificial Sequence: Synthetic oligonucleotide
  Target: LAMA2; (+) strand; PAM type: YTN; PAM sequence: TTC
cacagatagcataaaactgt

SEQ ID NO: 359152 - DNA, 20 bp, Artificial Sequence
  Description of Artificial Sequence: Synthetic oligonucleotide
  Target: LAMA2; (+) strand; PAM type: YTN; PAM sequence: CTG
tgatctctgaaaaagagaaa

SEQ ID NO: 359153 - DNA, 20 bp, Artificial Sequence
  Description of Artificial Sequence: Synthetic oligonucleotide
  Target: LAMA2; (+) strand; PAM type: YTN; PAM sequence: CTC
tgaaaaagagaaacaaatgg

SEQ ID NO: 359154 - DNA, 20 bp, Artificial Sequence
  Description of Artificial Sequence: Synthetic oligonucleotide
  Target: LAMA2; (+) strand; PAM type: YTN; PAM sequence: CTG
aaaaagagaaacaaatgggg

SEQ ID NO: 359155 - DNA, 20 bp, Artificial Sequence
  Description of Artificial Sequence: Synthetic oligonucleotide
  Target: LAMA2; (+) strand; PAM type: YTN; PAM sequence: TTT
acaattgccccaagattatt

SEQ ID NO: 359156 - DNA, 20 bp, Artificial Sequence
  Description of Artificial Sequence: Synthetic oligonucleotide
  Target: LAMA2; (+) strand; PAM type: YTN; PAM sequence: TTA
caattgccccaagattattg

SEQ ID NO: 359157 - DNA, 20 bp, Artificial Sequence
  Description of Artificial Sequence: Synthetic oligonucleotide
  Target: LAMA2; (+) strand; PAM type: YTN; PAM sequence: TTG
ccccaagattattgcctggg

SEQ ID NO: 359158 - DNA, 20 bp, Artificial Sequence
  Description of Artificial Sequence: Synthetic oligonucleotide
  Target: LAMA2; (+) strand; PAM type: YTN; PAM sequence: TTA
ttgcctggggacagtctcca

SEQ ID NO: 359159 - DNA, 20 bp, Artificial Sequence
  Description of Artificial Sequence: Synthetic oligonucleotide
  Target: LAMA2; (+) strand; PAM type: YTN; PAM sequence: TTG
cctggggacagtctccaggg

SEQ ID NO: 359160 - DNA, 20 bp, Artificial Sequence
  Description of Artificial Sequence: Synthetic oligonucleotide
  Target: LAMA2; (+) strand; PAM type: YTN; PAM sequence: CTG
gggacagtctccagggtgaa

SEQ ID NO: 359161 - DNA, 20 bp, Artificial Sequence
  Description of Artificial Sequence: Synthetic oligonucleotide
  Target: LAMA2; (+) strand; PAM type: YTN; PAM sequence: CTC
cagggtgaagtgcattggta

SEQ ID NO: 359162 - DNA, 20 bp, Artificial Sequence
  Description of Artificial Sequence: Synthetic oligonucleotide
  Target: LAMA2; (+) strand; PAM type: YTN; PAM sequence: TTG
gtatattgagaaaaaagcca

SEQ ID NO: 359163 - DNA, 20 bp, Artificial Sequence
  Description of Artificial Sequence: Synthetic oligonucleotide
  Target: LAMA2; (+) strand; PAM type: YTN; PAM sequence: TTG
agaaaaaagccaaacacagc

SEQ ID NO: 359164 - DNA, 20 bp, Artificial Sequence
  Description of Artificial Sequence: Synthetic oligonucleotide
  Target: LAMA2; (+) strand; PAM type: YTN; PAM sequence: CTG
gccttgccaaattgaaagac

SEQ ID NO: 359165 - DNA, 20 bp, Artificial Sequence
  Description of Artificial Sequence: Synthetic oligonucleotide
  Target: LAMA2; (+) strand; PAM type: YTN; PAM sequence: CTT
gccaaattgaaagacagagg

SEQ ID NO: 359166 - DNA, 20 bp, Artificial Sequence
  Description of Artificial Sequence: Synthetic oligonucleotide
  Target: LAMA2; (+) strand; PAM type: YTN; PAM sequence: TTG
ccaaattgaaagacagaggt

SEQ ID NO: 359167 - DNA, 20 bp, Artificial Sequence
  Description of Artificial Sequence: Synthetic oligonucleotide
  Target: LAMA2; (+) strand; PAM type: YTN; PAM sequence: TTG
aaagacagaggttagggttc

SEQ ID NO: 359168 - DNA, 20 bp, Artificial Sequence
  Description of Artificial Sequence: Synthetic oligonucleotide
  Target: LAMA2; (+) strand; PAM type: YTN; PAM sequence: TTA
gggttcatggaggccaaggc

SEQ ID NO: 359169 - DNA, 20 bp, Artificial Sequence
  Description of Artificial Sequence: Synthetic oligonucleotide
  Target: LAMA2; (+) strand; PAM type: YTN; PAM sequence: TTC
atggaggccaaggcagctag

SEQ ID NO: 359170 - DNA, 20 bp, Artificial Sequence
  Description of Artificial Sequence: Synthetic oligonucleotide
  Target: LAMA2; (+) strand; PAM type: YTN; PAM sequence: CTA
gcatttgtgaggcagcatac

SEQ ID NO: 359171 - DNA, 20 bp, Artificial Sequence
  Description of Artificial Sequence: Synthetic oligonucleotide
  Target: LAMA2; (+) strand; PAM type: YTN; PAM sequence: TTT
gtgaggcagcatacaaggga

SEQ ID NO: 359172 - DNA, 20 bp, Artificial Sequence
  Description of Artificial Sequence: Synthetic oligonucleotide
  Target: LAMA2; (+) strand; PAM type: YTN; PAM sequence: TTG
tgaggcagcatacaagggaa

SEQ ID NO: 359173 - DNA, 20 bp, Artificial Sequence
  Description of Artificial Sequence: Synthetic oligonucleotide
  Target: LAMA2; (+) strand; PAM type: YTN; PAM sequence: CTG
acctgcacagagagagagac

SEQ ID NO: 359174 - DNA, 20 bp, Artificial Sequence
  Description of Artificial Sequence: Synthetic oligonucleotide
  Target: LAMA2; (+) strand; PAM type: YTN; PAM sequence: CTG
cacagagagagagacgagga

SEQ ID NO: 359175 - DNA, 20 bp, Artificial Sequence
  Description of Artificial Sequence: Synthetic oligonucleotide
  Target: LAMA2; (+) strand; PAM type: YTN; PAM sequence: CTG
cagctatctgcaaagagaaa

SEQ ID NO: 359176 - DNA, 20 bp, Artificial Sequence
  Description of Artificial Sequence: Synthetic oligonucleotide
  Target: LAMA2; (+) strand; PAM type: YTN; PAM sequence: CTA
tctgcaaagagaaaccggag

SEQ ID NO: 359177 - DNA, 20 bp, Artificial Sequence
  Description of Artificial Sequence: Synthetic oligonucleotide
  Target: LAMA2; (+) strand; PAM type: YTN; PAM sequence: CTG
caaagagaaaccggagtact

SEQ ID NO: 359178 - DNA, 20 bp, Artificial Sequence
  Description of Artificial Sequence: Synthetic oligonucleotide
  Target: LAMA2; (+) strand; PAM type: YTN; PAM sequence: CTG
agttgcaaatatgtgaaaga

SEQ ID NO: 359179 - DNA, 20 bp, Artificial Sequence
  Description of Artificial Sequence: Synthetic oligonucleotide
  Target: LAMA2; (+) strand; PAM type: YTN; PAM sequence: TTG
caaatatgtgaaagaaaact

SEQ ID NO: 359180 - DNA, 20 bp, Artificial Sequence
  Description of Artificial Sequence: Synthetic oligonucleotide
  Target: LAMA2; (+) strand; PAM type: YTN; PAM sequence: CTA
cctaaggctaatgaaagaat

SEQ ID NO: 359181 - DNA, 20 bp, Artificial Sequence
  Description of Artificial Sequence: Synthetic oligonucleotide
  Target: LAMA2; (+) strand; PAM type: YTN; PAM sequence: CTA
aggctaatgaaagaatcact

SEQ ID NO: 359182 - DNA, 20 bp, Artificial Sequence
  Description of Artificial Sequence: Synthetic oligonucleotide
  Target: LAMA2; (+) strand; PAM type: YTN; PAM sequence: CTA
atgaaagaatcactaaaaag

SEQ ID NO: 359183 - DNA, 20 bp, Artificial Sequence
  Description of Artificial Sequence: Synthetic oligonucleotide
  Target: LAMA2; (+) strand; PAM type: YTN; PAM sequence: CTA
aaaagtagtaagagaaacaa

SEQ ID NO: 359184 - DNA, 20 bp, Artificial Sequence
  Description of Artificial Sequence: Synthetic oligonucleotide
  Target: LAMA2; (+) strand; PAM type: YTN; PAM sequence: TTC
ctgagctgatacagggctgc

SEQ ID NO: 359185 - DNA, 20 bp, Artificial Sequence
  Description of Artificial Sequence: Synthetic oligonucleotide
  Target: LAMA2; (+) strand; PAM type: YTN; PAM sequence: CTG
agctgatacagggctgctaa

SEQ ID NO: 359186 - DNA, 20 bp, Artificial Sequence
  Description of Artificial Sequence: Synthetic oligonucleotide
  Target: LAMA2; (+) strand; PAM type: YTN; PAM sequence: CTG
atacagggctgctaatagtt

SEQ ID NO: 359187 - DNA, 20 bp, Artificial Sequence
  Description of Artificial Sequence: Synthetic oligonucleotide
  Target: LAMA2; (+) strand; PAM type: YTN; PAM sequence: CTG
ctaatagtttattttcctaa

SEQ ID NO: 359188 - DNA, 20 bp, Artificial Sequence
  Description of Artificial Sequence: Synthetic oligonucleotide
  Target: LAMA2; (+) strand; PAM type: YTN; PAM sequence: CTA
atagtttattttcctaacac

SEQ ID NO: 359189 - DNA, 20 bp, Artificial Sequence
  Description of Artificial Sequence: Synthetic oligonucleotide
  Target: LAMA2; (+) strand; PAM type: YTN; PAM sequence: TTT
attttcctaacacccaaagt

SEQ ID NO: 359190 - DNA, 20 bp, Artificial Sequence
  Description of Artificial Sequence: Synthetic oligonucleotide
  Target: LAMA2; (+) strand; PAM type: YTN; PAM sequence: TTA
ttttcctaacacccaaagtg

SEQ ID NO: 359191 - DNA, 20 bp, Artificial Sequence
  Description of Artificial Sequence: Synthetic oligonucleotide
  Target: LAMA2; (+) strand; PAM type: YTN; PAM sequence: TTT
tcctaacacccaaagtggaa

SEQ ID NO: 359192 - DNA, 20 bp, Artificial Sequence
  Description of Artificial Sequence: Synthetic oligonucleotide
  Target: LAMA2; (+) strand; PAM type: YTN; PAM sequence: TTT
cctaacacccaaagtggaat

SEQ ID NO: 359193 - DNA, 20 bp, Artificial Sequence
  Description of Artificial Sequence: Synthetic oligonucleotide
  Target: LAMA2; (+) strand; PAM type: YTN; PAM sequence: TTC
ctaacacccaaagtggaatg

SEQ ID NO: 359194 - DNA, 20 bp, Artificial Sequence
  Description of Artificial Sequence: Synthetic oligonucleotide
  Target: LAMA2; (+) strand; PAM type: YTN; PAM sequence: CTA
acacccaaagtggaatgtct

SEQ ID NO: 359195 - DNA, 20 bp, Artificial Sequence
  Description of Artificial Sequence: Synthetic oligonucleotide
  Target: LAMA2; (+) strand; PAM type: YTN; PAM sequence: CTT
cataagagggactaaattag

SEQ ID NO: 359196 - DNA, 20 bp, Artificial Sequence
  Description of Artificial Sequence: Synthetic oligonucleotide
  Target: LAMA2; (+) strand; PAM type: YTN; PAM sequence: TTC
ataagagggactaaattagc

SEQ ID NO: 359197 - DNA, 20 bp, Artificial Sequence
  Description of Artificial Sequence: Synthetic oligonucleotide
  Target: LAMA2; (+) strand; PAM type: YTN; PAM sequence: CTA
aattagctccaaactacaag

SEQ ID NO: 359198 - DNA, 20 bp, Artificial Sequence
  Description of Artificial Sequence: Synthetic oligonucleotide
  Target: LAMA2; (+) strand; PAM type: YTN; PAM sequence: TTA
gctccaaactacaagctact

SEQ ID NO: 359199 - DNA, 20 bp, Artificial Sequence
  Description of Artificial Sequence: Synthetic oligonucleotide
  Target: LAMA2; (+) strand; PAM type: YTN; PAM sequence: CTC
caaactacaagctactctag

SEQ ID NO: 359200 - DNA, 20 bp, Artificial Sequence
  Description of Artificial Sequence: Synthetic oligonucleotide
  Target: LAMA2; (+) strand; PAM type: YTN; PAM sequence: CTA
caagctactctaggttcacc

SEQ ID NO: 359201 - DNA, 20 bp, Artificial Sequence
  Description of Artificial Sequence: Synthetic oligonucleotide
  Target: LAMA2; (+) strand; PAM type: YTN; PAM sequence: CTA
ctctaggttcaccccaacaa

SEQ ID NO: 359202 - DNA, 20 bp, Artificial Sequence
  Description of Artificial Sequence: Synthetic oligonucleotide
  Target: LAMA2; (+) strand; PAM type: YTN; PAM sequence: CTC
taggttcaccccaacaaatc

SEQ ID NO: 359203 - DNA, 20 bp, Artificial Sequence
  Description of Artificial Sequence: Synthetic oligonucleotide
  Target: LAMA2; (+) strand; PAM type: YTN; PAM sequence: CTA
ggttcaccccaacaaatctt

SEQ ID NO: 359204 - DNA, 20 bp, Artificial Sequence
  Description of Artificial Sequence: Synthetic oligonucleotide
  Target: LAMA2; (+) strand; PAM type: YTN; PAM sequence: TTC
accccaacaaatcttgaaaa

SEQ ID NO: 359205 - DNA, 20 bp, Artificial Sequence
  Description of Artificial Sequence: Synthetic oligonucleotide
  Target: LAMA2; (+) strand; PAM type: YTN; PAM sequence: CTT
gaaaacagccttaaaagaag

SEQ ID NO: 359206 - DNA, 20 bp, Artificial Sequence
  Description of Artificial Sequence: Synthetic oligonucleotide
  Target: LAMA2; (+) strand; PAM type: YTN; PAM sequence: TTG
aaaacagccttaaaagaagt

SEQ ID NO: 359207 - DNA, 20 bp, Artificial Sequence
  Description of Artificial Sequence: Synthetic oligonucleotide
  Target: LAMA2; (+) strand; PAM type: YTN; PAM sequence: CTT
aaaagaagtcaacttattcc

SEQ ID NO: 359208 - DNA, 20 bp, Artificial Sequence
  Description of Artificial Sequence: Synthetic oligonucleotide
  Target: LAMA2; (+) strand; PAM type: YTN; PAM sequence: TTA
aaagaagtcaacttattcca

SEQ ID NO: 359209 - DNA, 20 bp, Artificial Sequence
  Description of Artificial Sequence: Synthetic oligonucleotide
  Target: LAMA2; (+) strand; PAM type: YTN; PAM sequence: CTT
attccaaataaattaactgc

SEQ ID NO: 359210 - DNA, 20 bp, Artificial Sequence
  Description of Artificial Sequence: Synthetic oligonucleotide
  Target: LAMA2; (+) strand; PAM type: YTN; PAM sequence: TTA
ttccaaataaattaactgca

SEQ ID NO: 359211 - DNA, 20 bp, Artificial Sequence
  Description of Artificial Sequence: Synthetic oligonucleotide
  Target: LAMA2; (+) strand; PAM type: YTN; PAM sequence: TTC
caaataaattaactgcatgc

SEQ ID NO: 359212 - DNA, 20 bp, Artificial Sequence
  Description of Artificial Sequence: Synthetic oligonucleotide
  Target: LAMA2; (+) strand; PAM type: YTN; PAM sequence: TTA
actgcatgccagaacaaagt

SEQ ID NO: 359213 - DNA, 20 bp, Artificial Sequence
  Description of Artificial Sequence: Synthetic oligonucleotide
  Target: LAMA2; (+) strand; PAM type: YTN; PAM sequence: CTG
catgccagaacaaagtccaa

SEQ ID NO: 359214 - DNA, 20 bp, Artificial Sequence
  Description of Artificial Sequence: Synthetic oligonucleotide
  Target: LAMA2; (+) strand; PAM type: YTN; PAM sequence: CTA
tttaattacaacaaaatcca

SEQ ID NO: 359215 - DNA, 20 bp, Artificial Sequence
  Description of Artificial Sequence: Synthetic oligonucleotide
  Target: LAMA2; (+) strand; PAM type: YTN; PAM sequence: TTT
aattacaacaaaatccagca

SEQ ID NO: 359216 - DNA, 20 bp, Artificial Sequence
  Description of Artificial Sequence: Synthetic oligonucleotide
  Target: LAMA2; (+) strand; PAM type: YTN; PAM sequence: TTA
attacaacaaaatccagcac

SEQ ID NO: 359217 - DNA, 20 bp, Artificial Sequence
  Description of Artificial Sequence: Synthetic oligonucleotide
  Target: LAMA2; (+) strand; PAM type: YTN; PAM sequence: TTA
caacaaaatccagcactcaa

SEQ ID NO: 359218 - DNA, 20 bp, Artificial Sequence
  Description of Artificial Sequence: Synthetic oligonucleotide
  Target: LAMA2; (+) strand; PAM type: YTN; PAM sequence: CTC
aacaatgtaaaattcatgat

SEQ ID NO: 359219 - DNA, 20 bp, Artificial Sequence
  Description of Artificial Sequence: Synthetic oligonucleotide
  Target: LAMA2; (+) strand; PAM type: YTN; PAM sequence: TTC
atgatgtttggcatcaaatc

SEQ ID NO: 359220 - DNA, 20 bp, Artificial Sequence
  Description of Artificial Sequence: Synthetic oligonucleotide
  Target: LAMA2; (+) strand; PAM type: YTN; PAM sequence: TTT
ggcatcaaatcaaaaactac

SEQ ID NO: 359221 - DNA, 20 bp, Artificial Sequence
  Description of Artificial Sequence: Synthetic oligonucleotide
  Target: LAMA2; (+) strand; PAM type: YTN; PAM sequence: TTG
gcatcaaatcaaaaactacc

SEQ ID NO: 359222 - DNA, 20 bp, Artificial Sequence
  Description of Artificial Sequence: Synthetic oligonucleotide
  Target: LAMA2; (+) strand; PAM type: YTN; PAM sequence: CTA
ccaggtacataaacaagcag

SEQ ID NO: 359223 - DNA, 20 bp, Artificial Sequence
  Description of Artificial Sequence: Synthetic oligonucleotide
  Target: LAMA2; (+) strand; PAM type: YTN; PAM sequence: CTA
ccaggaggaaaatcaatcaa

SEQ ID NO: 359224 - DNA, 20 bp, Artificial Sequence
  Description of Artificial Sequence: Synthetic oligonucleotide
  Target: LAMA2; (+) strand; PAM type: YTN; PAM sequence: TTA
ttaaaaagacagataactgg

SEQ ID NO: 359225 - DNA, 20 bp, Artificial Sequence
  Description of Artificial Sequence: Synthetic oligonucleotide
  Target: LAMA2; (+) strand; PAM type: YTN; PAM sequence: TTA
aaaagacagataactggaaa

SEQ ID NO: 359226 - DNA, 20 bp, Artificial Sequence
  Description of Artificial Sequence: Synthetic oligonucleotide
  Target: LAMA2; (+) strand; PAM type: YTN; PAM sequence: CTG
gaaaattgtaaaagcaatca

SEQ ID NO: 359227 - DNA, 20 bp, Artificial Sequence
  Description of Artificial Sequence: Synthetic oligonucleotide
  Target: LAMA2; (+) strand; PAM type: YTN; PAM sequence: TTG
taaaagcaatcagaaaaaaa

SEQ ID NO: 359228 - DNA, 20 bp, Artificial Sequence
  Description of Artificial Sequence: Synthetic oligonucleotide
  Target: LAMA2; (+) strand; PAM type: YTN; PAM sequence: CTA
acatggccaggcgcggtggc

SEQ ID NO: 359229 - DNA, 20 bp, Artificial Sequence
  Description of Artificial Sequence: Synthetic oligonucleotide
  Target: LAMA2; (+) strand; PAM type: YTN; PAM sequence: CTC
atgcctgtaatcccagcact

SEQ ID NO: 359230 - DNA, 20 bp, Artificial Sequence
  Description of Artificial Sequence: Synthetic oligonucleotide
  Target: LAMA2; (+) strand; PAM type: YTN; PAM sequence: CTG
taatcccagcactttgggag

SEQ ID NO: 359231 - DNA, 20 bp, Artificial Sequence
  Description of Artificial Sequence: Synthetic oligonucleotide
  Target: LAMA2; (+) strand; PAM type: YTN; PAM sequence: CTT
tgggaggccaaggcaggtgg

SEQ ID NO: 359232 - DNA, 20 bp, Artificial Sequence
  Description of Artificial Sequence: Synthetic oligonucleotide
  Target: LAMA2; (+) strand; PAM type: YTN; PAM sequence: TTT
gggaggccaaggcaggtgga

SEQ ID NO: 359233 - DNA, 20 bp, Artificial Sequence
  Description of Artificial Sequence: Synthetic oligonucleotide
  Target: LAMA2; (+) strand; PAM type: YTN; PAM sequence: TTG
ggaggccaaggcaggtggat

SEQ ID NO: 359234 - DNA, 20 bp, Artificial Sequence
  Description of Artificial Sequence: Synthetic oligonucleotide
  Target: LAMA2; (+) strand; PAM type: YTN; PAM sequence: TTC
aagaccagcctggccaatat

SEQ ID NO: 359235 - DNA, 20 bp, Artificial Sequence
  Description of Artificial Sequence: Synthetic oligonucleotide
  Target: LAMA2; (+) strand; PAM type: YTN; PAM sequence: CTG
gccaatatggtgaaacccca

SEQ ID NO: 359236 - DNA, 20 bp, Artificial Sequence
  Description of Artificial Sequence: Synthetic oligonucleotide
  Target: LAMA2; (+) strand; PAM type: YTN; PAM sequence: CTC
tactaaaaatacaaaaatta

SEQ ID NO: 359237 - DNA, 20 bp, Artificial Sequence
  Description of Artificial Sequence: Synthetic oligonucleotide
  Target: LAMA2; (+) strand; PAM type: YTN; PAM sequence: CTA
ctaaaaatacaaaaattagc

SEQ ID NO: 359238 - DNA, 20 bp, Artificial Sequence
  Description of Artificial Sequence: Synthetic oligonucleotide
  Target: LAMA2; (+) strand; PAM type: YTN; PAM sequence: CTA
aaaatacaaaaattagctgg

SEQ ID NO: 359239 - DNA, 20 bp, Artificial Sequence
  Description of Artificial Sequence: Synthetic oligonucleotide
  Target: LAMA2; (+) strand; PAM type: YTN; PAM sequence: TTA
gctgggcatggtggtgcaca

SEQ ID NO: 359240 - DNA, 20 bp, Artificial Sequence
  Description of Artificial Sequence: Synthetic oligonucleotide
  Target: LAMA2; (+) strand; PAM type: YTN; PAM sequence: CTG
ggcatggtggtgcacacctg

SEQ ID NO: 359241 - DNA, 20 bp, Artificial Sequence
  Description of Artificial Sequence: Synthetic oligonucleotide
  Target: LAMA2; (+) strand; PAM type: YTN; PAM sequence: CTG
tagtcccagctgctcaggag

SEQ ID NO: 359242 - DNA, 20 bp, Artificial Sequence
  Description of Artificial Sequence: Synthetic oligonucleotide
  Target: LAMA2; (+) strand; PAM type: YTN; PAM sequence: CTG
ctcaggaggctgaggcagga

SEQ ID NO: 359243 - DNA, 20 bp, Artificial Sequence
  Description of Artificial Sequence: Synthetic oligonucleotide
  Target: LAMA2; (+) strand; PAM type: YTN; PAM sequence: CTC
aggaggctgaggcaggagaa

SEQ ID NO: 359244 - DNA, 20 bp, Artificial Sequence
  Description of Artificial Sequence: Synthetic oligonucleotide
  Target: LAMA2; (+) strand; PAM type: YTN; PAM sequence: CTG
aggcaggagaatcacttgaa

SEQ ID NO: 359245 - DNA, 20 bp, Artificial Sequence
  Description of Artificial Sequence: Synthetic oligonucleotide
  Target: LAMA2; (+) strand; PAM type: YTN; PAM sequence: CTT
gaacctgggaggcgatggtt

SEQ ID NO: 359246 - DNA, 20 bp, Artificial Sequence
  Description of Artificial Sequence: Synthetic oligonucleotide
  Target: LAMA2; (+) strand; PAM type: YTN; PAM sequence: TTG
aacctgggaggcgatggttt

SEQ ID NO: 359247 - DNA, 20 bp, Artificial Sequence
  Description of Artificial Sequence: Synthetic oligonucleotide
  Target: LAMA2; (+) strand; PAM type: YTN; PAM sequence: CTG
ggaggcgatggtttcagtga

SEQ ID NO: 359248 - DNA, 20 bp, Artificial Sequence
  Description of Artificial Sequence: Synthetic oligonucleotide
  Target: LAMA2; (+) strand; PAM type: YTN; PAM sequence: TTT
cagtgagccgagatcatacc

SEQ ID NO: 359249 - DNA, 20 bp, Artificial Sequence
  Description of Artificial Sequence: Synthetic oligonucleotide
  Target: LAMA2; (+) strand; PAM type: YTN; PAM sequence: TTC
agtgagccgagatcatacca

SEQ ID NO: 359250 - DNA, 20 bp, Artificial Sequence
  Description of Artificial Sequence: Synthetic oligonucleotide
  Target: LAMA2; (+) strand; PAM type: YTN; PAM sequence: CTG
cactccagcctaagcaacag

SEQ ID NO: 359251 - DNA, 20 bp, Artificial Sequence
  Description of Artificial Sequence: Synthetic oligonucleotide
  Target: LAMA2; (+) strand; PAM type: YTN; PAM sequence: CTC
cagcctaagcaacagagcga

SEQ ID NO: 359252 - DNA, 20 bp, Artificial Sequence
  Description of Artificial Sequence: Synthetic oligonucleotide
  Target: LAMA2; (+) strand; PAM type: YTN; PAM sequence: CTA
agcaacagagcgagagtctg

SEQ ID NO: 359253 - DNA, 20 bp, Artificial Sequence
  Description of Artificial Sequence: Synthetic oligonucleotide
  Target: LAMA2; (+) strand; PAM type: YTN; PAM sequence: CTG
tctcaaaaaaaaaaaaaaaa

SEQ ID NO: 359254 - DNA, 20 bp, Artificial Sequence
  Description of Artificial Sequence: Synthetic oligonucleotide
  Target: LAMA2; (+) strand; PAM type: YTN; PAM sequence: CTC
aaaaaaaaaaaaaaaaaaaa

SEQ ID NO: 359255 - DNA, 20 bp, Artificial Sequence
  Description of Artificial Sequence: Synthetic oligonucleotide
  Target: LAMA2; (+) strand; PAM type: YTN; PAM sequence: TTT
cttgtcagaccctatatgct

SEQ ID NO: 359256 - DNA, 20 bp, Artificial Sequence
  Description of Artificial Sequence: Synthetic oligonucleotide
  Target: LAMA2; (+) strand; PAM type: YTN; PAM sequence: TTC
ttgtcagaccctatatgcta

SEQ ID NO: 359257 - DNA, 20 bp, Artificial Sequence
  Description of Artificial Sequence: Synthetic oligonucleotide
  Target: LAMA2; (+) strand; PAM type: YTN; PAM sequence: CTT
gtcagaccctatatgctatg

SEQ ID NO: 359258 - DNA, 20 bp, Artificial Sequence
  Description of Artificial Sequence: Synthetic oligonucleotide
  Target: LAMA2; (+) strand; PAM type: YTN; PAM sequence: TTG
tcagaccctatatgctatgg

SEQ ID NO: 359259 - DNA, 20 bp, Artificial Sequence
  Description of Artificial Sequence: Synthetic oligonucleotide
  Target: LAMA2; (+) strand; PAM type: YTN; PAM sequence: CTA
tatgctatggtccaaatgtt

SEQ ID NO: 359260 - DNA, 20 bp, Artificial Sequence
  Description of Artificial Sequence: Synthetic oligonucleotide
  Target: LAMA2; (+) strand; PAM type: YTN; PAM sequence: CTA
tggtccaaatgttggtgtcc

SEQ ID NO: 359261 - DNA, 20 bp, Artificial Sequence
  Description of Artificial Sequence: Synthetic oligonucleotide
  Target: LAMA2; (+) strand; PAM type: YTN; PAM sequence: TTG
gtgtccccctaaaacttata

SEQ ID NO: 359262 - DNA, 20 bp, Artificial Sequence
  Description of Artificial Sequence: Synthetic oligonucleotide
  Target: LAMA2; (+) strand; PAM type: YTN; PAM sequence: CTA
aaacttatatgctggaacct

SEQ ID NO: 359263 - DNA, 20 bp, Artificial Sequence
  Description of Artificial Sequence: Synthetic oligonucleotide
  Target: LAMA2; (+) strand; PAM type: YTN; PAM sequence: CTT
atatgctggaacctaatgcc

SEQ ID NO: 359264 - DNA, 20 bp, Artificial Sequence
  Description of Artificial Sequence: Synthetic oligonucleotide
  Target: LAMA2; (+) strand; PAM type: YTN; PAM sequence: TTA
tatgctggaacctaatgcct

SEQ ID NO: 359265 - DNA, 20 bp, Artificial Sequence
  Description of Artificial Sequence: Synthetic oligonucleotide
  Target: LAMA2; (+) strand; PAM type: YTN; PAM sequence: CTG
gaacctaatgcctaatgtga

SEQ ID NO: 359266 - DNA, 20 bp, Artificial Sequence
  Description of Artificial Sequence: Synthetic oligonucleotide
  Target: LAMA2; (+) strand; PAM type: YTN; PAM sequence: CTA
atgcctaatgtgatagtatt

SEQ ID NO: 359267 - DNA, 20 bp, Artificial Sequence
  Description of Artificial Sequence: Synthetic oligonucleotide
  Target: LAMA2; (+) strand; PAM type: YTN; PAM sequence: CTA
atgtgatagtatttagaggt

SEQ ID NO: 359268 - DNA, 20 bp, Artificial Sequence
  Description of Artificial Sequence: Synthetic oligonucleotide
  Target: LAMA2; (+) strand; PAM type: YTN; PAM sequence: TTT
agaggtggggcttttggggg

SEQ ID NO: 359269 - DNA, 20 bp, Artificial Sequence
  Description of Artificial Sequence: Synthetic oligonucleotide
  Target: LAMA2; (+) strand; PAM type: YTN; PAM sequence: TTA
gaggtggggcttttggggga

SEQ ID NO: 359270 - DNA, 20 bp, Artificial Sequence
  Description of Artificial Sequence: Synthetic oligonucleotide
  Target: LAMA2; (+) strand; PAM type: YTN; PAM sequence: CTT
ttgggggagtgattaagtca

SEQ ID NO: 359271 - DNA, 20 bp, Artificial Sequence
  Description of Artificial Sequence: Synthetic oligonucleotide
  Target: LAMA2; (+) strand; PAM type: YTN; PAM sequence: TTT
tgggggagtgattaagtcat

SEQ ID NO: 359272 - DNA, 20 bp, Artificial Sequence
  Description of Artificial Sequence: Synthetic oligonucleotide
  Target: LAMA2; (+) strand; PAM type: YTN; PAM sequence: TTT
gggggagtgattaagtcatg

SEQ ID NO: 359273 - DNA, 20 bp, Artificial Sequence
  Description of Artificial Sequence: Synthetic oligonucleotide
  Target: LAMA2; (+) strand; PAM type: YTN; PAM sequence: TTG
ggggagtgattaagtcatga

SEQ ID NO: 359274 - DNA, 20 bp, Artificial Sequence
  Description of Artificial Sequence: Synthetic oligonucleotide
  Target: LAMA2; (+) strand; PAM type: YTN; PAM sequence: TTA
agtcatgagggctctaatct

SEQ ID NO: 359275 - DNA, 20 bp, Artificial Sequence
  Description of Artificial Sequence: Synthetic oligonucleotide
  Target: LAMA2; (+) strand; PAM type: YTN; PAM sequence: CTC
taatctccatgaatgggatt

SEQ ID NO: 359276 - DNA, 20 bp, Artificial Sequence
  Description of Artificial Sequence: Synthetic oligonucleotide
  Target: LAMA2; (+) strand; PAM type: YTN; PAM sequence: CTA
atctccatgaatgggattaa

SEQ ID NO: 359277 - DNA, 20 bp, Artificial Sequence
  Description of Artificial Sequence: Synthetic oligonucleotide
  Target: LAMA2; (+) strand; PAM type: YTN; PAM sequence: CTC
catgaatgggattaacatcc

SEQ ID NO: 359278 - DNA, 20 bp, Artificial Sequence
  Description of Artificial Sequence: Synthetic oligonucleotide
  Target: LAMA2; (+) strand; PAM type: YTN; PAM sequence: TTA
acatccttacaaaagaggtt

SEQ ID NO: 359279 - DNA, 20 bp, Artificial Sequence
  Description of Artificial Sequence: Synthetic oligonucleotide
  Target: LAMA2; (+) strand; PAM type: YTN; PAM sequence: CTT
acaaaagaggttgaggatgc

SEQ ID NO: 359280 - DNA, 20 bp, Artificial Sequence
  Description of Artificial Sequence: Synthetic oligonucleotide
  Target: LAMA2; (+) strand; PAM type: YTN; PAM sequence: TTA
caaaagaggttgaggatgct

SEQ ID NO: 359281 - DNA, 20 bp, Artificial Sequence
  Description of Artificial Sequence: Synthetic oligonucleotide
  Target: LAMA2; (+) strand; PAM type: YTN; PAM sequence: TTG
aggatgctgccttgcccttt

SEQ ID NO: 359282 - DNA, 20 bp, Artificial Sequence
  Description of Artificial Sequence: Synthetic oligonucleotide
  Target: LAMA2; (+) strand; PAM type: YTN; PAM sequence: CTG
ccttgccctttcctttacgt

SEQ ID NO: 359283 - DNA, 20 bp, Artificial Sequence
  Description of Artificial Sequence: Synthetic oligonucleotide
  Target: LAMA2; (+) strand; PAM type: YTN; PAM sequence: CTT
gccctttcctttacgtgaag

SEQ ID NO: 359284 - DNA, 20 bp, Artificial Sequence
  Description of Artificial Sequence: Synthetic oligonucleotide
  Target: LAMA2; (+) strand; PAM type: YTN; PAM sequence: TTG
ccctttcctttacgtgaagg

SEQ ID NO: 359285 - DNA, 20 bp, Artificial Sequence
  Description of Artificial Sequence: Synthetic oligonucleotide
  Target: LAMA2; (+) strand; PAM type: YTN; PAM sequence: CTT
tcctttacgtgaaggggcag

SEQ ID NO: 359286 - DNA, 20 bp, Artificial Sequence
  Description of Artificial Sequence: Synthetic oligonucleotide
  Target: LAMA2; (+) strand; PAM type: YTN; PAM sequence: TTT
cctttacgtgaaggggcagc

SEQ ID NO: 359287 - DNA, 20 bp, Artificial Sequence
  Description of Artificial Sequence: Synthetic oligonucleotide
  Target: LAMA2; (+) strand; PAM type: YTN; PAM sequence: TTC
ctttacgtgaaggggcagca

SEQ ID NO: 359288 - DNA, 20 bp, Artificial Sequence
  Description of Artificial Sequence: Synthetic oligonucleotide
  Target: LAMA2; (+) strand; PAM type: YTN; PAM sequence: CTT
tacgtgaaggggcagcaagg

SEQ ID NO: 359289 - DNA, 20 bp, Artificial Sequence
  Description of Artificial Sequence: Synthetic oligonucleotide
  Target: LAMA2; (+) strand; PAM type: YTN; PAM sequence: TTT
acgtgaaggggcagcaagga

SEQ ID NO: 359290 - DNA, 20 bp, Artificial Sequence
  Description of Artificial Sequence: Synthetic oligonucleotide
  Target: LAMA2; (+) strand; PAM type: YTN; PAM sequence: TTA
cgtgaaggggcagcaaggag

SEQ ID NO: 359291 - DNA, 20 bp, Artificial Sequence
  Description of Artificial Sequence: Synthetic oligonucleotide
  Target: LAMA2; (+) strand; PAM type: YTN; PAM sequence: CTT
ggaagcagagagcaagccct

SEQ ID NO: 359292 - DNA, 20 bp, Artificial Sequence
  Description of Artificial Sequence: Synthetic oligonucleotide
  Target: LAMA2; (+) strand; PAM type: YTN; PAM sequence: TTG
gaagcagagagcaagccctc

SEQ ID NO: 359293 - DNA, 20 bp, Artificial Sequence
  Description of Artificial Sequence: Synthetic oligonucleotide
  Target: LAMA2; (+) strand; PAM type: YTN; PAM sequence: CTC
accacacatcaaatctgctg

SEQ ID NO: 359294 - DNA, 20 bp, Artificial Sequence
  Description of Artificial Sequence: Synthetic oligonucleotide
  Target: LAMA2; (+) strand; PAM type: YTN; PAM sequence: CTG
ctgatgcctggatcttggat

SEQ ID NO: 359295 - DNA, 20 bp, Artificial Sequence
  Description of Artificial Sequence: Synthetic oligonucleotide
  Target: LAMA2; (+) strand; PAM type: YTN; PAM sequence: CTG
atgcctggatcttggatttc

SEQ ID NO: 359296 - DNA, 20 bp, Artificial Sequence
  Description of Artificial Sequence: Synthetic oligonucleotide
  Target: LAMA2; (+) strand; PAM type: YTN; PAM sequence: CTG
gatcttggatttcctagtct

SEQ ID NO: 359297 - DNA, 20 bp, Artificial Sequence
  Description of Artificial Sequence: Synthetic oligonucleotide
  Target: LAMA2; (+) strand; PAM type: YTN; PAM sequence: CTT
ggatttcctagtctccagca

SEQ ID NO: 359298 - DNA, 20 bp, Artificial Sequence
  Description of Artificial Sequence: Synthetic oligonucleotide
  Target: LAMA2; (+) strand; PAM type: YTN; PAM sequence: TTG
gatttcctagtctccagcac

SEQ ID NO: 359299 - DNA, 20 bp, Artificial Sequence
  Description of Artificial Sequence: Synthetic oligonucleotide
  Target: LAMA2; (+) strand; PAM type: YTN; PAM sequence: TTT
cctagtctccagcactgtga

SEQ ID NO: 359300 - DNA, 20 bp, Artificial Sequence
  Description of Artificial Sequence: Synthetic oligonucleotide
  Target: LAMA2; (+) strand; PAM type: YTN; PAM sequence: TTC
ctagtctccagcactgtgag

SEQ ID NO: 359301 - DNA, 20 bp, Artificial Sequence
  Description of Artificial Sequence: Synthetic oligonucleotide
  Target: LAMA2; (+) strand; PAM type: YTN; PAM sequence: CTA
gtctccagcactgtgagcag

SEQ ID NO: 359302 - DNA, 20 bp, Artificial Sequence
  Description of Artificial Sequence: Synthetic oligonucleotide
  Target: LAMA2; (+) strand; PAM type: YTN; PAM sequence: CTC
cagcactgtgagcagtatat

SEQ ID NO: 359303 - DNA, 20 bp, Artificial Sequence
  Description of Artificial Sequence: Synthetic oligonucleotide
  Target: LAMA2; (+) strand; PAM type: YTN; PAM sequence: CTG
tgagcagtatatttttaatg

SEQ ID NO: 359304 - DNA, 20 bp, Artificial Sequence
  Description of Artificial Sequence: Synthetic oligonucleotide
  Target: LAMA2; (+) strand; PAM type: YTN; PAM sequence: TTT
ttaatgcttaaaaactacct

SEQ ID NO: 359305 - DNA, 20 bp, Artificial Sequence
  Description of Artificial Sequence: Synthetic oligonucleotide
  Target: LAMA2; (+) strand; PAM type: YTN; PAM sequence: TTT
taatgcttaaaaactaccta

SEQ ID NO: 359306 - DNA, 20 bp, Artificial Sequence
  Description of Artificial Sequence: Synthetic oligonucleotide
  Target: LAMA2; (+) strand; PAM type: YTN; PAM sequence: TTT
aatgcttaaaaactacctag

SEQ ID NO: 359307 - DNA, 20 bp, Artificial Sequence
  Description of Artificial Sequence: Synthetic oligonucleotide
  Target: LAMA2; (+) strand; PAM type: YTN; PAM sequence: TTA
atgcttaaaaactacctagt

SEQ ID NO: 359308 - DNA, 20 bp, Artificial Sequence
  Description of Artificial Sequence: Synthetic oligonucleotide
  Target: LAMA2; (+) strand; PAM type: YTN; PAM sequence: CTT
aaaaactacctagtccctgt

SEQ ID NO: 359309 - DNA, 20 bp, Artificial Sequence
  Description of Artificial Sequence: Synthetic oligonucleotide
  Target: LAMA2; (+) strand; PAM type: YTN; PAM sequence: TTA
aaaactacctagtccctgtt

SEQ ID NO: 359310 - DNA, 20 bp, Artificial Sequence
  Description of Artificial Sequence: Synthetic oligonucleotide
  Target: LAMA2; (+) strand; PAM type: YTN; PAM sequence: CTA
cctagtccctgttattttgt

SEQ ID NO: 359311 - DNA, 20 bp, Artificial Sequence
  Description of Artificial Sequence: Synthetic oligonucleotide
  Target: LAMA2; (+) strand; PAM type: YTN; PAM sequence: CTA
gtccctgttattttgttgta

SEQ ID NO: 359312 - DNA, 20 bp, Artificial Sequence
  Description of Artificial Sequence: Synthetic oligonucleotide
  Target: LAMA2; (+) strand; PAM type: YTN; PAM sequence: CTG
ttattttgttgtagcagcct

SEQ ID NO: 359313 - DNA, 20 bp, Artificial Sequence
  Description of Artificial Sequence: Synthetic oligonucleotide
  Target: LAMA2; (+) strand; PAM type: YTN; PAM sequence: TTA
ttttgttgtagcagcctgaa

SEQ ID NO: 359314 - DNA, 20 bp, Artificial Sequence
  Description of Artificial Sequence: Synthetic oligonucleotide
  Target: LAMA2; (+) strand; PAM type: YTN; PAM sequence: TTT
tgttgtagcagcctgaatgc

SEQ ID NO: 359315 - DNA, 20 bp, Artificial Sequence
  Description of Artificial Sequence: Synthetic oligonucleotide
  Target: LAMA2; (+) strand; PAM type: YTN; PAM sequence: TTT
gttgtagcagcctgaatgca

SEQ ID NO: 359316 - DNA, 20 bp, Artificial Sequence
  Description of Artificial Sequence: Synthetic oligonucleotide
  Target: LAMA2; (+) strand; PAM type: YTN; PAM sequence: TTG
ttgtagcagcctgaatgcat

SEQ ID NO: 359317 - DNA, 20 bp, Artificial Sequence
  Description of Artificial Sequence: Synthetic oligonucleotide
  Target: LAMA2; (+) strand; PAM type: YTN; PAM sequence: TTG
tagcagcctgaatgcatcag

SEQ ID NO: 359318 - DNA, 20 bp, Artificial Sequence
  Description of Artificial Sequence: Synthetic oligonucleotide
  Target: LAMA2; (+) strand; PAM type: YTN; PAM sequence: CTG
aatgcatcagtacactttgc

SEQ ID NO: 359319 - DNA, 20 bp, Artificial Sequence
  Description of Artificial Sequence: Synthetic oligonucleotide
  Target: LAMA2; (+) strand; PAM type: YTN; PAM sequence: CTT
tgcaagccagaatacaatac

SEQ ID NO: 359320 - DNA, 20 bp, Artificial Sequence
  Description of Artificial Sequence: Synthetic oligonucleotide
  Target: LAMA2; (+) strand; PAM type: YTN; PAM sequence: TTT
gcaagccagaatacaataca

SEQ ID NO: 359321 - DNA, 20 bp, Artificial Sequence
  Description of Artificial Sequence: Synthetic oligonucleotide
  Target: LAMA2; (+) strand; PAM type: YTN; PAM sequence: TTG
caagccagaatacaatacag

SEQ ID NO: 359322 - DNA, 20 bp, Artificial Sequence
  Description of Artificial Sequence: Synthetic oligonucleotide
  Target: LAMA2; (+) strand; PAM type: YTN; PAM sequence: TTA
aagtattaggaaaaaacaac

SEQ ID NO: 359323 - DNA, 20 bp, Artificial Sequence
  Description of Artificial Sequence: Synthetic oligonucleotide
  Target: LAMA2; (+) strand; PAM type: YTN; PAM sequence: TTA
ggaaaaaacaacgcaagcaa

SEQ ID NO: 359324 - DNA, 20 bp, Artificial Sequence
  Description of Artificial Sequence: Synthetic oligonucleotide
  Target: LAMA2; (+) strand; PAM type: YTN; PAM sequence: CTA
tcagtctataattctttacc

SEQ ID NO: 359325 - DNA, 20 bp, Artificial Sequence
  Description of Artificial Sequence: Synthetic oligonucleotide
  Target: LAMA2; (+) strand; PAM type: YTN; PAM sequence: CTA
taattctttaccaggcaaaa

SEQ ID NO: 359326 - DNA, 20 bp, Artificial Sequence
  Description of Artificial Sequence: Synthetic oligonucleotide
  Target: LAMA2; (+) strand; PAM type: YTN; PAM sequence: TTC
tttaccaggcaaaaatgtct

SEQ ID NO: 359327 - DNA, 20 bp, Artificial Sequence
  Description of Artificial Sequence: Synthetic oligonucleotide
  Target: LAMA2; (+) strand; PAM type: YTN; PAM sequence: CTT
taccaggcaaaaatgtcttc

SEQ ID NO: 359328 - DNA, 20 bp, Artificial Sequence
  Description of Artificial Sequence: Synthetic oligonucleotide
  Target: LAMA2; (+) strand; PAM type: YTN; PAM sequence: TTT
accaggcaaaaatgtcttcc

SEQ ID NO: 359329 - DNA, 20 bp, Artificial Sequence
  Description of Artificial Sequence: Synthetic oligonucleotide
  Target: LAMA2; (+) strand; PAM type: YTN; PAM sequence: TTA
ccaggcaaaaatgtcttcca

SEQ ID NO: 359330 - DNA, 20 bp, Artificial Sequence
  Description of Artificial Sequence: Synthetic oligonucleotide
  Target: LAMA2; (+) strand; PAM type: YTN; PAM sequence: CTT
ccaaaactgaagaaaaaaca

SEQ ID NO: 359331 - DNA, 20 bp, Artificial Sequence
  Description of Artificial Sequence: Synthetic oligonucleotide
  Target: LAMA2; (+) strand; PAM type: YTN; PAM sequence: TTC
caaaactgaagaaaaaacaa

SEQ ID NO: 359332 - DNA, 20 bp, Artificial Sequence
  Description of Artificial Sequence: Synthetic oligonucleotide
  Target: LAMA2; (+) strand; PAM type: YTN; PAM sequence: CTG
aagaaaaaacaaagattgtt

SEQ ID NO: 359333 - DNA, 20 bp, Artificial Sequence
  Description of Artificial Sequence: Synthetic oligonucleotide
  Target: LAMA2; (+) strand; PAM type: YTN; PAM sequence: TTG
tttcagagaaatagaagttg

SEQ ID NO: 359334 - DNA, 20 bp, Artificial Sequence
  Description of Artificial Sequence: Synthetic oligonucleotide
  Target: LAMA2; (+) strand; PAM type: YTN; PAM sequence: TTT
cagagaaatagaagttgaaa

SEQ ID NO: 359335 - DNA, 20 bp, Artificial Sequence
  Description of Artificial Sequence: Synthetic oligonucleotide
  Target: LAMA2; (+) strand; PAM type: YTN; PAM sequence: TTC
agagaaatagaagttgaaag

SEQ ID NO: 359336 - DNA, 20 bp, Artificial Sequence
  Description of Artificial Sequence: Synthetic oligonucleotide
  Target: LAMA2; (+) strand; PAM type: YTN; PAM sequence: TTG
aaagaatgtgtcacagactg

SEQ ID NO: 359337 - DNA, 20 bp, Artificial Sequence
  Description of Artificial Sequence: Synthetic oligonucleotide
  Target: LAMA2; (+) strand; PAM type: YTN; PAM sequence: CTG
atgtacacaagaagaaatgt

SEQ ID NO: 359338 - DNA, 20 bp, Artificial Sequence
  Description of Artificial Sequence: Synthetic oligonucleotide
  Target: LAMA2; (+) strand; PAM type: YTN; PAM sequence: TTC
ttcaggcaaaagaaaaatgt

SEQ ID NO: 359339 - DNA, 20 bp, Artificial Sequence
  Description of Artificial Sequence: Synthetic oligonucleotide
  Target: LAMA2; (+) strand; PAM type: YTN; PAM sequence: CTT
caggcaaaagaaaaatgtta

SEQ ID NO: 359340 - DNA, 20 bp, Artificial Sequence
  Description of Artificial Sequence: Synthetic oligonucleotide
  Target: LAMA2; (+) strand; PAM type: YTN; PAM sequence: TTC
aggcaaaagaaaaatgttac

SEQ ID NO: 359341 - DNA, 20 bp, Artificial Sequence
  Description of Artificial Sequence: Synthetic oligonucleotide
  Target: LAMA2; (+) strand; PAM type: YTN; PAM sequence: TTA
ccagatggaaatttactcct

SEQ ID NO: 359342 - DNA, 20 bp, Artificial Sequence
  Description of Artificial Sequence: Synthetic oligonucleotide
  Target: LAMA2; (+) strand; PAM type: YTN; PAM sequence: TTT
actcctacaaatagaaatta

SEQ ID NO: 359343 - DNA, 20 bp, Artificial Sequence
  Description of Artificial Sequence: Synthetic oligonucleotide
  Target: LAMA2; (+) strand; PAM type: YTN; PAM sequence: TTA
ctcctacaaatagaaattaa

SEQ ID NO: 359344 - DNA, 20 bp, Artificial Sequence
  Description of Artificial Sequence: Synthetic oligonucleotide
  Target: LAMA2; (+) strand; PAM type: YTN; PAM sequence: CTC
ctacaaatagaaattaagtg

SEQ ID NO: 359345 - DNA, 20 bp, Artificial Sequence
  Description of Artificial Sequence: Synthetic oligonucleotide
  Target: LAMA2; (+) strand; PAM type: YTN; PAM sequence: CTA
caaatagaaattaagtgtat

SEQ ID NO: 359346 - DNA, 20 bp, Artificial Sequence
  Description of Artificial Sequence: Synthetic oligonucleotide
  Target: LAMA2; (+) strand; PAM type: YTN; PAM sequence: TTA
agtgtatcaaacaggtgaat

SEQ ID NO: 359347 - DNA, 20 bp, Artificial Sequence
  Description of Artificial Sequence: Synthetic oligonucleotide
  Target: LAMA2; (+) strand; PAM type: YTN; PAM sequence: CTT
tgtcactagtgctagctgtc

SEQ ID NO: 359348 - DNA, 20 bp, Artificial Sequence
  Description of Artificial Sequence: Synthetic oligonucleotide
  Target: LAMA2; (+) strand; PAM type: YTN; PAM sequence: TTT
gtcactagtgctagctgtca

SEQ ID NO: 359349 - DNA, 20 bp, Artificial Sequence
  Description of Artificial Sequence: Synthetic oligonucleotide
  Target: LAMA2; (+) strand; PAM type: YTN; PAM sequence: TTG
tcactagtgctagctgtcac

SEQ ID NO: 359350 - DNA, 20 bp, Artificial Sequence
  Description of Artificial Sequence: Synthetic oligonucleotide
  Target: LAMA2; (+) strand; PAM type: YTN; PAM sequence: CTA
gtgctagctgtcacaagacc

SEQ ID NO: 359351 - DNA, 20 bp, Artificial Sequence
  Description of Artificial Sequence: Synthetic oligonucleotide
  Target: LAMA2; (+) strand; PAM type: YTN; PAM sequence: CTA
gctgtcacaagacctctagc

SEQ ID NO: 359352 - DNA, 20 bp, Artificial Sequence
  Description of Artificial Sequence: Synthetic oligonucleotide
  Target: LAMA2; (+) strand; PAM type: YTN; PAM sequence: CTG
tcacaagacctctagccagt

SEQ ID NO: 359353 - DNA, 20 bp, Artificial Sequence
  Description of Artificial Sequence: Synthetic oligonucleotide
  Target: LAMA2; (+) strand; PAM type: YTN; PAM sequence: CTC
tagccagtcatgttttcagc

SEQ ID NO: 359354 - DNA, 20 bp, Artificial Sequence
  Description of Artificial Sequence: Synthetic oligonucleotide
  Target: LAMA2; (+) strand; PAM type: YTN; PAM sequence: CTA
gccagtcatgttttcagctg

SEQ ID NO: 359355 - DNA, 20 bp, Artificial Sequence
  Description of Artificial Sequence: Synthetic oligonucleotide
  Target: LAMA2; (+) strand; PAM type: YTN; PAM sequence: TTT
tcagctgtagggcctaacac

SEQ ID NO: 359356 - DNA, 20 bp, Artificial Sequence
  Description of Artificial Sequence: Synthetic oligonucleotide
  Target: LAMA2; (+) strand; PAM type: YTN; PAM sequence: TTT
cagctgtagggcctaacacc

SEQ ID NO: 359357 - DNA, 20 bp, Artificial Sequence
  Description of Artificial Sequence: Synthetic oligonucleotide
  Target: LAMA2; (+) strand; PAM type: YTN; PAM sequence: TTC
agctgtagggcctaacacca

SEQ ID NO: 359358 - DNA, 20 bp, Artificial Sequence
  Description of Artificial Sequence: Synthetic oligonucleotide
  Target: LAMA2; (+) strand; PAM type: YTN; PAM sequence: CTG
tagggcctaacaccatggtt

SEQ ID NO: 359359 - DNA, 20 bp, Artificial Sequence
  Description of Artificial Sequence: Synthetic oligonucleotide
  Target: LAMA2; (+) strand; PAM type: YTN; PAM sequence: CTA
acaccatggttaaggaatgg

SEQ ID NO: 359360 - DNA, 20 bp, Artificial Sequence
  Description of Artificial Sequence: Synthetic oligonucleotide
  Target: LAMA2; (+) strand; PAM type: YTN; PAM sequence: TTA
aggaatggttacctaaatac

SEQ ID NO: 359361 - DNA, 20 bp, Artificial Sequence
  Description of Artificial Sequence: Synthetic oligonucleotide
  Target: LAMA2; (+) strand; PAM type: YTN; PAM sequence: TTA
cctaaatacacaaacttaaa

SEQ ID NO: 359362 - DNA, 20 bp, Artificial Sequence
  Description of Artificial Sequence: Synthetic oligonucleotide
  Target: LAMA2; (+) strand; PAM type: YTN; PAM sequence: CTA
aatacacaaacttaaagtag

SEQ ID NO: 359363 - DNA, 20 bp, Artificial Sequence
  Description of Artificial Sequence: Synthetic oligonucleotide
  Target: LAMA2; (+) strand; PAM type: YTN; PAM sequence: CTT
aaagtagaacttcaaatact

SEQ ID NO: 359364 - DNA, 20 bp, Artificial Sequence
  Description of Artificial Sequence: Synthetic oligonucleotide
  Target: LAMA2; (+) strand; PAM type: YTN; PAM sequence: TTA
aagtagaacttcaaatactt

SEQ ID NO: 359365 - DNA, 20 bp, Artificial Sequence
  Description of Artificial Sequence: Synthetic oligonucleotide
  Target: LAMA2; (+) strand; PAM type: YTN; PAM sequence: CTT
caaatacttcctgtataaaa

SEQ ID NO: 359366 - DNA, 20 bp, Artificial Sequence
  Description of Artificial Sequence: Synthetic oligonucleotide
  Target: LAMA2; (+) strand; PAM type: YTN; PAM sequence: TTC
aaatacttcctgtataaaat

SEQ ID NO: 359367 - DNA, 20 bp, Artificial Sequence
  Description of Artificial Sequence: Synthetic oligonucleotide
  Target: LAMA2; (+) strand; PAM type: YTN; PAM sequence: CTT
cctgtataaaattttccctc

SEQ ID NO: 359368 - DNA, 20 bp, Artificial Sequence
  Description of Artificial Sequence: Synthetic oligonucleotide
  Target: LAMA2; (+) strand; PAM type: YTN; PAM sequence: TTC
ctgtataaaattttccctct

SEQ ID NO: 359369 - DNA, 20 bp, Artificial Sequence
  Description of Artificial Sequence: Synthetic oligonucleotide
  Target: LAMA2; (+) strand; PAM type: YTN; PAM sequence: CTG
tataaaattttccctctgaa

SEQ ID NO: 359370 - DNA, 20 bp, Artificial Sequence
  Description of Artificial Sequence: Synthetic oligonucleotide
  Target: LAMA2; (+) strand; PAM type: YTN; PAM sequence: TTT
tccctctgaagttttaaaaa

SEQ ID NO: 359371 - DNA, 20 bp, Artificial Sequence
  Description of Artificial Sequence: Synthetic oligonucleotide
  Target: LAMA2; (+) strand; PAM type: YTN; PAM sequence: TTT
ccctctgaagttttaaaaag

SEQ ID NO: 359372 - DNA, 20 bp, Artificial Sequence
  Description of Artificial Sequence: Synthetic oligonucleotide
  Target: LAMA2; (+) strand; PAM type: YTN; PAM sequence: TTC
cctctgaagttttaaaaaga

SEQ ID NO: 359373 - DNA, 20 bp, Artificial Sequence
  Description of Artificial Sequence: Synthetic oligonucleotide
  Target: LAMA2; (+) strand; PAM type: YTN; PAM sequence: CTC
tgaagttttaaaaagaaaga

SEQ ID NO: 359374 - DNA, 20 bp, Artificial Sequence
  Description of Artificial Sequence: Synthetic oligonucleotide
  Target: LAMA2; (+) strand; PAM type: YTN; PAM sequence: CTG
aagttttaaaaagaaagact

SEQ ID NO: 359375 - DNA, 20 bp, Artificial Sequence
  Description of Artificial Sequence: Synthetic oligonucleotide
  Target: LAMA2; (+) strand; PAM type: YTN; PAM sequence: TTT
taaaaagaaagactgggttg

SEQ ID NO: 359376 - DNA, 20 bp, Artificial Sequence
  Description of Artificial Sequence: Synthetic oligonucleotide
  Target: LAMA2; (+) strand; PAM type: YTN; PAM sequence: TTT
aaaaagaaagactgggttgt

SEQ ID NO: 359377 - DNA, 20 bp, Artificial Sequence
  Description of Artificial Sequence: Synthetic oligonucleotide
  Target: LAMA2; (+) strand; PAM type: YTN; PAM sequence: TTA
aaaagaaagactgggttgta

SEQ ID NO: 359378 - DNA, 20 bp, Artificial Sequence
  Description of Artificial Sequence: Synthetic oligonucleotide
  Target: LAMA2; (+) strand; PAM type: YTN; PAM sequence: CTG
ggttgtaagaagagtataaa

SEQ ID NO: 359379 - DNA, 20 bp, Artificial Sequence
  Description of Artificial Sequence: Synthetic oligonucleotide
  Target: LAMA2; (+) strand; PAM type: YTN; PAM sequence: TTG
taagaagagtataaaaaagg

SEQ ID NO: 359380 - DNA, 20 bp, Artificial Sequence
  Description of Artificial Sequence: Synthetic oligonucleotide
  Target: LAMA2; (+) strand; PAM type: YTN; PAM sequence: CTT
gcttctccagctctcatttc

SEQ ID NO: 359381 - DNA, 20 bp, Artificial Sequence
  Description of Artificial Sequence: Synthetic oligonucleotide
  Target: LAMA2; (+) strand; PAM type: YTN; PAM sequence: TTG
cttctccagctctcatttct

SEQ ID NO: 359382 - DNA, 20 bp, Artificial Sequence
  Description of Artificial Sequence: Synthetic oligonucleotide
  Target: LAMA2; (+) strand; PAM type: YTN; PAM sequence: CTT
ctccagctctcatttctcat

SEQ ID NO: 359383 - DNA, 20 bp, Artificial Sequence
  Description of Artificial Sequence: Synthetic oligonucleotide
  Target: LAMA2; (+) strand; PAM type: YTN; PAM sequence: TTC
tccagctctcatttctcatt

SEQ ID NO: 359384 - DNA, 20 bp, Artificial Sequence
  Description of Artificial Sequence: Synthetic oligonucleotide
  Target: LAMA2; (+) strand; PAM type: YTN; PAM sequence: CTC
cagctctcatttctcatttc

SEQ ID NO: 359385 - DNA, 20 bp, Artificial Sequence
  Description of Artificial Sequence: Synthetic oligonucleotide
  Target: LAMA2; (+) strand; PAM type: YTN; PAM sequence: CTC
tcatttctcatttcaaactt

SEQ ID NO: 359386 - DNA, 20 bp, Artificial Sequence
  Description of Artificial Sequence: Synthetic oligonucleotide
  Target: LAMA2; (+) strand; PAM type: YTN; PAM sequence: CTC
atttctcatttcaaacttaa

SEQ ID NO: 359387 - DNA, 20 bp, Artificial Sequence
  Description of Artificial Sequence: Synthetic oligonucleotide
  Target: LAMA2; (+) strand; PAM type: YTN; PAM sequence: TTT
ctcatttcaaacttaaagaa

SEQ ID NO: 359388 - DNA, 20 bp, Artificial Sequence
  Description of Artificial Sequence: Synthetic oligonucleotide
  Target: LAMA2; (+) strand; PAM type: YTN; PAM sequence: TTC
tcatttcaaacttaaagaaa

SEQ ID NO: 359389 - DNA, 20 bp, Artificial Sequence
  Description of Artificial Sequence: Synthetic oligonucleotide
  Target: LAMA2; (+) strand; PAM type: YTN; PAM sequence: CTC
atttcaaacttaaagaaaga

SEQ ID NO: 359390 - DNA, 20 bp, Artificial Sequence
  Description of Artificial Sequence: Synthetic oligonucleotide
  Target: LAMA2; (+) strand; PAM type: YTN; PAM sequence: TTT
caaacttaaagaaagaaaac

SEQ ID NO: 359391 - DNA, 20 bp, Artificial Sequence
  Description of Artificial Sequence: Synthetic oligonucleotide
  Target: LAMA2; (+) strand; PAM type: YTN; PAM sequence: TTC
aaacttaaagaaagaaaacc

SEQ ID NO: 359392 - DNA, 20 bp, Artificial Sequence
  Description of Artificial Sequence: Synthetic oligonucleotide
  Target: LAMA2; (+) strand; PAM type: YTN; PAM sequence: CTT
aaagaaagaaaaccagcacc

SEQ ID NO: 359393 - DNA, 20 bp, Artificial Sequence
  Description of Artificial Sequence: Synthetic oligonucleotide
  Target: LAMA2; (+) strand; PAM type: YTN; PAM sequence: TTA
aagaaagaaaaccagcacca

SEQ ID NO: 359394 - DNA, 20 bp, Artificial Sequence
  Description of Artificial Sequence: Synthetic oligonucleotide
  Target: LAMA2; (+) strand; PAM type: YTN; PAM sequence: TTT
gaaagtgtttcaataaactc

SEQ ID NO: 359395 - DNA, 20 bp, Artificial Sequence
  Description of Artificial Sequence: Synthetic oligonucleotide
  Target: LAMA2; (+) strand; PAM type: YTN; PAM sequence: TTG
aaagtgtttcaataaactct

SEQ ID NO: 359396 - DNA, 20 bp, Artificial Sequence
  Description of Artificial Sequence: Synthetic oligonucleotide
  Target: LAMA2; (+) strand; PAM type: YTN; PAM sequence: TTT
caataaactctcaatgtaaa

SEQ ID NO: 359397 - DNA, 20 bp, Artificial Sequence
  Description of Artificial Sequence: Synthetic oligonucleotide
  Target: LAMA2; (+) strand; PAM type: YTN; PAM sequence: TTC
aataaactctcaatgtaaaa

SEQ ID NO: 359398 - DNA, 20 bp, Artificial Sequence
  Description of Artificial Sequence: Synthetic oligonucleotide
  Target: LAMA2; (+) strand; PAM type: YTN; PAM sequence: CTC
tcaatgtaaaacttcacgtt

SEQ ID NO: 359399 - DNA, 20 bp, Artificial Sequence
  Description of Artificial Sequence: Synthetic oligonucleotide
  Target: LAMA2; (+) strand; PAM type: YTN; PAM sequence: CTC
aatgtaaaacttcacgttgt

SEQ ID NO: 359400 - DNA, 20 bp, Artificial Sequence
  Description of Artificial Sequence: Synthetic oligonucleotide
  Target: LAMA2; (+) strand; PAM type: YTN; PAM sequence: CTT
cacgttgttttctgtagctt

SEQ ID NO: 359401 - DNA, 20 bp, Artificial Sequence
  Description of Artificial Sequence: Synthetic oligonucleotide
  Target: LAMA2; (+) strand; PAM type: YTN; PAM sequence: TTC
acgttgttttctgtagcttt

SEQ ID NO: 359402 - DNA, 20 bp, Artificial Sequence
  Description of Artificial Sequence: Synthetic oligonucleotide
  Target: LAMA2; (+) strand; PAM type: YTN; PAM sequence: TTG
ttttctgtagcttttcagta

SEQ ID NO: 359403 - DNA, 20 bp, Artificial Sequence
  Description of Artificial Sequence: Synthetic oligonucleotide
  Target: LAMA2; (+) strand; PAM type: YTN; PAM sequence: TTT
tctgtagcttttcagtaact

SEQ ID NO: 359404 - DNA, 20 bp, Artificial Sequence
  Description of Artificial Sequence: Synthetic oligonucleotide
  Target: LAMA2; (+) strand; PAM type: YTN; PAM sequence: TTT
ctgtagcttttcagtaactt

SEQ ID NO: 359405 - DNA, 20 bp, Artificial Sequence
  Description of Artificial Sequence: Synthetic oligonucleotide
  Target: LAMA2; (+) strand; PAM type: YTN; PAM sequence: TTC
tgtagcttttcagtaacttc

SEQ ID NO: 359406 - DNA, 20 bp, Artificial Sequence
  Description of Artificial Sequence: Synthetic oligonucleotide
  Target: LAMA2; (+) strand; PAM type: YTN; PAM sequence: CTG
tagcttttcagtaacttctt

SEQ ID NO: 359407 - DNA, 20 bp, Artificial Sequence
  Description of Artificial Sequence: Synthetic oligonucleotide
  Target: LAMA2; (+) strand; PAM type: YTN; PAM sequence: CTT
ttcagtaacttcttacactc

SEQ ID NO: 359408 - DNA, 20 bp, Artificial Sequence
  Description of Artificial Sequence: Synthetic oligonucleotide
  Target: LAMA2; (+) strand; PAM type: YTN; PAM sequence: TTT
tcagtaacttcttacactca

SEQ ID NO: 359409 - DNA, 20 bp, Artificial Sequence
  Description of Artificial Sequence: Synthetic oligonucleotide
  Target: LAMA2; (+) strand; PAM type: YTN; PAM sequence: TTT
cagtaacttcttacactcat

SEQ ID NO: 359410 - DNA, 20 bp, Artificial Sequence
  Description of Artificial Sequence: Synthetic oligonucleotide
  Target: LAMA2; (+) strand; PAM type: YTN; PAM sequence: TTC
agtaacttcttacactcatg

SEQ ID NO: 359411 - DNA, 20 bp, Artificial Sequence
  Description of Artificial Sequence: Synthetic oligonucleotide
  Target: LAMA2; (+) strand; PAM type: YTN; PAM sequence: CTT
cttacactcatgttctatgt

SEQ ID NO: 359412 - DNA, 20 bp, Artificial Sequence
  Description of Artificial Sequence: Synthetic oligonucleotide
  Target: LAMA2; (+) strand; PAM type: YTN; PAM sequence: TTC
ttacactcatgttctatgtg

SEQ ID NO: 359413 - DNA, 20 bp, Artificial Sequence
  Description of Artificial Sequence: Synthetic oligonucleotide
  Target: LAMA2; (+) strand; PAM type: YTN; PAM sequence: CTT
acactcatgttctatgtgcg

SEQ ID NO: 359414 - DNA, 20 bp, Artificial Sequence
  Description of Artificial Sequence: Synthetic oligonucleotide
  Target: LAMA2; (+) strand; PAM type: YTN; PAM sequence: TTA
cactcatgttctatgtgcgg

SEQ ID NO: 359415 - DNA, 20 bp, Artificial Sequence
  Description of Artificial Sequence: Synthetic oligonucleotide
  Target: LAMA2; (+) strand; PAM type: YTN; PAM sequence: CTC
atgttctatgtgcggctcag

SEQ ID NO: 359416 - DNA, 20 bp, Artificial Sequence
  Description of Artificial Sequence: Synthetic oligonucleotide
  Target: LAMA2; (+) strand; PAM type: YTN; PAM sequence: TTC
tatgtgcggctcagtgggga

SEQ ID NO: 359417 - DNA, 20 bp, Artificial Sequence
  Description of Artificial Sequence: Synthetic oligonucleotide
  Target: LAMA2; (+) strand; PAM type: YTN; PAM sequence: CTA
tgtgcggctcagtggggaac

SEQ ID NO: 359418 - DNA, 20 bp, Artificial Sequence
  Description of Artificial Sequence: Synthetic oligonucleotide
  Target: LAMA2; (+) strand; PAM type: YTN; PAM sequence: CTC
agtggggaactatctgtatc

SEQ ID NO: 359419 - DNA, 20 bp, Artificial Sequence
  Description of Artificial Sequence: Synthetic oligonucleotide
  Target: LAMA2; (+) strand; PAM type: YTN; PAM sequence: CTA
tctgtatccagtggattgtt

SEQ ID NO: 359420 - DNA, 20 bp, Artificial Sequence
  Description of Artificial Sequence: Synthetic oligonucleotide
  Target: LAMA2; (+) strand; PAM type: YTN; PAM sequence: CTG
tatccagtggattgttggtt

SEQ ID NO: 359421 - DNA, 20 bp, Artificial Sequence
  Description of Artificial Sequence: Synthetic oligonucleotide
  Target: LAMA2; (+) strand; PAM type: YTN; PAM sequence: TTG
ttggttctgacacactagcc

SEQ ID NO: 359422 - DNA, 20 bp, Artificial Sequence
  Description of Artificial Sequence: Synthetic oligonucleotide
  Target: LAMA2; (+) strand; PAM type: YTN; PAM sequence: TTG
gttctgacacactagcctac

SEQ ID NO: 359423 - DNA, 20 bp, Artificial Sequence
  Description of Artificial Sequence: Synthetic oligonucleotide
  Target: LAMA2; (+) strand; PAM type: YTN; PAM sequence: TTC
tgacacactagcctacgtgc

SEQ ID NO: 359424 - DNA, 20 bp, Artificial Sequence
  Description of Artificial Sequence: Synthetic oligonucleotide
  Target: LAMA2; (+) strand; PAM type: YTN; PAM sequence: CTG
acacactagcctacgtgcat

SEQ ID NO: 359425 - DNA, 20 bp, Artificial Sequence
  Description of Artificial Sequence: Synthetic oligonucleotide
  Target: LAMA2; (+) strand; PAM type: YTN; PAM sequence: CTA
gcctacgtgcatatggggca

SEQ ID NO: 359426 - DNA, 20 bp, Artificial Sequence
  Description of Artificial Sequence: Synthetic oligonucleotide
  Target: LAMA2; (+) strand; PAM type: YTN; PAM sequence: CTA
cgtgcatatggggcaacccc

SEQ ID NO: 359427 - DNA, 20 bp, Artificial Sequence
  Description of Artificial Sequence: Synthetic oligonucleotide
  Target: LAMA2; (+) strand; PAM type: YTN; PAM sequence: CTG
gcccctgccacttgcaatag

SEQ ID NO: 359428 - DNA, 20 bp, Artificial Sequence
  Description of Artificial Sequence: Synthetic oligonucleotide
  Target: LAMA2; (+) strand; PAM type: YTN; PAM sequence: CTG
ccacttgcaatagatcagac

SEQ ID NO: 359429 - DNA, 20 bp, Artificial Sequence
  Description of Artificial Sequence: Synthetic oligonucleotide
  Target: LAMA2; (+) strand; PAM type: YTN; PAM sequence: CTT
gcaatagatcagacccaccc

SEQ ID NO: 359430 - DNA, 20 bp, Artificial Sequence
  Description of Artificial Sequence: Synthetic oligonucleotide
  Target: LAMA2; (+) strand; PAM type: YTN; PAM sequence: TTG
caatagatcagacccacccc

SEQ ID NO: 359431 - DNA, 20 bp, Artificial Sequence
  Description of Artificial Sequence: Synthetic oligonucleotide
  Target: LAMA2; (+) strand; PAM type: YTN; PAM sequence: CTT
gtggttgagtgaggcagtat

SEQ ID NO: 359432 - DNA, 20 bp, Artificial Sequence
  Description of Artificial Sequence: Synthetic oligonucleotide
  Target: LAMA2; (+) strand; PAM type: YTN; PAM sequence: TTG
tggttgagtgaggcagtatt

SEQ ID NO: 359433 - DNA, 20 bp, Artificial Sequence
  Description of Artificial Sequence: Synthetic oligonucleotide
  Target: LAMA2; (+) strand; PAM type: YTN; PAM sequence: TTG
agtgaggcagtattatgtca

SEQ ID NO: 359434 - DNA, 20 bp, Artificial Sequence
  Description of Artificial Sequence: Synthetic oligonucleotide
  Target: LAMA2; (+) strand; PAM type: YTN; PAM sequence: TTA
tgtcaattctaaacctggca

SEQ ID NO: 359435 - DNA, 20 bp, Artificial Sequence
  Description of Artificial Sequence: Synthetic oligonucleotide
  Target: LAMA2; (+) strand; PAM type: YTN; PAM sequence: TTC
taaacctggcattttgttta

SEQ ID NO: 359436 - DNA, 20 bp, Artificial Sequence
  Description of Artificial Sequence: Synthetic oligonucleotide
  Target: LAMA2; (+) strand; PAM type: YTN; PAM sequence: CTA
aacctggcattttgtttact

SEQ ID NO: 359437 - DNA, 20 bp, Artificial Sequence
  Description of Artificial Sequence: Synthetic oligonucleotide
  Target: LAMA2; (+) strand; PAM type: YTN; PAM sequence: CTG
gcattttgtttactgttgtt

SEQ ID NO: 359438 - DNA, 20 bp, Artificial Sequence
  Description of Artificial Sequence: Synthetic oligonucleotide
  Target: LAMA2; (+) strand; PAM type: YTN; PAM sequence: TTT
tgtttactgttgttgagtgt

SEQ ID NO: 359439 - DNA, 20 bp, Artificial Sequence
  Description of Artificial Sequence: Synthetic oligonucleotide
  Target: LAMA2; (+) strand; PAM type: YTN; PAM sequence: TTT
gtttactgttgttgagtgtt

SEQ ID NO: 359440 - DNA, 20 bp, Artificial Sequence
  Description of Artificial Sequence: Synthetic oligonucleotide
  Target: LAMA2; (+) strand; PAM type: YTN; PAM sequence: TTG
tttactgttgttgagtgttg

SEQ ID NO: 359441 - DNA, 20 bp, Artificial Sequence
  Description of Artificial Sequence: Synthetic oligonucleotide
  Target: LAMA2; (+) strand; PAM type: YTN; PAM sequence: TTT
actgttgttgagtgttgttg

SEQ ID NO: 359442 - DNA, 20 bp, Artificial Sequence
  Description of Artificial Sequence: Synthetic oligonucleotide
  Target: LAMA2; (+) strand; PAM type: YTN; PAM sequence: TTA
ctgttgttgagtgttgttgg

SEQ ID NO: 359443 - DNA, 20 bp, Artificial Sequence
  Description of Artificial Sequence: Synthetic oligonucleotide
  Target: LAMA2; (+) strand; PAM type: YTN; PAM sequence: CTG
ttgttgagtgttgttggtag

SEQ ID NO: 359444 - DNA, 20 bp, Artificial Sequence
  Description of Artificial Sequence: Synthetic oligonucleotide
  Target: LAMA2; (+) strand; PAM type: YTN; PAM sequence: TTG
ttgagtgttgttggtagtgg

SEQ ID NO: 359445 - DNA, 20 bp, Artificial Sequence
  Description of Artificial Sequence: Synthetic oligonucleotide
  Target: LAMA2; (+) strand; PAM type: YTN; PAM sequence: TTG
agtgttgttggtagtgggag

SEQ ID NO: 359446 - DNA, 20 bp, Artificial Sequence
  Description of Artificial Sequence: Synthetic oligonucleotide
  Target: LAMA2; (+) strand; PAM type: YTN; PAM sequence: TTG
ttggtagtgggagaagaaaa

SEQ ID NO: 359447 - DNA, 20 bp, Artificial Sequence
  Description of Artificial Sequence: Synthetic oligonucleotide
  Target: LAMA2; (+) strand; PAM type: YTN; PAM sequence: TTG
gtagtgggagaagaaaatag

SEQ ID NO: 359448 - DNA, 20 bp, Artificial Sequence
  Description of Artificial Sequence: Synthetic oligonucleotide
  Target: LAMA2; (+) strand; PAM type: YTN; PAM sequence: CTA
caagctaaggagagagggct

SEQ ID NO: 359449 - DNA, 20 bp, Artificial Sequence
  Description of Artificial Sequence: Synthetic oligonucleotide
  Target: LAMA2; (+) strand; PAM type: YTN; PAM sequence: CTA
aggagagagggctgcaacag

SEQ ID NO: 359450 - DNA, 20 bp, Artificial Sequence
  Description of Artificial Sequence: Synthetic oligonucleotide
  Target: LAMA2; (+) strand; PAM type: YTN; PAM sequence: CTG
caacagcttaattccttgta

SEQ ID NO: 359451 - DNA, 20 bp, Artificial Sequence
  Description of Artificial Sequence: Synthetic oligonucleotide
  Target: LAMA2; (+) strand; PAM type: YTN; PAM sequence: CTT
aattccttgtagtgttcata

SEQ ID NO: 359452 - DNA, 20 bp, Artificial Sequence
  Description of Artificial Sequence: Synthetic oligonucleotide
  Target: LAMA2; (+) strand; PAM type: YTN; PAM sequence: TTA
attccttgtagtgttcataa

SEQ ID NO: 359453 - DNA, 20 bp, Artificial Sequence
  Description of Artificial Sequence: Synthetic oligonucleotide
  Target: LAMA2; (+) strand; PAM type: YTN; PAM sequence: TTC
cttgtagtgttcataaagaa

SEQ ID NO: 359454 - DNA, 20 bp, Artificial Sequence
  Description of Artificial Sequence: Synthetic oligonucleotide
  Target: LAMA2; (+) strand; PAM type: YTN; PAM sequence: CTT
gtagtgttcataaagaacca

SEQ ID NO: 359455 - DNA, 20 bp, Artificial Sequence
  Description of Artificial Sequence: Synthetic oligonucleotide
  Target: LAMA2; (+) strand; PAM type: YTN; PAM sequence: TTG
tagtgttcataaagaaccaa

SEQ ID NO: 359456 - DNA, 20 bp, Artificial Sequence
  Description of Artificial Sequence: Synthetic oligonucleotide
  Target: LAMA2; (+) strand; PAM type: YTN; PAM sequence: TTC
ataaagaaccaatcctgctg

SEQ ID NO: 359457 - DNA, 20 bp, Artificial Sequence
  Description of Artificial Sequence: Synthetic oligonucleotide
  Target: LAMA2; (+) strand; PAM type: YTN; PAM sequence: CTG
ctgacagcttgatctcacat

SEQ ID NO: 359458 - DNA, 20 bp, Artificial Sequence
  Description of Artificial Sequence: Synthetic oligonucleotide
  Target: LAMA2; (+) strand; PAM type: YTN; PAM sequence: CTG
acagcttgatctcacatagc

SEQ ID NO: 359459 - DNA, 20 bp, Artificial Sequence
  Description of Artificial Sequence: Synthetic oligonucleotide
  Target: LAMA2; (+) strand; PAM type: YTN; PAM sequence: CTT
gatctcacatagcaaaataa

SEQ ID NO: 359460 - DNA, 20 bp, Artificial Sequence
  Description of Artificial Sequence: Synthetic oligonucleotide
  Target: LAMA2; (+) strand; PAM type: YTN; PAM sequence: TTG
atctcacatagcaaaataat

SEQ ID NO: 359461 - DNA, 20 bp, Artificial Sequence
  Description of Artificial Sequence: Synthetic oligonucleotide
  Target: LAMA2; (+) strand; PAM type: YTN; PAM sequence: CTC
acatagcaaaataatacatg

SEQ ID NO: 359462 - DNA, 20 bp, Artificial Sequence
  Description of Artificial Sequence: Synthetic oligonucleotide
  Target: LAMA2; (+) strand; PAM type: YTN; PAM sequence: CTT
tttttcctccttgatttcca

SEQ ID NO: 359463 - DNA, 20 bp, Artificial Sequence
  Description of Artificial Sequence: Synthetic oligonucleotide
  Target: LAMA2; (+) strand; PAM type: YTN; PAM sequence: TTT
ttttcctccttgatttccat

SEQ ID NO: 359464 - DNA, 20 bp, Artificial Sequence
  Description of Artificial Sequence: Synthetic oligonucleotide
  Target: LAMA2; (+) strand; PAM type: YTN; PAM sequence: TTT
tttcctccttgatttccatg

SEQ ID NO: 359465 - DNA, 20 bp, Artificial Sequence
  Description of Artificial Sequence: Synthetic oligonucleotide
  Target: LAMA2; (+) strand; PAM type: YTN; PAM sequence: TTT
ttcctccttgatttccatga

SEQ ID NO: 359466 - DNA, 20 bp, Artificial Sequence
  Description of Artificial Sequence: Synthetic oligonucleotide
  Target: LAMA2; (+) strand; PAM type: YTN; PAM sequence: TTT
tcctccttgatttccatgag

SEQ ID NO: 359467 - DNA, 20 bp, Artificial Sequence
  Description of Artificial Sequence: Synthetic oligonucleotide
  Target: LAMA2; (+) strand; PAM type: YTN; PAM sequence: TTT
cctccttgatttccatgaga

SEQ ID NO: 359468 - DNA, 20 bp, Artificial Sequence
  Description of Artificial Sequence: Synthetic oligonucleotide
  Target: LAMA2; (+) strand; PAM type: YTN; PAM sequence: TTC
ctccttgatttccatgagaa

SEQ ID NO: 359469 - DNA, 20 bp, Artificial Sequence
  Description of Artificial Sequence: Synthetic oligonucleotide
  Target: LAMA2; (+) strand; PAM type: YTN; PAM sequence: CTC
cttgatttccatgagaattg

SEQ ID NO: 359470 - DNA, 20 bp, Artificial Sequence
  Description of Artificial Sequence: Synthetic oligonucleotide
  Target: LAMA2; (+) strand; PAM type: YTN; PAM sequence: CTT
gatttccatgagaattgggt

SEQ ID NO: 359471 - DNA, 20 bp, Artificial Sequence
  Description of Artificial Sequence: Synthetic oligonucleotide
  Target: LAMA2; (+) strand; PAM type: YTN; PAM sequence: TTG
atttccatgagaattgggtg

SEQ ID NO: 359472 - DNA, 20 bp, Artificial Sequence
  Description of Artificial Sequence: Synthetic oligonucleotide
  Target: LAMA2; (+) strand; PAM type: YTN; PAM sequence: TTT
ccatgagaattgggtgaaag

SEQ ID NO: 359473 - DNA, 20 bp, Artificial Sequence
  Description of Artificial Sequence: Synthetic oligonucleotide
  Target: LAMA2; (+) strand; PAM type: YTN; PAM sequence: TTC
catgagaattgggtgaaagc

SEQ ID NO: 359474 - DNA, 20 bp, Artificial Sequence
  Description of Artificial Sequence: Synthetic oligonucleotide
  Target: LAMA2; (+) strand; PAM type: YTN; PAM sequence: TTG
ggtgaaagctattactcata

SEQ ID NO: 359475 - DNA, 20 bp, Artificial Sequence
  Description of Artificial Sequence: Synthetic oligonucleotide
  Target: LAMA2; (+) strand; PAM type: YTN; PAM sequence: CTA
ttactcatataagcggatga

SEQ ID NO: 359476 - DNA, 20 bp, Artificial Sequence
  Description of Artificial Sequence: Synthetic oligonucleotide
  Target: LAMA2; (+) strand; PAM type: YTN; PAM sequence: TTA
ctcatataagcggatgacct

SEQ ID NO: 359477 - DNA, 20 bp, Artificial Sequence
  Description of Artificial Sequence: Synthetic oligonucleotide
  Target: LAMA2; (+) strand; PAM type: YTN; PAM sequence: CTC
atataagcggatgacctgat

SEQ ID NO: 359478 - DNA, 20 bp, Artificial Sequence
  Description of Artificial Sequence: Synthetic oligonucleotide
  Target: LAMA2; (+) strand; PAM type: YTN; PAM sequence: CTG
attctctcatttttgtggtt

SEQ ID NO: 359479 - DNA, 20 bp, Artificial Sequence
  Description of Artificial Sequence: Synthetic oligonucleotide
  Target: LAMA2; (+) strand; PAM type: YTN; PAM sequence: TTC
tctcatttttgtggttacct

SEQ ID NO: 359480 - DNA, 20 bp, Artificial Sequence
  Description of Artificial Sequence: Synthetic oligonucleotide
  Target: LAMA2; (+) strand; PAM type: YTN; PAM sequence: CTC
tcatttttgtggttaccttt

SEQ ID NO: 359481 - DNA, 20 bp, Artificial Sequence
  Description of Artificial Sequence: Synthetic oligonucleotide
  Target: LAMA2; (+) strand; PAM type: YTN; PAM sequence: CTC
atttttgtggttacctttga

SEQ ID NO: 359482 - DNA, 20 bp, Artificial Sequence
  Description of Artificial Sequence: Synthetic oligonucleotide
  Target: LAMA2; (+) strand; PAM type: YTN; PAM sequence: TTT
ttgtggttacctttgattag

SEQ ID NO: 359483 - DNA, 20 bp, Artificial Sequence
  Description of Artificial Sequence: Synthetic oligonucleotide
  Target: LAMA2; (+) strand; PAM type: YTN; PAM sequence: TTT
tgtggttacctttgattagt

SEQ ID NO: 359484 - DNA, 20 bp, Artificial Sequence
  Description of Artificial Sequence: Synthetic oligonucleotide
  Target: LAMA2; (+) strand; PAM type: YTN; PAM sequence: TTT
gtggttacctttgattagtg

SEQ ID NO: 359485 - DNA, 20 bp, Artificial Sequence
  Description of Artificial Sequence: Synthetic oligonucleotide
  Target: LAMA2; (+) strand; PAM type: YTN; PAM sequence: TTG
tggttacctttgattagtgt

SEQ ID NO: 359486 - DNA, 20 bp, Artificial Sequence
  Description of Artificial Sequence: Synthetic oligonucleotide
  Target: LAMA2; (+) strand; PAM type: YTN; PAM sequence: TTA
cctttgattagtgttttggt

SEQ ID NO: 359487 - DNA, 20 bp, Artificial Sequence
  Description of Artificial Sequence: Synthetic oligonucleotide
  Target: LAMA2; (+) strand; PAM type: YTN; PAM sequence: CTT
tgattagtgttttggtcttt

SEQ ID NO: 359488 - DNA, 20 bp, Artificial Sequence
  Description of Artificial Sequence: Synthetic oligonucleotide
  Target: LAMA2; (+) strand; PAM type: YTN; PAM sequence: TTT
gattagtgttttggtcttta

SEQ ID NO: 359489 - DNA, 20 bp, Artificial Sequence
  Description of Artificial Sequence: Synthetic oligonucleotide
  Target: LAMA2; (+) strand; PAM type: YTN; PAM sequence: TTG
attagtgttttggtctttat

SEQ ID NO: 359490 - DNA, 20 bp, Artificial Sequence
  Description of Artificial Sequence: Synthetic oligonucleotide
  Target: LAMA2; (+) strand; PAM type: YTN; PAM sequence: TTA
gtgttttggtctttatgcgt

SEQ ID NO: 359491 - DNA, 20 bp, Artificial Sequence
  Description of Artificial Sequence: Synthetic oligonucleotide
  Target: LAMA2; (+) strand; PAM type: YTN; PAM sequence: TTT
tggtctttatgcgtttcaca

SEQ ID NO: 359492 - DNA, 20 bp, Artificial Sequence
  Description of Artificial Sequence: Synthetic oligonucleotide
  Target: LAMA2; (+) strand; PAM type: YTN; PAM sequence: TTT
ggtctttatgcgtttcacag

SEQ ID NO: 359493 - DNA, 20 bp, Artificial Sequence
  Description of Artificial Sequence: Synthetic oligonucleotide
  Target: LAMA2; (+) strand; PAM type: YTN; PAM sequence: TTG
gtctttatgcgtttcacaga

SEQ ID NO: 359494 - DNA, 20 bp, Artificial Sequence
  Description of Artificial Sequence: Synthetic oligonucleotide
  Target: LAMA2; (+) strand; PAM type: YTN; PAM sequence: CTT
tatgcgtttcacagacctga

SEQ ID NO: 359495 - DNA, 20 bp, Artificial Sequence
  Description of Artificial Sequence: Synthetic oligonucleotide
  Target: LAMA2; (+) strand; PAM type: YTN; PAM sequence: TTT
atgcgtttcacagacctgat

SEQ ID NO: 359496 - DNA, 20 bp, Artificial Sequence
  Description of Artificial Sequence: Synthetic oligonucleotide
  Target: LAMA2; (+) strand; PAM type: YTN; PAM sequence: TTA
tgcgtttcacagacctgatt

SEQ ID NO: 359497 - DNA, 20 bp, Artificial Sequence
  Description of Artificial Sequence: Synthetic oligonucleotide
  Target: LAMA2; (+) strand; PAM type: YTN; PAM sequence: TTT
cacagacctgattcaaatgc

SEQ ID NO: 359498 - DNA, 20 bp, Artificial Sequence
  Description of Artificial Sequence: Synthetic oligonucleotide
  Target: LAMA2; (+) strand; PAM type: YTN; PAM sequence: TTC
acagacctgattcaaatgct

SEQ ID NO: 359499 - DNA, 20 bp, Artificial Sequence
  Description of Artificial Sequence: Synthetic oligonucleotide
  Target: LAMA2; (+) strand; PAM type: YTN; PAM sequence: CTG
attcaaatgctggatctctg

SEQ ID NO: 359500 - DNA, 20 bp, Artificial Sequence
  Description of Artificial Sequence: Synthetic oligonucleotide
  Target: LAMA2; (+) strand; PAM type: YTN; PAM sequence: TTC
aaatgctggatctctgcttt

SEQ ID NO: 359501 - DNA, 20 bp, Artificial Sequence
  Description of Artificial Sequence: Synthetic oligonucleotide
  Target: LAMA2; (+) strand; PAM type: YTN; PAM sequence: CTG
gatctctgctttattagctt

SEQ ID NO: 359502 - DNA, 20 bp, Artificial Sequence
  Description of Artificial Sequence: Synthetic oligonucleotide
  Target: LAMA2; (+) strand; PAM type: YTN; PAM sequence: CTC
tgctttattagctttgtgat

SEQ ID NO: 359503 - DNA, 20 bp, Artificial Sequence
  Description of Artificial Sequence: Synthetic oligonucleotide
  Target: LAMA2; (+) strand; PAM type: YTN; PAM sequence: CTG
ctttattagctttgtgatct

SEQ ID NO: 359504 - DNA, 20 bp, Artificial Sequence
  Description of Artificial Sequence: Synthetic oligonucleotide
  Target: LAMA2; (+) strand; PAM type: YTN; PAM sequence: CTT
tattagctttgtgatcttgg

SEQ ID NO: 359505 - DNA, 20 bp, Artificial Sequence
  Description of Artificial Sequence: Synthetic oligonucleotide
  Target: LAMA2; (+) strand; PAM type: YTN; PAM sequence: TTT
attagctttgtgatcttgga

SEQ ID NO: 359506 - DNA, 20 bp, Artificial Sequence
  Description of Artificial Sequence: Synthetic oligonucleotide
  Target: LAMA2; (+) strand; PAM type: YTN; PAM sequence: TTA
ttagctttgtgatcttggac

SEQ ID NO: 359507 - DNA, 20 bp, Artificial Sequence
  Description of Artificial Sequence: Synthetic oligonucleotide
  Target: LAMA2; (+) strand; PAM type: YTN; PAM sequence: TTA
gctttgtgatcttggacata

SEQ ID NO: 359508 - DNA, 20 bp, Artificial Sequence
  Description of Artificial Sequence: Synthetic oligonucleotide
  Target: LAMA2; (+) strand; PAM type: YTN; PAM sequence: CTT
tgtgatcttggacatatccc

SEQ ID NO: 359509 - DNA, 20 bp, Artificial Sequence
  Description of Artificial Sequence: Synthetic oligonucleotide
  Target: LAMA2; (+) strand; PAM type: YTN; PAM sequence: TTT
gtgatcttggacatatccct

SEQ ID NO: 359510 - DNA, 20 bp, Artificial Sequence
  Description of Artificial Sequence: Synthetic oligonucleotide
  Target: LAMA2; (+) strand; PAM type: YTN; PAM sequence: TTG
tgatcttggacatatccctt

SEQ ID NO: 359511 - DNA, 20 bp, Artificial Sequence
  Description of Artificial Sequence: Synthetic oligonucleotide
  Target: LAMA2; (+) strand; PAM type: YTN; PAM sequence: CTT
ggacatatcccttaatctag

SEQ ID NO: 359512 - DNA, 20 bp, Artificial Sequence
  Description of Artificial Sequence: Synthetic oligonucleotide
  Target: LAMA2; (+) strand; PAM type: YTN; PAM sequence: TTG
gacatatcccttaatctagt

SEQ ID NO: 359513 - DNA, 20 bp, Artificial Sequence
  Description of Artificial Sequence: Synthetic oligonucleotide
  Target: LAMA2; (+) strand; PAM type: YTN; PAM sequence: CTT
aatctagttgagccagattc

SEQ ID NO: 359514 - DNA, 20 bp, Artificial Sequence
  Description of Artificial Sequence: Synthetic oligonucleotide
  Target: LAMA2; (+) strand; PAM type: YTN; PAM sequence: TTA
atctagttgagccagattct

SEQ ID NO: 359515 - DNA, 20 bp, Artificial Sequence
  Description of Artificial Sequence: Synthetic oligonucleotide
  Target: LAMA2; (+) strand; PAM type: YTN; PAM sequence: CTA
gttgagccagattctcatta

SEQ ID NO: 359516 - DNA, 20 bp, Artificial Sequence
  Description of Artificial Sequence: Synthetic oligonucleotide
  Target: LAMA2; (+) strand; PAM type: YTN; PAM sequence: TTG
agccagattctcattatctg

SEQ ID NO: 359517 - DNA, 20 bp, Artificial Sequence
  Description of Artificial Sequence: Synthetic oligonucleotide
  Target: LAMA2; (+) strand; PAM type: YTN; PAM sequence: TTC
tcattatctgcaaaatgagg

SEQ ID NO: 359518 - DNA, 20 bp, Artificial Sequence
  Description of Artificial Sequence: Synthetic oligonucleotide
  Target: LAMA2; (+) strand; PAM type: YTN; PAM sequence: CTC
attatctgcaaaatgaggct

SEQ ID NO: 359519 - DNA, 20 bp, Artificial Sequence
  Description of Artificial Sequence: Synthetic oligonucleotide
  Target: LAMA2; (+) strand; PAM type: YTN; PAM sequence: TTA
tctgcaaaatgaggcttcta

SEQ ID NO: 359520 - DNA, 20 bp, Artificial Sequence
  Description of Artificial Sequence: Synthetic oligonucleotide
  Target: LAMA2; (+) strand; PAM type: YTN; PAM sequence: CTG
caaaatgaggcttctagcac

SEQ ID NO: 359521 - DNA, 20 bp, Artificial Sequence
  Description of Artificial Sequence: Synthetic oligonucleotide
  Target: LAMA2; (+) strand; PAM type: YTN; PAM sequence: CTT
ctagcacccctcagaattgt

SEQ ID NO: 359522 - DNA, 20 bp, Artificial Sequence
  Description of Artificial Sequence: Synthetic oligonucleotide
  Target: LAMA2; (+) strand; PAM type: YTN; PAM sequence: TTC
tagcacccctcagaattgta

SEQ ID NO: 359523 - DNA, 20 bp, Artificial Sequence
  Description of Artificial Sequence: Synthetic oligonucleotide
  Target: LAMA2; (+) strand; PAM type: YTN; PAM sequence: CTA
gcacccctcagaattgtaca

SEQ ID NO: 359524 - DNA, 20 bp, Artificial Sequence
  Description of Artificial Sequence: Synthetic oligonucleotide
  Target: LAMA2; (+) strand; PAM type: YTN; PAM sequence: CTC
agaattgtacaaagctctcg

SEQ ID NO: 359525 - DNA, 20 bp, Artificial Sequence
  Description of Artificial Sequence: Synthetic oligonucleotide
  Target: LAMA2; (+) strand; PAM type: YTN; PAM sequence: TTG
tacaaagctctcgaaaatgt

SEQ ID NO: 359526 - DNA, 20 bp, Artificial Sequence
  Description of Artificial Sequence: Synthetic oligonucleotide
  Target: LAMA2; (+) strand; PAM type: YTN; PAM sequence: CTC
tcgaaaatgtccttagcaca

SEQ ID NO: 359527 - DNA, 20 bp, Artificial Sequence
  Description of Artificial Sequence: Synthetic oligonucleotide
  Target: LAMA2; (+) strand; PAM type: YTN; PAM sequence: CTC
gaaaatgtccttagcacaca

SEQ ID NO: 359528 - DNA, 20 bp, Artificial Sequence
  Description of Artificial Sequence: Synthetic oligonucleotide
  Target: LAMA2; (+) strand; PAM type: YTN; PAM sequence: CTT
agcacacagaagctgtccga

SEQ ID NO: 359529 - DNA, 20 bp, Artificial Sequence
  Description of Artificial Sequence: Synthetic oligonucleotide
  Target: LAMA2; (+) strand; PAM type: YTN; PAM sequence: TTA
gcacacagaagctgtccgat

SEQ ID NO: 359530 - DNA, 20 bp, Artificial Sequence
  Description of Artificial Sequence: Synthetic oligonucleotide
  Target: LAMA2; (+) strand; PAM type: YTN; PAM sequence: CTG
tccgataaatgccaattgct

SEQ ID NO: 359531 - DNA, 20 bp, Artificial Sequence
  Description of Artificial Sequence: Synthetic oligonucleotide
  Target: LAMA2; (+) strand; PAM type: YTN; PAM sequence: TTG
ctttatgaatttctgtagtt

SEQ ID NO: 359532 - DNA, 20 bp, Artificial Sequence
  Description of Artificial Sequence: Synthetic oligonucleotide
  Target: LAMA2; (+) strand; PAM type: YTN; PAM sequence: CTT
tatgaatttctgtagttgta

SEQ ID NO: 359533 - DNA, 20 bp, Artificial Sequence
  Description of Artificial Sequence: Synthetic oligonucleotide
  Target: LAMA2; (+) strand; PAM type: YTN; PAM sequence: TTT
atgaatttctgtagttgtat

SEQ ID NO: 359534 - DNA, 20 bp, Artificial Sequence
  Description of Artificial Sequence: Synthetic oligonucleotide
  Target: LAMA2; (+) strand; PAM type: YTN; PAM sequence: TTA
tgaatttctgtagttgtatg

SEQ ID NO: 359535 - DNA, 20 bp, Artificial Sequence
  Description of Artificial Sequence: Synthetic oligonucleotide
  Target: LAMA2; (+) strand; PAM type: YTN; PAM sequence: TTT
ctgtagttgtatgctgcagt

SEQ ID NO: 359536 - DNA, 20 bp, Artificial Sequence
  Description of Artificial Sequence: Synthetic oligonucleotide
  Target: LAMA2; (+) strand; PAM type: YTN; PAM sequence: TTC
tgtagttgtatgctgcagta

SEQ ID NO: 359537 - DNA, 20 bp, Artificial Sequence
  Description of Artificial Sequence: Synthetic oligonucleotide
  Target: LAMA2; (+) strand; PAM type: YTN; PAM sequence: CTG
tagttgtatgctgcagtaat

SEQ ID NO: 359538 - DNA, 20 bp, Artificial Sequence
  Description of Artificial Sequence: Synthetic oligonucleotide
  Target: LAMA2; (+) strand; PAM type: YTN; PAM sequence: TTG
tatgctgcagtaatttattt

SEQ ID NO: 359539 - DNA, 20 bp, Artificial Sequence
  Description of Artificial Sequence: Synthetic oligonucleotide
  Target: LAMA2; (+) strand; PAM type: YTN; PAM sequence: CTG
cagtaatttattttggagat

SEQ ID NO: 359540 - DNA, 20 bp, Artificial Sequence
  Description of Artificial Sequence: Synthetic oligonucleotide
  Target: LAMA2; (+) strand; PAM type: YTN; PAM sequence: TTT
attttggagatcttccttat

SEQ ID NO: 359541 - DNA, 20 bp, Artificial Sequence
  Description of Artificial Sequence: Synthetic oligonucleotide
  Target: LAMA2; (+) strand; PAM type: YTN; PAM sequence: TTA
ttttggagatcttccttata

SEQ ID NO: 359542 - DNA, 20 bp, Artificial Sequence
  Description of Artificial Sequence: Synthetic oligonucleotide
  Target: LAMA2; (+) strand; PAM type: YTN; PAM sequence: TTT
tggagatcttccttatatca

SEQ ID NO: 359543 - DNA, 20 bp, Artificial Sequence
  Description of Artificial Sequence: Synthetic oligonucleotide
  Target: LAMA2; (+) strand; PAM type: YTN; PAM sequence: TTT
ggagatcttccttatatcag

SEQ ID NO: 359544 - DNA, 20 bp, Artificial Sequence
  Description of Artificial Sequence: Synthetic oligonucleotide
  Target: LAMA2; (+) strand; PAM type: YTN; PAM sequence: TTG
gagatcttccttatatcagt

SEQ ID NO: 359545 - DNA, 20 bp, Artificial Sequence
  Description of Artificial Sequence: Synthetic oligonucleotide
  Target: LAMA2; (+) strand; PAM type: YTN; PAM sequence: CTT
ccttatatcagtaaaagacg

SEQ ID NO: 359546 - DNA, 20 bp, Artificial Sequence
  Description of Artificial Sequence: Synthetic oligonucleotide
  Target: LAMA2; (+) strand; PAM type: YTN; PAM sequence: TTC
cttatatcagtaaaagacgt

SEQ ID NO: 359547 - DNA, 20 bp, Artificial Sequence
  Description of Artificial Sequence: Synthetic oligonucleotide
  Target: LAMA2; (+) strand; PAM type: YTN; PAM sequence: CTT
atatcagtaaaagacgtttg

SEQ ID NO: 359548 - DNA, 20 bp, Artificial Sequence
  Description of Artificial Sequence: Synthetic oligonucleotide
  Target: LAMA2; (+) strand; PAM type: YTN; PAM sequence: TTA
tatcagtaaaagacgtttgt

SEQ ID NO: 359549 - DNA, 20 bp, Artificial Sequence
  Description of Artificial Sequence: Synthetic oligonucleotide
  Target: LAMA2; (+) strand; PAM type: YTN; PAM sequence: TTT
gttaaaaaacactttgtcac

SEQ ID NO: 359550 - DNA, 20 bp, Artificial Sequence
  Description of Artificial Sequence: Synthetic oligonucleotide
  Target: LAMA2; (+) strand; PAM type: YTN; PAM sequence: TTG
ttaaaaaacactttgtcacc

SEQ ID NO: 359551 - DNA, 20 bp, Artificial Sequence
  Description of Artificial Sequence: Synthetic oligonucleotide
  Target: LAMA2; (+) strand; PAM type: YTN; PAM sequence: TTA
aaaaacactttgtcacctgt

SEQ ID NO: 359552 - DNA, 20 bp, Artificial Sequence
  Description of Artificial Sequence: Synthetic oligonucleotide
  Target: LAMA2; (+) strand; PAM type: YTN; PAM sequence: CTT
tgtcacctgtctgacatagt

SEQ ID NO: 359553 - DNA, 20 bp, Artificial Sequence
  Description of Artificial Sequence: Synthetic oligonucleotide
  Target: LAMA2; (+) strand; PAM type: YTN; PAM sequence: TTT
gtcacctgtctgacatagta

SEQ ID NO: 359554 - DNA, 20 bp, Artificial Sequence
  Description of Artificial Sequence: Synthetic oligonucleotide
  Target: LAMA2; (+) strand; PAM type: YTN; PAM sequence: TTG
tcacctgtctgacatagtat

SEQ ID NO: 359555 - DNA, 20 bp, Artificial Sequence
  Description of Artificial Sequence: Synthetic oligonucleotide
  Target: LAMA2; (+) strand; PAM type: YTN; PAM sequence: CTG
tctgacatagtatctggtgg

SEQ ID NO: 359556 - DNA, 20 bp, Artificial Sequence
  Description of Artificial Sequence: Synthetic oligonucleotide
  Target: LAMA2; (+) strand; PAM type: YTN; PAM sequence: CTG
acatagtatctggtggtagt

SEQ ID NO: 359557 - DNA, 20 bp, Artificial Sequence
  Description of Artificial Sequence: Synthetic oligonucleotide
  Target: LAMA2; (+) strand; PAM type: YTN; PAM sequence: CTG
gtggtagtaaggataagaca

SEQ ID NO: 359558 - DNA, 20 bp, Artificial Sequence
  Description of Artificial Sequence: Synthetic oligonucleotide
  Target: LAMA2; (+) strand; PAM type: YTN; PAM sequence: TTA
aaaataaaaattgacaatca

SEQ ID NO: 359559 - DNA, 20 bp, Artificial Sequence
  Description of Artificial Sequence: Synthetic oligonucleotide
  Target: LAMA2; (+) strand; PAM type: YTN; PAM sequence: TTG
acaatcagagagagttaatt

SEQ ID NO: 359560 - DNA, 20 bp, Artificial Sequence
  Description of Artificial Sequence: Synthetic oligonucleotide
  Target: LAMA2; (+) strand; PAM type: YTN; PAM sequence: TTA
attttagcaagtacgtagat

SEQ ID NO: 359561 - DNA, 20 bp, Artificial Sequence
  Description of Artificial Sequence: Synthetic oligonucleotide
  Target: LAMA2; (+) strand; PAM type: YTN; PAM sequence: TTT
tagcaagtacgtagattata

SEQ ID NO: 359562 - DNA, 20 bp, Artificial Sequence
  Description of Artificial Sequence: Synthetic oligonucleotide
  Target: LAMA2; (+) strand; PAM type: YTN; PAM sequence: TTT
agcaagtacgtagattatat

SEQ ID NO: 359563 - DNA, 20 bp, Artificial Sequence
  Description of Artificial Sequence: Synthetic oligonucleotide
  Target: LAMA2; (+) strand; PAM type: YTN; PAM sequence: TTA
gcaagtacgtagattatatg

SEQ ID NO: 359564 - DNA, 20 bp, Artificial Sequence
  Description of Artificial Sequence: Synthetic oligonucleotide
  Target: LAMA2; (+) strand; PAM type: YTN; PAM sequence: TTA
tatgcctttaatggcagctt

SEQ ID NO: 359565 - DNA, 20 bp, Artificial Sequence
  Description of Artificial Sequence: Synthetic oligonucleotide
  Target: LAMA2; (+) strand; PAM type: YTN; PAM sequence: CTT
taatggcagctttgcagcaa

SEQ ID NO: 359566 - DNA, 20 bp, Artificial Sequence
  Description of Artificial Sequence: Synthetic oligonucleotide
  Target: LAMA2; (+) strand; PAM type: YTN; PAM sequence: TTT
aatggcagctttgcagcaaa

SEQ ID NO: 359567 - DNA, 20 bp, Artificial Sequence
  Description of Artificial Sequence: Synthetic oligonucleotide
  Target: LAMA2; (+) strand; PAM type: YTN; PAM sequence: TTA
atggcagctttgcagcaaag

SEQ ID NO: 359568 - DNA, 20 bp, Artificial Sequence
  Description of Artificial Sequence: Synthetic oligonucleotide
  Target: LAMA2; (+) strand; PAM type: YTN; PAM sequence: CTT
tgcagcaaagtgcaaaacat

SEQ ID NO: 359569 - DNA, 20 bp, Artificial Sequence
  Description of Artificial Sequence: Synthetic oligonucleotide
  Target: LAMA2; (+) strand; PAM type: YTN; PAM sequence: TTT
gcagcaaagtgcaaaacata

SEQ ID NO: 359570 - DNA, 20 bp, Artificial Sequence
  Description of Artificial Sequence: Synthetic oligonucleotide
  Target: LAMA2; (+) strand; PAM type: YTN; PAM sequence: TTG
cagcaaagtgcaaaacataa

SEQ ID NO: 359571 - DNA, 20 bp, Artificial Sequence
  Description of Artificial Sequence: Synthetic oligonucleotide
  Target: LAMA2; (+) strand; PAM type: YTN; PAM sequence: TTA
accagatttgtgaaataccc

SEQ ID NO: 359572 - DNA, 20 bp, Artificial Sequence
  Description of Artificial Sequence: Synthetic oligonucleotide
  Target: LAMA2; (+) strand; PAM type: YTN; PAM sequence: TTT
gtgaaatacccgcagagtgt

SEQ ID NO: 359573 - DNA, 20 bp, Artificial Sequence
  Description of Artificial Sequence: Synthetic oligonucleotide
  Target: LAMA2; (+) strand; PAM type: YTN; PAM sequence: TTG
tgaaatacccgcagagtgtt

SEQ ID NO: 359574 - DNA, 20 bp, Artificial Sequence
  Description of Artificial Sequence: Synthetic oligonucleotide
  Target: LAMA2; (+) strand; PAM type: YTN; PAM sequence: TTT
tagactttattttgaaggtg

SEQ ID NO: 359575 - DNA, 20 bp, Artificial Sequence
  Description of Artificial Sequence: Synthetic oligonucleotide
  Target: LAMA2; (+) strand; PAM type: YTN; PAM sequence: TTT
agactttattttgaaggtgc

SEQ ID NO: 359576 - DNA, 20 bp, Artificial Sequence
  Description of Artificial Sequence: Synthetic oligonucleotide
  Target: LAMA2; (+) strand; PAM type: YTN; PAM sequence: TTA
gactttattttgaaggtgcc

SEQ ID NO: 359577 - DNA, 20 bp, Artificial Sequence
  Description of Artificial Sequence: Synthetic oligonucleotide
  Target: LAMA2; (+) strand; PAM type: YTN; PAM sequence: CTT
tattttgaaggtgccaaatt

SEQ ID NO: 359578 - DNA, 20 bp, Artificial Sequence
  Description of Artificial Sequence: Synthetic oligonucleotide
  Target: LAMA2; (+) strand; PAM type: YTN; PAM sequence: TTT
attttgaaggtgccaaatta

SEQ ID NO: 359579 - DNA, 20 bp, Artificial Sequence
  Description of Artificial Sequence: Synthetic oligonucleotide
  Target: LAMA2; (+) strand; PAM type: YTN; PAM sequence: TTA
ttttgaaggtgccaaattag

SEQ ID NO: 359580 - DNA, 20 bp, Artificial Sequence
  Description of Artificial Sequence: Synthetic oligonucleotide
  Target: LAMA2; (+) strand; PAM type: YTN; PAM sequence: TTT
tgaaggtgccaaattagagc

SEQ ID NO: 359581 - DNA, 20 bp, Artificial Sequence
  Description of Artificial Sequence: Synthetic oligonucleotide
  Target: LAMA2; (+) strand; PAM type: YTN; PAM sequence: TTT
gaaggtgccaaattagagct

SEQ ID NO: 359582 - DNA, 20 bp, Artificial Sequence
  Description of Artificial Sequence: Synthetic oligonucleotide
  Target: LAMA2; (+) strand; PAM type: YTN; PAM sequence: TTG
aaggtgccaaattagagcta

SEQ ID NO: 359583 - DNA, 20 bp, Artificial Sequence
  Description of Artificial Sequence: Synthetic oligonucleotide
  Target: LAMA2; (+) strand; PAM type: YTN; PAM sequence: TTA
gagctaacatgcatcgcttc

SEQ ID NO: 359584 - DNA, 20 bp, Artificial Sequence
  Description of Artificial Sequence: Synthetic oligonucleotide
  Target: LAMA2; (+) strand; PAM type: YTN; PAM sequence: CTA
acatgcatcgcttcatgtct

SEQ ID NO: 359585 - DNA, 20 bp, Artificial Sequence
  Description of Artificial Sequence: Synthetic oligonucleotide
  Target: LAMA2; (+) strand; PAM type: YTN; PAM sequence: CTT
catgtcttcccaagaaaatt

SEQ ID NO: 359586 - DNA, 20 bp, Artificial Sequence
  Description of Artificial Sequence: Synthetic oligonucleotide
  Target: LAMA2; (+) strand; PAM type: YTN; PAM sequence: TTC
atgtcttcccaagaaaatta

SEQ ID NO: 359587 - DNA, 20 bp, Artificial Sequence
  Description of Artificial Sequence: Synthetic oligonucleotide
  Target: LAMA2; (+) strand; PAM type: YTN; PAM sequence: CTT
cccaagaaaattacatgaca

SEQ ID NO: 359588 - DNA, 20 bp, Artificial Sequence
  Description of Artificial Sequence: Synthetic oligonucleotide
  Target: LAMA2; (+) strand; PAM type: YTN; PAM sequence: TTC
ccaagaaaattacatgacaa

SEQ ID NO: 359589 - DNA, 20 bp, Artificial Sequence
  Description of Artificial Sequence: Synthetic oligonucleotide
  Target: LAMA2; (+) strand; PAM type: YTN; PAM sequence: TTA
catgacaaatatctatctct

SEQ ID NO: 359590 - DNA, 20 bp, Artificial Sequence
  Description of Artificial Sequence: Synthetic oligonucleotide
  Target: LAMA2; (+) strand; PAM type: YTN; PAM sequence: CTA
tctctgcttcactgacaacc

SEQ ID NO: 359591 - DNA, 20 bp, Artificial Sequence
  Description of Artificial Sequence: Synthetic oligonucleotide
  Target: LAMA2; (+) strand; PAM type: YTN; PAM sequence: CTC
tgcttcactgacaacctggc

SEQ ID NO: 359592 - DNA, 20 bp, Artificial Sequence
  Description of Artificial Sequence: Synthetic oligonucleotide
  Target: LAMA2; (+) strand; PAM type: YTN; PAM sequence: CTG
cttcactgacaacctggcag

SEQ ID NO: 359593 - DNA, 20 bp, Artificial Sequence
  Description of Artificial Sequence: Synthetic oligonucleotide
  Target: LAMA2; (+) strand; PAM type: YTN; PAM sequence: CTT
cactgacaacctggcagtga

SEQ ID NO: 359594 - DNA, 20 bp, Artificial Sequence
  Description of Artificial Sequence: Synthetic oligonucleotide
  Target: LAMA2; (+) strand; PAM type: YTN; PAM sequence: TTC
actgacaacctggcagtgaa

SEQ ID NO: 359595 - DNA, 20 bp, Artificial Sequence
  Description of Artificial Sequence: Synthetic oligonucleotide
  Target: LAMA2; (+) strand; PAM type: YTN; PAM sequence: CTG
acaacctggcagtgaaaggg

SEQ ID NO: 359596 - DNA, 20 bp, Artificial Sequence
  Description of Artificial Sequence: Synthetic oligonucleotide
  Target: LAMA2; (+) strand; PAM type: YTN; PAM sequence: CTG
gcagtgaaagggatttgagg

SEQ ID NO: 359597 - DNA, 20 bp, Artificial Sequence
  Description of Artificial Sequence: Synthetic oligonucleotide
  Target: LAMA2; (+) strand; PAM type: YTN; PAM sequence: TTT
gaggtttgtgcccatcagta

SEQ ID NO: 359598 - DNA, 20 bp, Artificial Sequence
  Description of Artificial Sequence: Synthetic oligonucleotide
  Target: LAMA2; (+) strand; PAM type: YTN; PAM sequence: TTG
aggtttgtgcccatcagtaa

SEQ ID NO: 359599 - DNA, 20 bp, Artificial Sequence
  Description of Artificial Sequence: Synthetic oligonucleotide
  Target: LAMA2; (+) strand; PAM type: YTN; PAM sequence: TTT
gtgcccatcagtaactaatt

SEQ ID NO: 359600 - DNA, 20 bp, Artificial Sequence
  Description of Artificial Sequence: Synthetic oligonucleotide
  Target: LAMA2; (+) strand; PAM type: YTN; PAM sequence: TTG
tgcccatcagtaactaatta

SEQ ID NO: 359601 - DNA, 20 bp, Artificial Sequence
  Description of Artificial Sequence: Synthetic oligonucleotide
  Target: LAMA2; (+) strand; PAM type: YTN; PAM sequence: CTA
attagagaagtaaatgttat

SEQ ID NO: 359602 - DNA, 20 bp, Artificial Sequence
  Description of Artificial Sequence: Synthetic oligonucleotide
  Target: LAMA2; (+) strand; PAM type: YTN; PAM sequence: TTA
gagaagtaaatgttataact

SEQ ID NO: 359603 - DNA, 20 bp, Artificial Sequence
  Description of Artificial Sequence: Synthetic oligonucleotide
  Target: LAMA2; (+) strand; PAM type: YTN; PAM sequence: TTA
taactagtcagtattctgtg

SEQ ID NO: 359604 - DNA, 20 bp, Artificial Sequence
  Description of Artificial Sequence: Synthetic oligonucleotide
  Target: LAMA2; (+) strand; PAM type: YTN; PAM sequence: CTA
gtcagtattctgtggctaca

SEQ ID NO: 359605 - DNA, 20 bp, Artificial Sequence
  Description of Artificial Sequence: Synthetic oligonucleotide
  Target: LAMA2; (+) strand; PAM type: YTN; PAM sequence: TTC
tgtggctacaatgtggcaag

SEQ ID NO: 359606 - DNA, 20 bp, Artificial Sequence
  Description of Artificial Sequence: Synthetic oligonucleotide
  Target: LAMA2; (+) strand; PAM type: YTN; PAM sequence: CTG
tggctacaatgtggcaagtt

SEQ ID NO: 359607 - DNA, 20 bp, Artificial Sequence
  Description of Artificial Sequence: Synthetic oligonucleotide
  Target: LAMA2; (+) strand; PAM type: YTN; PAM sequence: CTA
caatgtggcaagttaaaata

SEQ ID NO: 359608 - DNA, 20 bp, Artificial Sequence
  Description of Artificial Sequence: Synthetic oligonucleotide
  Target: LAMA2; (+) strand; PAM type: YTN; PAM sequence: TTA
aaataatatccttaaggtgg

SEQ ID NO: 359609 - DNA, 20 bp, Artificial Sequence
  Description of Artificial Sequence: Synthetic oligonucleotide
  Target: LAMA2; (+) strand; PAM type: YTN; PAM sequence: CTT
aaggtgggcgctaacgcaat

SEQ ID NO: 359610 - DNA, 20 bp, Artificial Sequence
  Description of Artificial Sequence: Synthetic oligonucleotide
  Target: LAMA2; (+) strand; PAM type: YTN; PAM sequence: TTA
aggtgggcgctaacgcaata

SEQ ID NO: 359611 - DNA, 20 bp, Artificial Sequence
  Description of Artificial Sequence: Synthetic oligonucleotide
  Target: LAMA2; (+) strand; PAM type: YTN; PAM sequence: CTA
acgcaatatgactggtatcc

SEQ ID NO: 359612 - DNA, 20 bp, Artificial Sequence
  Description of Artificial Sequence: Synthetic oligonucleotide
  Target: LAMA2; (+) strand; PAM type: YTN; PAM sequence: CTG
gtatccttatgaaaaaaaaa

SEQ ID NO: 359613 - DNA, 20 bp, Artificial Sequence
  Description of Artificial Sequence: Synthetic oligonucleotide
  Target: LAMA2; (+) strand; PAM type: YTN; PAM sequence: CTT
atgaaaaaaaaaaaaaagga

SEQ ID NO: 359614 - DNA, 20 bp, Artificial Sequence
  Description of Artificial Sequence: Synthetic oligonucleotide
  Target: LAMA2; (+) strand; PAM type: YTN; PAM sequence: TTA
tgaaaaaaaaaaaaaaggac

SEQ ID NO: 359615 - DNA, 20 bp, Artificial Sequence
  Description of Artificial Sequence: Synthetic oligonucleotide
  Target: LAMA2; (+) strand; PAM type: YTN; PAM sequence: TTT
ggagataaacacaccgacag

SEQ ID NO: 359616 - DNA, 20 bp, Artificial Sequence
  Description of Artificial Sequence: Synthetic oligonucleotide
  Target: LAMA2; (+) strand; PAM type: YTN; PAM sequence: TTG
gagataaacacaccgacagg

SEQ ID NO: 359617 - DNA, 20 bp, Artificial Sequence
  Description of Artificial Sequence: Synthetic oligonucleotide
  Target: LAMA2; (+) strand; PAM type: YTN; PAM sequence: TTC
acaagcaaaggagagaggcc

SEQ ID NO: 359618 - DNA, 20 bp, Artificial Sequence
  Description of Artificial Sequence: Synthetic oligonucleotide
  Target: LAMA2; (+) strand; PAM type: YTN; PAM sequence: CTG
gaacagattcctcttagccc

SEQ ID NO: 359619 - DNA, 20 bp, Artificial Sequence
  Description of Artificial Sequence: Synthetic oligonucleotide
  Target: LAMA2; (+) strand; PAM type: YTN; PAM sequence: TTC
ctcttagccctcaaagggaa

SEQ ID NO: 359620 - DNA, 20 bp, Artificial Sequence
  Description of Artificial Sequence: Synthetic oligonucleotide
  Target: LAMA2; (+) strand; PAM type: YTN; PAM sequence: CTC
ttagccctcaaagggaacta

SEQ ID NO: 359621 - DNA, 20 bp, Artificial Sequence
  Description of Artificial Sequence: Synthetic oligonucleotide
  Target: LAMA2; (+) strand; PAM type: YTN; PAM sequence: CTT
agccctcaaagggaactaac

SEQ ID NO: 359622 - DNA, 20 bp, Artificial Sequence
  Description of Artificial Sequence: Synthetic oligonucleotide
  Target: LAMA2; (+) strand; PAM type: YTN; PAM sequence: TTA
gccctcaaagggaactaacc

SEQ ID NO: 359623 - DNA, 20 bp, Artificial Sequence
  Description of Artificial Sequence: Synthetic oligonucleotide
  Target: LAMA2; (+) strand; PAM type: YTN; PAM sequence: CTC
aaagggaactaaccctgccg

SEQ ID NO: 359624 - DNA, 20 bp, Artificial Sequence
  Description of Artificial Sequence: Synthetic oligonucleotide
  Target: LAMA2; (+) strand; PAM type: YTN; PAM sequence: CTA
accctgccgataccttgatt

SEQ ID NO: 359625 - DNA, 20 bp, Artificial Sequence
  Description of Artificial Sequence: Synthetic oligonucleotide
  Target: LAMA2; (+) strand; PAM type: YTN; PAM sequence: CTG
ccgataccttgatttcagac

SEQ ID NO: 359626 - DNA, 20 bp, Artificial Sequence
  Description of Artificial Sequence: Synthetic oligonucleotide
  Target: LAMA2; (+) strand; PAM type: YTN; PAM sequence: CTT
gatttcagacttgtagcctc

SEQ ID NO: 359627 - DNA, 20 bp, Artificial Sequence
  Description of Artificial Sequence: Synthetic oligonucleotide
  Target: LAMA2; (+) strand; PAM type: YTN; PAM sequence: TTG
atttcagacttgtagcctct

SEQ ID NO: 359628 - DNA, 20 bp, Artificial Sequence
  Description of Artificial Sequence: Synthetic oligonucleotide
  Target: LAMA2; (+) strand; PAM type: YTN; PAM sequence: TTT
cagacttgtagcctctagaa

SEQ ID NO: 359629 - DNA, 20 bp, Artificial Sequence
  Description of Artificial Sequence: Synthetic oligonucleotide
  Target: LAMA2; (+) strand; PAM type: YTN; PAM sequence: TTC
agacttgtagcctctagaac

SEQ ID NO: 359630 - DNA, 20 bp, Artificial Sequence
  Description of Artificial Sequence: Synthetic oligonucleotide
  Target: LAMA2; (+) strand; PAM type: YTN; PAM sequence: CTT
gtagcctctagaactgtgaa

SEQ ID NO: 359631 - DNA, 20 bp, Artificial Sequence
  Description of Artificial Sequence: Synthetic oligonucleotide
  Target: LAMA2; (+) strand; PAM type: YTN; PAM sequence: TTG
tagcctctagaactgtgaaa

SEQ ID NO: 359632 - DNA, 20 bp, Artificial Sequence
  Description of Artificial Sequence: Synthetic oligonucleotide
  Target: LAMA2; (+) strand; PAM type: YTN; PAM sequence: CTC
tagaactgtgaaacaataca

SEQ ID NO: 359633 - DNA, 20 bp, Artificial Sequence
  Description of Artificial Sequence: Synthetic oligonucleotide
  Target: LAMA2; (+) strand; PAM type: YTN; PAM sequence: CTA
gaactgtgaaacaatacatt

SEQ ID NO: 359634 - DNA, 20 bp, Artificial Sequence
  Description of Artificial Sequence: Synthetic oligonucleotide
  Target: LAMA2; (+) strand; PAM type: YTN; PAM sequence: CTG
tgaaacaatacatttctgtt

SEQ ID NO: 359635 - DNA, 20 bp, Artificial Sequence
  Description of Artificial Sequence: Synthetic oligonucleotide
  Target: LAMA2; (+) strand; PAM type: YTN; PAM sequence: TTT
ctgttgtataagccacccag

SEQ ID NO: 359636 - DNA, 20 bp, Artificial Sequence
  Description of Artificial Sequence: Synthetic oligonucleotide
  Target: LAMA2; (+) strand; PAM type: YTN; PAM sequence: TTC
tgttgtataagccacccagt

SEQ ID NO: 359637 - DNA, 20 bp, Artificial Sequence
  Description of Artificial Sequence: Synthetic oligonucleotide
  Target: LAMA2; (+) strand; PAM type: YTN; PAM sequence: CTG
ttgtataagccacccagtct

SEQ ID NO: 359638 - DNA, 20 bp, Artificial Sequence
  Description of Artificial Sequence: Synthetic oligonucleotide
  Target: LAMA2; (+) strand; PAM type: YTN; PAM sequence: TTG
tataagccacccagtctatg

SEQ ID NO: 359639 - DNA, 20 bp, Artificial Sequence
  Description of Artificial Sequence: Synthetic oligonucleotide
  Target: LAMA2; (+) strand; PAM type: YTN; PAM sequence: CTA
tggtattttattatggcagc

SEQ ID NO: 359640 - DNA, 20 bp, Artificial Sequence
  Description of Artificial Sequence: Synthetic oligonucleotide
  Target: LAMA2; (+) strand; PAM type: YTN; PAM sequence: TTT
tattatggcagccctagcaa

SEQ ID NO: 359641 - DNA, 20 bp, Artificial Sequence
  Description of Artificial Sequence: Synthetic oligonucleotide
  Target: LAMA2; (+) strand; PAM type: YTN; PAM sequence: TTT
attatggcagccctagcaaa

SEQ ID NO: 359642 - DNA, 20 bp, Artificial Sequence
  Description of Artificial Sequence: Synthetic oligonucleotide
  Target: LAMA2; (+) strand; PAM type: YTN; PAM sequence: TTA
ttatggcagccctagcaaac

SEQ ID NO: 359643 - DNA, 20 bp, Artificial Sequence
  Description of Artificial Sequence: Synthetic oligonucleotide
  Target: LAMA2; (+) strand; PAM type: YTN; PAM sequence: TTA
tggcagccctagcaaaccaa

SEQ ID NO: 359644 - DNA, 20 bp, Artificial Sequence
  Description of Artificial Sequence: Synthetic oligonucleotide
  Target: LAMA2; (+) strand; PAM type: YTN; PAM sequence: CTA
gcaaaccaatacaaatcata

SEQ ID NO: 359645 - DNA, 20 bp, Artificial Sequence
  Description of Artificial Sequence: Synthetic oligonucleotide
  Target: LAMA2; (+) strand; PAM type: YTN; PAM sequence: TTA
tttttaaaatctcataattt

SEQ ID NO: 359646 - DNA, 20 bp, Artificial Sequence
  Description of Artificial Sequence: Synthetic oligonucleotide
  Target: LAMA2; (+) strand; PAM type: YTN; PAM sequence: TTT
ttaaaatctcataattttca

SEQ ID NO: 359647 - DNA, 20 bp, Artificial Sequence
  Description of Artificial Sequence: Synthetic oligonucleotide
  Target: LAMA2; (+) strand; PAM type: YTN; PAM sequence: TTT
taaaatctcataattttcat

SEQ ID NO: 359648 - DNA, 20 bp, Artificial Sequence
  Description of Artificial Sequence: Synthetic oligonucleotide
  Target: LAMA2; (+) strand; PAM type: YTN; PAM sequence: TTT
aaaatctcataattttcatt

SEQ ID NO: 359649 - DNA, 20 bp, Artificial Sequence
  Description of Artificial Sequence: Synthetic oligonucleotide
  Target: LAMA2; (+) strand; PAM type: YTN; PAM sequence: TTA
aaatctcataattttcattc

SEQ ID NO: 359650 - DNA, 20 bp, Artificial Sequence
  Description of Artificial Sequence: Synthetic oligonucleotide
  Target: LAMA2; (+) strand; PAM type: YTN; PAM sequence: CTC
ataattttcattcttgttat

SEQ ID NO: 359651 - DNA, 20 bp, Artificial Sequence
  Description of Artificial Sequence: Synthetic oligonucleotide
  Target: LAMA2; (+) strand; PAM type: YTN; PAM sequence: TTT
tcattcttgttatatatata

SEQ ID NO: 359652 - DNA, 20 bp, Artificial Sequence
  Description of Artificial Sequence: Synthetic oligonucleotide
  Target: LAMA2; (+) strand; PAM type: YTN; PAM sequence: TTT
cattcttgttatatatatat

SEQ ID NO: 359653 - DNA, 20 bp, Artificial Sequence
  Description of Artificial Sequence: Synthetic oligonucleotide
  Target: LAMA2; (+) strand; PAM type: YTN; PAM sequence: TTC
attcttgttatatatatata

SEQ ID NO: 359654 - DNA, 20 bp, Artificial Sequence
  Description of Artificial Sequence: Synthetic oligonucleotide
  Target: LAMA2; (+) strand; PAM type: YTN; PAM sequence: TTC
ttgttatatatatataaaac

SEQ ID NO: 359655 - DNA, 20 bp, Artificial Sequence
  Description of Artificial Sequence: Synthetic oligonucleotide
  Target: LAMA2; (+) strand; PAM type: YTN; PAM sequence: CTT
gttatatatatataaaacaa

SEQ ID NO: 359656 - DNA, 20 bp, Artificial Sequence
  Description of Artificial Sequence: Synthetic oligonucleotide
  Target: LAMA2; (+) strand; PAM type: YTN; PAM sequence: TTG
ttatatatatataaaacaaa

SEQ ID NO: 359657 - DNA, 20 bp, Artificial Sequence
  Description of Artificial Sequence: Synthetic oligonucleotide
  Target: LAMA2; (+) strand; PAM type: YTN; PAM sequence: TTA
tatatatataaaacaaataa

SEQ ID NO: 359658 - DNA, 20 bp, Artificial Sequence
  Description of Artificial Sequence: Synthetic oligonucleotide
  Target: LAMA2; (+) strand; PAM type: YTN; PAM sequence: CTC
tctctaatgtataaagaagt

SEQ ID NO: 359659 - DNA, 20 bp, Artificial Sequence
  Description of Artificial Sequence: Synthetic oligonucleotide
  Target: LAMA2; (+) strand; PAM type: YTN; PAM sequence: CTC
tctaatgtataaagaagtta

SEQ ID NO: 359660 - DNA, 20 bp, Artificial Sequence
  Description of Artificial Sequence: Synthetic oligonucleotide
  Target: LAMA2; (+) strand; PAM type: YTN; PAM sequence: CTC
taatgtataaagaagttaaa

SEQ ID NO: 359661 - DNA, 20 bp, Artificial Sequence
  Description of Artificial Sequence: Synthetic oligonucleotide
  Target: LAMA2; (+) strand; PAM type: YTN; PAM sequence: CTA
atgtataaagaagttaaaga

SEQ ID NO: 359662 - DNA, 20 bp, Artificial Sequence
  Description of Artificial Sequence: Synthetic oligonucleotide
  Target: LAMA2; (+) strand; PAM type: YTN; PAM sequence: TTA
aagaaattgataacagaaag

SEQ ID NO: 359663 - DNA, 20 bp, Artificial Sequence
  Description of Artificial Sequence: Synthetic oligonucleotide
  Target: LAMA2; (+) strand; PAM type: YTN; PAM sequence: TTG
ataacagaaaggccagcagt

SEQ ID NO: 359664 - DNA, 20 bp, Artificial Sequence
  Description of Artificial Sequence: Synthetic oligonucleotide
  Target: LAMA2; (+) strand; PAM type: YTN; PAM sequence: TTT
atagagaaggaaatttaaat

SEQ ID NO: 359665 - DNA, 20 bp, Artificial Sequence
  Description of Artificial Sequence: Synthetic oligonucleotide
  Target: LAMA2; (+) strand; PAM type: YTN; PAM sequence: TTA
tagagaaggaaatttaaatg

SEQ ID NO: 359666 - DNA, 20 bp, Artificial Sequence
  Description of Artificial Sequence: Synthetic oligonucleotide
  Target: LAMA2; (+) strand; PAM type: YTN; PAM sequence: TTT
aaatggctcttaaatgtatg

SEQ ID NO: 359667 - DNA, 20 bp, Artificial Sequence
  Description of Artificial Sequence: Synthetic oligonucleotide
  Target: LAMA2; (+) strand; PAM type: YTN; PAM sequence: TTA
aatggctcttaaatgtatga

SEQ ID NO: 359668 - DNA, 20 bp, Artificial Sequence
  Description of Artificial Sequence: Synthetic oligonucleotide
  Target: LAMA2; (+) strand; PAM type: YTN; PAM sequence: CTC
ttaaatgtatgaaacggtac

SEQ ID NO: 359669 - DNA, 20 bp, Artificial Sequence
  Description of Artificial Sequence: Synthetic oligonucleotide
  Target: LAMA2; (+) strand; PAM type: YTN; PAM sequence: CTT
aaatgtatgaaacggtactc

SEQ ID NO: 359670 - DNA, 20 bp, Artificial Sequence
  Description of Artificial Sequence: Synthetic oligonucleotide
  Target: LAMA2; (+) strand; PAM type: YTN; PAM sequence: TTA
aatgtatgaaacggtactca

SEQ ID NO: 359671 - DNA, 20 bp, Artificial Sequence
  Description of Artificial Sequence: Synthetic oligonucleotide
  Target: LAMA2; (+) strand; PAM type: YTN; PAM sequence: CTC
aacccgactcatagtatgct

SEQ ID NO: 359672 - DNA, 20 bp, Artificial Sequence
  Description of Artificial Sequence: Synthetic oligonucleotide
  Target: LAMA2; (+) strand; PAM type: YTN; PAM sequence: CTC
atagtatgctaactacactg

SEQ ID NO: 359673 - DNA, 20 bp, Artificial Sequence
  Description of Artificial Sequence: Synthetic oligonucleotide
  Target: LAMA2; (+) strand; PAM type: YTN; PAM sequence: CTA
actacactgagaaatcattg

SEQ ID NO: 359674 - DNA, 20 bp, Artificial Sequence
  Description of Artificial Sequence: Synthetic oligonucleotide
  Target: LAMA2; (+) strand; PAM type: YTN; PAM sequence: CTA
cactgagaaatcattgtctt

SEQ ID NO: 359675 - DNA, 20 bp, Artificial Sequence
  Description of Artificial Sequence: Synthetic oligonucleotide
  Target: LAMA2; (+) strand; PAM type: YTN; PAM sequence: CTG
agaaatcattgtcttctaac

SEQ ID NO: 359676 - DNA, 20 bp, Artificial Sequence
  Description of Artificial Sequence: Synthetic oligonucleotide
  Target: LAMA2; (+) strand; PAM type: YTN; PAM sequence: TTG
tcttctaacatataggaaag

SEQ ID NO: 359677 - DNA, 20 bp, Artificial Sequence
  Description of Artificial Sequence: Synthetic oligonucleotide
  Target: LAMA2; (+) strand; PAM type: YTN; PAM sequence: CTT
ctaacatataggaaagtcaa

SEQ ID NO: 359678 - DNA, 20 bp, Artificial Sequence
  Description of Artificial Sequence: Synthetic oligonucleotide
  Target: LAMA2; (+) strand; PAM type: YTN; PAM sequence: TTC
taacatataggaaagtcaac

SEQ ID NO: 359679 - DNA, 20 bp, Artificial Sequence
  Description of Artificial Sequence: Synthetic oligonucleotide
  Target: LAMA2; (+) strand; PAM type: YTN; PAM sequence: CTA
acatataggaaagtcaacca

SEQ ID NO: 359680 - DNA, 20 bp, Artificial Sequence
  Description of Artificial Sequence: Synthetic oligonucleotide
  Target: LAMA2; (+) strand; PAM type: YTN; PAM sequence: TTC
ctgtggcttcttcaggaaca

SEQ ID NO: 359681 - DNA, 20 bp, Artificial Sequence
  Description of Artificial Sequence: Synthetic oligonucleotide
  Target: LAMA2; (+) strand; PAM type: YTN; PAM sequence: CTG
tggcttcttcaggaacaaag

SEQ ID NO: 359682 - DNA, 20 bp, Artificial Sequence
  Description of Artificial Sequence: Synthetic oligonucleotide
  Target: LAMA2; (+) strand; PAM type: YTN; PAM sequence: CTT
cttcaggaacaaaggtcctc

SEQ ID NO: 359683 - DNA, 20 bp, Artificial Sequence
  Description of Artificial Sequence: Synthetic oligonucleotide
  Target: LAMA2; (+) strand; PAM type: YTN; PAM sequence: TTC
ttcaggaacaaaggtcctcc

SEQ ID NO: 359684 - DNA, 20 bp, Artificial Sequence
  Description of Artificial Sequence: Synthetic oligonucleotide
  Target: LAMA2; (+) strand; PAM type: YTN; PAM sequence: CTT
caggaacaaaggtcctccta

SEQ ID NO: 359685 - DNA, 20 bp, Artificial Sequence
  Description of Artificial Sequence: Synthetic oligonucleotide
  Target: LAMA2; (+) strand; PAM type: YTN; PAM sequence: TTC
aggaacaaaggtcctcctaa

SEQ ID NO: 359686 - DNA, 20 bp, Artificial Sequence
  Description of Artificial Sequence: Synthetic oligonucleotide
  Target: LAMA2; (+) strand; PAM type: YTN; PAM sequence: CTC
ctaaattggtagtgtgaata

SEQ ID NO: 359687 - DNA, 20 bp, Artificial Sequence
  Description of Artificial Sequence: Synthetic oligonucleotide
  Target: LAMA2; (+) strand; PAM type: YTN; PAM sequence: CTA
aattggtagtgtgaatatac

SEQ ID NO: 359688 - DNA, 20 bp, Artificial Sequence
  Description of Artificial Sequence: Synthetic oligonucleotide
  Target: LAMA2; (+) strand; PAM type: YTN; PAM sequence: TTG
gtagtgtgaatatacattga

SEQ ID NO: 359689 - DNA, 20 bp, Artificial Sequence
  Description of Artificial Sequence: Synthetic oligonucleotide
  Target: LAMA2; (+) strand; PAM type: YTN; PAM sequence: TTG
atgcaatccaaaaaaaaaat

SEQ ID NO: 359690 - DNA, 20 bp, Artificial Sequence
  Description of Artificial Sequence: Synthetic oligonucleotide
  Target: LAMA2; (+) strand; PAM type: YTN; PAM sequence: TTA
tagctgggcagggtggctca

SEQ ID NO: 359691 - DNA, 20 bp, Artificial Sequence
  Description of Artificial Sequence: Synthetic oligonucleotide
  Target: LAMA2; (+) strand; PAM type: YTN; PAM sequence: CTG
ggcagggtggctcatgcctg

SEQ ID NO: 359692 - DNA, 20 bp, Artificial Sequence
  Description of Artificial Sequence: Synthetic oligonucleotide
  Target: LAMA2; (+) strand; PAM type: YTN; PAM sequence: CTC
atgcctgtaatcccagcact

SEQ ID NO: 359693 - DNA, 20 bp, Artificial Sequence
  Description of Artificial Sequence: Synthetic oligonucleotide
  Target: LAMA2; (+) strand; PAM type: YTN; PAM sequence: CTG
taatcccagcactttgggag

SEQ ID NO: 359694 - DNA, 20 bp, Artificial Sequence
  Description of Artificial Sequence: Synthetic oligonucleotide
  Target: LAMA2; (+) strand; PAM type: YTN; PAM sequence: CTT
tgggaggctgaggcagatgg

SEQ ID NO: 359695 - DNA, 20 bp, Artificial Sequence
  Description of Artificial Sequence: Synthetic oligonucleotide
  Target: LAMA2; (+) strand; PAM type: YTN; PAM sequence: TTT
gggaggctgaggcagatgga

SEQ ID NO: 359696 - DNA, 20 bp, Artificial Sequence
  Description of Artificial Sequence: Synthetic oligonucleotide
  Target: LAMA2; (+) strand; PAM type: YTN; PAM sequence: TTG
ggaggctgaggcagatggat

SEQ ID NO: 359697 - DNA, 20 bp, Artificial Sequence
  Description of Artificial Sequence: Synthetic oligonucleotide
  Target: LAMA2; (+) strand; PAM type: YTN; PAM sequence: CTG
aggcagatggatcacgacgt

SEQ ID NO: 359698 - DNA, 20 bp, Artificial Sequence
  Description of Artificial Sequence: Synthetic oligonucleotide
  Target: LAMA2; (+) strand; PAM type: YTN; PAM sequence: CTG
gttaacatggtgaaaccccg

SEQ ID NO: 359699 - DNA, 20 bp, Artificial Sequence
  Description of Artificial Sequence: Synthetic oligonucleotide
  Target: LAMA2; (+) strand; PAM type: YTN; PAM sequence: TTA
acatggtgaaaccccgtctc

SEQ ID NO: 359700 - DNA, 20 bp, Artificial Sequence
  Description of Artificial Sequence: Synthetic oligonucleotide
  Target: LAMA2; (+) strand; PAM type: YTN; PAM sequence: CTC
tactaaaaaaaatacaaaaa

SEQ ID NO: 359701 - DNA, 20 bp, Artificial Sequence
  Description of Artificial Sequence: Synthetic oligonucleotide
  Target: LAMA2; (+) strand; PAM type: YTN; PAM sequence: CTA
ctaaaaaaaatacaaaaaat

SEQ ID NO: 359702 - DNA, 20 bp, Artificial Sequence
  Description of Artificial Sequence: Synthetic oligonucleotide
  Target: LAMA2; (+) strand; PAM type: YTN; PAM sequence: CTA
aaaaaaatacaaaaaattag

SEQ ID NO: 359703 - DNA, 20 bp, Artificial Sequence
  Description of Artificial Sequence: Synthetic oligonucleotide
  Target: LAMA2; (+) strand; PAM type: YTN; PAM sequence: TTA
gctggacctagtggcacacg

SEQ ID NO: 359704 - DNA, 20 bp, Artificial Sequence
  Description of Artificial Sequence: Synthetic oligonucleotide
  Target: LAMA2; (+) strand; PAM type: YTN; PAM sequence: CTG
gacctagtggcacacgcctg

SEQ ID NO: 359705 - DNA, 20 bp, Artificial Sequence
  Description of Artificial Sequence: Synthetic oligonucleotide
  Target: LAMA2; (+) strand; PAM type: YTN; PAM sequence: CTA
gtggcacacgcctgtagtcc

SEQ ID NO: 359706 - DNA, 20 bp, Artificial Sequence
  Description of Artificial Sequence: Synthetic oligonucleotide
  Target: LAMA2; (+) strand; PAM type: YTN; PAM sequence: CTG
tagtcccagctacttgagag

SEQ ID NO: 359707 - DNA, 20 bp, Artificial Sequence
  Description of Artificial Sequence: Synthetic oligonucleotide
  Target: LAMA2; (+) strand; PAM type: YTN; PAM sequence: CTA
cttgagaggctgaggcagga

SEQ ID NO: 359708 - DNA, 20 bp, Artificial Sequence
  Description of Artificial Sequence: Synthetic oligonucleotide
  Target: LAMA2; (+) strand; PAM type: YTN; PAM sequence: CTT
gagaggctgaggcaggagaa

SEQ ID NO: 359709 - DNA, 20 bp, Artificial Sequence
  Description of Artificial Sequence: Synthetic oligonucleotide
  Target: LAMA2; (+) strand; PAM type: YTN; PAM sequence: TTG
agaggctgaggcaggagaat

SEQ ID NO: 359710 - DNA, 20 bp, Artificial Sequence
  Description of Artificial Sequence: Synthetic oligonucleotide
  Target: LAMA2; (+) strand; PAM type: YTN; PAM sequence: CTG
aggcaggagaatcgcttgaa

SEQ ID NO: 359711 - DNA, 20 bp, Artificial Sequence
  Description of Artificial Sequence: Synthetic oligonucleotide
  Target: LAMA2; (+) strand; PAM type: YTN; PAM sequence: CTT
gaatccaggaggcagaggtt

SEQ ID NO: 359712 - DNA, 20 bp, Artificial Sequence
  Description of Artificial Sequence: Synthetic oligonucleotide
  Target: LAMA2; (+) strand; PAM type: YTN; PAM sequence: TTG
aatccaggaggcagaggttg

SEQ ID NO: 359713 - DNA, 20 bp, Artificial Sequence
  Description of Artificial Sequence: Synthetic oligonucleotide
  Target: LAMA2; (+) strand; PAM type: YTN; PAM sequence: TTG
cagtgagcagagatcatgcc

SEQ ID NO: 359714 - DNA, 20 bp, Artificial Sequence
  Description of Artificial Sequence: Synthetic oligonucleotide
  Target: LAMA2; (+) strand; PAM type: YTN; PAM sequence: CTA
cactccagcctgggtgacag

SEQ ID NO: 359715 - DNA, 20 bp, Artificial Sequence
  Description of Artificial Sequence: Synthetic oligonucleotide
  Target: LAMA2; (+) strand; PAM type: YTN; PAM sequence: CTC
cagcctgggtgacagagcaa

SEQ ID NO: 359716 - DNA, 20 bp, Artificial Sequence
  Description of Artificial Sequence: Synthetic oligonucleotide
  Target: LAMA2; (+) strand; PAM type: YTN; PAM sequence: CTG
ggtgacagagcaagggattc

SEQ ID NO: 359717 - DNA, 20 bp, Artificial Sequence
  Description of Artificial Sequence: Synthetic oligonucleotide
  Target: LAMA2; (+) strand; PAM type: YTN; PAM sequence: TTC
catctcaaaaaaaaaagaaa

SEQ ID NO: 359718 - DNA, 20 bp, Artificial Sequence
  Description of Artificial Sequence: Synthetic oligonucleotide
  Target: LAMA2; (+) strand; PAM type: YTN; PAM sequence: CTC
aaaaaaaaaagaaaaaagaa

SEQ ID NO: 359719 - DNA, 20 bp, Artificial Sequence
  Description of Artificial Sequence: Synthetic oligonucleotide
  Target: LAMA2; (+) strand; PAM type: YTN; PAM sequence: TTA
taaatgcacagtcttacata

SEQ ID NO: 359720 - DNA, 20 bp, Artificial Sequence
  Description of Artificial Sequence: Synthetic oligonucleotide
  Target: LAMA2; (+) strand; PAM type: YTN; PAM sequence: CTT
acatacttctcttctgggaa

SEQ ID NO: 359721 - DNA, 20 bp, Artificial Sequence
  Description of Artificial Sequence: Synthetic oligonucleotide
  Target: LAMA2; (+) strand; PAM type: YTN; PAM sequence: TTA
catacttctcttctgggaat

SEQ ID NO: 359722 - DNA, 20 bp, Artificial Sequence
  Description of Artificial Sequence: Synthetic oligonucleotide
  Target: LAMA2; (+) strand; PAM type: YTN; PAM sequence: CTT
ctcttctgggaatttattct

SEQ ID NO: 359723 - DNA, 20 bp, Artificial Sequence
  Description of Artificial Sequence: Synthetic oligonucleotide
  Target: LAMA2; (+) strand; PAM type: YTN; PAM sequence: TTC
tcttctgggaatttattctg

SEQ ID NO: 359724 - DNA, 20 bp, Artificial Sequence
  Description of Artificial Sequence: Synthetic oligonucleotide
  Target: LAMA2; (+) strand; PAM type: YTN; PAM sequence: CTC
ttctgggaatttattctgta

SEQ ID NO: 359725 - DNA, 20 bp, Artificial Sequence
  Description of Artificial Sequence: Synthetic oligonucleotide
  Target: LAMA2; (+) strand; PAM type: YTN; PAM sequence: CTT
ctgggaatttattctgtaag

SEQ ID NO: 359726 - DNA, 20 bp, Artificial Sequence
  Description of Artificial Sequence: Synthetic oligonucleotide
  Target: LAMA2; (+) strand; PAM type: YTN; PAM sequence: TTC
tgggaatttattctgtaagt

SEQ ID NO: 359727 - DNA, 20 bp, Artificial Sequence
  Description of Artificial Sequence: Synthetic oligonucleotide
  Target: LAMA2; (+) strand; PAM type: YTN; PAM sequence: CTG
ggaatttattctgtaagtat

SEQ ID NO: 359728 - DNA, 20 bp, Artificial Sequence
  Description of Artificial Sequence: Synthetic oligonucleotide
  Target: LAMA2; (+) strand; PAM type: YTN; PAM sequence: TTT
attctgtaagtatatatata

SEQ ID NO: 359729 - DNA, 20 bp, Artificial Sequence
  Description of Artificial Sequence: Synthetic oligonucleotide
  Target: LAMA2; (+) strand; PAM type: YTN; PAM sequence: TTA
ttctgtaagtatatatatat

SEQ ID NO: 359730 - DNA, 20 bp, Artificial Sequence
  Description of Artificial Sequence: Synthetic oligonucleotide
  Target: LAMA2; (+) strand; PAM type: YTN; PAM sequence: TTC
tgtaagtatatatatatata

SEQ ID NO: 359731 - DNA, 20 bp, Artificial Sequence
  Description of Artificial Sequence: Synthetic oligonucleotide
  Target: LAMA2; (+) strand; PAM type: YTN; PAM sequence: CTG
taagtatatatatatatata

SEQ ID NO: 359732 - DNA, 20 bp, Artificial Sequence
  Description of Artificial Sequence: Synthetic oligonucleotide
  Target: LAMA2; (+) strand; PAM type: YTN; PAM sequence: TTC
attccagaaatgtttgtaat

SEQ ID NO: 359733 - DNA, 20 bp, Artificial Sequence
  Description of Artificial Sequence: Synthetic oligonucleotide
  Target: LAMA2; (+) strand; PAM type: YTN; PAM sequence: TTC
cagaaatgtttgtaattgtc

SEQ ID NO: 359734 - DNA, 20 bp, Artificial Sequence
  Description of Artificial Sequence: Synthetic oligonucleotide
  Target: LAMA2; (+) strand; PAM type: YTN; PAM sequence: TTT
gtaattgtcaccacaaagct

SEQ ID NO: 359735 - DNA, 20 bp, Artificial Sequence
  Description of Artificial Sequence: Synthetic oligonucleotide
  Target: LAMA2; (+) strand; PAM type: YTN; PAM sequence: TTG
taattgtcaccacaaagctg

SEQ ID NO: 359736 - DNA, 20 bp, Artificial Sequence
  Description of Artificial Sequence: Synthetic oligonucleotide
  Target: LAMA2; (+) strand; PAM type: YTN; PAM sequence: TTG
tcaccacaaagctgccaatc

SEQ ID NO: 359737 - DNA, 20 bp, Artificial Sequence
  Description of Artificial Sequence: Synthetic oligonucleotide
  Target: LAMA2; (+) strand; PAM type: YTN; PAM sequence: CTG
ccaatcactgagagactgat

SEQ ID NO: 359738 - DNA, 20 bp, Artificial Sequence
  Description of Artificial Sequence: Synthetic oligonucleotide
  Target: LAMA2; (+) strand; PAM type: YTN; PAM sequence: CTG
agagactgattaaatgagtt

SEQ ID NO: 359739 - DNA, 20 bp, Artificial Sequence
  Description of Artificial Sequence: Synthetic oligonucleotide
  Target: LAMA2; (+) strand; PAM type: YTN; PAM sequence: CTG
attaaatgagttttggtaca

SEQ ID NO: 359740 - DNA, 20 bp, Artificial Sequence
  Description of Artificial Sequence: Synthetic oligonucleotide
  Target: LAMA2; (+) strand; PAM type: YTN; PAM sequence: TTA
aatgagttttggtacactcg

SEQ ID NO: 359741 - DNA, 20 bp, Artificial Sequence
  Description of Artificial Sequence: Synthetic oligonucleotide
  Target: LAMA2; (+) strand; PAM type: YTN; PAM sequence: TTT
tggtacactcgtgccatcaa

SEQ ID NO: 359742 - DNA, 20 bp, Artificial Sequence
  Description of Artificial Sequence: Synthetic oligonucleotide
  Target: LAMA2; (+) strand; PAM type: YTN; PAM sequence: TTT
ggtacactcgtgccatcaaa

SEQ ID NO: 359743 - DNA, 20 bp, Artificial Sequence
  Description of Artificial Sequence: Synthetic oligonucleotide
  Target: LAMA2; (+) strand; PAM type: YTN; PAM sequence: TTG
gtacactcgtgccatcaaac

SEQ ID NO: 359744 - DNA, 20 bp, Artificial Sequence
  Description of Artificial Sequence: Synthetic oligonucleotide
  Target: LAMA2; (+) strand; PAM type: YTN; PAM sequence: CTC
gtgccatcaaacactataaa

SEQ ID NO: 359745 - DNA, 20 bp, Artificial Sequence
  Description of Artificial Sequence: Synthetic oligonucleotide
  Target: LAMA2; (+) strand; PAM type: YTN; PAM sequence: CTA
taaaattattaaaaaaggaa

SEQ ID NO: 359746 - DNA, 20 bp, Artificial Sequence
  Description of Artificial Sequence: Synthetic oligonucleotide
  Target: LAMA2; (+) strand; PAM type: YTN; PAM sequence: TTA
ttaaaaaaggaaggaagatt

SEQ ID NO: 359747 - DNA, 20 bp, Artificial Sequence
  Description of Artificial Sequence: Synthetic oligonucleotide
  Target: LAMA2; (+) strand; PAM type: YTN; PAM sequence: TTA
aaaaaggaaggaagattttt

SEQ ID NO: 359748 - DNA, 20 bp, Artificial Sequence
  Description of Artificial Sequence: Synthetic oligonucleotide
  Target: LAMA2; (+) strand; PAM type: YTN; PAM sequence: TTT
ttgtataataatatggaatg

SEQ ID NO: 359749 - DNA, 20 bp, Artificial Sequence
  Description of Artificial Sequence: Synthetic oligonucleotide
  Target: LAMA2; (+) strand; PAM type: YTN; PAM sequence: TTT
tgtataataatatggaatga

SEQ ID NO: 359750 - DNA, 20 bp, Artificial Sequence
  Description of Artificial Sequence: Synthetic oligonucleotide
  Target: LAMA2; (+) strand; PAM type: YTN; PAM sequence: TTT
gtataataatatggaatgat

SEQ ID NO: 359751 - DNA, 20 bp, Artificial Sequence
  Description of Artificial Sequence: Synthetic oligonucleotide
  Target: LAMA2; (+) strand; PAM type: YTN; PAM sequence: TTG
tataataatatggaatgatc

SEQ ID NO: 359752 - DNA, 20 bp, Artificial Sequence
  Description of Artificial Sequence: Synthetic oligonucleotide
  Target: LAMA2; (+) strand; PAM type: YTN; PAM sequence: TTT
taaataaattaaacttagga

SEQ ID NO: 359753 - DNA, 20 bp, Artificial Sequence
  Description of Artificial Sequence: Synthetic oligonucleotide
  Target: LAMA2; (+) strand; PAM type: YTN; PAM sequence: TTT
aaataaattaaacttaggag

SEQ ID NO: 359754 - DNA, 20 bp, Artificial Sequence
  Description of Artificial Sequence: Synthetic oligonucleotide
  Target: LAMA2; (+) strand; PAM type: YTN; PAM sequence: TTA
aataaattaaacttaggagg

SEQ ID NO: 359755 - DNA, 20 bp, Artificial Sequence
  Description of Artificial Sequence: Synthetic oligonucleotide
  Target: LAMA2; (+) strand; PAM type: YTN; PAM sequence: TTA
aacttaggaggccaggtgca

SEQ ID NO: 359756 - DNA, 20 bp, Artificial Sequence
  Description of Artificial Sequence: Synthetic oligonucleotide
  Target: LAMA2; (+) strand; PAM type: YTN; PAM sequence: CTT
aggaggccaggtgcactggc

SEQ ID NO: 359757 - DNA, 20 bp, Artificial Sequence
  Description of Artificial Sequence: Synthetic oligonucleotide
  Target: LAMA2; (+) strand; PAM type: YTN; PAM sequence: TTA
ggaggccaggtgcactggct

SEQ ID NO: 359758 - DNA, 20 bp, Artificial Sequence
  Description of Artificial Sequence: Synthetic oligonucleotide
  Target: LAMA2; (+) strand; PAM type: YTN; PAM sequence: CTG
gctcacgcctgtaatcccaa

SEQ ID NO: 359759 - DNA, 20 bp, Artificial Sequence
  Description of Artificial Sequence: Synthetic oligonucleotide
  Target: LAMA2; (+) strand; PAM type: YTN; PAM sequence: CTC
acgcctgtaatcccaacact

SEQ ID NO: 359760 - DNA, 20 bp, Artificial Sequence
  Description of Artificial Sequence: Synthetic oligonucleotide
  Target: LAMA2; (+) strand; PAM type: YTN; PAM sequence: CTG
taatcccaacacttttggtg

SEQ ID NO: 359761 - DNA, 20 bp, Artificial Sequence
  Description of Artificial Sequence: Synthetic oligonucleotide
  Target: LAMA2; (+) strand; PAM type: YTN; PAM sequence: CTT
ttggtggttgagacaggcag

SEQ ID NO: 359762 - DNA, 20 bp, Artificial Sequence
  Description of Artificial Sequence: Synthetic oligonucleotide
  Target: LAMA2; (+) strand; PAM type: YTN; PAM sequence: TTT
tggtggttgagacaggcaga

SEQ ID NO: 359763 - DNA, 20 bp, Artificial Sequence
  Description of Artificial Sequence: Synthetic oligonucleotide
  Target: LAMA2; (+) strand; PAM type: YTN; PAM sequence: TTT
ggtggttgagacaggcagat

SEQ ID NO: 359764 - DNA, 20 bp, Artificial Sequence
  Description of Artificial Sequence: Synthetic oligonucleotide
  Target: LAMA2; (+) strand; PAM type: YTN; PAM sequence: TTG
gtggttgagacaggcagatc

SEQ ID NO: 359765 - DNA, 20 bp, Artificial Sequence
  Description of Artificial Sequence: Synthetic oligonucleotide
  Target: LAMA2; (+) strand; PAM type: YTN; PAM sequence: TTG
agacaggcagatcactggag

SEQ ID NO: 359766 - DNA, 20 bp, Artificial Sequence
  Description of Artificial Sequence: Synthetic oligonucleotide
  Target: LAMA2; (+) strand; PAM type: YTN; PAM sequence: CTG
gagaccaggagttcaagacc

SEQ ID NO: 359767 - DNA, 20 bp, Artificial Sequence
  Description of Artificial Sequence: Synthetic oligonucleotide
  Target: LAMA2; (+) strand; PAM type: YTN; PAM sequence: TTC
aagaccagcctggccaacat

SEQ ID NO: 359768 - DNA, 20 bp, Artificial Sequence
  Description of Artificial Sequence: Synthetic oligonucleotide
  Target: LAMA2; (+) strand; PAM type: YTN; PAM sequence: CTG
gccaacatggtgaaacccca

SEQ ID NO: 359769 - DNA, 20 bp, Artificial Sequence
  Description of Artificial Sequence: Synthetic oligonucleotide
  Target: LAMA2; (+) strand; PAM type: YTN; PAM sequence: CTC
tactaaaaatacaaaaatta

SEQ ID NO: 359770 - DNA, 20 bp, Artificial Sequence
  Description of Artificial Sequence: Synthetic oligonucleotide
  Target: LAMA2; (+) strand; PAM type: YTN; PAM sequence: CTA
ctaaaaatacaaaaattagc

SEQ ID NO: 359771 - DNA, 20 bp, Artificial Sequence
  Description of Artificial Sequence: Synthetic oligonucleotide
  Target: LAMA2; (+) strand; PAM type: YTN; PAM sequence: CTA
aaaatacaaaaattagcggg

SEQ ID NO: 359772 - DNA, 20 bp, Artificial Sequence
  Description of Artificial Sequence: Synthetic oligonucleotide
  Target: LAMA2; (+) strand; PAM type: YTN; PAM sequence: TTA
gcgggtgtggtggtgtgtgc

SEQ ID NO: 359773 - DNA, 20 bp, Artificial Sequence
  Description of Artificial Sequence: Synthetic oligonucleotide
  Target: LAMA2; (+) strand; PAM type: YTN; PAM sequence: CTA
ccagggaggctgaggcatga

SEQ ID NO: 359774 - DNA, 20 bp, Artificial Sequence
  Description of Artificial Sequence: Synthetic oligonucleotide
  Target: LAMA2; (+) strand; PAM type: YTN; PAM sequence: CTG
aggcatgagaatcacctgaa

SEQ ID NO: 359775 - DNA, 20 bp, Artificial Sequence
  Description of Artificial Sequence: Synthetic oligonucleotide
  Target: LAMA2; (+) strand; PAM type: YTN; PAM sequence: CTG
aactccggaggcggagattg

SEQ ID NO: 359776 - DNA, 20 bp, Artificial Sequence
  Description of Artificial Sequence: Synthetic oligonucleotide
  Target: LAMA2; (+) strand; PAM type: YTN; PAM sequence: CTC
cggaggcggagattgcagtg

SEQ ID NO: 359777 - DNA, 20 bp, Artificial Sequence
  Description of Artificial Sequence: Synthetic oligonucleotide
  Target: LAMA2; (+) strand; PAM type: YTN; PAM sequence: TTG
cagtgagctgaaattgtgcc

SEQ ID NO: 359778 - DNA, 20 bp, Artificial Sequence
  Description of Artificial Sequence: Synthetic oligonucleotide
  Target: LAMA2; (+) strand; PAM type: YTN; PAM sequence: CTG
aaattgtgccactgcactcc

SEQ ID NO: 359779 - DNA, 20 bp, Artificial Sequence
  Description of Artificial Sequence: Synthetic oligonucleotide
  Target: LAMA2; (+) strand; PAM type: YTN; PAM sequence: TTG
tgccactgcactccagcctg

SEQ ID NO: 359780 - DNA, 20 bp, Artificial Sequence
  Description of Artificial Sequence: Synthetic oligonucleotide
  Target: LAMA2; (+) strand; PAM type: YTN; PAM sequence: CTG
cactccagcctgggtgacag

SEQ ID NO: 359781 - DNA, 20 bp, Artificial Sequence
  Description of Artificial Sequence: Synthetic oligonucleotide
  Target: LAMA2; (+) strand; PAM type: YTN; PAM sequence: CTC
cagcctgggtgacagactga

SEQ ID NO: 359782 - DNA, 20 bp, Artificial Sequence
  Description of Artificial Sequence: Synthetic oligonucleotide
  Target: LAMA2; (+) strand; PAM type: YTN; PAM sequence: CTG
ggtgacagactgagactcca

SEQ ID NO: 359783 - DNA, 20 bp, Artificial Sequence
  Description of Artificial Sequence: Synthetic oligonucleotide
  Target: LAMA2; (+) strand; PAM type: YTN; PAM sequence: CTG
agactccatctcaaaaaaaa

SEQ ID NO: 359784 - DNA, 20 bp, Artificial Sequence
  Description of Artificial Sequence: Synthetic oligonucleotide
  Target: LAMA2; (+) strand; PAM type: YTN; PAM sequence: CTC
catctcaaaaaaaaaagaaa

SEQ ID NO: 359785 - DNA, 20 bp, Artificial Sequence
  Description of Artificial Sequence: Synthetic oligonucleotide
  Target: LAMA2; (+) strand; PAM type: YTN; PAM sequence: CTC
aaaaaaaaaagaaaggaaaa

SEQ ID NO: 359786 - DNA, 20 bp, Artificial Sequence
  Description of Artificial Sequence: Synthetic oligonucleotide
  Target: LAMA2; (+) strand; PAM type: YTN; PAM sequence: TTA
aacctaggaacaaagtagtt

SEQ ID NO: 359787 - DNA, 20 bp, Artificial Sequence
  Description of Artificial Sequence: Synthetic oligonucleotide
  Target: LAMA2; (+) strand; PAM type: YTN; PAM sequence: CTA
ggaacaaagtagtttatcta

SEQ ID NO: 359788 - DNA, 20 bp, Artificial Sequence
  Description of Artificial Sequence: Synthetic oligonucleotide
  Target: LAMA2; (+) strand; PAM type: YTN; PAM sequence: TTT
atctatctaatctatatgta

SEQ ID NO: 359789 - DNA, 20 bp, Artificial Sequence
  Description of Artificial Sequence: Synthetic oligonucleotide
  Target: LAMA2; (+) strand; PAM type: YTN; PAM sequence: TTA
tctatctaatctatatgtat

SEQ ID NO: 359790 - DNA, 20 bp, Artificial Sequence
  Description of Artificial Sequence: Synthetic oligonucleotide
  Target: LAMA2; (+) strand; PAM type: YTN; PAM sequence: CTA
tctaatctatatgtatgact

SEQ ID NO: 359791 - DNA, 20 bp, Artificial Sequence
  Description of Artificial Sequence: Synthetic oligonucleotide
  Target: LAMA2; (+) strand; PAM type: YTN; PAM sequence: CTA
atctatatgtatgactacta

SEQ ID NO: 359792 - DNA, 20 bp, Artificial Sequence
  Description of Artificial Sequence: Synthetic oligonucleotide
  Target: LAMA2; (+) strand; PAM type: YTN; PAM sequence: CTA
tatgtatgactactatttgt

SEQ ID NO: 359793 - DNA, 20 bp, Artificial Sequence
  Description of Artificial Sequence: Synthetic oligonucleotide
  Target: LAMA2; (+) strand; PAM type: YTN; PAM sequence: CTA
ctatttgtcttttaaagtgg

SEQ ID NO: 359794 - DNA, 20 bp, Artificial Sequence
  Description of Artificial Sequence: Synthetic oligonucleotide
  Target: LAMA2; (+) strand; PAM type: YTN; PAM sequence: CTA
tttgtcttttaaagtggaga

SEQ ID NO: 359795 - DNA, 20 bp, Artificial Sequence
  Description of Artificial Sequence: Synthetic oligonucleotide
  Target: LAMA2; (+) strand; PAM type: YTN; PAM sequence: TTT
gtcttttaaagtggagaaac

SEQ ID NO: 359796 - DNA, 20 bp, Artificial Sequence
  Description of Artificial Sequence: Synthetic oligonucleotide
  Target: LAMA2; (+) strand; PAM type: YTN; PAM sequence: TTG
tcttttaaagtggagaaacg

SEQ ID NO: 359797 - DNA, 20 bp, Artificial Sequence
  Description of Artificial Sequence: Synthetic oligonucleotide
  Target: LAMA2; (+) strand; PAM type: YTN; PAM sequence: CTT
ttaaagtggagaaacgaata

SEQ ID NO: 359798 - DNA, 20 bp, Artificial Sequence
  Description of Artificial Sequence: Synthetic oligonucleotide
  Target: LAMA2; (+) strand; PAM type: YTN; PAM sequence: TTT
taaagtggagaaacgaatat

SEQ ID NO: 359799 - DNA, 20 bp, Artificial Sequence
  Description of Artificial Sequence: Synthetic oligonucleotide
  Target: LAMA2; (+) strand; PAM type: YTN; PAM sequence: TTT
aaagtggagaaacgaatatg

SEQ ID NO: 359800 - DNA, 20 bp, Artificial Sequence
  Description of Artificial Sequence: Synthetic oligonucleotide
  Target: LAMA2; (+) strand; PAM type: YTN; PAM sequence: TTA
aagtggagaaacgaatatgt

SEQ ID NO: 359801 - DNA, 20 bp, Artificial Sequence
  Description of Artificial Sequence: Synthetic oligonucleotide
  Target: LAMA2; (+) strand; PAM type: YTN; PAM sequence: CTT
gtaattataaggtgacttag

SEQ ID NO: 359802 - DNA, 20 bp, Artificial Sequence
  Description of Artificial Sequence: Synthetic oligonucleotide
  Target: LAMA2; (+) strand; PAM type: YTN; PAM sequence: TTG
taattataaggtgacttagc

SEQ ID NO: 359803 - DNA, 20 bp, Artificial Sequence
  Description of Artificial Sequence: Synthetic oligonucleotide
  Target: LAMA2; (+) strand; PAM type: YTN; PAM sequence: TTA
taaggtgacttagctattta

SEQ ID NO: 359804 - DNA, 20 bp, Artificial Sequence
  Description of Artificial Sequence: Synthetic oligonucleotide
  Target: LAMA2; (+) strand; PAM type: YTN; PAM sequence: CTT
agctatttagagtcacatct

SEQ ID NO: 359805 - DNA, 20 bp, Artificial Sequence
  Description of Artificial Sequence: Synthetic oligonucleotide
  Target: LAMA2; (+) strand; PAM type: YTN; PAM sequence: TTA
gctatttagagtcacatcta

SEQ ID NO: 359806 - DNA, 20 bp, Artificial Sequence
  Description of Artificial Sequence: Synthetic oligonucleotide
  Target: LAMA2; (+) strand; PAM type: YTN; PAM sequence: CTA
tttagagtcacatctagcat

SEQ ID NO: 359807 - DNA, 20 bp, Artificial Sequence
  Description of Artificial Sequence: Synthetic oligonucleotide
  Target: LAMA2; (+) strand; PAM type: YTN; PAM sequence: TTT
agagtcacatctagcatttg

SEQ ID NO: 359808 - DNA, 20 bp, Artificial Sequence
  Description of Artificial Sequence: Synthetic oligonucleotide
  Target: LAMA2; (+) strand; PAM type: YTN; PAM sequence: TTA
gagtcacatctagcatttgc

SEQ ID NO: 359809 - DNA, 20 bp, Artificial Sequence
  Description of Artificial Sequence: Synthetic oligonucleotide
  Target: LAMA2; (+) strand; PAM type: YTN; PAM sequence: CTA
gcatttgcatcaaggtgagt

SEQ ID NO: 359810 - DNA, 20 bp, Artificial Sequence
  Description of Artificial Sequence: Synthetic oligonucleotide
  Target: LAMA2; (+) strand; PAM type: YTN; PAM sequence: TTT
gcatcaaggtgagtttgtct

SEQ ID NO: 359811 - DNA, 20 bp, Artificial Sequence
  Description of Artificial Sequence: Synthetic oligonucleotide
  Target: LAMA2; (+) strand; PAM type: YTN; PAM sequence: TTG
catcaaggtgagtttgtctc

SEQ ID NO: 359812 - DNA, 20 bp, Artificial Sequence
  Description of Artificial Sequence: Synthetic oligonucleotide
  Target: LAMA2; (+) strand; PAM type: YTN; PAM sequence: TTT
gtctcaaaagctctgttcta

SEQ ID NO: 359813 - DNA, 20 bp, Artificial Sequence
  Description of Artificial Sequence: Synthetic oligonucleotide
  Target: LAMA2; (+) strand; PAM type: YTN; PAM sequence: TTG
tctcaaaagctctgttctag

SEQ ID NO: 359814 - DNA, 20 bp, Artificial Sequence
  Description of Artificial Sequence: Synthetic oligonucleotide
  Target: LAMA2; (+) strand; PAM type: YTN; PAM sequence: CTC
aaaagctctgttctagtgcc

SEQ ID NO: 359815 - DNA, 20 bp, Artificial Sequence
  Description of Artificial Sequence: Synthetic oligonucleotide
  Target: LAMA2; (+) strand; PAM type: YTN; PAM sequence: CTC
tgttctagtgccccactcaa

SEQ ID NO: 359816 - DNA, 20 bp, Artificial Sequence
  Description of Artificial Sequence: Synthetic oligonucleotide
  Target: LAMA2; (+) strand; PAM type: YTN; PAM sequence: CTG
ttctagtgccccactcaaga

SEQ ID NO: 359817 - DNA, 20 bp, Artificial Sequence
  Description of Artificial Sequence: Synthetic oligonucleotide
  Target: LAMA2; (+) strand; PAM type: YTN; PAM sequence: TTC
tagtgccccactcaagaaca

SEQ ID NO: 359818 - DNA, 20 bp, Artificial Sequence
  Description of Artificial Sequence: Synthetic oligonucleotide
  Target: LAMA2; (+) strand; PAM type: YTN; PAM sequence: CTA
gtgccccactcaagaacaga

SEQ ID NO: 359819 - DNA, 20 bp, Artificial Sequence
  Description of Artificial Sequence: Synthetic oligonucleotide
  Target: LAMA2; (+) strand; PAM type: YTN; PAM sequence: CTC
aagaacagatattgtcaaat

SEQ ID NO: 359820 - DNA, 20 bp, Artificial Sequence
  Description of Artificial Sequence: Synthetic oligonucleotide
  Target: LAMA2; (+) strand; PAM type: YTN; PAM sequence: TTG
tcaaatttgtaaaagatatt

SEQ ID NO: 359821 - DNA, 20 bp, Artificial Sequence
  Description of Artificial Sequence: Synthetic oligonucleotide
  Target: LAMA2; (+) strand; PAM type: YTN; PAM sequence: TTT
gtaaaagatattttaactgg

SEQ ID NO: 359822 - DNA, 20 bp, Artificial Sequence
  Description of Artificial Sequence: Synthetic oligonucleotide
  Target: LAMA2; (+) strand; PAM type: YTN; PAM sequence: TTG
taaaagatattttaactgga

SEQ ID NO: 359823 - DNA, 20 bp, Artificial Sequence
  Description of Artificial Sequence: Synthetic oligonucleotide
  Target: LAMA2; (+) strand; PAM type: YTN; PAM sequence: TTT
taactggaatagacttgatt

SEQ ID NO: 359824 - DNA, 20 bp, Artificial Sequence
  Description of Artificial Sequence: Synthetic oligonucleotide
  Target: LAMA2; (+) strand; PAM type: YTN; PAM sequence: TTT
aactggaatagacttgattt

SEQ ID NO: 359825 - DNA, 20 bp, Artificial Sequence
  Description of Artificial Sequence: Synthetic oligonucleotide
  Target: LAMA2; (+) strand; PAM type: YTN; PAM sequence: TTA
actggaatagacttgatttt

SEQ ID NO: 359826 - DNA, 20 bp, Artificial Sequence
  Description of Artificial Sequence: Synthetic oligonucleotide
  Target: LAMA2; (+) strand; PAM type: YTN; PAM sequence: CTG
gaatagacttgatttttatt

SEQ ID NO: 359827 - DNA, 20 bp, Artificial Sequence
  Description of Artificial Sequence: Synthetic oligonucleotide
  Target: LAMA2; (+) strand; PAM type: YTN; PAM sequence: CTT
gatttttattgctgatttaa

SEQ ID NO: 359828 - DNA, 20 bp, Artificial Sequence
  Description of Artificial Sequence: Synthetic oligonucleotide
  Target: LAMA2; (+) strand; PAM type: YTN; PAM sequence: TTG
atttttattgctgatttaat

SEQ ID NO: 359829 - DNA, 20 bp, Artificial Sequence
  Description of Artificial Sequence: Synthetic oligonucleotide
  Target: LAMA2; (+) strand; PAM type: YTN; PAM sequence: TTT
ttattgctgatttaatctat

SEQ ID NO: 359830 - DNA, 20 bp, Artificial Sequence
  Description of Artificial Sequence: Synthetic oligonucleotide
  Target: LAMA2; (+) strand; PAM type: YTN; PAM sequence: TTT
tattgctgatttaatctatt

SEQ ID NO: 359831 - DNA, 20 bp, Artificial Sequence
  Description of Artificial Sequence: Synthetic oligonucleotide
  Target: LAMA2; (+) strand; PAM type: YTN; PAM sequence: TTT
attgctgatttaatctatta

SEQ ID NO: 359832 - DNA, 20 bp, Artificial Sequence
  Description of Artificial Sequence: Synthetic oligonucleotide
  Target: LAMA2; (+) strand; PAM type: YTN; PAM sequence: TTA
ttgctgatttaatctattac

SEQ ID NO: 359833 - DNA, 20 bp, Artificial Sequence
  Description of Artificial Sequence: Synthetic oligonucleotide
  Target: LAMA2; (+) strand; PAM type: YTN; PAM sequence: TTG
ctgatttaatctattacaaa

SEQ ID NO: 359834 - DNA, 20 bp, Artificial Sequence
  Description of Artificial Sequence: Synthetic oligonucleotide
  Target: LAMA2; (+) strand; PAM type: YTN; PAM sequence: CTG
atttaatctattacaaacta

SEQ ID NO: 359835 - DNA, 20 bp, Artificial Sequence
  Description of Artificial Sequence: Synthetic oligonucleotide
  Target: LAMA2; (+) strand; PAM type: YTN; PAM sequence: TTT
aatctattacaaactattgc

SEQ ID NO: 359836 - DNA, 20 bp, Artificial Sequence
  Description of Artificial Sequence: Synthetic oligonucleotide
  Target: LAMA2; (+) strand; PAM type: YTN; PAM sequence: TTA
atctattacaaactattgct

SEQ ID NO: 359837 - DNA, 20 bp, Artificial Sequence
  Description of Artificial Sequence: Synthetic oligonucleotide
  Target: LAMA2; (+) strand; PAM type: YTN; PAM sequence: CTA
ttacaaactattgcttttct

SEQ ID NO: 359838 - DNA, 20 bp, Artificial Sequence
  Description of Artificial Sequence: Synthetic oligonucleotide
  Target: LAMA2; (+) strand; PAM type: YTN; PAM sequence: TTA
caaactattgcttttctatt

SEQ ID NO: 359839 - DNA, 20 bp, Artificial Sequence
  Description of Artificial Sequence: Synthetic oligonucleotide
  Target: LAMA2; (+) strand; PAM type: YTN; PAM sequence: CTA
ttgcttttctattctaagct

SEQ ID NO: 359840 - DNA, 20 bp, Artificial Sequence
  Description of Artificial Sequence: Synthetic oligonucleotide
  Target: LAMA2; (+) strand; PAM type: YTN; PAM sequence: TTG
cttttctattctaagctgtt

SEQ ID NO: 359841 - DNA, 20 bp, Artificial Sequence
  Description of Artificial Sequence: Synthetic oligonucleotide
  Target: LAMA2; (+) strand; PAM type: YTN; PAM sequence: CTT
ttctattctaagctgttgta

SEQ ID NO: 359842 - DNA, 20 bp, Artificial Sequence
  Description of Artificial Sequence: Synthetic oligonucleotide
  Target: LAMA2; (+) strand; PAM type: YTN; PAM sequence: TTT
tctattctaagctgttgtaa

SEQ ID NO: 359843 - DNA, 20 bp, Artificial Sequence
  Description of Artificial Sequence: Synthetic oligonucleotide
  Target: LAMA2; (+) strand; PAM type: YTN; PAM sequence: TTT
ctattctaagctgttgtaaa

SEQ ID NO: 359844 - DNA, 20 bp, Artificial Sequence
  Description of Artificial Sequence: Synthetic oligonucleotide
  Target: LAMA2; (+) strand; PAM type: YTN; PAM sequence: TTC
tattctaagctgttgtaaaa

SEQ ID NO: 359845 - DNA, 20 bp, Artificial Sequence
  Description of Artificial Sequence: Synthetic oligonucleotide
  Target: LAMA2; (+) strand; PAM type: YTN; PAM sequence: CTA
ttctaagctgttgtaaaaat

SEQ ID NO: 359846 - DNA, 20 bp, Artificial Sequence
  Description of Artificial Sequence: Synthetic oligonucleotide
  Target: LAMA2; (+) strand; PAM type: YTN; PAM sequence: TTC
taagctgttgtaaaaattat

SEQ ID NO: 359847 - DNA, 20 bp, Artificial Sequence
  Description of Artificial Sequence: Synthetic oligonucleotide
  Target: LAMA2; (+) strand; PAM type: YTN; PAM sequence: CTA
agctgttgtaaaaattattg

SEQ ID NO: 359848 - DNA, 20 bp, Artificial Sequence
  Description of Artificial Sequence: Synthetic oligonucleotide
  Target: LAMA2; (+) strand; PAM type: YTN; PAM sequence: CTG
ttgtaaaaattattgcttta

SEQ ID NO: 359849 - DNA, 20 bp, Artificial Sequence
  Description of Artificial Sequence: Synthetic oligonucleotide
  Target: LAMA2; (+) strand; PAM type: YTN; PAM sequence: TTG
taaaaattattgctttaata

SEQ ID NO: 359850 - DNA, 20 bp, Artificial Sequence
  Description of Artificial Sequence: Synthetic oligonucleotide
  Target: LAMA2; (+) strand; PAM type: YTN; PAM sequence: TTA
ttgctttaatatgatcactt

SEQ ID NO: 359851 - DNA, 20 bp, Artificial Sequence
  Description of Artificial Sequence: Synthetic oligonucleotide
  Target: LAMA2; (+) strand; PAM type: YTN; PAM sequence: TTG
ctttaatatgatcacttaat

SEQ ID NO: 359852 - DNA, 20 bp, Artificial Sequence
  Description of Artificial Sequence: Synthetic oligonucleotide
  Target: LAMA2; (+) strand; PAM type: YTN; PAM sequence: CTT
taatatgatcacttaataag

SEQ ID NO: 359853 - DNA, 20 bp, Artificial Sequence
  Description of Artificial Sequence: Synthetic oligonucleotide
  Target: LAMA2; (+) strand; PAM type: YTN; PAM sequence: TTT
aatatgatcacttaataagc

SEQ ID NO: 359854 - DNA, 20 bp, Artificial Sequence
  Description of Artificial Sequence: Synthetic oligonucleotide
  Target: LAMA2; (+) strand; PAM type: YTN; PAM sequence: TTA
atatgatcacttaataagca

SEQ ID NO: 359855 - DNA, 20 bp, Artificial Sequence
  Description of Artificial Sequence: Synthetic oligonucleotide
  Target: LAMA2; (+) strand; PAM type: YTN; PAM sequence: CTT
aataagcattaaatgcccca

SEQ ID NO: 359856 - DNA, 20 bp, Artificial Sequence
  Description of Artificial Sequence: Synthetic oligonucleotide
  Target: LAMA2; (+) strand; PAM type: YTN; PAM sequence: TTA
ataagcattaaatgccccaa

SEQ ID NO: 359857 - DNA, 20 bp, Artificial Sequence
  Description of Artificial Sequence: Synthetic oligonucleotide
  Target: LAMA2; (+) strand; PAM type: YTN; PAM sequence: TTA
aatgccccaatcctatctgc

SEQ ID NO: 359858 - DNA, 20 bp, Artificial Sequence
  Description of Artificial Sequence: Synthetic oligonucleotide
  Target: LAMA2; (+) strand; PAM type: YTN; PAM sequence: CTA
tctgctaaaaattgtttggc

SEQ ID NO: 359859 - DNA, 20 bp, Artificial Sequence
  Description of Artificial Sequence: Synthetic oligonucleotide
  Target: LAMA2; (+) strand; PAM type: YTN; PAM sequence: CTG
ctaaaaattgtttggcatgt

SEQ ID NO: 359860 - DNA, 20 bp, Artificial Sequence
  Description of Artificial Sequence: Synthetic oligonucleotide
  Target: LAMA2; (+) strand; PAM type: YTN; PAM sequence: CTA
aaaattgtttggcatgttta

SEQ ID NO: 359861 - DNA, 20 bp, Artificial Sequence
  Description of Artificial Sequence: Synthetic oligonucleotide
  Target: LAMA2; (+) strand; PAM type: YTN; PAM sequence: TTG
tttggcatgtttaattgatc

SEQ ID NO: 359862 - DNA, 20 bp, Artificial Sequence
  Description of Artificial Sequence: Synthetic oligonucleotide
  Target: LAMA2; (+) strand; PAM type: YTN; PAM sequence: TTT
ggcatgtttaattgatcaca

SEQ ID NO: 359863 - DNA, 20 bp, Artificial Sequence
  Description of Artificial Sequence: Synthetic oligonucleotide
  Target: LAMA2; (+) strand; PAM type: YTN; PAM sequence: TTG
gcatgtttaattgatcacaa

SEQ ID NO: 359864 - DNA, 20 bp, Artificial Sequence
  Description of Artificial Sequence: Synthetic oligonucleotide
  Target: LAMA2; (+) strand; PAM type: YTN; PAM sequence: TTT
aattgatcacaaggatttga

SEQ ID NO: 359865 - DNA, 20 bp, Artificial Sequence
  Description of Artificial Sequence: Synthetic oligonucleotide
  Target: LAMA2; (+) strand; PAM type: YTN; PAM sequence: TTA
attgatcacaaggatttgaa

SEQ ID NO: 359866 - DNA, 20 bp, Artificial Sequence
  Description of Artificial Sequence: Synthetic oligonucleotide
  Target: LAMA2; (+) strand; PAM type: YTN; PAM sequence: TTG
atcacaaggatttgaatagc

SEQ ID NO: 359867 - DNA, 20 bp, Artificial Sequence
  Description of Artificial Sequence: Synthetic oligonucleotide
  Target: LAMA2; (+) strand; PAM type: YTN; PAM sequence: TTT
gaatagcactcttatctttt

SEQ ID NO: 359868 - DNA, 20 bp, Artificial Sequence
  Description of Artificial Sequence: Synthetic oligonucleotide
  Target: LAMA2; (+) strand; PAM type: YTN; PAM sequence: TTG
aatagcactcttatcttttc

SEQ ID NO: 359869 - DNA, 20 bp, Artificial Sequence
  Description of Artificial Sequence: Synthetic oligonucleotide
  Target: LAMA2; (+) strand; PAM type: YTN; PAM sequence: CTC
ttatcttttcaagtatcttc

SEQ ID NO: 359870 - DNA, 20 bp, Artificial Sequence
  Description of Artificial Sequence: Synthetic oligonucleotide
  Target: LAMA2; (+) strand; PAM type: YTN; PAM sequence: CTT
atcttttcaagtatcttcaa

SEQ ID NO: 359871 - DNA, 20 bp, Artificial Sequence
  Description of Artificial Sequence: Synthetic oligonucleotide
  Target: LAMA2; (+) strand; PAM type: YTN; PAM sequence: TTA
tcttttcaagtatcttcaag

SEQ ID NO: 359872 - DNA, 20 bp, Artificial Sequence
  Description of Artificial Sequence: Synthetic oligonucleotide
  Target: LAMA2; (+) strand; PAM type: YTN; PAM sequence: CTT
ttcaagtatcttcaagaaat

SEQ ID NO: 359873 - DNA, 20 bp, Artificial Sequence
  Description of Artificial Sequence: Synthetic oligonucleotide
  Target: LAMA2; (+) strand; PAM type: YTN; PAM sequence: TTT
tcaagtatcttcaagaaatt

SEQ ID NO: 359874 - DNA, 20 bp, Artificial Sequence
  Description of Artificial Sequence: Synthetic oligonucleotide
  Target: LAMA2; (+) strand; PAM type: YTN; PAM sequence: TTT
caagtatcttcaagaaattc

SEQ ID NO: 359875 - DNA, 20 bp, Artificial Sequence
  Description of Artificial Sequence: Synthetic oligonucleotide
  Target: LAMA2; (+) strand; PAM type: YTN; PAM sequence: TTC
aagtatcttcaagaaattct

SEQ ID NO: 359876 - DNA, 20 bp, Artificial Sequence
  Description of Artificial Sequence: Synthetic oligonucleotide
  Target: LAMA2; (+) strand; PAM type: YTN; PAM sequence: CTT
caagaaattcttattttcag

SEQ ID NO: 359877 - DNA, 20 bp, Artificial Sequence
  Description of Artificial Sequence: Synthetic oligonucleotide
  Target: LAMA2; (+) strand; PAM type: YTN; PAM sequence: TTC
aagaaattcttattttcagc

SEQ ID NO: 359878 - DNA, 20 bp, Artificial Sequence
  Description of Artificial Sequence: Synthetic oligonucleotide
  Target: LAMA2; (+) strand; PAM type: YTN; PAM sequence: TTC
ttattttcagcagggcatgt

SEQ ID NO: 359879 - DNA, 20 bp, Artificial Sequence
  Description of Artificial Sequence: Synthetic oligonucleotide
  Target: LAMA2; (+) strand; PAM type: YTN; PAM sequence: CTT
attttcagcagggcatgttg

SEQ ID NO: 359880 - DNA, 20 bp, Artificial Sequence
  Description of Artificial Sequence: Synthetic oligonucleotide
  Target: LAMA2; (+) strand; PAM type: YTN; PAM sequence: TTA
ttttcagcagggcatgttga

SEQ ID NO: 359881 - DNA, 20 bp, Artificial Sequence
  Description of Artificial Sequence: Synthetic oligonucleotide
  Target: LAMA2; (+) strand; PAM type: YTN; PAM sequence: TTT
tcagcagggcatgttgagga

SEQ ID NO: 359882 - DNA, 20 bp, Artificial Sequence
  Description of Artificial Sequence: Synthetic oligonucleotide
  Target: LAMA2; (+) strand; PAM type: YTN; PAM sequence: TTT
cagcagggcatgttgaggaa

SEQ ID NO: 359883 - DNA, 20 bp, Artificial Sequence
  Description of Artificial Sequence: Synthetic oligonucleotide
  Target: LAMA2; (+) strand; PAM type: YTN; PAM sequence: TTC
agcagggcatgttgaggaaa

SEQ ID NO: 359884 - DNA, 20 bp, Artificial Sequence
  Description of Artificial Sequence: Synthetic oligonucleotide
  Target: LAMA2; (+) strand; PAM type: YTN; PAM sequence: TTG
aggaaacataaagcttacat

SEQ ID NO: 359885 - DNA, 20 bp, Artificial Sequence
  Description of Artificial Sequence: Synthetic oligonucleotide
  Target: LAMA2; (+) strand; PAM type: YTN; PAM sequence: CTT
acattttttattcctgatgt

SEQ ID NO: 359886 - DNA, 20 bp, Artificial Sequence
  Description of Artificial Sequence: Synthetic oligonucleotide
  Target: LAMA2; (+) strand; PAM type: YTN; PAM sequence: TTA
cattttttattcctgatgtc

SEQ ID NO: 359887 - DNA, 20 bp, Artificial Sequence
  Description of Artificial Sequence: Synthetic oligonucleotide
  Target: LAMA2; (+) strand; PAM type: YTN; PAM sequence: TTT
tttattcctgatgtcttctc

SEQ ID NO: 359888 - DNA, 20 bp, Artificial Sequence
  Description of Artificial Sequence: Synthetic oligonucleotide
  Target: LAMA2; (+) strand; PAM type: YTN; PAM sequence: TTT
ttattcctgatgtcttctca

SEQ ID NO: 359889 - DNA, 20 bp, Artificial Sequence
  Description of Artificial Sequence: Synthetic oligonucleotide
  Target: LAMA2; (+) strand; PAM type: YTN; PAM sequence: TTT
tattcctgatgtcttctcat

SEQ ID NO: 359890 - DNA, 20 bp, Artificial Sequence
  Description of Artificial Sequence: Synthetic oligonucleotide
  Target: LAMA2; (+) strand; PAM type: YTN; PAM sequence: TTT
attcctgatgtcttctcatc

SEQ ID NO: 359891 - DNA, 20 bp, Artificial Sequence
  Description of Artificial Sequence: Synthetic oligonucleotide
  Target: LAMA2; (+) strand; PAM type: YTN; PAM sequence: TTA
ttcctgatgtcttctcatca

SEQ ID NO: 359892 - DNA, 20 bp, Artificial Sequence
  Description of Artificial Sequence: Synthetic oligonucleotide
  Target: LAMA2; (+) strand; PAM type: YTN; PAM sequence: TTC
ctgatgtcttctcatcactt

SEQ ID NO: 359893 - DNA, 20 bp, Artificial Sequence
  Description of Artificial Sequence: Synthetic oligonucleotide
  Target: LAMA2; (+) strand; PAM type: YTN; PAM sequence: CTG
atgtcttctcatcacttcca

SEQ ID NO: 359894 - DNA, 20 bp, Artificial Sequence
  Description of Artificial Sequence: Synthetic oligonucleotide
  Target: LAMA2; (+) strand; PAM type: YTN; PAM sequence: CTT
ctcatcacttccaacagtag

SEQ ID NO: 359895 - DNA, 20 bp, Artificial Sequence
  Description of Artificial Sequence: Synthetic oligonucleotide
  Target: LAMA2; (+) strand; PAM type: YTN; PAM sequence: TTC
tcatcacttccaacagtagc

SEQ ID NO: 359896 - DNA, 20 bp, Artificial Sequence
  Description of Artificial Sequence: Synthetic oligonucleotide
  Target: LAMA2; (+) strand; PAM type: YTN; PAM sequence: CTC
atcacttccaacagtagcca

SEQ ID NO: 359897 - DNA, 20 bp, Artificial Sequence
  Description of Artificial Sequence: Synthetic oligonucleotide
  Target: LAMA2; (+) strand; PAM type: YTN; PAM sequence: CTT
ccaacagtagccactgagtc

SEQ ID NO: 359898 - DNA, 20 bp, Artificial Sequence
  Description of Artificial Sequence: Synthetic oligonucleotide
  Target: LAMA2; (+) strand; PAM type: YTN; PAM sequence: TTC
caacagtagccactgagtca

SEQ ID NO: 359899 - DNA, 20 bp, Artificial Sequence
  Description of Artificial Sequence: Synthetic oligonucleotide
  Target: LAMA2; (+) strand; PAM type: YTN; PAM sequence: CTG
agtcaaagcagttgctctct

SEQ ID NO: 359900 - DNA, 20 bp, Artificial Sequence
  Description of Artificial Sequence: Synthetic oligonucleotide
  Target: LAMA2; (+) strand; PAM type: YTN; PAM sequence: TTG
ctctctttccttactttttc

SEQ ID NO: 359901 - DNA, 20 bp, Artificial Sequence
  Description of Artificial Sequence: Synthetic oligonucleotide
  Target: LAMA2; (+) strand; PAM type: YTN; PAM sequence: CTC
tctttccttactttttctaa

SEQ ID NO: 359902 - DNA, 20 bp, Artificial Sequence
  Description of Artificial Sequence: Synthetic oligonucleotide
  Target: LAMA2; (+) strand; PAM type: YTN; PAM sequence: CTC
tttccttactttttctaaag

SEQ ID NO: 359903 - DNA, 20 bp, Artificial Sequence
  Description of Artificial Sequence: Synthetic oligonucleotide
  Target: LAMA2; (+) strand; PAM type: YTN; PAM sequence: CTT
tccttactttttctaaagct

SEQ ID NO: 359904 - DNA, 20 bp, Artificial Sequence
  Description of Artificial Sequence: Synthetic oligonucleotide
  Target: LAMA2; (+) strand; PAM type: YTN; PAM sequence: TTT
ccttactttttctaaagctc

SEQ ID NO: 359905 - DNA, 20 bp, Artificial Sequence
  Description of Artificial Sequence: Synthetic oligonucleotide
  Target: LAMA2; (+) strand; PAM type: YTN; PAM sequence: TTC
cttactttttctaaagctct

SEQ ID NO: 359906 - DNA, 20 bp, Artificial Sequence
  Description of Artificial Sequence: Synthetic oligonucleotide
  Target: LAMA2; (+) strand; PAM type: YTN; PAM sequence: CTT
actttttctaaagctctccc

SEQ ID NO: 359907 - DNA, 20 bp, Artificial Sequence
  Description of Artificial Sequence: Synthetic oligonucleotide
  Target: LAMA2; (+) strand; PAM type: YTN; PAM sequence: TTA
ctttttctaaagctctccct

SEQ ID NO: 359908 - DNA, 20 bp, Artificial Sequence
  Description of Artificial Sequence: Synthetic oligonucleotide
  Target: LAMA2; (+) strand; PAM type: YTN; PAM sequence: CTT
tttctaaagctctccctcta

SEQ ID NO: 359909 - DNA, 20 bp, Artificial Sequence
  Description of Artificial Sequence: Synthetic oligonucleotide
  Target: LAMA2; (+) strand; PAM type: YTN; PAM sequence: TTT
ttctaaagctctccctctat

SEQ ID NO: 359910 - DNA, 20 bp, Artificial Sequence
  Description of Artificial Sequence: Synthetic oligonucleotide
  Target: LAMA2; (+) strand; PAM type: YTN; PAM sequence: TTT
tctaaagctctccctctata

SEQ ID NO: 359911 - DNA, 20 bp, Artificial Sequence
  Description of Artificial Sequence: Synthetic oligonucleotide
  Target: LAMA2; (+) strand; PAM type: YTN; PAM sequence: TTT
ctaaagctctccctctatat

SEQ ID NO: 359912 - DNA, 20 bp, Artificial Sequence
  Description of Artificial Sequence: Synthetic oligonucleotide
  Target: LAMA2; (+) strand; PAM type: YTN; PAM sequence: TTC
taaagctctccctctatatt

SEQ ID NO: 359913 - DNA, 20 bp, Artificial Sequence
  Description of Artificial Sequence: Synthetic oligonucleotide
  Target: LAMA2; (+) strand; PAM type: YTN; PAM sequence: CTA
aagctctccctctatattag

SEQ ID NO: 359914 - DNA, 20 bp, Artificial Sequence
  Description of Artificial Sequence: Synthetic oligonucleotide
  Target: LAMA2; (+) strand; PAM type: YTN; PAM sequence: CTC
tccctctatattagctgtgt

SEQ ID NO: 359915 - DNA, 20 bp, Artificial Sequence
  Description of Artificial Sequence: Synthetic oligonucleotide
  Target: LAMA2; (+) strand; PAM type: YTN; PAM sequence: CTC
cctctatattagctgtgtct

SEQ ID NO: 359916 - DNA, 20 bp, Artificial Sequence
  Description of Artificial Sequence: Synthetic oligonucleotide
  Target: LAMA2; (+) strand; PAM type: YTN; PAM sequence: CTC
tatattagctgtgtctgaga

SEQ ID NO: 359917 - DNA, 20 bp, Artificial Sequence
  Description of Artificial Sequence: Synthetic oligonucleotide
  Target: LAMA2; (+) strand; PAM type: YTN; PAM sequence: CTA
tattagctgtgtctgagatt

SEQ ID NO: 359918 - DNA, 20 bp, Artificial Sequence
  Description of Artificial Sequence: Synthetic oligonucleotide
  Target: LAMA2; (+) strand; PAM type: YTN; PAM sequence: TTA
gctgtgtctgagattgcagg

SEQ ID NO: 359919 - DNA, 20 bp, Artificial Sequence
  Description of Artificial Sequence: Synthetic oligonucleotide
  Target: LAMA2; (+) strand; PAM type: YTN; PAM sequence: CTG
tgtctgagattgcaggcagt

SEQ ID NO: 359920 - DNA, 20 bp, Artificial Sequence
  Description of Artificial Sequence: Synthetic oligonucleotide
  Target: LAMA2; (+) strand; PAM type: YTN; PAM sequence: CTG
agattgcaggcagttaaaat

SEQ ID NO: 359921 - DNA, 20 bp, Artificial Sequence
  Description of Artificial Sequence: Synthetic oligonucleotide
  Target: LAMA2; (+) strand; PAM type: YTN; PAM sequence: TTG
caggcagttaaaatccaaca

SEQ ID NO: 359922 - DNA, 20 bp, Artificial Sequence
  Description of Artificial Sequence: Synthetic oligonucleotide
  Target: LAMA2; (+) strand; PAM type: YTN; PAM sequence: TTA
aaatccaacatttggcacac

SEQ ID NO: 359923 - DNA, 20 bp, Artificial Sequence
  Description of Artificial Sequence: Synthetic oligonucleotide
  Target: LAMA2; (+) strand; PAM type: YTN; PAM sequence: TTT
ggcacactgaaaaaggggct

SEQ ID NO: 359924 - DNA, 20 bp, Artificial Sequence
  Description of Artificial Sequence: Synthetic oligonucleotide
  Target: LAMA2; (+) strand; PAM type: YTN; PAM sequence: TTG
gcacactgaaaaaggggcta

SEQ ID NO: 359925 - DNA, 20 bp, Artificial Sequence
  Description of Artificial Sequence: Synthetic oligonucleotide
  Target: LAMA2; (+) strand; PAM type: YTN; PAM sequence: CTG
aaaaaggggctatgtgatag

SEQ ID NO: 359926 - DNA, 20 bp, Artificial Sequence
  Description of Artificial Sequence: Synthetic oligonucleotide
  Target: LAMA2; (+) strand; PAM type: YTN; PAM sequence: CTA
tgtgatagggcctccaactg

SEQ ID NO: 359927 - DNA, 20 bp, Artificial Sequence
  Description of Artificial Sequence: Synthetic oligonucleotide
  Target: LAMA2; (+) strand; PAM type: YTN; PAM sequence: CTC
caactgaaatgtgatgaatt

SEQ ID NO: 359928 - DNA, 20 bp, Artificial Sequence
  Description of Artificial Sequence: Synthetic oligonucleotide
  Target: LAMA2; (+) strand; PAM type: YTN; PAM sequence: CTG
aaatgtgatgaattattaaa

SEQ ID NO: 359929 - DNA, 20 bp, Artificial Sequence
  Description of Artificial Sequence: Synthetic oligonucleotide
  Target: LAMA2; (+) strand; PAM type: YTN; PAM sequence: TTA
ttaaacaggtagtttgttgg

SEQ ID NO: 359930 - DNA, 20 bp, Artificial Sequence
  Description of Artificial Sequence: Synthetic oligonucleotide
  Target: LAMA2; (+) strand; PAM type: YTN; PAM sequence: TTA
aacaggtagtttgttgggtg

SEQ ID NO: 359931 - DNA, 20 bp, Artificial Sequence
  Description of Artificial Sequence: Synthetic oligonucleotide
  Target: LAMA2; (+) strand; PAM type: YTN; PAM sequence: TTT
gttgggtgattgaaaattac

SEQ ID NO: 359932 - DNA, 20 bp, Artificial Sequence
  Description of Artificial Sequence: Synthetic oligonucleotide
  Target: LAMA2; (+) strand; PAM type: YTN; PAM sequence: TTG
ttgggtgattgaaaattacc

SEQ ID NO: 359933 - DNA, 20 bp, Artificial Sequence
  Description of Artificial Sequence: Synthetic oligonucleotide
  Target: LAMA2; (+) strand; PAM type: YTN; PAM sequence: TTG
ggtgattgaaaattacctgt

SEQ ID NO: 359934 - DNA, 20 bp, Artificial Sequence
  Description of Artificial Sequence: Synthetic oligonucleotide
  Target: LAMA2; (+) strand; PAM type: YTN; PAM sequence: TTG
aaaattacctgtgaaagagt

SEQ ID NO: 359935 - DNA, 20 bp, Artificial Sequence
  Description of Artificial Sequence: Synthetic oligonucleotide
  Target: LAMA2; (+) strand; PAM type: YTN; PAM sequence: TTA
cctgtgaaagagtgcttatc

SEQ ID NO: 359936 - DNA, 20 bp, Artificial Sequence
  Description of Artificial Sequence: Synthetic oligonucleotide
  Target: LAMA2; (+) strand; PAM type: YTN; PAM sequence: CTG
tgaaagagtgcttatctcct

SEQ ID NO: 359937 - DNA, 20 bp, Artificial Sequence
  Description of Artificial Sequence: Synthetic oligonucleotide
  Target: LAMA2; (+) strand; PAM type: YTN; PAM sequence: CTT
atctccttgaggcacatcga

SEQ ID NO: 359938 - DNA, 20 bp, Artificial Sequence
  Description of Artificial Sequence: Synthetic oligonucleotide
  Target: LAMA2; (+) strand; PAM type: YTN; PAM sequence: TTA
tctccttgaggcacatcgaa

SEQ ID NO: 359939 - DNA, 20 bp, Artificial Sequence
  Description of Artificial Sequence: Synthetic oligonucleotide
  Target: LAMA2; (+) strand; PAM type: YTN; PAM sequence: CTC
cttgaggcacatcgaaagct

SEQ ID NO: 359940 - DNA, 20 bp, Artificial Sequence
  Description of Artificial Sequence: Synthetic oligonucleotide
  Target: LAMA2; (+) strand; PAM type: YTN; PAM sequence: CTT
gaggcacatcgaaagctgac

SEQ ID NO: 359941 - DNA, 20 bp, Artificial Sequence
  Description of Artificial Sequence: Synthetic oligonucleotide
  Target: LAMA2; (+) strand; PAM type: YTN; PAM sequence: TTG
aggcacatcgaaagctgacg

SEQ ID NO: 359942 - DNA, 20 bp, Artificial Sequence
  Description of Artificial Sequence: Synthetic oligonucleotide
  Target: LAMA2; (+) strand; PAM type: YTN; PAM sequence: CTG
acggaattgagccaattaga

SEQ ID NO: 359943 - DNA, 20 bp, Artificial Sequence
  Description of Artificial Sequence: Synthetic oligonucleotide
  Target: LAMA2; (+) strand; PAM type: YTN; PAM sequence: TTG
agccaattagactgactgtc

SEQ ID NO: 359944 - DNA, 20 bp, Artificial Sequence
  Description of Artificial Sequence: Synthetic oligonucleotide
  Target: LAMA2; (+) strand; PAM type: YTN; PAM sequence: TTA
gactgactgtctcttcaatg

SEQ ID NO: 359945 - DNA, 20 bp, Artificial Sequence
  Description of Artificial Sequence: Synthetic oligonucleotide
  Target: LAMA2; (+) strand; PAM type: YTN; PAM sequence: CTG
actgtctcttcaatgagttg

SEQ ID NO: 359946 - DNA, 20 bp, Artificial Sequence
  Description of Artificial Sequence: Synthetic oligonucleotide
  Target: LAMA2; (+) strand; PAM type: YTN; PAM sequence: CTG
tctcttcaatgagttgtgac

SEQ ID NO: 359947 - DNA, 20 bp, Artificial Sequence
  Description of Artificial Sequence: Synthetic oligonucleotide
  Target: LAMA2; (+) strand; PAM type: YTN; PAM sequence: CTC
ttcaatgagttgtgacctat

SEQ ID NO: 359948 - DNA, 20 bp, Artificial Sequence
  Description of Artificial Sequence: Synthetic oligonucleotide
  Target: LAMA2; (+) strand; PAM type: YTN; PAM sequence: CTT
caatgagttgtgacctatca

SEQ ID NO: 359949 - DNA, 20 bp, Artificial Sequence
  Description of Artificial Sequence: Synthetic oligonucleotide
  Target: LAMA2; (+) strand; PAM type: YTN; PAM sequence: TTC
aatgagttgtgacctatcaa

SEQ ID NO: 359950 - DNA, 20 bp, Artificial Sequence
  Description of Artificial Sequence: Synthetic oligonucleotide
  Target: LAMA2; (+) strand; PAM type: YTN; PAM sequence: TTG
tgacctatcaatggtaatag

SEQ ID NO: 359951 - DNA, 20 bp, Artificial Sequence
  Description of Artificial Sequence: Synthetic oligonucleotide
  Target: LAMA2; (+) strand; PAM type: YTN; PAM sequence: CTA
tcaatggtaatagcttatta

SEQ ID NO: 359952 - DNA, 20 bp, Artificial Sequence
  Description of Artificial Sequence: Synthetic oligonucleotide
  Target: LAMA2; (+) strand; PAM type: YTN; PAM sequence: CTT
attatgatgataaatgaacc

SEQ ID NO: 359953 - DNA, 20 bp, Artificial Sequence
  Description of Artificial Sequence: Synthetic oligonucleotide
  Target: LAMA2; (+) strand; PAM type: YTN; PAM sequence: TTA
ttatgatgataaatgaaccc

SEQ ID NO: 359954 - DNA, 20 bp, Artificial Sequence
  Description of Artificial Sequence: Synthetic oligonucleotide
  Target: LAMA2; (+) strand; PAM type: YTN; PAM sequence: TTA
tgatgataaatgaacccatc

SEQ ID NO: 359955 - DNA, 20 bp, Artificial Sequence
  Description of Artificial Sequence: Synthetic oligonucleotide
  Target: LAMA2; (+) strand; PAM type: YTN; PAM sequence: CTC
tcaaactgaagcctgagtac

SEQ ID NO: 359956 - DNA, 20 bp, Artificial Sequence
  Description of Artificial Sequence: Synthetic oligonucleotide
  Target: LAMA2; (+) strand; PAM type: YTN; PAM sequence: CTC
aaactgaagcctgagtacac

SEQ ID NO: 359957 - DNA, 20 bp, Artificial Sequence
  Description of Artificial Sequence: Synthetic oligonucleotide
  Target: LAMA2; (+) strand; PAM type: YTN; PAM sequence: CTG
aagcctgagtacacacttca

SEQ ID NO: 359958 - DNA, 20 bp, Artificial Sequence
  Description of Artificial Sequence: Synthetic oligonucleotide
  Target: LAMA2; (+) strand; PAM type: YTN; PAM sequence: CTG
agtacacacttcagcagttg

SEQ ID NO: 359959 - DNA, 20 bp, Artificial Sequence
  Description of Artificial Sequence: Synthetic oligonucleotide
  Target: LAMA2; (+) strand; PAM type: YTN; PAM sequence: CTT
cagcagttgccttgaatcat

SEQ ID NO: 359960 - DNA, 20 bp, Artificial Sequence
  Description of Artificial Sequence: Synthetic oligonucleotide
  Target: LAMA2; (+) strand; PAM type: YTN; PAM sequence: TTC
agcagttgccttgaatcatg

SEQ ID NO: 359961 - DNA, 20 bp, Artificial Sequence
  Description of Artificial Sequence: Synthetic oligonucleotide
  Target: LAMA2; (+) strand; PAM type: YTN; PAM sequence: TTG
ccttgaatcatgaggccatt

SEQ ID NO: 359962 - DNA, 20 bp, Artificial Sequence
  Description of Artificial Sequence: Synthetic oligonucleotide
  Target: LAMA2; (+) strand; PAM type: YTN; PAM sequence: CTT
gaatcatgaggccattgcct

SEQ ID NO: 359963 - DNA, 20 bp, Artificial Sequence
  Description of Artificial Sequence: Synthetic oligonucleotide
  Target: LAMA2; (+) strand; PAM type: YTN; PAM sequence: TTG
aatcatgaggccattgcctc

SEQ ID NO: 359964 - DNA, 20 bp, Artificial Sequence
  Description of Artificial Sequence: Synthetic oligonucleotide
  Target: LAMA2; (+) strand; PAM type: YTN; PAM sequence: TTG
cctctcaacttcagatcgac

SEQ ID NO: 359965 - DNA, 20 bp, Artificial Sequence
  Description of Artificial Sequence: Synthetic oligonucleotide
  Target: LAMA2; (+) strand; PAM type: YTN; PAM sequence: CTC
tcaacttcagatcgacagca

SEQ ID NO: 359966 - DNA, 20 bp, Artificial Sequence
  Description of Artificial Sequence: Synthetic oligonucleotide
  Target: LAMA2; (+) strand; PAM type: YTN; PAM sequence: CTC
aacttcagatcgacagcagt

SEQ ID NO: 359967 - DNA, 20 bp, Artificial Sequence
  Description of Artificial Sequence: Synthetic oligonucleotide
  Target: LAMA2; (+) strand; PAM type: YTN; PAM sequence: CTT
cagatcgacagcagtgacag

SEQ ID NO: 359968 - DNA, 20 bp, Artificial Sequence
  Description of Artificial Sequence: Synthetic oligonucleotide
  Target: LAMA2; (+) strand; PAM type: YTN; PAM sequence: TTC
agatcgacagcagtgacagc

SEQ ID NO: 359969 - DNA, 20 bp, Artificial Sequence
  Description of Artificial Sequence: Synthetic oligonucleotide
  Target: LAMA2; (+) strand; PAM type: YTN; PAM sequence: CTA
gacacagatgattgttttac

SEQ ID NO: 359970 - DNA, 20 bp, Artificial Sequence
  Description of Artificial Sequence: Synthetic oligonucleotide
  Target: LAMA2; (+) strand; PAM type: YTN; PAM sequence: TTG
ttttactcagatgaatatat

SEQ ID NO: 359971 - DNA, 20 bp, Artificial Sequence
  Description of Artificial Sequence: Synthetic oligonucleotide
  Target: LAMA2; (+) strand; PAM type: YTN; PAM sequence: TTT
tactcagatgaatatattta

SEQ ID NO: 359972 - DNA, 20 bp, Artificial Sequence
  Description of Artificial Sequence: Synthetic oligonucleotide
  Target: LAMA2; (+) strand; PAM type: YTN; PAM sequence: TTT
actcagatgaatatatttac

SEQ ID NO: 359973 - DNA, 20 bp, Artificial Sequence
  Description of Artificial Sequence: Synthetic oligonucleotide
  Target: LAMA2; (+) strand; PAM type: YTN; PAM sequence: TTA
ctcagatgaatatatttaca

SEQ ID NO: 359974 - DNA, 20 bp, Artificial Sequence
  Description of Artificial Sequence: Synthetic oligonucleotide
  Target: LAMA2; (+) strand; PAM type: YTN; PAM sequence: CTC
agatgaatatatttacagct

SEQ ID NO: 359975 - DNA, 20 bp, Artificial Sequence
  Description of Artificial Sequence: Synthetic oligonucleotide
  Target: LAMA2; (+) strand; PAM type: YTN; PAM sequence: TTT
acagctatttccaaagaaac

SEQ ID NO: 359976 - DNA, 20 bp, Artificial Sequence
  Description of Artificial Sequence: Synthetic oligonucleotide
  Target: LAMA2; (+) strand; PAM type: YTN; PAM sequence: TTA
cagctatttccaaagaaacg

SEQ ID NO: 359977 - DNA, 20 bp, Artificial Sequence
  Description of Artificial Sequence: Synthetic oligonucleotide
  Target: LAMA2; (+) strand; PAM type: YTN; PAM sequence: CTA
tttccaaagaaacgggccct

SEQ ID NO: 359978 - DNA, 20 bp, Artificial Sequence
  Description of Artificial Sequence: Synthetic oligonucleotide
  Target: LAMA2; (+) strand; PAM type: YTN; PAM sequence: TTT
ccaaagaaacgggcccttct

SEQ ID NO: 359979 - DNA, 20 bp, Artificial Sequence
  Description of Artificial Sequence: Synthetic oligonucleotide
  Target: LAMA2; (+) strand; PAM type: YTN; PAM sequence: TTC
caaagaaacgggcccttctt

SEQ ID NO: 359980 - DNA, 20 bp, Artificial Sequence
  Description of Artificial Sequence: Synthetic oligonucleotide
  Target: LAMA2; (+) strand; PAM type: YTN; PAM sequence: CTT
cttttgcattgtgtattcgt

SEQ ID NO: 359981 - DNA, 20 bp, Artificial Sequence
  Description of Artificial Sequence: Synthetic oligonucleotide
  Target: LAMA2; (+) strand; PAM type: YTN; PAM sequence: TTC
ttttgcattgtgtattcgta

SEQ ID NO: 359982 - DNA, 20 bp, Artificial Sequence
  Description of Artificial Sequence: Synthetic oligonucleotide
  Target: LAMA2; (+) strand; PAM type: YTN; PAM sequence: CTT
ttgcattgtgtattcgtatc

SEQ ID NO: 359983 - DNA, 20 bp, Artificial Sequence
  Description of Artificial Sequence: Synthetic oligonucleotide
  Target: LAMA2; (+) strand; PAM type: YTN; PAM sequence: TTT
tgcattgtgtattcgtatct

SEQ ID NO: 359984 - DNA, 20 bp, Artificial Sequence
  Description of Artificial Sequence: Synthetic oligonucleotide
  Target: LAMA2; (+) strand; PAM type: YTN; PAM sequence: TTT
gcattgtgtattcgtatctg

SEQ ID NO: 359985 - DNA, 20 bp, Artificial Sequence
  Description of Artificial Sequence: Synthetic oligonucleotide
  Target: LAMA2; (+) strand; PAM type: YTN; PAM sequence: TTG
cattgtgtattcgtatctga

SEQ ID NO: 359986 - DNA, 20 bp, Artificial Sequence
  Description of Artificial Sequence: Synthetic oligonucleotide
  Target: LAMA2; (+) strand; PAM type: YTN; PAM sequence: TTG
tgtattcgtatctgaaatag

SEQ ID NO: 359987 - DNA, 20 bp, Artificial Sequence
  Description of Artificial Sequence: Synthetic oligonucleotide
  Target: LAMA2; (+) strand; PAM type: YTN; PAM sequence: TTC
gtatctgaaatagttaccat

SEQ ID NO: 359988 - DNA, 20 bp, Artificial Sequence
  Description of Artificial Sequence: Synthetic oligonucleotide
  Target: LAMA2; (+) strand; PAM type: YTN; PAM sequence: CTG
aaatagttaccatatgacgt

SEQ ID NO: 359989 - DNA, 20 bp, Artificial Sequence
  Description of Artificial Sequence: Synthetic oligonucleotide
  Target: LAMA2; (+) strand; PAM type: YTN; PAM sequence: TTA
ccatatgacgtttccttcat

SEQ ID NO: 359990 - DNA, 20 bp, Artificial Sequence
  Description of Artificial Sequence: Synthetic oligonucleotide
  Target: LAMA2; (+) strand; PAM type: YTN; PAM sequence: TTT
ccttcattaggaagagaacc

SEQ ID NO: 359991 - DNA, 20 bp, Artificial Sequence
  Description of Artificial Sequence: Synthetic oligonucleotide
  Target: LAMA2; (+) strand; PAM type: YTN; PAM sequence: TTC
cttcattaggaagagaaccc

SEQ ID NO: 359992 - DNA, 20 bp, Artificial Sequence
  Description of Artificial Sequence: Synthetic oligonucleotide
  Target: LAMA2; (+) strand; PAM type: YTN; PAM sequence: CTT
cattaggaagagaacccctc

SEQ ID NO: 359993 - DNA, 20 bp, Artificial Sequence
  Description of Artificial Sequence: Synthetic oligonucleotide
  Target: LAMA2; (+) strand; PAM type: YTN; PAM sequence: TTC
attaggaagagaacccctcc

SEQ ID NO: 359994 - DNA, 20 bp, Artificial Sequence
  Description of Artificial Sequence: Synthetic oligonucleotide
  Target: LAMA2; (+) strand; PAM type: YTN; PAM sequence: TTA
ggaagagaacccctccctgg

SEQ ID NO: 359995 - DNA, 20 bp, Artificial Sequence
  Description of Artificial Sequence: Synthetic oligonucleotide
  Target: LAMA2; (+) strand; PAM type: YTN; PAM sequence: CTC
cctggctgtagcattctgaa

SEQ ID NO: 359996 - DNA, 20 bp, Artificial Sequence
  Description of Artificial Sequence: Synthetic oligonucleotide
  Target: LAMA2; (+) strand; PAM type: YTN; PAM sequence: CTG
gctgtagcattctgaaataa

SEQ ID NO: 359997 - DNA, 20 bp, Artificial Sequence
  Description of Artificial Sequence: Synthetic oligonucleotide
  Target: LAMA2; (+) strand; PAM type: YTN; PAM sequence: CTG
tagcattctgaaataactgg

SEQ ID NO: 359998 - DNA, 20 bp, Artificial Sequence
  Description of Artificial Sequence: Synthetic oligonucleotide
  Target: LAMA2; (+) strand; PAM type: YTN; PAM sequence: TTC
tgaaataactggattttgaa

SEQ ID NO: 359999 - DNA, 20 bp, Artificial Sequence
  Description of Artificial Sequence: Synthetic oligonucleotide
  Target: LAMA2; (+) strand; PAM type: YTN; PAM sequence: CTG
aaataactggattttgaagg

SEQ ID NO: 360000 - DNA, 20 bp, Artificial Sequence
  Description of Artificial Sequence: Synthetic oligonucleotide
  Target: LAMA2; (+) strand; PAM type: YTN; PAM sequence: CTG
gattttgaaggtcttttttt

SEQ ID NO: 360001 - DNA, 20 bp, Artificial Sequence
  Description of Artificial Sequence: Synthetic oligonucleotide
  Target: LAMA2; (+) strand; PAM type: YTN; PAM sequence: TTT
tgaaggtcttttttttttct

SEQ ID NO: 360002 - DNA, 20 bp, Artificial Sequence
  Description of Artificial Sequence: Synthetic oligonucleotide
  Target: LAMA2; (+) strand; PAM type: YTN; PAM sequence: TTT
gaaggtcttttttttttctt

SEQ ID NO: 360003 - DNA, 20 bp, Artificial Sequence
  Description of Artificial Sequence: Synthetic oligonucleotide
  Target: LAMA2; (+) strand; PAM type: YTN; PAM sequence: TTG
aaggtcttttttttttcttc

SEQ ID NO: 360004 - DNA, 20 bp, Artificial Sequence
  Description of Artificial Sequence: Synthetic oligonucleotide
  Target: LAMA2; (+) strand; PAM type: YTN; PAM sequence: CTT
ttttttttcttcactttttg

SEQ ID NO: 360005 - DNA, 20 bp, Artificial Sequence
  Description of Artificial Sequence: Synthetic oligonucleotide
  Target: LAMA2; (+) strand; PAM type: YTN; PAM sequence: TTT
tttttttcttcactttttgt

SEQ ID NO: 360006 - DNA, 20 bp, Artificial Sequence
  Description of Artificial Sequence: Synthetic oligonucleotide
  Target: LAMA2; (+) strand; PAM type: YTN; PAM sequence: TTT
ttttttcttcactttttgtt

SEQ ID NO: 360007 - DNA, 20 bp, Artificial Sequence
  Description of Artificial Sequence: Synthetic oligonucleotide
  Target: LAMA2; (+) strand; PAM type: YTN; PAM sequence: TTT
tttttcttcactttttgttt

SEQ ID NO: 360008 - DNA, 20 bp, Artificial Sequence
  Description of Artificial Sequence: Synthetic oligonucleotide
  Target: LAMA2; (+) strand; PAM type: YTN; PAM sequence: TTT
ttttcttcactttttgttta

SEQ ID NO: 360009 - DNA, 20 bp, Artificial Sequence
  Description of Artificial Sequence: Synthetic oligonucleotide
  Target: LAMA2; (+) strand; PAM type: YTN; PAM sequence: TTT
tttcttcactttttgtttat

SEQ ID NO: 360010 - DNA, 20 bp, Artificial Sequence
  Description of Artificial Sequence: Synthetic oligonucleotide
  Target: LAMA2; (+) strand; PAM type: YTN; PAM sequence: TTT
ttcttcactttttgtttatt

SEQ ID NO: 360011 - DNA, 20 bp, Artificial Sequence
  Description of Artificial Sequence: Synthetic oligonucleotide
  Target: LAMA2; (+) strand; PAM type: YTN; PAM sequence: TTT
tcttcactttttgtttattg

SEQ ID NO: 360012 - DNA, 20 bp, Artificial Sequence
  Description of Artificial Sequence: Synthetic oligonucleotide
  Target: LAMA2; (+) strand; PAM type: YTN; PAM sequence: TTT
cttcactttttgtttattgt

SEQ ID NO: 360013 - DNA, 20 bp, Artificial Sequence
  Description of Artificial Sequence: Synthetic oligonucleotide
  Target: LAMA2; (+) strand; PAM type: YTN; PAM sequence: TTC
ttcactttttgtttattgtt

SEQ ID NO: 360014 - DNA, 20 bp, Artificial Sequence
  Description of Artificial Sequence: Synthetic oligonucleotide
  Target: LAMA2; (+) strand; PAM type: YTN; PAM sequence: CTT
cactttttgtttattgttta

SEQ ID NO: 360015 - DNA, 20 bp, Artificial Sequence
  Description of Artificial Sequence: Synthetic oligonucleotide
  Target: LAMA2; (+) strand; PAM type: YTN; PAM sequence: TTC
actttttgtttattgtttac

SEQ ID NO: 360016 - DNA, 20 bp, Artificial Sequence
  Description of Artificial Sequence: Synthetic oligonucleotide
  Target: LAMA2; (+) strand; PAM type: YTN; PAM sequence: CTT
tttgtttattgtttacaatg

SEQ ID NO: 360017 - DNA, 20 bp, Artificial Sequence
  Description of Artificial Sequence: Synthetic oligonucleotide
  Target: LAMA2; (+) strand; PAM type: YTN; PAM sequence: TTT
ttgtttattgtttacaatgt

SEQ ID NO: 360018 - DNA, 20 bp, Artificial Sequence
  Description of Artificial Sequence: Synthetic oligonucleotide
  Target: LAMA2; (+) strand; PAM type: YTN; PAM sequence: TTT
tgtttattgtttacaatgtt

SEQ ID NO: 360019 - DNA, 20 bp, Artificial Sequence
  Description of Artificial Sequence: Synthetic oligonucleotide
  Target: LAMA2; (+) strand; PAM type: YTN; PAM sequence: TTT
gtttattgtttacaatgttt

SEQ ID NO: 360020 - DNA, 20 bp, Artificial Sequence
  Description of Artificial Sequence: Synthetic oligonucleotide
  Target: LAMA2; (+) strand; PAM type: YTN; PAM sequence: TTG
tttattgtttacaatgtttt

SEQ ID NO: 360021 - DNA, 20 bp, Artificial Sequence
  Description of Artificial Sequence: Synthetic oligonucleotide
  Target: LAMA2; (+) strand; PAM type: YTN; PAM sequence: TTT
attgtttacaatgttttaat

SEQ ID NO: 360022 - DNA, 20 bp, Artificial Sequence
  Description of Artificial Sequence: Synthetic oligonucleotide
  Target: LAMA2; (+) strand; PAM type: YTN; PAM sequence: TTA
ttgtttacaatgttttaatt

SEQ ID NO: 360023 - DNA, 20 bp, Artificial Sequence
  Description of Artificial Sequence: Synthetic oligonucleotide
  Target: LAMA2; (+) strand; PAM type: YTN; PAM sequence: TTG
tttacaatgttttaatttct

SEQ ID NO: 360024 - DNA, 20 bp, Artificial Sequence
  Description of Artificial Sequence: Synthetic oligonucleotide
  Target: LAMA2; (+) strand; PAM type: YTN; PAM sequence: TTT
acaatgttttaatttctcat

SEQ ID NO: 360025 - DNA, 20 bp, Artificial Sequence
  Description of Artificial Sequence: Synthetic oligonucleotide
  Target: LAMA2; (+) strand; PAM type: YTN; PAM sequence: TTA
caatgttttaatttctcatt

SEQ ID NO: 360026 - DNA, 20 bp, Artificial Sequence
  Description of Artificial Sequence: Synthetic oligonucleotide
  Target: LAMA2; (+) strand; PAM type: YTN; PAM sequence: TTT
taatttctcattcttgtgag

SEQ ID NO: 360027 - DNA, 20 bp, Artificial Sequence
  Description of Artificial Sequence: Synthetic oligonucleotide
  Target: LAMA2; (+) strand; PAM type: YTN; PAM sequence: TTT
aatttctcattcttgtgagt

SEQ ID NO: 360028 - DNA, 20 bp, Artificial Sequence
  Description of Artificial Sequence: Synthetic oligonucleotide
  Target: LAMA2; (+) strand; PAM type: YTN; PAM sequence: TTA
atttctcattcttgtgagta

SEQ ID NO: 360029 - DNA, 20 bp, Artificial Sequence
  Description of Artificial Sequence: Synthetic oligonucleotide
  Target: LAMA2; (+) strand; PAM type: YTN; PAM sequence: TTT
ctcattcttgtgagtaataa

SEQ ID NO: 360030 - DNA, 20 bp, Artificial Sequence
  Description of Artificial Sequence: Synthetic oligonucleotide
  Target: LAMA2; (+) strand; PAM type: YTN; PAM sequence: TTC
tcattcttgtgagtaataac

SEQ ID NO: 360031 - DNA, 20 bp, Artificial Sequence
  Description of Artificial Sequence: Synthetic oligonucleotide
  Target: LAMA2; (+) strand; PAM type: YTN; PAM sequence: CTC
attcttgtgagtaataactc

SEQ ID NO: 360032 - DNA, 20 bp, Artificial Sequence
  Description of Artificial Sequence: Synthetic oligonucleotide
  Target: LAMA2; (+) strand; PAM type: YTN; PAM sequence: TTC
ttgtgagtaataactcaact

SEQ ID NO: 360033 - DNA, 20 bp, Artificial Sequence
  Description of Artificial Sequence: Synthetic oligonucleotide
  Target: LAMA2; (+) strand; PAM type: YTN; PAM sequence: CTT
gtgagtaataactcaactcc

SEQ ID NO: 360034 - DNA, 20 bp, Artificial Sequence
  Description of Artificial Sequence: Synthetic oligonucleotide
  Target: LAMA2; (+) strand; PAM type: YTN; PAM sequence: TTG
tgagtaataactcaactcct

SEQ ID NO: 360035 - DNA, 20 bp, Artificial Sequence
  Description of Artificial Sequence: Synthetic oligonucleotide
  Target: LAMA2; (+) strand; PAM type: YTN; PAM sequence: CTC
aactcctggttaagtaaaat

SEQ ID NO: 360036 - DNA, 20 bp, Artificial Sequence
  Description of Artificial Sequence: Synthetic oligonucleotide
  Target: LAMA2; (+) strand; PAM type: YTN; PAM sequence: CTC
ctggttaagtaaaatttcag

SEQ ID NO: 360037 - DNA, 20 bp, Artificial Sequence
  Description of Artificial Sequence: Synthetic oligonucleotide
  Target: LAMA2; (+) strand; PAM type: YTN; PAM sequence: CTG
gttaagtaaaatttcagaat

SEQ ID NO: 360038 - DNA, 20 bp, Artificial Sequence
  Description of Artificial Sequence: Synthetic oligonucleotide
  Target: LAMA2; (+) strand; PAM type: YTN; PAM sequence: TTA
agtaaaatttcagaataaaa

SEQ ID NO: 360039 - DNA, 20 bp, Artificial Sequence
  Description of Artificial Sequence: Synthetic oligonucleotide
  Target: LAMA2; (+) strand; PAM type: YTN; PAM sequence: TTT
cagaataaaaatattgtttt

SEQ ID NO: 360040 - DNA, 20 bp, Artificial Sequence
  Description of Artificial Sequence: Synthetic oligonucleotide
  Target: LAMA2; (+) strand; PAM type: YTN; PAM sequence: TTC
agaataaaaatattgtttta

SEQ ID NO: 360041 - DNA, 20 bp, Artificial Sequence
  Description of Artificial Sequence: Synthetic oligonucleotide
  Target: LAMA2; (+) strand; PAM type: YTN; PAM sequence: TTG
ttttatagtaaagatgcttg

SEQ ID NO: 360042 - DNA, 20 bp, Artificial Sequence
  Description of Artificial Sequence: Synthetic oligonucleotide
  Target: LAMA2; (+) strand; PAM type: YTN; PAM sequence: TTT
tatagtaaagatgcttgtaa

SEQ ID NO: 360043 - DNA, 20 bp, Artificial Sequence
  Description of Artificial Sequence: Synthetic oligonucleotide
  Target: LAMA2; (+) strand; PAM type: YTN; PAM sequence: TTT
atagtaaagatgcttgtaat

SEQ ID NO: 360044 - DNA, 20 bp, Artificial Sequence
  Description of Artificial Sequence: Synthetic oligonucleotide
  Target: LAMA2; (+) strand; PAM type: YTN; PAM sequence: TTA
tagtaaagatgcttgtaata

SEQ ID NO: 360045 - DNA, 20 bp, Artificial Sequence
  Description of Artificial Sequence: Synthetic oligonucleotide
  Target: LAMA2; (+) strand; PAM type: YTN; PAM sequence: CTT
gtaatatcaaaacaagtatg

SEQ ID NO: 360046 - DNA, 20 bp, Artificial Sequence
  Description of Artificial Sequence: Synthetic oligonucleotide
  Target: LAMA2; (+) strand; PAM type: YTN; PAM sequence: TTG
taatatcaaaacaagtatgt

SEQ ID NO: 360047 - DNA, 20 bp, Artificial Sequence
  Description of Artificial Sequence: Synthetic oligonucleotide
  Target: LAMA2; (+) strand; PAM type: YTN; PAM sequence: TTT
ttaaaaaattaatttcatcc

SEQ ID NO: 360048 - DNA, 20 bp, Artificial Sequence
  Description of Artificial Sequence: Synthetic oligonucleotide
  Target: LAMA2; (+) strand; PAM type: YTN; PAM sequence: TTT
taaaaaattaatttcatcct

SEQ ID NO: 360049 - DNA, 20 bp, Artificial Sequence
  Description of Artificial Sequence: Synthetic oligonucleotide
  Target: LAMA2; (+) strand; PAM type: YTN; PAM sequence: TTT
aaaaaattaatttcatccta

SEQ ID NO: 360050 - DNA, 20 bp, Artificial Sequence
  Description of Artificial Sequence: Synthetic oligonucleotide
  Target: LAMA2; (+) strand; PAM type: YTN; PAM sequence: TTA
aaaaattaatttcatcctat

SEQ ID NO: 360051 - DNA, 20 bp, Artificial Sequence
  Description of Artificial Sequence: Synthetic oligonucleotide
  Target: LAMA2; (+) strand; PAM type: YTN; PAM sequence: TTA
atttcatcctattacatttc

SEQ ID NO: 360052 - DNA, 20 bp, Artificial Sequence
  Description of Artificial Sequence: Synthetic oligonucleotide
  Target: LAMA2; (+) strand; PAM type: YTN; PAM sequence: TTT
catcctattacatttcacat

SEQ ID NO: 360053 - DNA, 20 bp, Artificial Sequence
  Description of Artificial Sequence: Synthetic oligonucleotide
  Target: LAMA2; (+) strand; PAM type: YTN; PAM sequence: TTC
atcctattacatttcacatt

SEQ ID NO: 360054 - DNA, 20 bp, Artificial Sequence
  Description of Artificial Sequence: Synthetic oligonucleotide
  Target: LAMA2; (+) strand; PAM type: YTN; PAM sequence: CTA
ttacatttcacattttatat

SEQ ID NO: 360055 - DNA, 20 bp, Artificial Sequence
  Description of Artificial Sequence: Synthetic oligonucleotide
  Target: LAMA2; (+) strand; PAM type: YTN; PAM sequence: TTA
catttcacattttatatttg

SEQ ID NO: 360056 - DNA, 20 bp, Artificial Sequence
  Description of Artificial Sequence: Synthetic oligonucleotide
  Target: LAMA2; (+) strand; PAM type: YTN; PAM sequence: TTT
cacattttatatttgatgtg

SEQ ID NO: 360057 - DNA, 20 bp, Artificial Sequence
  Description of Artificial Sequence: Synthetic oligonucleotide
  Target: LAMA2; (+) strand; PAM type: YTN; PAM sequence: TTC
acattttatatttgatgtgg

SEQ ID NO: 360058 - DNA, 20 bp, Artificial Sequence
  Description of Artificial Sequence: Synthetic oligonucleotide
  Target: LAMA2; (+) strand; PAM type: YTN; PAM sequence: TTT
tatatttgatgtgggttgga

SEQ ID NO: 360059 - DNA, 20 bp, Artificial Sequence
  Description of Artificial Sequence: Synthetic oligonucleotide
  Target: LAMA2; (+) strand; PAM type: YTN; PAM sequence: TTT
atatttgatgtgggttggag

SEQ ID NO: 360060 - DNA, 20 bp, Artificial Sequence
  Description of Artificial Sequence: Synthetic oligonucleotide
  Target: LAMA2; (+) strand; PAM type: YTN; PAM sequence: TTA
tatttgatgtgggttggagg

SEQ ID NO: 360061 - DNA, 20 bp, Artificial Sequence
  Description of Artificial Sequence: Synthetic oligonucleotide
  Target: LAMA2; (+) strand; PAM type: YTN; PAM sequence: TTT
gatgtgggttggaggagccc

SEQ ID NO: 360062 - DNA, 20 bp, Artificial Sequence
  Description of Artificial Sequence: Synthetic oligonucleotide
  Target: LAMA2; (+) strand; PAM type: YTN; PAM sequence: TTG
atgtgggttggaggagcccc

SEQ ID NO: 360063 - DNA, 20 bp, Artificial Sequence
  Description of Artificial Sequence: Synthetic oligonucleotide
  Target: LAMA2; (+) strand; PAM type: YTN; PAM sequence: TTG
gaggagccccttagagattc

SEQ ID NO: 360064 - DNA, 20 bp, Artificial Sequence
  Description of Artificial Sequence: Synthetic oligonucleotide
  Target: LAMA2; (+) strand; PAM type: YTN; PAM sequence: CTT
agagattcttttttctttgt

SEQ ID NO: 360065 - DNA, 20 bp, Artificial Sequence
  Description of Artificial Sequence: Synthetic oligonucleotide
  Target: LAMA2; (+) strand; PAM type: YTN; PAM sequence: TTA
gagattcttttttctttgta

SEQ ID NO: 360066 - DNA, 20 bp, Artificial Sequence
  Description of Artificial Sequence: Synthetic oligonucleotide
  Target: LAMA2; (+) strand; PAM type: YTN; PAM sequence: TTC
ttttttctttgtagagaagt

SEQ ID NO: 360067 - DNA, 20 bp, Artificial Sequence
  Description of Artificial Sequence: Synthetic oligonucleotide
  Target: LAMA2; (+) strand; PAM type: YTN; PAM sequence: CTT
ttttctttgtagagaagttt

SEQ ID NO: 360068 - DNA, 20 bp, Artificial Sequence
  Description of Artificial Sequence: Synthetic oligonucleotide
  Target: LAMA2; (+) strand; PAM type: YTN; PAM sequence: TTT
tttctttgtagagaagtttt

SEQ ID NO: 360069 - DNA, 20 bp, Artificial Sequence
  Description of Artificial Sequence: Synthetic oligonucleotide
  Target: LAMA2; (+) strand; PAM type: YTN; PAM sequence: TTT
ttctttgtagagaagttttg

SEQ ID NO: 360070 - DNA, 20 bp, Artificial Sequence
  Description of Artificial Sequence: Synthetic oligonucleotide
  Target: LAMA2; (+) strand; PAM type: YTN; PAM sequence: TTT
tctttgtagagaagttttgt

SEQ ID NO: 360071 - DNA, 20 bp, Artificial Sequence
  Description of Artificial Sequence: Synthetic oligonucleotide
  Target: LAMA2; (+) strand; PAM type: YTN; PAM sequence: TTT
ctttgtagagaagttttgta

SEQ ID NO: 360072 - DNA, 20 bp, Artificial Sequence
  Description of Artificial Sequence: Synthetic oligonucleotide
  Target: LAMA2; (+) strand; PAM type: YTN; PAM sequence: TTC
tttgtagagaagttttgtag

SEQ ID NO: 360073 - DNA, 20 bp, Artificial Sequence
  Description of Artificial Sequence: Synthetic oligonucleotide
  Target: LAMA2; (+) strand; PAM type: YTN; PAM sequence: CTT
tgtagagaagttttgtagag

SEQ ID NO: 360074 - DNA, 20 bp, Artificial Sequence
  Description of Artificial Sequence: Synthetic oligonucleotide
  Target: LAMA2; (+) strand; PAM type: YTN; PAM sequence: TTT
gtagagaagttttgtagaga

SEQ ID NO: 360075 - DNA, 20 bp, Artificial Sequence
  Description of Artificial Sequence: Synthetic oligonucleotide
  Target: LAMA2; (+) strand; PAM type: YTN; PAM sequence: TTG
tagagaagttttgtagagat

SEQ ID NO: 360076 - DNA, 20 bp, Artificial Sequence
  Description of Artificial Sequence: Synthetic oligonucleotide
  Target: LAMA2; (+) strand; PAM type: YTN; PAM sequence: TTT
tgtagagatcaatagtgtaa

SEQ ID NO: 360077 - DNA, 20 bp, Artificial Sequence
  Description of Artificial Sequence: Synthetic oligonucleotide
  Target: LAMA2; (+) strand; PAM type: YTN; PAM sequence: TTT
gtagagatcaatagtgtaag

SEQ ID NO: 360078 - DNA, 20 bp, Artificial Sequence
  Description of Artificial Sequence: Synthetic oligonucleotide
  Target: LAMA2; (+) strand; PAM type: YTN; PAM sequence: TTG
tagagatcaatagtgtaaga

SEQ ID NO: 360079 - DNA, 20 bp, Artificial Sequence
  Description of Artificial Sequence: Synthetic oligonucleotide
  Target: LAMA2; (+) strand; PAM type: YTN; PAM sequence: TTT
tgtttccttttaatttttca

SEQ ID NO: 360080 - DNA, 20 bp, Artificial Sequence
  Description of Artificial Sequence: Synthetic oligonucleotide
  Target: LAMA2; (+) strand; PAM type: YTN; PAM sequence: TTT
gtttccttttaatttttcaa

SEQ ID NO: 360081 - DNA, 20 bp, Artificial Sequence
  Description of Artificial Sequence: Synthetic oligonucleotide
  Target: LAMA2; (+) strand; PAM type: YTN; PAM sequence: TTG
tttccttttaatttttcaaa

SEQ ID NO: 360082 - DNA, 20 bp, Artificial Sequence
  Description of Artificial Sequence: Synthetic oligonucleotide
  Target: LAMA2; (+) strand; PAM type: YTN; PAM sequence: TTT
ccttttaatttttcaaaata

SEQ ID NO: 360083 - DNA, 20 bp, Artificial Sequence
  Description of Artificial Sequence: Synthetic oligonucleotide
  Target: LAMA2; (+) strand; PAM type: YTN; PAM sequence: TTC
cttttaatttttcaaaatat

SEQ ID NO: 360084 - DNA, 20 bp, Artificial Sequence
  Description of Artificial Sequence: Synthetic oligonucleotide
  Target: LAMA2; (+) strand; PAM type: YTN; PAM sequence: CTT
ttaatttttcaaaatatttg

SEQ ID NO: 360085 - DNA, 20 bp, Artificial Sequence
  Description of Artificial Sequence: Synthetic oligonucleotide
  Target: LAMA2; (+) strand; PAM type: YTN; PAM sequence: TTT
taatttttcaaaatatttga

SEQ ID NO: 360086 - DNA, 20 bp, Artificial Sequence
  Description of Artificial Sequence: Synthetic oligonucleotide
  Target: LAMA2; (+) strand; PAM type: YTN; PAM sequence: TTT
aatttttcaaaatatttgaa

SEQ ID NO: 360087 - DNA, 20 bp, Artificial Sequence
  Description of Artificial Sequence: Synthetic oligonucleotide
  Target: LAMA2; (+) strand; PAM type: YTN; PAM sequence: TTA
atttttcaaaatatttgaaa

SEQ ID NO: 360088 - DNA, 20 bp, Artificial Sequence
  Description of Artificial Sequence: Synthetic oligonucleotide
  Target: LAMA2; (+) strand; PAM type: YTN; PAM sequence: TTT
ttcaaaatatttgaaaattc

SEQ ID NO: 360089 - DNA, 20 bp, Artificial Sequence
  Description of Artificial Sequence: Synthetic oligonucleotide
  Target: LAMA2; (+) strand; PAM type: YTN; PAM sequence: TTT
tcaaaatatttgaaaattct

SEQ ID NO: 360090 - DNA, 20 bp, Artificial Sequence
  Description of Artificial Sequence: Synthetic oligonucleotide
  Target: LAMA2; (+) strand; PAM type: YTN; PAM sequence: TTT
caaaatatttgaaaattctt

SEQ ID NO: 360091 - DNA, 20 bp, Artificial Sequence
  Description of Artificial Sequence: Synthetic oligonucleotide
  Target: LAMA2; (+) strand; PAM type: YTN; PAM sequence: TTC
aaaatatttgaaaattcttt

SEQ ID NO: 360092 - DNA, 20 bp, Artificial Sequence
  Description of Artificial Sequence: Synthetic oligonucleotide
  Target: LAMA2; (+) strand; PAM type: YTN; PAM sequence: TTT
gaaaattctttaagtagtta

SEQ ID NO: 360093 - DNA, 20 bp, Artificial Sequence
  Description of Artificial Sequence: Synthetic oligonucleotide
  Target: LAMA2; (+) strand; PAM type: YTN; PAM sequence: TTG
aaaattctttaagtagttac

SEQ ID NO: 360094 - DNA, 20 bp, Artificial Sequence
  Description of Artificial Sequence: Synthetic oligonucleotide
  Target: LAMA2; (+) strand; PAM type: YTN; PAM sequence: TTC
tttaagtagttactgaaatt

SEQ ID NO: 360095 - DNA, 20 bp, Artificial Sequence
  Description of Artificial Sequence: Synthetic oligonucleotide
  Target: LAMA2; (+) strand; PAM type: YTN; PAM sequence: CTT
taagtagttactgaaatttg

SEQ ID NO: 360096 - DNA, 20 bp, Artificial Sequence
  Description of Artificial Sequence: Synthetic oligonucleotide
  Target: LAMA2; (+) strand; PAM type: YTN; PAM sequence: TTT
aagtagttactgaaatttgg

SEQ ID NO: 360097 - DNA, 20 bp, Artificial Sequence
  Description of Artificial Sequence: Synthetic oligonucleotide
  Target: LAMA2; (+) strand; PAM type: YTN; PAM sequence: TTA
agtagttactgaaatttggt

SEQ ID NO: 360098 - DNA, 20 bp, Artificial Sequence
  Description of Artificial Sequence: Synthetic oligonucleotide
  Target: LAMA2; (+) strand; PAM type: YTN; PAM sequence: TTA
ctgaaatttggtaagttcca

SEQ ID NO: 360099 - DNA, 20 bp, Artificial Sequence
  Description of Artificial Sequence: Synthetic oligonucleotide
  Target: LAMA2; (+) strand; PAM type: YTN; PAM sequence: CTG
aaatttggtaagttccatgt

SEQ ID NO: 360100 - DNA, 20 bp, Artificial Sequence
  Description of Artificial Sequence: Synthetic oligonucleotide
  Target: LAMA2; (+) strand; PAM type: YTN; PAM sequence: TTT
ggtaagttccatgtgctgct

SEQ ID NO: 360101 - DNA, 20 bp, Artificial Sequence
  Description of Artificial Sequence: Synthetic oligonucleotide
  Target: LAMA2; (+) strand; PAM type: YTN; PAM sequence: TTG
gtaagttccatgtgctgcta

SEQ ID NO: 360102 - DNA, 20 bp, Artificial Sequence
  Description of Artificial Sequence: Synthetic oligonucleotide
  Target: LAMA2; (+) strand; PAM type: YTN; PAM sequence: TTC
catgtgctgctatattgata

SEQ ID NO: 360103 - DNA, 20 bp, Artificial Sequence
  Description of Artificial Sequence: Synthetic oligonucleotide
  Target: LAMA2; (+) strand; PAM type: YTN; PAM sequence: CTG
ctatattgatacattttgtt

SEQ ID NO: 360104 - DNA, 20 bp, Artificial Sequence
  Description of Artificial Sequence: Synthetic oligonucleotide
  Target: LAMA2; (+) strand; PAM type: YTN; PAM sequence: CTA
tattgatacattttgtttta

SEQ ID NO: 360105 - DNA, 20 bp, Artificial Sequence
  Description of Artificial Sequence: Synthetic oligonucleotide
  Target: LAMA2; (+) strand; PAM type: YTN; PAM sequence: TTG
atacattttgttttagaaga

SEQ ID NO: 360106 - DNA, 20 bp, Artificial Sequence
  Description of Artificial Sequence: Synthetic oligonucleotide
  Target: LAMA2; (+) strand; PAM type: YTN; PAM sequence: TTT
tgttttagaagaattaggag

SEQ ID NO: 360107 - DNA, 20 bp, Artificial Sequence
  Description of Artificial Sequence: Synthetic oligonucleotide
  Target: LAMA2; (+) strand; PAM type: YTN; PAM sequence: TTT
gttttagaagaattaggagc

SEQ ID NO: 360108 - DNA, 20 bp, Artificial Sequence
  Description of Artificial Sequence: Synthetic oligonucleotide
  Target: LAMA2; (+) strand; PAM type: YTN; PAM sequence: TTG
ttttagaagaattaggagca

SEQ ID NO: 360109 - DNA, 20 bp, Artificial Sequence
  Description of Artificial Sequence: Synthetic oligonucleotide
  Target: LAMA2; (+) strand; PAM type: YTN; PAM sequence: TTT
tagaagaattaggagcaaaa

SEQ ID NO: 360110 - DNA, 20 bp, Artificial Sequence
  Description of Artificial Sequence: Synthetic oligonucleotide
  Target: LAMA2; (+) strand; PAM type: YTN; PAM sequence: TTT
agaagaattaggagcaaaag

SEQ ID NO: 360111 - DNA, 20 bp, Artificial Sequence
  Description of Artificial Sequence: Synthetic oligonucleotide
  Target: LAMA2; (+) strand; PAM type: YTN; PAM sequence: TTA
gaagaattaggagcaaaagg

SEQ ID NO: 360112 - DNA, 20 bp, Artificial Sequence
  Description of Artificial Sequence: Synthetic oligonucleotide
  Target: LAMA2; (+) strand; PAM type: YTN; PAM sequence: TTA
ggagcaaaagggttattttt

SEQ ID NO: 360113 - DNA, 20 bp, Artificial Sequence
  Description of Artificial Sequence: Synthetic oligonucleotide
  Target: LAMA2; (+) strand; PAM type: YTN; PAM sequence: TTA
tttttataatgaaatacaat

SEQ ID NO: 360114 - DNA, 20 bp, Artificial Sequence
  Description of Artificial Sequence: Synthetic oligonucleotide
  Target: LAMA2; (+) strand; PAM type: YTN; PAM sequence: TTT
ttataatgaaatacaatctt

SEQ ID NO: 360115 - DNA, 20 bp, Artificial Sequence
  Description of Artificial Sequence: Synthetic oligonucleotide
  Target: LAMA2; (+) strand; PAM type: YTN; PAM sequence: TTT
tataatgaaatacaatcttc

SEQ ID NO: 360116 - DNA, 20 bp, Artificial Sequence
  Description of Artificial Sequence: Synthetic oligonucleotide
  Target: LAMA2; (+) strand; PAM type: YTN; PAM sequence: TTT
ataatgaaatacaatcttcc

SEQ ID NO: 360117 - DNA, 20 bp, Artificial Sequence
  Description of Artificial Sequence: Synthetic oligonucleotide
  Target: LAMA2; (+) strand; PAM type: YTN; PAM sequence: TTA
taatgaaatacaatcttcca

SEQ ID NO: 360118 - DNA, 20 bp, Artificial Sequence
  Description of Artificial Sequence: Synthetic oligonucleotide
  Target: LAMA2; (+) strand; PAM type: YTN; PAM sequence: CTT
ccagttcctaataagtatta

SEQ ID NO: 360119 - DNA, 20 bp, Artificial Sequence
  Description of Artificial Sequence: Synthetic oligonucleotide
  Target: LAMA2; (+) strand; PAM type: YTN; PAM sequence: TTC
cagttcctaataagtattag

SEQ ID NO: 360120 - DNA, 20 bp, Artificial Sequence
  Description of Artificial Sequence: Synthetic oligonucleotide
  Target: LAMA2; (+) strand; PAM type: YTN; PAM sequence: TTC
ctaataagtattagacacct

SEQ ID NO: 360121 - DNA, 20 bp, Artificial Sequence
  Description of Artificial Sequence: Synthetic oligonucleotide
  Target: LAMA2; (+) strand; PAM type: YTN; PAM sequence: CTA
ataagtattagacacctgtt

SEQ ID NO: 360122 - DNA, 20 bp, Artificial Sequence
  Description of Artificial Sequence: Synthetic oligonucleotide
  Target: LAMA2; (+) strand; PAM type: YTN; PAM sequence: TTA
gacacctgttagctgccaac

SEQ ID NO: 360123 - DNA, 20 bp, Artificial Sequence
  Description of Artificial Sequence: Synthetic oligonucleotide
  Target: LAMA2; (+) strand; PAM type: YTN; PAM sequence: CTG
ttagctgccaacttcccaaa

SEQ ID NO: 360124 - DNA, 20 bp, Artificial Sequence
  Description of Artificial Sequence: Synthetic oligonucleotide
  Target: LAMA2; (+) strand; PAM type: YTN; PAM sequence: TTA
gctgccaacttcccaaaaat

SEQ ID NO: 360125 - DNA, 20 bp, Artificial Sequence
  Description of Artificial Sequence: Synthetic oligonucleotide
  Target: LAMA2; (+) strand; PAM type: YTN; PAM sequence: CTG
ccaacttcccaaaaataccc

SEQ ID NO: 360126 - DNA, 20 bp, Artificial Sequence
  Description of Artificial Sequence: Synthetic oligonucleotide
  Target: LAMA2; (+) strand; PAM type: YTN; PAM sequence: CTT
cccaaaaatacccctgagaa

SEQ ID NO: 360127 - DNA, 20 bp, Artificial Sequence
  Description of Artificial Sequence: Synthetic oligonucleotide
  Target: LAMA2; (+) strand; PAM type: YTN; PAM sequence: TTC
ccaaaaatacccctgagaaa

SEQ ID NO: 360128 - DNA, 20 bp, Artificial Sequence
  Description of Artificial Sequence: Synthetic oligonucleotide
  Target: LAMA2; (+) strand; PAM type: YTN; PAM sequence: CTG
agaaaaaaaaaaacctgttg

SEQ ID NO: 360129 - DNA, 20 bp, Artificial Sequence
  Description of Artificial Sequence: Synthetic oligonucleotide
  Target: LAMA2; (+) strand; PAM type: YTN; PAM sequence: CTG
ttggtcaagaaagttcacga

SEQ ID NO: 360130 - DNA, 20 bp, Artificial Sequence
  Description of Artificial Sequence: Synthetic oligonucleotide
  Target: LAMA2; (+) strand; PAM type: YTN; PAM sequence: TTG
gtcaagaaagttcacgaagt

SEQ ID NO: 360131 - DNA, 20 bp, Artificial Sequence
  Description of Artificial Sequence: Synthetic oligonucleotide
  Target: LAMA2; (+) strand; PAM type: YTN; PAM sequence: TTC
acgaagttattacagtaaac

SEQ ID NO: 360132 - DNA, 20 bp, Artificial Sequence
  Description of Artificial Sequence: Synthetic oligonucleotide
  Target: LAMA2; (+) strand; PAM type: YTN; PAM sequence: TTA
ttacagtaaacaagaacatc

SEQ ID NO: 360133 - DNA, 20 bp, Artificial Sequence
  Description of Artificial Sequence: Synthetic oligonucleotide
  Target: LAMA2; (+) strand; PAM type: YTN; PAM sequence: TTA
cagtaaacaagaacatcacc

SEQ ID NO: 360134 - DNA, 20 bp, Artificial Sequence
  Description of Artificial Sequence: Synthetic oligonucleotide
  Target: LAMA2; (+) strand; PAM type: YTN; PAM sequence: CTT
gatattcttagtaatgtctc

SEQ ID NO: 360135 - DNA, 20 bp, Artificial Sequence
  Description of Artificial Sequence: Synthetic oligonucleotide
  Target: LAMA2; (+) strand; PAM type: YTN; PAM sequence: TTG
atattcttagtaatgtctca

SEQ ID NO: 360136 - DNA, 20 bp, Artificial Sequence
  Description of Artificial Sequence: Synthetic oligonucleotide
  Target: LAMA2; (+) strand; PAM type: YTN; PAM sequence: TTC
ttagtaatgtctcagaaggt

SEQ ID NO: 360137 - DNA, 20 bp, Artificial Sequence
  Description of Artificial Sequence: Synthetic oligonucleotide
  Target: LAMA2; (+) strand; PAM type: YTN; PAM sequence: CTT
agtaatgtctcagaaggtga

SEQ ID NO: 360138 - DNA, 20 bp, Artificial Sequence
  Description of Artificial Sequence: Synthetic oligonucleotide
  Target: LAMA2; (+) strand; PAM type: YTN; PAM sequence: TTA
gtaatgtctcagaaggtgag

SEQ ID NO: 360139 - DNA, 20 bp, Artificial Sequence
  Description of Artificial Sequence: Synthetic oligonucleotide
  Target: LAMA2; (+) strand; PAM type: YTN; PAM sequence: CTC
agaaggtgagggtcagggga

SEQ ID NO: 360140 - DNA, 20 bp, Artificial Sequence
  Description of Artificial Sequence: Synthetic oligonucleotide
  Target: LAMA2; (+) strand; PAM type: YTN; PAM sequence: TTT
acaggctttagggaaaaggc

SEQ ID NO: 360141 - DNA, 20 bp, Artificial Sequence
  Description of Artificial Sequence: Synthetic oligonucleotide
  Target: LAMA2; (+) strand; PAM type: YTN; PAM sequence: TTA
caggctttagggaaaaggct

SEQ ID NO: 360142 - DNA, 20 bp, Artificial Sequence
  Description of Artificial Sequence: Synthetic oligonucleotide
  Target: LAMA2; (+) strand; PAM type: YTN; PAM sequence: CTT
tagggaaaaggctggttgat

SEQ ID NO: 360143 - DNA, 20 bp, Artificial Sequence
  Description of Artificial Sequence: Synthetic oligonucleotide
  Target: LAMA2; (+) strand; PAM type: YTN; PAM sequence: TTT
agggaaaaggctggttgatt

SEQ ID NO: 360144 - DNA, 20 bp, Artificial Sequence
  Description of Artificial Sequence: Synthetic oligonucleotide
  Target: LAMA2; (+) strand; PAM type: YTN; PAM sequence: TTA
gggaaaaggctggttgattt

SEQ ID NO: 360145 - DNA, 20 bp, Artificial Sequence
  Description of Artificial Sequence: Synthetic oligonucleotide
  Target: LAMA2; (+) strand; PAM type: YTN; PAM sequence: CTG
gttgatttcaaggcaaatct

SEQ ID NO: 360146 - DNA, 20 bp, Artificial Sequence
  Description of Artificial Sequence: Synthetic oligonucleotide
  Target: LAMA2; (+) strand; PAM type: YTN; PAM sequence: TTG
atttcaaggcaaatcttgag

SEQ ID NO: 360147 - DNA, 20 bp, Artificial Sequence
  Description of Artificial Sequence: Synthetic oligonucleotide
  Target: LAMA2; (+) strand; PAM type: YTN; PAM sequence: TTT
caaggcaaatcttgagtgag

SEQ ID NO: 360148 - DNA, 20 bp, Artificial Sequence
  Description of Artificial Sequence: Synthetic oligonucleotide
  Target: LAMA2; (+) strand; PAM type: YTN; PAM sequence: TTC
aaggcaaatcttgagtgaga

SEQ ID NO: 360149 - DNA, 20 bp, Artificial Sequence
  Description of Artificial Sequence: Synthetic oligonucleotide
  Target: LAMA2; (+) strand; PAM type: YTN; PAM sequence: CTT
gagtgagagggaactggttg

SEQ ID NO: 360150 - DNA, 20 bp, Artificial Sequence
  Description of Artificial Sequence: Synthetic oligonucleotide
  Target: LAMA2; (+) strand; PAM type: YTN; PAM sequence: TTG
agtgagagggaactggttgg

SEQ ID NO: 360151 - DNA, 20 bp, Artificial Sequence
  Description of Artificial Sequence: Synthetic oligonucleotide
  Target: LAMA2; (+) strand; PAM type: YTN; PAM sequence: CTG
gttgggattctgcagggttt

SEQ ID NO: 360152 - DNA, 20 bp, Artificial Sequence
  Description of Artificial Sequence: Synthetic oligonucleotide
  Target: LAMA2; (+) strand; PAM type: YTN; PAM sequence: TTG
ggattctgcagggtttatta

SEQ ID NO: 360153 - DNA, 20 bp, Artificial Sequence
  Description of Artificial Sequence: Synthetic oligonucleotide
  Target: LAMA2; (+) strand; PAM type: YTN; PAM sequence: TTC
tgcagggtttattatataat

SEQ ID NO: 360154 - DNA, 20 bp, Artificial Sequence
  Description of Artificial Sequence: Synthetic oligonucleotide
  Target: LAMA2; (+) strand; PAM type: YTN; PAM sequence: CTG
cagggtttattatataatag

SEQ ID NO: 360155 - DNA, 20 bp, Artificial Sequence
  Description of Artificial Sequence: Synthetic oligonucleotide
  Target: LAMA2; (+) strand; PAM type: YTN; PAM sequence: TTT
attatataatagttttggat

SEQ ID NO: 360156 - DNA, 20 bp, Artificial Sequence
  Description of Artificial Sequence: Synthetic oligonucleotide
  Target: LAMA2; (+) strand; PAM type: YTN; PAM sequence: TTA
ttatataatagttttggatt

SEQ ID NO: 360157 - DNA, 20 bp, Artificial Sequence
  Description of Artificial Sequence: Synthetic oligonucleotide
  Target: LAMA2; (+) strand; PAM type: YTN; PAM sequence: TTA
tataatagttttggatttgt

SEQ ID NO: 360158 - DNA, 20 bp, Artificial Sequence
  Description of Artificial Sequence: Synthetic oligonucleotide
  Target: LAMA2; (+) strand; PAM type: YTN; PAM sequence: TTT
tggatttgtcaccagagtga

SEQ ID NO: 360159 - DNA, 20 bp, Artificial Sequence
  Description of Artificial Sequence: Synthetic oligonucleotide
  Target: LAMA2; (+) strand; PAM type: YTN; PAM sequence: TTT
ggatttgtcaccagagtgaa

SEQ ID NO: 360160 - DNA, 20 bp, Artificial Sequence
  Description of Artificial Sequence: Synthetic oligonucleotide
  Target: LAMA2; (+) strand; PAM type: YTN; PAM sequence: TTG
gatttgtcaccagagtgaac

SEQ ID NO: 360161 - DNA, 20 bp, Artificial Sequence
  Description of Artificial Sequence: Synthetic oligonucleotide
  Target: LAMA2; (+) strand; PAM type: YTN; PAM sequence: TTT
gtcaccagagtgaacaaaca

SEQ ID NO: 360162 - DNA, 20 bp, Artificial Sequence
  Description of Artificial Sequence: Synthetic oligonucleotide
  Target: LAMA2; (+) strand; PAM type: YTN; PAM sequence: TTG
tcaccagagtgaacaaacat

SEQ ID NO: 360163 - DNA, 20 bp, Artificial Sequence
  Description of Artificial Sequence: Synthetic oligonucleotide
  Target: LAMA2; (+) strand; PAM type: YTN; PAM sequence: TTG
aagaacatgttatgagtcta

SEQ ID NO: 360164 - DNA, 20 bp, Artificial Sequence
  Description of Artificial Sequence: Synthetic oligonucleotide
  Target: LAMA2; (+) strand; PAM type: YTN; PAM sequence: TTA
tgagtctataaggaagttag

SEQ ID NO: 360165 - DNA, 20 bp, Artificial Sequence
  Description of Artificial Sequence: Synthetic oligonucleotide
  Target: LAMA2; (+) strand; PAM type: YTN; PAM sequence: CTA
taaggaagttagcttagatg

SEQ ID NO: 360166 - DNA, 20 bp, Artificial Sequence
  Description of Artificial Sequence: Synthetic oligonucleotide
  Target: LAMA2; (+) strand; PAM type: YTN; PAM sequence: TTA
gcttagatggatcacagagc

SEQ ID NO: 360167 - DNA, 20 bp, Artificial Sequence
  Description of Artificial Sequence: Synthetic oligonucleotide
  Target: LAMA2; (+) strand; PAM type: YTN; PAM sequence: CTT
agatggatcacagagcagac

SEQ ID NO: 360168 - DNA, 20 bp, Artificial Sequence
  Description of Artificial Sequence: Synthetic oligonucleotide
  Target: LAMA2; (+) strand; PAM type: YTN; PAM sequence: TTA
gatggatcacagagcagaca

SEQ ID NO: 360169 - DNA, 20 bp, Artificial Sequence
  Description of Artificial Sequence: Synthetic oligonucleotide
  Target: LAMA2; (+) strand; PAM type: YTN; PAM sequence: TTT
tcttggagattgctcacagc

SEQ ID NO: 360170 - DNA, 20 bp, Artificial Sequence
  Description of Artificial Sequence: Synthetic oligonucleotide
  Target: LAMA2; (+) strand; PAM type: YTN; PAM sequence: TTT
cttggagattgctcacagca

SEQ ID NO: 360171 - DNA, 20 bp, Artificial Sequence
  Description of Artificial Sequence: Synthetic oligonucleotide
  Target: LAMA2; (+) strand; PAM type: YTN; PAM sequence: TTC
ttggagattgctcacagcat

SEQ ID NO: 360172 - DNA, 20 bp, Artificial Sequence
  Description of Artificial Sequence: Synthetic oligonucleotide
  Target: LAMA2; (+) strand; PAM type: YTN; PAM sequence: CTT
ggagattgctcacagcattc

SEQ ID NO: 360173 - DNA, 20 bp, Artificial Sequence
  Description of Artificial Sequence: Synthetic oligonucleotide
  Target: LAMA2; (+) strand; PAM type: YTN; PAM sequence: TTG
gagattgctcacagcattct

SEQ ID NO: 360174 - DNA, 20 bp, Artificial Sequence
  Description of Artificial Sequence: Synthetic oligonucleotide
  Target: LAMA2; (+) strand; PAM type: YTN; PAM sequence: TTG
ctcacagcattcttaaaata

SEQ ID NO: 360175 - DNA, 20 bp, Artificial Sequence
  Description of Artificial Sequence: Synthetic oligonucleotide
  Target: LAMA2; (+) strand; PAM type: YTN; PAM sequence: CTC
acagcattcttaaaataggg

SEQ ID NO: 360176 - DNA, 20 bp, Artificial Sequence
  Description of Artificial Sequence: Synthetic oligonucleotide
  Target: LAMA2; (+) strand; PAM type: YTN; PAM sequence: TTC
ttaaaatagggggtggacat

SEQ ID NO: 360177 - DNA, 20 bp, Artificial Sequence
  Description of Artificial Sequence: Synthetic oligonucleotide
  Target: LAMA2; (+) strand; PAM type: YTN; PAM sequence: CTT
aaaatagggggtggacattt

SEQ ID NO: 360178 - DNA, 20 bp, Artificial Sequence
  Description of Artificial Sequence: Synthetic oligonucleotide
  Target: LAMA2; (+) strand; PAM type: YTN; PAM sequence: TTA
aaatagggggtggacatttt

SEQ ID NO: 360179 - DNA, 20 bp, Artificial Sequence
  Description of Artificial Sequence: Synthetic oligonucleotide
  Target: LAMA2; (+) strand; PAM type: YTN; PAM sequence: TTT
ttcttactcccagcattatt

SEQ ID NO: 360180 - DNA, 20 bp, Artificial Sequence
  Description of Artificial Sequence: Synthetic oligonucleotide
  Target: LAMA2; (+) strand; PAM type: YTN; PAM sequence: TTT
tcttactcccagcattattt

SEQ ID NO: 360181 - DNA, 20 bp, Artificial Sequence
  Description of Artificial Sequence: Synthetic oligonucleotide
  Target: LAMA2; (+) strand; PAM type: YTN; PAM sequence: TTT
cttactcccagcattattta

SEQ ID NO: 360182 - DNA, 20 bp, Artificial Sequence
  Description of Artificial Sequence: Synthetic oligonucleotide
  Target: LAMA2; (+) strand; PAM type: YTN; PAM sequence: TTC
ttactcccagcattatttag

SEQ ID NO: 360183 - DNA, 20 bp, Artificial Sequence
  Description of Artificial Sequence: Synthetic oligonucleotide
  Target: LAMA2; (+) strand; PAM type: YTN; PAM sequence: CTT
actcccagcattatttagca

SEQ ID NO: 360184 - DNA, 20 bp, Artificial Sequence
  Description of Artificial Sequence: Synthetic oligonucleotide
  Target: LAMA2; (+) strand; PAM type: YTN; PAM sequence: TTA
ctcccagcattatttagcac

SEQ ID NO: 360185 - DNA, 20 bp, Artificial Sequence
  Description of Artificial Sequence: Synthetic oligonucleotide
  Target: LAMA2; (+) strand; PAM type: YTN; PAM sequence: CTC
ccagcattatttagcacagg

SEQ ID NO: 360186 - DNA, 20 bp, Artificial Sequence
  Description of Artificial Sequence: Synthetic oligonucleotide
  Target: LAMA2; (+) strand; PAM type: YTN; PAM sequence: TTA
tttagcacaggaaaggaaat

SEQ ID NO: 360187 - DNA, 20 bp, Artificial Sequence
  Description of Artificial Sequence: Synthetic oligonucleotide
  Target: LAMA2; (+) strand; PAM type: YTN; PAM sequence: TTT
agcacaggaaaggaaattgt

SEQ ID NO: 360188 - DNA, 20 bp, Artificial Sequence
  Description of Artificial Sequence: Synthetic oligonucleotide
  Target: LAMA2; (+) strand; PAM type: YTN; PAM sequence: TTA
gcacaggaaaggaaattgtg

SEQ ID NO: 360189 - DNA, 20 bp, Artificial Sequence
  Description of Artificial Sequence: Synthetic oligonucleotide
  Target: LAMA2; (+) strand; PAM type: YTN; PAM sequence: TTG
tgttagcgttagaagaaatt

SEQ ID NO: 360190 - DNA, 20 bp, Artificial Sequence
  Description of Artificial Sequence: Synthetic oligonucleotide
  Target: LAMA2; (+) strand; PAM type: YTN; PAM sequence: TTA
gcgttagaagaaattgtgtt

SEQ ID NO: 360191 - DNA, 20 bp, Artificial Sequence
  Description of Artificial Sequence: Synthetic oligonucleotide
  Target: LAMA2; (+) strand; PAM type: YTN; PAM sequence: TTA
gaagaaattgtgtttgcttt

SEQ ID NO: 360192 - DNA, 20 bp, Artificial Sequence
  Description of Artificial Sequence: Synthetic oligonucleotide
  Target: LAMA2; (+) strand; PAM type: YTN; PAM sequence: TTG
tgtttgctttagttcttaca

SEQ ID NO: 360193 - DNA, 20 bp, Artificial Sequence
  Description of Artificial Sequence: Synthetic oligonucleotide
  Target: LAMA2; (+) strand; PAM type: YTN; PAM sequence: TTT
gctttagttcttacagacaa

SEQ ID NO: 360194 - DNA, 20 bp, Artificial Sequence
  Description of Artificial Sequence: Synthetic oligonucleotide
  Target: LAMA2; (+) strand; PAM type: YTN; PAM sequence: TTG
ctttagttcttacagacaat

SEQ ID NO: 360195 - DNA, 20 bp, Artificial Sequence
  Description of Artificial Sequence: Synthetic oligonucleotide
  Target: LAMA2; (+) strand; PAM type: YTN; PAM sequence: CTT
tagttcttacagacaatata

SEQ ID NO: 360196 - DNA, 20 bp, Artificial Sequence
  Description of Artificial Sequence: Synthetic oligonucleotide
  Target: LAMA2; (+) strand; PAM type: YTN; PAM sequence: TTT
agttcttacagacaatatat

SEQ ID NO: 360197 - DNA, 20 bp, Artificial Sequence
  Description of Artificial Sequence: Synthetic oligonucleotide
  Target: LAMA2; (+) strand; PAM type: YTN; PAM sequence: TTA
gttcttacagacaatatatt

SEQ ID NO: 360198 - DNA, 20 bp, Artificial Sequence
  Description of Artificial Sequence: Synthetic oligonucleotide
  Target: LAMA2; (+) strand; PAM type: YTN; PAM sequence: TTC
ttacagacaatatatttact

SEQ ID NO: 360199 - DNA, 20 bp, Artificial Sequence
  Description of Artificial Sequence: Synthetic oligonucleotide
  Target: LAMA2; (+) strand; PAM type: YTN; PAM sequence: CTT
acagacaatatatttactta

SEQ ID NO: 360200 - DNA, 20 bp, Artificial Sequence
  Description of Artificial Sequence: Synthetic oligonucleotide
  Target: LAMA2; (+) strand; PAM type: YTN; PAM sequence: TTA
cagacaatatatttacttaa

SEQ ID NO: 360201 - DNA, 20 bp, Artificial Sequence
  Description of Artificial Sequence: Synthetic oligonucleotide
  Target: LAMA2; (+) strand; PAM type: YTN; PAM sequence: TTT
acttaatcttctgtgacact

SEQ ID NO: 360202 - DNA, 20 bp, Artificial Sequence
  Description of Artificial Sequence: Synthetic oligonucleotide
  Target: LAMA2; (+) strand; PAM type: YTN; PAM sequence: TTA
cttaatcttctgtgacactg

SEQ ID NO: 360203 - DNA, 20 bp, Artificial Sequence
  Description of Artificial Sequence: Synthetic oligonucleotide
  Target: LAMA2; (+) strand; PAM type: YTN; PAM sequence: CTT
aatcttctgtgacactgttt

SEQ ID NO: 360204 - DNA, 20 bp, Artificial Sequence
  Description of Artificial Sequence: Synthetic oligonucleotide
  Target: LAMA2; (+) strand; PAM type: YTN; PAM sequence: TTA
atcttctgtgacactgtttc

SEQ ID NO: 360205 - DNA, 20 bp, Artificial Sequence
  Description of Artificial Sequence: Synthetic oligonucleotide
  Target: LAMA2; (+) strand; PAM type: YTN; PAM sequence: CTT
ctgtgacactgtttcttaat

SEQ ID NO: 360206 - DNA, 20 bp, Artificial Sequence
  Description of Artificial Sequence: Synthetic oligonucleotide
  Target: LAMA2; (+) strand; PAM type: YTN; PAM sequence: TTC
tgtgacactgtttcttaatg

SEQ ID NO: 360207 - DNA, 20 bp, Artificial Sequence
  Description of Artificial Sequence: Synthetic oligonucleotide
  Target: LAMA2; (+) strand; PAM type: YTN; PAM sequence: CTG
tgacactgtttcttaatgta

SEQ ID NO: 360208 - DNA, 20 bp, Artificial Sequence
  Description of Artificial Sequence: Synthetic oligonucleotide
  Target: LAMA2; (+) strand; PAM type: YTN; PAM sequence: CTG
tttcttaatgtataaaatga

SEQ ID NO: 360209 - DNA, 20 bp, Artificial Sequence
  Description of Artificial Sequence: Synthetic oligonucleotide
  Target: LAMA2; (+) strand; PAM type: YTN; PAM sequence: TTT
cttaatgtataaaatgaaaa

SEQ ID NO: 360210 - DNA, 20 bp, Artificial Sequence
  Description of Artificial Sequence: Synthetic oligonucleotide
  Target: LAMA2; (+) strand; PAM type: YTN; PAM sequence: TTC
ttaatgtataaaatgaaaat

SEQ ID NO: 360211 - DNA, 20 bp, Artificial Sequence
  Description of Artificial Sequence: Synthetic oligonucleotide
  Target: LAMA2; (+) strand; PAM type: YTN; PAM sequence: CTT
aatgtataaaatgaaaataa

SEQ ID NO: 360212 - DNA, 20 bp, Artificial Sequence
  Description of Artificial Sequence: Synthetic oligonucleotide
  Target: LAMA2; (+) strand; PAM type: YTN; PAM sequence: TTA
atgtataaaatgaaaataat

SEQ ID NO: 360213 - DNA, 20 bp, Artificial Sequence
  Description of Artificial Sequence: Synthetic oligonucleotide
  Target: LAMA2; (+) strand; PAM type: YTN; PAM sequence: CTA
ctttatagtgttattttgag

SEQ ID NO: 360214 - DNA, 20 bp, Artificial Sequence
  Description of Artificial Sequence: Synthetic oligonucleotide
  Target: LAMA2; (+) strand; PAM type: YTN; PAM sequence: CTT
tatagtgttattttgagggt

SEQ ID NO: 360215 - DNA, 20 bp, Artificial Sequence
  Description of Artificial Sequence: Synthetic oligonucleotide
  Target: LAMA2; (+) strand; PAM type: YTN; PAM sequence: TTT
atagtgttattttgagggtt

SEQ ID NO: 360216 - DNA, 20 bp, Artificial Sequence
  Description of Artificial Sequence: Synthetic oligonucleotide
  Target: LAMA2; (+) strand; PAM type: YTN; PAM sequence: TTA
tagtgttattttgagggtta

SEQ ID NO: 360217 - DNA, 20 bp, Artificial Sequence
  Description of Artificial Sequence: Synthetic oligonucleotide
  Target: LAMA2; (+) strand; PAM type: YTN; PAM sequence: TTA
ttttgagggttaaatgagtt

SEQ ID NO: 360218 - DNA, 20 bp, Artificial Sequence
  Description of Artificial Sequence: Synthetic oligonucleotide
  Target: LAMA2; (+) strand; PAM type: YTN; PAM sequence: TTT
tgagggttaaatgagttaac

SEQ ID NO: 360219 - DNA, 20 bp, Artificial Sequence
  Description of Artificial Sequence: Synthetic oligonucleotide
  Target: LAMA2; (+) strand; PAM type: YTN; PAM sequence: TTT
gagggttaaatgagttaaca

SEQ ID NO: 360220 - DNA, 20 bp, Artificial Sequence
  Description of Artificial Sequence: Synthetic oligonucleotide
  Target: LAMA2; (+) strand; PAM type: YTN; PAM sequence: TTG
agggttaaatgagttaacac

SEQ ID NO: 360221 - DNA, 20 bp, Artificial Sequence
  Description of Artificial Sequence: Synthetic oligonucleotide
  Target: LAMA2; (+) strand; PAM type: YTN; PAM sequence: TTA
aatgagttaacacatatgca

SEQ ID NO: 360222 - DNA, 20 bp, Artificial Sequence
  Description of Artificial Sequence: Synthetic oligonucleotide
  Target: LAMA2; (+) strand; PAM type: YTN; PAM sequence: TTA
acacatatgcagtactcaag

SEQ ID NO: 360223 - DNA, 20 bp, Artificial Sequence
  Description of Artificial Sequence: Synthetic oligonucleotide
  Target: LAMA2; (+) strand; PAM type: YTN; PAM sequence: CTC
aagatggtgtctgaaaatga

SEQ ID NO: 360224 - DNA, 20 bp, Artificial Sequence
  Description of Artificial Sequence: Synthetic oligonucleotide
  Target: LAMA2; (+) strand; PAM type: YTN; PAM sequence: CTG
aaaatgataagcatttggta

SEQ ID NO: 360225 - DNA, 20 bp, Artificial Sequence
  Description of Artificial Sequence: Synthetic oligonucleotide
  Target: LAMA2; (+) strand; PAM type: YTN; PAM sequence: TTT
ggtattagctattattatta

SEQ ID NO: 360226 - DNA, 20 bp, Artificial Sequence
  Description of Artificial Sequence: Synthetic oligonucleotide
  Target: LAMA2; (+) strand; PAM type: YTN; PAM sequence: TTG
gtattagctattattattaa

SEQ ID NO: 360227 - DNA, 20 bp, Artificial Sequence
  Description of Artificial Sequence: Synthetic oligonucleotide
  Target: LAMA2; (+) strand; PAM type: YTN; PAM sequence: TTA
gctattattattaactccaa

SEQ ID NO: 360228 - DNA, 20 bp, Artificial Sequence
  Description of Artificial Sequence: Synthetic oligonucleotide
  Target: LAMA2; (+) strand; PAM type: YTN; PAM sequence: CTA
ttattattaactccaactgg

SEQ ID NO: 360229 - DNA, 20 bp, Artificial Sequence
  Description of Artificial Sequence: Synthetic oligonucleotide
  Target: LAMA2; (+) strand; PAM type: YTN; PAM sequence: TTA
ttattaactccaactgggct

SEQ ID NO: 360230 - DNA, 20 bp, Artificial Sequence
  Description of Artificial Sequence: Synthetic oligonucleotide
  Target: LAMA2; (+) strand; PAM type: YTN; PAM sequence: TTA
ttaactccaactgggcttaa

SEQ ID NO: 360231 - DNA, 20 bp, Artificial Sequence
  Description of Artificial Sequence: Synthetic oligonucleotide
  Target: LAMA2; (+) strand; PAM type: YTN; PAM sequence: TTA
actccaactgggcttaattt

SEQ ID NO: 360232 - DNA, 20 bp, Artificial Sequence
  Description of Artificial Sequence: Synthetic oligonucleotide
  Target: LAMA2; (+) strand; PAM type: YTN; PAM sequence: CTC
caactgggcttaatttgagg

SEQ ID NO: 360233 - DNA, 20 bp, Artificial Sequence
  Description of Artificial Sequence: Synthetic oligonucleotide
  Target: LAMA2; (+) strand; PAM type: YTN; PAM sequence: CTG
ggcttaatttgaggtcaggc

SEQ ID NO: 360234 - DNA, 20 bp, Artificial Sequence
  Description of Artificial Sequence: Synthetic oligonucleotide
  Target: LAMA2; (+) strand; PAM type: YTN; PAM sequence: CTT
aatttgaggtcaggcattat

SEQ ID NO: 360235 - DNA, 20 bp, Artificial Sequence
  Description of Artificial Sequence: Synthetic oligonucleotide
  Target: LAMA2; (+) strand; PAM type: YTN; PAM sequence: TTA
atttgaggtcaggcattatt

SEQ ID NO: 360236 - DNA, 20 bp, Artificial Sequence
  Description of Artificial Sequence: Synthetic oligonucleotide
  Target: LAMA2; (+) strand; PAM type: YTN; PAM sequence: TTT
gaggtcaggcattattttgt

SEQ ID NO: 360237 - DNA, 20 bp, Artificial Sequence
  Description of Artificial Sequence: Synthetic oligonucleotide
  Target: LAMA2; (+) strand; PAM type: YTN; PAM sequence: TTG
aggtcaggcattattttgtt

SEQ ID NO: 360238 - DNA, 20 bp, Artificial Sequence
  Description of Artificial Sequence: Synthetic oligonucleotide
  Target: LAMA2; (+) strand; PAM type: YTN; PAM sequence: TTA
ttttgttgaaattttagaaa

SEQ ID NO: 360239 - DNA, 20 bp, Artificial Sequence
  Description of Artificial Sequence: Synthetic oligonucleotide
  Target: LAMA2; (+) strand; PAM type: YTN; PAM sequence: TTT
tgttgaaattttagaaagac

SEQ ID NO: 360240 - DNA, 20 bp, Artificial Sequence
  Description of Artificial Sequence: Synthetic oligonucleotide
  Target: LAMA2; (+) strand; PAM type: YTN; PAM sequence: TTT
gttgaaattttagaaagact

SEQ ID NO: 360241 - DNA, 20 bp, Artificial Sequence
  Description of Artificial Sequence: Synthetic oligonucleotide
  Target: LAMA2; (+) strand; PAM type: YTN; PAM sequence: TTG
ttgaaattttagaaagactc

SEQ ID NO: 360242 - DNA, 20 bp, Artificial Sequence
  Description of Artificial Sequence: Synthetic oligonucleotide
  Target: LAMA2; (+) strand; PAM type: YTN; PAM sequence: TTG
aaattttagaaagactcccc

SEQ ID NO: 360243 - DNA, 20 bp, Artificial Sequence
  Description of Artificial Sequence: Synthetic oligonucleotide
  Target: LAMA2; (+) strand; PAM type: YTN; PAM sequence: TTT
tagaaagactcccctcacac

SEQ ID NO: 360244 - DNA, 20 bp, Artificial Sequence
  Description of Artificial Sequence: Synthetic oligonucleotide
  Target: LAMA2; (+) strand; PAM type: YTN; PAM sequence: TTT
agaaagactcccctcacaca

SEQ ID NO: 360245 - DNA, 20 bp, Artificial Sequence
  Description of Artificial Sequence: Synthetic oligonucleotide
  Target: LAMA2; (+) strand; PAM type: YTN; PAM sequence: TTA
gaaagactcccctcacacat

SEQ ID NO: 360246 - DNA, 20 bp, Artificial Sequence
  Description of Artificial Sequence: Synthetic oligonucleotide
  Target: LAMA2; (+) strand; PAM type: YTN; PAM sequence: CTC
ccctcacacataaacagaca

SEQ ID NO: 360247 - DNA, 20 bp, Artificial Sequence
  Description of Artificial Sequence: Synthetic oligonucleotide
  Target: LAMA2; (+) strand; PAM type: YTN; PAM sequence: CTC
acacataaacagacagaaag

SEQ ID NO: 360248 - DNA, 20 bp, Artificial Sequence
  Description of Artificial Sequence: Synthetic oligonucleotide
  Target: LAMA2; (+) strand; PAM type: YTN; PAM sequence: TTT
gctcatatctgtctaatttt

SEQ ID NO: 360249 - DNA, 20 bp, Artificial Sequence
  Description of Artificial Sequence: Synthetic oligonucleotide
  Target: LAMA2; (+) strand; PAM type: YTN; PAM sequence: TTG
ctcatatctgtctaattttt

SEQ ID NO: 360250 - DNA, 20 bp, Artificial Sequence
  Description of Artificial Sequence: Synthetic oligonucleotide
  Target: LAMA2; (+) strand; PAM type: YTN; PAM sequence: CTC
atatctgtctaatttttagg

SEQ ID NO: 360251 - DNA, 20 bp, Artificial Sequence
  Description of Artificial Sequence: Synthetic oligonucleotide
  Target: LAMA2; (+) strand; PAM type: YTN; PAM sequence: CTG
tctaatttttagggtatttt

SEQ ID NO: 360252 - DNA, 20 bp, Artificial Sequence
  Description of Artificial Sequence: Synthetic oligonucleotide
  Target: LAMA2; (+) strand; PAM type: YTN; PAM sequence: CTA
atttttagggtattttgata

SEQ ID NO: 360253 - DNA, 20 bp, Artificial Sequence
  Description of Artificial Sequence: Synthetic oligonucleotide
  Target: LAMA2; (+) strand; PAM type: YTN; PAM sequence: TTT
ttagggtattttgatataca

SEQ ID NO: 360254 - DNA, 20 bp, Artificial Sequence
  Description of Artificial Sequence: Synthetic oligonucleotide
  Target: LAMA2; (+) strand; PAM type: YTN; PAM sequence: TTT
tagggtattttgatatacaa

SEQ ID NO: 360255 - DNA, 20 bp, Artificial Sequence
  Description of Artificial Sequence: Synthetic oligonucleotide
  Target: LAMA2; (+) strand; PAM type: YTN; PAM sequence: TTT
agggtattttgatatacaaa

SEQ ID NO: 360256 - DNA, 20 bp, Artificial Sequence
  Description of Artificial Sequence: Synthetic oligonucleotide
  Target: LAMA2; (+) strand; PAM type: YTN; PAM sequence: TTA
gggtattttgatatacaaag

SEQ ID NO: 360257 - DNA, 20 bp, Artificial Sequence
  Description of Artificial Sequence: Synthetic oligonucleotide
  Target: LAMA2; (+) strand; PAM type: YTN; PAM sequence: TTT
tgatatacaaagtaactgac

SEQ ID NO: 360258 - DNA, 20 bp, Artificial Sequence
  Description of Artificial Sequence: Synthetic oligonucleotide
  Target: LAMA2; (+) strand; PAM type: YTN; PAM sequence: TTT
gatatacaaagtaactgact

SEQ ID NO: 360259 - DNA, 20 bp, Artificial Sequence
  Description of Artificial Sequence: Synthetic oligonucleotide
  Target: LAMA2; (+) strand; PAM type: YTN; PAM sequence: TTG
atatacaaagtaactgactg

SEQ ID NO: 360260 - DNA, 20 bp, Artificial Sequence
  Description of Artificial Sequence: Synthetic oligonucleotide
  Target: LAMA2; (+) strand; PAM type: YTN; PAM sequence: CTG
actgtcaggacctgtcttag

SEQ ID NO: 360261 - DNA, 20 bp, Artificial Sequence
  Description of Artificial Sequence: Synthetic oligonucleotide
  Target: LAMA2; (+) strand; PAM type: YTN; PAM sequence: CTG
tcaggacctgtcttagagat

SEQ ID NO: 360262 - DNA, 20 bp, Artificial Sequence
  Description of Artificial Sequence: Synthetic oligonucleotide
  Target: LAMA2; (+) strand; PAM type: YTN; PAM sequence: CTG
tcttagagatgatctggtag

SEQ ID NO: 360263 - DNA, 20 bp, Artificial Sequence
  Description of Artificial Sequence: Synthetic oligonucleotide
  Target: LAMA2; (+) strand; PAM type: YTN; PAM sequence: CTT
agagatgatctggtaggaca

SEQ ID NO: 360264 - DNA, 20 bp, Artificial Sequence
  Description of Artificial Sequence: Synthetic oligonucleotide
  Target: LAMA2; (+) strand; PAM type: YTN; PAM sequence: TTA
gagatgatctggtaggacag

SEQ ID NO: 360265 - DNA, 20 bp, Artificial Sequence
  Description of Artificial Sequence: Synthetic oligonucleotide
  Target: LAMA2; (+) strand; PAM type: YTN; PAM sequence: CTG
gtaggacagtaaatggcttt

SEQ ID NO: 360266 - DNA, 20 bp, Artificial Sequence
  Description of Artificial Sequence: Synthetic oligonucleotide
  Target: LAMA2; (+) strand; PAM type: YTN; PAM sequence: CTT
ttctttccagttttcatctg

SEQ ID NO: 360267 - DNA, 20 bp, Artificial Sequence
  Description of Artificial Sequence: Synthetic oligonucleotide
  Target: LAMA2; (+) strand; PAM type: YTN; PAM sequence: TTT
tctttccagttttcatctgg

SEQ ID NO: 360268 - DNA, 20 bp, Artificial Sequence
  Description of Artificial Sequence: Synthetic oligonucleotide
  Target: LAMA2; (+) strand; PAM type: YTN; PAM sequence: TTT
ctttccagttttcatctggg

SEQ ID NO: 360269 - DNA, 20 bp, Artificial Sequence
  Description of Artificial Sequence: Synthetic oligonucleotide
  Target: LAMA2; (+) strand; PAM type: YTN; PAM sequence: TTC
tttccagttttcatctggga

SEQ ID NO: 360270 - DNA, 20 bp, Artificial Sequence
  Description of Artificial Sequence: Synthetic oligonucleotide
  Target: LAMA2; (+) strand; PAM type: YTN; PAM sequence: CTT
tccagttttcatctgggact

SEQ ID NO: 360271 - DNA, 20 bp, Artificial Sequence
  Description of Artificial Sequence: Synthetic oligonucleotide
  Target: LAMA2; (+) strand; PAM type: YTN; PAM sequence: TTT
ccagttttcatctgggactg

SEQ ID NO: 360272 - DNA, 20 bp, Artificial Sequence
  Description of Artificial Sequence: Synthetic oligonucleotide
  Target: LAMA2; (+) strand; PAM type: YTN; PAM sequence: TTC
cagttttcatctgggactgg

SEQ ID NO: 360273 - DNA, 20 bp, Artificial Sequence
  Description of Artificial Sequence: Synthetic oligonucleotide
  Target: LAMA2; (+) strand; PAM type: YTN; PAM sequence: TTT
tcatctgggactgggtttga

SEQ ID NO: 360274 - DNA, 20 bp, Artificial Sequence
  Description of Artificial Sequence: Synthetic oligonucleotide
  Target: LAMA2; (+) strand; PAM type: YTN; PAM sequence: TTT
catctgggactgggtttgaa

SEQ ID NO: 360275 - DNA, 20 bp, Artificial Sequence
  Description of Artificial Sequence: Synthetic oligonucleotide
  Target: LAMA2; (+) strand; PAM type: YTN; PAM sequence: TTC
atctgggactgggtttgaag

SEQ ID NO: 360276 - DNA, 20 bp, Artificial Sequence
  Description of Artificial Sequence: Synthetic oligonucleotide
  Target: LAMA2; (+) strand; PAM type: YTN; PAM sequence: CTG
ggactgggtttgaagtgatc

SEQ ID NO: 360277 - DNA, 20 bp, Artificial Sequence
  Description of Artificial Sequence: Synthetic oligonucleotide
  Target: LAMA2; (+) strand; PAM type: YTN; PAM sequence: CTG
ggtttgaagtgatcatcagc

SEQ ID NO: 360278 - DNA, 20 bp, Artificial Sequence
  Description of Artificial Sequence: Synthetic oligonucleotide
  Target: LAMA2; (+) strand; PAM type: YTN; PAM sequence: TTT
gaagtgatcatcagcctcag

SEQ ID NO: 360279 - DNA, 20 bp, Artificial Sequence
  Description of Artificial Sequence: Synthetic oligonucleotide
  Target: LAMA2; (+) strand; PAM type: YTN; PAM sequence: TTG
aagtgatcatcagcctcagt

SEQ ID NO: 360280 - DNA, 20 bp, Artificial Sequence
  Description of Artificial Sequence: Synthetic oligonucleotide
  Target: LAMA2; (+) strand; PAM type: YTN; PAM sequence: CTC
agtgttctggaaataagtca

SEQ ID NO: 360281 - DNA, 20 bp, Artificial Sequence
  Description of Artificial Sequence: Synthetic oligonucleotide
  Target: LAMA2; (+) strand; PAM type: YTN; PAM sequence: TTC
tggaaataagtcatttataa

SEQ ID NO: 360282 - DNA, 20 bp, Artificial Sequence
  Description of Artificial Sequence: Synthetic oligonucleotide
  Target: LAMA2; (+) strand; PAM type: YTN; PAM sequence: CTG
gaaataagtcatttataatg

SEQ ID NO: 360283 - DNA, 20 bp, Artificial Sequence
  Description of Artificial Sequence: Synthetic oligonucleotide
  Target: LAMA2; (+) strand; PAM type: YTN; PAM sequence: TTT
ataatgaaatggaactggaa

SEQ ID NO: 360284 - DNA, 20 bp, Artificial Sequence
  Description of Artificial Sequence: Synthetic oligonucleotide
  Target: LAMA2; (+) strand; PAM type: YTN; PAM sequence: TTA
taatgaaatggaactggaaa

SEQ ID NO: 360285 - DNA, 20 bp, Artificial Sequence
  Description of Artificial Sequence: Synthetic oligonucleotide
  Target: LAMA2; (+) strand; PAM type: YTN; PAM sequence: CTG
gaaataacccacagacaaaa

SEQ ID NO: 360286 - DNA, 20 bp, Artificial Sequence
  Description of Artificial Sequence: Synthetic oligonucleotide
  Target: LAMA2; (+) strand; PAM type: YTN; PAM sequence: CTT
tgcaagccattgaagttccc

SEQ ID NO: 360287 - DNA, 20 bp, Artificial Sequence
  Description of Artificial Sequence: Synthetic oligonucleotide
  Target: LAMA2; (+) strand; PAM type: YTN; PAM sequence: TTT
gcaagccattgaagttcccc

SEQ ID NO: 360288 - DNA, 20 bp, Artificial Sequence
  Description of Artificial Sequence: Synthetic oligonucleotide
  Target: LAMA2; (+) strand; PAM type: YTN; PAM sequence: TTG
caagccattgaagttcccct

SEQ ID NO: 360289 - DNA, 20 bp, Artificial Sequence
  Description of Artificial Sequence: Synthetic oligonucleotide
  Target: LAMA2; (+) strand; PAM type: YTN; PAM sequence: TTG
aagttcccctaggccattta

SEQ ID NO: 360290 - DNA, 20 bp, Artificial Sequence
  Description of Artificial Sequence: Synthetic oligonucleotide
  Target: LAMA2; (+) strand; PAM type: YTN; PAM sequence: TTC
ccctaggccatttactgcct

SEQ ID NO: 360291 - DNA, 20 bp, Artificial Sequence
  Description of Artificial Sequence: Synthetic oligonucleotide
  Target: LAMA2; (+) strand; PAM type: YTN; PAM sequence: CTA
ggccatttactgccttaagc

SEQ ID NO: 360292 - DNA, 20 bp, Artificial Sequence
  Description of Artificial Sequence: Synthetic oligonucleotide
  Target: LAMA2; (+) strand; PAM type: YTN; PAM sequence: TTT
actgccttaagctcgttttt

SEQ ID NO: 360293 - DNA, 20 bp, Artificial Sequence
  Description of Artificial Sequence: Synthetic oligonucleotide
  Target: LAMA2; (+) strand; PAM type: YTN; PAM sequence: TTA
ctgccttaagctcgttttta

SEQ ID NO: 360294 - DNA, 20 bp, Artificial Sequence
  Description of Artificial Sequence: Synthetic oligonucleotide
  Target: LAMA2; (+) strand; PAM type: YTN; PAM sequence: CTG
ccttaagctcgtttttactc

SEQ ID NO: 360295 - DNA, 20 bp, Artificial Sequence
  Description of Artificial Sequence: Synthetic oligonucleotide
  Target: LAMA2; (+) strand; PAM type: YTN; PAM sequence: CTT
aagctcgtttttactcatac

SEQ ID NO: 360296 - DNA, 20 bp, Artificial Sequence
  Description of Artificial Sequence: Synthetic oligonucleotide
  Target: LAMA2; (+) strand; PAM type: YTN; PAM sequence: TTA
agctcgtttttactcatact

SEQ ID NO: 360297 - DNA, 20 bp, Artificial Sequence
  Description of Artificial Sequence: Synthetic oligonucleotide
  Target: LAMA2; (+) strand; PAM type: YTN; PAM sequence: CTC
gtttttactcatactgcagg

SEQ ID NO: 360298 - DNA, 20 bp, Artificial Sequence
  Description of Artificial Sequence: Synthetic oligonucleotide
  Target: LAMA2; (+) strand; PAM type: YTN; PAM sequence: TTT
ttactcatactgcaggaaaa

SEQ ID NO: 360299 - DNA, 20 bp, Artificial Sequence
  Description of Artificial Sequence: Synthetic oligonucleotide
  Target: LAMA2; (+) strand; PAM type: YTN; PAM sequence: TTT
tactcatactgcaggaaaaa

SEQ ID NO: 360300 - DNA, 20 bp, Artificial Sequence
  Description of Artificial Sequence: Synthetic oligonucleotide
  Target: LAMA2; (+) strand; PAM type: YTN; PAM sequence: TTT
actcatactgcaggaaaaaa

SEQ ID NO: 360301 - DNA, 20 bp, Artificial Sequence
  Description of Artificial Sequence: Synthetic oligonucleotide
  Target: LAMA2; (+) strand; PAM type: YTN; PAM sequence: TTA
ctcatactgcaggaaaaaaa

SEQ ID NO: 360302 - DNA, 20 bp, Artificial Sequence
  Description of Artificial Sequence: Synthetic oligonucleotide
  Target: LAMA2; (+) strand; PAM type: YTN; PAM sequence: CTC
atactgcaggaaaaaaaaga

SEQ ID NO: 360303 - DNA, 20 bp, Artificial Sequence
  Description of Artificial Sequence: Synthetic oligonucleotide
  Target: LAMA2; (+) strand; PAM type: YTN; PAM sequence: CTG
caggaaaaaaaagagtgagt

SEQ ID NO: 360304 - DNA, 20 bp, Artificial Sequence
  Description of Artificial Sequence: Synthetic oligonucleotide
  Target: LAMA2; (+) strand; PAM type: YTN; PAM sequence: TTC
ttatatcacataattttaaa

SEQ ID NO: 360305 - DNA, 20 bp, Artificial Sequence
  Description of Artificial Sequence: Synthetic oligonucleotide
  Target: LAMA2; (+) strand; PAM type: YTN; PAM sequence: CTT
atatcacataattttaaatt

SEQ ID NO: 360306 - DNA, 20 bp, Artificial Sequence
  Description of Artificial Sequence: Synthetic oligonucleotide
  Target: LAMA2; (+) strand; PAM type: YTN; PAM sequence: TTA
tatcacataattttaaatta

SEQ ID NO: 360307 - DNA, 20 bp, Artificial Sequence
  Description of Artificial Sequence: Synthetic oligonucleotide
  Target: LAMA2; (+) strand; PAM type: YTN; PAM sequence: TTT
taaattaagatgtgatggtt

SEQ ID NO: 360308 - DNA, 20 bp, Artificial Sequence
  Description of Artificial Sequence: Synthetic oligonucleotide
  Target: LAMA2; (+) strand; PAM type: YTN; PAM sequence: TTT
aaattaagatgtgatggttt

SEQ ID NO: 360309 - DNA, 20 bp, Artificial Sequence
  Description of Artificial Sequence: Synthetic oligonucleotide
  Target: LAMA2; (+) strand; PAM type: YTN; PAM sequence: TTA
aattaagatgtgatggtttt

SEQ ID NO: 360310 - DNA, 20 bp, Artificial Sequence
  Description of Artificial Sequence: Synthetic oligonucleotide
  Target: LAMA2; (+) strand; PAM type: YTN; PAM sequence: TTA
agatgtgatggttttatata

SEQ ID NO: 360311 - DNA, 20 bp, Artificial Sequence
  Description of Artificial Sequence: Synthetic oligonucleotide
  Target: LAMA2; (+) strand; PAM type: YTN; PAM sequence: TTT
tatataaaagcaaaaatgct

SEQ ID NO: 360312 - DNA, 20 bp, Artificial Sequence
  Description of Artificial Sequence: Synthetic oligonucleotide
  Target: LAMA2; (+) strand; PAM type: YTN; PAM sequence: TTT
atataaaagcaaaaatgctt

SEQ ID NO: 360313 - DNA, 20 bp, Artificial Sequence
  Description of Artificial Sequence: Synthetic oligonucleotide
  Target: LAMA2; (+) strand; PAM type: YTN; PAM sequence: TTA
tataaaagcaaaaatgcttt

SEQ ID NO: 360314 - DNA, 20 bp, Artificial Sequence
  Description of Artificial Sequence: Synthetic oligonucleotide
  Target: LAMA2; (+) strand; PAM type: YTN; PAM sequence: CTT
tattttgctttttttgttca

SEQ ID NO: 360315 - DNA, 20 bp, Artificial Sequence
  Description of Artificial Sequence: Synthetic oligonucleotide
  Target: LAMA2; (+) strand; PAM type: YTN; PAM sequence: TTT
attttgctttttttgttcaa

SEQ ID NO: 360316 - DNA, 20 bp, Artificial Sequence
  Description of Artificial Sequence: Synthetic oligonucleotide
  Target: LAMA2; (+) strand; PAM type: YTN; PAM sequence: TTA
ttttgctttttttgttcaag

SEQ ID NO: 360317 - DNA, 20 bp, Artificial Sequence
  Description of Artificial Sequence: Synthetic oligonucleotide
  Target: LAMA2; (+) strand; PAM type: YTN; PAM sequence: TTT
tgctttttttgttcaagaca

SEQ ID NO: 360318 - DNA, 20 bp, Artificial Sequence
  Description of Artificial Sequence: Synthetic oligonucleotide
  Target: LAMA2; (+) strand; PAM type: YTN; PAM sequence: TTT
gctttttttgttcaagacaa

SEQ ID NO: 360319 - DNA, 20 bp, Artificial Sequence
  Description of Artificial Sequence: Synthetic oligonucleotide
  Target: LAMA2; (+) strand; PAM type: YTN; PAM sequence: TTG
ctttttttgttcaagacaag

SEQ ID NO: 360320 - DNA, 20 bp, Artificial Sequence
  Description of Artificial Sequence: Synthetic oligonucleotide
  Target: LAMA2; (+) strand; PAM type: YTN; PAM sequence: CTT
tttttgttcaagacaagtac

SEQ ID NO: 360321 - DNA, 20 bp, Artificial Sequence
  Description of Artificial Sequence: Synthetic oligonucleotide
  Target: LAMA2; (+) strand; PAM type: YTN; PAM sequence: TTT
ttttgttcaagacaagtaca

SEQ ID NO: 360322 - DNA, 20 bp, Artificial Sequence
  Description of Artificial Sequence: Synthetic oligonucleotide
  Target: LAMA2; (+) strand; PAM type: YTN; PAM sequence: TTT
tttgttcaagacaagtacag

SEQ ID NO: 360323 - DNA, 20 bp, Artificial Sequence
  Description of Artificial Sequence: Synthetic oligonucleotide
  Target: LAMA2; (+) strand; PAM type: YTN; PAM sequence: TTT
ttgttcaagacaagtacagg

SEQ ID NO: 360324 - DNA, 20 bp, Artificial Sequence
  Description of Artificial Sequence: Synthetic oligonucleotide
  Target: LAMA2; (+) strand; PAM type: YTN; PAM sequence: TTT
tgttcaagacaagtacaggg

SEQ ID NO: 360325 - DNA, 20 bp, Artificial Sequence
  Description of Artificial Sequence: Synthetic oligonucleotide
  Target: LAMA2; (+) strand; PAM type: YTN; PAM sequence: TTT
gttcaagacaagtacaggga

SEQ ID NO: 360326 - DNA, 20 bp, Artificial Sequence
  Description of Artificial Sequence: Synthetic oligonucleotide
  Target: LAMA2; (+) strand; PAM type: YTN; PAM sequence: TTG
ttcaagacaagtacagggat

SEQ ID NO: 360327 - DNA, 20 bp, Artificial Sequence
  Description of Artificial Sequence: Synthetic oligonucleotide
  Target: LAMA2; (+) strand; PAM type: YTN; PAM sequence: TTC
aagacaagtacagggatgaa

SEQ ID NO: 360328 - DNA, 20 bp, Artificial Sequence
  Description of Artificial Sequence: Synthetic oligonucleotide
  Target: LAMA2; (+) strand; PAM type: YTN; PAM sequence: TTA
atatctaatcttaagtctgc

SEQ ID NO: 360329 - DNA, 20 bp, Artificial Sequence
  Description of Artificial Sequence: Synthetic oligonucleotide
  Target: LAMA2; (+) strand; PAM type: YTN; PAM sequence: CTA
atcttaagtctgctcttgat

SEQ ID NO: 360330 - DNA, 20 bp, Artificial Sequence
  Description of Artificial Sequence: Synthetic oligonucleotide
  Target: LAMA2; (+) strand; PAM type: YTN; PAM sequence: CTT
aagtctgctcttgatccgaa

SEQ ID NO: 360331 - DNA, 20 bp, Artificial Sequence
  Description of Artificial Sequence: Synthetic oligonucleotide
  Target: LAMA2; (+) strand; PAM type: YTN; PAM sequence: TTA
agtctgctcttgatccgaaa

SEQ ID NO: 360332 - DNA, 20 bp, Artificial Sequence
  Description of Artificial Sequence: Synthetic oligonucleotide
  Target: LAMA2; (+) strand; PAM type: YTN; PAM sequence: CTG
ctcttgatccgaaactcttt

SEQ ID NO: 360333 - DNA, 20 bp, Artificial Sequence
  Description of Artificial Sequence: Synthetic oligonucleotide
  Target: LAMA2; (+) strand; PAM type: YTN; PAM sequence: CTC
ttgatccgaaactcttttga

SEQ ID NO: 360334 - DNA, 20 bp, Artificial Sequence
  Description of Artificial Sequence: Synthetic oligonucleotide
  Target: LAMA2; (+) strand; PAM type: YTN; PAM sequence: CTT
gatccgaaactcttttgaaa

SEQ ID NO: 360335 - DNA, 20 bp, Artificial Sequence
  Description of Artificial Sequence: Synthetic oligonucleotide
  Target: LAMA2; (+) strand; PAM type: YTN; PAM sequence: TTG
atccgaaactcttttgaaac

SEQ ID NO: 360336 - DNA, 20 bp, Artificial Sequence
  Description of Artificial Sequence: Synthetic oligonucleotide
  Target: LAMA2; (+) strand; PAM type: YTN; PAM sequence: CTC
ttttgaaactttacctagaa

SEQ ID NO: 360337 - DNA, 20 bp, Artificial Sequence
  Description of Artificial Sequence: Synthetic oligonucleotide
  Target: LAMA2; (+) strand; PAM type: YTN; PAM sequence: CTT
ttgaaactttacctagaaaa

SEQ ID NO: 360338 - DNA, 20 bp, Artificial Sequence
  Description of Artificial Sequence: Synthetic oligonucleotide
  Target: LAMA2; (+) strand; PAM type: YTN; PAM sequence: TTT
tgaaactttacctagaaaat

SEQ ID NO: 360339 - DNA, 20 bp, Artificial Sequence
  Description of Artificial Sequence: Synthetic oligonucleotide
  Target: LAMA2; (+) strand; PAM type: YTN; PAM sequence: TTT
gaaactttacctagaaaatg

SEQ ID NO: 360340 - DNA, 20 bp, Artificial Sequence
  Description of Artificial Sequence: Synthetic oligonucleotide
  Target: LAMA2; (+) strand; PAM type: YTN; PAM sequence: TTG
aaactttacctagaaaatga

SEQ ID NO: 360341 - DNA, 20 bp, Artificial Sequence
  Description of Artificial Sequence: Synthetic oligonucleotide
  Target: LAMA2; (+) strand; PAM type: YTN; PAM sequence: CTT
tacctagaaaatgatagagc

SEQ ID NO: 360342 - DNA, 20 bp, Artificial Sequence
  Description of Artificial Sequence: Synthetic oligonucleotide
  Target: LAMA2; (+) strand; PAM type: YTN; PAM sequence: TTT
acctagaaaatgatagagca

SEQ ID NO: 360343 - DNA, 20 bp, Artificial Sequence
  Description of Artificial Sequence: Synthetic oligonucleotide
  Target: LAMA2; (+) strand; PAM type: YTN; PAM sequence: TTA
cctagaaaatgatagagcaa

SEQ ID NO: 360344 - DNA, 20 bp, Artificial Sequence
  Description of Artificial Sequence: Synthetic oligonucleotide
  Target: LAMA2; (+) strand; PAM type: YTN; PAM sequence: CTA
gaaaatgatagagcaattta

SEQ ID NO: 360345 - DNA, 20 bp, Artificial Sequence
  Description of Artificial Sequence: Synthetic oligonucleotide
  Target: LAMA2; (+) strand; PAM type: YTN; PAM sequence: TTT
aatgtgtctcacaatctagc

SEQ ID NO: 360346 - DNA, 20 bp, Artificial Sequence
  Description of Artificial Sequence: Synthetic oligonucleotide
  Target: LAMA2; (+) strand; PAM type: YTN; PAM sequence: TTA
atgtgtctcacaatctagca

SEQ ID NO: 360347 - DNA, 20 bp, Artificial Sequence
  Description of Artificial Sequence: Synthetic oligonucleotide
  Target: LAMA2; (+) strand; PAM type: YTN; PAM sequence: CTC
acaatctagcagagatttgg

SEQ ID NO: 360348 - DNA, 20 bp, Artificial Sequence
  Description of Artificial Sequence: Synthetic oligonucleotide
  Target: LAMA2; (+) strand; PAM type: YTN; PAM sequence: CTA
gcagagatttggagggtgat

SEQ ID NO: 360349 - DNA, 20 bp, Artificial Sequence
  Description of Artificial Sequence: Synthetic oligonucleotide
  Target: LAMA2; (+) strand; PAM type: YTN; PAM sequence: TTT
ggagggtgatggatagaata

SEQ ID NO: 360350 - DNA, 20 bp, Artificial Sequence
  Description of Artificial Sequence: Synthetic oligonucleotide
  Target: LAMA2; (+) strand; PAM type: YTN; PAM sequence: TTG
gagggtgatggatagaataa

SEQ ID NO: 360351 - DNA, 20 bp, Artificial Sequence
  Description of Artificial Sequence: Synthetic oligonucleotide
  Target: LAMA2; (+) strand; PAM type: YTN; PAM sequence: CTT
aacacaagaaataatttctg

SEQ ID NO: 360352 - DNA, 20 bp, Artificial Sequence
  Description of Artificial Sequence: Synthetic oligonucleotide
  Target: LAMA2; (+) strand; PAM type: YTN; PAM sequence: TTA
acacaagaaataatttctgt

SEQ ID NO: 360353 - DNA, 20 bp, Artificial Sequence
  Description of Artificial Sequence: Synthetic oligonucleotide
  Target: LAMA2; (+) strand; PAM type: YTN; PAM sequence: TTT
ctgttgtacaaagctcatga

SEQ ID NO: 360354 - DNA, 20 bp, Artificial Sequence
  Description of Artificial Sequence: Synthetic oligonucleotide
  Target: LAMA2; (+) strand; PAM type: YTN; PAM sequence: TTC
tgttgtacaaagctcatgag

SEQ ID NO: 360355 - DNA, 20 bp, Artificial Sequence
  Description of Artificial Sequence: Synthetic oligonucleotide
  Target: LAMA2; (+) strand; PAM type: YTN; PAM sequence: CTG
ttgtacaaagctcatgagct

SEQ ID NO: 360356 - DNA, 20 bp, Artificial Sequence
  Description of Artificial Sequence: Synthetic oligonucleotide
  Target: LAMA2; (+) strand; PAM type: YTN; PAM sequence: TTG
tacaaagctcatgagcttca

SEQ ID NO: 360357 - DNA, 20 bp, Artificial Sequence
  Description of Artificial Sequence: Synthetic oligonucleotide
  Target: LAMA2; (+) strand; PAM type: YTN; PAM sequence: CTC
atgagcttcatgcatggtga

SEQ ID NO: 360358 - DNA, 20 bp, Artificial Sequence
  Description of Artificial Sequence: Synthetic oligonucleotide
  Target: LAMA2; (+) strand; PAM type: YTN; PAM sequence: CTT
catgcatggtgaaagatatt

SEQ ID NO: 360359 - DNA, 20 bp, Artificial Sequence
  Description of Artificial Sequence: Synthetic oligonucleotide
  Target: LAMA2; (+) strand; PAM type: YTN; PAM sequence: TTC
atgcatggtgaaagatattt

SEQ ID NO: 360360 - DNA, 20 bp, Artificial Sequence
  Description of Artificial Sequence: Synthetic oligonucleotide
  Target: LAMA2; (+) strand; PAM type: YTN; PAM sequence: TTT
aggctaaagaaaatgttaac

SEQ ID NO: 360361 - DNA, 20 bp, Artificial Sequence
  Description of Artificial Sequence: Synthetic oligonucleotide
  Target: LAMA2; (+) strand; PAM type: YTN; PAM sequence: TTA
ggctaaagaaaatgttaact

SEQ ID NO: 360362 - DNA, 20 bp, Artificial Sequence
  Description of Artificial Sequence: Synthetic oligonucleotide
  Target: LAMA2; (+) strand; PAM type: YTN; PAM sequence: CTA
aagaaaatgttaactatgca

SEQ ID NO: 360363 - DNA, 20 bp, Artificial Sequence
  Description of Artificial Sequence: Synthetic oligonucleotide
  Target: LAMA2; (+) strand; PAM type: YTN; PAM sequence: TTA
actatgcagggaatgaaact

SEQ ID NO: 360364 - DNA, 20 bp, Artificial Sequence
  Description of Artificial Sequence: Synthetic oligonucleotide
  Target: LAMA2; (+) strand; PAM type: YTN; PAM sequence: CTA
tgcagggaatgaaactcgtg

SEQ ID NO: 360365 - DNA, 20 bp, Artificial Sequence
  Description of Artificial Sequence: Synthetic oligonucleotide
  Target: LAMA2; (+) strand; PAM type: YTN; PAM sequence: CTC
gtgacagcttgatcccataa

SEQ ID NO: 360366 - DNA, 20 bp, Artificial Sequence
  Description of Artificial Sequence: Synthetic oligonucleotide
  Target: LAMA2; (+) strand; PAM type: YTN; PAM sequence: CTT
gatcccataaaactcagcaa

SEQ ID NO: 360367 - DNA, 20 bp, Artificial Sequence
  Description of Artificial Sequence: Synthetic oligonucleotide
  Target: LAMA2; (+) strand; PAM type: YTN; PAM sequence: TTG
atcccataaaactcagcaag

SEQ ID NO: 360368 - DNA, 20 bp, Artificial Sequence
  Description of Artificial Sequence: Synthetic oligonucleotide
  Target: LAMA2; (+) strand; PAM type: YTN; PAM sequence: CTC
agcaaggatgaggtttgact

SEQ ID NO: 360369 - DNA, 20 bp, Artificial Sequence
  Description of Artificial Sequence: Synthetic oligonucleotide
  Target: LAMA2; (+) strand; PAM type: YTN; PAM sequence: TTT
gactctgcatccctgattta

SEQ ID NO: 360370 - DNA, 20 bp, Artificial Sequence
  Description of Artificial Sequence: Synthetic oligonucleotide
  Target: LAMA2; (+) strand; PAM type: YTN; PAM sequence: TTG
actctgcatccctgatttat

SEQ ID NO: 360371 - DNA, 20 bp, Artificial Sequence
  Description of Artificial Sequence: Synthetic oligonucleotide
  Target: LAMA2; (+) strand; PAM type: YTN; PAM sequence: CTC
tgcatccctgatttatatag

SEQ ID NO: 360372 - DNA, 20 bp, Artificial Sequence
  Description of Artificial Sequence: Synthetic oligonucleotide
  Target: LAMA2; (+) strand; PAM type: YTN; PAM sequence: CTG
catccctgatttatatagta

SEQ ID NO: 360373 - DNA, 20 bp, Artificial Sequence
  Description of Artificial Sequence: Synthetic oligonucleotide
  Target: LAMA2; (+) strand; PAM type: YTN; PAM sequence: CTG
atttatatagtacagtatgt

SEQ ID NO: 360374 - DNA, 20 bp, Artificial Sequence
  Description of Artificial Sequence: Synthetic oligonucleotide
  Target: LAMA2; (+) strand; PAM type: YTN; PAM sequence: TTT
atatagtacagtatgtttat

SEQ ID NO: 360375 - DNA, 20 bp, Artificial Sequence
  Description of Artificial Sequence: Synthetic oligonucleotide
  Target: LAMA2; (+) strand; PAM type: YTN; PAM sequence: TTA
tatagtacagtatgtttatt

SEQ ID NO: 360376 - DNA, 20 bp, Artificial Sequence
  Description of Artificial Sequence: Synthetic oligonucleotide
  Target: LAMA2; (+) strand; PAM type: YTN; PAM sequence: TTT
atttaaaggagataagccag

SEQ ID NO: 360377 - DNA, 20 bp, Artificial Sequence
  Description of Artificial Sequence: Synthetic oligonucleotide
  Target: LAMA2; (+) strand; PAM type: YTN; PAM sequence: TTA
tttaaaggagataagccagg

SEQ ID NO: 360378 - DNA, 20 bp, Artificial Sequence
  Description of Artificial Sequence: Synthetic oligonucleotide
  Target: LAMA2; (+) strand; PAM type: YTN; PAM sequence: TTT
aaaggagataagccaggtta

SEQ ID NO: 360379 - DNA, 20 bp, Artificial Sequence
  Description of Artificial Sequence: Synthetic oligonucleotide
  Target: LAMA2; (+) strand; PAM type: YTN; PAM sequence: TTA
aaggagataagccaggttaa

SEQ ID NO: 360380 - DNA, 20 bp, Artificial Sequence
  Description of Artificial Sequence: Synthetic oligonucleotide
  Target: LAMA2; (+) strand; PAM type: YTN; PAM sequence: TTA
aggggttcagcaaaactgtt

SEQ ID NO: 360381 - DNA, 20 bp, Artificial Sequence
  Description of Artificial Sequence: Synthetic oligonucleotide
  Target: LAMA2; (+) strand; PAM type: YTN; PAM sequence: TTC
agcaaaactgttaaattaac

SEQ ID NO: 360382 - DNA, 20 bp, Artificial Sequence
  Description of Artificial Sequence: Synthetic oligonucleotide
  Target: LAMA2; (+) strand; PAM type: YTN; PAM sequence: CTG
ttaaattaactcctttaaaa

SEQ ID NO: 360383 - DNA, 20 bp, Artificial Sequence
  Description of Artificial Sequence: Synthetic oligonucleotide
  Target: LAMA2; (+) strand; PAM type: YTN; PAM sequence: TTA
aattaactcctttaaaaatc

SEQ ID NO: 360384 - DNA, 20 bp, Artificial Sequence
  Description of Artificial Sequence: Synthetic oligonucleotide
  Target: LAMA2; (+) strand; PAM type: YTN; PAM sequence: TTA
actcctttaaaaatctagtt

SEQ ID NO: 360385 - DNA, 20 bp, Artificial Sequence
  Description of Artificial Sequence: Synthetic oligonucleotide
  Target: LAMA2; (+) strand; PAM type: YTN; PAM sequence: CTC
ctttaaaaatctagttattg

SEQ ID NO: 360386 - DNA, 20 bp, Artificial Sequence
  Description of Artificial Sequence: Synthetic oligonucleotide
  Target: LAMA2; (+) strand; PAM type: YTN; PAM sequence: CTT
taaaaatctagttattgcta

SEQ ID NO: 360387 - DNA, 20 bp, Artificial Sequence
  Description of Artificial Sequence: Synthetic oligonucleotide
  Target: LAMA2; (+) strand; PAM type: YTN; PAM sequence: TTT
aaaaatctagttattgctat

SEQ ID NO: 360388 - DNA, 20 bp, Artificial Sequence
  Description of Artificial Sequence: Synthetic oligonucleotide
  Target: LAMA2; (+) strand; PAM type: YTN; PAM sequence: TTA
aaaatctagttattgctatg

SEQ ID NO: 360389 - DNA, 20 bp, Artificial Sequence
  Description of Artificial Sequence: Synthetic oligonucleotide
  Target: LAMA2; (+) strand; PAM type: YTN; PAM sequence: CTA
gttattgctatgaaagtctc

SEQ ID NO: 360390 - DNA, 20 bp, Artificial Sequence
  Description of Artificial Sequence: Synthetic oligonucleotide
  Target: LAMA2; (+) strand; PAM type: YTN; PAM sequence: TTA
ttgctatgaaagtctctcaa

SEQ ID NO: 360391 - DNA, 20 bp, Artificial Sequence
  Description of Artificial Sequence: Synthetic oligonucleotide
  Target: LAMA2; (+) strand; PAM type: YTN; PAM sequence: TTG
ctatgaaagtctctcaagtg

SEQ ID NO: 360392 - DNA, 20 bp, Artificial Sequence
  Description of Artificial Sequence: Synthetic oligonucleotide
  Target: LAMA2; (+) strand; PAM type: YTN; PAM sequence: CTA
tgaaagtctctcaagtgcgg

SEQ ID NO: 360393 - DNA, 20 bp, Artificial Sequence
  Description of Artificial Sequence: Synthetic oligonucleotide
  Target: LAMA2; (+) strand; PAM type: YTN; PAM sequence: CTC
tcaagtgcggtgctcaggct

SEQ ID NO: 360394 - DNA, 20 bp, Artificial Sequence
  Description of Artificial Sequence: Synthetic oligonucleotide
  Target: LAMA2; (+) strand; PAM type: YTN; PAM sequence: CTC
aagtgcggtgctcaggcttt

SEQ ID NO: 360395 - DNA, 20 bp, Artificial Sequence
  Description of Artificial Sequence: Synthetic oligonucleotide
  Target: LAMA2; (+) strand; PAM type: YTN; PAM sequence: CTC
aggcttttttgcatcagtca

SEQ ID NO: 360396 - DNA, 20 bp, Artificial Sequence
  Description of Artificial Sequence: Synthetic oligonucleotide
  Target: LAMA2; (+) strand; PAM type: YTN; PAM sequence: CTT
ttttgcatcagtcatctgga

SEQ ID NO: 360397 - DNA, 20 bp, Artificial Sequence
  Description of Artificial Sequence: Synthetic oligonucleotide
  Target: LAMA2; (+) strand; PAM type: YTN; PAM sequence: TTT
tttgcatcagtcatctggag

SEQ ID NO: 360398 - DNA, 20 bp, Artificial Sequence
  Description of Artificial Sequence: Synthetic oligonucleotide
  Target: LAMA2; (+) strand; PAM type: YTN; PAM sequence: TTT
ttgcatcagtcatctggagt

SEQ ID NO: 360399 - DNA, 20 bp, Artificial Sequence
  Description of Artificial Sequence: Synthetic oligonucleotide
  Target: LAMA2; (+) strand; PAM type: YTN; PAM sequence: TTT
tgcatcagtcatctggagtc

SEQ ID NO: 360400 - DNA, 20 bp, Artificial Sequence
  Description of Artificial Sequence: Synthetic oligonucleotide
  Target: LAMA2; (+) strand; PAM type: YTN; PAM sequence: TTT
gcatcagtcatctggagtct

SEQ ID NO: 360401 - DNA, 20 bp, Artificial Sequence
  Description of Artificial Sequence: Synthetic oligonucleotide
  Target: LAMA2; (+) strand; PAM type: YTN; PAM sequence: TTG
catcagtcatctggagtctt

SEQ ID NO: 360402 - DNA, 20 bp, Artificial Sequence
  Description of Artificial Sequence: Synthetic oligonucleotide
  Target: LAMA2; (+) strand; PAM type: YTN; PAM sequence: CTG
gagtctttatttaaaatgtt

SEQ ID NO: 360403 - DNA, 20 bp, Artificial Sequence
  Description of Artificial Sequence: Synthetic oligonucleotide
  Target: LAMA2; (+) strand; PAM type: YTN; PAM sequence: CTT
tatttaaaatgtttattatt

SEQ ID NO: 360404 - DNA, 20 bp, Artificial Sequence
  Description of Artificial Sequence: Synthetic oligonucleotide
  Target: LAMA2; (+) strand; PAM type: YTN; PAM sequence: TTT
atttaaaatgtttattattg

SEQ ID NO: 360405 - DNA, 20 bp, Artificial Sequence
  Description of Artificial Sequence: Synthetic oligonucleotide
  Target: LAMA2; (+) strand; PAM type: YTN; PAM sequence: TTA
tttaaaatgtttattattgg

SEQ ID NO: 360406 - DNA, 20 bp, Artificial Sequence
  Description of Artificial Sequence: Synthetic oligonucleotide
  Target: LAMA2; (+) strand; PAM type: YTN; PAM sequence: TTT
aaaatgtttattattggccg

SEQ ID NO: 360407 - DNA, 20 bp, Artificial Sequence
  Description of Artificial Sequence: Synthetic oligonucleotide
  Target: LAMA2; (+) strand; PAM type: YTN; PAM sequence: TTA
aaatgtttattattggccgg

SEQ ID NO: 360408 - DNA, 20 bp, Artificial Sequence
  Description of Artificial Sequence: Synthetic oligonucleotide
  Target: LAMA2; (+) strand; PAM type: YTN; PAM sequence: TTT
attattggccgggcgcggtg

SEQ ID NO: 360409 - DNA, 20 bp, Artificial Sequence
  Description of Artificial Sequence: Synthetic oligonucleotide
  Target: LAMA2; (+) strand; PAM type: YTN; PAM sequence: TTA
ttattggccgggcgcggtgg

SEQ ID NO: 360410 - DNA, 20 bp, Artificial Sequence
  Description of Artificial Sequence: Synthetic oligonucleotide
  Target: LAMA2; (+) strand; PAM type: YTN; PAM sequence: TTA
ttggccgggcgcggtggctc

SEQ ID NO: 360411 - DNA, 20 bp, Artificial Sequence
  Description of Artificial Sequence: Synthetic oligonucleotide
  Target: LAMA2; (+) strand; PAM type: YTN; PAM sequence: TTG
gccgggcgcggtggctcacg

SEQ ID NO: 360412 - DNA, 20 bp, Artificial Sequence
  Description of Artificial Sequence: Synthetic oligonucleotide
  Target: LAMA2; (+) strand; PAM type: YTN; PAM sequence: CTC
acgcctgtaatcccagcact

SEQ ID NO: 360413 - DNA, 20 bp, Artificial Sequence
  Description of Artificial Sequence: Synthetic oligonucleotide
  Target: LAMA2; (+) strand; PAM type: YTN; PAM sequence: CTG
taatcccagcactttgggag

SEQ ID NO: 360414 - DNA, 20 bp, Artificial Sequence
  Description of Artificial Sequence: Synthetic oligonucleotide
  Target: LAMA2; (+) strand; PAM type: YTN; PAM sequence: CTT
tgggaggctgaggcgggcgg

SEQ ID NO: 360415 - DNA, 20 bp, Artificial Sequence
  Description of Artificial Sequence: Synthetic oligonucleotide
  Target: LAMA2; (+) strand; PAM type: YTN; PAM sequence: TTT
gggaggctgaggcgggcgga

SEQ ID NO: 360416 - DNA, 20 bp, Artificial Sequence
  Description of Artificial Sequence: Synthetic oligonucleotide
  Target: LAMA2; (+) strand; PAM type: YTN; PAM sequence: TTG
ggaggctgaggcgggcggat

SEQ ID NO: 360417 - DNA, 20 bp, Artificial Sequence
  Description of Artificial Sequence: Synthetic oligonucleotide
  Target: LAMA2; (+) strand; PAM type: YTN; PAM sequence: CTG
aggcgggcggataacgaggt

SEQ ID NO: 360418 - DNA, 20 bp, Artificial Sequence
  Description of Artificial Sequence: Synthetic oligonucleotide
  Target: LAMA2; (+) strand; PAM type: YTN; PAM sequence: CTG
gctaacacgatgaaatccca

SEQ ID NO: 360419 - DNA, 20 bp, Artificial Sequence
  Description of Artificial Sequence: Synthetic oligonucleotide
  Target: LAMA2; (+) strand; PAM type: YTN; PAM sequence: CTA
acacgatgaaatcccatctc

SEQ ID NO: 360420 - DNA, 20 bp, Artificial Sequence
  Description of Artificial Sequence: Synthetic oligonucleotide
  Target: LAMA2; (+) strand; PAM type: YTN; PAM sequence: CTC
tactaaatatacataaaaat

SEQ ID NO: 360421 - DNA, 20 bp, Artificial Sequence
  Description of Artificial Sequence: Synthetic oligonucleotide
  Target: LAMA2; (+) strand; PAM type: YTN; PAM sequence: CTA
ctaaatatacataaaaatta

SEQ ID NO: 360422 - DNA, 20 bp, Artificial Sequence
  Description of Artificial Sequence: Synthetic oligonucleotide
  Target: LAMA2; (+) strand; PAM type: YTN; PAM sequence: CTA
aatatacataaaaattagcc

SEQ ID NO: 360423 - DNA, 20 bp, Artificial Sequence
  Description of Artificial Sequence: Synthetic oligonucleotide
  Target: LAMA2; (+) strand; PAM type: YTN; PAM sequence: TTA
gccaggcagggtagcgggca

SEQ ID NO: 360424 - DNA, 20 bp, Artificial Sequence
  Description of Artificial Sequence: Synthetic oligonucleotide
  Target: LAMA2; (+) strand; PAM type: YTN; PAM sequence: CTG
taatcccagctactcgggag

SEQ ID NO: 360425 - DNA, 20 bp, Artificial Sequence
  Description of Artificial Sequence: Synthetic oligonucleotide
  Target: LAMA2; (+) strand; PAM type: YTN; PAM sequence: CTA
ctcgggaggctgaggcagga

SEQ ID NO: 360426 - DNA, 20 bp, Artificial Sequence
  Description of Artificial Sequence: Synthetic oligonucleotide
  Target: LAMA2; (+) strand; PAM type: YTN; PAM sequence: CTC
gggaggctgaggcaggagaa

SEQ ID NO: 360427 - DNA, 20 bp, Artificial Sequence
  Description of Artificial Sequence: Synthetic oligonucleotide
  Target: LAMA2; (+) strand; PAM type: YTN; PAM sequence: CTG
aggcaggagaatgacgtgaa

SEQ ID NO: 360428 - DNA, 20 bp, Artificial Sequence
  Description of Artificial Sequence: Synthetic oligonucleotide
  Target: LAMA2; (+) strand; PAM type: YTN; PAM sequence: CTT
gcagtgagccgtgatcgcgc

SEQ ID NO: 360429 - DNA, 20 bp, Artificial Sequence
  Description of Artificial Sequence: Synthetic oligonucleotide
  Target: LAMA2; (+) strand; PAM type: YTN; PAM sequence: TTG
cagtgagccgtgatcgcgcc

SEQ ID NO: 360430 - DNA, 20 bp, Artificial Sequence
  Description of Artificial Sequence: Synthetic oligonucleotide
  Target: LAMA2; (+) strand; PAM type: YTN; PAM sequence: CTG
cactccagcccgggcgacag

SEQ ID NO: 360431 - DNA, 20 bp, Artificial Sequence
  Description of Artificial Sequence: Synthetic oligonucleotide
  Target: LAMA2; (+) strand; PAM type: YTN; PAM sequence: CTC
cagcccgggcgacagagcga

SEQ ID NO: 360432 - DNA, 20 bp, Artificial Sequence
  Description of Artificial Sequence: Synthetic oligonucleotide
  Target: LAMA2; (+) strand; PAM type: YTN; PAM sequence: CTC
catctcaaaaaaaaaaaaaa

SEQ ID NO: 360433 - DNA, 20 bp, Artificial Sequence
  Description of Artificial Sequence: Synthetic oligonucleotide
  Target: LAMA2; (+) strand; PAM type: YTN; PAM sequence: CTC
aaaaaaaaaaaaaaaaaaaa

SEQ ID NO: 360434 - DNA, 20 bp, Artificial Sequence
  Description of Artificial Sequence: Synthetic oligonucleotide
  Target: LAMA2; (+) strand; PAM type: YTN; PAM sequence: TTT
ttactattgacccttactct

SEQ ID NO: 360435 - DNA, 20 bp, Artificial Sequence
  Description of Artificial Sequence: Synthetic oligonucleotide
  Target: LAMA2; (+) strand; PAM type: YTN; PAM sequence: TTT
tactattgacccttactctg

SEQ ID NO: 360436 - DNA, 20 bp, Artificial Sequence
  Description of Artificial Sequence: Synthetic oligonucleotide
  Target: LAMA2; (+) strand; PAM type: YTN; PAM sequence: TTT
actattgacccttactctgg

SEQ ID NO: 360437 - DNA, 20 bp, Artificial Sequence
  Description of Artificial Sequence: Synthetic oligonucleotide
  Target: LAMA2; (+) strand; PAM type: YTN; PAM sequence: TTA
ctattgacccttactctgga

SEQ ID NO: 360438 - DNA, 20 bp, Artificial Sequence
  Description of Artificial Sequence: Synthetic oligonucleotide
  Target: LAMA2; (+) strand; PAM type: YTN; PAM sequence: CTA
ttgacccttactctggattc

SEQ ID NO: 360439 - DNA, 20 bp, Artificial Sequence
  Description of Artificial Sequence: Synthetic oligonucleotide
  Target: LAMA2; (+) strand; PAM type: YTN; PAM sequence: TTG
acccttactctggattcact

SEQ ID NO: 360440 - DNA, 20 bp, Artificial Sequence
  Description of Artificial Sequence: Synthetic oligonucleotide
  Target: LAMA2; (+) strand; PAM type: YTN; PAM sequence: CTT
actctggattcacttatcca

SEQ ID NO: 360441 - DNA, 20 bp, Artificial Sequence
  Description of Artificial Sequence: Synthetic oligonucleotide
  Target: LAMA2; (+) strand; PAM type: YTN; PAM sequence: TTA
ctctggattcacttatccag

SEQ ID NO: 360442 - DNA, 20 bp, Artificial Sequence
  Description of Artificial Sequence: Synthetic oligonucleotide
  Target: LAMA2; (+) strand; PAM type: YTN; PAM sequence: CTC
tggattcacttatccagaag

SEQ ID NO: 360443 - DNA, 20 bp, Artificial Sequence
  Description of Artificial Sequence: Synthetic oligonucleotide
  Target: LAMA2; (+) strand; PAM type: YTN; PAM sequence: CTG
gattcacttatccagaagat

SEQ ID NO: 360444 - DNA, 20 bp, Artificial Sequence
  Description of Artificial Sequence: Synthetic oligonucleotide
  Target: LAMA2; (+) strand; PAM type: YTN; PAM sequence: TTC
acttatccagaagatctggg

SEQ ID NO: 360445 - DNA, 20 bp, Artificial Sequence
  Description of Artificial Sequence: Synthetic oligonucleotide
  Target: LAMA2; (+) strand; PAM type: YTN; PAM sequence: CTT
atccagaagatctggggaaa

SEQ ID NO: 360446 - DNA, 20 bp, Artificial Sequence
  Description of Artificial Sequence: Synthetic oligonucleotide
  Target: LAMA2; (+) strand; PAM type: YTN; PAM sequence: TTA
tccagaagatctggggaaat

SEQ ID NO: 360447 - DNA, 20 bp, Artificial Sequence
  Description of Artificial Sequence: Synthetic oligonucleotide
  Target: LAMA2; (+) strand; PAM type: YTN; PAM sequence: CTG
gggaaatctacgtttttaat

SEQ ID NO: 360448 - DNA, 20 bp, Artificial Sequence
  Description of Artificial Sequence: Synthetic oligonucleotide
  Target: LAMA2; (+) strand; PAM type: YTN; PAM sequence: CTA
cgtttttaatcagctcccca

SEQ ID NO: 360449 - DNA, 20 bp, Artificial Sequence
  Description of Artificial Sequence: Synthetic oligonucleotide
  Target: LAMA2; (+) strand; PAM type: YTN; PAM sequence: TTT
ttaatcagctccccaagtga

SEQ ID NO: 360450 - DNA, 20 bp, Artificial Sequence
  Description of Artificial Sequence: Synthetic oligonucleotide
  Target: LAMA2; (+) strand; PAM type: YTN; PAM sequence: TTT
taatcagctccccaagtgat

SEQ ID NO: 360451 - DNA, 20 bp, Artificial Sequence
  Description of Artificial Sequence: Synthetic oligonucleotide
  Target: LAMA2; (+) strand; PAM type: YTN; PAM sequence: TTT
aatcagctccccaagtgatt

SEQ ID NO: 360452 - DNA, 20 bp, Artificial Sequence
  Description of Artificial Sequence: Synthetic oligonucleotide
  Target: LAMA2; (+) strand; PAM type: YTN; PAM sequence: TTA
atcagctccccaagtgatta

SEQ ID NO: 360453 - DNA, 20 bp, Artificial Sequence
  Description of Artificial Sequence: Synthetic oligonucleotide
  Target: LAMA2; (+) strand; PAM type: YTN; PAM sequence: CTC
cccaagtgattatttaccca

SEQ ID NO: 360454 - DNA, 20 bp, Artificial Sequence
  Description of Artificial Sequence: Synthetic oligonucleotide
  Target: LAMA2; (+) strand; PAM type: YTN; PAM sequence: TTA
tttacccataagaatttggg

SEQ ID NO: 360455 - DNA, 20 bp, Artificial Sequence
  Description of Artificial Sequence: Synthetic oligonucleotide
  Target: LAMA2; (+) strand; PAM type: YTN; PAM sequence: TTT
acccataagaatttgggggg

SEQ ID NO: 360456 - DNA, 20 bp, Artificial Sequence
  Description of Artificial Sequence: Synthetic oligonucleotide
  Target: LAMA2; (+) strand; PAM type: YTN; PAM sequence: TTA
cccataagaatttggggggc

SEQ ID NO: 360457 - DNA, 20 bp, Artificial Sequence
  Description of Artificial Sequence: Synthetic oligonucleotide
  Target: LAMA2; (+) strand; PAM type: YTN; PAM sequence: TTT
ggggggcactcttttatgac

SEQ ID NO: 360458 - DNA, 20 bp, Artificial Sequence
  Description of Artificial Sequence: Synthetic oligonucleotide
  Target: LAMA2; (+) strand; PAM type: YTN; PAM sequence: TTG
gggggcactcttttatgact

SEQ ID NO: 360459 - DNA, 20 bp, Artificial Sequence
  Description of Artificial Sequence: Synthetic oligonucleotide
  Target: LAMA2; (+) strand; PAM type: YTN; PAM sequence: CTC
ttttatgactacttttttaa

SEQ ID NO: 360460 - DNA, 20 bp, Artificial Sequence
  Description of Artificial Sequence: Synthetic oligonucleotide
  Target: LAMA2; (+) strand; PAM type: YTN; PAM sequence: CTT
ttatgactacttttttaaat

SEQ ID NO: 360461 - DNA, 20 bp, Artificial Sequence
  Description of Artificial Sequence: Synthetic oligonucleotide
  Target: LAMA2; (+) strand; PAM type: YTN; PAM sequence: TTT
tatgactacttttttaaatt

SEQ ID NO: 360462 - DNA, 20 bp, Artificial Sequence
  Description of Artificial Sequence: Synthetic oligonucleotide
  Target: LAMA2; (+) strand; PAM type: YTN; PAM sequence: TTT
atgactacttttttaaatta

SEQ ID NO: 360463 - DNA, 20 bp, Artificial Sequence
  Description of Artificial Sequence: Synthetic oligonucleotide
  Target: LAMA2; (+) strand; PAM type: YTN; PAM sequence: TTA
tgactacttttttaaattac

SEQ ID NO: 360464 - DNA, 20 bp, Artificial Sequence
  Description of Artificial Sequence: Synthetic oligonucleotide
  Target: LAMA2; (+) strand; PAM type: YTN; PAM sequence: CTA
cttttttaaattactgatga

SEQ ID NO: 360465 - DNA, 20 bp, Artificial Sequence
  Description of Artificial Sequence: Synthetic oligonucleotide
  Target: LAMA2; (+) strand; PAM type: YTN; PAM sequence: CTT
ttttaaattactgatgatta

SEQ ID NO: 360466 - DNA, 20 bp, Artificial Sequence
  Description of Artificial Sequence: Synthetic oligonucleotide
  Target: LAMA2; (+) strand; PAM type: YTN; PAM sequence: TTT
tttaaattactgatgattaa

SEQ ID NO: 360467 - DNA, 20 bp, Artificial Sequence
  Description of Artificial Sequence: Synthetic oligonucleotide
  Target: LAMA2; (+) strand; PAM type: YTN; PAM sequence: TTT
ttaaattactgatgattaat

SEQ ID NO: 360468 - DNA, 20 bp, Artificial Sequence
  Description of Artificial Sequence: Synthetic oligonucleotide
  Target: LAMA2; (+) strand; PAM type: YTN; PAM sequence: TTT
taaattactgatgattaatt

SEQ ID NO: 360469 - DNA, 20 bp, Artificial Sequence
  Description of Artificial Sequence: Synthetic oligonucleotide
  Target: LAMA2; (+) strand; PAM type: YTN; PAM sequence: TTT
aaattactgatgattaatta

SEQ ID NO: 360470 - DNA, 20 bp, Artificial Sequence
  Description of Artificial Sequence: Synthetic oligonucleotide
  Target: LAMA2; (+) strand; PAM type: YTN; PAM sequence: TTA
aattactgatgattaattat

SEQ ID NO: 360471 - DNA, 20 bp, Artificial Sequence
  Description of Artificial Sequence: Synthetic oligonucleotide
  Target: LAMA2; (+) strand; PAM type: YTN; PAM sequence: TTA
ctgatgattaattatctgca

SEQ ID NO: 360472 - DNA, 20 bp, Artificial Sequence
  Description of Artificial Sequence: Synthetic oligonucleotide
  Target: LAMA2; (+) strand; PAM type: YTN; PAM sequence: CTG
atgattaattatctgcagat

SEQ ID NO: 360473 - DNA, 20 bp, Artificial Sequence
  Description of Artificial Sequence: Synthetic oligonucleotide
  Target: LAMA2; (+) strand; PAM type: YTN; PAM sequence: TTA
attatctgcagatagttccc

SEQ ID NO: 360474 - DNA, 20 bp, Artificial Sequence
  Description of Artificial Sequence: Synthetic oligonucleotide
  Target: LAMA2; (+) strand; PAM type: YTN; PAM sequence: TTA
tctgcagatagttccctaga

SEQ ID NO: 360475 - DNA, 20 bp, Artificial Sequence
  Description of Artificial Sequence: Synthetic oligonucleotide
  Target: LAMA2; (+) strand; PAM type: YTN; PAM sequence: CTG
cagatagttccctagacttt

SEQ ID NO: 360476 - DNA, 20 bp, Artificial Sequence
  Description of Artificial Sequence: Synthetic oligonucleotide
  Target: LAMA2; (+) strand; PAM type: YTN; PAM sequence: TTC
cctagactttgactttccaa

SEQ ID NO: 360477 - DNA, 20 bp, Artificial Sequence
  Description of Artificial Sequence: Synthetic oligonucleotide
  Target: LAMA2; (+) strand; PAM type: YTN; PAM sequence: CTA
gactttgactttccaaggct

SEQ ID NO: 360478 - DNA, 20 bp, Artificial Sequence
  Description of Artificial Sequence: Synthetic oligonucleotide
  Target: LAMA2; (+) strand; PAM type: YTN; PAM sequence: CTT
tgactttccaaggctttaaa

SEQ ID NO: 360479 - DNA, 20 bp, Artificial Sequence
  Description of Artificial Sequence: Synthetic oligonucleotide
  Target: LAMA2; (+) strand; PAM type: YTN; PAM sequence: TTT
gactttccaaggctttaaaa

SEQ ID NO: 360480 - DNA, 20 bp, Artificial Sequence
  Description of Artificial Sequence: Synthetic oligonucleotide
  Target: LAMA2; (+) strand; PAM type: YTN; PAM sequence: TTG
actttccaaggctttaaaaa

SEQ ID NO: 360481 - DNA, 20 bp, Artificial Sequence
  Description of Artificial Sequence: Synthetic oligonucleotide
  Target: LAMA2; (+) strand; PAM type: YTN; PAM sequence: CTT
tccaaggctttaaaaaaaca

SEQ ID NO: 360482 - DNA, 20 bp, Artificial Sequence
  Description of Artificial Sequence: Synthetic oligonucleotide
  Target: LAMA2; (+) strand; PAM type: YTN; PAM sequence: TTT
ccaaggctttaaaaaaacaa

SEQ ID NO: 360483 - DNA, 20 bp, Artificial Sequence
  Description of Artificial Sequence: Synthetic oligonucleotide
  Target: LAMA2; (+) strand; PAM type: YTN; PAM sequence: TTC
caaggctttaaaaaaacaaa

SEQ ID NO: 360484 - DNA, 20 bp, Artificial Sequence
  Description of Artificial Sequence: Synthetic oligonucleotide
  Target: LAMA2; (+) strand; PAM type: YTN; PAM sequence: CTT
taaaaaaacaaacaaacaaa

SEQ ID NO: 360485 - DNA, 20 bp, Artificial Sequence
  Description of Artificial Sequence: Synthetic oligonucleotide
  Target: LAMA2; (+) strand; PAM type: YTN; PAM sequence: TTT
aaaaaaacaaacaaacaaaa

SEQ ID NO: 360486 - DNA, 20 bp, Artificial Sequence
  Description of Artificial Sequence: Synthetic oligonucleotide
  Target: LAMA2; (+) strand; PAM type: YTN; PAM sequence: TTA
aaaaaacaaacaaacaaaaa

SEQ ID NO: 360487 - DNA, 20 bp, Artificial Sequence
  Description of Artificial Sequence: Synthetic oligonucleotide
  Target: LAMA2; (+) strand; PAM type: YTN; PAM sequence: CTG
cagtatgcttttagtctgaa

SEQ ID NO: 360488 - DNA, 20 bp, Artificial Sequence
  Description of Artificial Sequence: Synthetic oligonucleotide
  Target: LAMA2; (+) strand; PAM type: YTN; PAM sequence: CTT
ttagtctgaattcagggatt

SEQ ID NO: 360489 - DNA, 20 bp, Artificial Sequence
  Description of Artificial Sequence: Synthetic oligonucleotide
  Target: LAMA2; (+) strand; PAM type: YTN; PAM sequence: TTT
tagtctgaattcagggattg

SEQ ID NO: 360490 - DNA, 20 bp, Artificial Sequence
  Description of Artificial Sequence: Synthetic oligonucleotide
  Target: LAMA2; (+) strand; PAM type: YTN; PAM sequence: TTT
agtctgaattcagggattga

SEQ ID NO: 360491 - DNA, 20 bp, Artificial Sequence
  Description of Artificial Sequence: Synthetic oligonucleotide
  Target: LAMA2; (+) strand; PAM type: YTN; PAM sequence: TTA
gtctgaattcagggattgac

SEQ ID NO: 360492 - DNA, 20 bp, Artificial Sequence
  Description of Artificial Sequence: Synthetic oligonucleotide
  Target: LAMA2; (+) strand; PAM type: YTN; PAM sequence: CTG
aattcagggattgactttct

SEQ ID NO: 360493 - DNA, 20 bp, Artificial Sequence
  Description of Artificial Sequence: Synthetic oligonucleotide
  Target: LAMA2; (+) strand; PAM type: YTN; PAM sequence: TTC
agggattgactttcttatcc

SEQ ID NO: 360494 - DNA, 20 bp, Artificial Sequence
  Description of Artificial Sequence: Synthetic oligonucleotide
  Target: LAMA2; (+) strand; PAM type: YTN; PAM sequence: TTG
actttcttatccaatagtct

SEQ ID NO: 360495 - DNA, 20 bp, Artificial Sequence
  Description of Artificial Sequence: Synthetic oligonucleotide
  Target: LAMA2; (+) strand; PAM type: YTN; PAM sequence: CTT
tcttatccaatagtctatcc

SEQ ID NO: 360496 - DNA, 20 bp, Artificial Sequence
  Description of Artificial Sequence: Synthetic oligonucleotide
  Target: LAMA2; (+) strand; PAM type: YTN; PAM sequence: TTT
cttatccaatagtctatcct

SEQ ID NO: 360497 - DNA, 20 bp, Artificial Sequence
  Description of Artificial Sequence: Synthetic oligonucleotide
  Target: LAMA2; (+) strand; PAM type: YTN; PAM sequence: TTC
ttatccaatagtctatcctg

SEQ ID NO: 360498 - DNA, 20 bp, Artificial Sequence
  Description of Artificial Sequence: Synthetic oligonucleotide
  Target: LAMA2; (+) strand; PAM type: YTN; PAM sequence: CTT
atccaatagtctatcctgta

SEQ ID NO: 360499 - DNA, 20 bp, Artificial Sequence
  Description of Artificial Sequence: Synthetic oligonucleotide
  Target: LAMA2; (+) strand; PAM type: YTN; PAM sequence: TTA
tccaatagtctatcctgtac

SEQ ID NO: 360500 - DNA, 20 bp, Artificial Sequence
  Description of Artificial Sequence: Synthetic oligonucleotide
  Target: LAMA2; (+) strand; PAM type: YTN; PAM sequence: CTA
tcctgtacaagggaacccta

SEQ ID NO: 360501 - DNA, 20 bp, Artificial Sequence
  Description of Artificial Sequence: Synthetic oligonucleotide
  Target: LAMA2; (+) strand; PAM type: YTN; PAM sequence: CTG
tacaagggaaccctaaaata

SEQ ID NO: 360502 - DNA, 20 bp, Artificial Sequence
  Description of Artificial Sequence: Synthetic oligonucleotide
  Target: LAMA2; (+) strand; PAM type: YTN; PAM sequence: CTA
aaataacctcgttagccacc

SEQ ID NO: 360503 - DNA, 20 bp, Artificial Sequence
  Description of Artificial Sequence: Synthetic oligonucleotide
  Target: LAMA2; (+) strand; PAM type: YTN; PAM sequence: CTC
gttagccaccaccaaagact

SEQ ID NO: 360504 - DNA, 20 bp, Artificial Sequence
  Description of Artificial Sequence: Synthetic oligonucleotide
  Target: LAMA2; (+) strand; PAM type: YTN; PAM sequence: TTA
gccaccaccaaagactatgt

SEQ ID NO: 360505 - DNA, 20 bp, Artificial Sequence
  Description of Artificial Sequence: Synthetic oligonucleotide
  Target: LAMA2; (+) strand; PAM type: YTN; PAM sequence: CTA
tgtaaatacaaatttattta

SEQ ID NO: 360506 - DNA, 20 bp, Artificial Sequence
  Description of Artificial Sequence: Synthetic oligonucleotide
  Target: LAMA2; (+) strand; PAM type: YTN; PAM sequence: TTT
atttatcaatctcattagaa

SEQ ID NO: 360507 - DNA, 20 bp, Artificial Sequence
  Description of Artificial Sequence: Synthetic oligonucleotide
  Target: LAMA2; (+) strand; PAM type: YTN; PAM sequence: TTA
tttatcaatctcattagaaa

SEQ ID NO: 360508 - DNA, 20 bp, Artificial Sequence
  Description of Artificial Sequence: Synthetic oligonucleotide
  Target: LAMA2; (+) strand; PAM type: YTN; PAM sequence: TTT
atcaatctcattagaaaccg

SEQ ID NO: 360509 - DNA, 20 bp, Artificial Sequence
  Description of Artificial Sequence: Synthetic oligonucleotide
  Target: LAMA2; (+) strand; PAM type: YTN; PAM sequence: TTA
tcaatctcattagaaaccga

SEQ ID NO: 360510 - DNA, 20 bp, Artificial Sequence
  Description of Artificial Sequence: Synthetic oligonucleotide
  Target: LAMA2; (+) strand; PAM type: YTN; PAM sequence: CTC
attagaaaccgaaccacgca

SEQ ID NO: 360511 - DNA, 20 bp, Artificial Sequence
  Description of Artificial Sequence: Synthetic oligonucleotide
  Target: LAMA2; (+) strand; PAM type: YTN; PAM sequence: TTA
gaaaccgaaccacgcatgtg

SEQ ID NO: 360512 - DNA, 20 bp, Artificial Sequence
  Description of Artificial Sequence: Synthetic oligonucleotide
  Target: LAMA2; (+) strand; PAM type: YTN; PAM sequence: TTT
acattggaataaaatgaatc

SEQ ID NO: 360513 - DNA, 20 bp, Artificial Sequence
  Description of Artificial Sequence: Synthetic oligonucleotide
  Target: LAMA2; (+) strand; PAM type: YTN; PAM sequence: TTA
cattggaataaaatgaatct

SEQ ID NO: 360514 - DNA, 20 bp, Artificial Sequence
  Description of Artificial Sequence: Synthetic oligonucleotide
  Target: LAMA2; (+) strand; PAM type: YTN; PAM sequence: TTG
gaataaaatgaatcttagaa

SEQ ID NO: 360515 - DNA, 20 bp, Artificial Sequence
  Description of Artificial Sequence: Synthetic oligonucleotide
  Target: LAMA2; (+) strand; PAM type: YTN; PAM sequence: CTT
agaaagcagctatttttaaa

SEQ ID NO: 360516 - DNA, 20 bp, Artificial Sequence
  Description of Artificial Sequence: Synthetic oligonucleotide
  Target: LAMA2; (+) strand; PAM type: YTN; PAM sequence: TTA
gaaagcagctatttttaaag

SEQ ID NO: 360517 - DNA, 20 bp, Artificial Sequence
  Description of Artificial Sequence: Synthetic oligonucleotide
  Target: LAMA2; (+) strand; PAM type: YTN; PAM sequence: CTA
tttttaaagaaacaggaagt

SEQ ID NO: 360518 - DNA, 20 bp, Artificial Sequence
  Description of Artificial Sequence: Synthetic oligonucleotide
  Target: LAMA2; (+) strand; PAM type: YTN; PAM sequence: TTT
ttaaagaaacaggaagtcta

SEQ ID NO: 360519 - DNA, 20 bp, Artificial Sequence
  Description of Artificial Sequence: Synthetic oligonucleotide
  Target: LAMA2; (+) strand; PAM type: YTN; PAM sequence: TTT
taaagaaacaggaagtctaa

SEQ ID NO: 360520 - DNA, 20 bp, Artificial Sequence
  Description of Artificial Sequence: Synthetic oligonucleotide
  Target: LAMA2; (+) strand; PAM type: YTN; PAM sequence: TTT
aaagaaacaggaagtctaac

SEQ ID NO: 360521 - DNA, 20 bp, Artificial Sequence
  Description of Artificial Sequence: Synthetic oligonucleotide
  Target: LAMA2; (+) strand; PAM type: YTN; PAM sequence: TTA
aagaaacaggaagtctaaca

SEQ ID NO: 360522 - DNA, 20 bp, Artificial Sequence
  Description of Artificial Sequence: Synthetic oligonucleotide
  Target: LAMA2; (+) strand; PAM type: YTN; PAM sequence: CTA
acatgtactgccattaattt

SEQ ID NO: 360523 - DNA, 20 bp, Artificial Sequence
  Description of Artificial Sequence: Synthetic oligonucleotide
  Target: LAMA2; (+) strand; PAM type: YTN; PAM sequence: CTG
ccattaatttggaatgggag

SEQ ID NO: 360524 - DNA, 20 bp, Artificial Sequence
  Description of Artificial Sequence: Synthetic oligonucleotide
  Target: LAMA2; (+) strand; PAM type: YTN; PAM sequence: TTA
atttggaatgggagagaaag

SEQ ID NO: 360525 - DNA, 20 bp, Artificial Sequence
  Description of Artificial Sequence: Synthetic oligonucleotide
  Target: LAMA2; (+) strand; PAM type: YTN; PAM sequence: TTT
ggaatgggagagaaaggaga

SEQ ID NO: 360526 - DNA, 20 bp, Artificial Sequence
  Description of Artificial Sequence: Synthetic oligonucleotide
  Target: LAMA2; (+) strand; PAM type: YTN; PAM sequence: TTG
gaatgggagagaaaggagac

SEQ ID NO: 360527 - DNA, 20 bp, Artificial Sequence
  Description of Artificial Sequence: Synthetic oligonucleotide
  Target: LAMA2; (+) strand; PAM type: YTN; PAM sequence: CTT
ggcagaaccagaatattgcg

SEQ ID NO: 360528 - DNA, 20 bp, Artificial Sequence
  Description of Artificial Sequence: Synthetic oligonucleotide
  Target: LAMA2; (+) strand; PAM type: YTN; PAM sequence: TTG
gcagaaccagaatattgcgt

SEQ ID NO: 360529 - DNA, 20 bp, Artificial Sequence
  Description of Artificial Sequence: Synthetic oligonucleotide
  Target: LAMA2; (+) strand; PAM type: YTN; PAM sequence: TTG
cgtgaggattgaagatagct

SEQ ID NO: 360530 - DNA, 20 bp, Artificial Sequence
  Description of Artificial Sequence: Synthetic oligonucleotide
  Target: LAMA2; (+) strand; PAM type: YTN; PAM sequence: TTG
aagatagcttcagattctag

SEQ ID NO: 360531 - DNA, 20 bp, Artificial Sequence
  Description of Artificial Sequence: Synthetic oligonucleotide
  Target: LAMA2; (+) strand; PAM type: YTN; PAM sequence: CTT
cagattctagaagagtttct

SEQ ID NO: 360532 - DNA, 20 bp, Artificial Sequence
  Description of Artificial Sequence: Synthetic oligonucleotide
  Target: LAMA2; (+) strand; PAM type: YTN; PAM sequence: TTC
agattctagaagagtttcta

SEQ ID NO: 360533 - DNA, 20 bp, Artificial Sequence
  Description of Artificial Sequence: Synthetic oligonucleotide
  Target: LAMA2; (+) strand; PAM type: YTN; PAM sequence: TTC
tagaagagtttctagctctt

SEQ ID NO: 360534 - DNA, 20 bp, Artificial Sequence
  Description of Artificial Sequence: Synthetic oligonucleotide
  Target: LAMA2; (+) strand; PAM type: YTN; PAM sequence: CTA
gaagagtttctagctctttc

SEQ ID NO: 360535 - DNA, 20 bp, Artificial Sequence
  Description of Artificial Sequence: Synthetic oligonucleotide
  Target: LAMA2; (+) strand; PAM type: YTN; PAM sequence: TTT
ctagctctttctgaatatgt

SEQ ID NO: 360536 - DNA, 20 bp, Artificial Sequence
  Description of Artificial Sequence: Synthetic oligonucleotide
  Target: LAMA2; (+) strand; PAM type: YTN; PAM sequence: TTC
tagctctttctgaatatgtg

SEQ ID NO: 360537 - DNA, 20 bp, Artificial Sequence
  Description of Artificial Sequence: Synthetic oligonucleotide
  Target: LAMA2; (+) strand; PAM type: YTN; PAM sequence: CTA
gctctttctgaatatgtgtt

SEQ ID NO: 360538 - DNA, 20 bp, Artificial Sequence
  Description of Artificial Sequence: Synthetic oligonucleotide
  Target: LAMA2; (+) strand; PAM type: YTN; PAM sequence: CTC
tttctgaatatgtgttaaca

SEQ ID NO: 360539 - DNA, 20 bp, Artificial Sequence
  Description of Artificial Sequence: Synthetic oligonucleotide
  Target: LAMA2; (+) strand; PAM type: YTN; PAM sequence: CTT
tctgaatatgtgttaacagt

SEQ ID NO: 360540 - DNA, 20 bp, Artificial Sequence
  Description of Artificial Sequence: Synthetic oligonucleotide
  Target: LAMA2; (+) strand; PAM type: YTN; PAM sequence: TTT
ctgaatatgtgttaacagtt

SEQ ID NO: 360541 - DNA, 20 bp, Artificial Sequence
  Description of Artificial Sequence: Synthetic oligonucleotide
  Target: LAMA2; (+) strand; PAM type: YTN; PAM sequence: TTC
tgaatatgtgttaacagttt

SEQ ID NO: 360542 - DNA, 20 bp, Artificial Sequence
  Description of Artificial Sequence: Synthetic oligonucleotide
  Target: LAMA2; (+) strand; PAM type: YTN; PAM sequence: CTG
aatatgtgttaacagtttcg

SEQ ID NO: 360543 - DNA, 20 bp, Artificial Sequence
  Description of Artificial Sequence: Synthetic oligonucleotide
  Target: LAMA2; (+) strand; PAM type: YTN; PAM sequence: TTA
acagtttcgctgtttgagct

SEQ ID NO: 360544 - DNA, 20 bp, Artificial Sequence
  Description of Artificial Sequence: Synthetic oligonucleotide
  Target: LAMA2; (+) strand; PAM type: YTN; PAM sequence: TTT
cgctgtttgagctctgctac

SEQ ID NO: 360545 - DNA, 20 bp, Artificial Sequence
  Description of Artificial Sequence: Synthetic oligonucleotide
  Target: LAMA2; (+) strand; PAM type: YTN; PAM sequence: TTC
gctgtttgagctctgctacc

SEQ ID NO: 360546 - DNA, 20 bp, Artificial Sequence
  Description of Artificial Sequence: Synthetic oligonucleotide
  Target: LAMA2; (+) strand; PAM type: YTN; PAM sequence: CTG
tttgagctctgctacccact

SEQ ID NO: 360547 - DNA, 20 bp, Artificial Sequence
  Description of Artificial Sequence: Synthetic oligonucleotide
  Target: LAMA2; (+) strand; PAM type: YTN; PAM sequence: TTT
gagctctgctacccactagc

SEQ ID NO: 360548 - DNA, 20 bp, Artificial Sequence
  Description of Artificial Sequence: Synthetic oligonucleotide
  Target: LAMA2; (+) strand; PAM type: YTN; PAM sequence: TTG
agctctgctacccactagcc

SEQ ID NO: 360549 - DNA, 20 bp, Artificial Sequence
  Description of Artificial Sequence: Synthetic oligonucleotide
  Target: LAMA2; (+) strand; PAM type: YTN; PAM sequence: CTC
tgctacccactagccagtta

SEQ ID NO: 360550 - DNA, 20 bp, Artificial Sequence
  Description of Artificial Sequence: Synthetic oligonucleotide
  Target: LAMA2; (+) strand; PAM type: YTN; PAM sequence: CTG
ctacccactagccagttata

SEQ ID NO: 360551 - DNA, 20 bp, Artificial Sequence
  Description of Artificial Sequence: Synthetic oligonucleotide
  Target: LAMA2; (+) strand; PAM type: YTN; PAM sequence: CTA
cccactagccagttataaac

SEQ ID NO: 360552 - DNA, 20 bp, Artificial Sequence
  Description of Artificial Sequence: Synthetic oligonucleotide
  Target: LAMA2; (+) strand; PAM type: YTN; PAM sequence: CTA
gccagttataaacacaggta

SEQ ID NO: 360553 - DNA, 20 bp, Artificial Sequence
  Description of Artificial Sequence: Synthetic oligonucleotide
  Target: LAMA2; (+) strand; PAM type: YTN; PAM sequence: TTA
taaacacaggtaagaccctt

SEQ ID NO: 360554 - DNA, 20 bp, Artificial Sequence
  Description of Artificial Sequence: Synthetic oligonucleotide
  Target: LAMA2; (+) strand; PAM type: YTN; PAM sequence: CTT
aacttcacagggcctgttgg

SEQ ID NO: 360555 - DNA, 20 bp, Artificial Sequence
  Description of Artificial Sequence: Synthetic oligonucleotide
  Target: LAMA2; (+) strand; PAM type: YTN; PAM sequence: TTA
acttcacagggcctgttggg

SEQ ID NO: 360556 - DNA, 20 bp, Artificial Sequence
  Description of Artificial Sequence: Synthetic oligonucleotide
  Target: LAMA2; (+) strand; PAM type: YTN; PAM sequence: CTT
cacagggcctgttgggaaga

SEQ ID NO: 360557 - DNA, 20 bp, Artificial Sequence
  Description of Artificial Sequence: Synthetic oligonucleotide
  Target: LAMA2; (+) strand; PAM type: YTN; PAM sequence: TTC
acagggcctgttgggaagag

SEQ ID NO: 360558 - DNA, 20 bp, Artificial Sequence
  Description of Artificial Sequence: Synthetic oligonucleotide
  Target: LAMA2; (+) strand; PAM type: YTN; PAM sequence: CTG
ttgggaagaggttataattt

SEQ ID NO: 360559 - DNA, 20 bp, Artificial Sequence
  Description of Artificial Sequence: Synthetic oligonucleotide
  Target: LAMA2; (+) strand; PAM type: YTN; PAM sequence: TTG
ggaagaggttataatttttt

SEQ ID NO: 360560 - DNA, 20 bp, Artificial Sequence
  Description of Artificial Sequence: Synthetic oligonucleotide
  Target: LAMA2; (+) strand; PAM type: YTN; PAM sequence: TTA
taattttttagcaacagaac

SEQ ID NO: 360561 - DNA, 20 bp, Artificial Sequence
  Description of Artificial Sequence: Synthetic oligonucleotide
  Target: LAMA2; (+) strand; PAM type: YTN; PAM sequence: TTT
tttagcaacagaacctgttt

SEQ ID NO: 360562 - DNA, 20 bp, Artificial Sequence
  Description of Artificial Sequence: Synthetic oligonucleotide
  Target: LAMA2; (+) strand; PAM type: YTN; PAM sequence: TTT
ttagcaacagaacctgtttt

SEQ ID NO: 360563 - DNA, 20 bp, Artificial Sequence
  Description of Artificial Sequence: Synthetic oligonucleotide
  Target: LAMA2; (+) strand; PAM type: YTN; PAM sequence: TTT
tagcaacagaacctgttttt

SEQ ID NO: 360564 - DNA, 20 bp, Artificial Sequence
  Description of Artificial Sequence: Synthetic oligonucleotide
  Target: LAMA2; (+) strand; PAM type: YTN; PAM sequence: TTT
agcaacagaacctgtttttc

SEQ ID NO: 360565 - DNA, 20 bp, Artificial Sequence
  Description of Artificial Sequence: Synthetic oligonucleotide
  Target: LAMA2; (+) strand; PAM type: YTN; PAM sequence: TTA
gcaacagaacctgtttttca

SEQ ID NO: 360566 - DNA, 20 bp, Artificial Sequence
  Description of Artificial Sequence: Synthetic oligonucleotide
  Target: LAMA2; (+) strand; PAM type: YTN; PAM sequence: CTG
tttttcaaacaaaatcctaa

SEQ ID NO: 360567 - DNA, 20 bp, Artificial Sequence
  Description of Artificial Sequence: Synthetic oligonucleotide
  Target: LAMA2; (+) strand; PAM type: YTN; PAM sequence: TTT
ttcaaacaaaatcctaatta

SEQ ID NO: 360568 - DNA, 20 bp, Artificial Sequence
  Description of Artificial Sequence: Synthetic oligonucleotide
  Target: LAMA2; (+) strand; PAM type: YTN; PAM sequence: TTT
tcaaacaaaatcctaattag

SEQ ID NO: 360569 - DNA, 20 bp, Artificial Sequence
  Description of Artificial Sequence: Synthetic oligonucleotide
  Target: LAMA2; (+) strand; PAM type: YTN; PAM sequence: TTT
caaacaaaatcctaattaga

SEQ ID NO: 360570 - DNA, 20 bp, Artificial Sequence
  Description of Artificial Sequence: Synthetic oligonucleotide
  Target: LAMA2; (+) strand; PAM type: YTN; PAM sequence: TTC
aaacaaaatcctaattagaa

SEQ ID NO: 360571 - DNA, 20 bp, Artificial Sequence
  Description of Artificial Sequence: Synthetic oligonucleotide
  Target: LAMA2; (+) strand; PAM type: YTN; PAM sequence: CTA
attagaacacccaaaaacaa

SEQ ID NO: 360572 - DNA, 20 bp, Artificial Sequence
  Description of Artificial Sequence: Synthetic oligonucleotide
  Target: LAMA2; (+) strand; PAM type: YTN; PAM sequence: TTA
gaacacccaaaaacaaacaa

SEQ ID NO: 360573 - DNA, 20 bp, Artificial Sequence
  Description of Artificial Sequence: Synthetic oligonucleotide
  Target: LAMA2; (+) strand; PAM type: YTN; PAM sequence: TTC
aaatgggtgacatggccagt

SEQ ID NO: 360574 - DNA, 20 bp, Artificial Sequence
  Description of Artificial Sequence: Synthetic oligonucleotide
  Target: LAMA2; (+) strand; PAM type: YTN; PAM sequence: CTG
gttacagtatgagacagatg

SEQ ID NO: 360575 - DNA, 20 bp, Artificial Sequence
  Description of Artificial Sequence: Synthetic oligonucleotide
  Target: LAMA2; (+) strand; PAM type: YTN; PAM sequence: TTA
cagtatgagacagatgccgg

SEQ ID NO: 360576 - DNA, 20 bp, Artificial Sequence
  Description of Artificial Sequence: Synthetic oligonucleotide
  Target: LAMA2; (+) strand; PAM type: YTN; PAM sequence: TTA
cggtgggcaacagaacagat

SEQ ID NO: 360577 - DNA, 20 bp, Artificial Sequence
  Description of Artificial Sequence: Synthetic oligonucleotide
  Target: LAMA2; (+) strand; PAM type: YTN; PAM sequence: CTG
gctacagtggtcgacagagt

SEQ ID NO: 360578 - DNA, 20 bp, Artificial Sequence
  Description of Artificial Sequence: Synthetic oligonucleotide
  Target: LAMA2; (+) strand; PAM type: YTN; PAM sequence: CTA
cagtggtcgacagagttcat

SEQ ID NO: 360579 - DNA, 20 bp, Artificial Sequence
  Description of Artificial Sequence: Synthetic oligonucleotide
  Target: LAMA2; (+) strand; PAM type: YTN; PAM sequence: TTC
attttagttcaagcagaagg

SEQ ID NO: 360580 - DNA, 20 bp, Artificial Sequence
  Description of Artificial Sequence: Synthetic oligonucleotide
  Target: LAMA2; (+) strand; PAM type: YTN; PAM sequence: TTT
tagttcaagcagaaggtagg

SEQ ID NO: 360581 - DNA, 20 bp, Artificial Sequence
  Description of Artificial Sequence: Synthetic oligonucleotide
  Target: LAMA2; (+) strand; PAM type: YTN; PAM sequence: TTT
agttcaagcagaaggtaggg

SEQ ID NO: 360582 - DNA, 20 bp, Artificial Sequence
  Description of Artificial Sequence: Synthetic oligonucleotide
  Target: LAMA2; (+) strand; PAM type: YTN; PAM sequence: TTA
gttcaagcagaaggtagggc

SEQ ID NO: 360583 - DNA, 20 bp, Artificial Sequence
  Description of Artificial Sequence: Synthetic oligonucleotide
  Target: LAMA2; (+) strand; PAM type: YTN; PAM sequence: TTC
aagcagaaggtagggctggt

SEQ ID NO: 360584 - DNA, 20 bp, Artificial Sequence
  Description of Artificial Sequence: Synthetic oligonucleotide
  Target: LAMA2; (+) strand; PAM type: YTN; PAM sequence: CTG
gtgcttgttacagtggccag

SEQ ID NO: 360585 - DNA, 20 bp, Artificial Sequence
  Description of Artificial Sequence: Synthetic oligonucleotide
  Target: LAMA2; (+) strand; PAM type: YTN; PAM sequence: CTT
gttacagtggccagtaggcc

SEQ ID NO: 360586 - DNA, 20 bp, Artificial Sequence
  Description of Artificial Sequence: Synthetic oligonucleotide
  Target: LAMA2; (+) strand; PAM type: YTN; PAM sequence: TTG
ttacagtggccagtaggcct

SEQ ID NO: 360587 - DNA, 20 bp, Artificial Sequence
  Description of Artificial Sequence: Synthetic oligonucleotide
  Target: LAMA2; (+) strand; PAM type: YTN; PAM sequence: TTA
cagtggccagtaggcctggt

SEQ ID NO: 360588 - DNA, 20 bp, Artificial Sequence
  Description of Artificial Sequence: Synthetic oligonucleotide
  Target: LAMA2; (+) strand; PAM type: YTN; PAM sequence: CTG
gtttctggttatagcacatg

SEQ ID NO: 360589 - DNA, 20 bp, Artificial Sequence
  Description of Artificial Sequence: Synthetic oligonucleotide
  Target: LAMA2; (+) strand; PAM type: YTN; PAM sequence: TTT
ctggttatagcacatggcag

SEQ ID NO: 360590 - DNA, 20 bp, Artificial Sequence
  Description of Artificial Sequence: Synthetic oligonucleotide
  Target: LAMA2; (+) strand; PAM type: YTN; PAM sequence: TTC
tggttatagcacatggcaga

SEQ ID NO: 360591 - DNA, 20 bp, Artificial Sequence
  Description of Artificial Sequence: Synthetic oligonucleotide
  Target: LAMA2; (+) strand; PAM type: YTN; PAM sequence: CTG
gttatagcacatggcagagt

SEQ ID NO: 360592 - DNA, 20 bp, Artificial Sequence
  Description of Artificial Sequence: Synthetic oligonucleotide
  Target: LAMA2; (+) strand; PAM type: YTN; PAM sequence: TTA
tagcacatggcagagttagg

SEQ ID NO: 360593 - DNA, 20 bp, Artificial Sequence
  Description of Artificial Sequence: Synthetic oligonucleotide
  Target: LAMA2; (+) strand; PAM type: YTN; PAM sequence: TTA
ggagctctacctacattatg

SEQ ID NO: 360594 - DNA, 20 bp, Artificial Sequence
  Description of Artificial Sequence: Synthetic oligonucleotide
  Target: LAMA2; (+) strand; PAM type: YTN; PAM sequence: CTC
tacctacattatgtccccac

SEQ ID NO: 360595 - DNA, 20 bp, Artificial Sequence
  Description of Artificial Sequence: Synthetic oligonucleotide
  Target: LAMA2; (+) strand; PAM type: YTN; PAM sequence: CTA
cctacattatgtccccacgg

SEQ ID NO: 360596 - DNA, 20 bp, Artificial Sequence
  Description of Artificial Sequence: Synthetic oligonucleotide
  Target: LAMA2; (+) strand; PAM type: YTN; PAM sequence: CTA
cattatgtccccacggcctc

SEQ ID NO: 360597 - DNA, 20 bp, Artificial Sequence
  Description of Artificial Sequence: Synthetic oligonucleotide
  Target: LAMA2; (+) strand; PAM type: YTN; PAM sequence: TTA
tgtccccacggcctcatctg

SEQ ID NO: 360598 - DNA, 20 bp, Artificial Sequence
  Description of Artificial Sequence: Synthetic oligonucleotide
  Target: LAMA2; (+) strand; PAM type: YTN; PAM sequence: CTC
atctgtggtttccccataag

SEQ ID NO: 360599 - DNA, 20 bp, Artificial Sequence
  Description of Artificial Sequence: Synthetic oligonucleotide
  Target: LAMA2; (+) strand; PAM type: YTN; PAM sequence: CTG
tggtttccccataagaaaac

SEQ ID NO: 360600 - DNA, 20 bp, Artificial Sequence
  Description of Artificial Sequence: Synthetic oligonucleotide
  Target: LAMA2; (+) strand; PAM type: YTN; PAM sequence: TTT
ccccataagaaaactacctt

SEQ ID NO: 360601 - DNA, 20 bp, Artificial Sequence
  Description of Artificial Sequence: Synthetic oligonucleotide
  Target: LAMA2; (+) strand; PAM type: YTN; PAM sequence: TTC
cccataagaaaactaccttt

SEQ ID NO: 360602 - DNA, 20 bp, Artificial Sequence
  Description of Artificial Sequence: Synthetic oligonucleotide
  Target: LAMA2; (+) strand; PAM type: YTN; PAM sequence: CTA
ccttttgggaaaacatgata

SEQ ID NO: 360603 - DNA, 20 bp, Artificial Sequence
  Description of Artificial Sequence: Synthetic oligonucleotide
  Target: LAMA2; (+) strand; PAM type: YTN; PAM sequence: CTT
ttgggaaaacatgatacaaa

SEQ ID NO: 360604 - DNA, 20 bp, Artificial Sequence
  Description of Artificial Sequence: Synthetic oligonucleotide
  Target: LAMA2; (+) strand; PAM type: YTN; PAM sequence: TTT
tgggaaaacatgatacaaac

SEQ ID NO: 360605 - DNA, 20 bp, Artificial Sequence
  Description of Artificial Sequence: Synthetic oligonucleotide
  Target: LAMA2; (+) strand; PAM type: YTN; PAM sequence: TTT
gggaaaacatgatacaaaca

SEQ ID NO: 360606 - DNA, 20 bp, Artificial Sequence
  Description of Artificial Sequence: Synthetic oligonucleotide
  Target: LAMA2; (+) strand; PAM type: YTN; PAM sequence: TTG
ggaaaacatgatacaaacag

SEQ ID NO: 360607 - DNA, 20 bp, Artificial Sequence
  Description of Artificial Sequence: Synthetic oligonucleotide
  Target: LAMA2; (+) strand; PAM type: YTN; PAM sequence: TTA
gaaggtctcctgcagattta

SEQ ID NO: 360608 - DNA, 20 bp, Artificial Sequence
  Description of Artificial Sequence: Synthetic oligonucleotide
  Target: LAMA2; (+) strand; PAM type: YTN; PAM sequence: CTC
ctgcagatttaaaattttat

SEQ ID NO: 360609 - DNA, 20 bp, Artificial Sequence
  Description of Artificial Sequence: Synthetic oligonucleotide
  Target: LAMA2; (+) strand; PAM type: YTN; PAM sequence: CTG
cagatttaaaattttatgaa

SEQ ID NO: 360610 - DNA, 20 bp, Artificial Sequence
  Description of Artificial Sequence: Synthetic oligonucleotide
  Target: LAMA2; (+) strand; PAM type: YTN; PAM sequence: TTT
aaaattttatgaatataatg

SEQ ID NO: 360611 - DNA, 20 bp, Artificial Sequence
  Description of Artificial Sequence: Synthetic oligonucleotide
  Target: LAMA2; (+) strand; PAM type: YTN; PAM sequence: TTA
aaattttatgaatataatgc

SEQ ID NO: 360612 - DNA, 20 bp, Artificial Sequence
  Description of Artificial Sequence: Synthetic oligonucleotide
  Target: LAMA2; (+) strand; PAM type: YTN; PAM sequence: TTT
tatgaatataatgccaaata

SEQ ID NO: 360613 - DNA, 20 bp, Artificial Sequence
  Description of Artificial Sequence: Synthetic oligonucleotide
  Target: LAMA2; (+) strand; PAM type: YTN; PAM sequence: TTT
atgaatataatgccaaatat

SEQ ID NO: 360614 - DNA, 20 bp, Artificial Sequence
  Description of Artificial Sequence: Synthetic oligonucleotide
  Target: LAMA2; (+) strand; PAM type: YTN; PAM sequence: TTA
tgaatataatgccaaatata

SEQ ID NO: 360615 - DNA, 20 bp, Artificial Sequence
  Description of Artificial Sequence: Synthetic oligonucleotide
  Target: LAMA2; (+) strand; PAM type: YTN; PAM sequence: CTT
acactcagttgactactaat

SEQ ID NO: 360616 - DNA, 20 bp, Artificial Sequence
  Description of Artificial Sequence: Synthetic oligonucleotide
  Target: LAMA2; (+) strand; PAM type: YTN; PAM sequence: TTA
cactcagttgactactaata

SEQ ID NO: 360617 - DNA, 20 bp, Artificial Sequence
  Description of Artificial Sequence: Synthetic oligonucleotide
  Target: LAMA2; (+) strand; PAM type: YTN; PAM sequence: CTC
agttgactactaataataaa

SEQ ID NO: 360618 - DNA, 20 bp, Artificial Sequence
  Description of Artificial Sequence: Synthetic oligonucleotide
  Target: LAMA2; (+) strand; PAM type: YTN; PAM sequence: TTG
actactaataataaataacc

SEQ ID NO: 360619 - DNA, 20 bp, Artificial Sequence
  Description of Artificial Sequence: Synthetic oligonucleotide
  Target: LAMA2; (+) strand; PAM type: YTN; PAM sequence: CTA
ctaataataaataaccctac

SEQ ID NO: 360620 - DNA, 20 bp, Artificial Sequence
  Description of Artificial Sequence: Synthetic oligonucleotide
  Target: LAMA2; (+) strand; PAM type: YTN; PAM sequence: CTA
ataataaataaccctacaaa

SEQ ID NO: 360621 - DNA, 20 bp, Artificial Sequence
  Description of Artificial Sequence: Synthetic oligonucleotide
  Target: LAMA2; (+) strand; PAM type: YTN; PAM sequence: CTA
caaaatatggtaaagtgact

SEQ ID NO: 360622 - DNA, 20 bp, Artificial Sequence
  Description of Artificial Sequence: Synthetic oligonucleotide
  Target: LAMA2; (+) strand; PAM type: YTN; PAM sequence: CTC
catgacaacaattgaaaaga

SEQ ID NO: 360623 - DNA, 20 bp, Artificial Sequence
  Description of Artificial Sequence: Synthetic oligonucleotide
  Target: LAMA2; (+) strand; PAM type: YTN; PAM sequence: TTG
aaaagaaaataattgcactc

SEQ ID NO: 360624 - DNA, 20 bp, Artificial Sequence
  Description of Artificial Sequence: Synthetic oligonucleotide
  Target: LAMA2; (+) strand; PAM type: YTN; PAM sequence: TTG
cactcagctgagctattgtc

SEQ ID NO: 360625 - DNA, 20 bp, Artificial Sequence
  Description of Artificial Sequence: Synthetic oligonucleotide
  Target: LAMA2; (+) strand; PAM type: YTN; PAM sequence: CTC
agctgagctattgtccatat

SEQ ID NO: 360626 - DNA, 20 bp, Artificial Sequence
  Description of Artificial Sequence: Synthetic oligonucleotide
  Target: LAMA2; (+) strand; PAM type: YTN; PAM sequence: CTG
agctattgtccatatctaga

SEQ ID NO: 360627 - DNA, 20 bp, Artificial Sequence
  Description of Artificial Sequence: Synthetic oligonucleotide
  Target: LAMA2; (+) strand; PAM type: YTN; PAM sequence: CTA
ttgtccatatctagatgcac

SEQ ID NO: 360628 - DNA, 20 bp, Artificial Sequence
  Description of Artificial Sequence: Synthetic oligonucleotide
  Target: LAMA2; (+) strand; PAM type: YTN; PAM sequence: TTG
tccatatctagatgcactga

SEQ ID NO: 360629 - DNA, 20 bp, Artificial Sequence
  Description of Artificial Sequence: Synthetic oligonucleotide
  Target: LAMA2; (+) strand; PAM type: YTN; PAM sequence: CTA
gatgcactgatgatacacaa

SEQ ID NO: 360630 - DNA, 20 bp, Artificial Sequence
  Description of Artificial Sequence: Synthetic oligonucleotide
  Target: LAMA2; (+) strand; PAM type: YTN; PAM sequence: CTG
atgatacacaaacccagcca

SEQ ID NO: 360631 - DNA, 20 bp, Artificial Sequence
  Description of Artificial Sequence: Synthetic oligonucleotide
  Target: LAMA2; (+) strand; PAM type: YTN; PAM sequence: CTA
gaatgattcaagacactgaa

SEQ ID NO: 360632 - DNA, 20 bp, Artificial Sequence
  Description of Artificial Sequence: Synthetic oligonucleotide
  Target: LAMA2; (+) strand; PAM type: YTN; PAM sequence: TTC
aagacactgaacagccagtg

SEQ ID NO: 360633 - DNA, 20 bp, Artificial Sequence
  Description of Artificial Sequence: Synthetic oligonucleotide
  Target: LAMA2; (+) strand; PAM type: YTN; PAM sequence: CTG
aacagccagtgttcaagcta

SEQ ID NO: 360634 - DNA, 20 bp, Artificial Sequence
  Description of Artificial Sequence: Synthetic oligonucleotide
  Target: LAMA2; (+) strand; PAM type: YTN; PAM sequence: TTC
aagctacgtaatttcttacc

SEQ ID NO: 360635 - DNA, 20 bp, Artificial Sequence
  Description of Artificial Sequence: Synthetic oligonucleotide
  Target: LAMA2; (+) strand; PAM type: YTN; PAM sequence: CTA
cgtaatttcttacctatatt

SEQ ID NO: 360636 - DNA, 20 bp, Artificial Sequence
  Description of Artificial Sequence: Synthetic oligonucleotide
  Target: LAMA2; (+) strand; PAM type: YTN; PAM sequence: TTT
cttacctatattacaggaaa

SEQ ID NO: 360637 - DNA, 20 bp, Artificial Sequence
  Description of Artificial Sequence: Synthetic oligonucleotide
  Target: LAMA2; (+) strand; PAM type: YTN; PAM sequence: TTC
ttacctatattacaggaaaa

SEQ ID NO: 360638 - DNA, 20 bp, Artificial Sequence
  Description of Artificial Sequence: Synthetic oligonucleotide
  Target: LAMA2; (+) strand; PAM type: YTN; PAM sequence: CTT
acctatattacaggaaaaaa

SEQ ID NO: 360639 - DNA, 20 bp, Artificial Sequence
  Description of Artificial Sequence: Synthetic oligonucleotide
  Target: LAMA2; (+) strand; PAM type: YTN; PAM sequence: TTA
cctatattacaggaaaaaac

SEQ ID NO: 360640 - DNA, 20 bp, Artificial Sequence
  Description of Artificial Sequence: Synthetic oligonucleotide
  Target: LAMA2; (+) strand; PAM type: YTN; PAM sequence: CTA
tattacaggaaaaaaccatc

SEQ ID NO: 360641 - DNA, 20 bp, Artificial Sequence
  Description of Artificial Sequence: Synthetic oligonucleotide
  Target: LAMA2; (+) strand; PAM type: YTN; PAM sequence: TTA
caggaaaaaaccatctaact

SEQ ID NO: 360642 - DNA, 20 bp, Artificial Sequence
  Description of Artificial Sequence: Synthetic oligonucleotide
  Target: LAMA2; (+) strand; PAM type: YTN; PAM sequence: CTA
actctttttctacctccaac

SEQ ID NO: 360643 - DNA, 20 bp, Artificial Sequence
  Description of Artificial Sequence: Synthetic oligonucleotide
  Target: LAMA2; (+) strand; PAM type: YTN; PAM sequence: CTC
tttttctacctccaacctcc

SEQ ID NO: 360644 - DNA, 20 bp, Artificial Sequence
  Description of Artificial Sequence: Synthetic oligonucleotide
  Target: LAMA2; (+) strand; PAM type: YTN; PAM sequence: CTT
tttctacctccaacctccct

SEQ ID NO: 360645 - DNA, 20 bp, Artificial Sequence
  Description of Artificial Sequence: Synthetic oligonucleotide
  Target: LAMA2; (+) strand; PAM type: YTN; PAM sequence: TTT
ttctacctccaacctccctc

SEQ ID NO: 360646 - DNA, 20 bp, Artificial Sequence
  Description of Artificial Sequence: Synthetic oligonucleotide
  Target: LAMA2; (+) strand; PAM type: YTN; PAM sequence: TTT
tctacctccaacctccctcc

SEQ ID NO: 360647 - DNA, 20 bp, Artificial Sequence
  Description of Artificial Sequence: Synthetic oligonucleotide
  Target: LAMA2; (+) strand; PAM type: YTN; PAM sequence: TTT
ctacctccaacctccctcct

SEQ ID NO: 360648 - DNA, 20 bp, Artificial Sequence
  Description of Artificial Sequence: Synthetic oligonucleotide
  Target: LAMA2; (+) strand; PAM type: YTN; PAM sequence: TTC
tacctccaacctccctcctc

SEQ ID NO: 360649 - DNA, 20 bp, Artificial Sequence
  Description of Artificial Sequence: Synthetic oligonucleotide
  Target: LAMA2; (+) strand; PAM type: YTN; PAM sequence: CTA
cctccaacctccctcctctg

SEQ ID NO: 360650 - DNA, 20 bp, Artificial Sequence
  Description of Artificial Sequence: Synthetic oligonucleotide
  Target: LAMA2; (+) strand; PAM type: YTN; PAM sequence: CTC
caacctccctcctctgaaat

SEQ ID NO: 360651 - DNA, 20 bp, Artificial Sequence
  Description of Artificial Sequence: Synthetic oligonucleotide
  Target: LAMA2; (+) strand; PAM type: YTN; PAM sequence: CTC
cctcctctgaaatgttattc

SEQ ID NO: 360652 - DNA, 20 bp, Artificial Sequence
  Description of Artificial Sequence: Synthetic oligonucleotide
  Target: LAMA2; (+) strand; PAM type: YTN; PAM sequence: CTC
ctctgaaatgttattcacat

SEQ ID NO: 360653 - DNA, 20 bp, Artificial Sequence
  Description of Artificial Sequence: Synthetic oligonucleotide
  Target: LAMA2; (+) strand; PAM type: YTN; PAM sequence: CTC
tgaaatgttattcacatacc

SEQ ID NO: 360654 - DNA, 20 bp, Artificial Sequence
  Description of Artificial Sequence: Synthetic oligonucleotide
  Target: LAMA2; (+) strand; PAM type: YTN; PAM sequence: CTG
aaatgttattcacatacctg

SEQ ID NO: 360655 - DNA, 20 bp, Artificial Sequence
  Description of Artificial Sequence: Synthetic oligonucleotide
  Target: LAMA2; (+) strand; PAM type: YTN; PAM sequence: TTA
ttcacatacctggtggagaa

SEQ ID NO: 360656 - DNA, 20 bp, Artificial Sequence
  Description of Artificial Sequence: Synthetic oligonucleotide
  Target: LAMA2; (+) strand; PAM type: YTN; PAM sequence: TTC
acatacctggtggagaagaa

SEQ ID NO: 360657 - DNA, 20 bp, Artificial Sequence
  Description of Artificial Sequence: Synthetic oligonucleotide
  Target: LAMA2; (+) strand; PAM type: YTN; PAM sequence: CTG
gtggagaagaatctttataa

SEQ ID NO: 360658 - DNA, 20 bp, Artificial Sequence
  Description of Artificial Sequence: Synthetic oligonucleotide
  Target: LAMA2; (+) strand; PAM type: YTN; PAM sequence: CTT
tataaaactcaaatttgatt

SEQ ID NO: 360659 - DNA, 20 bp, Artificial Sequence
  Description of Artificial Sequence: Synthetic oligonucleotide
  Target: LAMA2; (+) strand; PAM type: YTN; PAM sequence: TTT
ataaaactcaaatttgatta

SEQ ID NO: 360660 - DNA, 20 bp, Artificial Sequence
  Description of Artificial Sequence: Synthetic oligonucleotide
  Target: LAMA2; (+) strand; PAM type: YTN; PAM sequence: TTA
taaaactcaaatttgattac

SEQ ID NO: 360661 - DNA, 20 bp, Artificial Sequence
  Description of Artificial Sequence: Synthetic oligonucleotide
  Target: LAMA2; (+) strand; PAM type: YTN; PAM sequence: CTC
aaatttgattaccttagtcc

SEQ ID NO: 360662 - DNA, 20 bp, Artificial Sequence
  Description of Artificial Sequence: Synthetic oligonucleotide
  Target: LAMA2; (+) strand; PAM type: YTN; PAM sequence: TTT
gattaccttagtcctctgct

SEQ ID NO: 360663 - DNA, 20 bp, Artificial Sequence
  Description of Artificial Sequence: Synthetic oligonucleotide
  Target: LAMA2; (+) strand; PAM type: YTN; PAM sequence: TTG
attaccttagtcctctgctt

SEQ ID NO: 360664 - DNA, 20 bp, Artificial Sequence
  Description of Artificial Sequence: Synthetic oligonucleotide
  Target: LAMA2; (+) strand; PAM type: YTN; PAM sequence: TTA
ccttagtcctctgcttaaaa

SEQ ID NO: 360665 - DNA, 20 bp, Artificial Sequence
  Description of Artificial Sequence: Synthetic oligonucleotide
  Target: LAMA2; (+) strand; PAM type: YTN; PAM sequence: CTT
agtcctctgcttaaaatttc

SEQ ID NO: 360666 - DNA, 20 bp, Artificial Sequence
  Description of Artificial Sequence: Synthetic oligonucleotide
  Target: LAMA2; (+) strand; PAM type: YTN; PAM sequence: TTA
gtcctctgcttaaaatttca

SEQ ID NO: 360667 - DNA, 20 bp, Artificial Sequence
  Description of Artificial Sequence: Synthetic oligonucleotide
  Target: LAMA2; (+) strand; PAM type: YTN; PAM sequence: CTC
tgcttaaaatttcagtgtct

SEQ ID NO: 360668 - DNA, 20 bp, Artificial Sequence
  Description of Artificial Sequence: Synthetic oligonucleotide
  Target: LAMA2; (+) strand; PAM type: YTN; PAM sequence: CTG
cttaaaatttcagtgtcttt

SEQ ID NO: 360669 - DNA, 20 bp, Artificial Sequence
  Description of Artificial Sequence: Synthetic oligonucleotide
  Target: LAMA2; (+) strand; PAM type: YTN; PAM sequence: CTT
aaaatttcagtgtctttcaa

SEQ ID NO: 360670 - DNA, 20 bp, Artificial Sequence
  Description of Artificial Sequence: Synthetic oligonucleotide
  Target: LAMA2; (+) strand; PAM type: YTN; PAM sequence: TTA
aaatttcagtgtctttcaat

SEQ ID NO: 360671 - DNA, 20 bp, Artificial Sequence
  Description of Artificial Sequence: Synthetic oligonucleotide
  Target: LAMA2; (+) strand; PAM type: YTN; PAM sequence: TTT
cagtgtctttcaatgaaagc

SEQ ID NO: 360672 - DNA, 20 bp, Artificial Sequence
  Description of Artificial Sequence: Synthetic oligonucleotide
  Target: LAMA2; (+) strand; PAM type: YTN; PAM sequence: TTC
agtgtctttcaatgaaagct

SEQ ID NO: 360673 - DNA, 20 bp, Artificial Sequence
  Description of Artificial Sequence: Synthetic oligonucleotide
  Target: LAMA2; (+) strand; PAM type: YTN; PAM sequence: CTT
tcaatgaaagctcagagacc

SEQ ID NO: 360674 - DNA, 20 bp, Artificial Sequence
  Description of Artificial Sequence: Synthetic oligonucleotide
  Target: LAMA2; (+) strand; PAM type: YTN; PAM sequence: TTT
caatgaaagctcagagacca

SEQ ID NO: 360675 - DNA, 20 bp, Artificial Sequence
  Description of Artificial Sequence: Synthetic oligonucleotide
  Target: LAMA2; (+) strand; PAM type: YTN; PAM sequence: TTC
aatgaaagctcagagaccat

SEQ ID NO: 360676 - DNA, 20 bp, Artificial Sequence
  Description of Artificial Sequence: Synthetic oligonucleotide
  Target: LAMA2; (+) strand; PAM type: YTN; PAM sequence: CTC
agagaccattctggacttat

SEQ ID NO: 360677 - DNA, 20 bp, Artificial Sequence
  Description of Artificial Sequence: Synthetic oligonucleotide
  Target: LAMA2; (+) strand; PAM type: YTN; PAM sequence: TTC
tggacttataactcccttgc

SEQ ID NO: 360678 - DNA, 20 bp, Artificial Sequence
  Description of Artificial Sequence: Synthetic oligonucleotide
  Target: LAMA2; (+) strand; PAM type: YTN; PAM sequence: CTG
gacttataactcccttgcag

SEQ ID NO: 360679 - DNA, 20 bp, Artificial Sequence
  Description of Artificial Sequence: Synthetic oligonucleotide
  Target: LAMA2; (+) strand; PAM type: YTN; PAM sequence: CTT
ataactcccttgcagctcag

SEQ ID NO: 360680 - DNA, 20 bp, Artificial Sequence
  Description of Artificial Sequence: Synthetic oligonucleotide
  Target: LAMA2; (+) strand; PAM type: YTN; PAM sequence: TTA
taactcccttgcagctcaga

SEQ ID NO: 360681 - DNA, 20 bp, Artificial Sequence
  Description of Artificial Sequence: Synthetic oligonucleotide
  Target: LAMA2; (+) strand; PAM type: YTN; PAM sequence: CTC
ccttgcagctcagaagggac

SEQ ID NO: 360682 - DNA, 20 bp, Artificial Sequence
  Description of Artificial Sequence: Synthetic oligonucleotide
  Target: LAMA2; (+) strand; PAM type: YTN; PAM sequence: CTT
gcagctcagaagggacccgt

SEQ ID NO: 360683 - DNA, 20 bp, Artificial Sequence
  Description of Artificial Sequence: Synthetic oligonucleotide
  Target: LAMA2; (+) strand; PAM type: YTN; PAM sequence: TTG
cagctcagaagggacccgtg

SEQ ID NO: 360684 - DNA, 20 bp, Artificial Sequence
  Description of Artificial Sequence: Synthetic oligonucleotide
  Target: LAMA2; (+) strand; PAM type: YTN; PAM sequence: CTC
agaagggacccgtggtccag

SEQ ID NO: 360685 - DNA, 20 bp, Artificial Sequence
  Description of Artificial Sequence: Synthetic oligonucleotide
  Target: LAMA2; (+) strand; PAM type: YTN; PAM sequence: TTA
aaatgcccgtggtaagtgtt

SEQ ID NO: 360686 - DNA, 20 bp, Artificial Sequence
  Description of Artificial Sequence: Synthetic oligonucleotide
  Target: LAMA2; (+) strand; PAM type: YTN; PAM sequence: TTC
aatgctctctcatgcttttc

SEQ ID NO: 360687 - DNA, 20 bp, Artificial Sequence
  Description of Artificial Sequence: Synthetic oligonucleotide
  Target: LAMA2; (+) strand; PAM type: YTN; PAM sequence: CTC
tctcatgcttttcttctcac

SEQ ID NO: 360688 - DNA, 20 bp, Artificial Sequence
  Description of Artificial Sequence: Synthetic oligonucleotide
  Target: LAMA2; (+) strand; PAM type: YTN; PAM sequence: CTC
tcatgcttttcttctcacaa

SEQ ID NO: 360689 - DNA, 20 bp, Artificial Sequence
  Description of Artificial Sequence: Synthetic oligonucleotide
  Target: LAMA2; (+) strand; PAM type: YTN; PAM sequence: CTC
atgcttttcttctcacaatg

SEQ ID NO: 360690 - DNA, 20 bp, Artificial Sequence
  Description of Artificial Sequence: Synthetic oligonucleotide
  Target: LAMA2; (+) strand; PAM type: YTN; PAM sequence: CTT
ttcttctcacaatgtccctt

SEQ ID NO: 360691 - DNA, 20 bp, Artificial Sequence
  Description of Artificial Sequence: Synthetic oligonucleotide
  Target: LAMA2; (+) strand; PAM type: YTN; PAM sequence: TTT
tcttctcacaatgtcccttc

SEQ ID NO: 360692 - DNA, 20 bp, Artificial Sequence
  Description of Artificial Sequence: Synthetic oligonucleotide
  Target: LAMA2; (+) strand; PAM type: YTN; PAM sequence: TTT
cttctcacaatgtcccttca

SEQ ID NO: 360693 - DNA, 20 bp, Artificial Sequence
  Description of Artificial Sequence: Synthetic oligonucleotide
  Target: LAMA2; (+) strand; PAM type: YTN; PAM sequence: TTC
ttctcacaatgtcccttcag

SEQ ID NO: 360694 - DNA, 20 bp, Artificial Sequence
  Description of Artificial Sequence: Synthetic oligonucleotide
  Target: LAMA2; (+) strand; PAM type: YTN; PAM sequence: CTT
ctcacaatgtcccttcagta

SEQ ID NO: 360695 - DNA, 20 bp, Artificial Sequence
  Description of Artificial Sequence: Synthetic oligonucleotide
  Target: LAMA2; (+) strand; PAM type: YTN; PAM sequence: TTC
tcacaatgtcccttcagtac

SEQ ID NO: 360696 - DNA, 20 bp, Artificial Sequence
  Description of Artificial Sequence: Synthetic oligonucleotide
  Target: LAMA2; (+) strand; PAM type: YTN; PAM sequence: CTC
acaatgtcccttcagtacgg

SEQ ID NO: 360697 - DNA, 20 bp, Artificial Sequence
  Description of Artificial Sequence: Synthetic oligonucleotide
  Target: LAMA2; (+) strand; PAM type: YTN; PAM sequence: CTT
cagtacgggatttctttcta

SEQ ID NO: 360698 - DNA, 20 bp, Artificial Sequence
  Description of Artificial Sequence: Synthetic oligonucleotide
  Target: LAMA2; (+) strand; PAM type: YTN; PAM sequence: TTC
agtacgggatttctttctac

SEQ ID NO: 360699 - DNA, 20 bp, Artificial Sequence
  Description of Artificial Sequence: Synthetic oligonucleotide
  Target: LAMA2; (+) strand; PAM type: YTN; PAM sequence: TTT
ctttctaccattttcctgag

SEQ ID NO: 360700 - DNA, 20 bp, Artificial Sequence
  Description of Artificial Sequence: Synthetic oligonucleotide
  Target: LAMA2; (+) strand; PAM type: YTN; PAM sequence: TTC
tttctaccattttcctgagt

SEQ ID NO: 360701 - DNA, 20 bp, Artificial Sequence
  Description of Artificial Sequence: Synthetic oligonucleotide
  Target: LAMA2; (+) strand; PAM type: YTN; PAM sequence: CTT
tctaccattttcctgagtaa

SEQ ID NO: 360702 - DNA, 20 bp, Artificial Sequence
  Description of Artificial Sequence: Synthetic oligonucleotide
  Target: LAMA2; (+) strand; PAM type: YTN; PAM sequence: TTT
ctaccattttcctgagtaat

SEQ ID NO: 360703 - DNA, 20 bp, Artificial Sequence
  Description of Artificial Sequence: Synthetic oligonucleotide
  Target: LAMA2; (+) strand; PAM type: YTN; PAM sequence: TTC
taccattttcctgagtaatt

SEQ ID NO: 360704 - DNA, 20 bp, Artificial Sequence
  Description of Artificial Sequence: Synthetic oligonucleotide
  Target: LAMA2; (+) strand; PAM type: YTN; PAM sequence: CTA
ccattttcctgagtaattac

SEQ ID NO: 360705 - DNA, 20 bp, Artificial Sequence
  Description of Artificial Sequence: Synthetic oligonucleotide
  Target: LAMA2; (+) strand; PAM type: YTN; PAM sequence: TTT
tcctgagtaattaccttcta

SEQ ID NO: 360706 - DNA, 20 bp, Artificial Sequence
  Description of Artificial Sequence: Synthetic oligonucleotide
  Target: LAMA2; (+) strand; PAM type: YTN; PAM sequence: TTT
cctgagtaattaccttctag

SEQ ID NO: 360707 - DNA, 20 bp, Artificial Sequence
  Description of Artificial Sequence: Synthetic oligonucleotide
  Target: LAMA2; (+) strand; PAM type: YTN; PAM sequence: TTC
ctgagtaattaccttctagt

SEQ ID NO: 360708 - DNA, 20 bp, Artificial Sequence
  Description of Artificial Sequence: Synthetic oligonucleotide
  Target: LAMA2; (+) strand; PAM type: YTN; PAM sequence: CTG
agtaattaccttctagtcat

SEQ ID NO: 360709 - DNA, 20 bp, Artificial Sequence
  Description of Artificial Sequence: Synthetic oligonucleotide
  Target: LAMA2; (+) strand; PAM type: YTN; PAM sequence: TTA
ccttctagtcatcattcaaa

SEQ ID NO: 360710 - DNA, 20 bp, Artificial Sequence
  Description of Artificial Sequence: Synthetic oligonucleotide
  Target: LAMA2; (+) strand; PAM type: YTN; PAM sequence: CTT
ctagtcatcattcaaaaagc

SEQ ID NO: 360711 - DNA, 20 bp, Artificial Sequence
  Description of Artificial Sequence: Synthetic oligonucleotide
  Target: LAMA2; (+) strand; PAM type: YTN; PAM sequence: TTC
tagtcatcattcaaaaagca

SEQ ID NO: 360712 - DNA, 20 bp, Artificial Sequence
  Description of Artificial Sequence: Synthetic oligonucleotide
  Target: LAMA2; (+) strand; PAM type: YTN; PAM sequence: CTA
gtcatcattcaaaaagcatt

SEQ ID NO: 360713 - DNA, 20 bp, Artificial Sequence
  Description of Artificial Sequence: Synthetic oligonucleotide
  Target: LAMA2; (+) strand; PAM type: YTN; PAM sequence: TTC
aaaaagcatttaagcattga

SEQ ID NO: 360714 - DNA, 20 bp, Artificial Sequence
  Description of Artificial Sequence: Synthetic oligonucleotide
  Target: LAMA2; (+) strand; PAM type: YTN; PAM sequence: TTT
aagcattgaattctatagga

SEQ ID NO: 360715 - DNA, 20 bp, Artificial Sequence
  Description of Artificial Sequence: Synthetic oligonucleotide
  Target: LAMA2; (+) strand; PAM type: YTN; PAM sequence: TTA
agcattgaattctataggaa

SEQ ID NO: 360716 - DNA, 20 bp, Artificial Sequence
  Description of Artificial Sequence: Synthetic oligonucleotide
  Target: LAMA2; (+) strand; PAM type: YTN; PAM sequence: TTG
aattctataggaaatgtttc

SEQ ID NO: 360717 - DNA, 20 bp, Artificial Sequence
  Description of Artificial Sequence: Synthetic oligonucleotide
  Target: LAMA2; (+) strand; PAM type: YTN; PAM sequence: TTC
tataggaaatgtttctaatc

SEQ ID NO: 360718 - DNA, 20 bp, Artificial Sequence
  Description of Artificial Sequence: Synthetic oligonucleotide
  Target: LAMA2; (+) strand; PAM type: YTN; PAM sequence: CTA
taggaaatgtttctaatcac

SEQ ID NO: 360719 - DNA, 20 bp, Artificial Sequence
  Description of Artificial Sequence: Synthetic oligonucleotide
  Target: LAMA2; (+) strand; PAM type: YTN; PAM sequence: TTT
ctaatcaccctatcccccag

SEQ ID NO: 360720 - DNA, 20 bp, Artificial Sequence
  Description of Artificial Sequence: Synthetic oligonucleotide
  Target: LAMA2; (+) strand; PAM type: YTN; PAM sequence: TTC
taatcaccctatcccccagc

SEQ ID NO: 360721 - DNA, 20 bp, Artificial Sequence
  Description of Artificial Sequence: Synthetic oligonucleotide
  Target: LAMA2; (+) strand; PAM type: YTN; PAM sequence: CTA
atcaccctatcccccagctc

SEQ ID NO: 360722 - DNA, 20 bp, Artificial Sequence
  Description of Artificial Sequence: Synthetic oligonucleotide
  Target: LAMA2; (+) strand; PAM type: YTN; PAM sequence: CTA
tcccccagctctggctgagt

SEQ ID NO: 360723 - DNA, 20 bp, Artificial Sequence
  Description of Artificial Sequence: Synthetic oligonucleotide
  Target: LAMA2; (+) strand; PAM type: YTN; PAM sequence: CTC
tggctgagttaggccttctc

SEQ ID NO: 360724 - DNA, 20 bp, Artificial Sequence
  Description of Artificial Sequence: Synthetic oligonucleotide
  Target: LAMA2; (+) strand; PAM type: YTN; PAM sequence: CTG
gctgagttaggccttctctg

SEQ ID NO: 360725 - DNA, 20 bp, Artificial Sequence
  Description of Artificial Sequence: Synthetic oligonucleotide
  Target: LAMA2; (+) strand; PAM type: YTN; PAM sequence: CTG
agttaggccttctctgcaca

SEQ ID NO: 360726 - DNA, 20 bp, Artificial Sequence
  Description of Artificial Sequence: Synthetic oligonucleotide
  Target: LAMA2; (+) strand; PAM type: YTN; PAM sequence: TTA
ggccttctctgcacaattcc

SEQ ID NO: 360727 - DNA, 20 bp, Artificial Sequence
  Description of Artificial Sequence: Synthetic oligonucleotide
  Target: LAMA2; (+) strand; PAM type: YTN; PAM sequence: CTT
ctctgcacaattcccatgaa

SEQ ID NO: 360728 - DNA, 20 bp, Artificial Sequence
  Description of Artificial Sequence: Synthetic oligonucleotide
  Target: LAMA2; (+) strand; PAM type: YTN; PAM sequence: TTC
tctgcacaattcccatgaaa

SEQ ID NO: 360729 - DNA, 20 bp, Artificial Sequence
  Description of Artificial Sequence: Synthetic oligonucleotide
  Target: LAMA2; (+) strand; PAM type: YTN; PAM sequence: CTC
tgcacaattcccatgaaagc

SEQ ID NO: 360730 - DNA, 20 bp, Artificial Sequence
  Description of Artificial Sequence: Synthetic oligonucleotide
  Target: LAMA2; (+) strand; PAM type: YTN; PAM sequence: CTG
cacaattcccatgaaagcac

SEQ ID NO: 360731 - DNA, 20 bp, Artificial Sequence
  Description of Artificial Sequence: Synthetic oligonucleotide
  Target: LAMA2; (+) strand; PAM type: YTN; PAM sequence: TTC
ccatgaaagcacctaccacc

SEQ ID NO: 360732 - DNA, 20 bp, Artificial Sequence
  Description of Artificial Sequence: Synthetic oligonucleotide
  Target: LAMA2; (+) strand; PAM type: YTN; PAM sequence: CTA
ccacccagcaggcagaaata

SEQ ID NO: 360733 - DNA, 20 bp, Artificial Sequence
  Description of Artificial Sequence: Synthetic oligonucleotide
  Target: LAMA2; (+) strand; PAM type: YTN; PAM sequence: CTC
tttgactttctcactaaact

SEQ ID NO: 360734 - DNA, 20 bp, Artificial Sequence
  Description of Artificial Sequence: Synthetic oligonucleotide
  Target: LAMA2; (+) strand; PAM type: YTN; PAM sequence: CTT
tgactttctcactaaactgc

SEQ ID NO: 360735 - DNA, 20 bp, Artificial Sequence
  Description of Artificial Sequence: Synthetic oligonucleotide
  Target: LAMA2; (+) strand; PAM type: YTN; PAM sequence: TTT
gactttctcactaaactgca

SEQ ID NO: 360736 - DNA, 20 bp, Artificial Sequence
  Description of Artificial Sequence: Synthetic oligonucleotide
  Target: LAMA2; (+) strand; PAM type: YTN; PAM sequence: TTG
actttctcactaaactgcaa

SEQ ID NO: 360737 - DNA, 20 bp, Artificial Sequence
  Description of Artificial Sequence: Synthetic oligonucleotide
  Target: LAMA2; (+) strand; PAM type: YTN; PAM sequence: CTT
tctcactaaactgcaaattc

SEQ ID NO: 360738 - DNA, 20 bp, Artificial Sequence
  Description of Artificial Sequence: Synthetic oligonucleotide
  Target: LAMA2; (+) strand; PAM type: YTN; PAM sequence: TTT
ctcactaaactgcaaattcc

SEQ ID NO: 360739 - DNA, 20 bp, Artificial Sequence
  Description of Artificial Sequence: Synthetic oligonucleotide
  Target: LAMA2; (+) strand; PAM type: YTN; PAM sequence: TTC
tcactaaactgcaaattcct

SEQ ID NO: 360740 - DNA, 20 bp, Artificial Sequence
  Description of Artificial Sequence: Synthetic oligonucleotide
  Target: LAMA2; (+) strand; PAM type: YTN; PAM sequence: CTC
actaaactgcaaattcctgg

SEQ ID NO: 360741 - DNA, 20 bp, Artificial Sequence
  Description of Artificial Sequence: Synthetic oligonucleotide
  Target: LAMA2; (+) strand; PAM type: YTN; PAM sequence: CTA
aactgcaaattcctggtgag

SEQ ID NO: 360742 - DNA, 20 bp, Artificial Sequence
  Description of Artificial Sequence: Synthetic oligonucleotide
  Target: LAMA2; (+) strand; PAM type: YTN; PAM sequence: CTG
caaattcctggtgagtgaca

SEQ ID NO: 360743 - DNA, 20 bp, Artificial Sequence
  Description of Artificial Sequence: Synthetic oligonucleotide
  Target: LAMA2; (+) strand; PAM type: YTN; PAM sequence: TTC
ctggtgagtgacaactggat

SEQ ID NO: 360744 - DNA, 20 bp, Artificial Sequence
  Description of Artificial Sequence: Synthetic oligonucleotide
  Target: LAMA2; (+) strand; PAM type: YTN; PAM sequence: CTG
gtgagtgacaactggattct

SEQ ID NO: 360745 - DNA, 20 bp, Artificial Sequence
  Description of Artificial Sequence: Synthetic oligonucleotide
  Target: LAMA2; (+) strand; PAM type: YTN; PAM sequence: CTG
gattctattcttcttctaac

SEQ ID NO: 360746 - DNA, 20 bp, Artificial Sequence
  Description of Artificial Sequence: Synthetic oligonucleotide
  Target: LAMA2; (+) strand; PAM type: YTN; PAM sequence: TTC
tattcttcttctaacctcta

SEQ ID NO: 360747 - DNA, 20 bp, Artificial Sequence
  Description of Artificial Sequence: Synthetic oligonucleotide
  Target: LAMA2; (+) strand; PAM type: YTN; PAM sequence: CTA
ttcttcttctaacctctaga

SEQ ID NO: 360748 - DNA, 20 bp, Artificial Sequence
  Description of Artificial Sequence: Synthetic oligonucleotide
  Target: LAMA2; (+) strand; PAM type: YTN; PAM sequence: TTC
ttcttctaacctctagaacc

SEQ ID NO: 360749 - DNA, 20 bp, Artificial Sequence
  Description of Artificial Sequence: Synthetic oligonucleotide
  Target: LAMA2; (+) strand; PAM type: YTN; PAM sequence: CTT
cttctaacctctagaaccta

SEQ ID NO: 360750 - DNA, 20 bp, Artificial Sequence
  Description of Artificial Sequence: Synthetic oligonucleotide
  Target: LAMA2; (+) strand; PAM type: YTN; PAM sequence: TTC
ttctaacctctagaacctag

SEQ ID NO: 360751 - DNA, 20 bp, Artificial Sequence
  Description of Artificial Sequence: Synthetic oligonucleotide
  Target: LAMA2; (+) strand; PAM type: YTN; PAM sequence: CTT
ctaacctctagaacctagca

SEQ ID NO: 360752 - DNA, 20 bp, Artificial Sequence
  Description of Artificial Sequence: Synthetic oligonucleotide
  Target: LAMA2; (+) strand; PAM type: YTN; PAM sequence: TTC
taacctctagaacctagcag

SEQ ID NO: 360753 - DNA, 20 bp, Artificial Sequence
  Description of Artificial Sequence: Synthetic oligonucleotide
  Target: LAMA2; (+) strand; PAM type: YTN; PAM sequence: CTA
acctctagaacctagcagat

SEQ ID NO: 360754 - DNA, 20 bp, Artificial Sequence
  Description of Artificial Sequence: Synthetic oligonucleotide
  Target: LAMA2; (+) strand; PAM type: YTN; PAM sequence: CTC
tagaacctagcagattgctt

SEQ ID NO: 360755 - DNA, 20 bp, Artificial Sequence
  Description of Artificial Sequence: Synthetic oligonucleotide
  Target: LAMA2; (+) strand; PAM type: YTN; PAM sequence: CTA
gaacctagcagattgctttg

SEQ ID NO: 360756 - DNA, 20 bp, Artificial Sequence
  Description of Artificial Sequence: Synthetic oligonucleotide
  Target: LAMA2; (+) strand; PAM type: YTN; PAM sequence: CTA
gcagattgctttggagacct

SEQ ID NO: 360757 - DNA, 20 bp, Artificial Sequence
  Description of Artificial Sequence: Synthetic oligonucleotide
  Target: LAMA2; (+) strand; PAM type: YTN; PAM sequence: TTG
ctttggagaccttaggaact

SEQ ID NO: 360758 - DNA, 20 bp, Artificial Sequence
  Description of Artificial Sequence: Synthetic oligonucleotide
  Target: LAMA2; (+) strand; PAM type: YTN; PAM sequence: CTT
tggagaccttaggaacttaa

SEQ ID NO: 360759 - DNA, 20 bp, Artificial Sequence
  Description of Artificial Sequence: Synthetic oligonucleotide
  Target: LAMA2; (+) strand; PAM type: YTN; PAM sequence: TTT
ggagaccttaggaacttaat

SEQ ID NO: 360760 - DNA, 20 bp, Artificial Sequence
  Description of Artificial Sequence: Synthetic oligonucleotide
  Target: LAMA2; (+) strand; PAM type: YTN; PAM sequence: TTG
gagaccttaggaacttaata

SEQ ID NO: 360761 - DNA, 20 bp, Artificial Sequence
  Description of Artificial Sequence: Synthetic oligonucleotide
  Target: LAMA2; (+) strand; PAM type: YTN; PAM sequence: CTT
aggaacttaataattctttg

SEQ ID NO: 360762 - DNA, 20 bp, Artificial Sequence
  Description of Artificial Sequence: Synthetic oligonucleotide
  Target: LAMA2; (+) strand; PAM type: YTN; PAM sequence: TTA
ggaacttaataattctttgt

SEQ ID NO: 360763 - DNA, 20 bp, Artificial Sequence
  Description of Artificial Sequence: Synthetic oligonucleotide
  Target: LAMA2; (+) strand; PAM type: YTN; PAM sequence: CTT
aataattctttgttgagtga

SEQ ID NO: 360764 - DNA, 20 bp, Artificial Sequence
  Description of Artificial Sequence: Synthetic oligonucleotide
  Target: LAMA2; (+) strand; PAM type: YTN; PAM sequence: TTA
ataattctttgttgagtgaa

SEQ ID NO: 360765 - DNA, 20 bp, Artificial Sequence
  Description of Artificial Sequence: Synthetic oligonucleotide
  Target: LAMA2; (+) strand; PAM type: YTN; PAM sequence: TTC
tttgttgagtgaataaaggg

SEQ ID NO: 360766 - DNA, 20 bp, Artificial Sequence
  Description of Artificial Sequence: Synthetic oligonucleotide
  Target: LAMA2; (+) strand; PAM type: YTN; PAM sequence: CTT
tgttgagtgaataaagggat

SEQ ID NO: 360767 - DNA, 20 bp, Artificial Sequence
  Description of Artificial Sequence: Synthetic oligonucleotide
  Target: LAMA2; (+) strand; PAM type: YTN; PAM sequence: TTT
gttgagtgaataaagggatg

SEQ ID NO: 360768 - DNA, 20 bp, Artificial Sequence
  Description of Artificial Sequence: Synthetic oligonucleotide
  Target: LAMA2; (+) strand; PAM type: YTN; PAM sequence: TTG
ttgagtgaataaagggatgc

SEQ ID NO: 360769 - DNA, 20 bp, Artificial Sequence
  Description of Artificial Sequence: Synthetic oligonucleotide
  Target: LAMA2; (+) strand; PAM type: YTN; PAM sequence: TTG
agtgaataaagggatgcttt

SEQ ID NO: 360770 - DNA, 20 bp, Artificial Sequence
  Description of Artificial Sequence: Synthetic oligonucleotide
  Target: LAMA2; (+) strand; PAM type: YTN; PAM sequence: CTT
tttgtggacagcagttattt

SEQ ID NO: 360771 - DNA, 20 bp, Artificial Sequence
  Description of Artificial Sequence: Synthetic oligonucleotide
  Target: LAMA2; (+) strand; PAM type: YTN; PAM sequence: TTT
ttgtggacagcagttatttc

SEQ ID NO: 360772 - DNA, 20 bp, Artificial Sequence
  Description of Artificial Sequence: Synthetic oligonucleotide
  Target: LAMA2; (+) strand; PAM type: YTN; PAM sequence: TTT
tgtggacagcagttatttct

SEQ ID NO: 360773 - DNA, 20 bp, Artificial Sequence
  Description of Artificial Sequence: Synthetic oligonucleotide
  Target: LAMA2; (+) strand; PAM type: YTN; PAM sequence: TTT
gtggacagcagttatttctg

SEQ ID NO: 360774 - DNA, 20 bp, Artificial Sequence
  Description of Artificial Sequence: Synthetic oligonucleotide
  Target: LAMA2; (+) strand; PAM type: YTN; PAM sequence: TTG
tggacagcagttatttctgt

SEQ ID NO: 360775 - DNA, 20 bp, Artificial Sequence
  Description of Artificial Sequence: Synthetic oligonucleotide
  Target: LAMA2; (+) strand; PAM type: YTN; PAM sequence: TTA
tttctgtttacacaaaagat

SEQ ID NO: 360776 - DNA, 20 bp, Artificial Sequence
  Description of Artificial Sequence: Synthetic oligonucleotide
  Target: LAMA2; (+) strand; PAM type: YTN; PAM sequence: TTT
ctgtttacacaaaagataag

SEQ ID NO: 360777 - DNA, 20 bp, Artificial Sequence
  Description of Artificial Sequence: Synthetic oligonucleotide
  Target: LAMA2; (+) strand; PAM type: YTN; PAM sequence: TTC
tgtttacacaaaagataaga

SEQ ID NO: 360778 - DNA, 20 bp, Artificial Sequence
  Description of Artificial Sequence: Synthetic oligonucleotide
  Target: LAMA2; (+) strand; PAM type: YTN; PAM sequence: CTG
tttacacaaaagataagaga

SEQ ID NO: 360779 - DNA, 20 bp, Artificial Sequence
  Description of Artificial Sequence: Synthetic oligonucleotide
  Target: LAMA2; (+) strand; PAM type: YTN; PAM sequence: TTT
acacaaaagataagagaaaa

SEQ ID NO: 360780 - DNA, 20 bp, Artificial Sequence
  Description of Artificial Sequence: Synthetic oligonucleotide
  Target: LAMA2; (+) strand; PAM type: YTN; PAM sequence: TTA
cacaaaagataagagaaaat

SEQ ID NO: 360781 - DNA, 20 bp, Artificial Sequence
  Description of Artificial Sequence: Synthetic oligonucleotide
  Target: LAMA2; (+) strand; PAM type: YTN; PAM sequence: TTA
tcctaaattttaaaaaattt

SEQ ID NO: 360782 - DNA, 20 bp, Artificial Sequence
  Description of Artificial Sequence: Synthetic oligonucleotide
  Target: LAMA2; (+) strand; PAM type: YTN; PAM sequence: CTA
aattttaaaaaatttgaaac

SEQ ID NO: 360783 - DNA, 20 bp, Artificial Sequence
  Description of Artificial Sequence: Synthetic oligonucleotide
  Target: LAMA2; (+) strand; PAM type: YTN; PAM sequence: TTT
taaaaaatttgaaacttaca

SEQ ID NO: 360784 - DNA, 20 bp, Artificial Sequence
  Description of Artificial Sequence: Synthetic oligonucleotide
  Target: LAMA2; (+) strand; PAM type: YTN; PAM sequence: TTT
aaaaaatttgaaacttacaa

SEQ ID NO: 360785 - DNA, 20 bp, Artificial Sequence
  Description of Artificial Sequence: Synthetic oligonucleotide
  Target: LAMA2; (+) strand; PAM type: YTN; PAM sequence: TTA
aaaaatttgaaacttacaaa

SEQ ID NO: 360786 - DNA, 20 bp, Artificial Sequence
  Description of Artificial Sequence: Synthetic oligonucleotide
  Target: LAMA2; (+) strand; PAM type: YTN; PAM sequence: TTT
gaaacttacaaaaagtgttg

SEQ ID NO: 360787 - DNA, 20 bp, Artificial Sequence
  Description of Artificial Sequence: Synthetic oligonucleotide
  Target: LAMA2; (+) strand; PAM type: YTN; PAM sequence: TTG
aaacttacaaaaagtgttgg

SEQ ID NO: 360788 - DNA, 20 bp, Artificial Sequence
  Description of Artificial Sequence: Synthetic oligonucleotide
  Target: LAMA2; (+) strand; PAM type: YTN; PAM sequence: CTT
acaaaaagtgttggatttaa

SEQ ID NO: 360789 - DNA, 20 bp, Artificial Sequence
  Description of Artificial Sequence: Synthetic oligonucleotide
  Target: LAMA2; (+) strand; PAM type: YTN; PAM sequence: TTA
caaaaagtgttggatttaag

SEQ ID NO: 360790 - DNA, 20 bp, Artificial Sequence
  Description of Artificial Sequence: Synthetic oligonucleotide
  Target: LAMA2; (+) strand; PAM type: YTN; PAM sequence: TTG
gatttaagttcctttgtctg

SEQ ID NO: 360791 - DNA, 20 bp, Artificial Sequence
  Description of Artificial Sequence: Synthetic oligonucleotide
  Target: LAMA2; (+) strand; PAM type: YTN; PAM sequence: TTT
aagttcctttgtctgtctgg

SEQ ID NO: 360792 - DNA, 20 bp, Artificial Sequence
  Description of Artificial Sequence: Synthetic oligonucleotide
  Target: LAMA2; (+) strand; PAM type: YTN; PAM sequence: TTA
agttcctttgtctgtctgga

SEQ ID NO: 360793 - DNA, 20 bp, Artificial Sequence
  Description of Artificial Sequence: Synthetic oligonucleotide
  Target: LAMA2; (+) strand; PAM type: YTN; PAM sequence: TTC
ctttgtctgtctggatttcc

SEQ ID NO: 360794 - DNA, 20 bp, Artificial Sequence
  Description of Artificial Sequence: Synthetic oligonucleotide
  Target: LAMA2; (+) strand; PAM type: YTN; PAM sequence: CTT
tgtctgtctggatttccgaa

SEQ ID NO: 360795 - DNA, 20 bp, Artificial Sequence
  Description of Artificial Sequence: Synthetic oligonucleotide
  Target: LAMA2; (+) strand; PAM type: YTN; PAM sequence: TTT
gtctgtctggatttccgaaa

SEQ ID NO: 360796 - DNA, 20 bp, Artificial Sequence
  Description of Artificial Sequence: Synthetic oligonucleotide
  Target: LAMA2; (+) strand; PAM type: YTN; PAM sequence: TTG
tctgtctggatttccgaaat

SEQ ID NO: 360797 - DNA, 20 bp, Artificial Sequence
  Description of Artificial Sequence: Synthetic oligonucleotide
  Target: LAMA2; (+) strand; PAM type: YTN; PAM sequence: CTG
tctggatttccgaaatattt

SEQ ID NO: 360798 - DNA, 20 bp, Artificial Sequence
  Description of Artificial Sequence: Synthetic oligonucleotide
  Target: LAMA2; (+) strand; PAM type: YTN; PAM sequence: CTG
gatttccgaaatatttttaa

SEQ ID NO: 360799 - DNA, 20 bp, Artificial Sequence
  Description of Artificial Sequence: Synthetic oligonucleotide
  Target: LAMA2; (+) strand; PAM type: YTN; PAM sequence: TTT
ccgaaatatttttaaaagat

SEQ ID NO: 360800 - DNA, 20 bp, Artificial Sequence
  Description of Artificial Sequence: Synthetic oligonucleotide
  Target: LAMA2; (+) strand; PAM type: YTN; PAM sequence: TTC
cgaaatatttttaaaagatt

SEQ ID NO: 360801 - DNA, 20 bp, Artificial Sequence
  Description of Artificial Sequence: Synthetic oligonucleotide
  Target: LAMA2; (+) strand; PAM type: YTN; PAM sequence: TTT
ttaaaagattttttctggga

SEQ ID NO: 360802 - DNA, 20 bp, Artificial Sequence
  Description of Artificial Sequence: Synthetic oligonucleotide
  Target: LAMA2; (+) strand; PAM type: YTN; PAM sequence: TTT
taaaagattttttctgggat

SEQ ID NO: 360803 - DNA, 20 bp, Artificial Sequence
  Description of Artificial Sequence: Synthetic oligonucleotide
  Target: LAMA2; (+) strand; PAM type: YTN; PAM sequence: TTT
aaaagattttttctgggatc

SEQ ID NO: 360804 - DNA, 20 bp, Artificial Sequence
  Description of Artificial Sequence: Synthetic oligonucleotide
  Target: LAMA2; (+) strand; PAM type: YTN; PAM sequence: TTA
aaagattttttctgggatca

SEQ ID NO: 360805 - DNA, 20 bp, Artificial Sequence
  Description of Artificial Sequence: Synthetic oligonucleotide
  Target: LAMA2; (+) strand; PAM type: YTN; PAM sequence: TTT
tttctgggatcatttaaggc

SEQ ID NO: 360806 - DNA, 20 bp, Artificial Sequence
  Description of Artificial Sequence: Synthetic oligonucleotide
  Target: LAMA2; (+) strand; PAM type: YTN; PAM sequence: TTT
ttctgggatcatttaaggcc

SEQ ID NO: 360807 - DNA, 20 bp, Artificial Sequence
  Description of Artificial Sequence: Synthetic oligonucleotide
  Target: LAMA2; (+) strand; PAM type: YTN; PAM sequence: TTT
tctgggatcatttaaggcct

SEQ ID NO: 360808 - DNA, 20 bp, Artificial Sequence
  Description of Artificial Sequence: Synthetic oligonucleotide
  Target: LAMA2; (+) strand; PAM type: YTN; PAM sequence: TTT
ctgggatcatttaaggcctc

SEQ ID NO: 360809 - DNA, 20 bp, Artificial Sequence
  Description of Artificial Sequence: Synthetic oligonucleotide
  Target: LAMA2; (+) strand; PAM type: YTN; PAM sequence: TTC
tgggatcatttaaggcctca

SEQ ID NO: 360810 - DNA, 20 bp, Artificial Sequence
  Description of Artificial Sequence: Synthetic oligonucleotide
  Target: LAMA2; (+) strand; PAM type: YTN; PAM sequence: CTG
ggatcatttaaggcctcatc

SEQ ID NO: 360811 - DNA, 20 bp, Artificial Sequence
  Description of Artificial Sequence: Synthetic oligonucleotide
  Target: LAMA2; (+) strand; PAM type: YTN; PAM sequence: TTT
aaggcctcatctgttcagaa

SEQ ID NO: 360812 - DNA, 20 bp, Artificial Sequence
  Description of Artificial Sequence: Synthetic oligonucleotide
  Target: LAMA2; (+) strand; PAM type: YTN; PAM sequence: TTA
aggcctcatctgttcagaac

SEQ ID NO: 360813 - DNA, 20 bp, Artificial Sequence
  Description of Artificial Sequence: Synthetic oligonucleotide
  Target: LAMA2; (+) strand; PAM type: YTN; PAM sequence: CTC
atctgttcagaaccaagggg

SEQ ID NO: 360814 - DNA, 20 bp, Artificial Sequence
  Description of Artificial Sequence: Synthetic oligonucleotide
  Target: LAMA2; (+) strand; PAM type: YTN; PAM sequence: CTG
ttcagaaccaaggggaggac

SEQ ID NO: 360815 - DNA, 20 bp, Artificial Sequence
  Description of Artificial Sequence: Synthetic oligonucleotide
  Target: LAMA2; (+) strand; PAM type: YTN; PAM sequence: TTC
agaaccaaggggaggaccga

SEQ ID NO: 360816 - DNA, 20 bp, Artificial Sequence
  Description of Artificial Sequence: Synthetic oligonucleotide
  Target: LAMA2; (+) strand; PAM type: YTN; PAM sequence: TTC
ttttccagccctcaaatttt

SEQ ID NO: 360817 - DNA, 20 bp, Artificial Sequence
  Description of Artificial Sequence: Synthetic oligonucleotide
  Target: LAMA2; (+) strand; PAM type: YTN; PAM sequence: CTT
ttccagccctcaaattttat

SEQ ID NO: 360818 - DNA, 20 bp, Artificial Sequence
  Description of Artificial Sequence: Synthetic oligonucleotide
  Target: LAMA2; (+) strand; PAM type: YTN; PAM sequence: TTT
tccagccctcaaattttatg

SEQ ID NO: 360819 - DNA, 20 bp, Artificial Sequence
  Description of Artificial Sequence: Synthetic oligonucleotide
  Target: LAMA2; (+) strand; PAM type: YTN; PAM sequence: TTT
ccagccctcaaattttatga

SEQ ID NO: 360820 - DNA, 20 bp, Artificial Sequence
  Description of Artificial Sequence: Synthetic oligonucleotide
  Target: LAMA2; (+) strand; PAM type: YTN; PAM sequence: TTC
cagccctcaaattttatgag

SEQ ID NO: 360821 - DNA, 20 bp, Artificial Sequence
  Description of Artificial Sequence: Synthetic oligonucleotide
  Target: LAMA2; (+) strand; PAM type: YTN; PAM sequence: CTC
aaattttatgagcctgagtt

SEQ ID NO: 360822 - DNA, 20 bp, Artificial Sequence
  Description of Artificial Sequence: Synthetic oligonucleotide
  Target: LAMA2; (+) strand; PAM type: YTN; PAM sequence: TTT
tatgagcctgagttgcattg

SEQ ID NO: 360823 - DNA, 20 bp, Artificial Sequence
  Description of Artificial Sequence: Synthetic oligonucleotide
  Target: LAMA2; (+) strand; PAM type: YTN; PAM sequence: TTT
atgagcctgagttgcattgt

SEQ ID NO: 360824 - DNA, 20 bp, Artificial Sequence
  Description of Artificial Sequence: Synthetic oligonucleotide
  Target: LAMA2; (+) strand; PAM type: YTN; PAM sequence: TTA
tgagcctgagttgcattgtg

SEQ ID NO: 360825 - DNA, 20 bp, Artificial Sequence
  Description of Artificial Sequence: Synthetic oligonucleotide
  Target: LAMA2; (+) strand; PAM type: YTN; PAM sequence: CTG
agttgcattgtgtgggtaaa

SEQ ID NO: 360826 - DNA, 20 bp, Artificial Sequence
  Description of Artificial Sequence: Synthetic oligonucleotide
  Target: LAMA2; (+) strand; PAM type: YTN; PAM sequence: TTG
cattgtgtgggtaaaagtct

SEQ ID NO: 360827 - DNA, 20 bp, Artificial Sequence
  Description of Artificial Sequence: Synthetic oligonucleotide
  Target: LAMA2; (+) strand; PAM type: YTN; PAM sequence: TTG
tgtgggtaaaagtcttgtgc

SEQ ID NO: 360828 - DNA, 20 bp, Artificial Sequence
  Description of Artificial Sequence: Synthetic oligonucleotide
  Target: LAMA2; (+) strand; PAM type: YTN; PAM sequence: CTT
gtgctctgtggatcaggagg

SEQ ID NO: 360829 - DNA, 20 bp, Artificial Sequence
  Description of Artificial Sequence: Synthetic oligonucleotide
  Target: LAMA2; (+) strand; PAM type: YTN; PAM sequence: TTG
tgctctgtggatcaggagga

SEQ ID NO: 360830 - DNA, 20 bp, Artificial Sequence
  Description of Artificial Sequence: Synthetic oligonucleotide
  Target: LAMA2; (+) strand; PAM type: YTN; PAM sequence: CTC
tgtggatcaggaggaagtta

SEQ ID NO: 360831 - DNA, 20 bp, Artificial Sequence
  Description of Artificial Sequence: Synthetic oligonucleotide
  Target: LAMA2; (+) strand; PAM type: YTN; PAM sequence: CTG
tggatcaggaggaagttaga

SEQ ID NO: 360832 - DNA, 20 bp, Artificial Sequence
  Description of Artificial Sequence: Synthetic oligonucleotide
  Target: LAMA2; (+) strand; PAM type: YTN; PAM sequence: TTA
gatgttttggatatttacat

SEQ ID NO: 360833 - DNA, 20 bp, Artificial Sequence
  Description of Artificial Sequence: Synthetic oligonucleotide
  Target: LAMA2; (+) strand; PAM type: YTN; PAM sequence: TTT
tggatatttacatagaaaca

SEQ ID NO: 360834 - DNA, 20 bp, Artificial Sequence
  Description of Artificial Sequence: Synthetic oligonucleotide
  Target: LAMA2; (+) strand; PAM type: YTN; PAM sequence: TTT
ggatatttacatagaaacaa

SEQ ID NO: 360835 - DNA, 20 bp, Artificial Sequence
  Description of Artificial Sequence: Synthetic oligonucleotide
  Target: LAMA2; (+) strand; PAM type: YTN; PAM sequence: TTG
gatatttacatagaaacaaa

SEQ ID NO: 360836 - DNA, 20 bp, Artificial Sequence
  Description of Artificial Sequence: Synthetic oligonucleotide
  Target: LAMA2; (+) strand; PAM type: YTN; PAM sequence: TTT
acatagaaacaaagaatttg

SEQ ID NO: 360837 - DNA, 20 bp, Artificial Sequence
  Description of Artificial Sequence: Synthetic oligonucleotide
  Target: LAMA2; (+) strand; PAM type: YTN; PAM sequence: TTA
catagaaacaaagaatttga

SEQ ID NO: 360838 - DNA, 20 bp, Artificial Sequence
  Description of Artificial Sequence: Synthetic oligonucleotide
  Target: LAMA2; (+) strand; PAM type: YTN; PAM sequence: TTT
gaagactggaaagaacttga

SEQ ID NO: 360839 - DNA, 20 bp, Artificial Sequence
  Description of Artificial Sequence: Synthetic oligonucleotide
  Target: LAMA2; (+) strand; PAM type: YTN; PAM sequence: TTG
aagactggaaagaacttgag

SEQ ID NO: 360840 - DNA, 20 bp, Artificial Sequence
  Description of Artificial Sequence: Synthetic oligonucleotide
  Target: LAMA2; (+) strand; PAM type: YTN; PAM sequence: CTG
gaaagaacttgagcaggact

SEQ ID NO: 360841 - DNA, 20 bp, Artificial Sequence
  Description of Artificial Sequence: Synthetic oligonucleotide
  Target: LAMA2; (+) strand; PAM type: YTN; PAM sequence: CTT
gagcaggactctattaaatg

SEQ ID NO: 360842 - DNA, 20 bp, Artificial Sequence
  Description of Artificial Sequence: Synthetic oligonucleotide
  Target: LAMA2; (+) strand; PAM type: YTN; PAM sequence: TTG
agcaggactctattaaatgt

SEQ ID NO: 360843 - DNA, 20 bp, Artificial Sequence
  Description of Artificial Sequence: Synthetic oligonucleotide
  Target: LAMA2; (+) strand; PAM type: YTN; PAM sequence: CTC
tattaaatgtgttttgtgtg

SEQ ID NO: 360844 - DNA, 20 bp, Artificial Sequence
  Description of Artificial Sequence: Synthetic oligonucleotide
  Target: LAMA2; (+) strand; PAM type: YTN; PAM sequence: CTA
ttaaatgtgttttgtgtgag

SEQ ID NO: 360845 - DNA, 20 bp, Artificial Sequence
  Description of Artificial Sequence: Synthetic oligonucleotide
  Target: LAMA2; (+) strand; PAM type: YTN; PAM sequence: TTA
aatgtgttttgtgtgagatg

SEQ ID NO: 360846 - DNA, 20 bp, Artificial Sequence
  Description of Artificial Sequence: Synthetic oligonucleotide
  Target: LAMA2; (+) strand; PAM type: YTN; PAM sequence: TTT
tgtgtgagatggttttcacc

SEQ ID NO: 360847 - DNA, 20 bp, Artificial Sequence
  Description of Artificial Sequence: Synthetic oligonucleotide
  Target: LAMA2; (+) strand; PAM type: YTN; PAM sequence: TTT
gtgtgagatggttttcaccc

SEQ ID NO: 360848 - DNA, 20 bp, Artificial Sequence
  Description of Artificial Sequence: Synthetic oligonucleotide
  Target: LAMA2; (+) strand; PAM type: YTN; PAM sequence: TTG
tgtgagatggttttcaccct

SEQ ID NO: 360849 - DNA, 20 bp, Artificial Sequence
  Description of Artificial Sequence: Synthetic oligonucleotide
  Target: LAMA2; (+) strand; PAM type: YTN; PAM sequence: TTT
tcaccctgtgttcttgtggt

SEQ ID NO: 360850 - DNA, 20 bp, Artificial Sequence
  Description of Artificial Sequence: Synthetic oligonucleotide
  Target: LAMA2; (+) strand; PAM type: YTN; PAM sequence: TTT
caccctgtgttcttgtggtt

SEQ ID NO: 360851 - DNA, 20 bp, Artificial Sequence
  Description of Artificial Sequence: Synthetic oligonucleotide
  Target: LAMA2; (+) strand; PAM type: YTN; PAM sequence: TTC
accctgtgttcttgtggttc

SEQ ID NO: 360852 - DNA, 20 bp, Artificial Sequence
  Description of Artificial Sequence: Synthetic oligonucleotide
  Target: LAMA2; (+) strand; PAM type: YTN; PAM sequence: CTG
tgttcttgtggttcctccat

SEQ ID NO: 360853 - DNA, 20 bp, Artificial Sequence
  Description of Artificial Sequence: Synthetic oligonucleotide
  Target: LAMA2; (+) strand; PAM type: YTN; PAM sequence: TTC
ttgtggttcctccatgctag

SEQ ID NO: 360854 - DNA, 20 bp, Artificial Sequence
  Description of Artificial Sequence: Synthetic oligonucleotide
  Target: LAMA2; (+) strand; PAM type: YTN; PAM sequence: CTT
gtggttcctccatgctaggg

SEQ ID NO: 360855 - DNA, 20 bp, Artificial Sequence
  Description of Artificial Sequence: Synthetic oligonucleotide
  Target: LAMA2; (+) strand; PAM type: YTN; PAM sequence: TTG
tggttcctccatgctagggg

SEQ ID NO: 360856 - DNA, 20 bp, Artificial Sequence
  Description of Artificial Sequence: Synthetic oligonucleotide
  Target: LAMA2; (+) strand; PAM type: YTN; PAM sequence: TTC
ctccatgctaggggcaggag

SEQ ID NO: 360857 - DNA, 20 bp, Artificial Sequence
  Description of Artificial Sequence: Synthetic oligonucleotide
  Target: LAMA2; (+) strand; PAM type: YTN; PAM sequence: CTC
catgctaggggcaggaggta

SEQ ID NO: 360858 - DNA, 20 bp, Artificial Sequence
  Description of Artificial Sequence: Synthetic oligonucleotide
  Target: LAMA2; (+) strand; PAM type: YTN; PAM sequence: CTA
ggggcaggaggtaggatgga

SEQ ID NO: 360859 - DNA, 20 bp, Artificial Sequence
  Description of Artificial Sequence: Synthetic oligonucleotide
  Target: LAMA2; (+) strand; PAM type: YTN; PAM sequence: CTC
ttttcctcttaaaccggatg

SEQ ID NO: 360860 - DNA, 20 bp, Artificial Sequence
  Description of Artificial Sequence: Synthetic oligonucleotide
  Target: LAMA2; (+) strand; PAM type: YTN; PAM sequence: CTT
ttcctcttaaaccggatgtt

SEQ ID NO: 360861 - DNA, 20 bp, Artificial Sequence
  Description of Artificial Sequence: Synthetic oligonucleotide
  Target: LAMA2; (+) strand; PAM type: YTN; PAM sequence: TTT
tcctcttaaaccggatgttt

SEQ ID NO: 360862 - DNA, 20 bp, Artificial Sequence
  Description of Artificial Sequence: Synthetic oligonucleotide
  Target: LAMA2; (+) strand; PAM type: YTN; PAM sequence: TTT
cctcttaaaccggatgtttt

SEQ ID NO: 360863 - DNA, 20 bp, Artificial Sequence
  Description of Artificial Sequence: Synthetic oligonucleotide
  Target: LAMA2; (+) strand; PAM type: YTN; PAM sequence: TTC
ctcttaaaccggatgttttt

SEQ ID NO: 360864 - DNA, 20 bp, Artificial Sequence
  Description of Artificial Sequence: Synthetic oligonucleotide
  Target: LAMA2; (+) strand; PAM type: YTN; PAM sequence: CTC
ttaaaccggatgtttttttt

SEQ ID NO: 360865 - DNA, 20 bp, Artificial Sequence
  Description of Artificial Sequence: Synthetic oligonucleotide
  Target: LAMA2; (+) strand; PAM type: YTN; PAM sequence: CTT
aaaccggatgttttttttaa

SEQ ID NO: 360866 - DNA, 20 bp, Artificial Sequence
  Description of Artificial Sequence: Synthetic oligonucleotide
  Target: LAMA2; (+) strand; PAM type: YTN; PAM sequence: TTA
aaccggatgttttttttaaa

SEQ ID NO: 360867 - DNA, 20 bp, Artificial Sequence
  Description of Artificial Sequence: Synthetic oligonucleotide
  Target: LAMA2; (+) strand; PAM type: YTN; PAM sequence: TTT
tttttaaaatcagttttata

SEQ ID NO: 360868 - DNA, 20 bp, Artificial Sequence
  Description of Artificial Sequence: Synthetic oligonucleotide
  Target: LAMA2; (+) strand; PAM type: YTN; PAM sequence: TTT
ttttaaaatcagttttatat

SEQ ID NO: 360869 - DNA, 20 bp, Artificial Sequence
  Description of Artificial Sequence: Synthetic oligonucleotide
  Target: LAMA2; (+) strand; PAM type: YTN; PAM sequence: TTT
tttaaaatcagttttatatg

SEQ ID NO: 360870 - DNA, 20 bp, Artificial Sequence
  Description of Artificial Sequence: Synthetic oligonucleotide
  Target: LAMA2; (+) strand; PAM type: YTN; PAM sequence: TTT
ttaaaatcagttttatatgt

SEQ ID NO: 360871 - DNA, 20 bp, Artificial Sequence
  Description of Artificial Sequence: Synthetic oligonucleotide
  Target: LAMA2; (+) strand; PAM type: YTN; PAM sequence: TTT
taaaatcagttttatatgtt

SEQ ID NO: 360872 - DNA, 20 bp, Artificial Sequence
  Description of Artificial Sequence: Synthetic oligonucleotide
  Target: LAMA2; (+) strand; PAM type: YTN; PAM sequence: TTT
aaaatcagttttatatgttg

SEQ ID NO: 360873 - DNA, 20 bp, Artificial Sequence
  Description of Artificial Sequence: Synthetic oligonucleotide
  Target: LAMA2; (+) strand; PAM type: YTN; PAM sequence: TTA
aaatcagttttatatgttga

SEQ ID NO: 360874 - DNA, 20 bp, Artificial Sequence
  Description of Artificial Sequence: Synthetic oligonucleotide
  Target: LAMA2; (+) strand; PAM type: YTN; PAM sequence: TTT
tatatgttgagagtccatgg

SEQ ID NO: 360875 - DNA, 20 bp, Artificial Sequence
  Description of Artificial Sequence: Synthetic oligonucleotide
  Target: LAMA2; (+) strand; PAM type: YTN; PAM sequence: TTT
atatgttgagagtccatgga

SEQ ID NO: 360876 - DNA, 20 bp, Artificial Sequence
  Description of Artificial Sequence: Synthetic oligonucleotide
  Target: LAMA2; (+) strand; PAM type: YTN; PAM sequence: TTA
tatgttgagagtccatggaa

SEQ ID NO: 360877 - DNA, 20 bp, Artificial Sequence
  Description of Artificial Sequence: Synthetic oligonucleotide
  Target: LAMA2; (+) strand; PAM type: YTN; PAM sequence: TTG
agagtccatggaatggaatg

SEQ ID NO: 360878 - DNA, 20 bp, Artificial Sequence
  Description of Artificial Sequence: Synthetic oligonucleotide
  Target: LAMA2; (+) strand; PAM type: YTN; PAM sequence: CTG
agaccctgaaagattaagtc

SEQ ID NO: 360879 - DNA, 20 bp, Artificial Sequence
  Description of Artificial Sequence: Synthetic oligonucleotide
  Target: LAMA2; (+) strand; PAM type: YTN; PAM sequence: CTG
aaagattaagtcacttgaac

SEQ ID NO: 360880 - DNA, 20 bp, Artificial Sequence
  Description of Artificial Sequence: Synthetic oligonucleotide
  Target: LAMA2; (+) strand; PAM type: YTN; PAM sequence: TTA
agtcacttgaacaaagatat

SEQ ID NO: 360881 - DNA, 20 bp, Artificial Sequence
  Description of Artificial Sequence: Synthetic oligonucleotide
  Target: LAMA2; (+) strand; PAM type: YTN; PAM sequence: CTT
gaacaaagatatacagcttc

SEQ ID NO: 360882 - DNA, 20 bp, Artificial Sequence
  Description of Artificial Sequence: Synthetic oligonucleotide
  Target: LAMA2; (+) strand; PAM type: YTN; PAM sequence: TTG
aacaaagatatacagcttct

SEQ ID NO: 360883 - DNA, 20 bp, Artificial Sequence
  Description of Artificial Sequence: Synthetic oligonucleotide
  Target: LAMA2; (+) strand; PAM type: YTN; PAM sequence: CTT
ctccagagaccaggcagaca

SEQ ID NO: 360884 - DNA, 20 bp, Artificial Sequence
  Description of Artificial Sequence: Synthetic oligonucleotide
  Target: LAMA2; (+) strand; PAM type: YTN; PAM sequence: TTC
tccagagaccaggcagacac

SEQ ID NO: 360885 - DNA, 20 bp, Artificial Sequence
  Description of Artificial Sequence: Synthetic oligonucleotide
  Target: LAMA2; (+) strand; PAM type: YTN; PAM sequence: CTC
cagagaccaggcagacacta

SEQ ID NO: 360886 - DNA, 20 bp, Artificial Sequence
  Description of Artificial Sequence: Synthetic oligonucleotide
  Target: LAMA2; (+) strand; PAM type: YTN; PAM sequence: CTA
ggtttatgatttcctgactt

SEQ ID NO: 360887 - DNA, 20 bp, Artificial Sequence
  Description of Artificial Sequence: Synthetic oligonucleotide
  Target: LAMA2; (+) strand; PAM type: YTN; PAM sequence: TTT
atgatttcctgacttccact

SEQ ID NO: 360888 - DNA, 20 bp, Artificial Sequence
  Description of Artificial Sequence: Synthetic oligonucleotide
  Target: LAMA2; (+) strand; PAM type: YTN; PAM sequence: TTA
tgatttcctgacttccactg

SEQ ID NO: 360889 - DNA, 20 bp, Artificial Sequence
  Description of Artificial Sequence: Synthetic oligonucleotide
  Target: LAMA2; (+) strand; PAM type: YTN; PAM sequence: TTT
cctgacttccactgcagatc

SEQ ID NO: 360890 - DNA, 20 bp, Artificial Sequence
  Description of Artificial Sequence: Synthetic oligonucleotide
  Target: LAMA2; (+) strand; PAM type: YTN; PAM sequence: TTC
ctgacttccactgcagatct

SEQ ID NO: 360891 - DNA, 20 bp, Artificial Sequence
  Description of Artificial Sequence: Synthetic oligonucleotide
  Target: LAMA2; (+) strand; PAM type: YTN; PAM sequence: CTG
acttccactgcagatctctt

SEQ ID NO: 360892 - DNA, 20 bp, Artificial Sequence
  Description of Artificial Sequence: Synthetic oligonucleotide
  Target: LAMA2; (+) strand; PAM type: YTN; PAM sequence: CTT
ccactgcagatctcttacca

SEQ ID NO: 360893 - DNA, 20 bp, Artificial Sequence
  Description of Artificial Sequence: Synthetic oligonucleotide
  Target: LAMA2; (+) strand; PAM type: YTN; PAM sequence: TTC
cactgcagatctcttaccat

SEQ ID NO: 360894 - DNA, 20 bp, Artificial Sequence
  Description of Artificial Sequence: Synthetic oligonucleotide
  Target: LAMA2; (+) strand; PAM type: YTN; PAM sequence: CTG
cagatctcttaccatttttc

SEQ ID NO: 360895 - DNA, 20 bp, Artificial Sequence
  Description of Artificial Sequence: Synthetic oligonucleotide
  Target: LAMA2; (+) strand; PAM type: YTN; PAM sequence: CTC
ttaccatttttctatgagag

SEQ ID NO: 360896 - DNA, 20 bp, Artificial Sequence
  Description of Artificial Sequence: Synthetic oligonucleotide
  Target: LAMA2; (+) strand; PAM type: YTN; PAM sequence: CTT
accatttttctatgagagtc

SEQ ID NO: 360897 - DNA, 20 bp, Artificial Sequence
  Description of Artificial Sequence: Synthetic oligonucleotide
  Target: LAMA2; (+) strand; PAM type: YTN; PAM sequence: TTA
ccatttttctatgagagtca

SEQ ID NO: 360898 - DNA, 20 bp, Artificial Sequence
  Description of Artificial Sequence: Synthetic oligonucleotide
  Target: LAMA2; (+) strand; PAM type: YTN; PAM sequence: TTT
ttctatgagagtcataaaaa

SEQ ID NO: 360899 - DNA, 20 bp, Artificial Sequence
  Description of Artificial Sequence: Synthetic oligonucleotide
  Target: LAMA2; (+) strand; PAM type: YTN; PAM sequence: TTT
tctatgagagtcataaaaaa

SEQ ID NO: 360900 - DNA, 20 bp, Artificial Sequence
  Description of Artificial Sequence: Synthetic oligonucleotide
  Target: LAMA2; (+) strand; PAM type: YTN; PAM sequence: TTT
ctatgagagtcataaaaaaa

SEQ ID NO: 360901 - DNA, 20 bp, Artificial Sequence
  Description of Artificial Sequence: Synthetic oligonucleotide
  Target: LAMA2; (+) strand; PAM type: YTN; PAM sequence: TTC
tatgagagtcataaaaaaag

SEQ ID NO: 360902 - DNA, 20 bp, Artificial Sequence
  Description of Artificial Sequence: Synthetic oligonucleotide
  Target: LAMA2; (+) strand; PAM type: YTN; PAM sequence: CTA
tgagagtcataaaaaaagaa

SEQ ID NO: 360903 - DNA, 20 bp, Artificial Sequence
  Description of Artificial Sequence: Synthetic oligonucleotide
  Target: LAMA2; (+) strand; PAM type: YTN; PAM sequence: CTA
tttactttctagtcaaggtg

SEQ ID NO: 360904 - DNA, 20 bp, Artificial Sequence
  Description of Artificial Sequence: Synthetic oligonucleotide
  Target: LAMA2; (+) strand; PAM type: YTN; PAM sequence: TTT
actttctagtcaaggtgggt

SEQ ID NO: 360905 - DNA, 20 bp, Artificial Sequence
  Description of Artificial Sequence: Synthetic oligonucleotide
  Target: LAMA2; (+) strand; PAM type: YTN; PAM sequence: TTA
ctttctagtcaaggtgggtt

SEQ ID NO: 360906 - DNA, 20 bp, Artificial Sequence
  Description of Artificial Sequence: Synthetic oligonucleotide
  Target: LAMA2; (+) strand; PAM type: YTN; PAM sequence: CTT
tctagtcaaggtgggttaaa

SEQ ID NO: 360907 - DNA, 20 bp, Artificial Sequence
  Description of Artificial Sequence: Synthetic oligonucleotide
  Target: LAMA2; (+) strand; PAM type: YTN; PAM sequence: TTT
ctagtcaaggtgggttaaaa

SEQ ID NO: 360908 - DNA, 20 bp, Artificial Sequence
  Description of Artificial Sequence: Synthetic oligonucleotide
  Target: LAMA2; (+) strand; PAM type: YTN; PAM sequence: TTC
tagtcaaggtgggttaaaat

SEQ ID NO: 360909 - DNA, 20 bp, Artificial Sequence
  Description of Artificial Sequence: Synthetic oligonucleotide
  Target: LAMA2; (+) strand; PAM type: YTN; PAM sequence: CTA
gtcaaggtgggttaaaatca

SEQ ID NO: 360910 - DNA, 20 bp, Artificial Sequence
  Description of Artificial Sequence: Synthetic oligonucleotide
  Target: LAMA2; (+) strand; PAM type: YTN; PAM sequence: TTA
aaatcaagccacttgttttc

SEQ ID NO: 360911 - DNA, 20 bp, Artificial Sequence
  Description of Artificial Sequence: Synthetic oligonucleotide
  Target: LAMA2; (+) strand; PAM type: YTN; PAM sequence: CTT
gttttcaaacatcgatttcg

SEQ ID NO: 360912 - DNA, 20 bp, Artificial Sequence
  Description of Artificial Sequence: Synthetic oligonucleotide
  Target: LAMA2; (+) strand; PAM type: YTN; PAM sequence: TTG
ttttcaaacatcgatttcgg

SEQ ID NO: 360913 - DNA, 20 bp, Artificial Sequence
  Description of Artificial Sequence: Synthetic oligonucleotide
  Target: LAMA2; (+) strand; PAM type: YTN; PAM sequence: TTT
tcaaacatcgatttcgggtt

SEQ ID NO: 360914 - DNA, 20 bp, Artificial Sequence
  Description of Artificial Sequence: Synthetic oligonucleotide
  Target: LAMA2; (+) strand; PAM type: YTN; PAM sequence: TTT
caaacatcgatttcgggttc

SEQ ID NO: 360915 - DNA, 20 bp, Artificial Sequence
  Description of Artificial Sequence: Synthetic oligonucleotide
  Target: LAMA2; (+) strand; PAM type: YTN; PAM sequence: TTC
aaacatcgatttcgggttca

SEQ ID NO: 360916 - DNA, 20 bp, Artificial Sequence
  Description of Artificial Sequence: Synthetic oligonucleotide
  Target: LAMA2; (+) strand; PAM type: YTN; PAM sequence: TTT
cgggttcatgccatcaaatt

SEQ ID NO: 360917 - DNA, 20 bp, Artificial Sequence
  Description of Artificial Sequence: Synthetic oligonucleotide
  Target: LAMA2; (+) strand; PAM type: YTN; PAM sequence: TTC
gggttcatgccatcaaatta

SEQ ID NO: 360918 - DNA, 20 bp, Artificial Sequence
  Description of Artificial Sequence: Synthetic oligonucleotide
  Target: LAMA2; (+) strand; PAM type: YTN; PAM sequence: TTC
atgccatcaaattaaaaaat

SEQ ID NO: 360919 - DNA, 20 bp, Artificial Sequence
  Description of Artificial Sequence: Synthetic oligonucleotide
  Target: LAMA2; (+) strand; PAM type: YTN; PAM sequence: TTA
aaaaattcacttaactgagt

SEQ ID NO: 360920 - DNA, 20 bp, Artificial Sequence
  Description of Artificial Sequence: Synthetic oligonucleotide
  Target: LAMA2; (+) strand; PAM type: YTN; PAM sequence: TTC
acttaactgagtttaatttg

SEQ ID NO: 360921 - DNA, 20 bp, Artificial Sequence
  Description of Artificial Sequence: Synthetic oligonucleotide
  Target: LAMA2; (+) strand; PAM type: YTN; PAM sequence: CTT
aactgagtttaatttgcttt

SEQ ID NO: 360922 - DNA, 20 bp, Artificial Sequence
  Description of Artificial Sequence: Synthetic oligonucleotide
  Target: LAMA2; (+) strand; PAM type: YTN; PAM sequence: TTA
actgagtttaatttgctttc

SEQ ID NO: 360923 - DNA, 20 bp, Artificial Sequence
  Description of Artificial Sequence: Synthetic oligonucleotide
  Target: LAMA2; (+) strand; PAM type: YTN; PAM sequence: CTG
agtttaatttgctttcactt

SEQ ID NO: 360924 - DNA, 20 bp, Artificial Sequence
  Description of Artificial Sequence: Synthetic oligonucleotide
  Target: LAMA2; (+) strand; PAM type: YTN; PAM sequence: TTT
aatttgctttcacttaggaa

SEQ ID NO: 360925 - DNA, 20 bp, Artificial Sequence
  Description of Artificial Sequence: Synthetic oligonucleotide
  Target: LAMA2; (+) strand; PAM type: YTN; PAM sequence: TTA
atttgctttcacttaggaag

SEQ ID NO: 360926 - DNA, 20 bp, Artificial Sequence
  Description of Artificial Sequence: Synthetic oligonucleotide
  Target: LAMA2; (+) strand; PAM type: YTN; PAM sequence: TTT
gctttcacttaggaagcagc

SEQ ID NO: 360927 - DNA, 20 bp, Artificial Sequence
  Description of Artificial Sequence: Synthetic oligonucleotide
  Target: LAMA2; (+) strand; PAM type: YTN; PAM sequence: TTG
ctttcacttaggaagcagct

SEQ ID NO: 360928 - DNA, 20 bp, Artificial Sequence
  Description of Artificial Sequence: Synthetic oligonucleotide
  Target: LAMA2; (+) strand; PAM type: YTN; PAM sequence: CTT
tcacttaggaagcagctgcc

SEQ ID NO: 360929 - DNA, 20 bp, Artificial Sequence
  Description of Artificial Sequence: Synthetic oligonucleotide
  Target: LAMA2; (+) strand; PAM type: YTN; PAM sequence: TTT
cacttaggaagcagctgcct

SEQ ID NO: 360930 - DNA, 20 bp, Artificial Sequence
  Description of Artificial Sequence: Synthetic oligonucleotide
  Target: LAMA2; (+) strand; PAM type: YTN; PAM sequence: TTC
acttaggaagcagctgcctt

SEQ ID NO: 360931 - DNA, 20 bp, Artificial Sequence
  Description of Artificial Sequence: Synthetic oligonucleotide
  Target: LAMA2; (+) strand; PAM type: YTN; PAM sequence: CTT
aggaagcagctgcctttcaa

SEQ ID NO: 360932 - DNA, 20 bp, Artificial Sequence
  Description of Artificial Sequence: Synthetic oligonucleotide
  Target: LAMA2; (+) strand; PAM type: YTN; PAM sequence: TTA
ggaagcagctgcctttcaag

SEQ ID NO: 360933 - DNA, 20 bp, Artificial Sequence
  Description of Artificial Sequence: Synthetic oligonucleotide
  Target: LAMA2; (+) strand; PAM type: YTN; PAM sequence: CTG
cctttcaagataataaaata

SEQ ID NO: 360934 - DNA, 20 bp, Artificial Sequence
  Description of Artificial Sequence: Synthetic oligonucleotide
  Target: LAMA2; (+) strand; PAM type: YTN; PAM sequence: CTT
tcaagataataaaataaaca

SEQ ID NO: 360935 - DNA, 20 bp, Artificial Sequence
  Description of Artificial Sequence: Synthetic oligonucleotide
  Target: LAMA2; (+) strand; PAM type: YTN; PAM sequence: TTT
caagataataaaataaacag

SEQ ID NO: 360936 - DNA, 20 bp, Artificial Sequence
  Description of Artificial Sequence: Synthetic oligonucleotide
  Target: LAMA2; (+) strand; PAM type: YTN; PAM sequence: TTC
aagataataaaataaacaga

SEQ ID NO: 360937 - DNA, 20 bp, Artificial Sequence
  Description of Artificial Sequence: Synthetic oligonucleotide
  Target: LAMA2; (+) strand; PAM type: YTN; PAM sequence: TTT
ggtcagctgtggcttttaat

SEQ ID NO: 360938 - DNA, 20 bp, Artificial Sequence
  Description of Artificial Sequence: Synthetic oligonucleotide
  Target: LAMA2; (+) strand; PAM type: YTN; PAM sequence: TTG
gtcagctgtggcttttaatt

SEQ ID NO: 360939 - DNA, 20 bp, Artificial Sequence
  Description of Artificial Sequence: Synthetic oligonucleotide
  Target: LAMA2; (+) strand; PAM type: YTN; PAM sequence: CTG
tggcttttaatttaaatgtt

SEQ ID NO: 360940 - DNA, 20 bp, Artificial Sequence
  Description of Artificial Sequence: Synthetic oligonucleotide
  Target: LAMA2; (+) strand; PAM type: YTN; PAM sequence: CTT
ttaatttaaatgtttgattt

SEQ ID NO: 360941 - DNA, 20 bp, Artificial Sequence
  Description of Artificial Sequence: Synthetic oligonucleotide
  Target: LAMA2; (+) strand; PAM type: YTN; PAM sequence: TTT
taatttaaatgtttgattta

SEQ ID NO: 360942 - DNA, 20 bp, Artificial Sequence
  Description of Artificial Sequence: Synthetic oligonucleotide
  Target: LAMA2; (+) strand; PAM type: YTN; PAM sequence: TTT
aatttaaatgtttgatttaa

SEQ ID NO: 360943 - DNA, 20 bp, Artificial Sequence
  Description of Artificial Sequence: Synthetic oligonucleotide
  Target: LAMA2; (+) strand; PAM type: YTN; PAM sequence: TTA
atttaaatgtttgatttaat

SEQ ID NO: 360944 - DNA, 20 bp, Artificial Sequence
  Description of Artificial Sequence: Synthetic oligonucleotide
  Target: LAMA2; (+) strand; PAM type: YTN; PAM sequence: TTT
aaatgtttgatttaatgttg

SEQ ID NO: 360945 - DNA, 20 bp, Artificial Sequence
  Description of Artificial Sequence: Synthetic oligonucleotide
  Target: LAMA2; (+) strand; PAM type: YTN; PAM sequence: TTA
aatgtttgatttaatgttgt

SEQ ID NO: 360946 - DNA, 20 bp, Artificial Sequence
  Description of Artificial Sequence: Synthetic oligonucleotide
  Target: LAMA2; (+) strand; PAM type: YTN; PAM sequence: TTT
gatttaatgttgtttagttt

SEQ ID NO: 360947 - DNA, 20 bp, Artificial Sequence
  Description of Artificial Sequence: Synthetic oligonucleotide
  Target: LAMA2; (+) strand; PAM type: YTN; PAM sequence: TTG
atttaatgttgtttagtttg

SEQ ID NO: 360948 - DNA, 20 bp, Artificial Sequence
  Description of Artificial Sequence: Synthetic oligonucleotide
  Target: LAMA2; (+) strand; PAM type: YTN; PAM sequence: TTT
aatgttgtttagtttgctgg

SEQ ID NO: 360949 - DNA, 20 bp, Artificial Sequence
  Description of Artificial Sequence: Synthetic oligonucleotide
  Target: LAMA2; (+) strand; PAM type: YTN; PAM sequence: TTA
atgttgtttagtttgctgga

SEQ ID NO: 360950 - DNA, 20 bp, Artificial Sequence
  Description of Artificial Sequence: Synthetic oligonucleotide
  Target: LAMA2; (+) strand; PAM type: YTN; PAM sequence: TTG
tttagtttgctggattccaa

SEQ ID NO: 360951 - DNA, 20 bp, Artificial Sequence
  Description of Artificial Sequence: Synthetic oligonucleotide
  Target: LAMA2; (+) strand; PAM type: YTN; PAM sequence: TTT
agtttgctggattccaaaat

SEQ ID NO: 360952 - DNA, 20 bp, Artificial Sequence
  Description of Artificial Sequence: Synthetic oligonucleotide
  Target: LAMA2; (+) strand; PAM type: YTN; PAM sequence: TTA
gtttgctggattccaaaata

SEQ ID NO: 360953 - DNA, 20 bp, Artificial Sequence
  Description of Artificial Sequence: Synthetic oligonucleotide
  Target: LAMA2; (+) strand; PAM type: YTN; PAM sequence: TTT
gctggattccaaaatattct

SEQ ID NO: 360954 - DNA, 20 bp, Artificial Sequence
  Description of Artificial Sequence: Synthetic oligonucleotide
  Target: LAMA2; (+) strand; PAM type: YTN; PAM sequence: TTG
ctggattccaaaatattctc

SEQ ID NO: 360955 - DNA, 20 bp, Artificial Sequence
  Description of Artificial Sequence: Synthetic oligonucleotide
  Target: LAMA2; (+) strand; PAM type: YTN; PAM sequence: CTG
gattccaaaatattctctgc

SEQ ID NO: 360956 - DNA, 20 bp, Artificial Sequence
  Description of Artificial Sequence: Synthetic oligonucleotide
  Target: LAMA2; (+) strand; PAM type: YTN; PAM sequence: TTC
caaaatattctctgcaagag

SEQ ID NO: 360957 - DNA, 20 bp, Artificial Sequence
  Description of Artificial Sequence: Synthetic oligonucleotide
  Target: LAMA2; (+) strand; PAM type: YTN; PAM sequence: TTC
tctgcaagagaagcatacac

SEQ ID NO: 360958 - DNA, 20 bp, Artificial Sequence
  Description of Artificial Sequence: Synthetic oligonucleotide
  Target: LAMA2; (+) strand; PAM type: YTN; PAM sequence: CTC
tgcaagagaagcatacacat

SEQ ID NO: 360959 - DNA, 20 bp, Artificial Sequence
  Description of Artificial Sequence: Synthetic oligonucleotide
  Target: LAMA2; (+) strand; PAM type: YTN; PAM sequence: CTG
caagagaagcatacacattc

SEQ ID NO: 360960 - DNA, 20 bp, Artificial Sequence
  Description of Artificial Sequence: Synthetic oligonucleotide
  Target: LAMA2; (+) strand; PAM type: YTN; PAM sequence: TTC
taaagcatttcaaatgttta

SEQ ID NO: 360961 - DNA, 20 bp, Artificial Sequence
  Description of Artificial Sequence: Synthetic oligonucleotide
  Target: LAMA2; (+) strand; PAM type: YTN; PAM sequence: CTA
aagcatttcaaatgtttatt

SEQ ID NO: 360962 - DNA, 20 bp, Artificial Sequence
  Description of Artificial Sequence: Synthetic oligonucleotide
  Target: LAMA2; (+) strand; PAM type: YTN; PAM sequence: TTT
caaatgtttattatgatgtc

SEQ ID NO: 360963 - DNA, 20 bp, Artificial Sequence
  Description of Artificial Sequence: Synthetic oligonucleotide
  Target: LAMA2; (+) strand; PAM type: YTN; PAM sequence: TTC
aaatgtttattatgatgtcc

SEQ ID NO: 360964 - DNA, 20 bp, Artificial Sequence
  Description of Artificial Sequence: Synthetic oligonucleotide
  Target: LAMA2; (+) strand; PAM type: YTN; PAM sequence: TTT
attatgatgtcctagaggtg

SEQ ID NO: 360965 - DNA, 20 bp, Artificial Sequence
  Description of Artificial Sequence: Synthetic oligonucleotide
  Target: LAMA2; (+) strand; PAM type: YTN; PAM sequence: TTA
ttatgatgtcctagaggtgg

SEQ ID NO: 360966 - DNA, 20 bp, Artificial Sequence
  Description of Artificial Sequence: Synthetic oligonucleotide
  Target: LAMA2; (+) strand; PAM type: YTN; PAM sequence: TTA
tgatgtcctagaggtggctg

SEQ ID NO: 360967 - DNA, 20 bp, Artificial Sequence
  Description of Artificial Sequence: Synthetic oligonucleotide
  Target: LAMA2; (+) strand; PAM type: YTN; PAM sequence: CTA
gaggtggctgtctttctgtt

SEQ ID NO: 360968 - DNA, 20 bp, Artificial Sequence
  Description of Artificial Sequence: Synthetic oligonucleotide
  Target: LAMA2; (+) strand; PAM type: YTN; PAM sequence: CTG
tctttctgttgctgtgcata

SEQ ID NO: 360969 - DNA, 20 bp, Artificial Sequence
  Description of Artificial Sequence: Synthetic oligonucleotide
  Target: LAMA2; (+) strand; PAM type: YTN; PAM sequence: CTT
tctgttgctgtgcataccct

SEQ ID NO: 360970 - DNA, 20 bp, Artificial Sequence
  Description of Artificial Sequence: Synthetic oligonucleotide
  Target: LAMA2; (+) strand; PAM type: YTN; PAM sequence: TTT
ctgttgctgtgcataccctg

SEQ ID NO: 360971 - DNA, 20 bp, Artificial Sequence
  Description of Artificial Sequence: Synthetic oligonucleotide
  Target: LAMA2; (+) strand; PAM type: YTN; PAM sequence: TTC
tgttgctgtgcataccctga

SEQ ID NO: 360972 - DNA, 20 bp, Artificial Sequence
  Description of Artificial Sequence: Synthetic oligonucleotide
  Target: LAMA2; (+) strand; PAM type: YTN; PAM sequence: CTG
ttgctgtgcataccctgagc

SEQ ID NO: 360973 - DNA, 20 bp, Artificial Sequence
  Description of Artificial Sequence: Synthetic oligonucleotide
  Target: LAMA2; (+) strand; PAM type: YTN; PAM sequence: TTG
ctgtgcataccctgagcaga

SEQ ID NO: 360974 - DNA, 20 bp, Artificial Sequence
  Description of Artificial Sequence: Synthetic oligonucleotide
  Target: LAMA2; (+) strand; PAM type: YTN; PAM sequence: CTG
tgcataccctgagcagactt

SEQ ID NO: 360975 - DNA, 20 bp, Artificial Sequence
  Description of Artificial Sequence: Synthetic oligonucleotide
  Target: LAMA2; (+) strand; PAM type: YTN; PAM sequence: CTG
agcagacttgacattgcttt

SEQ ID NO: 360976 - DNA, 20 bp, Artificial Sequence
  Description of Artificial Sequence: Synthetic oligonucleotide
  Target: LAMA2; (+) strand; PAM type: YTN; PAM sequence: CTT
gacattgctttggaagcaca

SEQ ID NO: 360977 - DNA, 20 bp, Artificial Sequence
  Description of Artificial Sequence: Synthetic oligonucleotide
  Target: LAMA2; (+) strand; PAM type: YTN; PAM sequence: TTG
acattgctttggaagcacat

SEQ ID NO: 360978 - DNA, 20 bp, Artificial Sequence
  Description of Artificial Sequence: Synthetic oligonucleotide
  Target: LAMA2; (+) strand; PAM type: YTN; PAM sequence: TTG
ctttggaagcacatattttc

SEQ ID NO: 360979 - DNA, 20 bp, Artificial Sequence
  Description of Artificial Sequence: Synthetic oligonucleotide
  Target: LAMA2; (+) strand; PAM type: YTN; PAM sequence: CTT
tggaagcacatattttctga

SEQ ID NO: 360980 - DNA, 20 bp, Artificial Sequence
  Description of Artificial Sequence: Synthetic oligonucleotide
  Target: LAMA2; (+) strand; PAM type: YTN; PAM sequence: TTT
ggaagcacatattttctgat

SEQ ID NO: 360981 - DNA, 20 bp, Artificial Sequence
  Description of Artificial Sequence: Synthetic oligonucleotide
  Target: LAMA2; (+) strand; PAM type: YTN; PAM sequence: TTG
gaagcacatattttctgata

SEQ ID NO: 360982 - DNA, 20 bp, Artificial Sequence
  Description of Artificial Sequence: Synthetic oligonucleotide
  Target: LAMA2; (+) strand; PAM type: YTN; PAM sequence: TTT
tctgatagacatattactct

SEQ ID NO: 360983 - DNA, 20 bp, Artificial Sequence
  Description of Artificial Sequence: Synthetic oligonucleotide
  Target: LAMA2; (+) strand; PAM type: YTN; PAM sequence: TTT
ctgatagacatattactctc

SEQ ID NO: 360984 - DNA, 20 bp, Artificial Sequence
  Description of Artificial Sequence: Synthetic oligonucleotide
  Target: LAMA2; (+) strand; PAM type: YTN; PAM sequence: TTC
tgatagacatattactctca

SEQ ID NO: 360985 - DNA, 20 bp, Artificial Sequence
  Description of Artificial Sequence: Synthetic oligonucleotide
  Target: LAMA2; (+) strand; PAM type: YTN; PAM sequence: CTG
atagacatattactctcata

SEQ ID NO: 360986 - DNA, 20 bp, Artificial Sequence
  Description of Artificial Sequence: Synthetic oligonucleotide
  Target: LAMA2; (+) strand; PAM type: YTN; PAM sequence: TTA
ctctcataatctaaaatttt

SEQ ID NO: 360987 - DNA, 20 bp, Artificial Sequence
  Description of Artificial Sequence: Synthetic oligonucleotide
  Target: LAMA2; (+) strand; PAM type: YTN; PAM sequence: CTC
tcataatctaaaatttttca

SEQ ID NO: 360988 - DNA, 20 bp, Artificial Sequence
  Description of Artificial Sequence: Synthetic oligonucleotide
  Target: LAMA2; (+) strand; PAM type: YTN; PAM sequence: CTC
ataatctaaaatttttcaga

SEQ ID NO: 360989 - DNA, 20 bp, Artificial Sequence
  Description of Artificial Sequence: Synthetic oligonucleotide
  Target: LAMA2; (+) strand; PAM type: YTN; PAM sequence: CTA
aaatttttcagaagtgacaa

SEQ ID NO: 360990 - DNA, 20 bp, Artificial Sequence
  Description of Artificial Sequence: Synthetic oligonucleotide
  Target: LAMA2; (+) strand; PAM type: YTN; PAM sequence: TTT
ttcagaagtgacaaaagtgg

SEQ ID NO: 360991 - DNA, 20 bp, Artificial Sequence
  Description of Artificial Sequence: Synthetic oligonucleotide
  Target: LAMA2; (+) strand; PAM type: YTN; PAM sequence: TTT
tcagaagtgacaaaagtggg

SEQ ID NO: 360992 - DNA, 20 bp, Artificial Sequence
  Description of Artificial Sequence: Synthetic oligonucleotide
  Target: LAMA2; (+) strand; PAM type: YTN; PAM sequence: TTT
cagaagtgacaaaagtgggg

SEQ ID NO: 360993 - DNA, 20 bp, Artificial Sequence
  Description of Artificial Sequence: Synthetic oligonucleotide
  Target: LAMA2; (+) strand; PAM type: YTN; PAM sequence: TTC
agaagtgacaaaagtggggt

SEQ ID NO: 360994 - DNA, 20 bp, Artificial Sequence
  Description of Artificial Sequence: Synthetic oligonucleotide
  Target: LAMA2; (+) strand; PAM type: YTN; PAM sequence: TTG
accattttcttcttcgctgt

SEQ ID NO: 360995 - DNA, 20 bp, Artificial Sequence
  Description of Artificial Sequence: Synthetic oligonucleotide
  Target: LAMA2; (+) strand; PAM type: YTN; PAM sequence: TTT
tcttcttcgctgtctccatg

SEQ ID NO: 360996 - DNA, 20 bp, Artificial Sequence
  Description of Artificial Sequence: Synthetic oligonucleotide
  Target: LAMA2; (+) strand; PAM type: YTN; PAM sequence: TTT
cttcttcgctgtctccatga

SEQ ID NO: 360997 - DNA, 20 bp, Artificial Sequence
  Description of Artificial Sequence: Synthetic oligonucleotide
  Target: LAMA2; (+) strand; PAM type: YTN; PAM sequence: TTC
ttcttcgctgtctccatgat

SEQ ID NO: 360998 - DNA, 20 bp, Artificial Sequence
  Description of Artificial Sequence: Synthetic oligonucleotide
  Target: LAMA2; (+) strand; PAM type: YTN; PAM sequence: CTT
cttcgctgtctccatgattt

SEQ ID NO: 360999 - DNA, 20 bp, Artificial Sequence
  Description of Artificial Sequence: Synthetic oligonucleotide
  Target: LAMA2; (+) strand; PAM type: YTN; PAM sequence: TTC
ttcgctgtctccatgatttt

SEQ ID NO: 361000 - DNA, 20 bp, Artificial Sequence
  Description of Artificial Sequence: Synthetic oligonucleotide
  Target: LAMA2; (+) strand; PAM type: YTN; PAM sequence: CTT
cgctgtctccatgattttgc

SEQ ID NO: 361001 - DNA, 20 bp, Artificial Sequence
  Description of Artificial Sequence: Synthetic oligonucleotide
  Target: LAMA2; (+) strand; PAM type: YTN; PAM sequence: TTC
gctgtctccatgattttgct

SEQ ID NO: 361002 - DNA, 20 bp, Artificial Sequence
  Description of Artificial Sequence: Synthetic oligonucleotide
  Target: LAMA2; (+) strand; PAM type: YTN; PAM sequence: CTG
tctccatgattttgcttttt

SEQ ID NO: 361003 - DNA, 20 bp, Artificial Sequence
  Description of Artificial Sequence: Synthetic oligonucleotide
  Target: LAMA2; (+) strand; PAM type: YTN; PAM sequence: CTC
catgattttgctttttccaa

SEQ ID NO: 361004 - DNA, 20 bp, Artificial Sequence
  Description of Artificial Sequence: Synthetic oligonucleotide
  Target: LAMA2; (+) strand; PAM type: YTN; PAM sequence: TTT
tgctttttccaagatgtcat

SEQ ID NO: 361005 - DNA, 20 bp, Artificial Sequence
  Description of Artificial Sequence: Synthetic oligonucleotide
  Target: LAMA2; (+) strand; PAM type: YTN; PAM sequence: TTT
gctttttccaagatgtcatg

SEQ ID NO: 361006 - DNA, 20 bp, Artificial Sequence
  Description of Artificial Sequence: Synthetic oligonucleotide
  Target: LAMA2; (+) strand; PAM type: YTN; PAM sequence: TTG
ctttttccaagatgtcatgt

SEQ ID NO: 361007 - DNA, 20 bp, Artificial Sequence
  Description of Artificial Sequence: Synthetic oligonucleotide
  Target: LAMA2; (+) strand; PAM type: YTN; PAM sequence: CTT
tttccaagatgtcatgtagt

SEQ ID NO: 361008 - DNA, 20 bp, Artificial Sequence
  Description of Artificial Sequence: Synthetic oligonucleotide
  Target: LAMA2; (+) strand; PAM type: YTN; PAM sequence: TTT
ttccaagatgtcatgtagtt

SEQ ID NO: 361009 - DNA, 20 bp, Artificial Sequence
  Description of Artificial Sequence: Synthetic oligonucleotide
  Target: LAMA2; (+) strand; PAM type: YTN; PAM sequence: TTT
tccaagatgtcatgtagtta

SEQ ID NO: 361010 - DNA, 20 bp, Artificial Sequence
  Description of Artificial Sequence: Synthetic oligonucleotide
  Target: LAMA2; (+) strand; PAM type: YTN; PAM sequence: TTT
ccaagatgtcatgtagttag

SEQ ID NO: 361011 - DNA, 20 bp, Artificial Sequence
  Description of Artificial Sequence: Synthetic oligonucleotide
  Target: LAMA2; (+) strand; PAM type: YTN; PAM sequence: TTC
caagatgtcatgtagttaga

SEQ ID NO: 361012 - DNA, 20 bp, Artificial Sequence
  Description of Artificial Sequence: Synthetic oligonucleotide
  Target: LAMA2; (+) strand; PAM type: YTN; PAM sequence: TTA
gaatcatacaatgtgttgtc

SEQ ID NO: 361013 - DNA, 20 bp, Artificial Sequence
  Description of Artificial Sequence: Synthetic oligonucleotide
  Target: LAMA2; (+) strand; PAM type: YTN; PAM sequence: TTG
tcttttcaggttggcttttt

SEQ ID NO: 361014 - DNA, 20 bp, Artificial Sequence
  Description of Artificial Sequence: Synthetic oligonucleotide
  Target: LAMA2; (+) strand; PAM type: YTN; PAM sequence: CTT
ttcaggttggcttttttcac

SEQ ID NO: 361015 - DNA, 20 bp, Artificial Sequence
  Description of Artificial Sequence: Synthetic oligonucleotide
  Target: LAMA2; (+) strand; PAM type: YTN; PAM sequence: TTT
tcaggttggcttttttcact

SEQ ID NO: 361016 - DNA, 20 bp, Artificial Sequence
  Description of Artificial Sequence: Synthetic oligonucleotide
  Target: LAMA2; (+) strand; PAM type: YTN; PAM sequence: TTT
caggttggcttttttcactt

SEQ ID NO: 361017 - DNA, 20 bp, Artificial Sequence
  Description of Artificial Sequence: Synthetic oligonucleotide
  Target: LAMA2; (+) strand; PAM type: YTN; PAM sequence: TTC
aggttggcttttttcactta

SEQ ID NO: 361018 - DNA, 20 bp, Artificial Sequence
  Description of Artificial Sequence: Synthetic oligonucleotide
  Target: LAMA2; (+) strand; PAM type: YTN; PAM sequence: TTG
gcttttttcacttagcaata

SEQ ID NO: 361019 - DNA, 20 bp, Artificial Sequence
  Description of Artificial Sequence: Synthetic oligonucleotide
  Target: LAMA2; (+) strand; PAM type: YTN; PAM sequence: CTT
ttttcacttagcaatatgcc

SEQ ID NO: 361020 - DNA, 20 bp, Artificial Sequence
  Description of Artificial Sequence: Synthetic oligonucleotide
  Target: LAMA2; (+) strand; PAM type: YTN; PAM sequence: TTT
tttcacttagcaatatgcct

SEQ ID NO: 361021 - DNA, 20 bp, Artificial Sequence
  Description of Artificial Sequence: Synthetic oligonucleotide
  Target: LAMA2; (+) strand; PAM type: YTN; PAM sequence: TTT
ttcacttagcaatatgcctg

SEQ ID NO: 361022 - DNA, 20 bp, Artificial Sequence
  Description of Artificial Sequence: Synthetic oligonucleotide
  Target: LAMA2; (+) strand; PAM type: YTN; PAM sequence: TTT
tcacttagcaatatgcctgt

SEQ ID NO: 361023 - DNA, 20 bp, Artificial Sequence
  Description of Artificial Sequence: Synthetic oligonucleotide
  Target: LAMA2; (+) strand; PAM type: YTN; PAM sequence: TTT
cacttagcaatatgcctgta

SEQ ID NO: 361024 - DNA, 20 bp, Artificial Sequence
  Description of Artificial Sequence: Synthetic oligonucleotide
  Target: LAMA2; (+) strand; PAM type: YTN; PAM sequence: TTC
acttagcaatatgcctgtaa

SEQ ID NO: 361025 - DNA, 20 bp, Artificial Sequence
  Description of Artificial Sequence: Synthetic oligonucleotide
  Target: LAMA2; (+) strand; PAM type: YTN; PAM sequence: CTT
agcaatatgcctgtaaggtt

SEQ ID NO: 361026 - DNA, 20 bp, Artificial Sequence
  Description of Artificial Sequence: Synthetic oligonucleotide
  Target: LAMA2; (+) strand; PAM type: YTN; PAM sequence: TTA
gcaatatgcctgtaaggttc

SEQ ID NO: 361027 - DNA, 20 bp, Artificial Sequence
  Description of Artificial Sequence: Synthetic oligonucleotide
  Target: LAMA2; (+) strand; PAM type: YTN; PAM sequence: CTG
taaggttccgccatgtcttt

SEQ ID NO: 361028 - DNA, 20 bp, Artificial Sequence
  Description of Artificial Sequence: Synthetic oligonucleotide
  Target: LAMA2; (+) strand; PAM type: YTN; PAM sequence: TTC
cgccatgtcttttcttgcct

SEQ ID NO: 361029 - DNA, 20 bp, Artificial Sequence
  Description of Artificial Sequence: Synthetic oligonucleotide
  Target: LAMA2; (+) strand; PAM type: YTN; PAM sequence: CTT
ttcttgccttgataattcat

SEQ ID NO: 361030 - DNA, 20 bp, Artificial Sequence
  Description of Artificial Sequence: Synthetic oligonucleotide
  Target: LAMA2; (+) strand; PAM type: YTN; PAM sequence: TTT
tcttgccttgataattcatt

SEQ ID NO: 361031 - DNA, 20 bp, Artificial Sequence
  Description of Artificial Sequence: Synthetic oligonucleotide
  Target: LAMA2; (+) strand; PAM type: YTN; PAM sequence: TTT
cttgccttgataattcattt

SEQ ID NO: 361032 - DNA, 20 bp, Artificial Sequence
  Description of Artificial Sequence: Synthetic oligonucleotide
  Target: LAMA2; (+) strand; PAM type: YTN; PAM sequence: TTC
ttgccttgataattcatttc

SEQ ID NO: 361033 - DNA, 20 bp, Artificial Sequence
  Description of Artificial Sequence: Synthetic oligonucleotide
  Target: LAMA2; (+) strand; PAM type: YTN; PAM sequence: CTT
gccttgataattcatttctt

SEQ ID NO: 361034 - DNA, 20 bp, Artificial Sequence
  Description of Artificial Sequence: Synthetic oligonucleotide
  Target: LAMA2; (+) strand; PAM type: YTN; PAM sequence: TTG
ccttgataattcatttcttt

SEQ ID NO: 361035 - DNA, 20 bp, Artificial Sequence
  Description of Artificial Sequence: Synthetic oligonucleotide
  Target: LAMA2; (+) strand; PAM type: YTN; PAM sequence: CTT
gataattcatttctttttag

SEQ ID NO: 361036 - DNA, 20 bp, Artificial Sequence
  Description of Artificial Sequence: Synthetic oligonucleotide
  Target: LAMA2; (+) strand; PAM type: YTN; PAM sequence: TTG
ataattcatttctttttagc

SEQ ID NO: 361037 - DNA, 20 bp, Artificial Sequence
  Description of Artificial Sequence: Synthetic oligonucleotide
  Target: LAMA2; (+) strand; PAM type: YTN; PAM sequence: TTC
atttctttttagctctgaat

SEQ ID NO: 361038 - DNA, 20 bp, Artificial Sequence
  Description of Artificial Sequence: Synthetic oligonucleotide
  Target: LAMA2; (+) strand; PAM type: YTN; PAM sequence: TTT
ctttttagctctgaatacta

SEQ ID NO: 361039 - DNA, 20 bp, Artificial Sequence
  Description of Artificial Sequence: Synthetic oligonucleotide
  Target: LAMA2; (+) strand; PAM type: YTN; PAM sequence: TTC
tttttagctctgaatactat

SEQ ID NO: 361040 - DNA, 20 bp, Artificial Sequence
  Description of Artificial Sequence: Synthetic oligonucleotide
  Target: LAMA2; (+) strand; PAM type: YTN; PAM sequence: CTT
tttagctctgaatactattt

SEQ ID NO: 361041 - DNA, 20 bp, Artificial Sequence
  Description of Artificial Sequence: Synthetic oligonucleotide
  Target: LAMA2; (+) strand; PAM type: YTN; PAM sequence: TTT
ttagctctgaatactatttt

SEQ ID NO: 361042 - DNA, 20 bp, Artificial Sequence
  Description of Artificial Sequence: Synthetic oligonucleotide
  Target: LAMA2; (+) strand; PAM type: YTN; PAM sequence: TTT
tagctctgaatactattttg

SEQ ID NO: 361043 - DNA, 20 bp, Artificial Sequence
  Description of Artificial Sequence: Synthetic oligonucleotide
  Target: LAMA2; (+) strand; PAM type: YTN; PAM sequence: TTT
agctctgaatactattttgt

SEQ ID NO: 361044 - DNA, 20 bp, Artificial Sequence
  Description of Artificial Sequence: Synthetic oligonucleotide
  Target: LAMA2; (+) strand; PAM type: YTN; PAM sequence: TTA
gctctgaatactattttgtt

SEQ ID NO: 361045 - DNA, 20 bp, Artificial Sequence
  Description of Artificial Sequence: Synthetic oligonucleotide
  Target: LAMA2; (+) strand; PAM type: YTN; PAM sequence: CTC
tgaatactattttgttgtct

SEQ ID NO: 361046 - DNA, 20 bp, Artificial Sequence
  Description of Artificial Sequence: Synthetic oligonucleotide
  Target: LAMA2; (+) strand; PAM type: YTN; PAM sequence: CTG
aatactattttgttgtctgg

SEQ ID NO: 361047 - DNA, 20 bp, Artificial Sequence
  Description of Artificial Sequence: Synthetic oligonucleotide
  Target: LAMA2; (+) strand; PAM type: YTN; PAM sequence: CTA
ttttgttgtctggatataac

SEQ ID NO: 361048 - DNA, 20 bp, Artificial Sequence
  Description of Artificial Sequence: Synthetic oligonucleotide
  Target: LAMA2; (+) strand; PAM type: YTN; PAM sequence: TTT
tgttgtctggatataaccac

SEQ ID NO: 361049 - DNA, 20 bp, Artificial Sequence
  Description of Artificial Sequence: Synthetic oligonucleotide
  Target: LAMA2; (+) strand; PAM type: YTN; PAM sequence: TTT
gttgtctggatataaccaca

SEQ ID NO: 361050 - DNA, 20 bp, Artificial Sequence
  Description of Artificial Sequence: Synthetic oligonucleotide
  Target: LAMA2; (+) strand; PAM type: YTN; PAM sequence: TTG
ttgtctggatataaccacag

SEQ ID NO: 361051 - DNA, 20 bp, Artificial Sequence
  Description of Artificial Sequence: Synthetic oligonucleotide
  Target: LAMA2; (+) strand; PAM type: YTN; PAM sequence: TTG
tctggatataaccacagttg

SEQ ID NO: 361052 - DNA, 20 bp, Artificial Sequence
  Description of Artificial Sequence: Synthetic oligonucleotide
  Target: LAMA2; (+) strand; PAM type: YTN; PAM sequence: CTG
gatataaccacagttgaatt

SEQ ID NO: 361053 - DNA, 20 bp, Artificial Sequence
  Description of Artificial Sequence: Synthetic oligonucleotide
  Target: LAMA2; (+) strand; PAM type: YTN; PAM sequence: TTG
aattatccatttacctcctg

SEQ ID NO: 361054 - DNA, 20 bp, Artificial Sequence
  Description of Artificial Sequence: Synthetic oligonucleotide
  Target: LAMA2; (+) strand; PAM type: YTN; PAM sequence: TTA
tccatttacctcctgaaaaa

SEQ ID NO: 361055 - DNA, 20 bp, Artificial Sequence
  Description of Artificial Sequence: Synthetic oligonucleotide
  Target: LAMA2; (+) strand; PAM type: YTN; PAM sequence: TTT
acctcctgaaaaacatcctg

SEQ ID NO: 361056 - DNA, 20 bp, Artificial Sequence
  Description of Artificial Sequence: Synthetic oligonucleotide
  Target: LAMA2; (+) strand; PAM type: YTN; PAM sequence: TTA
cctcctgaaaaacatcctgc

SEQ ID NO: 361057 - DNA, 20 bp, Artificial Sequence
  Description of Artificial Sequence: Synthetic oligonucleotide
  Target: LAMA2; (+) strand; PAM type: YTN; PAM sequence: CTC
ctgaaaaacatcctgcttgc

SEQ ID NO: 361058 - DNA, 20 bp, Artificial Sequence
  Description of Artificial Sequence: Synthetic oligonucleotide
  Target: LAMA2; (+) strand; PAM type: YTN; PAM sequence: CTG
aaaaacatcctgcttgctac

SEQ ID NO: 361059 - DNA, 20 bp, Artificial Sequence
  Description of Artificial Sequence: Synthetic oligonucleotide
  Target: LAMA2; (+) strand; PAM type: YTN; PAM sequence: CTG
cttgctaccatgttctggca

SEQ ID NO: 361060 - DNA, 20 bp, Artificial Sequence
  Description of Artificial Sequence: Synthetic oligonucleotide
  Target: LAMA2; (+) strand; PAM type: YTN; PAM sequence: CTT
gctaccatgttctggcaata

SEQ ID NO: 361061 - DNA, 20 bp, Artificial Sequence
  Description of Artificial Sequence: Synthetic oligonucleotide
  Target: LAMA2; (+) strand; PAM type: YTN; PAM sequence: TTG
ctaccatgttctggcaatat

SEQ ID NO: 361062 - DNA, 20 bp, Artificial Sequence
  Description of Artificial Sequence: Synthetic oligonucleotide
  Target: LAMA2; (+) strand; PAM type: YTN; PAM sequence: CTA
ccatgttctggcaatatgaa

SEQ ID NO: 361063 - DNA, 20 bp, Artificial Sequence
  Description of Artificial Sequence: Synthetic oligonucleotide
  Target: LAMA2; (+) strand; PAM type: YTN; PAM sequence: TTC
tggcaatatgaatcaagctg

SEQ ID NO: 361064 - DNA, 20 bp, Artificial Sequence
  Description of Artificial Sequence: Synthetic oligonucleotide
  Target: LAMA2; (+) strand; PAM type: YTN; PAM sequence: CTG
gcaatatgaatcaagctgct

SEQ ID NO: 361065 - DNA, 20 bp, Artificial Sequence
  Description of Artificial Sequence: Synthetic oligonucleotide
  Target: LAMA2; (+) strand; PAM type: YTN; PAM sequence: CTG
ctataaacacttatgtgata

SEQ ID NO: 361066 - DNA, 20 bp, Artificial Sequence
  Description of Artificial Sequence: Synthetic oligonucleotide
  Target: LAMA2; (+) strand; PAM type: YTN; PAM sequence: CTA
taaacacttatgtgataagt

SEQ ID NO: 361067 - DNA, 20 bp, Artificial Sequence
  Description of Artificial Sequence: Synthetic oligonucleotide
  Target: LAMA2; (+) strand; PAM type: YTN; PAM sequence: CTT
atgtgataagtcttgtgtgg

SEQ ID NO: 361068 - DNA, 20 bp, Artificial Sequence
  Description of Artificial Sequence: Synthetic oligonucleotide
  Target: LAMA2; (+) strand; PAM type: YTN; PAM sequence: TTA
tgtgataagtcttgtgtgga

SEQ ID NO: 361069 - DNA, 20 bp, Artificial Sequence
  Description of Artificial Sequence: Synthetic oligonucleotide
  Target: LAMA2; (+) strand; PAM type: YTN; PAM sequence: CTT
gtgtggatataaatattcaa

SEQ ID NO: 361070 - DNA, 20 bp, Artificial Sequence
  Description of Artificial Sequence: Synthetic oligonucleotide
  Target: LAMA2; (+) strand; PAM type: YTN; PAM sequence: TTG
tgtggatataaatattcaac

SEQ ID NO: 361071 - DNA, 20 bp, Artificial Sequence
  Description of Artificial Sequence: Synthetic oligonucleotide
  Target: LAMA2; (+) strand; PAM type: YTN; PAM sequence: TTC
aacttatttgggtaaatacc

SEQ ID NO: 361072 - DNA, 20 bp, Artificial Sequence
  Description of Artificial Sequence: Synthetic oligonucleotide
  Target: LAMA2; (+) strand; PAM type: YTN; PAM sequence: CTT
atttgggtaaataccaaaga

SEQ ID NO: 361073 - DNA, 20 bp, Artificial Sequence
  Description of Artificial Sequence: Synthetic oligonucleotide
  Target: LAMA2; (+) strand; PAM type: YTN; PAM sequence: TTA
tttgggtaaataccaaagag

SEQ ID NO: 361074 - DNA, 20 bp, Artificial Sequence
  Description of Artificial Sequence: Synthetic oligonucleotide
  Target: LAMA2; (+) strand; PAM type: YTN; PAM sequence: TTT
gggtaaataccaaagagtgc

SEQ ID NO: 361075 - DNA, 20 bp, Artificial Sequence
  Description of Artificial Sequence: Synthetic oligonucleotide
  Target: LAMA2; (+) strand; PAM type: YTN; PAM sequence: TTG
ggtaaataccaaagagtgca

SEQ ID NO: 361076 - DNA, 20 bp, Artificial Sequence
  Description of Artificial Sequence: Synthetic oligonucleotide
  Target: LAMA2; (+) strand; PAM type: YTN; PAM sequence: TTA
ctggatcatatggtcagagc

SEQ ID NO: 361077 - DNA, 20 bp, Artificial Sequence
  Description of Artificial Sequence: Synthetic oligonucleotide
  Target: LAMA2; (+) strand; PAM type: YTN; PAM sequence: CTG
gatcatatggtcagagcatg

SEQ ID NO: 361078 - DNA, 20 bp, Artificial Sequence
  Description of Artificial Sequence: Synthetic oligonucleotide
  Target: LAMA2; (+) strand; PAM type: YTN; PAM sequence: CTA
gttttgtaataaactgccaa

SEQ ID NO: 361079 - DNA, 20 bp, Artificial Sequence
  Description of Artificial Sequence: Synthetic oligonucleotide
  Target: LAMA2; (+) strand; PAM type: YTN; PAM sequence: TTT
tgtaataaactgccaaacta

SEQ ID NO: 361080 - DNA, 20 bp, Artificial Sequence
  Description of Artificial Sequence: Synthetic oligonucleotide
  Target: LAMA2; (+) strand; PAM type: YTN; PAM sequence: TTT
gtaataaactgccaaactat

SEQ ID NO: 361081 - DNA, 20 bp, Artificial Sequence
  Description of Artificial Sequence: Synthetic oligonucleotide
  Target: LAMA2; (+) strand; PAM type: YTN; PAM sequence: TTG
taataaactgccaaactatc

SEQ ID NO: 361082 - DNA, 20 bp, Artificial Sequence
  Description of Artificial Sequence: Synthetic oligonucleotide
  Target: LAMA2; (+) strand; PAM type: YTN; PAM sequence: CTG
ccaaactatcttccaatatg

SEQ ID NO: 361083 - DNA, 20 bp, Artificial Sequence
  Description of Artificial Sequence: Synthetic oligonucleotide
  Target: LAMA2; (+) strand; PAM type: YTN; PAM sequence: CTA
tcttccaatatggttgtata

SEQ ID NO: 361084 - DNA, 20 bp, Artificial Sequence
  Description of Artificial Sequence: Synthetic oligonucleotide
  Target: LAMA2; (+) strand; PAM type: YTN; PAM sequence: CTT
ccaatatggttgtataattt

SEQ ID NO: 361085 - DNA, 20 bp, Artificial Sequence
  Description of Artificial Sequence: Synthetic oligonucleotide
  Target: LAMA2; (+) strand; PAM type: YTN; PAM sequence: TTC
caatatggttgtataatttt

SEQ ID NO: 361086 - DNA, 20 bp, Artificial Sequence
  Description of Artificial Sequence: Synthetic oligonucleotide
  Target: LAMA2; (+) strand; PAM type: YTN; PAM sequence: TTG
tataattttgcattctcacc

SEQ ID NO: 361087 - DNA, 20 bp, Artificial Sequence
  Description of Artificial Sequence: Synthetic oligonucleotide
  Target: LAMA2; (+) strand; PAM type: YTN; PAM sequence: TTT
tgcattctcaccagcaatga

SEQ ID NO: 361088 - DNA, 20 bp, Artificial Sequence
  Description of Artificial Sequence: Synthetic oligonucleotide
  Target: LAMA2; (+) strand; PAM type: YTN; PAM sequence: TTT
gcattctcaccagcaatgaa

SEQ ID NO: 361089 - DNA, 20 bp, Artificial Sequence
  Description of Artificial Sequence: Synthetic oligonucleotide
  Target: LAMA2; (+) strand; PAM type: YTN; PAM sequence: TTG
cattctcaccagcaatgaac

SEQ ID NO: 361090 - DNA, 20 bp, Artificial Sequence
  Description of Artificial Sequence: Synthetic oligonucleotide
  Target: LAMA2; (+) strand; PAM type: YTN; PAM sequence: TTC
tcaccagcaatgaacaagag

SEQ ID NO: 361091 - DNA, 20 bp, Artificial Sequence
  Description of Artificial Sequence: Synthetic oligonucleotide
  Target: LAMA2; (+) strand; PAM type: YTN; PAM sequence: CTC
accagcaatgaacaagagtt

SEQ ID NO: 361092 - DNA, 20 bp, Artificial Sequence
  Description of Artificial Sequence: Synthetic oligonucleotide
  Target: LAMA2; (+) strand; PAM type: YTN; PAM sequence: TTC
ctgtttctccacattctcac

SEQ ID NO: 361093 - DNA, 20 bp, Artificial Sequence
  Description of Artificial Sequence: Synthetic oligonucleotide
  Target: LAMA2; (+) strand; PAM type: YTN; PAM sequence: CTG
tttctccacattctcaccag

SEQ ID NO: 361094 - DNA, 20 bp, Artificial Sequence
  Description of Artificial Sequence: Synthetic oligonucleotide
  Target: LAMA2; (+) strand; PAM type: YTN; PAM sequence: TTT
ctccacattctcaccagcat

SEQ ID NO: 361095 - DNA, 20 bp, Artificial Sequence
  Description of Artificial Sequence: Synthetic oligonucleotide
  Target: LAMA2; (+) strand; PAM type: YTN; PAM sequence: TTC
tccacattctcaccagcatt

SEQ ID NO: 361096 - DNA, 20 bp, Artificial Sequence
  Description of Artificial Sequence: Synthetic oligonucleotide
  Target: LAMA2; (+) strand; PAM type: YTN; PAM sequence: CTC
cacattctcaccagcatttc

SEQ ID NO: 361097 - DNA, 20 bp, Artificial Sequence
  Description of Artificial Sequence: Synthetic oligonucleotide
  Target: LAMA2; (+) strand; PAM type: YTN; PAM sequence: TTC
tcaccagcatttcatattgt

SEQ ID NO: 361098 - DNA, 20 bp, Artificial Sequence
  Description of Artificial Sequence: Synthetic oligonucleotide
  Target: LAMA2; (+) strand; PAM type: YTN; PAM sequence: CTC
accagcatttcatattgtca

SEQ ID NO: 361099 - DNA, 20 bp, Artificial Sequence
  Description of Artificial Sequence: Synthetic oligonucleotide
  Target: LAMA2; (+) strand; PAM type: YTN; PAM sequence: TTT
catattgtcaatgttttaga

SEQ ID NO: 361100 - DNA, 20 bp, Artificial Sequence
  Description of Artificial Sequence: Synthetic oligonucleotide
  Target: LAMA2; (+) strand; PAM type: YTN; PAM sequence: TTC
atattgtcaatgttttagac

SEQ ID NO: 361101 - DNA, 20 bp, Artificial Sequence
  Description of Artificial Sequence: Synthetic oligonucleotide
  Target: LAMA2; (+) strand; PAM type: YTN; PAM sequence: TTG
tcaatgttttagacatcagc

SEQ ID NO: 361102 - DNA, 20 bp, Artificial Sequence
  Description of Artificial Sequence: Synthetic oligonucleotide
  Target: LAMA2; (+) strand; PAM type: YTN; PAM sequence: TTT
tagacatcagctattctaat

SEQ ID NO: 361103 - DNA, 20 bp, Artificial Sequence
  Description of Artificial Sequence: Synthetic oligonucleotide
  Target: LAMA2; (+) strand; PAM type: YTN; PAM sequence: TTT
agacatcagctattctaata

SEQ ID NO: 361104 - DNA, 20 bp, Artificial Sequence
  Description of Artificial Sequence: Synthetic oligonucleotide
  Target: LAMA2; (+) strand; PAM type: YTN; PAM sequence: TTA
gacatcagctattctaatag

SEQ ID NO: 361105 - DNA, 20 bp, Artificial Sequence
  Description of Artificial Sequence: Synthetic oligonucleotide
  Target: LAMA2; (+) strand; PAM type: YTN; PAM sequence: CTA
ttctaatagatatgtagtgg

SEQ ID NO: 361106 - DNA, 20 bp, Artificial Sequence
  Description of Artificial Sequence: Synthetic oligonucleotide
  Target: LAMA2; (+) strand; PAM type: YTN; PAM sequence: TTC
taatagatatgtagtggtat

SEQ ID NO: 361107 - DNA, 20 bp, Artificial Sequence
  Description of Artificial Sequence: Synthetic oligonucleotide
  Target: LAMA2; (+) strand; PAM type: YTN; PAM sequence: CTA
atagatatgtagtggtatat

SEQ ID NO: 361108 - DNA, 20 bp, Artificial Sequence
  Description of Artificial Sequence: Synthetic oligonucleotide
  Target: LAMA2; (+) strand; PAM type: YTN; PAM sequence: TTG
ttttaatttgaaattctcta

SEQ ID NO: 361109 - DNA, 20 bp, Artificial Sequence
  Description of Artificial Sequence: Synthetic oligonucleotide
  Target: LAMA2; (+) strand; PAM type: YTN; PAM sequence: TTT
taatttgaaattctctaatg

SEQ ID NO: 361110 - DNA, 20 bp, Artificial Sequence
  Description of Artificial Sequence: Synthetic oligonucleotide
  Target: LAMA2; (+) strand; PAM type: YTN; PAM sequence: TTT
aatttgaaattctctaatga

SEQ ID NO: 361111 - DNA, 20 bp, Artificial Sequence
  Description of Artificial Sequence: Synthetic oligonucleotide
  Target: LAMA2; (+) strand; PAM type: YTN; PAM sequence: TTA
atttgaaattctctaatgat

SEQ ID NO: 361112 - DNA, 20 bp, Artificial Sequence
  Description of Artificial Sequence: Synthetic oligonucleotide
  Target: LAMA2; (+) strand; PAM type: YTN; PAM sequence: TTT
gaaattctctaatgatgtaa

SEQ ID NO: 361113 - DNA, 20 bp, Artificial Sequence
  Description of Artificial Sequence: Synthetic oligonucleotide
  Target: LAMA2; (+) strand; PAM type: YTN; PAM sequence: TTG
aaattctctaatgatgtaag

SEQ ID NO: 361114 - DNA, 20 bp, Artificial Sequence
  Description of Artificial Sequence: Synthetic oligonucleotide
  Target: LAMA2; (+) strand; PAM type: YTN; PAM sequence: TTC
tctaatgatgtaagatgatg

SEQ ID NO: 361115 - DNA, 20 bp, Artificial Sequence
  Description of Artificial Sequence: Synthetic oligonucleotide
  Target: LAMA2; (+) strand; PAM type: YTN; PAM sequence: CTC
taatgatgtaagatgatgag

SEQ ID NO: 361116 - DNA, 20 bp, Artificial Sequence
  Description of Artificial Sequence: Synthetic oligonucleotide
  Target: LAMA2; (+) strand; PAM type: YTN; PAM sequence: CTA
atgatgtaagatgatgagca

SEQ ID NO: 361117 - DNA, 20 bp, Artificial Sequence
  Description of Artificial Sequence: Synthetic oligonucleotide
  Target: LAMA2; (+) strand; PAM type: YTN; PAM sequence: TTT
tcatgtgcttattttccatc

SEQ ID NO: 361118 - DNA, 20 bp, Artificial Sequence
  Description of Artificial Sequence: Synthetic oligonucleotide
  Target: LAMA2; (+) strand; PAM type: YTN; PAM sequence: TTT
catgtgcttattttccatct

SEQ ID NO: 361119 - DNA, 20 bp, Artificial Sequence
  Description of Artificial Sequence: Synthetic oligonucleotide
  Target: LAMA2; (+) strand; PAM type: YTN; PAM sequence: TTC
atgtgcttattttccatctg

SEQ ID NO: 361120 - DNA, 20 bp, Artificial Sequence
  Description of Artificial Sequence: Synthetic oligonucleotide
  Target: LAMA2; (+) strand; PAM type: YTN; PAM sequence: CTT
attttccatctgtatataag

SEQ ID NO: 361121 - DNA, 20 bp, Artificial Sequence
  Description of Artificial Sequence: Synthetic oligonucleotide
  Target: LAMA2; (+) strand; PAM type: YTN; PAM sequence: TTA
ttttccatctgtatataagc

SEQ ID NO: 361122 - DNA, 20 bp, Artificial Sequence
  Description of Artificial Sequence: Synthetic oligonucleotide
  Target: LAMA2; (+) strand; PAM type: YTN; PAM sequence: TTT
tccatctgtatataagcttt

SEQ ID NO: 361123 - DNA, 20 bp, Artificial Sequence
  Description of Artificial Sequence: Synthetic oligonucleotide
  Target: LAMA2; (+) strand; PAM type: YTN; PAM sequence: TTT
ccatctgtatataagctttg

SEQ ID NO: 361124 - DNA, 20 bp, Artificial Sequence
  Description of Artificial Sequence: Synthetic oligonucleotide
  Target: LAMA2; (+) strand; PAM type: YTN; PAM sequence: TTC
catctgtatataagctttgc

SEQ ID NO: 361125 - DNA, 20 bp, Artificial Sequence
  Description of Artificial Sequence: Synthetic oligonucleotide
  Target: LAMA2; (+) strand; PAM type: YTN; PAM sequence: CTG
tatataagctttgctgaggt

SEQ ID NO: 361126 - DNA, 20 bp, Artificial Sequence
  Description of Artificial Sequence: Synthetic oligonucleotide
  Target: LAMA2; (+) strand; PAM type: YTN; PAM sequence: CTT
tgctgaggtatctgtttaga

SEQ ID NO: 361127 - DNA, 20 bp, Artificial Sequence
  Description of Artificial Sequence: Synthetic oligonucleotide
  Target: LAMA2; (+) strand; PAM type: YTN; PAM sequence: TTT
gctgaggtatctgtttagat

SEQ ID NO: 361128 - DNA, 20 bp, Artificial Sequence
  Description of Artificial Sequence: Synthetic oligonucleotide
  Target: LAMA2; (+) strand; PAM type: YTN; PAM sequence: TTG
ctgaggtatctgtttagatt

SEQ ID NO: 361129 - DNA, 20 bp, Artificial Sequence
  Description of Artificial Sequence: Synthetic oligonucleotide
  Target: LAMA2; (+) strand; PAM type: YTN; PAM sequence: CTG
aggtatctgtttagattttt

SEQ ID NO: 361130 - DNA, 20 bp, Artificial Sequence
  Description of Artificial Sequence: Synthetic oligonucleotide
  Target: LAMA2; (+) strand; PAM type: YTN; PAM sequence: CTG
tttagattttttccaatttt

SEQ ID NO: 361131 - DNA, 20 bp, Artificial Sequence
  Description of Artificial Sequence: Synthetic oligonucleotide
  Target: LAMA2; (+) strand; PAM type: YTN; PAM sequence: TTT
agattttttccaatttttaa

SEQ ID NO: 361132 - DNA, 20 bp, Artificial Sequence
  Description of Artificial Sequence: Synthetic oligonucleotide
  Target: LAMA2; (+) strand; PAM type: YTN; PAM sequence: TTA
gattttttccaatttttaaa

SEQ ID NO: 361133 - DNA, 20 bp, Artificial Sequence
  Description of Artificial Sequence: Synthetic oligonucleotide
  Target: LAMA2; (+) strand; PAM type: YTN; PAM sequence: TTT
tttccaatttttaaatttat

SEQ ID NO: 361134 - DNA, 20 bp, Artificial Sequence
  Description of Artificial Sequence: Synthetic oligonucleotide
  Target: LAMA2; (+) strand; PAM type: YTN; PAM sequence: TTT
ttccaatttttaaatttatt

SEQ ID NO: 361135 - DNA, 20 bp, Artificial Sequence
  Description of Artificial Sequence: Synthetic oligonucleotide
  Target: LAMA2; (+) strand; PAM type: YTN; PAM sequence: TTT
tccaatttttaaatttattt

SEQ ID NO: 361136 - DNA, 20 bp, Artificial Sequence
  Description of Artificial Sequence: Synthetic oligonucleotide
  Target: LAMA2; (+) strand; PAM type: YTN; PAM sequence: TTT
ccaatttttaaatttatttt

SEQ ID NO: 361137 - DNA, 20 bp, Artificial Sequence
  Description of Artificial Sequence: Synthetic oligonucleotide
  Target: LAMA2; (+) strand; PAM type: YTN; PAM sequence: TTC
caatttttaaatttattttc

SEQ ID NO: 361138 - DNA, 20 bp, Artificial Sequence
  Description of Artificial Sequence: Synthetic oligonucleotide
  Target: LAMA2; (+) strand; PAM type: YTN; PAM sequence: TTT
ttaaatttattttcttgttg

SEQ ID NO: 361139 - DNA, 20 bp, Artificial Sequence
  Description of Artificial Sequence: Synthetic oligonucleotide
  Target: LAMA2; (+) strand; PAM type: YTN; PAM sequence: TTT
taaatttattttcttgttgt

SEQ ID NO: 361140 - DNA, 20 bp, Artificial Sequence
  Description of Artificial Sequence: Synthetic oligonucleotide
  Target: LAMA2; (+) strand; PAM type: YTN; PAM sequence: TTT
aaatttattttcttgttgtt

SEQ ID NO: 361141 - DNA, 20 bp, Artificial Sequence
  Description of Artificial Sequence: Synthetic oligonucleotide
  Target: LAMA2; (+) strand; PAM type: YTN; PAM sequence: TTA
aatttattttcttgttgttg

SEQ ID NO: 361142 - DNA, 20 bp, Artificial Sequence
  Description of Artificial Sequence: Synthetic oligonucleotide
  Target: LAMA2; (+) strand; PAM type: YTN; PAM sequence: TTT
attttcttgttgttgagatt

SEQ ID NO: 361143 - DNA, 20 bp, Artificial Sequence
  Description of Artificial Sequence: Synthetic oligonucleotide
  Target: LAMA2; (+) strand; PAM type: YTN; PAM sequence: TTA
ttttcttgttgttgagattt

SEQ ID NO: 361144 - DNA, 20 bp, Artificial Sequence
  Description of Artificial Sequence: Synthetic oligonucleotide
  Target: LAMA2; (+) strand; PAM type: YTN; PAM sequence: TTT
tcttgttgttgagatttaag

SEQ ID NO: 361145 - DNA, 20 bp, Artificial Sequence
  Description of Artificial Sequence: Synthetic oligonucleotide
  Target: LAMA2; (+) strand; PAM type: YTN; PAM sequence: TTT
cttgttgttgagatttaaga

SEQ ID NO: 361146 - DNA, 20 bp, Artificial Sequence
  Description of Artificial Sequence: Synthetic oligonucleotide
  Target: LAMA2; (+) strand; PAM type: YTN; PAM sequence: TTC
ttgttgttgagatttaagag

SEQ ID NO: 361147 - DNA, 20 bp, Artificial Sequence
  Description of Artificial Sequence: Synthetic oligonucleotide
  Target: LAMA2; (+) strand; PAM type: YTN; PAM sequence: CTT
gttgttgagatttaagagtt

SEQ ID NO: 361148 - DNA, 20 bp, Artificial Sequence
  Description of Artificial Sequence: Synthetic oligonucleotide
  Target: LAMA2; (+) strand; PAM type: YTN; PAM sequence: TTG
ttgttgagatttaagagttc

SEQ ID NO: 361149 - DNA, 20 bp, Artificial Sequence
  Description of Artificial Sequence: Synthetic oligonucleotide
  Target: LAMA2; (+) strand; PAM type: YTN; PAM sequence: TTG
ttgagatttaagagttcttt

SEQ ID NO: 361150 - DNA, 20 bp, Artificial Sequence
  Description of Artificial Sequence: Synthetic oligonucleotide
  Target: LAMA2; (+) strand; PAM type: YTN; PAM sequence: TTG
agatttaagagttctttgta

SEQ ID NO: 361151 - DNA, 20 bp, Artificial Sequence
  Description of Artificial Sequence: Synthetic oligonucleotide
  Target: LAMA2; (+) strand; PAM type: YTN; PAM sequence: TTT
aagagttctttgtatgtttt

SEQ ID NO: 361152 - DNA, 20 bp, Artificial Sequence
  Description of Artificial Sequence: Synthetic oligonucleotide
  Target: LAMA2; (+) strand; PAM type: YTN; PAM sequence: TTA
agagttctttgtatgttttg

SEQ ID NO: 361153 - DNA, 20 bp, Artificial Sequence
  Description of Artificial Sequence: Synthetic oligonucleotide
  Target: LAMA2; (+) strand; PAM type: YTN; PAM sequence: TTC
tttgtatgttttggaccata

SEQ ID NO: 361154 - DNA, 20 bp, Artificial Sequence
  Description of Artificial Sequence: Synthetic oligonucleotide
  Target: LAMA2; (+) strand; PAM type: YTN; PAM sequence: CTT
tgtatgttttggaccatatc

SEQ ID NO: 361155 - DNA, 20 bp, Artificial Sequence
  Description of Artificial Sequence: Synthetic oligonucleotide
  Target: LAMA2; (+) strand; PAM type: YTN; PAM sequence: TTT
gtatgttttggaccatatca

SEQ ID NO: 361156 - DNA, 20 bp, Artificial Sequence
  Description of Artificial Sequence: Synthetic oligonucleotide
  Target: LAMA2; (+) strand; PAM type: YTN; PAM sequence: TTG
tatgttttggaccatatcag

SEQ ID NO: 361157 - DNA, 20 bp, Artificial Sequence
  Description of Artificial Sequence: Synthetic oligonucleotide
  Target: LAMA2; (+) strand; PAM type: YTN; PAM sequence: TTT
tggaccatatcaggtatatc

SEQ ID NO: 361158 - DNA, 20 bp, Artificial Sequence
  Description of Artificial Sequence: Synthetic oligonucleotide
  Target: LAMA2; (+) strand; PAM type: YTN; PAM sequence: TTT
ggaccatatcaggtatatct

SEQ ID NO: 361159 - DNA, 20 bp, Artificial Sequence
  Description of Artificial Sequence: Synthetic oligonucleotide
  Target: LAMA2; (+) strand; PAM type: YTN; PAM sequence: TTG
gaccatatcaggtatatctt

SEQ ID NO: 361160 - DNA, 20 bp, Artificial Sequence
  Description of Artificial Sequence: Synthetic oligonucleotide
  Target: LAMA2; (+) strand; PAM type: YTN; PAM sequence: CTT
ttgcaaatattttcttgcaa

SEQ ID NO: 361161 - DNA, 20 bp, Artificial Sequence
  Description of Artificial Sequence: Synthetic oligonucleotide
  Target: LAMA2; (+) strand; PAM type: YTN; PAM sequence: TTT
tgcaaatattttcttgcaaa

SEQ ID NO: 361162 - DNA, 20 bp, Artificial Sequence
  Description of Artificial Sequence: Synthetic oligonucleotide
  Target: LAMA2; (+) strand; PAM type: YTN; PAM sequence: TTT
gcaaatattttcttgcaaat

SEQ ID NO: 361163 - DNA, 20 bp, Artificial Sequence
  Description of Artificial Sequence: Synthetic oligonucleotide
  Target: LAMA2; (+) strand; PAM type: YTN; PAM sequence: TTG
caaatattttcttgcaaatg

SEQ ID NO: 361164 - DNA, 20 bp, Artificial Sequence
  Description of Artificial Sequence: Synthetic oligonucleotide
  Target: LAMA2; (+) strand; PAM type: YTN; PAM sequence: TTT
tcttgcaaatggtagtttct

SEQ ID NO: 361165 - DNA, 20 bp, Artificial Sequence
  Description of Artificial Sequence: Synthetic oligonucleotide
  Target: LAMA2; (+) strand; PAM type: YTN; PAM sequence: TTT
cttgcaaatggtagtttctc

SEQ ID NO: 361166 - DNA, 20 bp, Artificial Sequence
  Description of Artificial Sequence: Synthetic oligonucleotide
  Target: LAMA2; (+) strand; PAM type: YTN; PAM sequence: TTC
ttgcaaatggtagtttctct

SEQ ID NO: 361167 - DNA, 20 bp, Artificial Sequence
  Description of Artificial Sequence: Synthetic oligonucleotide
  Target: LAMA2; (+) strand; PAM type: YTN; PAM sequence: CTT
gcaaatggtagtttctctta

SEQ ID NO: 361168 - DNA, 20 bp, Artificial Sequence
  Description of Artificial Sequence: Synthetic oligonucleotide
  Target: LAMA2; (+) strand; PAM type: YTN; PAM sequence: TTG
caaatggtagtttctcttat

SEQ ID NO: 361169 - DNA, 20 bp, Artificial Sequence
  Description of Artificial Sequence: Synthetic oligonucleotide
  Target: LAMA2; (+) strand; PAM type: YTN; PAM sequence: TTT
ctcttattctcttcacagtg

SEQ ID NO: 361170 - DNA, 20 bp, Artificial Sequence
  Description of Artificial Sequence: Synthetic oligonucleotide
  Target: LAMA2; (+) strand; PAM type: YTN; PAM sequence: TTC
tcttattctcttcacagtgt

SEQ ID NO: 361171 - DNA, 20 bp, Artificial Sequence
  Description of Artificial Sequence: Synthetic oligonucleotide
  Target: LAMA2; (+) strand; PAM type: YTN; PAM sequence: CTC
ttattctcttcacagtgtct

SEQ ID NO: 361172 - DNA, 20 bp, Artificial Sequence
  Description of Artificial Sequence: Synthetic oligonucleotide
  Target: LAMA2; (+) strand; PAM type: YTN; PAM sequence: CTT
attctcttcacagtgtcttt

SEQ ID NO: 361173 - DNA, 20 bp, Artificial Sequence
  Description of Artificial Sequence: Synthetic oligonucleotide
  Target: LAMA2; (+) strand; PAM type: YTN; PAM sequence: TTA
ttctcttcacagtgtctttc

SEQ ID NO: 361174 - DNA, 20 bp, Artificial Sequence
  Description of Artificial Sequence: Synthetic oligonucleotide
  Target: LAMA2; (+) strand; PAM type: YTN; PAM sequence: TTC
tcttcacagtgtctttcaca

SEQ ID NO: 361175 - DNA, 20 bp, Artificial Sequence
  Description of Artificial Sequence: Synthetic oligonucleotide
  Target: LAMA2; (+) strand; PAM type: YTN; PAM sequence: CTC
ttcacagtgtctttcacaga

SEQ ID NO: 361176 - DNA, 20 bp, Artificial Sequence
  Description of Artificial Sequence: Synthetic oligonucleotide
  Target: LAMA2; (+) strand; PAM type: YTN; PAM sequence: CTT
cacagtgtctttcacagaga

SEQ ID NO: 361177 - DNA, 20 bp, Artificial Sequence
  Description of Artificial Sequence: Synthetic oligonucleotide
  Target: LAMA2; (+) strand; PAM type: YTN; PAM sequence: TTC
acagtgtctttcacagagaa

SEQ ID NO: 361178 - DNA, 20 bp, Artificial Sequence
  Description of Artificial Sequence: Synthetic oligonucleotide
  Target: LAMA2; (+) strand; PAM type: YTN; PAM sequence: CTT
tcacagagaagatgattttt

SEQ ID NO: 361179 - DNA, 20 bp, Artificial Sequence
  Description of Artificial Sequence: Synthetic oligonucleotide
  Target: LAMA2; (+) strand; PAM type: YTN; PAM sequence: TTT
cacagagaagatgattttta

SEQ ID NO: 361180 - DNA, 20 bp, Artificial Sequence
  Description of Artificial Sequence: Synthetic oligonucleotide
  Target: LAMA2; (+) strand; PAM type: YTN; PAM sequence: TTC
acagagaagatgatttttaa

SEQ ID NO: 361181 - DNA, 20 bp, Artificial Sequence
  Description of Artificial Sequence: Synthetic oligonucleotide
  Target: LAMA2; (+) strand; PAM type: YTN; PAM sequence: TTT
ttaattttaataaaatctaa

SEQ ID NO: 361182 - DNA, 20 bp, Artificial Sequence
  Description of Artificial Sequence: Synthetic oligonucleotide
  Target: LAMA2; (+) strand; PAM type: YTN; PAM sequence: TTT
taattttaataaaatctaaa

SEQ ID NO: 361183 - DNA, 20 bp, Artificial Sequence
  Description of Artificial Sequence: Synthetic oligonucleotide
  Target: LAMA2; (+) strand; PAM type: YTN; PAM sequence: TTT
aattttaataaaatctaaaa

SEQ ID NO: 361184 - DNA, 20 bp, Artificial Sequence
  Description of Artificial Sequence: Synthetic oligonucleotide
  Target: LAMA2; (+) strand; PAM type: YTN; PAM sequence: TTA
attttaataaaatctaaaat

SEQ ID NO: 361185 - DNA, 20 bp, Artificial Sequence
  Description of Artificial Sequence: Synthetic oligonucleotide
  Target: LAMA2; (+) strand; PAM type: YTN; PAM sequence: TTT
taataaaatctaaaatgaat

SEQ ID NO: 361186 - DNA, 20 bp, Artificial Sequence
  Description of Artificial Sequence: Synthetic oligonucleotide
  Target: LAMA2; (+) strand; PAM type: YTN; PAM sequence: TTT
aataaaatctaaaatgaatt

SEQ ID NO: 361187 - DNA, 20 bp, Artificial Sequence
  Description of Artificial Sequence: Synthetic oligonucleotide
  Target: LAMA2; (+) strand; PAM type: YTN; PAM sequence: TTA
ataaaatctaaaatgaattt

SEQ ID NO: 361188 - DNA, 20 bp, Artificial Sequence
  Description of Artificial Sequence: Synthetic oligonucleotide
  Target: LAMA2; (+) strand; PAM type: YTN; PAM sequence: CTA
aaatgaatttttatttcatg

SEQ ID NO: 361189 - DNA, 20 bp, Artificial Sequence
  Description of Artificial Sequence: Synthetic oligonucleotide
  Target: LAMA2; (+) strand; PAM type: YTN; PAM sequence: TTT
ttatttcatggatcttgact

SEQ ID NO: 361190 - DNA, 20 bp, Artificial Sequence
  Description of Artificial Sequence: Synthetic oligonucleotide
  Target: LAMA2; (+) strand; PAM type: YTN; PAM sequence: TTT
tatttcatggatcttgactt

SEQ ID NO: 361191 - DNA, 20 bp, Artificial Sequence
  Description of Artificial Sequence: Synthetic oligonucleotide
  Target: LAMA2; (+) strand; PAM type: YTN; PAM sequence: TTT
atttcatggatcttgacttt

SEQ ID NO: 361192 - DNA, 20 bp, Artificial Sequence
  Description of Artificial Sequence: Synthetic oligonucleotide
  Target: LAMA2; (+) strand; PAM type: YTN; PAM sequence: TTA
tttcatggatcttgacttta

SEQ ID NO: 361193 - DNA, 20 bp, Artificial Sequence
  Description of Artificial Sequence: Synthetic oligonucleotide
  Target: LAMA2; (+) strand; PAM type: YTN; PAM sequence: TTT
catggatcttgactttagtg

SEQ ID NO: 361194 - DNA, 20 bp, Artificial Sequence
  Description of Artificial Sequence: Synthetic oligonucleotide
  Target: LAMA2; (+) strand; PAM type: YTN; PAM sequence: TTC
atggatcttgactttagtgt

SEQ ID NO: 361195 - DNA, 20 bp, Artificial Sequence
  Description of Artificial Sequence: Synthetic oligonucleotide
  Target: LAMA2; (+) strand; PAM type: YTN; PAM sequence: CTT
gactttagtgttatatataa

SEQ ID NO: 361196 - DNA, 20 bp, Artificial Sequence
  Description of Artificial Sequence: Synthetic oligonucleotide
  Target: LAMA2; (+) strand; PAM type: YTN; PAM sequence: TTG
actttagtgttatatataaa

SEQ ID NO: 361197 - DNA, 20 bp, Artificial Sequence
  Description of Artificial Sequence: Synthetic oligonucleotide
  Target: LAMA2; (+) strand; PAM type: YTN; PAM sequence: CTT
tagtgttatatataaagagt

SEQ ID NO: 361198 - DNA, 20 bp, Artificial Sequence
  Description of Artificial Sequence: Synthetic oligonucleotide
  Target: LAMA2; (+) strand; PAM type: YTN; PAM sequence: TTT
agtgttatatataaagagtt

SEQ ID NO: 361199 - DNA, 20 bp, Artificial Sequence
  Description of Artificial Sequence: Synthetic oligonucleotide
  Target: LAMA2; (+) strand; PAM type: YTN; PAM sequence: TTA
gtgttatatataaagagtta

SEQ ID NO: 361200 - DNA, 20 bp, Artificial Sequence
  Description of Artificial Sequence: Synthetic oligonucleotide
  Target: LAMA2; (+) strand; PAM type: YTN; PAM sequence: TTA
tatataaagagttactgcaa

SEQ ID NO: 361201 - DNA, 20 bp, Artificial Sequence
  Description of Artificial Sequence: Synthetic oligonucleotide
  Target: LAMA2; (+) strand; PAM type: YTN; PAM sequence: TTA
ctgcaaactcagggttattt

SEQ ID NO: 361202 - DNA, 20 bp, Artificial Sequence
  Description of Artificial Sequence: Synthetic oligonucleotide
  Target: LAMA2; (+) strand; PAM type: YTN; PAM sequence: CTG
caaactcagggttatttaga

SEQ ID NO: 361203 - DNA, 20 bp, Artificial Sequence
  Description of Artificial Sequence: Synthetic oligonucleotide
  Target: LAMA2; (+) strand; PAM type: YTN; PAM sequence: CTC
agggttatttagattttctt

SEQ ID NO: 361204 - DNA, 20 bp, Artificial Sequence
  Description of Artificial Sequence: Synthetic oligonucleotide
  Target: LAMA2; (+) strand; PAM type: YTN; PAM sequence: TTA
tttagattttcttctatgtt

SEQ ID NO: 361205 - DNA, 20 bp, Artificial Sequence
  Description of Artificial Sequence: Synthetic oligonucleotide
  Target: LAMA2; (+) strand; PAM type: YTN; PAM sequence: TTT
agattttcttctatgttatc

SEQ ID NO: 361206 - DNA, 20 bp, Artificial Sequence
  Description of Artificial Sequence: Synthetic oligonucleotide
  Target: LAMA2; (+) strand; PAM type: YTN; PAM sequence: TTA
gattttcttctatgttatct

SEQ ID NO: 361207 - DNA, 20 bp, Artificial Sequence
  Description of Artificial Sequence: Synthetic oligonucleotide
  Target: LAMA2; (+) strand; PAM type: YTN; PAM sequence: TTT
tcttctatgttatcttccaa

SEQ ID NO: 361208 - DNA, 20 bp, Artificial Sequence
  Description of Artificial Sequence: Synthetic oligonucleotide
  Target: LAMA2; (+) strand; PAM type: YTN; PAM sequence: TTT
cttctatgttatcttccaag

SEQ ID NO: 361209 - DNA, 20 bp, Artificial Sequence
  Description of Artificial Sequence: Synthetic oligonucleotide
  Target: LAMA2; (+) strand; PAM type: YTN; PAM sequence: TTC
ttctatgttatcttccaaga

SEQ ID NO: 361210 - DNA, 20 bp, Artificial Sequence
  Description of Artificial Sequence: Synthetic oligonucleotide
  Target: LAMA2; (+) strand; PAM type: YTN; PAM sequence: CTT
ctatgttatcttccaagagt

SEQ ID NO: 361211 - DNA, 20 bp, Artificial Sequence
  Description of Artificial Sequence: Synthetic oligonucleotide
  Target: LAMA2; (+) strand; PAM type: YTN; PAM sequence: TTC
tatgttatcttccaagagtc

SEQ ID NO: 361212 - DNA, 20 bp, Artificial Sequence
  Description of Artificial Sequence: Synthetic oligonucleotide
  Target: LAMA2; (+) strand; PAM type: YTN; PAM sequence: CTA
tgttatcttccaagagtcat

SEQ ID NO: 361213 - DNA, 20 bp, Artificial Sequence
  Description of Artificial Sequence: Synthetic oligonucleotide
  Target: LAMA2; (+) strand; PAM type: YTN; PAM sequence: TTA
tcttccaagagtcatagttt

SEQ ID NO: 361214 - DNA, 20 bp, Artificial Sequence
  Description of Artificial Sequence: Synthetic oligonucleotide
  Target: LAMA2; (+) strand; PAM type: YTN; PAM sequence: CTT
ccaagagtcatagttttgca

SEQ ID NO: 361215 - DNA, 20 bp, Artificial Sequence
  Description of Artificial Sequence: Synthetic oligonucleotide
  Target: LAMA2; (+) strand; PAM type: YTN; PAM sequence: TTC
caagagtcatagttttgcat

SEQ ID NO: 361216 - DNA, 20 bp, Artificial Sequence
  Description of Artificial Sequence: Synthetic oligonucleotide
  Target: LAMA2; (+) strand; PAM type: YTN; PAM sequence: TTT
tgcattttatatgatccatt

SEQ ID NO: 361217 - DNA, 20 bp, Artificial Sequence
  Description of Artificial Sequence: Synthetic oligonucleotide
  Target: LAMA2; (+) strand; PAM type: YTN; PAM sequence: TTT
gcattttatatgatccattt

SEQ ID NO: 361218 - DNA, 20 bp, Artificial Sequence
  Description of Artificial Sequence: Synthetic oligonucleotide
  Target: LAMA2; (+) strand; PAM type: YTN; PAM sequence: TTG
cattttatatgatccatttt

SEQ ID NO: 361219 - DNA, 20 bp, Artificial Sequence
  Description of Artificial Sequence: Synthetic oligonucleotide
  Target: LAMA2; (+) strand; PAM type: YTN; PAM sequence: TTT
tatatgatccattttgaggt

SEQ ID NO: 361220 - DNA, 20 bp, Artificial Sequence
  Description of Artificial Sequence: Synthetic oligonucleotide
  Target: LAMA2; (+) strand; PAM type: YTN; PAM sequence: TTT
atatgatccattttgaggtc

SEQ ID NO: 361221 - DNA, 20 bp, Artificial Sequence
  Description of Artificial Sequence: Synthetic oligonucleotide
  Target: LAMA2; (+) strand; PAM type: YTN; PAM sequence: TTA
tatgatccattttgaggtct

SEQ ID NO: 361222 - DNA, 20 bp, Artificial Sequence
  Description of Artificial Sequence: Synthetic oligonucleotide
  Target: LAMA2; (+) strand; PAM type: YTN; PAM sequence: TTT
tgaggtctatgatccatttt

SEQ ID NO: 361223 - DNA, 20 bp, Artificial Sequence
  Description of Artificial Sequence: Synthetic oligonucleotide
  Target: LAMA2; (+) strand; PAM type: YTN; PAM sequence: TTT
gaggtctatgatccattttg

SEQ ID NO: 361224 - DNA, 20 bp, Artificial Sequence
  Description of Artificial Sequence: Synthetic oligonucleotide
  Target: LAMA2; (+) strand; PAM type: YTN; PAM sequence: TTG
aggtctatgatccattttgt

SEQ ID NO: 361225 - DNA, 20 bp, Artificial Sequence
  Description of Artificial Sequence: Synthetic oligonucleotide
  Target: LAMA2; (+) strand; PAM type: YTN; PAM sequence: CTA
tgatccattttgtgttaatt

SEQ ID NO: 361226 - DNA, 20 bp, Artificial Sequence
  Description of Artificial Sequence: Synthetic oligonucleotide
  Target: LAMA2; (+) strand; PAM type: YTN; PAM sequence: TTT
tgtgttaatttttgtgaggg

SEQ ID NO: 361227 - DNA, 20 bp, Artificial Sequence
  Description of Artificial Sequence: Synthetic oligonucleotide
  Target: LAMA2; (+) strand; PAM type: YTN; PAM sequence: TTT
gtgttaatttttgtgagggt

SEQ ID NO: 361228 - DNA, 20 bp, Artificial Sequence
  Description of Artificial Sequence: Synthetic oligonucleotide
  Target: LAMA2; (+) strand; PAM type: YTN; PAM sequence: TTG
tgttaatttttgtgagggtc

SEQ ID NO: 361229 - DNA, 20 bp, Artificial Sequence
  Description of Artificial Sequence: Synthetic oligonucleotide
  Target: LAMA2; (+) strand; PAM type: YTN; PAM sequence: TTA
atttttgtgagggtctatat

SEQ ID NO: 361230 - DNA, 20 bp, Artificial Sequence
  Description of Artificial Sequence: Synthetic oligonucleotide
  Target: LAMA2; (+) strand; PAM type: YTN; PAM sequence: TTT
ttgtgagggtctatatctgc

SEQ ID NO: 361231 - DNA, 20 bp, Artificial Sequence
  Description of Artificial Sequence: Synthetic oligonucleotide
  Target: LAMA2; (+) strand; PAM type: YTN; PAM sequence: TTT
tgtgagggtctatatctgca

SEQ ID NO: 361232 - DNA, 20 bp, Artificial Sequence
  Description of Artificial Sequence: Synthetic oligonucleotide
  Target: LAMA2; (+) strand; PAM type: YTN; PAM sequence: TTT
gtgagggtctatatctgcat

SEQ ID NO: 361233 - DNA, 20 bp, Artificial Sequence
  Description of Artificial Sequence: Synthetic oligonucleotide
  Target: LAMA2; (+) strand; PAM type: YTN; PAM sequence: TTG
tgagggtctatatctgcatt

SEQ ID NO: 361234 - DNA, 20 bp, Artificial Sequence
  Description of Artificial Sequence: Synthetic oligonucleotide
  Target: LAMA2; (+) strand; PAM type: YTN; PAM sequence: CTA
tatctgcatttatgtatttt

SEQ ID NO: 361235 - DNA, 20 bp, Artificial Sequence
  Description of Artificial Sequence: Synthetic oligonucleotide
  Target: LAMA2; (+) strand; PAM type: YTN; PAM sequence: CTG
catttatgtattttttcaca

SEQ ID NO: 361236 - DNA, 20 bp, Artificial Sequence
  Description of Artificial Sequence: Synthetic oligonucleotide
  Target: LAMA2; (+) strand; PAM type: YTN; PAM sequence: TTT
atgtattttttcacaagtta

SEQ ID NO: 361237 - DNA, 20 bp, Artificial Sequence
  Description of Artificial Sequence: Synthetic oligonucleotide
  Target: LAMA2; (+) strand; PAM type: YTN; PAM sequence: TTA
tgtattttttcacaagttat

SEQ ID NO: 361238 - DNA, 20 bp, Artificial Sequence
  Description of Artificial Sequence: Synthetic oligonucleotide
  Target: LAMA2; (+) strand; PAM type: YTN; PAM sequence: TTT
tttcacaagttatctcagtc

SEQ ID NO: 361239 - DNA, 20 bp, Artificial Sequence
  Description of Artificial Sequence: Synthetic oligonucleotide
  Target: LAMA2; (+) strand; PAM type: YTN; PAM sequence: TTT
ttcacaagttatctcagtca

SEQ ID NO: 361240 - DNA, 20 bp, Artificial Sequence
  Description of Artificial Sequence: Synthetic oligonucleotide
  Target: LAMA2; (+) strand; PAM type: YTN; PAM sequence: TTT
tcacaagttatctcagtcaa

SEQ ID NO: 361241 - DNA, 20 bp, Artificial Sequence
  Description of Artificial Sequence: Synthetic oligonucleotide
  Target: LAMA2; (+) strand; PAM type: YTN; PAM sequence: TTT
cacaagttatctcagtcaat

SEQ ID NO: 361242 - DNA, 20 bp, Artificial Sequence
  Description of Artificial Sequence: Synthetic oligonucleotide
  Target: LAMA2; (+) strand; PAM type: YTN; PAM sequence: TTC
acaagttatctcagtcaatt

SEQ ID NO: 361243 - DNA, 20 bp, Artificial Sequence
  Description of Artificial Sequence: Synthetic oligonucleotide
  Target: LAMA2; (+) strand; PAM type: YTN; PAM sequence: TTA
tctcagtcaattttctgttg

SEQ ID NO: 361244 - DNA, 20 bp, Artificial Sequence
  Description of Artificial Sequence: Synthetic oligonucleotide
  Target: LAMA2; (+) strand; PAM type: YTN; PAM sequence: CTC
agtcaattttctgttgctat

SEQ ID NO: 361245 - DNA, 20 bp, Artificial Sequence
  Description of Artificial Sequence: Synthetic oligonucleotide
  Target: LAMA2; (+) strand; PAM type: YTN; PAM sequence: TTT
tctgttgctataacagaata

SEQ ID NO: 361246 - DNA, 20 bp, Artificial Sequence
  Description of Artificial Sequence: Synthetic oligonucleotide
  Target: LAMA2; (+) strand; PAM type: YTN; PAM sequence: TTT
ctgttgctataacagaatac

SEQ ID NO: 361247 - DNA, 20 bp, Artificial Sequence
  Description of Artificial Sequence: Synthetic oligonucleotide
  Target: LAMA2; (+) strand; PAM type: YTN; PAM sequence: TTC
tgttgctataacagaatacc

SEQ ID NO: 361248 - DNA, 20 bp, Artificial Sequence
  Description of Artificial Sequence: Synthetic oligonucleotide
  Target: LAMA2; (+) strand; PAM type: YTN; PAM sequence: CTG
ttgctataacagaatacctg

SEQ ID NO: 361249 - DNA, 20 bp, Artificial Sequence
  Description of Artificial Sequence: Synthetic oligonucleotide
  Target: LAMA2; (+) strand; PAM type: YTN; PAM sequence: TTG
ctataacagaatacctgaga

SEQ ID NO: 361250 - DNA, 20 bp, Artificial Sequence
  Description of Artificial Sequence: Synthetic oligonucleotide
  Target: LAMA2; (+) strand; PAM type: YTN; PAM sequence: CTA
taacagaatacctgagacta

SEQ ID NO: 361251 - DNA, 20 bp, Artificial Sequence
  Description of Artificial Sequence: Synthetic oligonucleotide
  Target: LAMA2; (+) strand; PAM type: YTN; PAM sequence: CTG
agactaggtaatttataaag

SEQ ID NO: 361252 - DNA, 20 bp, Artificial Sequence
  Description of Artificial Sequence: Synthetic oligonucleotide
  Target: LAMA2; (+) strand; PAM type: YTN; PAM sequence: CTA
ggtaatttataaaggagaga

SEQ ID NO: 361253 - DNA, 20 bp, Artificial Sequence
  Description of Artificial Sequence: Synthetic oligonucleotide
  Target: LAMA2; (+) strand; PAM type: YTN; PAM sequence: TTT
ataaaggagagagttctatt

SEQ ID NO: 361254 - DNA, 20 bp, Artificial Sequence
  Description of Artificial Sequence: Synthetic oligonucleotide
  Target: LAMA2; (+) strand; PAM type: YTN; PAM sequence: TTA
taaaggagagagttctattt

SEQ ID NO: 361255 - DNA, 20 bp, Artificial Sequence
  Description of Artificial Sequence: Synthetic oligonucleotide
  Target: LAMA2; (+) strand; PAM type: YTN; PAM sequence: TTC
tatttagcttgtgatcctgg

SEQ ID NO: 361256 - DNA, 20 bp, Artificial Sequence
  Description of Artificial Sequence: Synthetic oligonucleotide
  Target: LAMA2; (+) strand; PAM type: YTN; PAM sequence: CTA
tttagcttgtgatcctggga

SEQ ID NO: 361257 - DNA, 20 bp, Artificial Sequence
  Description of Artificial Sequence: Synthetic oligonucleotide
  Target: LAMA2; (+) strand; PAM type: YTN; PAM sequence: TTT
agcttgtgatcctgggagct

SEQ ID NO: 361258 - DNA, 20 bp, Artificial Sequence
  Description of Artificial Sequence: Synthetic oligonucleotide
  Target: LAMA2; (+) strand; PAM type: YTN; PAM sequence: TTA
gcttgtgatcctgggagctt

SEQ ID NO: 361259 - DNA, 20 bp, Artificial Sequence
  Description of Artificial Sequence: Synthetic oligonucleotide
  Target: LAMA2; (+) strand; PAM type: YTN; PAM sequence: CTT
gtgatcctgggagcttgact

SEQ ID NO: 361260 - DNA, 20 bp, Artificial Sequence
  Description of Artificial Sequence: Synthetic oligonucleotide
  Target: LAMA2; (+) strand; PAM type: YTN; PAM sequence: TTG
tgatcctgggagcttgacta

SEQ ID NO: 361261 - DNA, 20 bp, Artificial Sequence
  Description of Artificial Sequence: Synthetic oligonucleotide
  Target: LAMA2; (+) strand; PAM type: YTN; PAM sequence: CTG
ggagcttgactaggagatcc

SEQ ID NO: 361262 - DNA, 20 bp, Artificial Sequence
  Description of Artificial Sequence: Synthetic oligonucleotide
  Target: LAMA2; (+) strand; PAM type: YTN; PAM sequence: CTT
gactaggagatccaagttag

SEQ ID NO: 361263 - DNA, 20 bp, Artificial Sequence
  Description of Artificial Sequence: Synthetic oligonucleotide
  Target: LAMA2; (+) strand; PAM type: YTN; PAM sequence: TTG
actaggagatccaagttagg

SEQ ID NO: 361264 - DNA, 20 bp, Artificial Sequence
  Description of Artificial Sequence: Synthetic oligonucleotide
  Target: LAMA2; (+) strand; PAM type: YTN; PAM sequence: CTA
ggagatccaagttaggacag

SEQ ID NO: 361265 - DNA, 20 bp, Artificial Sequence
  Description of Artificial Sequence: Synthetic oligonucleotide
  Target: LAMA2; (+) strand; PAM type: YTN; PAM sequence: TTA
ggacaggtgcatttggtcaa

SEQ ID NO: 361266 - DNA, 20 bp, Artificial Sequence
  Description of Artificial Sequence: Synthetic oligonucleotide
  Target: LAMA2; (+) strand; PAM type: YTN; PAM sequence: TTT
ggtcaagttctggtgagagt

SEQ ID NO: 361267 - DNA, 20 bp, Artificial Sequence
  Description of Artificial Sequence: Synthetic oligonucleotide
  Target: LAMA2; (+) strand; PAM type: YTN; PAM sequence: TTG
gtcaagttctggtgagagtc

SEQ ID NO: 361268 - DNA, 20 bp, Artificial Sequence
  Description of Artificial Sequence: Synthetic oligonucleotide
  Target: LAMA2; (+) strand; PAM type: YTN; PAM sequence: TTC
tggtgagagtcttgtgctgc

SEQ ID NO: 361269 - DNA, 20 bp, Artificial Sequence
  Description of Artificial Sequence: Synthetic oligonucleotide
  Target: LAMA2; (+) strand; PAM type: YTN; PAM sequence: CTG
gtgagagtcttgtgctgcat

SEQ ID NO: 361270 - DNA, 20 bp, Artificial Sequence
  Description of Artificial Sequence: Synthetic oligonucleotide
  Target: LAMA2; (+) strand; PAM type: YTN; PAM sequence: CTT
gtgctgcatcttaacatggt

SEQ ID NO: 361271 - DNA, 20 bp, Artificial Sequence
  Description of Artificial Sequence: Synthetic oligonucleotide
  Target: LAMA2; (+) strand; PAM type: YTN; PAM sequence: TTG
tgctgcatcttaacatggtg

SEQ ID NO: 361272 - DNA, 20 bp, Artificial Sequence
  Description of Artificial Sequence: Synthetic oligonucleotide
  Target: LAMA2; (+) strand; PAM type: YTN; PAM sequence: CTG
catcttaacatggtggagaa

SEQ ID NO: 361273 - DNA, 20 bp, Artificial Sequence
  Description of Artificial Sequence: Synthetic oligonucleotide
  Target: LAMA2; (+) strand; PAM type: YTN; PAM sequence: CTT
aacatggtggagaagtggaa

SEQ ID NO: 361274 - DNA, 20 bp, Artificial Sequence
  Description of Artificial Sequence: Synthetic oligonucleotide
  Target: LAMA2; (+) strand; PAM type: YTN; PAM sequence: TTA
acatggtggagaagtggaag

SEQ ID NO: 361275 - DNA, 20 bp, Artificial Sequence
  Description of Artificial Sequence: Synthetic oligonucleotide
  Target: LAMA2; (+) strand; PAM type: YTN; PAM sequence: CTT
cctttttaacaacccaccct

SEQ ID NO: 361276 - DNA, 20 bp, Artificial Sequence
  Description of Artificial Sequence: Synthetic oligonucleotide
  Target: LAMA2; (+) strand; PAM type: YTN; PAM sequence: TTC
ctttttaacaacccaccctc

SEQ ID NO: 361277 - DNA, 20 bp, Artificial Sequence
  Description of Artificial Sequence: Synthetic oligonucleotide
  Target: LAMA2; (+) strand; PAM type: YTN; PAM sequence: CTT
tttaacaacccaccctcgag

SEQ ID NO: 361278 - DNA, 20 bp, Artificial Sequence
  Description of Artificial Sequence: Synthetic oligonucleotide
  Target: LAMA2; (+) strand; PAM type: YTN; PAM sequence: TTT
ttaacaacccaccctcgagg

SEQ ID NO: 361279 - DNA, 20 bp, Artificial Sequence
  Description of Artificial Sequence: Synthetic oligonucleotide
  Target: LAMA2; (+) strand; PAM type: YTN; PAM sequence: TTT
taacaacccaccctcgaggt

SEQ ID NO: 361280 - DNA, 20 bp, Artificial Sequence
  Description of Artificial Sequence: Synthetic oligonucleotide
  Target: LAMA2; (+) strand; PAM type: YTN; PAM sequence: TTT
aacaacccaccctcgaggta

SEQ ID NO: 361281 - DNA, 20 bp, Artificial Sequence
  Description of Artificial Sequence: Synthetic oligonucleotide
  Target: LAMA2; (+) strand; PAM type: YTN; PAM sequence: TTA
acaacccaccctcgaggtag

SEQ ID NO: 361282 - DNA, 20 bp, Artificial Sequence
  Description of Artificial Sequence: Synthetic oligonucleotide
  Target: LAMA2; (+) strand; PAM type: YTN; PAM sequence: CTC
gaggtagctaatccagtcct

SEQ ID NO: 361283 - DNA, 20 bp, Artificial Sequence
  Description of Artificial Sequence: Synthetic oligonucleotide
  Target: LAMA2; (+) strand; PAM type: YTN; PAM sequence: CTA
atccagtcctacaagagcaa

SEQ ID NO: 361284 - DNA, 20 bp, Artificial Sequence
  Description of Artificial Sequence: Synthetic oligonucleotide
  Target: LAMA2; (+) strand; PAM type: YTN; PAM sequence: CTA
caagagcaagaactcactct

SEQ ID NO: 361285 - DNA, 20 bp, Artificial Sequence
  Description of Artificial Sequence: Synthetic oligonucleotide
  Target: LAMA2; (+) strand; PAM type: YTN; PAM sequence: CTC
actctaagaaaggtattaat

SEQ ID NO: 361286 - DNA, 20 bp, Artificial Sequence
  Description of Artificial Sequence: Synthetic oligonucleotide
  Target: LAMA2; (+) strand; PAM type: YTN; PAM sequence: CTC
taagaaaggtattaattcct

SEQ ID NO: 361287 - DNA, 20 bp, Artificial Sequence
  Description of Artificial Sequence: Synthetic oligonucleotide
  Target: LAMA2; (+) strand; PAM type: YTN; PAM sequence: CTA
agaaaggtattaattccttt

SEQ ID NO: 361288 - DNA, 20 bp, Artificial Sequence
  Description of Artificial Sequence: Synthetic oligonucleotide
  Target: LAMA2; (+) strand; PAM type: YTN; PAM sequence: TTA
attcctttttaaaaacctaa

SEQ ID NO: 361289 - DNA, 20 bp, Artificial Sequence
  Description of Artificial Sequence: Synthetic oligonucleotide
  Target: LAMA2; (+) strand; PAM type: YTN; PAM sequence: TTC
ctttttaaaaacctaatcac

SEQ ID NO: 361290 - DNA, 20 bp, Artificial Sequence
  Description of Artificial Sequence: Synthetic oligonucleotide
  Target: LAMA2; (+) strand; PAM type: YTN; PAM sequence: CTT
tttaaaaacctaatcacctc

SEQ ID NO: 361291 - DNA, 20 bp, Artificial Sequence
  Description of Artificial Sequence: Synthetic oligonucleotide
  Target: LAMA2; (+) strand; PAM type: YTN; PAM sequence: TTT
ttaaaaacctaatcacctct

SEQ ID NO: 361292 - DNA, 20 bp, Artificial Sequence
  Description of Artificial Sequence: Synthetic oligonucleotide
  Target: LAMA2; (+) strand; PAM type: YTN; PAM sequence: TTT
taaaaacctaatcacctctc

SEQ ID NO: 361293 - DNA, 20 bp, Artificial Sequence
  Description of Artificial Sequence: Synthetic oligonucleotide
  Target: LAMA2; (+) strand; PAM type: YTN; PAM sequence: TTT
aaaaacctaatcacctctcc

SEQ ID NO: 361294 - DNA, 20 bp, Artificial Sequence
  Description of Artificial Sequence: Synthetic oligonucleotide
  Target: LAMA2; (+) strand; PAM type: YTN; PAM sequence: TTA
aaaacctaatcacctctcca

SEQ ID NO: 361295 - DNA, 20 bp, Artificial Sequence
  Description of Artificial Sequence: Synthetic oligonucleotide
  Target: LAMA2; (+) strand; PAM type: YTN; PAM sequence: CTA
atcacctctccaaggcacca

SEQ ID NO: 361296 - DNA, 20 bp, Artificial Sequence
  Description of Artificial Sequence: Synthetic oligonucleotide
  Target: LAMA2; (+) strand; PAM type: YTN; PAM sequence: CTC
tccaaggcaccacctctcaa

SEQ ID NO: 361297 - DNA, 20 bp, Artificial Sequence
  Description of Artificial Sequence: Synthetic oligonucleotide
  Target: LAMA2; (+) strand; PAM type: YTN; PAM sequence: CTC
caaggcaccacctctcaaca

SEQ ID NO: 361298 - DNA, 20 bp, Artificial Sequence
  Description of Artificial Sequence: Synthetic oligonucleotide
  Target: LAMA2; (+) strand; PAM type: YTN; PAM sequence: CTC
tcaacatcaccccattagga

SEQ ID NO: 361299 - DNA, 20 bp, Artificial Sequence
  Description of Artificial Sequence: Synthetic oligonucleotide
  Target: LAMA2; (+) strand; PAM type: YTN; PAM sequence: CTC
aacatcaccccattaggaac

SEQ ID NO: 361300 - DNA, 20 bp, Artificial Sequence
  Description of Artificial Sequence: Synthetic oligonucleotide
  Target: LAMA2; (+) strand; PAM type: YTN; PAM sequence: TTA
ggaaccaaacctcactatgg

SEQ ID NO: 361301 - DNA, 20 bp, Artificial Sequence
  Description of Artificial Sequence: Synthetic oligonucleotide
  Target: LAMA2; (+) strand; PAM type: YTN; PAM sequence: CTC
actatggattttgattgtga

SEQ ID NO: 361302 - DNA, 20 bp, Artificial Sequence
  Description of Artificial Sequence: Synthetic oligonucleotide
  Target: LAMA2; (+) strand; PAM type: YTN; PAM sequence: CTA
tggattttgattgtgacaaa

SEQ ID NO: 361303 - DNA, 20 bp, Artificial Sequence
  Description of Artificial Sequence: Synthetic oligonucleotide
  Target: LAMA2; (+) strand; PAM type: YTN; PAM sequence: TTT
tgattgtgacaaaccatatt

SEQ ID NO: 361304 - DNA, 20 bp, Artificial Sequence
  Description of Artificial Sequence: Synthetic oligonucleotide
  Target: LAMA2; (+) strand; PAM type: YTN; PAM sequence: TTT
gattgtgacaaaccatattc

SEQ ID NO: 361305 - DNA, 20 bp, Artificial Sequence
  Description of Artificial Sequence: Synthetic oligonucleotide
  Target: LAMA2; (+) strand; PAM type: YTN; PAM sequence: TTG
attgtgacaaaccatattct

SEQ ID NO: 361306 - DNA, 20 bp, Artificial Sequence
  Description of Artificial Sequence: Synthetic oligonucleotide
  Target: LAMA2; (+) strand; PAM type: YTN; PAM sequence: TTG
tgacaaaccatattctaacc

SEQ ID NO: 361307 - DNA, 20 bp, Artificial Sequence
  Description of Artificial Sequence: Synthetic oligonucleotide
  Target: LAMA2; (+) strand; PAM type: YTN; PAM sequence: TTC
taaccataacacaaatgatg

SEQ ID NO: 361308 - DNA, 20 bp, Artificial Sequence
  Description of Artificial Sequence: Synthetic oligonucleotide
  Target: LAMA2; (+) strand; PAM type: YTN; PAM sequence: CTA
accataacacaaatgatgtc

SEQ ID NO: 361309 - DNA, 20 bp, Artificial Sequence
  Description of Artificial Sequence: Synthetic oligonucleotide
  Target: LAMA2; (+) strand; PAM type: YTN; PAM sequence: TTT
ttctagtgccatttgttgaa

SEQ ID NO: 361310 - DNA, 20 bp, Artificial Sequence
  Description of Artificial Sequence: Synthetic oligonucleotide
  Target: LAMA2; (+) strand; PAM type: YTN; PAM sequence: TTT
tctagtgccatttgttgaaa

SEQ ID NO: 361311 - DNA, 20 bp, Artificial Sequence
  Description of Artificial Sequence: Synthetic oligonucleotide
  Target: LAMA2; (+) strand; PAM type: YTN; PAM sequence: TTT
ctagtgccatttgttgaaaa

SEQ ID NO: 361312 - DNA, 20 bp, Artificial Sequence
  Description of Artificial Sequence: Synthetic oligonucleotide
  Target: LAMA2; (+) strand; PAM type: YTN; PAM sequence: TTC
tagtgccatttgttgaaaac

SEQ ID NO: 361313 - DNA, 20 bp, Artificial Sequence
  Description of Artificial Sequence: Synthetic oligonucleotide
  Target: LAMA2; (+) strand; PAM type: YTN; PAM sequence: CTA
gtgccatttgttgaaaacac

SEQ ID NO: 361314 - DNA, 20 bp, Artificial Sequence
  Description of Artificial Sequence: Synthetic oligonucleotide
  Target: LAMA2; (+) strand; PAM type: YTN; PAM sequence: TTT
gttgaaaacactttcctttc

SEQ ID NO: 361315 - DNA, 20 bp, Artificial Sequence
  Description of Artificial Sequence: Synthetic oligonucleotide
  Target: LAMA2; (+) strand; PAM type: YTN; PAM sequence: TTG
ttgaaaacactttcctttct

SEQ ID NO: 361316 - DNA, 20 bp, Artificial Sequence
  Description of Artificial Sequence: Synthetic oligonucleotide
  Target: LAMA2; (+) strand; PAM type: YTN; PAM sequence: TTG
aaaacactttcctttcttca

SEQ ID NO: 361317 - DNA, 20 bp, Artificial Sequence
  Description of Artificial Sequence: Synthetic oligonucleotide
  Target: LAMA2; (+) strand; PAM type: YTN; PAM sequence: CTT
tcctttcttcattgaattcc

SEQ ID NO: 361318 - DNA, 20 bp, Artificial Sequence
  Description of Artificial Sequence: Synthetic oligonucleotide
  Target: LAMA2; (+) strand; PAM type: YTN; PAM sequence: TTT
cctttcttcattgaattccc

SEQ ID NO: 361319 - DNA, 20 bp, Artificial Sequence
  Description of Artificial Sequence: Synthetic oligonucleotide
  Target: LAMA2; (+) strand; PAM type: YTN; PAM sequence: TTC
ctttcttcattgaattccct

SEQ ID NO: 361320 - DNA, 20 bp, Artificial Sequence
  Description of Artificial Sequence: Synthetic oligonucleotide
  Target: LAMA2; (+) strand; PAM type: YTN; PAM sequence: CTT
tcttcattgaattccctttg

SEQ ID NO: 361321 - DNA, 20 bp, Artificial Sequence
  Description of Artificial Sequence: Synthetic oligonucleotide
  Target: LAMA2; (+) strand; PAM type: YTN; PAM sequence: TTT
cttcattgaattccctttgc

SEQ ID NO: 361322 - DNA, 20 bp, Artificial Sequence
  Description of Artificial Sequence: Synthetic oligonucleotide
  Target: LAMA2; (+) strand; PAM type: YTN; PAM sequence: TTC
ttcattgaattccctttgct

SEQ ID NO: 361323 - DNA, 20 bp, Artificial Sequence
  Description of Artificial Sequence: Synthetic oligonucleotide
  Target: LAMA2; (+) strand; PAM type: YTN; PAM sequence: CTT
cattgaattccctttgctcc

SEQ ID NO: 361324 - DNA, 20 bp, Artificial Sequence
  Description of Artificial Sequence: Synthetic oligonucleotide
  Target: LAMA2; (+) strand; PAM type: YTN; PAM sequence: TTC
attgaattccctttgctcct

SEQ ID NO: 361325 - DNA, 20 bp, Artificial Sequence
  Description of Artificial Sequence: Synthetic oligonucleotide
  Target: LAMA2; (+) strand; PAM type: YTN; PAM sequence: TTG
aattccctttgctcctttgt

SEQ ID NO: 361326 - DNA, 20 bp, Artificial Sequence
  Description of Artificial Sequence: Synthetic oligonucleotide
  Target: LAMA2; (+) strand; PAM type: YTN; PAM sequence: TTC
cctttgctcctttgtgaaag

SEQ ID NO: 361327 - DNA, 20 bp, Artificial Sequence
  Description of Artificial Sequence: Synthetic oligonucleotide
  Target: LAMA2; (+) strand; PAM type: YTN; PAM sequence: CTT
tgctcctttgtgaaagatca

SEQ ID NO: 361328 - DNA, 20 bp, Artificial Sequence
  Description of Artificial Sequence: Synthetic oligonucleotide
  Target: LAMA2; (+) strand; PAM type: YTN; PAM sequence: TTT
gctcctttgtgaaagatcag

SEQ ID NO: 361329 - DNA, 20 bp, Artificial Sequence
  Description of Artificial Sequence: Synthetic oligonucleotide
  Target: LAMA2; (+) strand; PAM type: YTN; PAM sequence: TTG
ctcctttgtgaaagatcaga

SEQ ID NO: 361330 - DNA, 20 bp, Artificial Sequence
  Description of Artificial Sequence: Synthetic oligonucleotide
  Target: LAMA2; (+) strand; PAM type: YTN; PAM sequence: CTC
ctttgtgaaagatcagatgg

SEQ ID NO: 361331 - DNA, 20 bp, Artificial Sequence
  Description of Artificial Sequence: Synthetic oligonucleotide
  Target: LAMA2; (+) strand; PAM type: YTN; PAM sequence: CTT
tgtgaaagatcagatggcca

SEQ ID NO: 361332 - DNA, 20 bp, Artificial Sequence
  Description of Artificial Sequence: Synthetic oligonucleotide
  Target: LAMA2; (+) strand; PAM type: YTN; PAM sequence: TTT
gtgaaagatcagatggccat

SEQ ID NO: 361333 - DNA, 20 bp, Artificial Sequence
  Description of Artificial Sequence: Synthetic oligonucleotide
  Target: LAMA2; (+) strand; PAM type: YTN; PAM sequence: TTG
tgaaagatcagatggccata

SEQ ID NO: 361334 - DNA, 20 bp, Artificial Sequence
  Description of Artificial Sequence: Synthetic oligonucleotide
  Target: LAMA2; (+) strand; PAM type: YTN; PAM sequence: TTC
atgcgggtgtatttctgggc

SEQ ID NO: 361335 - DNA, 20 bp, Artificial Sequence
  Description of Artificial Sequence: Synthetic oligonucleotide
  Target: LAMA2; (+) strand; PAM type: YTN; PAM sequence: TTT
ctgggctggctattctgttc

SEQ ID NO: 361336 - DNA, 20 bp, Artificial Sequence
  Description of Artificial Sequence: Synthetic oligonucleotide
  Target: LAMA2; (+) strand; PAM type: YTN; PAM sequence: TTC
tgggctggctattctgttcc

SEQ ID NO: 361337 - DNA, 20 bp, Artificial Sequence
  Description of Artificial Sequence: Synthetic oligonucleotide
  Target: LAMA2; (+) strand; PAM type: YTN; PAM sequence: CTG
ggctggctattctgttccat

SEQ ID NO: 361338 - DNA, 20 bp, Artificial Sequence
  Description of Artificial Sequence: Synthetic oligonucleotide
  Target: LAMA2; (+) strand; PAM type: YTN; PAM sequence: CTG
gctattctgttccattgatc

SEQ ID NO: 361339 - DNA, 20 bp, Artificial Sequence
  Description of Artificial Sequence: Synthetic oligonucleotide
  Target: LAMA2; (+) strand; PAM type: YTN; PAM sequence: CTA
ttctgttccattgatctaag

SEQ ID NO: 361340 - DNA, 20 bp, Artificial Sequence
  Description of Artificial Sequence: Synthetic oligonucleotide
  Target: LAMA2; (+) strand; PAM type: YTN; PAM sequence: TTC
tgttccattgatctaagtga

SEQ ID NO: 361341 - DNA, 20 bp, Artificial Sequence
  Description of Artificial Sequence: Synthetic oligonucleotide
  Target: LAMA2; (+) strand; PAM type: YTN; PAM sequence: CTG
ttccattgatctaagtgact

SEQ ID NO: 361342 - DNA, 20 bp, Artificial Sequence
  Description of Artificial Sequence: Synthetic oligonucleotide
  Target: LAMA2; (+) strand; PAM type: YTN; PAM sequence: TTC
cattgatctaagtgactttt

SEQ ID NO: 361343 - DNA, 20 bp, Artificial Sequence
  Description of Artificial Sequence: Synthetic oligonucleotide
  Target: LAMA2; (+) strand; PAM type: YTN; PAM sequence: TTG
atctaagtgacttttttctg

SEQ ID NO: 361344 - DNA, 20 bp, Artificial Sequence
  Description of Artificial Sequence: Synthetic oligonucleotide
  Target: LAMA2; (+) strand; PAM type: YTN; PAM sequence: CTA
agtgacttttttctgaccag

SEQ ID NO: 361345 - DNA, 20 bp, Artificial Sequence
  Description of Artificial Sequence: Synthetic oligonucleotide
  Target: LAMA2; (+) strand; PAM type: YTN; PAM sequence: CTT
ttttctgaccagtactatat

SEQ ID NO: 361346 - DNA, 20 bp, Artificial Sequence
  Description of Artificial Sequence: Synthetic oligonucleotide
  Target: LAMA2; (+) strand; PAM type: YTN; PAM sequence: TTT
tttctgaccagtactatatt

SEQ ID NO: 361347 - DNA, 20 bp, Artificial Sequence
  Description of Artificial Sequence: Synthetic oligonucleotide
  Target: LAMA2; (+) strand; PAM type: YTN; PAM sequence: TTT
ttctgaccagtactatattg

SEQ ID NO: 361348 - DNA, 20 bp, Artificial Sequence
  Description of Artificial Sequence: Synthetic oligonucleotide
  Target: LAMA2; (+) strand; PAM type: YTN; PAM sequence: TTT
tctgaccagtactatattgt

SEQ ID NO: 361349 - DNA, 20 bp, Artificial Sequence
  Description of Artificial Sequence: Synthetic oligonucleotide
  Target: LAMA2; (+) strand; PAM type: YTN; PAM sequence: TTT
ctgaccagtactatattgtc

SEQ ID NO: 361350 - DNA, 20 bp, Artificial Sequence
  Description of Artificial Sequence: Synthetic oligonucleotide
  Target: LAMA2; (+) strand; PAM type: YTN; PAM sequence: TTC
tgaccagtactatattgtct

SEQ ID NO: 361351 - DNA, 20 bp, Artificial Sequence
  Description of Artificial Sequence: Synthetic oligonucleotide
  Target: LAMA2; (+) strand; PAM type: YTN; PAM sequence: CTG
accagtactatattgtcttg

SEQ ID NO: 361352 - DNA, 20 bp, Artificial Sequence
  Description of Artificial Sequence: Synthetic oligonucleotide
  Target: LAMA2; (+) strand; PAM type: YTN; PAM sequence: CTA
tattgtcttgataactatag

SEQ ID NO: 361353 - DNA, 20 bp, Artificial Sequence
  Description of Artificial Sequence: Synthetic oligonucleotide
  Target: LAMA2; (+) strand; PAM type: YTN; PAM sequence: TTG
tcttgataactatagtttta

SEQ ID NO: 361354 - DNA, 20 bp, Artificial Sequence
  Description of Artificial Sequence: Synthetic oligonucleotide
  Target: LAMA2; (+) strand; PAM type: YTN; PAM sequence: CTT
gataactatagttttatact

SEQ ID NO: 361355 - DNA, 20 bp, Artificial Sequence
  Description of Artificial Sequence: Synthetic oligonucleotide
  Target: LAMA2; (+) strand; PAM type: YTN; PAM sequence: TTG
ataactatagttttatacta

SEQ ID NO: 361356 - DNA, 20 bp, Artificial Sequence
  Description of Artificial Sequence: Synthetic oligonucleotide
  Target: LAMA2; (+) strand; PAM type: YTN; PAM sequence: CTA
tagttttatactaagtcttg

SEQ ID NO: 361357 - DNA, 20 bp, Artificial Sequence
  Description of Artificial Sequence: Synthetic oligonucleotide
  Target: LAMA2; (+) strand; PAM type: YTN; PAM sequence: TTT
tatactaagtcttgaagttg

SEQ ID NO: 361358 - DNA, 20 bp, Artificial Sequence
  Description of Artificial Sequence: Synthetic oligonucleotide
  Target: LAMA2; (+) strand; PAM type: YTN; PAM sequence: TTT
atactaagtcttgaagttgg

SEQ ID NO: 361359 - DNA, 20 bp, Artificial Sequence
  Description of Artificial Sequence: Synthetic oligonucleotide
  Target: LAMA2; (+) strand; PAM type: YTN; PAM sequence: TTA
tactaagtcttgaagttggg

SEQ ID NO: 361360 - DNA, 20 bp, Artificial Sequence
  Description of Artificial Sequence: Synthetic oligonucleotide
  Target: LAMA2; (+) strand; PAM type: YTN; PAM sequence: CTA
agtcttgaagttgggtagtg

SEQ ID NO: 361361 - DNA, 20 bp, Artificial Sequence
  Description of Artificial Sequence: Synthetic oligonucleotide
  Target: LAMA2; (+) strand; PAM type: YTN; PAM sequence: CTT
gaagttgggtagtgttagct

SEQ ID NO: 361362 - DNA, 20 bp, Artificial Sequence
  Description of Artificial Sequence: Synthetic oligonucleotide
  Target: LAMA2; (+) strand; PAM type: YTN; PAM sequence: TTG
aagttgggtagtgttagctt

SEQ ID NO: 361363 - DNA, 20 bp, Artificial Sequence
  Description of Artificial Sequence: Synthetic oligonucleotide
  Target: LAMA2; (+) strand; PAM type: YTN; PAM sequence: TTG
ggtagtgttagctttacaag

SEQ ID NO: 361364 - DNA, 20 bp, Artificial Sequence
  Description of Artificial Sequence: Synthetic oligonucleotide
  Target: LAMA2; (+) strand; PAM type: YTN; PAM sequence: TTA
gctttacaagtttgttcaat

SEQ ID NO: 361365 - DNA, 20 bp, Artificial Sequence
  Description of Artificial Sequence: Synthetic oligonucleotide
  Target: LAMA2; (+) strand; PAM type: YTN; PAM sequence: CTT
tacaagtttgttcaatatta

SEQ ID NO: 361366 - DNA, 20 bp, Artificial Sequence
  Description of Artificial Sequence: Synthetic oligonucleotide
  Target: LAMA2; (+) strand; PAM type: YTN; PAM sequence: TTT
acaagtttgttcaatattat

SEQ ID NO: 361367 - DNA, 20 bp, Artificial Sequence
  Description of Artificial Sequence: Synthetic oligonucleotide
  Target: LAMA2; (+) strand; PAM type: YTN; PAM sequence: TTA
caagtttgttcaatattatt

SEQ ID NO: 361368 - DNA, 20 bp, Artificial Sequence
  Description of Artificial Sequence: Synthetic oligonucleotide
  Target: LAMA2; (+) strand; PAM type: YTN; PAM sequence: TTT
gttcaatattatttaatgat

SEQ ID NO: 361369 - DNA, 20 bp, Artificial Sequence
  Description of Artificial Sequence: Synthetic oligonucleotide
  Target: LAMA2; (+) strand; PAM type: YTN; PAM sequence: TTG
ttcaatattatttaatgatg

SEQ ID NO: 361370 - DNA, 20 bp, Artificial Sequence
  Description of Artificial Sequence: Synthetic oligonucleotide
  Target: LAMA2; (+) strand; PAM type: YTN; PAM sequence: TTC
aatattatttaatgatgtgt

SEQ ID NO: 361371 - DNA, 20 bp, Artificial Sequence
  Description of Artificial Sequence: Synthetic oligonucleotide
  Target: LAMA2; (+) strand; PAM type: YTN; PAM sequence: TTA
tttaatgatgtgttggctgt

SEQ ID NO: 361372 - DNA, 20 bp, Artificial Sequence
  Description of Artificial Sequence: Synthetic oligonucleotide
  Target: LAMA2; (+) strand; PAM type: YTN; PAM sequence: TTT
aatgatgtgttggctgttct

SEQ ID NO: 361373 - DNA, 20 bp, Artificial Sequence
  Description of Artificial Sequence: Synthetic oligonucleotide
  Target: LAMA2; (+) strand; PAM type: YTN; PAM sequence: TTA
atgatgtgttggctgttctt

SEQ ID NO: 361374 - DNA, 20 bp, Artificial Sequence
  Description of Artificial Sequence: Synthetic oligonucleotide
  Target: LAMA2; (+) strand; PAM type: YTN; PAM sequence: TTG
gctgttcttggtctttcctc

SEQ ID NO: 361375 - DNA, 20 bp, Artificial Sequence
  Description of Artificial Sequence: Synthetic oligonucleotide
  Target: LAMA2; (+) strand; PAM type: YTN; PAM sequence: CTG
ttcttggtctttcctctcca

SEQ ID NO: 361376 - DNA, 20 bp, Artificial Sequence
  Description of Artificial Sequence: Synthetic oligonucleotide
  Target: LAMA2; (+) strand; PAM type: YTN; PAM sequence: TTC
ttggtctttcctctccatat

SEQ ID NO: 361377 - DNA, 20 bp, Artificial Sequence
  Description of Artificial Sequence: Synthetic oligonucleotide
  Target: LAMA2; (+) strand; PAM type: YTN; PAM sequence: CTT
ggtctttcctctccatataa

SEQ ID NO: 361378 - DNA, 20 bp, Artificial Sequence
  Description of Artificial Sequence: Synthetic oligonucleotide
  Target: LAMA2; (+) strand; PAM type: YTN; PAM sequence: TTG
gtctttcctctccatataaa

SEQ ID NO: 361379 - DNA, 20 bp, Artificial Sequence
  Description of Artificial Sequence: Synthetic oligonucleotide
  Target: LAMA2; (+) strand; PAM type: YTN; PAM sequence: CTT
tcctctccatataaatttta

SEQ ID NO: 361380 - DNA, 20 bp, Artificial Sequence
  Description of Artificial Sequence: Synthetic oligonucleotide
  Target: LAMA2; (+) strand; PAM type: YTN; PAM sequence: TTT
cctctccatataaattttag

SEQ ID NO: 361381 - DNA, 20 bp, Artificial Sequence
  Description of Artificial Sequence: Synthetic oligonucleotide
  Target: LAMA2; (+) strand; PAM type: YTN; PAM sequence: TTC
ctctccatataaattttaga

SEQ ID NO: 361382 - DNA, 20 bp, Artificial Sequence
  Description of Artificial Sequence: Synthetic oligonucleotide
  Target: LAMA2; (+) strand; PAM type: YTN; PAM sequence: CTC
tccatataaattttagaatc

SEQ ID NO: 361383 - DNA, 20 bp, Artificial Sequence
  Description of Artificial Sequence: Synthetic oligonucleotide
  Target: LAMA2; (+) strand; PAM type: YTN; PAM sequence: CTC
catataaattttagaatcag

SEQ ID NO: 361384 - DNA, 20 bp, Artificial Sequence
  Description of Artificial Sequence: Synthetic oligonucleotide
  Target: LAMA2; (+) strand; PAM type: YTN; PAM sequence: TTT
tagaatcagtgtgttgatat

SEQ ID NO: 361385 - DNA, 20 bp, Artificial Sequence
  Description of Artificial Sequence: Synthetic oligonucleotide
  Target: LAMA2; (+) strand; PAM type: YTN; PAM sequence: TTT
agaatcagtgtgttgatatc

SEQ ID NO: 361386 - DNA, 20 bp, Artificial Sequence
  Description of Artificial Sequence: Synthetic oligonucleotide
  Target: LAMA2; (+) strand; PAM type: YTN; PAM sequence: TTA
gaatcagtgtgttgatatcc

SEQ ID NO: 361387 - DNA, 20 bp, Artificial Sequence
  Description of Artificial Sequence: Synthetic oligonucleotide
  Target: LAMA2; (+) strand; PAM type: YTN; PAM sequence: TTG
atatccaaaaaataacttgc

SEQ ID NO: 361388 - DNA, 20 bp, Artificial Sequence
  Description of Artificial Sequence: Synthetic oligonucleotide
  Target: LAMA2; (+) strand; PAM type: YTN; PAM sequence: CTT
gctgggattttgactgggat

SEQ ID NO: 361389 - DNA, 20 bp, Artificial Sequence
  Description of Artificial Sequence: Synthetic oligonucleotide
  Target: LAMA2; (+) strand; PAM type: YTN; PAM sequence: TTG
ctgggattttgactgggatt

SEQ ID NO: 361390 - DNA, 20 bp, Artificial Sequence
  Description of Artificial Sequence: Synthetic oligonucleotide
  Target: LAMA2; (+) strand; PAM type: YTN; PAM sequence: CTG
ggattttgactgggattacc

SEQ ID NO: 361391 - DNA, 20 bp, Artificial Sequence
  Description of Artificial Sequence: Synthetic oligonucleotide
  Target: LAMA2; (+) strand; PAM type: YTN; PAM sequence: TTT
tgactgggattaccttgaat

SEQ ID NO: 361392 - DNA, 20 bp, Artificial Sequence
  Description of Artificial Sequence: Synthetic oligonucleotide
  Target: LAMA2; (+) strand; PAM type: YTN; PAM sequence: TTT
gactgggattaccttgaatc

SEQ ID NO: 361393 - DNA, 20 bp, Artificial Sequence
  Description of Artificial Sequence: Synthetic oligonucleotide
  Target: LAMA2; (+) strand; PAM type: YTN; PAM sequence: TTG
actgggattaccttgaatct

SEQ ID NO: 361394 - DNA, 20 bp, Artificial Sequence
  Description of Artificial Sequence: Synthetic oligonucleotide
  Target: LAMA2; (+) strand; PAM type: YTN; PAM sequence: CTG
ggattaccttgaatctacac

SEQ ID NO: 361395 - DNA, 20 bp, Artificial Sequence
  Description of Artificial Sequence: Synthetic oligonucleotide
  Target: LAMA2; (+) strand; PAM type: YTN; PAM sequence: TTA
ccttgaatctacacaaattg

SEQ ID NO: 361396 - DNA, 20 bp, Artificial Sequence
  Description of Artificial Sequence: Synthetic oligonucleotide
  Target: LAMA2; (+) strand; PAM type: YTN; PAM sequence: CTT
gaatctacacaaattgggaa

SEQ ID NO: 361397 - DNA, 20 bp, Artificial Sequence
  Description of Artificial Sequence: Synthetic oligonucleotide
  Target: LAMA2; (+) strand; PAM type: YTN; PAM sequence: TTG
aatctacacaaattgggaag

SEQ ID NO: 361398 - DNA, 20 bp, Artificial Sequence
  Description of Artificial Sequence: Synthetic oligonucleotide
  Target: LAMA2; (+) strand; PAM type: YTN; PAM sequence: CTA
cacaaattgggaagaactga

SEQ ID NO: 361399 - DNA, 20 bp, Artificial Sequence
  Description of Artificial Sequence: Synthetic oligonucleotide
  Target: LAMA2; (+) strand; PAM type: YTN; PAM sequence: TTG
ggaagaactgacatcctacc

SEQ ID NO: 361400 - DNA, 20 bp, Artificial Sequence
  Description of Artificial Sequence: Synthetic oligonucleotide
  Target: LAMA2; (+) strand; PAM type: YTN; PAM sequence: CTG
acatcctaccttgagtcttc

SEQ ID NO: 361401 - DNA, 20 bp, Artificial Sequence
  Description of Artificial Sequence: Synthetic oligonucleotide
  Target: LAMA2; (+) strand; PAM type: YTN; PAM sequence: CTA
ccttgagtcttcctatttat

SEQ ID NO: 361402 - DNA, 20 bp, Artificial Sequence
  Description of Artificial Sequence: Synthetic oligonucleotide
  Target: LAMA2; (+) strand; PAM type: YTN; PAM sequence: CTT
gagtcttcctatttatggac

SEQ ID NO: 361403 - DNA, 20 bp, Artificial Sequence
  Description of Artificial Sequence: Synthetic oligonucleotide
  Target: LAMA2; (+) strand; PAM type: YTN; PAM sequence: TTG
agtcttcctatttatggaca

SEQ ID NO: 361404 - DNA, 20 bp, Artificial Sequence
  Description of Artificial Sequence: Synthetic oligonucleotide
  Target: LAMA2; (+) strand; PAM type: YTN; PAM sequence: CTT
cctatttatggacatggaat

SEQ ID NO: 361405 - DNA, 20 bp, Artificial Sequence
  Description of Artificial Sequence: Synthetic oligonucleotide
  Target: LAMA2; (+) strand; PAM type: YTN; PAM sequence: TTC
ctatttatggacatggaata

SEQ ID NO: 361406 - DNA, 20 bp, Artificial Sequence
  Description of Artificial Sequence: Synthetic oligonucleotide
  Target: LAMA2; (+) strand; PAM type: YTN; PAM sequence: CTA
tttatggacatggaatacct

SEQ ID NO: 361407 - DNA, 20 bp, Artificial Sequence
  Description of Artificial Sequence: Synthetic oligonucleotide
  Target: LAMA2; (+) strand; PAM type: YTN; PAM sequence: TTT
atggacatggaatacctctc

SEQ ID NO: 361408 - DNA, 20 bp, Artificial Sequence
  Description of Artificial Sequence: Synthetic oligonucleotide
  Target: LAMA2; (+) strand; PAM type: YTN; PAM sequence: TTA
tggacatggaatacctctcc

SEQ ID NO: 361409 - DNA, 20 bp, Artificial Sequence
  Description of Artificial Sequence: Synthetic oligonucleotide
  Target: LAMA2; (+) strand; PAM type: YTN; PAM sequence: CTC
tccatttatttaatttttct

SEQ ID NO: 361410 - DNA, 20 bp, Artificial Sequence
  Description of Artificial Sequence: Synthetic oligonucleotide
  Target: LAMA2; (+) strand; PAM type: YTN; PAM sequence: CTC
catttatttaatttttcttt

SEQ ID NO: 361411 - DNA, 20 bp, Artificial Sequence
  Description of Artificial Sequence: Synthetic oligonucleotide
  Target: LAMA2; (+) strand; PAM type: YTN; PAM sequence: TTT
atttaatttttctttgattt

SEQ ID NO: 361412 - DNA, 20 bp, Artificial Sequence
  Description of Artificial Sequence: Synthetic oligonucleotide
  Target: LAMA2; (+) strand; PAM type: YTN; PAM sequence: TTA
tttaatttttctttgatttc

SEQ ID NO: 361413 - DNA, 20 bp, Artificial Sequence
  Description of Artificial Sequence: Synthetic oligonucleotide
  Target: LAMA2; (+) strand; PAM type: YTN; PAM sequence: TTT
aatttttctttgatttcttt

SEQ ID NO: 361414 - DNA, 20 bp, Artificial Sequence
  Description of Artificial Sequence: Synthetic oligonucleotide
  Target: LAMA2; (+) strand; PAM type: YTN; PAM sequence: TTA
atttttctttgatttctttc

SEQ ID NO: 361415 - DNA, 20 bp, Artificial Sequence
  Description of Artificial Sequence: Synthetic oligonucleotide
  Target: LAMA2; (+) strand; PAM type: YTN; PAM sequence: TTT
ttctttgatttctttcactg

SEQ ID NO: 361416 - DNA, 20 bp, Artificial Sequence
  Description of Artificial Sequence: Synthetic oligonucleotide
  Target: LAMA2; (+) strand; PAM type: YTN; PAM sequence: TTT
tctttgatttctttcactgg

SEQ ID NO: 361417 - DNA, 20 bp, Artificial Sequence
  Description of Artificial Sequence: Synthetic oligonucleotide
  Target: LAMA2; (+) strand; PAM type: YTN; PAM sequence: TTT
ctttgatttctttcactgga

SEQ ID NO: 361418 - DNA, 20 bp, Artificial Sequence
  Description of Artificial Sequence: Synthetic oligonucleotide
  Target: LAMA2; (+) strand; PAM type: YTN; PAM sequence: TTC
tttgatttctttcactggag

SEQ ID NO: 361419 - DNA, 20 bp, Artificial Sequence
  Description of Artificial Sequence: Synthetic oligonucleotide
  Target: LAMA2; (+) strand; PAM type: YTN; PAM sequence: CTT
tgatttctttcactggagtt

SEQ ID NO: 361420 - DNA, 20 bp, Artificial Sequence
  Description of Artificial Sequence: Synthetic oligonucleotide
  Target: LAMA2; (+) strand; PAM type: YTN; PAM sequence: TTT
gatttctttcactggagttt

SEQ ID NO: 361421 - DNA, 20 bp, Artificial Sequence
  Description of Artificial Sequence: Synthetic oligonucleotide
  Target: LAMA2; (+) strand; PAM type: YTN; PAM sequence: TTG
atttctttcactggagtttt

SEQ ID NO: 361422 - DNA, 20 bp, Artificial Sequence
  Description of Artificial Sequence: Synthetic oligonucleotide
  Target: LAMA2; (+) strand; PAM type: YTN; PAM sequence: TTT
ctttcactggagttttatag

SEQ ID NO: 361423 - DNA, 20 bp, Artificial Sequence
  Description of Artificial Sequence: Synthetic oligonucleotide
  Target: LAMA2; (+) strand; PAM type: YTN; PAM sequence: TTC
tttcactggagttttatagt

SEQ ID NO: 361424 - DNA, 20 bp, Artificial Sequence
  Description of Artificial Sequence: Synthetic oligonucleotide
  Target: LAMA2; (+) strand; PAM type: YTN; PAM sequence: CTT
tcactggagttttatagttt

SEQ ID NO: 361425 - DNA, 20 bp, Artificial Sequence
  Description of Artificial Sequence: Synthetic oligonucleotide
  Target: LAMA2; (+) strand; PAM type: YTN; PAM sequence: TTT
cactggagttttatagtttt

SEQ ID NO: 361426 - DNA, 20 bp, Artificial Sequence
  Description of Artificial Sequence: Synthetic oligonucleotide
  Target: LAMA2; (+) strand; PAM type: YTN; PAM sequence: TTC
actggagttttatagttttc

SEQ ID NO: 361427 - DNA, 20 bp, Artificial Sequence
  Description of Artificial Sequence: Synthetic oligonucleotide
  Target: LAMA2; (+) strand; PAM type: YTN; PAM sequence: CTG
gagttttatagttttcctca

SEQ ID NO: 361428 - DNA, 20 bp, Artificial Sequence
  Description of Artificial Sequence: Synthetic oligonucleotide
  Target: LAMA2; (+) strand; PAM type: YTN; PAM sequence: TTT
tatagttttcctcatataga

SEQ ID NO: 361429 - DNA, 20 bp, Artificial Sequence
  Description of Artificial Sequence: Synthetic oligonucleotide
  Target: LAMA2; (+) strand; PAM type: YTN; PAM sequence: TTT
atagttttcctcatatagat

SEQ ID NO: 361430 - DNA, 20 bp, Artificial Sequence
  Description of Artificial Sequence: Synthetic oligonucleotide
  Target: LAMA2; (+) strand; PAM type: YTN; PAM sequence: TTA
tagttttcctcatatagatt

SEQ ID NO: 361431 - DNA, 20 bp, Artificial Sequence
  Description of Artificial Sequence: Synthetic oligonucleotide
  Target: LAMA2; (+) strand; PAM type: YTN; PAM sequence: TTT
tcctcatatagattttgtac

SEQ ID NO: 361432 - DNA, 20 bp, Artificial Sequence
  Description of Artificial Sequence: Synthetic oligonucleotide
  Target: LAMA2; (+) strand; PAM type: YTN; PAM sequence: TTT
cctcatatagattttgtaca

SEQ ID NO: 361433 - DNA, 20 bp, Artificial Sequence
  Description of Artificial Sequence: Synthetic oligonucleotide
  Target: LAMA2; (+) strand; PAM type: YTN; PAM sequence: TTC
ctcatatagattttgtacat

SEQ ID NO: 361434 - DNA, 20 bp, Artificial Sequence
  Description of Artificial Sequence: Synthetic oligonucleotide
  Target: LAMA2; (+) strand; PAM type: YTN; PAM sequence: CTC
atatagattttgtacataat

SEQ ID NO: 361435 - DNA, 20 bp, Artificial Sequence
  Description of Artificial Sequence: Synthetic oligonucleotide
  Target: LAMA2; (+) strand; PAM type: YTN; PAM sequence: TTT
tgtacataatttgttagatt

SEQ ID NO: 361436 - DNA, 20 bp, Artificial Sequence
  Description of Artificial Sequence: Synthetic oligonucleotide
  Target: LAMA2; (+) strand; PAM type: YTN; PAM sequence: TTT
gtacataatttgttagattt

SEQ ID NO: 361437 - DNA, 20 bp, Artificial Sequence
  Description of Artificial Sequence: Synthetic oligonucleotide
  Target: LAMA2; (+) strand; PAM type: YTN; PAM sequence: TTG
tacataatttgttagattta

SEQ ID NO: 361438 - DNA, 20 bp, Artificial Sequence
  Description of Artificial Sequence: Synthetic oligonucleotide
  Target: LAMA2; (+) strand; PAM type: YTN; PAM sequence: TTT
gttagatttatattgaagtg

SEQ ID NO: 361439 - DNA, 20 bp, Artificial Sequence
  Description of Artificial Sequence: Synthetic oligonucleotide
  Target: LAMA2; (+) strand; PAM type: YTN; PAM sequence: TTG
ttagatttatattgaagtgt

SEQ ID NO: 361440 - DNA, 20 bp, Artificial Sequence
  Description of Artificial Sequence: Synthetic oligonucleotide
  Target: LAMA2; (+) strand; PAM type: YTN; PAM sequence: TTA
gatttatattgaagtgtttt

SEQ ID NO: 361441 - DNA, 20 bp, Artificial Sequence
  Description of Artificial Sequence: Synthetic oligonucleotide
  Target: LAMA2; (+) strand; PAM type: YTN; PAM sequence: TTT
atattgaagtgttttgtgga

SEQ ID NO: 361442 - DNA, 20 bp, Artificial Sequence
  Description of Artificial Sequence: Synthetic oligonucleotide
  Target: LAMA2; (+) strand; PAM type: YTN; PAM sequence: TTA
tattgaagtgttttgtggag

SEQ ID NO: 361443 - DNA, 20 bp, Artificial Sequence
  Description of Artificial Sequence: Synthetic oligonucleotide
  Target: LAMA2; (+) strand; PAM type: YTN; PAM sequence: TTG
aagtgttttgtggagcatgc

SEQ ID NO: 361444 - DNA, 20 bp, Artificial Sequence
  Description of Artificial Sequence: Synthetic oligonucleotide
  Target: LAMA2; (+) strand; PAM type: YTN; PAM sequence: TTT
tgtggagcatgctagtataa

SEQ ID NO: 361445 - DNA, 20 bp, Artificial Sequence
  Description of Artificial Sequence: Synthetic oligonucleotide
  Target: LAMA2; (+) strand; PAM type: YTN; PAM sequence: TTT
gtggagcatgctagtataaa

SEQ ID NO: 361446 - DNA, 20 bp, Artificial Sequence
  Description of Artificial Sequence: Synthetic oligonucleotide
  Target: LAMA2; (+) strand; PAM type: YTN; PAM sequence: TTG
tggagcatgctagtataaat

SEQ ID NO: 361447 - DNA, 20 bp, Artificial Sequence
  Description of Artificial Sequence: Synthetic oligonucleotide
  Target: LAMA2; (+) strand; PAM type: YTN; PAM sequence: CTA
gtataaatggtcttgtgttt

SEQ ID NO: 361448 - DNA, 20 bp, Artificial Sequence
  Description of Artificial Sequence: Synthetic oligonucleotide
  Target: LAMA2; (+) strand; PAM type: YTN; PAM sequence: CTT
gtgtttttaacttcacattc

SEQ ID NO: 361449 - DNA, 20 bp, Artificial Sequence
  Description of Artificial Sequence: Synthetic oligonucleotide
  Target: LAMA2; (+) strand; PAM type: YTN; PAM sequence: TTG
tgtttttaacttcacattcc

SEQ ID NO: 361450 - DNA, 20 bp, Artificial Sequence
  Description of Artificial Sequence: Synthetic oligonucleotide
  Target: LAMA2; (+) strand; PAM type: YTN; PAM sequence: TTT
ttaacttcacattccaattt

SEQ ID NO: 361451 - DNA, 20 bp, Artificial Sequence
  Description of Artificial Sequence: Synthetic oligonucleotide
  Target: LAMA2; (+) strand; PAM type: YTN; PAM sequence: TTT
taacttcacattccaatttt

SEQ ID NO: 361452 - DNA, 20 bp, Artificial Sequence
  Description of Artificial Sequence: Synthetic oligonucleotide
  Target: LAMA2; (+) strand; PAM type: YTN; PAM sequence: TTT
aacttcacattccaattttc

SEQ ID NO: 361453 - DNA, 20 bp, Artificial Sequence
  Description of Artificial Sequence: Synthetic oligonucleotide
  Target: LAMA2; (+) strand; PAM type: YTN; PAM sequence: TTA
acttcacattccaattttct

SEQ ID NO: 361454 - DNA, 20 bp, Artificial Sequence
  Description of Artificial Sequence: Synthetic oligonucleotide
  Target: LAMA2; (+) strand; PAM type: YTN; PAM sequence: CTT
cacattccaattttctttgc

SEQ ID NO: 361455 - DNA, 20 bp, Artificial Sequence
  Description of Artificial Sequence: Synthetic oligonucleotide
  Target: LAMA2; (+) strand; PAM type: YTN; PAM sequence: TTC
acattccaattttctttgct

SEQ ID NO: 361456 - DNA, 20 bp, Artificial Sequence
  Description of Artificial Sequence: Synthetic oligonucleotide
  Target: LAMA2; (+) strand; PAM type: YTN; PAM sequence: TTC
caattttctttgctaatata

SEQ ID NO: 361457 - DNA, 20 bp, Artificial Sequence
  Description of Artificial Sequence: Synthetic oligonucleotide
  Target: LAMA2; (+) strand; PAM type: YTN; PAM sequence: TTT
tctttgctaatatataggaa

SEQ ID NO: 361458 - DNA, 20 bp, Artificial Sequence
  Description of Artificial Sequence: Synthetic oligonucleotide
  Target: LAMA2; (+) strand; PAM type: YTN; PAM sequence: TTT
ctttgctaatatataggaaa

SEQ ID NO: 361459 - DNA, 20 bp, Artificial Sequence
  Description of Artificial Sequence: Synthetic oligonucleotide
  Target: LAMA2; (+) strand; PAM type: YTN; PAM sequence: TTC
tttgctaatatataggaaag

SEQ ID NO: 361460 - DNA, 20 bp, Artificial Sequence
  Description of Artificial Sequence: Synthetic oligonucleotide
  Target: LAMA2; (+) strand; PAM type: YTN; PAM sequence: CTT
tgctaatatataggaaagca

SEQ ID NO: 361461 - DNA, 20 bp, Artificial Sequence
  Description of Artificial Sequence: Synthetic oligonucleotide
  Target: LAMA2; (+) strand; PAM type: YTN; PAM sequence: TTT
gctaatatataggaaagcaa

SEQ ID NO: 361462 - DNA, 20 bp, Artificial Sequence
  Description of Artificial Sequence: Synthetic oligonucleotide
  Target: LAMA2; (+) strand; PAM type: YTN; PAM sequence: TTG
ctaatatataggaaagcaat

SEQ ID NO: 361463 - DNA, 20 bp, Artificial Sequence
  Description of Artificial Sequence: Synthetic oligonucleotide
  Target: LAMA2; (+) strand; PAM type: YTN; PAM sequence: CTA
atatataggaaagcaattga

SEQ ID NO: 361464 - DNA, 20 bp, Artificial Sequence
  Description of Artificial Sequence: Synthetic oligonucleotide
  Target: LAMA2; (+) strand; PAM type: YTN; PAM sequence: TTG
acttttataccacctttttc

SEQ ID NO: 361465 - DNA, 20 bp, Artificial Sequence
  Description of Artificial Sequence: Synthetic oligonucleotide
  Target: LAMA2; (+) strand; PAM type: YTN; PAM sequence: CTT
ttataccacctttttcttca

SEQ ID NO: 361466 - DNA, 20 bp, Artificial Sequence
  Description of Artificial Sequence: Synthetic oligonucleotide
  Target: LAMA2; (+) strand; PAM type: YTN; PAM sequence: TTT
tataccacctttttcttcag

SEQ ID NO: 361467 - DNA, 20 bp, Artificial Sequence
  Description of Artificial Sequence: Synthetic oligonucleotide
  Target: LAMA2; (+) strand; PAM type: YTN; PAM sequence: TTT
ataccacctttttcttcaga

SEQ ID NO: 361468 - DNA, 20 bp, Artificial Sequence
  Description of Artificial Sequence: Synthetic oligonucleotide
  Target: LAMA2; (+) strand; PAM type: YTN; PAM sequence: TTA
taccacctttttcttcagac

SEQ ID NO: 361469 - DNA, 20 bp, Artificial Sequence
  Description of Artificial Sequence: Synthetic oligonucleotide
  Target: LAMA2; (+) strand; PAM type: YTN; PAM sequence: CTT
tttcttcagacagatggaat

SEQ ID NO: 361470 - DNA, 20 bp, Artificial Sequence
  Description of Artificial Sequence: Synthetic oligonucleotide
  Target: LAMA2; (+) strand; PAM type: YTN; PAM sequence: TTT
ttcttcagacagatggaatc

SEQ ID NO: 361471 - DNA, 20 bp, Artificial Sequence
  Description of Artificial Sequence: Synthetic oligonucleotide
  Target: LAMA2; (+) strand; PAM type: YTN; PAM sequence: TTT
tcttcagacagatggaatca

SEQ ID NO: 361472 - DNA, 20 bp, Artificial Sequence
  Description of Artificial Sequence: Synthetic oligonucleotide
  Target: LAMA2; (+) strand; PAM type: YTN; PAM sequence: TTT
cttcagacagatggaatcaa

SEQ ID NO: 361473 - DNA, 20 bp, Artificial Sequence
  Description of Artificial Sequence: Synthetic oligonucleotide
  Target: LAMA2; (+) strand; PAM type: YTN; PAM sequence: TTC
ttcagacagatggaatcaag

SEQ ID NO: 361474 - DNA, 20 bp, Artificial Sequence
  Description of Artificial Sequence: Synthetic oligonucleotide
  Target: LAMA2; (+) strand; PAM type: YTN; PAM sequence: CTT
cagacagatggaatcaagtg

SEQ ID NO: 361475 - DNA, 20 bp, Artificial Sequence
  Description of Artificial Sequence: Synthetic oligonucleotide
  Target: LAMA2; (+) strand; PAM type: YTN; PAM sequence: TTC
agacagatggaatcaagtga

SEQ ID NO: 361476 - DNA, 20 bp, Artificial Sequence
  Description of Artificial Sequence: Synthetic oligonucleotide
  Target: LAMA2; (+) strand; PAM type: YTN; PAM sequence: CTT
agaaattggctttgttgctc

SEQ ID NO: 361477 - DNA, 20 bp, Artificial Sequence
  Description of Artificial Sequence: Synthetic oligonucleotide
  Target: LAMA2; (+) strand; PAM type: YTN; PAM sequence: TTA
gaaattggctttgttgctct

SEQ ID NO: 361478 - DNA, 20 bp, Artificial Sequence
  Description of Artificial Sequence: Synthetic oligonucleotide
  Target: LAMA2; (+) strand; PAM type: YTN; PAM sequence: TTG
gctttgttgctctgcctgag

SEQ ID NO: 361479 - DNA, 20 bp, Artificial Sequence
  Description of Artificial Sequence: Synthetic oligonucleotide
  Target: LAMA2; (+) strand; PAM type: YTN; PAM sequence: CTT
tgttgctctgcctgagtatc

SEQ ID NO: 361480 - DNA, 20 bp, Artificial Sequence
  Description of Artificial Sequence: Synthetic oligonucleotide
  Target: LAMA2; (+) strand; PAM type: YTN; PAM sequence: TTT
gttgctctgcctgagtatct

SEQ ID NO: 361481 - DNA, 20 bp, Artificial Sequence
  Description of Artificial Sequence: Synthetic oligonucleotide
  Target: LAMA2; (+) strand; PAM type: YTN; PAM sequence: TTG
ttgctctgcctgagtatctt

SEQ ID NO: 361482 - DNA, 20 bp, Artificial Sequence
  Description of Artificial Sequence: Synthetic oligonucleotide
  Target: LAMA2; (+) strand; PAM type: YTN; PAM sequence: TTG
ctctgcctgagtatcttgaa

SEQ ID NO: 361483 - DNA, 20 bp, Artificial Sequence
  Description of Artificial Sequence: Synthetic oligonucleotide
  Target: LAMA2; (+) strand; PAM type: YTN; PAM sequence: CTC
tgcctgagtatcttgaaaat

SEQ ID NO: 361484 - DNA, 20 bp, Artificial Sequence
  Description of Artificial Sequence: Synthetic oligonucleotide
  Target: LAMA2; (+) strand; PAM type: YTN; PAM sequence: CTG
cctgagtatcttgaaaattc

SEQ ID NO: 361485 - DNA, 20 bp, Artificial Sequence
  Description of Artificial Sequence: Synthetic oligonucleotide
  Target: LAMA2; (+) strand; PAM type: YTN; PAM sequence: CTG
agtatcttgaaaattctcat

SEQ ID NO: 361486 - DNA, 20 bp, Artificial Sequence
  Description of Artificial Sequence: Synthetic oligonucleotide
  Target: LAMA2; (+) strand; PAM type: YTN; PAM sequence: CTT
gaaaattctcatcttccttc

SEQ ID NO: 361487 - DNA, 20 bp, Artificial Sequence
  Description of Artificial Sequence: Synthetic oligonucleotide
  Target: LAMA2; (+) strand; PAM type: YTN; PAM sequence: TTG
aaaattctcatcttccttct

SEQ ID NO: 361488 - DNA, 20 bp, Artificial Sequence
  Description of Artificial Sequence: Synthetic oligonucleotide
  Target: LAMA2; (+) strand; PAM type: YTN; PAM sequence: TTC
tcatcttccttctgagaacc

SEQ ID NO: 361489 - DNA, 20 bp, Artificial Sequence
  Description of Artificial Sequence: Synthetic oligonucleotide
  Target: LAMA2; (+) strand; PAM type: YTN; PAM sequence: CTC
atcttccttctgagaaccat

SEQ ID NO: 361490 - DNA, 20 bp, Artificial Sequence
  Description of Artificial Sequence: Synthetic oligonucleotide
  Target: LAMA2; (+) strand; PAM type: YTN; PAM sequence: CTT
ccttctgagaaccataacct

SEQ ID NO: 361491 - DNA, 20 bp, Artificial Sequence
  Description of Artificial Sequence: Synthetic oligonucleotide
  Target: LAMA2; (+) strand; PAM type: YTN; PAM sequence: TTC
cttctgagaaccataaccta

SEQ ID NO: 361492 - DNA, 20 bp, Artificial Sequence
  Description of Artificial Sequence: Synthetic oligonucleotide
  Target: LAMA2; (+) strand; PAM type: YTN; PAM sequence: CTT
ctgagaaccataacctacat

SEQ ID NO: 361493 - DNA, 20 bp, Artificial Sequence
  Description of Artificial Sequence: Synthetic oligonucleotide
  Target: LAMA2; (+) strand; PAM type: YTN; PAM sequence: TTC
tgagaaccataacctacata

SEQ ID NO: 361494 - DNA, 20 bp, Artificial Sequence
  Description of Artificial Sequence: Synthetic oligonucleotide
  Target: LAMA2; (+) strand; PAM type: YTN; PAM sequence: CTG
agaaccataacctacatatc

SEQ ID NO: 361495 - DNA, 20 bp, Artificial Sequence
  Description of Artificial Sequence: Synthetic oligonucleotide
  Target: LAMA2; (+) strand; PAM type: YTN; PAM sequence: CTA
catatctcaaggttatagat

SEQ ID NO: 361496 - DNA, 20 bp, Artificial Sequence
  Description of Artificial Sequence: Synthetic oligonucleotide
  Target: LAMA2; (+) strand; PAM type: YTN; PAM sequence: CTC
aaggttatagataaaatgct

SEQ ID NO: 361497 - DNA, 20 bp, Artificial Sequence
  Description of Artificial Sequence: Synthetic oligonucleotide
  Target: LAMA2; (+) strand; PAM type: YTN; PAM sequence: TTA
tagataaaatgctacctaca

SEQ ID NO: 361498 - DNA, 20 bp, Artificial Sequence
  Description of Artificial Sequence: Synthetic oligonucleotide
  Target: LAMA2; (+) strand; PAM type: YTN; PAM sequence: CTA
cctacaaaatccttgtaatg

SEQ ID NO: 361499 - DNA, 20 bp, Artificial Sequence
  Description of Artificial Sequence: Synthetic oligonucleotide
  Target: LAMA2; (+) strand; PAM type: YTN; PAM sequence: CTA
caaaatccttgtaatgctta

SEQ ID NO: 361500 - DNA, 20 bp, Artificial Sequence
  Description of Artificial Sequence: Synthetic oligonucleotide
  Target: LAMA2; (+) strand; PAM type: YTN; PAM sequence: CTT
gtaatgcttacagtctaaaa

SEQ ID NO: 361501 - DNA, 20 bp, Artificial Sequence
  Description of Artificial Sequence: Synthetic oligonucleotide
  Target: LAMA2; (+) strand; PAM type: YTN; PAM sequence: TTG
taatgcttacagtctaaaag

SEQ ID NO: 361502 - DNA, 20 bp, Artificial Sequence
  Description of Artificial Sequence: Synthetic oligonucleotide
  Target: LAMA2; (+) strand; PAM type: YTN; PAM sequence: CTT
acagtctaaaagactaaata

SEQ ID NO: 361503 - DNA, 20 bp, Artificial Sequence
  Description of Artificial Sequence: Synthetic oligonucleotide
  Target: LAMA2; (+) strand; PAM type: YTN; PAM sequence: TTA
cagtctaaaagactaaataa

SEQ ID NO: 361504 - DNA, 20 bp, Artificial Sequence
  Description of Artificial Sequence: Synthetic oligonucleotide
  Target: LAMA2; (+) strand; PAM type: YTN; PAM sequence: CTA
aaagactaaataaggcctca

SEQ ID NO: 361505 - DNA, 20 bp, Artificial Sequence
  Description of Artificial Sequence: Synthetic oligonucleotide
  Target: LAMA2; (+) strand; PAM type: YTN; PAM sequence: CTA
aataaggcctcaagagatta

SEQ ID NO: 361506 - DNA, 20 bp, Artificial Sequence
  Description of Artificial Sequence: Synthetic oligonucleotide
  Target: LAMA2; (+) strand; PAM type: YTN; PAM sequence: CTC
aagagattattcaaaatcag

SEQ ID NO: 361507 - DNA, 20 bp, Artificial Sequence
  Description of Artificial Sequence: Synthetic oligonucleotide
  Target: LAMA2; (+) strand; PAM type: YTN; PAM sequence: TTA
ttcaaaatcagagttgttga

SEQ ID NO: 361508 - DNA, 20 bp, Artificial Sequence
  Description of Artificial Sequence: Synthetic oligonucleotide
  Target: LAMA2; (+) strand; PAM type: YTN; PAM sequence: TTC
aaaatcagagttgttgattc

SEQ ID NO: 361509 - DNA, 20 bp, Artificial Sequence
  Description of Artificial Sequence: Synthetic oligonucleotide
  Target: LAMA2; (+) strand; PAM type: YTN; PAM sequence: TTG
ttgattcccagtagagtcat

SEQ ID NO: 361510 - DNA, 20 bp, Artificial Sequence
  Description of Artificial Sequence: Synthetic oligonucleotide
  Target: LAMA2; (+) strand; PAM type: YTN; PAM sequence: TTG
attcccagtagagtcataaa

SEQ ID NO: 361511 - DNA, 20 bp, Artificial Sequence
  Description of Artificial Sequence: Synthetic oligonucleotide
  Target: LAMA2; (+) strand; PAM type: YTN; PAM sequence: TTC
ccagtagagtcataaagggc

SEQ ID NO: 361512 - DNA, 20 bp, Artificial Sequence
  Description of Artificial Sequence: Synthetic oligonucleotide
  Target: LAMA2; (+) strand; PAM type: YTN; PAM sequence: CTA
tgttatgttagctgcaattc

SEQ ID NO: 361513 - DNA, 20 bp, Artificial Sequence
  Description of Artificial Sequence: Synthetic oligonucleotide
  Target: LAMA2; (+) strand; PAM type: YTN; PAM sequence: TTA
tgttagctgcaattctaatc

SEQ ID NO: 361514 - DNA, 20 bp, Artificial Sequence
  Description of Artificial Sequence: Synthetic oligonucleotide
  Target: LAMA2; (+) strand; PAM type: YTN; PAM sequence: TTA
gctgcaattctaatcctata

SEQ ID NO: 361515 - DNA, 20 bp, Artificial Sequence
  Description of Artificial Sequence: Synthetic oligonucleotide
  Target: LAMA2; (+) strand; PAM type: YTN; PAM sequence: CTG
caattctaatcctatatcaa

SEQ ID NO: 361516 - DNA, 20 bp, Artificial Sequence
  Description of Artificial Sequence: Synthetic oligonucleotide
  Target: LAMA2; (+) strand; PAM type: YTN; PAM sequence: TTC
taatcctatatcaaagcttc

SEQ ID NO: 361517 - DNA, 20 bp, Artificial Sequence
  Description of Artificial Sequence: Synthetic oligonucleotide
  Target: LAMA2; (+) strand; PAM type: YTN; PAM sequence: CTA
atcctatatcaaagcttctg

SEQ ID NO: 361518 - DNA, 20 bp, Artificial Sequence
  Description of Artificial Sequence: Synthetic oligonucleotide
  Target: LAMA2; (+) strand; PAM type: YTN; PAM sequence: CTA
tatcaaagcttctgacttcc

SEQ ID NO: 361519 - DNA, 20 bp, Artificial Sequence
  Description of Artificial Sequence: Synthetic oligonucleotide
  Target: LAMA2; (+) strand; PAM type: YTN; PAM sequence: CTT
ctgacttccactcccccata

SEQ ID NO: 361520 - DNA, 20 bp, Artificial Sequence
  Description of Artificial Sequence: Synthetic oligonucleotide
  Target: LAMA2; (+) strand; PAM type: YTN; PAM sequence: TTC
tgacttccactcccccatat

SEQ ID NO: 361521 - DNA, 20 bp, Artificial Sequence
  Description of Artificial Sequence: Synthetic oligonucleotide
  Target: LAMA2; (+) strand; PAM type: YTN; PAM sequence: CTG
acttccactcccccatatct

SEQ ID NO: 361522 - DNA, 20 bp, Artificial Sequence
  Description of Artificial Sequence: Synthetic oligonucleotide
  Target: LAMA2; (+) strand; PAM type: YTN; PAM sequence: CTT
ccactcccccatatctaagg

SEQ ID NO: 361523 - DNA, 20 bp, Artificial Sequence
  Description of Artificial Sequence: Synthetic oligonucleotide
  Target: LAMA2; (+) strand; PAM type: YTN; PAM sequence: TTC
cactcccccatatctaagga

SEQ ID NO: 361524 - DNA, 20 bp, Artificial Sequence
  Description of Artificial Sequence: Synthetic oligonucleotide
  Target: LAMA2; (+) strand; PAM type: YTN; PAM sequence: CTC
ccccatatctaaggaggttt

SEQ ID NO: 361525 - DNA, 20 bp, Artificial Sequence
  Description of Artificial Sequence: Synthetic oligonucleotide
  Target: LAMA2; (+) strand; PAM type: YTN; PAM sequence: CTA
aggaggtttccctcaacagt

SEQ ID NO: 361526 - DNA, 20 bp, Artificial Sequence
  Description of Artificial Sequence: Synthetic oligonucleotide
  Target: LAMA2; (+) strand; PAM type: YTN; PAM sequence: TTT
ccctcaacagttgaaaaata

SEQ ID NO: 361527 - DNA, 20 bp, Artificial Sequence
  Description of Artificial Sequence: Synthetic oligonucleotide
  Target: LAMA2; (+) strand; PAM type: YTN; PAM sequence: TTC
cctcaacagttgaaaaataa

SEQ ID NO: 361528 - DNA, 20 bp, Artificial Sequence
  Description of Artificial Sequence: Synthetic oligonucleotide
  Target: LAMA2; (+) strand; PAM type: YTN; PAM sequence: CTC
aacagttgaaaaataactgc

SEQ ID NO: 361529 - DNA, 20 bp, Artificial Sequence
  Description of Artificial Sequence: Synthetic oligonucleotide
  Target: LAMA2; (+) strand; PAM type: YTN; PAM sequence: TTG
aaaaataactgcagatactg

SEQ ID NO: 361530 - DNA, 20 bp, Artificial Sequence
  Description of Artificial Sequence: Synthetic oligonucleotide
  Target: LAMA2; (+) strand; PAM type: YTN; PAM sequence: CTG
cagatactgctttgccatcc

SEQ ID NO: 361531 - DNA, 20 bp, Artificial Sequence
  Description of Artificial Sequence: Synthetic oligonucleotide
  Target: LAMA2; (+) strand; PAM type: YTN; PAM sequence: CTG
ctttgccatcccatgccaca

SEQ ID NO: 361532 - DNA, 20 bp, Artificial Sequence
  Description of Artificial Sequence: Synthetic oligonucleotide
  Target: LAMA2; (+) strand; PAM type: YTN; PAM sequence: CTT
tgccatcccatgccacaaaa

SEQ ID NO: 361533 - DNA, 20 bp, Artificial Sequence
  Description of Artificial Sequence: Synthetic oligonucleotide
  Target: LAMA2; (+) strand; PAM type: YTN; PAM sequence: TTT
gccatcccatgccacaaaaa

SEQ ID NO: 361534 - DNA, 20 bp, Artificial Sequence
  Description of Artificial Sequence: Synthetic oligonucleotide
  Target: LAMA2; (+) strand; PAM type: YTN; PAM sequence: TTG
ccatcccatgccacaaaaat

SEQ ID NO: 361535 - DNA, 20 bp, Artificial Sequence
  Description of Artificial Sequence: Synthetic oligonucleotide
  Target: LAMA2; (+) strand; PAM type: YTN; PAM sequence: TTT
ctgaaggatgctgcagagag

SEQ ID NO: 361536 - DNA, 20 bp, Artificial Sequence
  Description of Artificial Sequence: Synthetic oligonucleotide
  Target: LAMA2; (+) strand; PAM type: YTN; PAM sequence: TTC
tgaaggatgctgcagagaga

SEQ ID NO: 361537 - DNA, 20 bp, Artificial Sequence
  Description of Artificial Sequence: Synthetic oligonucleotide
  Target: LAMA2; (+) strand; PAM type: YTN; PAM sequence: CTG
aaggatgctgcagagagata

SEQ ID NO: 361538 - DNA, 20 bp, Artificial Sequence
  Description of Artificial Sequence: Synthetic oligonucleotide
  Target: LAMA2; (+) strand; PAM type: YTN; PAM sequence: CTG
cagagagatatatatttctt

SEQ ID NO: 361539 - DNA, 20 bp, Artificial Sequence
  Description of Artificial Sequence: Synthetic oligonucleotide
  Target: LAMA2; (+) strand; PAM type: YTN; PAM sequence: TTT
cttaagcccagctcatatct

SEQ ID NO: 361540 - DNA, 20 bp, Artificial Sequence
  Description of Artificial Sequence: Synthetic oligonucleotide
  Target: LAMA2; (+) strand; PAM type: YTN; PAM sequence: TTC
ttaagcccagctcatatcta

SEQ ID NO: 361541 - DNA, 20 bp, Artificial Sequence
  Description of Artificial Sequence: Synthetic oligonucleotide
  Target: LAMA2; (+) strand; PAM type: YTN; PAM sequence: CTT
aagcccagctcatatctatt

SEQ ID NO: 361542 - DNA, 20 bp, Artificial Sequence
  Description of Artificial Sequence: Synthetic oligonucleotide
  Target: LAMA2; (+) strand; PAM type: YTN; PAM sequence: TTA
agcccagctcatatctattt

SEQ ID NO: 361543 - DNA, 20 bp, Artificial Sequence
  Description of Artificial Sequence: Synthetic oligonucleotide
  Target: LAMA2; (+) strand; PAM type: YTN; PAM sequence: CTC
atatctatttctcaaggctg

SEQ ID NO: 361544 - DNA, 20 bp, Artificial Sequence
  Description of Artificial Sequence: Synthetic oligonucleotide
  Target: LAMA2; (+) strand; PAM type: YTN; PAM sequence: CTA
tttctcaaggctgtgtgata

SEQ ID NO: 361545 - DNA, 20 bp, Artificial Sequence
  Description of Artificial Sequence: Synthetic oligonucleotide
  Target: LAMA2; (+) strand; PAM type: YTN; PAM sequence: TTT
ctcaaggctgtgtgatatca

SEQ ID NO: 361546 - DNA, 20 bp, Artificial Sequence
  Description of Artificial Sequence: Synthetic oligonucleotide
  Target: LAMA2; (+) strand; PAM type: YTN; PAM sequence: TTC
tcaaggctgtgtgatatcat

SEQ ID NO: 361547 - DNA, 20 bp, Artificial Sequence
  Description of Artificial Sequence: Synthetic oligonucleotide
  Target: LAMA2; (+) strand; PAM type: YTN; PAM sequence: CTC
aaggctgtgtgatatcatag

SEQ ID NO: 361548 - DNA, 20 bp, Artificial Sequence
  Description of Artificial Sequence: Synthetic oligonucleotide
  Target: LAMA2; (+) strand; PAM type: YTN; PAM sequence: CTG
tgtgatatcatagaatgaat

SEQ ID NO: 361549 - DNA, 20 bp, Artificial Sequence
  Description of Artificial Sequence: Synthetic oligonucleotide
  Target: LAMA2; (+) strand; PAM type: YTN; PAM sequence: TTT
atttatttatttatcagtca

SEQ ID NO: 361550 - DNA, 20 bp, Artificial Sequence
  Description of Artificial Sequence: Synthetic oligonucleotide
  Target: LAMA2; (+) strand; PAM type: YTN; PAM sequence: TTA
tttatttatttatcagtcaa

SEQ ID NO: 361551 - DNA, 20 bp, Artificial Sequence
  Description of Artificial Sequence: Synthetic oligonucleotide
  Target: LAMA2; (+) strand; PAM type: YTN; PAM sequence: TTT
atttatttatcagtcaaata

SEQ ID NO: 361552 - DNA, 20 bp, Artificial Sequence
  Description of Artificial Sequence: Synthetic oligonucleotide
  Target: LAMA2; (+) strand; PAM type: YTN; PAM sequence: TTA
tttatttatcagtcaaataa

SEQ ID NO: 361553 - DNA, 20 bp, Artificial Sequence
  Description of Artificial Sequence: Synthetic oligonucleotide
  Target: LAMA2; (+) strand; PAM type: YTN; PAM sequence: TTT
atttatcagtcaaataaatc

SEQ ID NO: 361554 - DNA, 20 bp, Artificial Sequence
  Description of Artificial Sequence: Synthetic oligonucleotide
  Target: LAMA2; (+) strand; PAM type: YTN; PAM sequence: TTA
tttatcagtcaaataaatct

SEQ ID NO: 361555 - DNA, 20 bp, Artificial Sequence
  Description of Artificial Sequence: Synthetic oligonucleotide
  Target: LAMA2; (+) strand; PAM type: YTN; PAM sequence: TTT
atcagtcaaataaatctgat

SEQ ID NO: 361556 - DNA, 20 bp, Artificial Sequence
  Description of Artificial Sequence: Synthetic oligonucleotide
  Target: LAMA2; (+) strand; PAM type: YTN; PAM sequence: TTA
tcagtcaaataaatctgatt

SEQ ID NO: 361557 - DNA, 20 bp, Artificial Sequence
  Description of Artificial Sequence: Synthetic oligonucleotide
  Target: LAMA2; (+) strand; PAM type: YTN; PAM sequence: CTG
atttaattttttagaactta

SEQ ID NO: 361558 - DNA, 20 bp, Artificial Sequence
  Description of Artificial Sequence: Synthetic oligonucleotide
  Target: LAMA2; (+) strand; PAM type: YTN; PAM sequence: TTT
aattttttagaacttaacat

SEQ ID NO: 361559 - DNA, 20 bp, Artificial Sequence
  Description of Artificial Sequence: Synthetic oligonucleotide
  Target: LAMA2; (+) strand; PAM type: YTN; PAM sequence: TTA
attttttagaacttaacatt

SEQ ID NO: 361560 - DNA, 20 bp, Artificial Sequence
  Description of Artificial Sequence: Synthetic oligonucleotide
  Target: LAMA2; (+) strand; PAM type: YTN; PAM sequence: TTT
tttagaacttaacatttagt

SEQ ID NO: 361561 - DNA, 20 bp, Artificial Sequence
  Description of Artificial Sequence: Synthetic oligonucleotide
  Target: LAMA2; (+) strand; PAM type: YTN; PAM sequence: TTT
ttagaacttaacatttagta

SEQ ID NO: 361562 - DNA, 20 bp, Artificial Sequence
  Description of Artificial Sequence: Synthetic oligonucleotide
  Target: LAMA2; (+) strand; PAM type: YTN; PAM sequence: TTT
tagaacttaacatttagtag

SEQ ID NO: 361563 - DNA, 20 bp, Artificial Sequence
  Description of Artificial Sequence: Synthetic oligonucleotide
  Target: LAMA2; (+) strand; PAM type: YTN; PAM sequence: TTT
agaacttaacatttagtagc

SEQ ID NO: 361564 - DNA, 20 bp, Artificial Sequence
  Description of Artificial Sequence: Synthetic oligonucleotide
  Target: LAMA2; (+) strand; PAM type: YTN; PAM sequence: TTA
gaacttaacatttagtagct

SEQ ID NO: 361565 - DNA, 20 bp, Artificial Sequence
  Description of Artificial Sequence: Synthetic oligonucleotide
  Target: LAMA2; (+) strand; PAM type: YTN; PAM sequence: CTT
aacatttagtagctgtgaga

SEQ ID NO: 361566 - DNA, 20 bp, Artificial Sequence
  Description of Artificial Sequence: Synthetic oligonucleotide
  Target: LAMA2; (+) strand; PAM type: YTN; PAM sequence: TTA
acatttagtagctgtgagat

SEQ ID NO: 361567 - DNA, 20 bp, Artificial Sequence
  Description of Artificial Sequence: Synthetic oligonucleotide
  Target: LAMA2; (+) strand; PAM type: YTN; PAM sequence: TTT
agtagctgtgagatcttaca

SEQ ID NO: 361568 - DNA, 20 bp, Artificial Sequence
  Description of Artificial Sequence: Synthetic oligonucleotide
  Target: LAMA2; (+) strand; PAM type: YTN; PAM sequence: TTA
gtagctgtgagatcttacag

SEQ ID NO: 361569 - DNA, 20 bp, Artificial Sequence
  Description of Artificial Sequence: Synthetic oligonucleotide
  Target: LAMA2; (+) strand; PAM type: YTN; PAM sequence: CTG
tgagatcttacagagatttc

SEQ ID NO: 361570 - DNA, 20 bp, Artificial Sequence
  Description of Artificial Sequence: Synthetic oligonucleotide
  Target: LAMA2; (+) strand; PAM type: YTN; PAM sequence: CTT
acagagatttcttcaccttg

SEQ ID NO: 361571 - DNA, 20 bp, Artificial Sequence
  Description of Artificial Sequence: Synthetic oligonucleotide
  Target: LAMA2; (+) strand; PAM type: YTN; PAM sequence: TTA
cagagatttcttcaccttgt

SEQ ID NO: 361572 - DNA, 20 bp, Artificial Sequence
  Description of Artificial Sequence: Synthetic oligonucleotide
  Target: LAMA2; (+) strand; PAM type: YTN; PAM sequence: TTT
cttcaccttgtatcctttgt

SEQ ID NO: 361573 - DNA, 20 bp, Artificial Sequence
  Description of Artificial Sequence: Synthetic oligonucleotide
  Target: LAMA2; (+) strand; PAM type: YTN; PAM sequence: TTC
ttcaccttgtatcctttgtc

SEQ ID NO: 361574 - DNA, 20 bp, Artificial Sequence
  Description of Artificial Sequence: Synthetic oligonucleotide
  Target: LAMA2; (+) strand; PAM type: YTN; PAM sequence: CTT
caccttgtatcctttgtcac

SEQ ID NO: 361575 - DNA, 20 bp, Artificial Sequence
  Description of Artificial Sequence: Synthetic oligonucleotide
  Target: LAMA2; (+) strand; PAM type: YTN; PAM sequence: TTC
accttgtatcctttgtcact

SEQ ID NO: 361576 - DNA, 20 bp, Artificial Sequence
  Description of Artificial Sequence: Synthetic oligonucleotide
  Target: LAMA2; (+) strand; PAM type: YTN; PAM sequence: CTT
gtatcctttgtcactttatc

SEQ ID NO: 361577 - DNA, 20 bp, Artificial Sequence
  Description of Artificial Sequence: Synthetic oligonucleotide
  Target: LAMA2; (+) strand; PAM type: YTN; PAM sequence: TTG
tatcctttgtcactttatct

SEQ ID NO: 361578 - DNA, 20 bp, Artificial Sequence
  Description of Artificial Sequence: Synthetic oligonucleotide
  Target: LAMA2; (+) strand; PAM type: YTN; PAM sequence: CTT
tgtcactttatctataaaat

SEQ ID NO: 361579 - DNA, 20 bp, Artificial Sequence
  Description of Artificial Sequence: Synthetic oligonucleotide
  Target: LAMA2; (+) strand; PAM type: YTN; PAM sequence: TTT
gtcactttatctataaaatg

SEQ ID NO: 361580 - DNA, 20 bp, Artificial Sequence
  Description of Artificial Sequence: Synthetic oligonucleotide
  Target: LAMA2; (+) strand; PAM type: YTN; PAM sequence: TTG
tcactttatctataaaatgg

SEQ ID NO: 361581 - DNA, 20 bp, Artificial Sequence
  Description of Artificial Sequence: Synthetic oligonucleotide
  Target: LAMA2; (+) strand; PAM type: YTN; PAM sequence: CTT
tatctataaaatggagagtg

SEQ ID NO: 361582 - DNA, 20 bp, Artificial Sequence
  Description of Artificial Sequence: Synthetic oligonucleotide
  Target: LAMA2; (+) strand; PAM type: YTN; PAM sequence: TTT
atctataaaatggagagtgt

SEQ ID NO: 361583 - DNA, 20 bp, Artificial Sequence
  Description of Artificial Sequence: Synthetic oligonucleotide
  Target: LAMA2; (+) strand; PAM type: YTN; PAM sequence: TTA
tctataaaatggagagtgta

SEQ ID NO: 361584 - DNA, 20 bp, Artificial Sequence
  Description of Artificial Sequence: Synthetic oligonucleotide
  Target: LAMA2; (+) strand; PAM type: YTN; PAM sequence: CTA
taaaatggagagtgtaaata

SEQ ID NO: 361585 - DNA, 20 bp, Artificial Sequence
  Description of Artificial Sequence: Synthetic oligonucleotide
  Target: LAMA2; (+) strand; PAM type: YTN; PAM sequence: CTA
cttcttagagttatcatgat

SEQ ID NO: 361586 - DNA, 20 bp, Artificial Sequence
  Description of Artificial Sequence: Synthetic oligonucleotide
  Target: LAMA2; (+) strand; PAM type: YTN; PAM sequence: CTT
cttagagttatcatgattct

SEQ ID NO: 361587 - DNA, 20 bp, Artificial Sequence
  Description of Artificial Sequence: Synthetic oligonucleotide
  Target: LAMA2; (+) strand; PAM type: YTN; PAM sequence: TTC
ttagagttatcatgattctt

SEQ ID NO: 361588 - DNA, 20 bp, Artificial Sequence
  Description of Artificial Sequence: Synthetic oligonucleotide
  Target: LAMA2; (+) strand; PAM type: YTN; PAM sequence: CTT
agagttatcatgattcttta

SEQ ID NO: 361589 - DNA, 20 bp, Artificial Sequence
  Description of Artificial Sequence: Synthetic oligonucleotide
  Target: LAMA2; (+) strand; PAM type: YTN; PAM sequence: TTA
gagttatcatgattctttaa

SEQ ID NO: 361590 - DNA, 20 bp, Artificial Sequence
  Description of Artificial Sequence: Synthetic oligonucleotide
  Target: LAMA2; (+) strand; PAM type: YTN; PAM sequence: TTA
tcatgattctttaatctaat

SEQ ID NO: 361591 - DNA, 20 bp, Artificial Sequence
  Description of Artificial Sequence: Synthetic oligonucleotide
  Target: LAMA2; (+) strand; PAM type: YTN; PAM sequence: TTC
tttaatctaataactcatga

SEQ ID NO: 361592 - DNA, 20 bp, Artificial Sequence
  Description of Artificial Sequence: Synthetic oligonucleotide
  Target: LAMA2; (+) strand; PAM type: YTN; PAM sequence: CTT
taatctaataactcatgaga

SEQ ID NO: 361593 - DNA, 20 bp, Artificial Sequence
  Description of Artificial Sequence: Synthetic oligonucleotide
  Target: LAMA2; (+) strand; PAM type: YTN; PAM sequence: TTT
aatctaataactcatgagac

SEQ ID NO: 361594 - DNA, 20 bp, Artificial Sequence
  Description of Artificial Sequence: Synthetic oligonucleotide
  Target: LAMA2; (+) strand; PAM type: YTN; PAM sequence: TTA
atctaataactcatgagaca

SEQ ID NO: 361595 - DNA, 20 bp, Artificial Sequence
  Description of Artificial Sequence: Synthetic oligonucleotide
  Target: LAMA2; (+) strand; PAM type: YTN; PAM sequence: CTA
ataactcatgagacactgga

SEQ ID NO: 361596 - DNA, 20 bp, Artificial Sequence
  Description of Artificial Sequence: Synthetic oligonucleotide
  Target: LAMA2; (+) strand; PAM type: YTN; PAM sequence: CTC
atgagacactggatatgtaa

SEQ ID NO: 361597 - DNA, 20 bp, Artificial Sequence
  Description of Artificial Sequence: Synthetic oligonucleotide
  Target: LAMA2; (+) strand; PAM type: YTN; PAM sequence: CTG
gatatgtaataggaactgaa

SEQ ID NO: 361598 - DNA, 20 bp, Artificial Sequence
  Description of Artificial Sequence: Synthetic oligonucleotide
  Target: LAMA2; (+) strand; PAM type: YTN; PAM sequence: CTG
aataattcttaacccccttg

SEQ ID NO: 361599 - DNA, 20 bp, Artificial Sequence
  Description of Artificial Sequence: Synthetic oligonucleotide
  Target: LAMA2; (+) strand; PAM type: YTN; PAM sequence: TTC
ttaacccccttgctttccct

SEQ ID NO: 361600 - DNA, 20 bp, Artificial Sequence
  Description of Artificial Sequence: Synthetic oligonucleotide
  Target: LAMA2; (+) strand; PAM type: YTN; PAM sequence: CTT
aacccccttgctttcccttg

SEQ ID NO: 361601 - DNA, 20 bp, Artificial Sequence
  Description of Artificial Sequence: Synthetic oligonucleotide
  Target: LAMA2; (+) strand; PAM type: YTN; PAM sequence: TTA
acccccttgctttcccttga

SEQ ID NO: 361602 - DNA, 20 bp, Artificial Sequence
  Description of Artificial Sequence: Synthetic oligonucleotide
  Target: LAMA2; (+) strand; PAM type: YTN; PAM sequence: CTT
gctttcccttgacatttcca

SEQ ID NO: 361603 - DNA, 20 bp, Artificial Sequence
  Description of Artificial Sequence: Synthetic oligonucleotide
  Target: LAMA2; (+) strand; PAM type: YTN; PAM sequence: TTG
ctttcccttgacatttccag

SEQ ID NO: 361604 - DNA, 20 bp, Artificial Sequence
  Description of Artificial Sequence: Synthetic oligonucleotide
  Target: LAMA2; (+) strand; PAM type: YTN; PAM sequence: CTT
tcccttgacatttccagaaa

SEQ ID NO: 361605 - DNA, 20 bp, Artificial Sequence
  Description of Artificial Sequence: Synthetic oligonucleotide
  Target: LAMA2; (+) strand; PAM type: YTN; PAM sequence: TTT
cccttgacatttccagaaaa

SEQ ID NO: 361606 - DNA, 20 bp, Artificial Sequence
  Description of Artificial Sequence: Synthetic oligonucleotide
  Target: LAMA2; (+) strand; PAM type: YTN; PAM sequence: TTC
ccttgacatttccagaaaat

SEQ ID NO: 361607 - DNA, 20 bp, Artificial Sequence
  Description of Artificial Sequence: Synthetic oligonucleotide
  Target: LAMA2; (+) strand; PAM type: YTN; PAM sequence: CTT
gacatttccagaaaataaaa

SEQ ID NO: 361608 - DNA, 20 bp, Artificial Sequence
  Description of Artificial Sequence: Synthetic oligonucleotide
  Target: LAMA2; (+) strand; PAM type: YTN; PAM sequence: TTG
acatttccagaaaataaaac

SEQ ID NO: 361609 - DNA, 20 bp, Artificial Sequence
  Description of Artificial Sequence: Synthetic oligonucleotide
  Target: LAMA2; (+) strand; PAM type: YTN; PAM sequence: TTT
ccagaaaataaaacttgatt

SEQ ID NO: 361610 - DNA, 20 bp, Artificial Sequence
  Description of Artificial Sequence: Synthetic oligonucleotide
  Target: LAMA2; (+) strand; PAM type: YTN; PAM sequence: TTC
cagaaaataaaacttgattg

SEQ ID NO: 361611 - DNA, 20 bp, Artificial Sequence
  Description of Artificial Sequence: Synthetic oligonucleotide
  Target: LAMA2; (+) strand; PAM type: YTN; PAM sequence: CTT
gattgagtatctaagattat

SEQ ID NO: 361612 - DNA, 20 bp, Artificial Sequence
  Description of Artificial Sequence: Synthetic oligonucleotide
  Target: LAMA2; (+) strand; PAM type: YTN; PAM sequence: TTG
attgagtatctaagattata

SEQ ID NO: 361613 - DNA, 20 bp, Artificial Sequence
  Description of Artificial Sequence: Synthetic oligonucleotide
  Target: LAMA2; (+) strand; PAM type: YTN; PAM sequence: TTG
agtatctaagattatataac

SEQ ID NO: 361614 - DNA, 20 bp, Artificial Sequence
  Description of Artificial Sequence: Synthetic oligonucleotide
  Target: LAMA2; (+) strand; PAM type: YTN; PAM sequence: CTA
agattatataacagatccca

SEQ ID NO: 361615 - DNA, 20 bp, Artificial Sequence
  Description of Artificial Sequence: Synthetic oligonucleotide
  Target: LAMA2; (+) strand; PAM type: YTN; PAM sequence: TTA
tataacagatcccactagac

SEQ ID NO: 361616 - DNA, 20 bp, Artificial Sequence
  Description of Artificial Sequence: Synthetic oligonucleotide
  Target: LAMA2; (+) strand; PAM type: YTN; PAM sequence: CTA
gactaagtgaatctgaggga

SEQ ID NO: 361617 - DNA, 20 bp, Artificial Sequence
  Description of Artificial Sequence: Synthetic oligonucleotide
  Target: LAMA2; (+) strand; PAM type: YTN; PAM sequence: CTA
agtgaatctgagggaagatg

SEQ ID NO: 361618 - DNA, 20 bp, Artificial Sequence
  Description of Artificial Sequence: Synthetic oligonucleotide
  Target: LAMA2; (+) strand; PAM type: YTN; PAM sequence: CTG
agggaagatgtatttgtcac

SEQ ID NO: 361619 - DNA, 20 bp, Artificial Sequence
  Description of Artificial Sequence: Synthetic oligonucleotide
  Target: LAMA2; (+) strand; PAM type: YTN; PAM sequence: TTT
gtcacttttcttctcttctt

SEQ ID NO: 361620 - DNA, 20 bp, Artificial Sequence
  Description of Artificial Sequence: Synthetic oligonucleotide
  Target: LAMA2; (+) strand; PAM type: YTN; PAM sequence: TTG
tcacttttcttctcttcttt

SEQ ID NO: 361621 - DNA, 20 bp, Artificial Sequence
  Description of Artificial Sequence: Synthetic oligonucleotide
  Target: LAMA2; (+) strand; PAM type: YTN; PAM sequence: CTT
ttcttctcttctttggtttt

SEQ ID NO: 361622 - DNA, 20 bp, Artificial Sequence
  Description of Artificial Sequence: Synthetic oligonucleotide
  Target: LAMA2; (+) strand; PAM type: YTN; PAM sequence: TTT
tcttctcttctttggttttt

SEQ ID NO: 361623 - DNA, 20 bp, Artificial Sequence
  Description of Artificial Sequence: Synthetic oligonucleotide
  Target: LAMA2; (+) strand; PAM type: YTN; PAM sequence: TTT
cttctcttctttggttttta

SEQ ID NO: 361624 - DNA, 20 bp, Artificial Sequence
  Description of Artificial Sequence: Synthetic oligonucleotide
  Target: LAMA2; (+) strand; PAM type: YTN; PAM sequence: TTC
ttctcttctttggtttttaa

SEQ ID NO: 361625 - DNA, 20 bp, Artificial Sequence
  Description of Artificial Sequence: Synthetic oligonucleotide
  Target: LAMA2; (+) strand; PAM type: YTN; PAM sequence: CTT
ctcttctttggtttttaaaa

SEQ ID NO: 361626 - DNA, 20 bp, Artificial Sequence
  Description of Artificial Sequence: Synthetic oligonucleotide
  Target: LAMA2; (+) strand; PAM type: YTN; PAM sequence: TTC
tcttctttggtttttaaaaa

SEQ ID NO: 361627 - DNA, 20 bp, Artificial Sequence
  Description of Artificial Sequence: Synthetic oligonucleotide
  Target: LAMA2; (+) strand; PAM type: YTN; PAM sequence: CTC
ttctttggtttttaaaaagt

SEQ ID NO: 361628 - DNA, 20 bp, Artificial Sequence
  Description of Artificial Sequence: Synthetic oligonucleotide
  Target: LAMA2; (+) strand; PAM type: YTN; PAM sequence: CTT
ctttggtttttaaaaagtat

SEQ ID NO: 361629 - DNA, 20 bp, Artificial Sequence
  Description of Artificial Sequence: Synthetic oligonucleotide
  Target: LAMA2; (+) strand; PAM type: YTN; PAM sequence: TTC
tttggtttttaaaaagtatc

SEQ ID NO: 361630 - DNA, 20 bp, Artificial Sequence
  Description of Artificial Sequence: Synthetic oligonucleotide
  Target: LAMA2; (+) strand; PAM type: YTN; PAM sequence: CTT
tggtttttaaaaagtatcat

SEQ ID NO: 361631 - DNA, 20 bp, Artificial Sequence
  Description of Artificial Sequence: Synthetic oligonucleotide
  Target: LAMA2; (+) strand; PAM type: YTN; PAM sequence: TTT
ggtttttaaaaagtatcatt

SEQ ID NO: 361632 - DNA, 20 bp, Artificial Sequence
  Description of Artificial Sequence: Synthetic oligonucleotide
  Target: LAMA2; (+) strand; PAM type: YTN; PAM sequence: TTG
gtttttaaaaagtatcatta

SEQ ID NO: 361633 - DNA, 20 bp, Artificial Sequence
  Description of Artificial Sequence: Synthetic oligonucleotide
  Target: LAMA2; (+) strand; PAM type: YTN; PAM sequence: TTT
ttaaaaagtatcattagaaa

SEQ ID NO: 361634 - DNA, 20 bp, Artificial Sequence
  Description of Artificial Sequence: Synthetic oligonucleotide
  Target: LAMA2; (+) strand; PAM type: YTN; PAM sequence: TTT
taaaaagtatcattagaaat

SEQ ID NO: 361635 - DNA, 20 bp, Artificial Sequence
  Description of Artificial Sequence: Synthetic oligonucleotide
  Target: LAMA2; (+) strand; PAM type: YTN; PAM sequence: TTT
aaaaagtatcattagaaata

SEQ ID NO: 361636 - DNA, 20 bp, Artificial Sequence
  Description of Artificial Sequence: Synthetic oligonucleotide
  Target: LAMA2; (+) strand; PAM type: YTN; PAM sequence: TTA
aaaagtatcattagaaatag

SEQ ID NO: 361637 - DNA, 20 bp, Artificial Sequence
  Description of Artificial Sequence: Synthetic oligonucleotide
  Target: LAMA2; (+) strand; PAM type: YTN; PAM sequence: TTA
gaaatagaatcagtaactat

SEQ ID NO: 361638 - DNA, 20 bp, Artificial Sequence
  Description of Artificial Sequence: Synthetic oligonucleotide
  Target: LAMA2; (+) strand; PAM type: YTN; PAM sequence: CTA
taaacaaatttctgtgtact

SEQ ID NO: 361639 - DNA, 20 bp, Artificial Sequence
  Description of Artificial Sequence: Synthetic oligonucleotide
  Target: LAMA2; (+) strand; PAM type: YTN; PAM sequence: TTT
ctgtgtactgatccagtatt

SEQ ID NO: 361640 - DNA, 20 bp, Artificial Sequence
  Description of Artificial Sequence: Synthetic oligonucleotide
  Target: LAMA2; (+) strand; PAM type: YTN; PAM sequence: TTC
tgtgtactgatccagtatta

SEQ ID NO: 361641 - DNA, 20 bp, Artificial Sequence
  Description of Artificial Sequence: Synthetic oligonucleotide
  Target: LAMA2; (+) strand; PAM type: YTN; PAM sequence: CTG
tgtactgatccagtattaac

SEQ ID NO: 361642 - DNA, 20 bp, Artificial Sequence
  Description of Artificial Sequence: Synthetic oligonucleotide
  Target: LAMA2; (+) strand; PAM type: YTN; PAM sequence: CTG
atccagtattaacagagaaa

SEQ ID NO: 361643 - DNA, 20 bp, Artificial Sequence
  Description of Artificial Sequence: Synthetic oligonucleotide
  Target: LAMA2; (+) strand; PAM type: YTN; PAM sequence: TTA
acagagaaaataatggttga

SEQ ID NO: 361644 - DNA, 20 bp, Artificial Sequence
  Description of Artificial Sequence: Synthetic oligonucleotide
  Target: LAMA2; (+) strand; PAM type: YTN; PAM sequence: TTG
actgtgccttactgtgcaag

SEQ ID NO: 361645 - DNA, 20 bp, Artificial Sequence
  Description of Artificial Sequence: Synthetic oligonucleotide
  Target: LAMA2; (+) strand; PAM type: YTN; PAM sequence: CTG
tgccttactgtgcaaggcaa

SEQ ID NO: 361646 - DNA, 20 bp, Artificial Sequence
  Description of Artificial Sequence: Synthetic oligonucleotide
  Target: LAMA2; (+) strand; PAM type: YTN; PAM sequence: CTT
actgtgcaaggcaaaaatga

SEQ ID NO: 361647 - DNA, 20 bp, Artificial Sequence
  Description of Artificial Sequence: Synthetic oligonucleotide
  Target: LAMA2; (+) strand; PAM type: YTN; PAM sequence: TTA
ctgtgcaaggcaaaaatgag

SEQ ID NO: 361648 - DNA, 20 bp, Artificial Sequence
  Description of Artificial Sequence: Synthetic oligonucleotide
  Target: LAMA2; (+) strand; PAM type: YTN; PAM sequence: CTG
tgcaaggcaaaaatgagctc

SEQ ID NO: 361649 - DNA, 20 bp, Artificial Sequence
  Description of Artificial Sequence: Synthetic oligonucleotide
  Target: LAMA2; (+) strand; PAM type: YTN; PAM sequence: CTC
aagatattatcaaagtcatg

SEQ ID NO: 361650 - DNA, 20 bp, Artificial Sequence
  Description of Artificial Sequence: Synthetic oligonucleotide
  Target: LAMA2; (+) strand; PAM type: YTN; PAM sequence: TTA
tcaaagtcatgaatcagaaa

SEQ ID NO: 361651 - DNA, 20 bp, Artificial Sequence
  Description of Artificial Sequence: Synthetic oligonucleotide
  Target: LAMA2; (+) strand; PAM type: YTN; PAM sequence: TTT
cgttttacaaatgatggata

SEQ ID NO: 361652 - DNA, 20 bp, Artificial Sequence
  Description of Artificial Sequence: Synthetic oligonucleotide
  Target: LAMA2; (+) strand; PAM type: YTN; PAM sequence: TTC
gttttacaaatgatggatag

SEQ ID NO: 361653 - DNA, 20 bp, Artificial Sequence
  Description of Artificial Sequence: Synthetic oligonucleotide
  Target: LAMA2; (+) strand; PAM type: YTN; PAM sequence: TTT
tacaaatgatggatagccac

SEQ ID NO: 361654 - DNA, 20 bp, Artificial Sequence
  Description of Artificial Sequence: Synthetic oligonucleotide
  Target: LAMA2; (+) strand; PAM type: YTN; PAM sequence: TTT
acaaatgatggatagccaca

SEQ ID NO: 361655 - DNA, 20 bp, Artificial Sequence
  Description of Artificial Sequence: Synthetic oligonucleotide
  Target: LAMA2; (+) strand; PAM type: YTN; PAM sequence: TTA
caaatgatggatagccacaa

SEQ ID NO: 361656 - DNA, 20 bp, Artificial Sequence
  Description of Artificial Sequence: Synthetic oligonucleotide
  Target: LAMA2; (+) strand; PAM type: YTN; PAM sequence: CTA
ggacatacaatctctgatta

SEQ ID NO: 361657 - DNA, 20 bp, Artificial Sequence
  Description of Artificial Sequence: Synthetic oligonucleotide
  Target: LAMA2; (+) strand; PAM type: YTN; PAM sequence: CTC
tgattacacaactgcagtct

SEQ ID NO: 361658 - DNA, 20 bp, Artificial Sequence
  Description of Artificial Sequence: Synthetic oligonucleotide
  Target: LAMA2; (+) strand; PAM type: YTN; PAM sequence: CTG
attacacaactgcagtctat

SEQ ID NO: 361659 - DNA, 20 bp, Artificial Sequence
  Description of Artificial Sequence: Synthetic oligonucleotide
  Target: LAMA2; (+) strand; PAM type: YTN; PAM sequence: TTA
cacaactgcagtctatagct

SEQ ID NO: 361660 - DNA, 20 bp, Artificial Sequence
  Description of Artificial Sequence: Synthetic oligonucleotide
  Target: LAMA2; (+) strand; PAM type: YTN; PAM sequence: CTG
cagtctatagctacattctg

SEQ ID NO: 361661 - DNA, 20 bp, Artificial Sequence
  Description of Artificial Sequence: Synthetic oligonucleotide
  Target: LAMA2; (+) strand; PAM type: YTN; PAM sequence: CTA
tagctacattctgcagatta

SEQ ID NO: 361662 - DNA, 20 bp, Artificial Sequence
  Description of Artificial Sequence: Synthetic oligonucleotide
  Target: LAMA2; (+) strand; PAM type: YTN; PAM sequence: CTA
cattctgcagattaaacacc

SEQ ID NO: 361663 - DNA, 20 bp, Artificial Sequence
  Description of Artificial Sequence: Synthetic oligonucleotide
  Target: LAMA2; (+) strand; PAM type: YTN; PAM sequence: TTC
tgcagattaaacaccacagt

SEQ ID NO: 361664 - DNA, 20 bp, Artificial Sequence
  Description of Artificial Sequence: Synthetic oligonucleotide
  Target: LAMA2; (+) strand; PAM type: YTN; PAM sequence: CTG
cagattaaacaccacagtag

SEQ ID NO: 361665 - DNA, 20 bp, Artificial Sequence
  Description of Artificial Sequence: Synthetic oligonucleotide
  Target: LAMA2; (+) strand; PAM type: YTN; PAM sequence: TTA
aacaccacagtagagatgga

SEQ ID NO: 361666 - DNA, 20 bp, Artificial Sequence
  Description of Artificial Sequence: Synthetic oligonucleotide
  Target: LAMA2; (+) strand; PAM type: YTN; PAM sequence: CTT
tattgtttatattttatgaa

SEQ ID NO: 361667 - DNA, 20 bp, Artificial Sequence
  Description of Artificial Sequence: Synthetic oligonucleotide
  Target: LAMA2; (+) strand; PAM type: YTN; PAM sequence: TTT
attgtttatattttatgaaa

SEQ ID NO: 361668 - DNA, 20 bp, Artificial Sequence
  Description of Artificial Sequence: Synthetic oligonucleotide
  Target: LAMA2; (+) strand; PAM type: YTN; PAM sequence: TTA
ttgtttatattttatgaaaa

SEQ ID NO: 361669 - DNA, 20 bp, Artificial Sequence
  Description of Artificial Sequence: Synthetic oligonucleotide
  Target: LAMA2; (+) strand; PAM type: YTN; PAM sequence: TTG
tttatattttatgaaaactg

SEQ ID NO: 361670 - DNA, 20 bp, Artificial Sequence
  Description of Artificial Sequence: Synthetic oligonucleotide
  Target: LAMA2; (+) strand; PAM type: YTN; PAM sequence: TTT
atattttatgaaaactgttc

SEQ ID NO: 361671 - DNA, 20 bp, Artificial Sequence
  Description of Artificial Sequence: Synthetic oligonucleotide
  Target: LAMA2; (+) strand; PAM type: YTN; PAM sequence: TTA
tattttatgaaaactgttct

SEQ ID NO: 361672 - DNA, 20 bp, Artificial Sequence
  Description of Artificial Sequence: Synthetic oligonucleotide
  Target: LAMA2; (+) strand; PAM type: YTN; PAM sequence: TTT
tatgaaaactgttctctttt

SEQ ID NO: 361673 - DNA, 20 bp, Artificial Sequence
  Description of Artificial Sequence: Synthetic oligonucleotide
  Target: LAMA2; (+) strand; PAM type: YTN; PAM sequence: TTT
atgaaaactgttctcttttg

SEQ ID NO: 361674 - DNA, 20 bp, Artificial Sequence
  Description of Artificial Sequence: Synthetic oligonucleotide
  Target: LAMA2; (+) strand; PAM type: YTN; PAM sequence: TTA
tgaaaactgttctcttttgt

SEQ ID NO: 361675 - DNA, 20 bp, Artificial Sequence
  Description of Artificial Sequence: Synthetic oligonucleotide
  Target: LAMA2; (+) strand; PAM type: YTN; PAM sequence: CTG
ttctcttttgtttttatgtc

SEQ ID NO: 361676 - DNA, 20 bp, Artificial Sequence
  Description of Artificial Sequence: Synthetic oligonucleotide
  Target: LAMA2; (+) strand; PAM type: YTN; PAM sequence: TTC
tcttttgtttttatgtcagt

SEQ ID NO: 361677 - DNA, 20 bp, Artificial Sequence
  Description of Artificial Sequence: Synthetic oligonucleotide
  Target: LAMA2; (+) strand; PAM type: YTN; PAM sequence: CTC
ttttgtttttatgtcagttt

SEQ ID NO: 361678 - DNA, 20 bp, Artificial Sequence
  Description of Artificial Sequence: Synthetic oligonucleotide
  Target: LAMA2; (+) strand; PAM type: YTN; PAM sequence: CTT
ttgtttttatgtcagtttga

SEQ ID NO: 361679 - DNA, 20 bp, Artificial Sequence
  Description of Artificial Sequence: Synthetic oligonucleotide
  Target: LAMA2; (+) strand; PAM type: YTN; PAM sequence: TTT
tgtttttatgtcagtttgag

SEQ ID NO: 361680 - DNA, 20 bp, Artificial Sequence
  Description of Artificial Sequence: Synthetic oligonucleotide
  Target: LAMA2; (+) strand; PAM type: YTN; PAM sequence: TTT
gtttttatgtcagtttgaga

SEQ ID NO: 361681 - DNA, 20 bp, Artificial Sequence
  Description of Artificial Sequence: Synthetic oligonucleotide
  Target: LAMA2; (+) strand; PAM type: YTN; PAM sequence: TTG
tttttatgtcagtttgagag

SEQ ID NO: 361682 - DNA, 20 bp, Artificial Sequence
  Description of Artificial Sequence: Synthetic oligonucleotide
  Target: LAMA2; (+) strand; PAM type: YTN; PAM sequence: TTT
ttatgtcagtttgagagtag

SEQ ID NO: 361683 - DNA, 20 bp, Artificial Sequence
  Description of Artificial Sequence: Synthetic oligonucleotide
  Target: LAMA2; (+) strand; PAM type: YTN; PAM sequence: TTT
tatgtcagtttgagagtaga

SEQ ID NO: 361684 - DNA, 20 bp, Artificial Sequence
  Description of Artificial Sequence: Synthetic oligonucleotide
  Target: LAMA2; (+) strand; PAM type: YTN; PAM sequence: TTT
atgtcagtttgagagtagaa

SEQ ID NO: 361685 - DNA, 20 bp, Artificial Sequence
  Description of Artificial Sequence: Synthetic oligonucleotide
  Target: LAMA2; (+) strand; PAM type: YTN; PAM sequence: TTA
tgtcagtttgagagtagaag

SEQ ID NO: 361686 - DNA, 20 bp, Artificial Sequence
  Description of Artificial Sequence: Synthetic oligonucleotide
  Target: LAMA2; (+) strand; PAM type: YTN; PAM sequence: TTT
gagagtagaagaatatcctt

SEQ ID NO: 361687 - DNA, 20 bp, Artificial Sequence
  Description of Artificial Sequence: Synthetic oligonucleotide
  Target: LAMA2; (+) strand; PAM type: YTN; PAM sequence: TTG
agagtagaagaatatccttg

SEQ ID NO: 361688 - DNA, 20 bp, Artificial Sequence
  Description of Artificial Sequence: Synthetic oligonucleotide
  Target: LAMA2; (+) strand; PAM type: YTN; PAM sequence: CTT
gagggcaaaacatgcctttc

SEQ ID NO: 361689 - DNA, 20 bp, Artificial Sequence
  Description of Artificial Sequence: Synthetic oligonucleotide
  Target: LAMA2; (+) strand; PAM type: YTN; PAM sequence: TTG
agggcaaaacatgcctttca

SEQ ID NO: 361690 - DNA, 20 bp, Artificial Sequence
  Description of Artificial Sequence: Synthetic oligonucleotide
  Target: LAMA2; (+) strand; PAM type: YTN; PAM sequence: CTT
tcatacattagagctgccta

SEQ ID NO: 361691 - DNA, 20 bp, Artificial Sequence
  Description of Artificial Sequence: Synthetic oligonucleotide
  Target: LAMA2; (+) strand; PAM type: YTN; PAM sequence: TTT
catacattagagctgcctag

SEQ ID NO: 361692 - DNA, 20 bp, Artificial Sequence
  Description of Artificial Sequence: Synthetic oligonucleotide
  Target: LAMA2; (+) strand; PAM type: YTN; PAM sequence: TTC
atacattagagctgcctaga

SEQ ID NO: 361693 - DNA, 20 bp, Artificial Sequence
  Description of Artificial Sequence: Synthetic oligonucleotide
  Target: LAMA2; (+) strand; PAM type: YTN; PAM sequence: TTA
gagctgcctagagcatagtc

SEQ ID NO: 361694 - DNA, 20 bp, Artificial Sequence
  Description of Artificial Sequence: Synthetic oligonucleotide
  Target: LAMA2; (+) strand; PAM type: YTN; PAM sequence: CTG
cctagagcatagtctggcac

SEQ ID NO: 361695 - DNA, 20 bp, Artificial Sequence
  Description of Artificial Sequence: Synthetic oligonucleotide
  Target: LAMA2; (+) strand; PAM type: YTN; PAM sequence: CTA
gagcatagtctggcacatta

SEQ ID NO: 361696 - DNA, 20 bp, Artificial Sequence
  Description of Artificial Sequence: Synthetic oligonucleotide
  Target: LAMA2; (+) strand; PAM type: YTN; PAM sequence: CTG
gcacattatataaatattaa

SEQ ID NO: 361697 - DNA, 20 bp, Artificial Sequence
  Description of Artificial Sequence: Synthetic oligonucleotide
  Target: LAMA2; (+) strand; PAM type: YTN; PAM sequence: TTA
tataaatattaaataattcc

SEQ ID NO: 361698 - DNA, 20 bp, Artificial Sequence
  Description of Artificial Sequence: Synthetic oligonucleotide
  Target: LAMA2; (+) strand; PAM type: YTN; PAM sequence: TTA
aataattcctataattaaac

SEQ ID NO: 361699 - DNA, 20 bp, Artificial Sequence
  Description of Artificial Sequence: Synthetic oligonucleotide
  Target: LAMA2; (+) strand; PAM type: YTN; PAM sequence: TTC
ctataattaaactgatgttc

SEQ ID NO: 361700 - DNA, 20 bp, Artificial Sequence
  Description of Artificial Sequence: Synthetic oligonucleotide
  Target: LAMA2; (+) strand; PAM type: YTN; PAM sequence: CTA
taattaaactgatgttcttt

SEQ ID NO: 361701 - DNA, 20 bp, Artificial Sequence
  Description of Artificial Sequence: Synthetic oligonucleotide
  Target: LAMA2; (+) strand; PAM type: YTN; PAM sequence: TTA
aactgatgttctttggaatg

SEQ ID NO: 361702 - DNA, 20 bp, Artificial Sequence
  Description of Artificial Sequence: Synthetic oligonucleotide
  Target: LAMA2; (+) strand; PAM type: YTN; PAM sequence: CTG
atgttctttggaatgaggat

SEQ ID NO: 361703 - DNA, 20 bp, Artificial Sequence
  Description of Artificial Sequence: Synthetic oligonucleotide
  Target: LAMA2; (+) strand; PAM type: YTN; PAM sequence: TTC
tttggaatgaggatggagac

SEQ ID NO: 361704 - DNA, 20 bp, Artificial Sequence
  Description of Artificial Sequence: Synthetic oligonucleotide
  Target: LAMA2; (+) strand; PAM type: YTN; PAM sequence: CTT
tggaatgaggatggagacac

SEQ ID NO: 361705 - DNA, 20 bp, Artificial Sequence
  Description of Artificial Sequence: Synthetic oligonucleotide
  Target: LAMA2; (+) strand; PAM type: YTN; PAM sequence: TTT
ggaatgaggatggagacaca

SEQ ID NO: 361706 - DNA, 20 bp, Artificial Sequence
  Description of Artificial Sequence: Synthetic oligonucleotide
  Target: LAMA2; (+) strand; PAM type: YTN; PAM sequence: TTG
gaatgaggatggagacacat

SEQ ID NO: 361707 - DNA, 20 bp, Artificial Sequence
  Description of Artificial Sequence: Synthetic oligonucleotide
  Target: LAMA2; (+) strand; PAM type: YTN; PAM sequence: TTA
tctgaattgccttaagctag

SEQ ID NO: 361708 - DNA, 20 bp, Artificial Sequence
  Description of Artificial Sequence: Synthetic oligonucleotide
  Target: LAMA2; (+) strand; PAM type: YTN; PAM sequence: CTG
aattgccttaagctagtttt

SEQ ID NO: 361709 - DNA, 20 bp, Artificial Sequence
  Description of Artificial Sequence: Synthetic oligonucleotide
  Target: LAMA2; (+) strand; PAM type: YTN; PAM sequence: TTG
ccttaagctagttttgcaat

SEQ ID NO: 361710 - DNA, 20 bp, Artificial Sequence
  Description of Artificial Sequence: Synthetic oligonucleotide
  Target: LAMA2; (+) strand; PAM type: YTN; PAM sequence: CTT
aagctagttttgcaataagt

SEQ ID NO: 361711 - DNA, 20 bp, Artificial Sequence
  Description of Artificial Sequence: Synthetic oligonucleotide
  Target: LAMA2; (+) strand; PAM type: YTN; PAM sequence: TTA
agctagttttgcaataagta

SEQ ID NO: 361712 - DNA, 20 bp, Artificial Sequence
  Description of Artificial Sequence: Synthetic oligonucleotide
  Target: LAMA2; (+) strand; PAM type: YTN; PAM sequence: CTA
gttttgcaataagtagattt

SEQ ID NO: 361713 - DNA, 20 bp, Artificial Sequence
  Description of Artificial Sequence: Synthetic oligonucleotide
  Target: LAMA2; (+) strand; PAM type: YTN; PAM sequence: TTT
tgcaataagtagatttttac

SEQ ID NO: 361714 - DNA, 20 bp, Artificial Sequence
  Description of Artificial Sequence: Synthetic oligonucleotide
  Target: LAMA2; (+) strand; PAM type: YTN; PAM sequence: TTT
gcaataagtagatttttact

SEQ ID NO: 361715 - DNA, 20 bp, Artificial Sequence
  Description of Artificial Sequence: Synthetic oligonucleotide
  Target: LAMA2; (+) strand; PAM type: YTN; PAM sequence: TTG
caataagtagatttttacta

SEQ ID NO: 361716 - DNA, 20 bp, Artificial Sequence
  Description of Artificial Sequence: Synthetic oligonucleotide
  Target: LAMA2; (+) strand; PAM type: YTN; PAM sequence: TTT
ttactattctagaatatgta

SEQ ID NO: 361717 - DNA, 20 bp, Artificial Sequence
  Description of Artificial Sequence: Synthetic oligonucleotide
  Target: LAMA2; (+) strand; PAM type: YTN; PAM sequence: TTT
tactattctagaatatgtaa

SEQ ID NO: 361718 - DNA, 20 bp, Artificial Sequence
  Description of Artificial Sequence: Synthetic oligonucleotide
  Target: LAMA2; (+) strand; PAM type: YTN; PAM sequence: TTT
actattctagaatatgtaat

SEQ ID NO: 361719 - DNA, 20 bp, Artificial Sequence
  Description of Artificial Sequence: Synthetic oligonucleotide
  Target: LAMA2; (+) strand; PAM type: YTN; PAM sequence: TTA
ctattctagaatatgtaatg

SEQ ID NO: 361720 - DNA, 20 bp, Artificial Sequence
  Description of Artificial Sequence: Synthetic oligonucleotide
  Target: LAMA2; (+) strand; PAM type: YTN; PAM sequence: CTA
ttctagaatatgtaatgaat

SEQ ID NO: 361721 - DNA, 20 bp, Artificial Sequence
  Description of Artificial Sequence: Synthetic oligonucleotide
  Target: LAMA2; (+) strand; PAM type: YTN; PAM sequence: TTC
tagaatatgtaatgaatgaa

SEQ ID NO: 361722 - DNA, 20 bp, Artificial Sequence
  Description of Artificial Sequence: Synthetic oligonucleotide
  Target: LAMA2; (+) strand; PAM type: YTN; PAM sequence: CTA
gaatatgtaatgaatgaatc

SEQ ID NO: 361723 - DNA, 20 bp, Artificial Sequence
  Description of Artificial Sequence: Synthetic oligonucleotide
  Target: LAMA2; (+) strand; PAM type: YTN; PAM sequence: CTA
tgttacaagtaagtattaat

SEQ ID NO: 361724 - DNA, 20 bp, Artificial Sequence
  Description of Artificial Sequence: Synthetic oligonucleotide
  Target: LAMA2; (+) strand; PAM type: YTN; PAM sequence: TTA
caagtaagtattaattaatg

SEQ ID NO: 361725 - DNA, 20 bp, Artificial Sequence
  Description of Artificial Sequence: Synthetic oligonucleotide
  Target: LAMA2; (+) strand; PAM type: YTN; PAM sequence: TTA
attaatggttgaagtacaaa

SEQ ID NO: 361726 - DNA, 20 bp, Artificial Sequence
  Description of Artificial Sequence: Synthetic oligonucleotide
  Target: LAMA2; (+) strand; PAM type: YTN; PAM sequence: TTA
atggttgaagtacaaaaaca

SEQ ID NO: 361727 - DNA, 20 bp, Artificial Sequence
  Description of Artificial Sequence: Synthetic oligonucleotide
  Target: LAMA2; (+) strand; PAM type: YTN; PAM sequence: TTG
aagtacaaaaacatcttcct

SEQ ID NO: 361728 - DNA, 20 bp, Artificial Sequence
  Description of Artificial Sequence: Synthetic oligonucleotide
  Target: LAMA2; (+) strand; PAM type: YTN; PAM sequence: CTT
ccttgaattatatgataatc

SEQ ID NO: 361729 - DNA, 20 bp, Artificial Sequence
  Description of Artificial Sequence: Synthetic oligonucleotide
  Target: LAMA2; (+) strand; PAM type: YTN; PAM sequence: TTC
cttgaattatatgataatct

SEQ ID NO: 361730 - DNA, 20 bp, Artificial Sequence
  Description of Artificial Sequence: Synthetic oligonucleotide
  Target: LAMA2; (+) strand; PAM type: YTN; PAM sequence: CTT
gaattatatgataatctaca

SEQ ID NO: 361731 - DNA, 20 bp, Artificial Sequence
  Description of Artificial Sequence: Synthetic oligonucleotide
  Target: LAMA2; (+) strand; PAM type: YTN; PAM sequence: TTG
aattatatgataatctacat

SEQ ID NO: 361732 - DNA, 20 bp, Artificial Sequence
  Description of Artificial Sequence: Synthetic oligonucleotide
  Target: LAMA2; (+) strand; PAM type: YTN; PAM sequence: TTA
tatgataatctacatcacag

SEQ ID NO: 361733 - DNA, 20 bp, Artificial Sequence
  Description of Artificial Sequence: Synthetic oligonucleotide
  Target: LAMA2; (+) strand; PAM type: YTN; PAM sequence: CTA
catcacagtgaaaggaattt

SEQ ID NO: 361734 - DNA, 20 bp, Artificial Sequence
  Description of Artificial Sequence: Synthetic oligonucleotide
  Target: LAMA2; (+) strand; PAM type: YTN; PAM sequence: TTT
atcatgacaaatgctagtca

SEQ ID NO: 361735 - DNA, 20 bp, Artificial Sequence
  Description of Artificial Sequence: Synthetic oligonucleotide
  Target: LAMA2; (+) strand; PAM type: YTN; PAM sequence: TTA
tcatgacaaatgctagtcaa

SEQ ID NO: 361736 - DNA, 20 bp, Artificial Sequence
  Description of Artificial Sequence: Synthetic oligonucleotide
  Target: LAMA2; (+) strand; PAM type: YTN; PAM sequence: CTA
gtcaatgttgaatcacagag

SEQ ID NO: 361737 - DNA, 20 bp, Artificial Sequence
  Description of Artificial Sequence: Synthetic oligonucleotide
  Target: LAMA2; (+) strand; PAM type: YTN; PAM sequence: TTG
aatcacagagggctatatga

SEQ ID NO: 361738 - DNA, 20 bp, Artificial Sequence
  Description of Artificial Sequence: Synthetic oligonucleotide
  Target: LAMA2; (+) strand; PAM type: YTN; PAM sequence: CTA
tatgagatccattttcattc

SEQ ID NO: 361739 - DNA, 20 bp, Artificial Sequence
  Description of Artificial Sequence: Synthetic oligonucleotide
  Target: LAMA2; (+) strand; PAM type: YTN; PAM sequence: TTT
tcattcttaaagaaaattat

SEQ ID NO: 361740 - DNA, 20 bp, Artificial Sequence
  Description of Artificial Sequence: Synthetic oligonucleotide
  Target: LAMA2; (+) strand; PAM type: YTN; PAM sequence: TTT
cattcttaaagaaaattatt

SEQ ID NO: 361741 - DNA, 20 bp, Artificial Sequence
  Description of Artificial Sequence: Synthetic oligonucleotide
  Target: LAMA2; (+) strand; PAM type: YTN; PAM sequence: TTC
attcttaaagaaaattatta

SEQ ID NO: 361742 - DNA, 20 bp, Artificial Sequence
  Description of Artificial Sequence: Synthetic oligonucleotide
  Target: LAMA2; (+) strand; PAM type: YTN; PAM sequence: TTC
ttaaagaaaattattatatc

SEQ ID NO: 361743 - DNA, 20 bp, Artificial Sequence
  Description of Artificial Sequence: Synthetic oligonucleotide
  Target: LAMA2; (+) strand; PAM type: YTN; PAM sequence: CTT
aaagaaaattattatatctt

SEQ ID NO: 361744 - DNA, 20 bp, Artificial Sequence
  Description of Artificial Sequence: Synthetic oligonucleotide
  Target: LAMA2; (+) strand; PAM type: YTN; PAM sequence: TTA
aagaaaattattatatcttt

SEQ ID NO: 361745 - DNA, 20 bp, Artificial Sequence
  Description of Artificial Sequence: Synthetic oligonucleotide
  Target: LAMA2; (+) strand; PAM type: YTN; PAM sequence: TTA
ttatatctttttattaatat

SEQ ID NO: 361746 - DNA, 20 bp, Artificial Sequence
  Description of Artificial Sequence: Synthetic oligonucleotide
  Target: LAMA2; (+) strand; PAM type: YTN; PAM sequence: TTA
tatctttttattaatatggt

SEQ ID NO: 361747 - DNA, 20 bp, Artificial Sequence
  Description of Artificial Sequence: Synthetic oligonucleotide
  Target: LAMA2; (+) strand; PAM type: YTN; PAM sequence: CTT
tttattaatatggtggatat

SEQ ID NO: 361748 - DNA, 20 bp, Artificial Sequence
  Description of Artificial Sequence: Synthetic oligonucleotide
  Target: LAMA2; (+) strand; PAM type: YTN; PAM sequence: TTT
ttattaatatggtggatatt

SEQ ID NO: 361749 - DNA, 20 bp, Artificial Sequence
  Description of Artificial Sequence: Synthetic oligonucleotide
  Target: LAMA2; (+) strand; PAM type: YTN; PAM sequence: TTT
tattaatatggtggatattt

SEQ ID NO: 361750 - DNA, 20 bp, Artificial Sequence
  Description of Artificial Sequence: Synthetic oligonucleotide
  Target: LAMA2; (+) strand; PAM type: YTN; PAM sequence: TTT
attaatatggtggatattta

SEQ ID NO: 361751 - DNA, 20 bp, Artificial Sequence
  Description of Artificial Sequence: Synthetic oligonucleotide
  Target: LAMA2; (+) strand; PAM type: YTN; PAM sequence: TTA
ttaatatggtggatatttac

SEQ ID NO: 361752 - DNA, 20 bp, Artificial Sequence
  Description of Artificial Sequence: Synthetic oligonucleotide
  Target: LAMA2; (+) strand; PAM type: YTN; PAM sequence: TTA
atatggtggatatttactca

SEQ ID NO: 361753 - DNA, 20 bp, Artificial Sequence
  Description of Artificial Sequence: Synthetic oligonucleotide
  Target: LAMA2; (+) strand; PAM type: YTN; PAM sequence: TTT
actcagtaaataataaagaa

SEQ ID NO: 361754 - DNA, 20 bp, Artificial Sequence
  Description of Artificial Sequence: Synthetic oligonucleotide
  Target: LAMA2; (+) strand; PAM type: YTN; PAM sequence: TTA
ctcagtaaataataaagaaa

SEQ ID NO: 361755 - DNA, 20 bp, Artificial Sequence
  Description of Artificial Sequence: Synthetic oligonucleotide
  Target: LAMA2; (+) strand; PAM type: YTN; PAM sequence: CTC
agtaaataataaagaaaact

SEQ ID NO: 361756 - DNA, 20 bp, Artificial Sequence
  Description of Artificial Sequence: Synthetic oligonucleotide
  Target: LAMA2; (+) strand; PAM type: YTN; PAM sequence: CTA
atatgaagtgcaatttgtaa

SEQ ID NO: 361757 - DNA, 20 bp, Artificial Sequence
  Description of Artificial Sequence: Synthetic oligonucleotide
  Target: LAMA2; (+) strand; PAM type: YTN; PAM sequence: TTT
gtaatattctatttatgatg

SEQ ID NO: 361758 - DNA, 20 bp, Artificial Sequence
  Description of Artificial Sequence: Synthetic oligonucleotide
  Target: LAMA2; (+) strand; PAM type: YTN; PAM sequence: TTG
taatattctatttatgatgc

SEQ ID NO: 361759 - DNA, 20 bp, Artificial Sequence
  Description of Artificial Sequence: Synthetic oligonucleotide
  Target: LAMA2; (+) strand; PAM type: YTN; PAM sequence: TTC
tatttatgatgcatgatttt

SEQ ID NO: 361760 - DNA, 20 bp, Artificial Sequence
  Description of Artificial Sequence: Synthetic oligonucleotide
  Target: LAMA2; (+) strand; PAM type: YTN; PAM sequence: CTA
tttatgatgcatgatttttg

SEQ ID NO: 361761 - DNA, 20 bp, Artificial Sequence
  Description of Artificial Sequence: Synthetic oligonucleotide
  Target: LAMA2; (+) strand; PAM type: YTN; PAM sequence: TTT
atgatgcatgatttttgttg

SEQ ID NO: 361762 - DNA, 20 bp, Artificial Sequence
  Description of Artificial Sequence: Synthetic oligonucleotide
  Target: LAMA2; (+) strand; PAM type: YTN; PAM sequence: TTA
tgatgcatgatttttgttgc

SEQ ID NO: 361763 - DNA, 20 bp, Artificial Sequence
  Description of Artificial Sequence: Synthetic oligonucleotide
  Target: LAMA2; (+) strand; PAM type: YTN; PAM sequence: TTT
ttgttgcacaattagaaaat

SEQ ID NO: 361764 - DNA, 20 bp, Artificial Sequence
  Description of Artificial Sequence: Synthetic oligonucleotide
  Target: LAMA2; (+) strand; PAM type: YTN; PAM sequence: TTT
tgttgcacaattagaaaata

SEQ ID NO: 361765 - DNA, 20 bp, Artificial Sequence
  Description of Artificial Sequence: Synthetic oligonucleotide
  Target: LAMA2; (+) strand; PAM type: YTN; PAM sequence: TTT
gttgcacaattagaaaatac

SEQ ID NO: 361766 - DNA, 20 bp, Artificial Sequence
  Description of Artificial Sequence: Synthetic oligonucleotide
  Target: LAMA2; (+) strand; PAM type: YTN; PAM sequence: TTG
ttgcacaattagaaaatact

SEQ ID NO: 361767 - DNA, 20 bp, Artificial Sequence
  Description of Artificial Sequence: Synthetic oligonucleotide
  Target: LAMA2; (+) strand; PAM type: YTN; PAM sequence: TTG
cacaattagaaaatacttaa

SEQ ID NO: 361768 - DNA, 20 bp, Artificial Sequence
  Description of Artificial Sequence: Synthetic oligonucleotide
  Target: LAMA2; (+) strand; PAM type: YTN; PAM sequence: TTA
gaaaatacttaagttcttga

SEQ ID NO: 361769 - DNA, 20 bp, Artificial Sequence
  Description of Artificial Sequence: Synthetic oligonucleotide
  Target: LAMA2; (+) strand; PAM type: YTN; PAM sequence: CTT
aagttcttgagaatagttgg

SEQ ID NO: 361770 - DNA, 20 bp, Artificial Sequence
  Description of Artificial Sequence: Synthetic oligonucleotide
  Target: LAMA2; (+) strand; PAM type: YTN; PAM sequence: TTA
agttcttgagaatagttgga

SEQ ID NO: 361771 - DNA, 20 bp, Artificial Sequence
  Description of Artificial Sequence: Synthetic oligonucleotide
  Target: LAMA2; (+) strand; PAM type: YTN; PAM sequence: TTC
ttgagaatagttggaaaggg

SEQ ID NO: 361772 - DNA, 20 bp, Artificial Sequence
  Description of Artificial Sequence: Synthetic oligonucleotide
  Target: LAMA2; (+) strand; PAM type: YTN; PAM sequence: CTT
gagaatagttggaaagggtt

SEQ ID NO: 361773 - DNA, 20 bp, Artificial Sequence
  Description of Artificial Sequence: Synthetic oligonucleotide
  Target: LAMA2; (+) strand; PAM type: YTN; PAM sequence: TTG
agaatagttggaaagggttg

SEQ ID NO: 361774 - DNA, 20 bp, Artificial Sequence
  Description of Artificial Sequence: Synthetic oligonucleotide
  Target: LAMA2; (+) strand; PAM type: YTN; PAM sequence: TTG
gaaagggttgtaatgatcag

SEQ ID NO: 361775 - DNA, 20 bp, Artificial Sequence
  Description of Artificial Sequence: Synthetic oligonucleotide
  Target: LAMA2; (+) strand; PAM type: YTN; PAM sequence: TTG
taatgatcagaaacacatat

SEQ ID NO: 361776 - DNA, 20 bp, Artificial Sequence
  Description of Artificial Sequence: Synthetic oligonucleotide
  Target: LAMA2; (+) strand; PAM type: YTN; PAM sequence: TTA
tacctaaacatgtattaaga

SEQ ID NO: 361777 - DNA, 20 bp, Artificial Sequence
  Description of Artificial Sequence: Synthetic oligonucleotide
  Target: LAMA2; (+) strand; PAM type: YTN; PAM sequence: CTA
aacatgtattaagaccttgt

SEQ ID NO: 361778 - DNA, 20 bp, Artificial Sequence
  Description of Artificial Sequence: Synthetic oligonucleotide
  Target: LAMA2; (+) strand; PAM type: YTN; PAM sequence: TTA
agaccttgttttaaaaatta

SEQ ID NO: 361779 - DNA, 20 bp, Artificial Sequence
  Description of Artificial Sequence: Synthetic oligonucleotide
  Target: LAMA2; (+) strand; PAM type: YTN; PAM sequence: CTT
gttttaaaaattagatcttg

SEQ ID NO: 361780 - DNA, 20 bp, Artificial Sequence
  Description of Artificial Sequence: Synthetic oligonucleotide
  Target: LAMA2; (+) strand; PAM type: YTN; PAM sequence: TTG
ttttaaaaattagatcttgg

SEQ ID NO: 361781 - DNA, 20 bp, Artificial Sequence
  Description of Artificial Sequence: Synthetic oligonucleotide
  Target: LAMA2; (+) strand; PAM type: YTN; PAM sequence: TTT
taaaaattagatcttggagc

SEQ ID NO: 361782 - DNA, 20 bp, Artificial Sequence
  Description of Artificial Sequence: Synthetic oligonucleotide
  Target: LAMA2; (+) strand; PAM type: YTN; PAM sequence: TTT
aaaaattagatcttggagca

SEQ ID NO: 361783 - DNA, 20 bp, Artificial Sequence
  Description of Artificial Sequence: Synthetic oligonucleotide
  Target: LAMA2; (+) strand; PAM type: YTN; PAM sequence: TTA
aaaattagatcttggagcaa

SEQ ID NO: 361784 - DNA, 20 bp, Artificial Sequence
  Description of Artificial Sequence: Synthetic oligonucleotide
  Target: LAMA2; (+) strand; PAM type: YTN; PAM sequence: TTA
gatcttggagcaagaaggta

SEQ ID NO: 361785 - DNA, 20 bp, Artificial Sequence
  Description of Artificial Sequence: Synthetic oligonucleotide
  Target: LAMA2; (+) strand; PAM type: YTN; PAM sequence: CTT
ggagcaagaaggtaagctgt

SEQ ID NO: 361786 - DNA, 20 bp, Artificial Sequence
  Description of Artificial Sequence: Synthetic oligonucleotide
  Target: LAMA2; (+) strand; PAM type: YTN; PAM sequence: TTG
gagcaagaaggtaagctgta

SEQ ID NO: 361787 - DNA, 20 bp, Artificial Sequence
  Description of Artificial Sequence: Synthetic oligonucleotide
  Target: LAMA2; (+) strand; PAM type: YTN; PAM sequence: CTG
tatcattacgttcttagaat

SEQ ID NO: 361788 - DNA, 20 bp, Artificial Sequence
  Description of Artificial Sequence: Synthetic oligonucleotide
  Target: LAMA2; (+) strand; PAM type: YTN; PAM sequence: TTA
cgttcttagaatacagggtt

SEQ ID NO: 361789 - DNA, 20 bp, Artificial Sequence
  Description of Artificial Sequence: Synthetic oligonucleotide
  Target: LAMA2; (+) strand; PAM type: YTN; PAM sequence: TTC
ttagaatacagggttgggcg

SEQ ID NO: 361790 - DNA, 20 bp, Artificial Sequence
  Description of Artificial Sequence: Synthetic oligonucleotide
  Target: LAMA2; (+) strand; PAM type: YTN; PAM sequence: CTT
agaatacagggttgggcgtg

SEQ ID NO: 361791 - DNA, 20 bp, Artificial Sequence
  Description of Artificial Sequence: Synthetic oligonucleotide
  Target: LAMA2; (+) strand; PAM type: YTN; PAM sequence: TTA
gaatacagggttgggcgtgg

SEQ ID NO: 361792 - DNA, 20 bp, Artificial Sequence
  Description of Artificial Sequence: Synthetic oligonucleotide
  Target: LAMA2; (+) strand; PAM type: YTN; PAM sequence: TTG
ggcgtgggggctcatgcctg

SEQ ID NO: 361793 - DNA, 20 bp, Artificial Sequence
  Description of Artificial Sequence: Synthetic oligonucleotide
  Target: LAMA2; (+) strand; PAM type: YTN; PAM sequence: CTC
atgcctgtaatcccagcatt

SEQ ID NO: 361794 - DNA, 20 bp, Artificial Sequence
  Description of Artificial Sequence: Synthetic oligonucleotide
  Target: LAMA2; (+) strand; PAM type: YTN; PAM sequence: CTG
taatcccagcattttgggag

SEQ ID NO: 361795 - DNA, 20 bp, Artificial Sequence
  Description of Artificial Sequence: Synthetic oligonucleotide
  Target: LAMA2; (+) strand; PAM type: YTN; PAM sequence: TTT
tgggaggctgaggcgggtgg

SEQ ID NO: 361796 - DNA, 20 bp, Artificial Sequence
  Description of Artificial Sequence: Synthetic oligonucleotide
  Target: LAMA2; (+) strand; PAM type: YTN; PAM sequence: TTT
gggaggctgaggcgggtgga

SEQ ID NO: 361797 - DNA, 20 bp, Artificial Sequence
  Description of Artificial Sequence: Synthetic oligonucleotide
  Target: LAMA2; (+) strand; PAM type: YTN; PAM sequence: TTG
ggaggctgaggcgggtggat

SEQ ID NO: 361798 - DNA, 20 bp, Artificial Sequence
  Description of Artificial Sequence: Synthetic oligonucleotide
  Target: LAMA2; (+) strand; PAM type: YTN; PAM sequence: CTG
aggcgggtggatcacgaggt

SEQ ID NO: 361799 - DNA, 20 bp, Artificial Sequence
  Description of Artificial Sequence: Synthetic oligonucleotide
  Target: LAMA2; (+) strand; PAM type: YTN; PAM sequence: CTG
gccaacatgacgaaaccctg

SEQ ID NO: 361800 - DNA, 20 bp, Artificial Sequence
  Description of Artificial Sequence: Synthetic oligonucleotide
  Target: LAMA2; (+) strand; PAM type: YTN; PAM sequence: CTG
tctgtactaaaaatacaaaa

SEQ ID NO: 361801 - DNA, 20 bp, Artificial Sequence
  Description of Artificial Sequence: Synthetic oligonucleotide
  Target: LAMA2; (+) strand; PAM type: YTN; PAM sequence: CTG
tactaaaaatacaaaaatta

SEQ ID NO: 361802 - DNA, 20 bp, Artificial Sequence
  Description of Artificial Sequence: Synthetic oligonucleotide
  Target: LAMA2; (+) strand; PAM type: YTN; PAM sequence: CTA
aaaatacaaaaattacctgg

SEQ ID NO: 361803 - DNA, 20 bp, Artificial Sequence
  Description of Artificial Sequence: Synthetic oligonucleotide
  Target: LAMA2; (+) strand; PAM type: YTN; PAM sequence: TTA
cctgggtatggtggcgtgtg

SEQ ID NO: 361804 - DNA, 20 bp, Artificial Sequence
  Description of Artificial Sequence: Synthetic oligonucleotide
  Target: LAMA2; (+) strand; PAM type: YTN; PAM sequence: CTG
ggtatggtggcgtgtgcctg

SEQ ID NO: 361805 - DNA, 20 bp, Artificial Sequence
  Description of Artificial Sequence: Synthetic oligonucleotide
  Target: LAMA2; (+) strand; PAM type: YTN; PAM sequence: CTG
taatcccagctacttgggag

SEQ ID NO: 361806 - DNA, 20 bp, Artificial Sequence
  Description of Artificial Sequence: Synthetic oligonucleotide
  Target: LAMA2; (+) strand; PAM type: YTN; PAM sequence: CTA
cttgggaggctgaggcagga

SEQ ID NO: 361807 - DNA, 20 bp, Artificial Sequence
  Description of Artificial Sequence: Synthetic oligonucleotide
  Target: LAMA2; (+) strand; PAM type: YTN; PAM sequence: CTT
gggaggctgaggcaggagaa

SEQ ID NO: 361808 - DNA, 20 bp, Artificial Sequence
  Description of Artificial Sequence: Synthetic oligonucleotide
  Target: LAMA2; (+) strand; PAM type: YTN; PAM sequence: TTG
ggaggctgaggcaggagaat

SEQ ID NO: 361809 - DNA, 20 bp, Artificial Sequence
  Description of Artificial Sequence: Synthetic oligonucleotide
  Target: LAMA2; (+) strand; PAM type: YTN; PAM sequence: CTG
aggcaggagaatcgcttgaa

SEQ ID NO: 361810 - DNA, 20 bp, Artificial Sequence
  Description of Artificial Sequence: Synthetic oligonucleotide
  Target: LAMA2; (+) strand; PAM type: YTN; PAM sequence: CTT
gaacccaggaggcggaggtt

SEQ ID NO: 361811 - DNA, 20 bp, Artificial Sequence
  Description of Artificial Sequence: Synthetic oligonucleotide
  Target: LAMA2; (+) strand; PAM type: YTN; PAM sequence: TTG
aacccaggaggcggaggttg

SEQ ID NO: 361812 - DNA, 20 bp, Artificial Sequence
  Description of Artificial Sequence: Synthetic oligonucleotide
  Target: LAMA2; (+) strand; PAM type: YTN; PAM sequence: TTG
cagtgagctgagatcgtgcc

SEQ ID NO: 361813 - DNA, 20 bp, Artificial Sequence
  Description of Artificial Sequence: Synthetic oligonucleotide
  Target: LAMA2; (+) strand; PAM type: YTN; PAM sequence: CTG
agatcgtgcctctgcactcc

SEQ ID NO: 361814 - DNA, 20 bp, Artificial Sequence
  Description of Artificial Sequence: Synthetic oligonucleotide
  Target: LAMA2; (+) strand; PAM type: YTN; PAM sequence: CTC
tgcactccagcctggtgaca

SEQ ID NO: 361815 - DNA, 20 bp, Artificial Sequence
  Description of Artificial Sequence: Synthetic oligonucleotide
  Target: LAMA2; (+) strand; PAM type: YTN; PAM sequence: CTG
cactccagcctggtgacaga

SEQ ID NO: 361816 - DNA, 20 bp, Artificial Sequence
  Description of Artificial Sequence: Synthetic oligonucleotide
  Target: LAMA2; (+) strand; PAM type: YTN; PAM sequence: CTC
cagcctggtgacagagcgag

SEQ ID NO: 361817 - DNA, 20 bp, Artificial Sequence
  Description of Artificial Sequence: Synthetic oligonucleotide
  Target: LAMA2; (+) strand; PAM type: YTN; PAM sequence: CTG
gtgacagagcgagactccat

SEQ ID NO: 361818 - DNA, 20 bp, Artificial Sequence
  Description of Artificial Sequence: Synthetic oligonucleotide
  Target: LAMA2; (+) strand; PAM type: YTN; PAM sequence: CTC
catctcaaaaaaaaaataat

SEQ ID NO: 361819 - DNA, 20 bp, Artificial Sequence
  Description of Artificial Sequence: Synthetic oligonucleotide
  Target: LAMA2; (+) strand; PAM type: YTN; PAM sequence: CTC
aaaaaaaaaataataataat

SEQ ID NO: 361820 - DNA, 20 bp, Artificial Sequence
  Description of Artificial Sequence: Synthetic oligonucleotide
  Target: LAMA2; (+) strand; PAM type: YTN; PAM sequence: TTT
tgaatacaaaatatctattt

SEQ ID NO: 361821 - DNA, 20 bp, Artificial Sequence
  Description of Artificial Sequence: Synthetic oligonucleotide
  Target: LAMA2; (+) strand; PAM type: YTN; PAM sequence: TTT
gaatacaaaatatctatttt

SEQ ID NO: 361822 - DNA, 20 bp, Artificial Sequence
  Description of Artificial Sequence: Synthetic oligonucleotide
  Target: LAMA2; (+) strand; PAM type: YTN; PAM sequence: TTG
aatacaaaatatctattttt

SEQ ID NO: 361823 - DNA, 20 bp, Artificial Sequence
  Description of Artificial Sequence: Synthetic oligonucleotide
  Target: LAMA2; (+) strand; PAM type: YTN; PAM sequence: CTA
tttttagaatctcaaaccca

SEQ ID NO: 361824 - DNA, 20 bp, Artificial Sequence
  Description of Artificial Sequence: Synthetic oligonucleotide
  Target: LAMA2; (+) strand; PAM type: YTN; PAM sequence: TTT
ttagaatctcaaacccatga

SEQ ID NO: 361825 - DNA, 20 bp, Artificial Sequence
  Description of Artificial Sequence: Synthetic oligonucleotide
  Target: LAMA2; (+) strand; PAM type: YTN; PAM sequence: TTT
tagaatctcaaacccatgag

SEQ ID NO: 361826 - DNA, 20 bp, Artificial Sequence
  Description of Artificial Sequence: Synthetic oligonucleotide
  Target: LAMA2; (+) strand; PAM type: YTN; PAM sequence: TTT
agaatctcaaacccatgagt

SEQ ID NO: 361827 - DNA, 20 bp, Artificial Sequence
  Description of Artificial Sequence: Synthetic oligonucleotide
  Target: LAMA2; (+) strand; PAM type: YTN; PAM sequence: TTA
gaatctcaaacccatgagtt

SEQ ID NO: 361828 - DNA, 20 bp, Artificial Sequence
  Description of Artificial Sequence: Synthetic oligonucleotide
  Target: LAMA2; (+) strand; PAM type: YTN; PAM sequence: CTC
aaacccatgagttactttct

SEQ ID NO: 361829 - DNA, 20 bp, Artificial Sequence
  Description of Artificial Sequence: Synthetic oligonucleotide
  Target: LAMA2; (+) strand; PAM type: YTN; PAM sequence: TTA
ctttcttccatatataagtc

SEQ ID NO: 361830 - DNA, 20 bp, Artificial Sequence
  Description of Artificial Sequence: Synthetic oligonucleotide
  Target: LAMA2; (+) strand; PAM type: YTN; PAM sequence: CTT
tcttccatatataagtccca

SEQ ID NO: 361831 - DNA, 20 bp, Artificial Sequence
  Description of Artificial Sequence: Synthetic oligonucleotide
  Target: LAMA2; (+) strand; PAM type: YTN; PAM sequence: TTT
cttccatatataagtcccaa

SEQ ID NO: 361832 - DNA, 20 bp, Artificial Sequence
  Description of Artificial Sequence: Synthetic oligonucleotide
  Target: LAMA2; (+) strand; PAM type: YTN; PAM sequence: TTC
ttccatatataagtcccaac

SEQ ID NO: 361833 - DNA, 20 bp, Artificial Sequence
  Description of Artificial Sequence: Synthetic oligonucleotide
  Target: LAMA2; (+) strand; PAM type: YTN; PAM sequence: CTT
ccatatataagtcccaacat

SEQ ID NO: 361834 - DNA, 20 bp, Artificial Sequence
  Description of Artificial Sequence: Synthetic oligonucleotide
  Target: LAMA2; (+) strand; PAM type: YTN; PAM sequence: TTC
catatataagtcccaacatg

SEQ ID NO: 361835 - DNA, 20 bp, Artificial Sequence
  Description of Artificial Sequence: Synthetic oligonucleotide
  Target: LAMA2; (+) strand; PAM type: YTN; PAM sequence: TTT
tctataatcagtctatgtct

SEQ ID NO: 361836 - DNA, 20 bp, Artificial Sequence
  Description of Artificial Sequence: Synthetic oligonucleotide
  Target: LAMA2; (+) strand; PAM type: YTN; PAM sequence: TTT
ctataatcagtctatgtcta

SEQ ID NO: 361837 - DNA, 20 bp, Artificial Sequence
  Description of Artificial Sequence: Synthetic oligonucleotide
  Target: LAMA2; (+) strand; PAM type: YTN; PAM sequence: TTC
tataatcagtctatgtctat

SEQ ID NO: 361838 - DNA, 20 bp, Artificial Sequence
  Description of Artificial Sequence: Synthetic oligonucleotide
  Target: LAMA2; (+) strand; PAM type: YTN; PAM sequence: CTA
taatcagtctatgtctatta

SEQ ID NO: 361839 - DNA, 20 bp, Artificial Sequence
  Description of Artificial Sequence: Synthetic oligonucleotide
  Target: LAMA2; (+) strand; PAM type: YTN; PAM sequence: CTA
tgtctattagatgtgtaatt

SEQ ID NO: 361840 - DNA, 20 bp, Artificial Sequence
  Description of Artificial Sequence: Synthetic oligonucleotide
  Target: LAMA2; (+) strand; PAM type: YTN; PAM sequence: CTA
ttagatgtgtaattatatta

SEQ ID NO: 361841 - DNA, 20 bp, Artificial Sequence
  Description of Artificial Sequence: Synthetic oligonucleotide
  Target: LAMA2; (+) strand; PAM type: YTN; PAM sequence: TTA
gatgtgtaattatattaatt

SEQ ID NO: 361842 - DNA, 20 bp, Artificial Sequence
  Description of Artificial Sequence: Synthetic oligonucleotide
  Target: LAMA2; (+) strand; PAM type: YTN; PAM sequence: TTA
tattaattatgtaaatgcac

SEQ ID NO: 361843 - DNA, 20 bp, Artificial Sequence
  Description of Artificial Sequence: Synthetic oligonucleotide
  Target: LAMA2; (+) strand; PAM type: YTN; PAM sequence: TTA
attatgtaaatgcacatgaa

SEQ ID NO: 361844 - DNA, 20 bp, Artificial Sequence
  Description of Artificial Sequence: Synthetic oligonucleotide
  Target: LAMA2; (+) strand; PAM type: YTN; PAM sequence: TTA
tgtaaatgcacatgaatacc

SEQ ID NO: 361845 - DNA, 20 bp, Artificial Sequence
  Description of Artificial Sequence: Synthetic oligonucleotide
  Target: LAMA2; (+) strand; PAM type: YTN; PAM sequence: TTA
tttggttaatcttcgaattt

SEQ ID NO: 361846 - DNA, 20 bp, Artificial Sequence
  Description of Artificial Sequence: Synthetic oligonucleotide
  Target: LAMA2; (+) strand; PAM type: YTN; PAM sequence: TTT
ggttaatcttcgaatttctt

SEQ ID NO: 361847 - DNA, 20 bp, Artificial Sequence
  Description of Artificial Sequence: Synthetic oligonucleotide
  Target: LAMA2; (+) strand; PAM type: YTN; PAM sequence: TTG
gttaatcttcgaatttcttt

SEQ ID NO: 361848 - DNA, 20 bp, Artificial Sequence
  Description of Artificial Sequence: Synthetic oligonucleotide
  Target: LAMA2; (+) strand; PAM type: YTN; PAM sequence: TTA
atcttcgaatttcttttagc

SEQ ID NO: 361849 - DNA, 20 bp, Artificial Sequence
  Description of Artificial Sequence: Synthetic oligonucleotide
  Target: LAMA2; (+) strand; PAM type: YTN; PAM sequence: CTT
cgaatttcttttagcaatta

SEQ ID NO: 361850 - DNA, 20 bp, Artificial Sequence
  Description of Artificial Sequence: Synthetic oligonucleotide
  Target: LAMA2; (+) strand; PAM type: YTN; PAM sequence: TTC
gaatttcttttagcaattat

SEQ ID NO: 361851 - DNA, 20 bp, Artificial Sequence
  Description of Artificial Sequence: Synthetic oligonucleotide
  Target: LAMA2; (+) strand; PAM type: YTN; PAM sequence: TTT
cttttagcaattatatactc

SEQ ID NO: 361852 - DNA, 20 bp, Artificial Sequence
  Description of Artificial Sequence: Synthetic oligonucleotide
  Target: LAMA2; (+) strand; PAM type: YTN; PAM sequence: TTC
ttttagcaattatatactct

SEQ ID NO: 361853 - DNA, 20 bp, Artificial Sequence
  Description of Artificial Sequence: Synthetic oligonucleotide
  Target: LAMA2; (+) strand; PAM type: YTN; PAM sequence: CTT
ttagcaattatatactctcc

SEQ ID NO: 361854 - DNA, 20 bp, Artificial Sequence
  Description of Artificial Sequence: Synthetic oligonucleotide
  Target: LAMA2; (+) strand; PAM type: YTN; PAM sequence: TTT
tagcaattatatactctcct

SEQ ID NO: 361855 - DNA, 20 bp, Artificial Sequence
  Description of Artificial Sequence: Synthetic oligonucleotide
  Target: LAMA2; (+) strand; PAM type: YTN; PAM sequence: TTT
agcaattatatactctcctc

SEQ ID NO: 361856 - DNA, 20 bp, Artificial Sequence
  Description of Artificial Sequence: Synthetic oligonucleotide
  Target: LAMA2; (+) strand; PAM type: YTN; PAM sequence: TTA
gcaattatatactctcctcc

SEQ ID NO: 361857 - DNA, 20 bp, Artificial Sequence
  Description of Artificial Sequence: Synthetic oligonucleotide
  Target: LAMA2; (+) strand; PAM type: YTN; PAM sequence: TTA
tatactctcctccaggttag

SEQ ID NO: 361858 - DNA, 20 bp, Artificial Sequence
  Description of Artificial Sequence: Synthetic oligonucleotide
  Target: LAMA2; (+) strand; PAM type: YTN; PAM sequence: CTC
tcctccaggttagattgagc

SEQ ID NO: 361859 - DNA, 20 bp, Artificial Sequence
  Description of Artificial Sequence: Synthetic oligonucleotide
  Target: LAMA2; (+) strand; PAM type: YTN; PAM sequence: CTC
ctccaggttagattgagctt

SEQ ID NO: 361860 - DNA, 20 bp, Artificial Sequence
  Description of Artificial Sequence: Synthetic oligonucleotide
  Target: LAMA2; (+) strand; PAM type: YTN; PAM sequence: CTC
caggttagattgagctttcc

SEQ ID NO: 361861 - DNA, 20 bp, Artificial Sequence
  Description of Artificial Sequence: Synthetic oligonucleotide
  Target: LAMA2; (+) strand; PAM type: YTN; PAM sequence: TTA
gattgagctttcccttcaac

SEQ ID NO: 361862 - DNA, 20 bp, Artificial Sequence
  Description of Artificial Sequence: Synthetic oligonucleotide
  Target: LAMA2; (+) strand; PAM type: YTN; PAM sequence: TTG
agctttcccttcaactcaga

SEQ ID NO: 361863 - DNA, 20 bp, Artificial Sequence
  Description of Artificial Sequence: Synthetic oligonucleotide
  Target: LAMA2; (+) strand; PAM type: YTN; PAM sequence: CTT
tcccttcaactcagagaaat

SEQ ID NO: 361864 - DNA, 20 bp, Artificial Sequence
  Description of Artificial Sequence: Synthetic oligonucleotide
  Target: LAMA2; (+) strand; PAM type: YTN; PAM sequence: TTT
cccttcaactcagagaaatc

SEQ ID NO: 361865 - DNA, 20 bp, Artificial Sequence
  Description of Artificial Sequence: Synthetic oligonucleotide
  Target: LAMA2; (+) strand; PAM type: YTN; PAM sequence: TTC
ccttcaactcagagaaatca

SEQ ID NO: 361866 - DNA, 20 bp, Artificial Sequence
  Description of Artificial Sequence: Synthetic oligonucleotide
  Target: LAMA2; (+) strand; PAM type: YTN; PAM sequence: CTT
caactcagagaaatcagtgt

SEQ ID NO: 361867 - DNA, 20 bp, Artificial Sequence
  Description of Artificial Sequence: Synthetic oligonucleotide
  Target: LAMA2; (+) strand; PAM type: YTN; PAM sequence: TTC
aactcagagaaatcagtgtc

SEQ ID NO: 361868 - DNA, 20 bp, Artificial Sequence
  Description of Artificial Sequence: Synthetic oligonucleotide
  Target: LAMA2; (+) strand; PAM type: YTN; PAM sequence: CTC
agagaaatcagtgtcaacag

SEQ ID NO: 361869 - DNA, 20 bp, Artificial Sequence
  Description of Artificial Sequence: Synthetic oligonucleotide
  Target: LAMA2; (+) strand; PAM type: YTN; PAM sequence: CTA
ccttctgtaagactaccaga

SEQ ID NO: 361870 - DNA, 20 bp, Artificial Sequence
  Description of Artificial Sequence: Synthetic oligonucleotide
  Target: LAMA2; (+) strand; PAM type: YTN; PAM sequence: CTT
ctgtaagactaccagagagc

SEQ ID NO: 361871 - DNA, 20 bp, Artificial Sequence
  Description of Artificial Sequence: Synthetic oligonucleotide
  Target: LAMA2; (+) strand; PAM type: YTN; PAM sequence: TTC
tgtaagactaccagagagct

SEQ ID NO: 361872 - DNA, 20 bp, Artificial Sequence
  Description of Artificial Sequence: Synthetic oligonucleotide
  Target: LAMA2; (+) strand; PAM type: YTN; PAM sequence: CTG
taagactaccagagagctat

SEQ ID NO: 361873 - DNA, 20 bp, Artificial Sequence
  Description of Artificial Sequence: Synthetic oligonucleotide
  Target: LAMA2; (+) strand; PAM type: YTN; PAM sequence: CTA
ccagagagctatgcattact

SEQ ID NO: 361874 - DNA, 20 bp, Artificial Sequence
  Description of Artificial Sequence: Synthetic oligonucleotide
  Target: LAMA2; (+) strand; PAM type: YTN; PAM sequence: CTA
tgcattactctgtacaaagg

SEQ ID NO: 361875 - DNA, 20 bp, Artificial Sequence
  Description of Artificial Sequence: Synthetic oligonucleotide
  Target: LAMA2; (+) strand; PAM type: YTN; PAM sequence: TTA
ctctgtacaaaggatatttc

SEQ ID NO: 361876 - DNA, 20 bp, Artificial Sequence
  Description of Artificial Sequence: Synthetic oligonucleotide
  Target: LAMA2; (+) strand; PAM type: YTN; PAM sequence: CTC
tgtacaaaggatatttctcc

SEQ ID NO: 361877 - DNA, 20 bp, Artificial Sequence
  Description of Artificial Sequence: Synthetic oligonucleotide
  Target: LAMA2; (+) strand; PAM type: YTN; PAM sequence: CTG
tacaaaggatatttctccta

SEQ ID NO: 361878 - DNA, 20 bp, Artificial Sequence
  Description of Artificial Sequence: Synthetic oligonucleotide
  Target: LAMA2; (+) strand; PAM type: YTN; PAM sequence: TTT
ctcctataaatagtgctttc

SEQ ID NO: 361879 - DNA, 20 bp, Artificial Sequence
  Description of Artificial Sequence: Synthetic oligonucleotide
  Target: LAMA2; (+) strand; PAM type: YTN; PAM sequence: TTC
tcctataaatagtgctttca

SEQ ID NO: 361880 - DNA, 20 bp, Artificial Sequence
  Description of Artificial Sequence: Synthetic oligonucleotide
  Target: LAMA2; (+) strand; PAM type: YTN; PAM sequence: CTC
ctataaatagtgctttcaat

SEQ ID NO: 361881 - DNA, 20 bp, Artificial Sequence
  Description of Artificial Sequence: Synthetic oligonucleotide
  Target: LAMA2; (+) strand; PAM type: YTN; PAM sequence: CTA
taaatagtgctttcaataga

SEQ ID NO: 361882 - DNA, 20 bp, Artificial Sequence
  Description of Artificial Sequence: Synthetic oligonucleotide
  Target: LAMA2; (+) strand; PAM type: YTN; PAM sequence: CTT
tcaatagagaaaatctgtta

SEQ ID NO: 361883 - DNA, 20 bp, Artificial Sequence
  Description of Artificial Sequence: Synthetic oligonucleotide
  Target: LAMA2; (+) strand; PAM type: YTN; PAM sequence: TTT
caatagagaaaatctgttat

SEQ ID NO: 361884 - DNA, 20 bp, Artificial Sequence
  Description of Artificial Sequence: Synthetic oligonucleotide
  Target: LAMA2; (+) strand; PAM type: YTN; PAM sequence: TTC
aatagagaaaatctgttatc

SEQ ID NO: 361885 - DNA, 20 bp, Artificial Sequence
  Description of Artificial Sequence: Synthetic oligonucleotide
  Target: LAMA2; (+) strand; PAM type: YTN; PAM sequence: CTG
ttatcatgttgtcagtaaat

SEQ ID NO: 361886 - DNA, 20 bp, Artificial Sequence
  Description of Artificial Sequence: Synthetic oligonucleotide
  Target: LAMA2; (+) strand; PAM type: YTN; PAM sequence: TTA
tcatgttgtcagtaaattca

SEQ ID NO: 361887 - DNA, 20 bp, Artificial Sequence
  Description of Artificial Sequence: Synthetic oligonucleotide
  Target: LAMA2; (+) strand; PAM type: YTN; PAM sequence: TTG
tcagtaaattcaaatatttt

SEQ ID NO: 361888 - DNA, 20 bp, Artificial Sequence
  Description of Artificial Sequence: Synthetic oligonucleotide
  Target: LAMA2; (+) strand; PAM type: YTN; PAM sequence: TTC
aaatattttctcttttggaa

SEQ ID NO: 361889 - DNA, 20 bp, Artificial Sequence
  Description of Artificial Sequence: Synthetic oligonucleotide
  Target: LAMA2; (+) strand; PAM type: YTN; PAM sequence: TTT
tctcttttggaatactctgt

SEQ ID NO: 361890 - DNA, 20 bp, Artificial Sequence
  Description of Artificial Sequence: Synthetic oligonucleotide
  Target: LAMA2; (+) strand; PAM type: YTN; PAM sequence: TTT
ctcttttggaatactctgtt

SEQ ID NO: 361891 - DNA, 20 bp, Artificial Sequence
  Description of Artificial Sequence: Synthetic oligonucleotide
  Target: LAMA2; (+) strand; PAM type: YTN; PAM sequence: TTC
tcttttggaatactctgttc

SEQ ID NO: 361892 - DNA, 20 bp, Artificial Sequence
  Description of Artificial Sequence: Synthetic oligonucleotide
  Target: LAMA2; (+) strand; PAM type: YTN; PAM sequence: CTC
ttttggaatactctgttcct

SEQ ID NO: 361893 - DNA, 20 bp, Artificial Sequence
  Description of Artificial Sequence: Synthetic oligonucleotide
  Target: LAMA2; (+) strand; PAM type: YTN; PAM sequence: CTT
ttggaatactctgttcctat

SEQ ID NO: 361894 - DNA, 20 bp, Artificial Sequence
  Description of Artificial Sequence: Synthetic oligonucleotide
  Target: LAMA2; (+) strand; PAM type: YTN; PAM sequence: TTT
tggaatactctgttcctatt

SEQ ID NO: 361895 - DNA, 20 bp, Artificial Sequence
  Description of Artificial Sequence: Synthetic oligonucleotide
  Target: LAMA2; (+) strand; PAM type: YTN; PAM sequence: TTT
ggaatactctgttcctatta

SEQ ID NO: 361896 - DNA, 20 bp, Artificial Sequence
  Description of Artificial Sequence: Synthetic oligonucleotide
  Target: LAMA2; (+) strand; PAM type: YTN; PAM sequence: TTG
gaatactctgttcctattaa

SEQ ID NO: 361897 - DNA, 20 bp, Artificial Sequence
  Description of Artificial Sequence: Synthetic oligonucleotide
  Target: LAMA2; (+) strand; PAM type: YTN; PAM sequence: CTC
tgttcctattaaaacaagag

SEQ ID NO: 361898 - DNA, 20 bp, Artificial Sequence
  Description of Artificial Sequence: Synthetic oligonucleotide
  Target: LAMA2; (+) strand; PAM type: YTN; PAM sequence: CTG
ttcctattaaaacaagagct

SEQ ID NO: 361899 - DNA, 20 bp, Artificial Sequence
  Description of Artificial Sequence: Synthetic oligonucleotide
  Target: LAMA2; (+) strand; PAM type: YTN; PAM sequence: TTC
ctattaaaacaagagctgtt

SEQ ID NO: 361900 - DNA, 20 bp, Artificial Sequence
  Description of Artificial Sequence: Synthetic oligonucleotide
  Target: LAMA2; (+) strand; PAM type: YTN; PAM sequence: CTA
ttaaaacaagagctgtttcc

SEQ ID NO: 361901 - DNA, 20 bp, Artificial Sequence
  Description of Artificial Sequence: Synthetic oligonucleotide
  Target: LAMA2; (+) strand; PAM type: YTN; PAM sequence: TTA
aaacaagagctgtttccttc

SEQ ID NO: 361902 - DNA, 20 bp, Artificial Sequence
  Description of Artificial Sequence: Synthetic oligonucleotide
  Target: LAMA2; (+) strand; PAM type: YTN; PAM sequence: CTG
tttccttctttgaaacaagt

SEQ ID NO: 361903 - DNA, 20 bp, Artificial Sequence
  Description of Artificial Sequence: Synthetic oligonucleotide
  Target: LAMA2; (+) strand; PAM type: YTN; PAM sequence: TTT
ccttctttgaaacaagttat

SEQ ID NO: 361904 - DNA, 20 bp, Artificial Sequence
  Description of Artificial Sequence: Synthetic oligonucleotide
  Target: LAMA2; (+) strand; PAM type: YTN; PAM sequence: TTC
cttctttgaaacaagttatt

SEQ ID NO: 361905 - DNA, 20 bp, Artificial Sequence
  Description of Artificial Sequence: Synthetic oligonucleotide
  Target: LAMA2; (+) strand; PAM type: YTN; PAM sequence: CTT
ctttgaaacaagttatttat

SEQ ID NO: 361906 - DNA, 20 bp, Artificial Sequence
  Description of Artificial Sequence: Synthetic oligonucleotide
  Target: LAMA2; (+) strand; PAM type: YTN; PAM sequence: TTC
tttgaaacaagttatttata

SEQ ID NO: 361907 - DNA, 20 bp, Artificial Sequence
  Description of Artificial Sequence: Synthetic oligonucleotide
  Target: LAMA2; (+) strand; PAM type: YTN; PAM sequence: CTT
tgaaacaagttatttatatt

SEQ ID NO: 361908 - DNA, 20 bp, Artificial Sequence
  Description of Artificial Sequence: Synthetic oligonucleotide
  Target: LAMA2; (+) strand; PAM type: YTN; PAM sequence: TTT
gaaacaagttatttatattt

SEQ ID NO: 361909 - DNA, 20 bp, Artificial Sequence
  Description of Artificial Sequence: Synthetic oligonucleotide
  Target: LAMA2; (+) strand; PAM type: YTN; PAM sequence: TTG
aaacaagttatttatattta

SEQ ID NO: 361910 - DNA, 20 bp, Artificial Sequence
  Description of Artificial Sequence: Synthetic oligonucleotide
  Target: LAMA2; (+) strand; PAM type: YTN; PAM sequence: TTA
tttatatttatgtggttaag

SEQ ID NO: 361911 - DNA, 20 bp, Artificial Sequence
  Description of Artificial Sequence: Synthetic oligonucleotide
  Target: LAMA2; (+) strand; PAM type: YTN; PAM sequence: TTT
atatttatgtggttaagata

SEQ ID NO: 361912 - DNA, 20 bp, Artificial Sequence
  Description of Artificial Sequence: Synthetic oligonucleotide
  Target: LAMA2; (+) strand; PAM type: YTN; PAM sequence: TTA
tatttatgtggttaagatat

SEQ ID NO: 361913 - DNA, 20 bp, Artificial Sequence
  Description of Artificial Sequence: Synthetic oligonucleotide
  Target: LAMA2; (+) strand; PAM type: YTN; PAM sequence: TTT
atgtggttaagatatcctat

SEQ ID NO: 361914 - DNA, 20 bp, Artificial Sequence
  Description of Artificial Sequence: Synthetic oligonucleotide
  Target: LAMA2; (+) strand; PAM type: YTN; PAM sequence: TTA
tgtggttaagatatcctatc

SEQ ID NO: 361915 - DNA, 20 bp, Artificial Sequence
  Description of Artificial Sequence: Synthetic oligonucleotide
  Target: LAMA2; (+) strand; PAM type: YTN; PAM sequence: TTA
agatatcctatcttaaacca

SEQ ID NO: 361916 - DNA, 20 bp, Artificial Sequence
  Description of Artificial Sequence: Synthetic oligonucleotide
  Target: LAMA2; (+) strand; PAM type: YTN; PAM sequence: CTA
tcttaaaccataagaccttt

SEQ ID NO: 361917 - DNA, 20 bp, Artificial Sequence
  Description of Artificial Sequence: Synthetic oligonucleotide
  Target: LAMA2; (+) strand; PAM type: YTN; PAM sequence: CTT
aaaccataagacctttttga

SEQ ID NO: 361918 - DNA, 20 bp, Artificial Sequence
  Description of Artificial Sequence: Synthetic oligonucleotide
  Target: LAMA2; (+) strand; PAM type: YTN; PAM sequence: TTA
aaccataagacctttttgaa

SEQ ID NO: 361919 - DNA, 20 bp, Artificial Sequence
  Description of Artificial Sequence: Synthetic oligonucleotide
  Target: LAMA2; (+) strand; PAM type: YTN; PAM sequence: CTT
tttgaatacttcacatacag

SEQ ID NO: 361920 - DNA, 20 bp, Artificial Sequence
  Description of Artificial Sequence: Synthetic oligonucleotide
  Target: LAMA2; (+) strand; PAM type: YTN; PAM sequence: TTT
ttgaatacttcacatacaga

SEQ ID NO: 361921 - DNA, 20 bp, Artificial Sequence
  Description of Artificial Sequence: Synthetic oligonucleotide
  Target: LAMA2; (+) strand; PAM type: YTN; PAM sequence: TTT
tgaatacttcacatacagaa

SEQ ID NO: 361922 - DNA, 20 bp, Artificial Sequence
  Description of Artificial Sequence: Synthetic oligonucleotide
  Target: LAMA2; (+) strand; PAM type: YTN; PAM sequence: TTT
gaatacttcacatacagaaa

SEQ ID NO: 361923 - DNA, 20 bp, Artificial Sequence
  Description of Artificial Sequence: Synthetic oligonucleotide
  Target: LAMA2; (+) strand; PAM type: YTN; PAM sequence: TTG
aatacttcacatacagaaaa

SEQ ID NO: 361924 - DNA, 20 bp, Artificial Sequence
  Description of Artificial Sequence: Synthetic oligonucleotide
  Target: LAMA2; (+) strand; PAM type: YTN; PAM sequence: CTT
cacatacagaaaaatgaaaa

SEQ ID NO: 361925 - DNA, 20 bp, Artificial Sequence
  Description of Artificial Sequence: Synthetic oligonucleotide
  Target: LAMA2; (+) strand; PAM type: YTN; PAM sequence: TTC
acatacagaaaaatgaaaaa

SEQ ID NO: 361926 - DNA, 20 bp, Artificial Sequence
  Description of Artificial Sequence: Synthetic oligonucleotide
  Target: LAMA2; (+) strand; PAM type: YTN; PAM sequence: TTA
aacaaatatcagagttgctg

SEQ ID NO: 361927 - DNA, 20 bp, Artificial Sequence
  Description of Artificial Sequence: Synthetic oligonucleotide
  Target: LAMA2; (+) strand; PAM type: YTN; PAM sequence: TTG
ctgggaaccccaggatataa

SEQ ID NO: 361928 - DNA, 20 bp, Artificial Sequence
  Description of Artificial Sequence: Synthetic oligonucleotide
  Target: LAMA2; (+) strand; PAM type: YTN; PAM sequence: CTG
ggaaccccaggatataatct

SEQ ID NO: 361929 - DNA, 20 bp, Artificial Sequence
  Description of Artificial Sequence: Synthetic oligonucleotide
  Target: LAMA2; (+) strand; PAM type: YTN; PAM sequence: CTA
ctgtggatagtcattcatag

SEQ ID NO: 361930 - DNA, 20 bp, Artificial Sequence
  Description of Artificial Sequence: Synthetic oligonucleotide
  Target: LAMA2; (+) strand; PAM type: YTN; PAM sequence: CTG
tggatagtcattcatagaca

SEQ ID NO: 361931 - DNA, 20 bp, Artificial Sequence
  Description of Artificial Sequence: Synthetic oligonucleotide
  Target: LAMA2; (+) strand; PAM type: YTN; PAM sequence: TTC
atagacaaagacacctccta

SEQ ID NO: 361932 - DNA, 20 bp, Artificial Sequence
  Description of Artificial Sequence: Synthetic oligonucleotide
  Target: LAMA2; (+) strand; PAM type: YTN; PAM sequence: CTC
ctatttataggcttgggaca

SEQ ID NO: 361933 - DNA, 20 bp, Artificial Sequence
  Description of Artificial Sequence: Synthetic oligonucleotide
  Target: LAMA2; (+) strand; PAM type: YTN; PAM sequence: CTA
tttataggcttgggacagtt

SEQ ID NO: 361934 - DNA, 20 bp, Artificial Sequence
  Description of Artificial Sequence: Synthetic oligonucleotide
  Target: LAMA2; (+) strand; PAM type: YTN; PAM sequence: TTT
ataggcttgggacagttcag

SEQ ID NO: 361935 - DNA, 20 bp, Artificial Sequence
  Description of Artificial Sequence: Synthetic oligonucleotide
  Target: LAMA2; (+) strand; PAM type: YTN; PAM sequence: TTA
taggcttgggacagttcagc

SEQ ID NO: 361936 - DNA, 20 bp, Artificial Sequence
  Description of Artificial Sequence: Synthetic oligonucleotide
  Target: LAMA2; (+) strand; PAM type: YTN; PAM sequence: CTT
gggacagttcagcttctcca

SEQ ID NO: 361937 - DNA, 20 bp, Artificial Sequence
  Description of Artificial Sequence: Synthetic oligonucleotide
  Target: LAMA2; (+) strand; PAM type: YTN; PAM sequence: TTG
ggacagttcagcttctccaa

SEQ ID NO: 361938 - DNA, 20 bp, Artificial Sequence
  Description of Artificial Sequence: Synthetic oligonucleotide
  Target: LAMA2; (+) strand; PAM type: YTN; PAM sequence: TTC
agcttctccaacttgaagag

SEQ ID NO: 361939 - DNA, 20 bp, Artificial Sequence
  Description of Artificial Sequence: Synthetic oligonucleotide
  Target: LAMA2; (+) strand; PAM type: YTN; PAM sequence: CTT
ctccaacttgaagagagttt

SEQ ID NO: 361940 - DNA, 20 bp, Artificial Sequence
  Description of Artificial Sequence: Synthetic oligonucleotide
  Target: LAMA2; (+) strand; PAM type: YTN; PAM sequence: TTC
tccaacttgaagagagtttt

SEQ ID NO: 361941 - DNA, 20 bp, Artificial Sequence
  Description of Artificial Sequence: Synthetic oligonucleotide
  Target: LAMA2; (+) strand; PAM type: YTN; PAM sequence: CTC
caacttgaagagagttttga

SEQ ID NO: 361942 - DNA, 20 bp, Artificial Sequence
  Description of Artificial Sequence: Synthetic oligonucleotide
  Target: LAMA2; (+) strand; PAM type: YTN; PAM sequence: CTT
gaagagagttttgaagatca

SEQ ID NO: 361943 - DNA, 20 bp, Artificial Sequence
  Description of Artificial Sequence: Synthetic oligonucleotide
  Target: LAMA2; (+) strand; PAM type: YTN; PAM sequence: TTG
aagagagttttgaagatcaa

SEQ ID NO: 361944 - DNA, 20 bp, Artificial Sequence
  Description of Artificial Sequence: Synthetic oligonucleotide
  Target: LAMA2; (+) strand; PAM type: YTN; PAM sequence: TTT
tgaagatcaaatacaaatgg

SEQ ID NO: 361945 - DNA, 20 bp, Artificial Sequence
  Description of Artificial Sequence: Synthetic oligonucleotide
  Target: LAMA2; (+) strand; PAM type: YTN; PAM sequence: TTT
gaagatcaaatacaaatggg

SEQ ID NO: 361946 - DNA, 20 bp, Artificial Sequence
  Description of Artificial Sequence: Synthetic oligonucleotide
  Target: LAMA2; (+) strand; PAM type: YTN; PAM sequence: TTG
aagatcaaatacaaatgggt

SEQ ID NO: 361947 - DNA, 20 bp, Artificial Sequence
  Description of Artificial Sequence: Synthetic oligonucleotide
  Target: LAMA2; (+) strand; PAM type: YTN; PAM sequence: CTT
gtgaagtttcaaaaaatgtt

SEQ ID NO: 361948 - DNA, 20 bp, Artificial Sequence
  Description of Artificial Sequence: Synthetic oligonucleotide
  Target: LAMA2; (+) strand; PAM type: YTN; PAM sequence: TTG
tgaagtttcaaaaaatgttt

SEQ ID NO: 361949 - DNA, 20 bp, Artificial Sequence
  Description of Artificial Sequence: Synthetic oligonucleotide
  Target: LAMA2; (+) strand; PAM type: YTN; PAM sequence: TTT
caaaaaatgtttctcaaagt

SEQ ID NO: 361950 - DNA, 20 bp, Artificial Sequence
  Description of Artificial Sequence: Synthetic oligonucleotide
  Target: LAMA2; (+) strand; PAM type: YTN; PAM sequence: TTC
aaaaaatgtttctcaaagtc

SEQ ID NO: 361951 - DNA, 20 bp, Artificial Sequence
  Description of Artificial Sequence: Synthetic oligonucleotide
  Target: LAMA2; (+) strand; PAM type: YTN; PAM sequence: TTT
ctcaaagtcctttgagaaaa

SEQ ID NO: 361952 - DNA, 20 bp, Artificial Sequence
  Description of Artificial Sequence: Synthetic oligonucleotide
  Target: LAMA2; (+) strand; PAM type: YTN; PAM sequence: TTC
tcaaagtcctttgagaaaaa

SEQ ID NO: 361953 - DNA, 20 bp, Artificial Sequence
  Description of Artificial Sequence: Synthetic oligonucleotide
  Target: LAMA2; (+) strand; PAM type: YTN; PAM sequence: CTC
aaagtcctttgagaaaaata

SEQ ID NO: 361954 - DNA, 20 bp, Artificial Sequence
  Description of Artificial Sequence: Synthetic oligonucleotide
  Target: LAMA2; (+) strand; PAM type: YTN; PAM sequence: CTT
tgagaaaaataaacttgggc

SEQ ID NO: 361955 - DNA, 20 bp, Artificial Sequence
  Description of Artificial Sequence: Synthetic oligonucleotide
  Target: LAMA2; (+) strand; PAM type: YTN; PAM sequence: TTT
gagaaaaataaacttgggcc

SEQ ID NO: 361956 - DNA, 20 bp, Artificial Sequence
  Description of Artificial Sequence: Synthetic oligonucleotide
  Target: LAMA2; (+) strand; PAM type: YTN; PAM sequence: TTG
agaaaaataaacttgggcct

SEQ ID NO: 361957 - DNA, 20 bp, Artificial Sequence
  Description of Artificial Sequence: Synthetic oligonucleotide
  Target: LAMA2; (+) strand; PAM type: YTN; PAM sequence: CTT
gggcctgtagccaatagttt

SEQ ID NO: 361958 - DNA, 20 bp, Artificial Sequence
  Description of Artificial Sequence: Synthetic oligonucleotide
  Target: LAMA2; (+) strand; PAM type: YTN; PAM sequence: TTG
ggcctgtagccaatagtttg

SEQ ID NO: 361959 - DNA, 20 bp, Artificial Sequence
  Description of Artificial Sequence: Synthetic oligonucleotide
  Target: LAMA2; (+) strand; PAM type: YTN; PAM sequence: CTG
tagccaatagtttgtattcc

SEQ ID NO: 361960 - DNA, 20 bp, Artificial Sequence
  Description of Artificial Sequence: Synthetic oligonucleotide
  Target: LAMA2; (+) strand; PAM type: YTN; PAM sequence: TTT
gtattccaggcttttaaaaa

SEQ ID NO: 361961 - DNA, 20 bp, Artificial Sequence
  Description of Artificial Sequence: Synthetic oligonucleotide
  Target: LAMA2; (+) strand; PAM type: YTN; PAM sequence: TTG
tattccaggcttttaaaaaa

SEQ ID NO: 361962 - DNA, 20 bp, Artificial Sequence
  Description of Artificial Sequence: Synthetic oligonucleotide
  Target: LAMA2; (+) strand; PAM type: YTN; PAM sequence: TTC
caggcttttaaaaaaaattc

SEQ ID NO: 361963 - DNA, 20 bp, Artificial Sequence
  Description of Artificial Sequence: Synthetic oligonucleotide
  Target: LAMA2; (+) strand; PAM type: YTN; PAM sequence: CTT
ttaaaaaaaattcaaataca

SEQ ID NO: 361964 - DNA, 20 bp, Artificial Sequence
  Description of Artificial Sequence: Synthetic oligonucleotide
  Target: LAMA2; (+) strand; PAM type: YTN; PAM sequence: TTT
taaaaaaaattcaaatacag

SEQ ID NO: 361965 - DNA, 20 bp, Artificial Sequence
  Description of Artificial Sequence: Synthetic oligonucleotide
  Target: LAMA2; (+) strand; PAM type: YTN; PAM sequence: TTT
aaaaaaaattcaaatacaga

SEQ ID NO: 361966 - DNA, 20 bp, Artificial Sequence
  Description of Artificial Sequence: Synthetic oligonucleotide
  Target: LAMA2; (+) strand; PAM type: YTN; PAM sequence: TTA
aaaaaaattcaaatacagaa

SEQ ID NO: 361967 - DNA, 20 bp, Artificial Sequence
  Description of Artificial Sequence: Synthetic oligonucleotide
  Target: LAMA2; (+) strand; PAM type: YTN; PAM sequence: TTC
aaatacagaaacatcagatt

SEQ ID NO: 361968 - DNA, 20 bp, Artificial Sequence
  Description of Artificial Sequence: Synthetic oligonucleotide
  Target: LAMA2; (+) strand; PAM type: YTN; PAM sequence: TTT
tcattgccataggggtcatg

SEQ ID NO: 361969 - DNA, 20 bp, Artificial Sequence
  Description of Artificial Sequence: Synthetic oligonucleotide
  Target: LAMA2; (+) strand; PAM type: YTN; PAM sequence: TTT
cattgccataggggtcatga

SEQ ID NO: 361970 - DNA, 20 bp, Artificial Sequence
  Description of Artificial Sequence: Synthetic oligonucleotide
  Target: LAMA2; (+) strand; PAM type: YTN; PAM sequence: TTC
attgccataggggtcatgac

SEQ ID NO: 361971 - DNA, 20 bp, Artificial Sequence
  Description of Artificial Sequence: Synthetic oligonucleotide
  Target: LAMA2; (+) strand; PAM type: YTN; PAM sequence: TTG
ccataggggtcatgacatct

SEQ ID NO: 361972 - DNA, 20 bp, Artificial Sequence
  Description of Artificial Sequence: Synthetic oligonucleotide
  Target: LAMA2; (+) strand; PAM type: YTN; PAM sequence: CTT
ttaacataagtgcagaaact

SEQ ID NO: 361973 - DNA, 20 bp, Artificial Sequence
  Description of Artificial Sequence: Synthetic oligonucleotide
  Target: LAMA2; (+) strand; PAM type: YTN; PAM sequence: TTT
taacataagtgcagaaacta

SEQ ID NO: 361974 - DNA, 20 bp, Artificial Sequence
  Description of Artificial Sequence: Synthetic oligonucleotide
  Target: LAMA2; (+) strand; PAM type: YTN; PAM sequence: TTT
aacataagtgcagaaactat

SEQ ID NO: 361975 - DNA, 20 bp, Artificial Sequence
  Description of Artificial Sequence: Synthetic oligonucleotide
  Target: LAMA2; (+) strand; PAM type: YTN; PAM sequence: TTA
acataagtgcagaaactatc

SEQ ID NO: 361976 - DNA, 20 bp, Artificial Sequence
  Description of Artificial Sequence: Synthetic oligonucleotide
  Target: LAMA2; (+) strand; PAM type: YTN; PAM sequence: CTA
tctgtaatgaatcaaaactt

SEQ ID NO: 361977 - DNA, 20 bp, Artificial Sequence
  Description of Artificial Sequence: Synthetic oligonucleotide
  Target: LAMA2; (+) strand; PAM type: YTN; PAM sequence: CTG
taatgaatcaaaacttaaat

SEQ ID NO: 361978 - DNA, 20 bp, Artificial Sequence
  Description of Artificial Sequence: Synthetic oligonucleotide
  Target: LAMA2; (+) strand; PAM type: YTN; PAM sequence: CTT
aaatcagatgacattaagac

SEQ ID NO: 361979 - DNA, 20 bp, Artificial Sequence
  Description of Artificial Sequence: Synthetic oligonucleotide
  Target: LAMA2; (+) strand; PAM type: YTN; PAM sequence: TTA
aatcagatgacattaagacc

SEQ ID NO: 361980 - DNA, 20 bp, Artificial Sequence
  Description of Artificial Sequence: Synthetic oligonucleotide
  Target: LAMA2; (+) strand; PAM type: YTN; PAM sequence: TTA
agaccagctttgctattacc

SEQ ID NO: 361981 - DNA, 20 bp, Artificial Sequence
  Description of Artificial Sequence: Synthetic oligonucleotide
  Target: LAMA2; (+) strand; PAM type: YTN; PAM sequence: CTT
tgctattaccacagatggca

SEQ ID NO: 361982 - DNA, 20 bp, Artificial Sequence
  Description of Artificial Sequence: Synthetic oligonucleotide
  Target: LAMA2; (+) strand; PAM type: YTN; PAM sequence: TTT
gctattaccacagatggcat

SEQ ID NO: 361983 - DNA, 20 bp, Artificial Sequence
  Description of Artificial Sequence: Synthetic oligonucleotide
  Target: LAMA2; (+) strand; PAM type: YTN; PAM sequence: TTG
ctattaccacagatggcatc

SEQ ID NO: 361984 - DNA, 20 bp, Artificial Sequence
  Description of Artificial Sequence: Synthetic oligonucleotide
  Target: LAMA2; (+) strand; PAM type: YTN; PAM sequence: CTA
ttaccacagatggcatcaca

SEQ ID NO: 361985 - DNA, 20 bp, Artificial Sequence
  Description of Artificial Sequence: Synthetic oligonucleotide
  Target: LAMA2; (+) strand; PAM type: YTN; PAM sequence: TTA
ccacagatggcatcacaatt

SEQ ID NO: 361986 - DNA, 20 bp, Artificial Sequence
  Description of Artificial Sequence: Synthetic oligonucleotide
  Target: LAMA2; (+) strand; PAM type: YTN; PAM sequence: TTA
acttttaatatatcaaaaat

SEQ ID NO: 361987 - DNA, 20 bp, Artificial Sequence
  Description of Artificial Sequence: Synthetic oligonucleotide
  Target: LAMA2; (+) strand; PAM type: YTN; PAM sequence: CTT
ttaatatatcaaaaatgtga

SEQ ID NO: 361988 - DNA, 20 bp, Artificial Sequence
  Description of Artificial Sequence: Synthetic oligonucleotide
  Target: LAMA2; (+) strand; PAM type: YTN; PAM sequence: TTT
taatatatcaaaaatgtgag

SEQ ID NO: 361989 - DNA, 20 bp, Artificial Sequence
  Description of Artificial Sequence: Synthetic oligonucleotide
  Target: LAMA2; (+) strand; PAM type: YTN; PAM sequence: TTT
aatatatcaaaaatgtgagt

SEQ ID NO: 361990 - DNA, 20 bp, Artificial Sequence
  Description of Artificial Sequence: Synthetic oligonucleotide
  Target: LAMA2; (+) strand; PAM type: YTN; PAM sequence: TTA
atatatcaaaaatgtgagtg

SEQ ID NO: 361991 - DNA, 20 bp, Artificial Sequence
  Description of Artificial Sequence: Synthetic oligonucleotide
  Target: LAMA2; (+) strand; PAM type: YTN; PAM sequence: CTC
atatattatcagtcatttga

SEQ ID NO: 361992 - DNA, 20 bp, Artificial Sequence
  Description of Artificial Sequence: Synthetic oligonucleotide
  Target: LAMA2; (+) strand; PAM type: YTN; PAM sequence: TTA
tcagtcatttgatcatgata

SEQ ID NO: 361993 - DNA, 20 bp, Artificial Sequence
  Description of Artificial Sequence: Synthetic oligonucleotide
  Target: LAMA2; (+) strand; PAM type: YTN; PAM sequence: TTT
gatcatgatattccaacatt

SEQ ID NO: 361994 - DNA, 20 bp, Artificial Sequence
  Description of Artificial Sequence: Synthetic oligonucleotide
  Target: LAMA2; (+) strand; PAM type: YTN; PAM sequence: TTG
atcatgatattccaacatta

SEQ ID NO: 361995 - DNA, 20 bp, Artificial Sequence
  Description of Artificial Sequence: Synthetic oligonucleotide
  Target: LAMA2; (+) strand; PAM type: YTN; PAM sequence: TTC
caacattaacatctcagtgt

SEQ ID NO: 361996 - DNA, 20 bp, Artificial Sequence
  Description of Artificial Sequence: Synthetic oligonucleotide
  Target: LAMA2; (+) strand; PAM type: YTN; PAM sequence: TTA
acatctcagtgtattgtgaa

SEQ ID NO: 361997 - DNA, 20 bp, Artificial Sequence
  Description of Artificial Sequence: Synthetic oligonucleotide
  Target: LAMA2; (+) strand; PAM type: YTN; PAM sequence: CTC
agtgtattgtgaaaatgatt

SEQ ID NO: 361998 - DNA, 20 bp, Artificial Sequence
  Description of Artificial Sequence: Synthetic oligonucleotide
  Target: LAMA2; (+) strand; PAM type: YTN; PAM sequence: TTG
tgaaaatgattcatttgtac

SEQ ID NO: 361999 - DNA, 20 bp, Artificial Sequence
  Description of Artificial Sequence: Synthetic oligonucleotide
  Target: LAMA2; (+) strand; PAM type: YTN; PAM sequence: TTC
atttgtacaatatttttctt

SEQ ID NO: 362000 - DNA, 20 bp, Artificial Sequence
  Description of Artificial Sequence: Synthetic oligonucleotide
  Target: LAMA2; (+) strand; PAM type: YTN; PAM sequence: TTT
gtacaatatttttcttcttc

SEQ ID NO: 362001 - DNA, 20 bp, Artificial Sequence
  Description of Artificial Sequence: Synthetic oligonucleotide
  Target: LAMA2; (+) strand; PAM type: YTN; PAM sequence: TTG
tacaatatttttcttcttct

SEQ ID NO: 362002 - DNA, 20 bp, Artificial Sequence
  Description of Artificial Sequence: Synthetic oligonucleotide
  Target: LAMA2; (+) strand; PAM type: YTN; PAM sequence: TTT
ttcttcttctagacttttaa

SEQ ID NO: 362003 - DNA, 20 bp, Artificial Sequence
  Description of Artificial Sequence: Synthetic oligonucleotide
  Target: LAMA2; (+) strand; PAM type: YTN; PAM sequence: TTT
tcttcttctagacttttaat

SEQ ID NO: 362004 - DNA, 20 bp, Artificial Sequence
  Description of Artificial Sequence: Synthetic oligonucleotide
  Target: LAMA2; (+) strand; PAM type: YTN; PAM sequence: TTT
cttcttctagacttttaatt

SEQ ID NO: 362005 - DNA, 20 bp, Artificial Sequence
  Description of Artificial Sequence: Synthetic oligonucleotide
  Target: LAMA2; (+) strand; PAM type: YTN; PAM sequence: TTC
ttcttctagacttttaattt

SEQ ID NO: 362006 - DNA, 20 bp, Artificial Sequence
  Description of Artificial Sequence: Synthetic oligonucleotide
  Target: LAMA2; (+) strand; PAM type: YTN; PAM sequence: CTT
cttctagacttttaatttct

SEQ ID NO: 362007 - DNA, 20 bp, Artificial Sequence
  Description of Artificial Sequence: Synthetic oligonucleotide
  Target: LAMA2; (+) strand; PAM type: YTN; PAM sequence: TTC
ttctagacttttaatttctt

SEQ ID NO: 362008 - DNA, 20 bp, Artificial Sequence
  Description of Artificial Sequence: Synthetic oligonucleotide
  Target: LAMA2; (+) strand; PAM type: YTN; PAM sequence: CTT
ctagacttttaatttcttga

SEQ ID NO: 362009 - DNA, 20 bp, Artificial Sequence
  Description of Artificial Sequence: Synthetic oligonucleotide
  Target: LAMA2; (+) strand; PAM type: YTN; PAM sequence: TTC
tagacttttaatttcttgaa

SEQ ID NO: 362010 - DNA, 20 bp, Artificial Sequence
  Description of Artificial Sequence: Synthetic oligonucleotide
  Target: LAMA2; (+) strand; PAM type: YTN; PAM sequence: CTA
gacttttaatttcttgaagg

SEQ ID NO: 362011 - DNA, 20 bp, Artificial Sequence
  Description of Artificial Sequence: Synthetic oligonucleotide
  Target: LAMA2; (+) strand; PAM type: YTN; PAM sequence: CTT
ttaatttcttgaaggaagga

SEQ ID NO: 362012 - DNA, 20 bp, Artificial Sequence
  Description of Artificial Sequence: Synthetic oligonucleotide
  Target: LAMA2; (+) strand; PAM type: YTN; PAM sequence: TTT
taatttcttgaaggaaggaa

SEQ ID NO: 362013 - DNA, 20 bp, Artificial Sequence
  Description of Artificial Sequence: Synthetic oligonucleotide
  Target: LAMA2; (+) strand; PAM type: YTN; PAM sequence: TTT
aatttcttgaaggaaggaac

SEQ ID NO: 362014 - DNA, 20 bp, Artificial Sequence
  Description of Artificial Sequence: Synthetic oligonucleotide
  Target: LAMA2; (+) strand; PAM type: YTN; PAM sequence: TTA
atttcttgaaggaaggaacg

SEQ ID NO: 362015 - DNA, 20 bp, Artificial Sequence
  Description of Artificial Sequence: Synthetic oligonucleotide
  Target: LAMA2; (+) strand; PAM type: YTN; PAM sequence: TTT
cttgaaggaaggaacgcatt

SEQ ID NO: 362016 - DNA, 20 bp, Artificial Sequence
  Description of Artificial Sequence: Synthetic oligonucleotide
  Target: LAMA2; (+) strand; PAM type: YTN; PAM sequence: TTC
ttgaaggaaggaacgcattt

SEQ ID NO: 362017 - DNA, 20 bp, Artificial Sequence
  Description of Artificial Sequence: Synthetic oligonucleotide
  Target: LAMA2; (+) strand; PAM type: YTN; PAM sequence: CTT
gaaggaaggaacgcatttta

SEQ ID NO: 362018 - DNA, 20 bp, Artificial Sequence
  Description of Artificial Sequence: Synthetic oligonucleotide
  Target: LAMA2; (+) strand; PAM type: YTN; PAM sequence: TTG
aaggaaggaacgcattttac

SEQ ID NO: 362019 - DNA, 20 bp, Artificial Sequence
  Description of Artificial Sequence: Synthetic oligonucleotide
  Target: LAMA2; (+) strand; PAM type: YTN; PAM sequence: TTT
tactcatcttgtagtgaccc

SEQ ID NO: 362020 - DNA, 20 bp, Artificial Sequence
  Description of Artificial Sequence: Synthetic oligonucleotide
  Target: LAMA2; (+) strand; PAM type: YTN; PAM sequence: TTT
actcatcttgtagtgaccct

SEQ ID NO: 362021 - DNA, 20 bp, Artificial Sequence
  Description of Artificial Sequence: Synthetic oligonucleotide
  Target: LAMA2; (+) strand; PAM type: YTN; PAM sequence: TTA
ctcatcttgtagtgaccctc

SEQ ID NO: 362022 - DNA, 20 bp, Artificial Sequence
  Description of Artificial Sequence: Synthetic oligonucleotide
  Target: LAMA2; (+) strand; PAM type: YTN; PAM sequence: CTC
atcttgtagtgaccctccct

SEQ ID NO: 362023 - DNA, 20 bp, Artificial Sequence
  Description of Artificial Sequence: Synthetic oligonucleotide
  Target: LAMA2; (+) strand; PAM type: YTN; PAM sequence: CTT
gtagtgaccctccctgtaca

SEQ ID NO: 362024 - DNA, 20 bp, Artificial Sequence
  Description of Artificial Sequence: Synthetic oligonucleotide
  Target: LAMA2; (+) strand; PAM type: YTN; PAM sequence: TTG
tagtgaccctccctgtacat

SEQ ID NO: 362025 - DNA, 20 bp, Artificial Sequence
  Description of Artificial Sequence: Synthetic oligonucleotide
  Target: LAMA2; (+) strand; PAM type: YTN; PAM sequence: CTC
cctgtacatgttgcctgaga

SEQ ID NO: 362026 - DNA, 20 bp, Artificial Sequence
  Description of Artificial Sequence: Synthetic oligonucleotide
  Target: LAMA2; (+) strand; PAM type: YTN; PAM sequence: CTG
tacatgttgcctgagacata

SEQ ID NO: 362027 - DNA, 20 bp, Artificial Sequence
  Description of Artificial Sequence: Synthetic oligonucleotide
  Target: LAMA2; (+) strand; PAM type: YTN; PAM sequence: TTG
cctgagacataataactatt

SEQ ID NO: 362028 - DNA, 20 bp, Artificial Sequence
  Description of Artificial Sequence: Synthetic oligonucleotide
  Target: LAMA2; (+) strand; PAM type: YTN; PAM sequence: CTG
agacataataactattcaaa

SEQ ID NO: 362029 - DNA, 20 bp, Artificial Sequence
  Description of Artificial Sequence: Synthetic oligonucleotide
  Target: LAMA2; (+) strand; PAM type: YTN; PAM sequence: CTA
ttcaaaaatgtttacagtat

SEQ ID NO: 362030 - DNA, 20 bp, Artificial Sequence
  Description of Artificial Sequence: Synthetic oligonucleotide
  Target: LAMA2; (+) strand; PAM type: YTN; PAM sequence: TTC
aaaaatgtttacagtattca

SEQ ID NO: 362031 - DNA, 20 bp, Artificial Sequence
  Description of Artificial Sequence: Synthetic oligonucleotide
  Target: LAMA2; (+) strand; PAM type: YTN; PAM sequence: TTT
acagtattcaatgaaattat

SEQ ID NO: 362032 - DNA, 20 bp, Artificial Sequence
  Description of Artificial Sequence: Synthetic oligonucleotide
  Target: LAMA2; (+) strand; PAM type: YTN; PAM sequence: TTA
cagtattcaatgaaattata

SEQ ID NO: 362033 - DNA, 20 bp, Artificial Sequence
  Description of Artificial Sequence: Synthetic oligonucleotide
  Target: LAMA2; (+) strand; PAM type: YTN; PAM sequence: TTC
aatgaaattatataaatctt

SEQ ID NO: 362034 - DNA, 20 bp, Artificial Sequence
  Description of Artificial Sequence: Synthetic oligonucleotide
  Target: LAMA2; (+) strand; PAM type: YTN; PAM sequence: TTA
tataaatcttggtttaaaaa

SEQ ID NO: 362035 - DNA, 20 bp, Artificial Sequence
  Description of Artificial Sequence: Synthetic oligonucleotide
  Target: LAMA2; (+) strand; PAM type: YTN; PAM sequence: CTT
ggtttaaaaagcttgatata

SEQ ID NO: 362036 - DNA, 20 bp, Artificial Sequence
  Description of Artificial Sequence: Synthetic oligonucleotide
  Target: LAMA2; (+) strand; PAM type: YTN; PAM sequence: TTG
gtttaaaaagcttgatatac

SEQ ID NO: 362037 - DNA, 20 bp, Artificial Sequence
  Description of Artificial Sequence: Synthetic oligonucleotide
  Target: LAMA2; (+) strand; PAM type: YTN; PAM sequence: TTT
aaaaagcttgatatacaatg

SEQ ID NO: 362038 - DNA, 20 bp, Artificial Sequence
  Description of Artificial Sequence: Synthetic oligonucleotide
  Target: LAMA2; (+) strand; PAM type: YTN; PAM sequence: TTA
aaaagcttgatatacaatga

SEQ ID NO: 362039 - DNA, 20 bp, Artificial Sequence
  Description of Artificial Sequence: Synthetic oligonucleotide
  Target: LAMA2; (+) strand; PAM type: YTN; PAM sequence: CTT
gatatacaatgaaacatact

SEQ ID NO: 362040 - DNA, 20 bp, Artificial Sequence
  Description of Artificial Sequence: Synthetic oligonucleotide
  Target: LAMA2; (+) strand; PAM type: YTN; PAM sequence: TTG
atatacaatgaaacatactt

SEQ ID NO: 362041 - DNA, 20 bp, Artificial Sequence
  Description of Artificial Sequence: Synthetic oligonucleotide
  Target: LAMA2; (+) strand; PAM type: YTN; PAM sequence: CTT
gggcaaattataaagctgtt

SEQ ID NO: 362042 - DNA, 20 bp, Artificial Sequence
  Description of Artificial Sequence: Synthetic oligonucleotide
  Target: LAMA2; (+) strand; PAM type: YTN; PAM sequence: TTG
ggcaaattataaagctgttc

SEQ ID NO: 362043 - DNA, 20 bp, Artificial Sequence
  Description of Artificial Sequence: Synthetic oligonucleotide
  Target: LAMA2; (+) strand; PAM type: YTN; PAM sequence: TTA
taaagctgttcctgagaatg

SEQ ID NO: 362044 - DNA, 20 bp, Artificial Sequence
  Description of Artificial Sequence: Synthetic oligonucleotide
  Target: LAMA2; (+) strand; PAM type: YTN; PAM sequence: CTG
ttcctgagaatgagctaata

SEQ ID NO: 362045 - DNA, 20 bp, Artificial Sequence
  Description of Artificial Sequence: Synthetic oligonucleotide
  Target: LAMA2; (+) strand; PAM type: YTN; PAM sequence: TTC
ctgagaatgagctaatacat

SEQ ID NO: 362046 - DNA, 20 bp, Artificial Sequence
  Description of Artificial Sequence: Synthetic oligonucleotide
  Target: LAMA2; (+) strand; PAM type: YTN; PAM sequence: CTG
agaatgagctaatacatatt

SEQ ID NO: 362047 - DNA, 20 bp, Artificial Sequence
  Description of Artificial Sequence: Synthetic oligonucleotide
  Target: LAMA2; (+) strand; PAM type: YTN; PAM sequence: CTA
atacatatttagttgttaaa

SEQ ID NO: 362048 - DNA, 20 bp, Artificial Sequence
  Description of Artificial Sequence: Synthetic oligonucleotide
  Target: LAMA2; (+) strand; PAM type: YTN; PAM sequence: TTT
agttgttaaaattctgaggg

SEQ ID NO: 362049 - DNA, 20 bp, Artificial Sequence
  Description of Artificial Sequence: Synthetic oligonucleotide
  Target: LAMA2; (+) strand; PAM type: YTN; PAM sequence: TTA
gttgttaaaattctgagggg

SEQ ID NO: 362050 - DNA, 20 bp, Artificial Sequence
  Description of Artificial Sequence: Synthetic oligonucleotide
  Target: LAMA2; (+) strand; PAM type: YTN; PAM sequence: TTG
ttaaaattctgaggggaaaa

SEQ ID NO: 362051 - DNA, 20 bp, Artificial Sequence
  Description of Artificial Sequence: Synthetic oligonucleotide
  Target: LAMA2; (+) strand; PAM type: YTN; PAM sequence: TTA
aaattctgaggggaaaatgt

SEQ ID NO: 362052 - DNA, 20 bp, Artificial Sequence
  Description of Artificial Sequence: Synthetic oligonucleotide
  Target: LAMA2; (+) strand; PAM type: YTN; PAM sequence: TTC
tgaggggaaaatgtaaatta

SEQ ID NO: 362053 - DNA, 20 bp, Artificial Sequence
  Description of Artificial Sequence: Synthetic oligonucleotide
  Target: LAMA2; (+) strand; PAM type: YTN; PAM sequence: CTG
aggggaaaatgtaaattaga

SEQ ID NO: 362054 - DNA, 20 bp, Artificial Sequence
  Description of Artificial Sequence: Synthetic oligonucleotide
  Target: LAMA2; (+) strand; PAM type: YTN; PAM sequence: TTA
gatgtgaactacctctacaa

SEQ ID NO: 362055 - DNA, 20 bp, Artificial Sequence
  Description of Artificial Sequence: Synthetic oligonucleotide
  Target: LAMA2; (+) strand; PAM type: YTN; PAM sequence: CTA
cctctacaatataagatagc

SEQ ID NO: 362056 - DNA, 20 bp, Artificial Sequence
  Description of Artificial Sequence: Synthetic oligonucleotide
  Target: LAMA2; (+) strand; PAM type: YTN; PAM sequence: CTC
tacaatataagatagcagta

SEQ ID NO: 362057 - DNA, 20 bp, Artificial Sequence
  Description of Artificial Sequence: Synthetic oligonucleotide
  Target: LAMA2; (+) strand; PAM type: YTN; PAM sequence: CTA
caatataagatagcagtagg

SEQ ID NO: 362058 - DNA, 20 bp, Artificial Sequence
  Description of Artificial Sequence: Synthetic oligonucleotide
  Target: LAMA2; (+) strand; PAM type: YTN; PAM sequence: CTG
taagttaaaataatcatttt

SEQ ID NO: 362059 - DNA, 20 bp, Artificial Sequence
  Description of Artificial Sequence: Synthetic oligonucleotide
  Target: LAMA2; (+) strand; PAM type: YTN; PAM sequence: TTA
aaataatcatttttctcatt

SEQ ID NO: 362060 - DNA, 20 bp, Artificial Sequence
  Description of Artificial Sequence: Synthetic oligonucleotide
  Target: LAMA2; (+) strand; PAM type: YTN; PAM sequence: TTT
ttctcatttttcagtaacat

SEQ ID NO: 362061 - DNA, 20 bp, Artificial Sequence
  Description of Artificial Sequence: Synthetic oligonucleotide
  Target: LAMA2; (+) strand; PAM type: YTN; PAM sequence: TTT
tctcatttttcagtaacatt

SEQ ID NO: 362062 - DNA, 20 bp, Artificial Sequence
  Description of Artificial Sequence: Synthetic oligonucleotide
  Target: LAMA2; (+) strand; PAM type: YTN; PAM sequence: TTT
ctcatttttcagtaacattc

SEQ ID NO: 362063 - DNA, 20 bp, Artificial Sequence
  Description of Artificial Sequence: Synthetic oligonucleotide
  Target: LAMA2; (+) strand; PAM type: YTN; PAM sequence: TTC
tcatttttcagtaacattca

SEQ ID NO: 362064 - DNA, 20 bp, Artificial Sequence
  Description of Artificial Sequence: Synthetic oligonucleotide
  Target: LAMA2; (+) strand; PAM type: YTN; PAM sequence: CTC
atttttcagtaacattcatt

SEQ ID NO: 362065 - DNA, 20 bp, Artificial Sequence
  Description of Artificial Sequence: Synthetic oligonucleotide
  Target: LAMA2; (+) strand; PAM type: YTN; PAM sequence: TTT
ttcagtaacattcattaaat

SEQ ID NO: 362066 - DNA, 20 bp, Artificial Sequence
  Description of Artificial Sequence: Synthetic oligonucleotide
  Target: LAMA2; (+) strand; PAM type: YTN; PAM sequence: TTT
tcagtaacattcattaaatg

SEQ ID NO: 362067 - DNA, 20 bp, Artificial Sequence
  Description of Artificial Sequence: Synthetic oligonucleotide
  Target: LAMA2; (+) strand; PAM type: YTN; PAM sequence: TTT
cagtaacattcattaaatgc

SEQ ID NO: 362068 - DNA, 20 bp, Artificial Sequence
  Description of Artificial Sequence: Synthetic oligonucleotide
  Target: LAMA2; (+) strand; PAM type: YTN; PAM sequence: TTC
agtaacattcattaaatgcc

SEQ ID NO: 362069 - DNA, 20 bp, Artificial Sequence
  Description of Artificial Sequence: Synthetic oligonucleotide
  Target: LAMA2; (+) strand; PAM type: YTN; PAM sequence: TTC
attaaatgcctgatacaatt

SEQ ID NO: 362070 - DNA, 20 bp, Artificial Sequence
  Description of Artificial Sequence: Synthetic oligonucleotide
  Target: LAMA2; (+) strand; PAM type: YTN; PAM sequence: TTA
aatgcctgatacaattctgt

SEQ ID NO: 362071 - DNA, 20 bp, Artificial Sequence
  Description of Artificial Sequence: Synthetic oligonucleotide
  Target: LAMA2; (+) strand; PAM type: YTN; PAM sequence: CTG
atacaattctgtactttctg

SEQ ID NO: 362072 - DNA, 20 bp, Artificial Sequence
  Description of Artificial Sequence: Synthetic oligonucleotide
  Target: LAMA2; (+) strand; PAM type: YTN; PAM sequence: TTC
tgtactttctgaaaattgac

SEQ ID NO: 362073 - DNA, 20 bp, Artificial Sequence
  Description of Artificial Sequence: Synthetic oligonucleotide
  Target: LAMA2; (+) strand; PAM type: YTN; PAM sequence: CTG
tactttctgaaaattgacta

SEQ ID NO: 362074 - DNA, 20 bp, Artificial Sequence
  Description of Artificial Sequence: Synthetic oligonucleotide
  Target: LAMA2; (+) strand; PAM type: YTN; PAM sequence: CTT
tctgaaaattgactataata

SEQ ID NO: 362075 - DNA, 20 bp, Artificial Sequence
  Description of Artificial Sequence: Synthetic oligonucleotide
  Target: LAMA2; (+) strand; PAM type: YTN; PAM sequence: TTT
ctgaaaattgactataataa

SEQ ID NO: 362076 - DNA, 20 bp, Artificial Sequence
  Description of Artificial Sequence: Synthetic oligonucleotide
  Target: LAMA2; (+) strand; PAM type: YTN; PAM sequence: TTC
tgaaaattgactataataaa

SEQ ID NO: 362077 - DNA, 20 bp, Artificial Sequence
  Description of Artificial Sequence: Synthetic oligonucleotide
  Target: LAMA2; (+) strand; PAM type: YTN; PAM sequence: CTG
aaaattgactataataaaga

SEQ ID NO: 362078 - DNA, 20 bp, Artificial Sequence
  Description of Artificial Sequence: Synthetic oligonucleotide
  Target: LAMA2; (+) strand; PAM type: YTN; PAM sequence: TTG
actataataaagaaatcctg

SEQ ID NO: 362079 - DNA, 20 bp, Artificial Sequence
  Description of Artificial Sequence: Synthetic oligonucleotide
  Target: LAMA2; (+) strand; PAM type: YTN; PAM sequence: CTA
taataaagaaatcctggcca

SEQ ID NO: 362080 - DNA, 20 bp, Artificial Sequence
  Description of Artificial Sequence: Synthetic oligonucleotide
  Target: LAMA2; (+) strand; PAM type: YTN; PAM sequence: CTG
gccattataaaattgtcatc

SEQ ID NO: 362081 - DNA, 20 bp, Artificial Sequence
  Description of Artificial Sequence: Synthetic oligonucleotide
  Target: LAMA2; (+) strand; PAM type: YTN; PAM sequence: TTA
taaaattgtcatccactcat

SEQ ID NO: 362082 - DNA, 20 bp, Artificial Sequence
  Description of Artificial Sequence: Synthetic oligonucleotide
  Target: LAMA2; (+) strand; PAM type: YTN; PAM sequence: TTG
tcatccactcataggtagaa

SEQ ID NO: 362083 - DNA, 20 bp, Artificial Sequence
  Description of Artificial Sequence: Synthetic oligonucleotide
  Target: LAMA2; (+) strand; PAM type: YTN; PAM sequence: CTC
ataggtagaataaatgagag

SEQ ID NO: 362084 - DNA, 20 bp, Artificial Sequence
  Description of Artificial Sequence: Synthetic oligonucleotide
  Target: LAMA2; (+) strand; PAM type: YTN; PAM sequence: TTA
tggtgatctaaatatagaaa

SEQ ID NO: 362085 - DNA, 20 bp, Artificial Sequence
  Description of Artificial Sequence: Synthetic oligonucleotide
  Target: LAMA2; (+) strand; PAM type: YTN; PAM sequence: CTA
aatatagaaagcatttaaat

SEQ ID NO: 362086 - DNA, 20 bp, Artificial Sequence
  Description of Artificial Sequence: Synthetic oligonucleotide
  Target: LAMA2; (+) strand; PAM type: YTN; PAM sequence: TTT
aaattagagaacagctgaaa

SEQ ID NO: 362087 - DNA, 20 bp, Artificial Sequence
  Description of Artificial Sequence: Synthetic oligonucleotide
  Target: LAMA2; (+) strand; PAM type: YTN; PAM sequence: TTA
aattagagaacagctgaaat

SEQ ID NO: 362088 - DNA, 20 bp, Artificial Sequence
  Description of Artificial Sequence: Synthetic oligonucleotide
  Target: LAMA2; (+) strand; PAM type: YTN; PAM sequence: TTA
gagaacagctgaaattgtgc

SEQ ID NO: 362089 - DNA, 20 bp, Artificial Sequence
  Description of Artificial Sequence: Synthetic oligonucleotide
  Target: LAMA2; (+) strand; PAM type: YTN; PAM sequence: CTG
aaattgtgcttctaaaacat

SEQ ID NO: 362090 - DNA, 20 bp, Artificial Sequence
  Description of Artificial Sequence: Synthetic oligonucleotide
  Target: LAMA2; (+) strand; PAM type: YTN; PAM sequence: TTG
tgcttctaaaacatttcagt

SEQ ID NO: 362091 - DNA, 20 bp, Artificial Sequence
  Description of Artificial Sequence: Synthetic oligonucleotide
  Target: LAMA2; (+) strand; PAM type: YTN; PAM sequence: CTT
ctaaaacatttcagtgttgt

SEQ ID NO: 362092 - DNA, 20 bp, Artificial Sequence
  Description of Artificial Sequence: Synthetic oligonucleotide
  Target: LAMA2; (+) strand; PAM type: YTN; PAM sequence: TTC
taaaacatttcagtgttgtt

SEQ ID NO: 362093 - DNA, 20 bp, Artificial Sequence
  Description of Artificial Sequence: Synthetic oligonucleotide
  Target: LAMA2; (+) strand; PAM type: YTN; PAM sequence: CTA
aaacatttcagtgttgttca

SEQ ID NO: 362094 - DNA, 20 bp, Artificial Sequence
  Description of Artificial Sequence: Synthetic oligonucleotide
  Target: LAMA2; (+) strand; PAM type: YTN; PAM sequence: TTT
cagtgttgttcattttctat

SEQ ID NO: 362095 - DNA, 20 bp, Artificial Sequence
  Description of Artificial Sequence: Synthetic oligonucleotide
  Target: LAMA2; (+) strand; PAM type: YTN; PAM sequence: TTC
agtgttgttcattttctata

SEQ ID NO: 362096 - DNA, 20 bp, Artificial Sequence
  Description of Artificial Sequence: Synthetic oligonucleotide
  Target: LAMA2; (+) strand; PAM type: YTN; PAM sequence: TTG
ttcattttctatatgttata

SEQ ID NO: 362097 - DNA, 20 bp, Artificial Sequence
  Description of Artificial Sequence: Synthetic oligonucleotide
  Target: LAMA2; (+) strand; PAM type: YTN; PAM sequence: TTC
attttctatatgttatattg

SEQ ID NO: 362098 - DNA, 20 bp, Artificial Sequence
  Description of Artificial Sequence: Synthetic oligonucleotide
  Target: LAMA2; (+) strand; PAM type: YTN; PAM sequence: TTT
tctatatgttatattgaaaa

SEQ ID NO: 362099 - DNA, 20 bp, Artificial Sequence
  Description of Artificial Sequence: Synthetic oligonucleotide
  Target: LAMA2; (+) strand; PAM type: YTN; PAM sequence: TTT
ctatatgttatattgaaaaa

SEQ ID NO: 362100 - DNA, 20 bp, Artificial Sequence
  Description of Artificial Sequence: Synthetic oligonucleotide
  Target: LAMA2; (+) strand; PAM type: YTN; PAM sequence: TTC
tatatgttatattgaaaaaa

SEQ ID NO: 362101 - DNA, 20 bp, Artificial Sequence
  Description of Artificial Sequence: Synthetic oligonucleotide
  Target: LAMA2; (+) strand; PAM type: YTN; PAM sequence: CTA
tatgttatattgaaaaaagt

SEQ ID NO: 362102 - DNA, 20 bp, Artificial Sequence
  Description of Artificial Sequence: Synthetic oligonucleotide
  Target: LAMA2; (+) strand; PAM type: YTN; PAM sequence: TTA
tattgaaaaaagtaatatgg

SEQ ID NO: 362103 - DNA, 20 bp, Artificial Sequence
  Description of Artificial Sequence: Synthetic oligonucleotide
  Target: LAMA2; (+) strand; PAM type: YTN; PAM sequence: TTG
aaaaaagtaatatggaaatg

SEQ ID NO: 362104 - DNA, 20 bp, Artificial Sequence
  Description of Artificial Sequence: Synthetic oligonucleotide
  Target: LAMA2; (+) strand; PAM type: YTN; PAM sequence: TTT
tcatttgcagatgcttaaat

SEQ ID NO: 362105 - DNA, 20 bp, Artificial Sequence
  Description of Artificial Sequence: Synthetic oligonucleotide
  Target: LAMA2; (+) strand; PAM type: YTN; PAM sequence: TTT
catttgcagatgcttaaatt

SEQ ID NO: 362106 - DNA, 20 bp, Artificial Sequence
  Description of Artificial Sequence: Synthetic oligonucleotide
  Target: LAMA2; (+) strand; PAM type: YTN; PAM sequence: TTC
atttgcagatgcttaaattt

SEQ ID NO: 362107 - DNA, 20 bp, Artificial Sequence
  Description of Artificial Sequence: Synthetic oligonucleotide
  Target: LAMA2; (+) strand; PAM type: YTN; PAM sequence: TTT
gcagatgcttaaatttagat

SEQ ID NO: 362108 - DNA, 20 bp, Artificial Sequence
  Description of Artificial Sequence: Synthetic oligonucleotide
  Target: LAMA2; (+) strand; PAM type: YTN; PAM sequence: TTG
cagatgcttaaatttagata

SEQ ID NO: 362109 - DNA, 20 bp, Artificial Sequence
  Description of Artificial Sequence: Synthetic oligonucleotide
  Target: LAMA2; (+) strand; PAM type: YTN; PAM sequence: CTT
aaatttagatacatgtttaa

SEQ ID NO: 362110 - DNA, 20 bp, Artificial Sequence
  Description of Artificial Sequence: Synthetic oligonucleotide
  Target: LAMA2; (+) strand; PAM type: YTN; PAM sequence: TTA
aatttagatacatgtttaat

SEQ ID NO: 362111 - DNA, 20 bp, Artificial Sequence
  Description of Artificial Sequence: Synthetic oligonucleotide
  Target: LAMA2; (+) strand; PAM type: YTN; PAM sequence: TTT
agatacatgtttaatactgt

SEQ ID NO: 362112 - DNA, 20 bp, Artificial Sequence
  Description of Artificial Sequence: Synthetic oligonucleotide
  Target: LAMA2; (+) strand; PAM type: YTN; PAM sequence: TTA
gatacatgtttaatactgta

SEQ ID NO: 362113 - DNA, 20 bp, Artificial Sequence
  Description of Artificial Sequence: Synthetic oligonucleotide
  Target: LAMA2; (+) strand; PAM type: YTN; PAM sequence: TTT
aatactgtaatcattttgat

SEQ ID NO: 362114 - DNA, 20 bp, Artificial Sequence
  Description of Artificial Sequence: Synthetic oligonucleotide
  Target: LAMA2; (+) strand; PAM type: YTN; PAM sequence: TTA
atactgtaatcattttgatc

SEQ ID NO: 362115 - DNA, 20 bp, Artificial Sequence
  Description of Artificial Sequence: Synthetic oligonucleotide
  Target: LAMA2; (+) strand; PAM type: YTN; PAM sequence: CTG
taatcattttgatcaaacag

SEQ ID NO: 362116 - DNA, 20 bp, Artificial Sequence
  Description of Artificial Sequence: Synthetic oligonucleotide
  Target: LAMA2; (+) strand; PAM type: YTN; PAM sequence: TTT
tgatcaaacagcagctatta

SEQ ID NO: 362117 - DNA, 20 bp, Artificial Sequence
  Description of Artificial Sequence: Synthetic oligonucleotide
  Target: LAMA2; (+) strand; PAM type: YTN; PAM sequence: TTT
gatcaaacagcagctattat

SEQ ID NO: 362118 - DNA, 20 bp, Artificial Sequence
  Description of Artificial Sequence: Synthetic oligonucleotide
  Target: LAMA2; (+) strand; PAM type: YTN; PAM sequence: TTG
atcaaacagcagctattatt

SEQ ID NO: 362119 - DNA, 20 bp, Artificial Sequence
  Description of Artificial Sequence: Synthetic oligonucleotide
  Target: LAMA2; (+) strand; PAM type: YTN; PAM sequence: CTA
ttatttattattcaatattt

SEQ ID NO: 362120 - DNA, 20 bp, Artificial Sequence
  Description of Artificial Sequence: Synthetic oligonucleotide
  Target: LAMA2; (+) strand; PAM type: YTN; PAM sequence: TTA
tttattattcaatatttata

SEQ ID NO: 362121 - DNA, 20 bp, Artificial Sequence
  Description of Artificial Sequence: Synthetic oligonucleotide
  Target: LAMA2; (+) strand; PAM type: YTN; PAM sequence: TTT
attattcaatatttatatgt

SEQ ID NO: 362122 - DNA, 20 bp, Artificial Sequence
  Description of Artificial Sequence: Synthetic oligonucleotide
  Target: LAMA2; (+) strand; PAM type: YTN; PAM sequence: TTA
ttattcaatatttatatgta

SEQ ID NO: 362123 - DNA, 20 bp, Artificial Sequence
  Description of Artificial Sequence: Synthetic oligonucleotide
  Target: LAMA2; (+) strand; PAM type: YTN; PAM sequence: TTA
ttcaatatttatatgtaaaa

SEQ ID NO: 362124 - DNA, 20 bp, Artificial Sequence
  Description of Artificial Sequence: Synthetic oligonucleotide
  Target: LAMA2; (+) strand; PAM type: YTN; PAM sequence: TTC
aatatttatatgtaaaacct

SEQ ID NO: 362125 - DNA, 20 bp, Artificial Sequence
  Description of Artificial Sequence: Synthetic oligonucleotide
  Target: LAMA2; (+) strand; PAM type: YTN; PAM sequence: TTT
atatgtaaaacctgaaactt

SEQ ID NO: 362126 - DNA, 20 bp, Artificial Sequence
  Description of Artificial Sequence: Synthetic oligonucleotide
  Target: LAMA2; (+) strand; PAM type: YTN; PAM sequence: TTA
tatgtaaaacctgaaacttt

SEQ ID NO: 362127 - DNA, 20 bp, Artificial Sequence
  Description of Artificial Sequence: Synthetic oligonucleotide
  Target: LAMA2; (+) strand; PAM type: YTN; PAM sequence: CTG
aaactttcatctaccttaat

SEQ ID NO: 362128 - DNA, 20 bp, Artificial Sequence
  Description of Artificial Sequence: Synthetic oligonucleotide
  Target: LAMA2; (+) strand; PAM type: YTN; PAM sequence: CTT
tcatctaccttaatgatggt

SEQ ID NO: 362129 - DNA, 20 bp, Artificial Sequence
  Description of Artificial Sequence: Synthetic oligonucleotide
  Target: LAMA2; (+) strand; PAM type: YTN; PAM sequence: TTT
catctaccttaatgatggta

SEQ ID NO: 362130 - DNA, 20 bp, Artificial Sequence
  Description of Artificial Sequence: Synthetic oligonucleotide
  Target: LAMA2; (+) strand; PAM type: YTN; PAM sequence: TTC
atctaccttaatgatggtat

SEQ ID NO: 362131 - DNA, 20 bp, Artificial Sequence
  Description of Artificial Sequence: Synthetic oligonucleotide
  Target: LAMA2; (+) strand; PAM type: YTN; PAM sequence: CTA
ccttaatgatggtattgtga

SEQ ID NO: 362132 - DNA, 20 bp, Artificial Sequence
  Description of Artificial Sequence: Synthetic oligonucleotide
  Target: LAMA2; (+) strand; PAM type: YTN; PAM sequence: CTT
aatgatggtattgtgataaa

SEQ ID NO: 362133 - DNA, 20 bp, Artificial Sequence
  Description of Artificial Sequence: Synthetic oligonucleotide
  Target: LAMA2; (+) strand; PAM type: YTN; PAM sequence: TTA
atgatggtattgtgataaaa

SEQ ID NO: 362134 - DNA, 20 bp, Artificial Sequence
  Description of Artificial Sequence: Synthetic oligonucleotide
  Target: LAMA2; (+) strand; PAM type: YTN; PAM sequence: TTG
tgataaaagtacccatgtat

SEQ ID NO: 362135 - DNA, 20 bp, Artificial Sequence
  Description of Artificial Sequence: Synthetic oligonucleotide
  Target: LAMA2; (+) strand; PAM type: YTN; PAM sequence: TTT
gccaattctttttattcctt

SEQ ID NO: 362136 - DNA, 20 bp, Artificial Sequence
  Description of Artificial Sequence: Synthetic oligonucleotide
  Target: LAMA2; (+) strand; PAM type: YTN; PAM sequence: TTG
ccaattctttttattcctta

SEQ ID NO: 362137 - DNA, 20 bp, Artificial Sequence
  Description of Artificial Sequence: Synthetic oligonucleotide
  Target: LAMA2; (+) strand; PAM type: YTN; PAM sequence: TTC
tttttattccttaaagaata

SEQ ID NO: 362138 - DNA, 20 bp, Artificial Sequence
  Description of Artificial Sequence: Synthetic oligonucleotide
  Target: LAMA2; (+) strand; PAM type: YTN; PAM sequence: CTT
tttattccttaaagaatatc

SEQ ID NO: 362139 - DNA, 20 bp, Artificial Sequence
  Description of Artificial Sequence: Synthetic oligonucleotide
  Target: LAMA2; (+) strand; PAM type: YTN; PAM sequence: TTT
ttattccttaaagaatatct

SEQ ID NO: 362140 - DNA, 20 bp, Artificial Sequence
  Description of Artificial Sequence: Synthetic oligonucleotide
  Target: LAMA2; (+) strand; PAM type: YTN; PAM sequence: TTT
tattccttaaagaatatctg

SEQ ID NO: 362141 - DNA, 20 bp, Artificial Sequence
  Description of Artificial Sequence: Synthetic oligonucleotide
  Target: LAMA2; (+) strand; PAM type: YTN; PAM sequence: TTT
attccttaaagaatatctga

SEQ ID NO: 362142 - DNA, 20 bp, Artificial Sequence
  Description of Artificial Sequence: Synthetic oligonucleotide
  Target: LAMA2; (+) strand; PAM type: YTN; PAM sequence: TTA
ttccttaaagaatatctgac

SEQ ID NO: 362143 - DNA, 20 bp, Artificial Sequence
  Description of Artificial Sequence: Synthetic oligonucleotide
  Target: LAMA2; (+) strand; PAM type: YTN; PAM sequence: TTC
cttaaagaatatctgacaat

SEQ ID NO: 362144 - DNA, 20 bp, Artificial Sequence
  Description of Artificial Sequence: Synthetic oligonucleotide
  Target: LAMA2; (+) strand; PAM type: YTN; PAM sequence: CTT
aaagaatatctgacaatttg

SEQ ID NO: 362145 - DNA, 20 bp, Artificial Sequence
  Description of Artificial Sequence: Synthetic oligonucleotide
  Target: LAMA2; (+) strand; PAM type: YTN; PAM sequence: TTA
aagaatatctgacaatttgc

SEQ ID NO: 362146 - DNA, 20 bp, Artificial Sequence
  Description of Artificial Sequence: Synthetic oligonucleotide
  Target: LAMA2; (+) strand; PAM type: YTN; PAM sequence: CTG
acaatttgctggtttgtata

SEQ ID NO: 362147 - DNA, 20 bp, Artificial Sequence
  Description of Artificial Sequence: Synthetic oligonucleotide
  Target: LAMA2; (+) strand; PAM type: YTN; PAM sequence: TTT
gctggtttgtataagtttga

SEQ ID NO: 362148 - DNA, 20 bp, Artificial Sequence
  Description of Artificial Sequence: Synthetic oligonucleotide
  Target: LAMA2; (+) strand; PAM type: YTN; PAM sequence: TTG
ctggtttgtataagtttgag

SEQ ID NO: 362149 - DNA, 20 bp, Artificial Sequence
  Description of Artificial Sequence: Synthetic oligonucleotide
  Target: LAMA2; (+) strand; PAM type: YTN; PAM sequence: CTG
gtttgtataagtttgagtta

SEQ ID NO: 362150 - DNA, 20 bp, Artificial Sequence
  Description of Artificial Sequence: Synthetic oligonucleotide
  Target: LAMA2; (+) strand; PAM type: YTN; PAM sequence: TTT
gtataagtttgagttaagac

SEQ ID NO: 362151 - DNA, 20 bp, Artificial Sequence
  Description of Artificial Sequence: Synthetic oligonucleotide
  Target: LAMA2; (+) strand; PAM type: YTN; PAM sequence: TTG
tataagtttgagttaagaca

SEQ ID NO: 362152 - DNA, 20 bp, Artificial Sequence
  Description of Artificial Sequence: Synthetic oligonucleotide
  Target: LAMA2; (+) strand; PAM type: YTN; PAM sequence: TTT
gagttaagacaccgtaataa

SEQ ID NO: 362153 - DNA, 20 bp, Artificial Sequence
  Description of Artificial Sequence: Synthetic oligonucleotide
  Target: LAMA2; (+) strand; PAM type: YTN; PAM sequence: TTG
agttaagacaccgtaataat

SEQ ID NO: 362154 - DNA, 20 bp, Artificial Sequence
  Description of Artificial Sequence: Synthetic oligonucleotide
  Target: LAMA2; (+) strand; PAM type: YTN; PAM sequence: TTA
agacaccgtaataatgtcct

SEQ ID NO: 362155 - DNA, 20 bp, Artificial Sequence
  Description of Artificial Sequence: Synthetic oligonucleotide
  Target: LAMA2; (+) strand; PAM type: YTN; PAM sequence: CTG
cagtatatatgtcaaaatac

SEQ ID NO: 362156 - DNA, 20 bp, Artificial Sequence
  Description of Artificial Sequence: Synthetic oligonucleotide
  Target: LAMA2; (+) strand; PAM type: YTN; PAM sequence: CTC
taaaatagcagtctccaaga

SEQ ID NO: 362157 - DNA, 20 bp, Artificial Sequence
  Description of Artificial Sequence: Synthetic oligonucleotide
  Target: LAMA2; (+) strand; PAM type: YTN; PAM sequence: CTA
aaatagcagtctccaagaac

SEQ ID NO: 362158 - DNA, 20 bp, Artificial Sequence
  Description of Artificial Sequence: Synthetic oligonucleotide
  Target: LAMA2; (+) strand; PAM type: YTN; PAM sequence: CTC
caagaacccaggaagtatgt

SEQ ID NO: 362159 - DNA, 20 bp, Artificial Sequence
  Description of Artificial Sequence: Synthetic oligonucleotide
  Target: LAMA2; (+) strand; PAM type: YTN; PAM sequence: TTT
tattttctttaaaaaataag

SEQ ID NO: 362160 - DNA, 20 bp, Artificial Sequence
  Description of Artificial Sequence: Synthetic oligonucleotide
  Target: LAMA2; (+) strand; PAM type: YTN; PAM sequence: TTT
attttctttaaaaaataaga

SEQ ID NO: 362161 - DNA, 20 bp, Artificial Sequence
  Description of Artificial Sequence: Synthetic oligonucleotide
  Target: LAMA2; (+) strand; PAM type: YTN; PAM sequence: TTA
ttttctttaaaaaataagac

SEQ ID NO: 362162 - DNA, 20 bp, Artificial Sequence
  Description of Artificial Sequence: Synthetic oligonucleotide
  Target: LAMA2; (+) strand; PAM type: YTN; PAM sequence: TTT
tctttaaaaaataagacaga

SEQ ID NO: 362163 - DNA, 20 bp, Artificial Sequence
  Description of Artificial Sequence: Synthetic oligonucleotide
  Target: LAMA2; (+) strand; PAM type: YTN; PAM sequence: TTT
ctttaaaaaataagacagac

SEQ ID NO: 362164 - DNA, 20 bp, Artificial Sequence
  Description of Artificial Sequence: Synthetic oligonucleotide
  Target: LAMA2; (+) strand; PAM type: YTN; PAM sequence: TTC
tttaaaaaataagacagaca

SEQ ID NO: 362165 - DNA, 20 bp, Artificial Sequence
  Description of Artificial Sequence: Synthetic oligonucleotide
  Target: LAMA2; (+) strand; PAM type: YTN; PAM sequence: CTT
taaaaaataagacagacact

SEQ ID NO: 362166 - DNA, 20 bp, Artificial Sequence
  Description of Artificial Sequence: Synthetic oligonucleotide
  Target: LAMA2; (+) strand; PAM type: YTN; PAM sequence: TTT
aaaaaataagacagacactt

SEQ ID NO: 362167 - DNA, 20 bp, Artificial Sequence
  Description of Artificial Sequence: Synthetic oligonucleotide
  Target: LAMA2; (+) strand; PAM type: YTN; PAM sequence: TTA
aaaaataagacagacacttc

SEQ ID NO: 362168 - DNA, 20 bp, Artificial Sequence
  Description of Artificial Sequence: Synthetic oligonucleotide
  Target: LAMA2; (+) strand; PAM type: YTN; PAM sequence: CTT
ctcaaaagaagacatttatg

SEQ ID NO: 362169 - DNA, 20 bp, Artificial Sequence
  Description of Artificial Sequence: Synthetic oligonucleotide
  Target: LAMA2; (+) strand; PAM type: YTN; PAM sequence: TTC
tcaaaagaagacatttatgc

SEQ ID NO: 362170 - DNA, 20 bp, Artificial Sequence
  Description of Artificial Sequence: Synthetic oligonucleotide
  Target: LAMA2; (+) strand; PAM type: YTN; PAM sequence: CTC
aaaagaagacatttatgcag

SEQ ID NO: 362171 - DNA, 20 bp, Artificial Sequence
  Description of Artificial Sequence: Synthetic oligonucleotide
  Target: LAMA2; (+) strand; PAM type: YTN; PAM sequence: TTT
atgcagccaaaaaacacatg

SEQ ID NO: 362172 - DNA, 20 bp, Artificial Sequence
  Description of Artificial Sequence: Synthetic oligonucleotide
  Target: LAMA2; (+) strand; PAM type: YTN; PAM sequence: TTA
tgcagccaaaaaacacatga

SEQ ID NO: 362173 - DNA, 20 bp, Artificial Sequence
  Description of Artificial Sequence: Synthetic oligonucleotide
  Target: LAMA2; (+) strand; PAM type: YTN; PAM sequence: CTC
accatcactggccatcagag

SEQ ID NO: 362174 - DNA, 20 bp, Artificial Sequence
  Description of Artificial Sequence: Synthetic oligonucleotide
  Target: LAMA2; (+) strand; PAM type: YTN; PAM sequence: CTG
gccatcagagaaatgcaaat

SEQ ID NO: 362175 - DNA, 20 bp, Artificial Sequence
  Description of Artificial Sequence: Synthetic oligonucleotide
  Target: LAMA2; (+) strand; PAM type: YTN; PAM sequence: CTC
acaccaattagaatggcagt

SEQ ID NO: 362176 - DNA, 20 bp, Artificial Sequence
  Description of Artificial Sequence: Synthetic oligonucleotide
  Target: LAMA2; (+) strand; PAM type: YTN; PAM sequence: TTA
gaatggcagtcattaaaaag

SEQ ID NO: 362177 - DNA, 20 bp, Artificial Sequence
  Description of Artificial Sequence: Synthetic oligonucleotide
  Target: LAMA2; (+) strand; PAM type: YTN; PAM sequence: TTA
aaaagtcaggaaacaacaga

SEQ ID NO: 362178 - DNA, 20 bp, Artificial Sequence
  Description of Artificial Sequence: Synthetic oligonucleotide
  Target: LAMA2; (+) strand; PAM type: YTN; PAM sequence: CTG
gagaggatgtggagaaatag

SEQ ID NO: 362179 - DNA, 20 bp, Artificial Sequence
  Description of Artificial Sequence: Synthetic oligonucleotide
  Target: LAMA2; (+) strand; PAM type: YTN; PAM sequence: CTT
ttacactgttggtgggactg

SEQ ID NO: 362180 - DNA, 20 bp, Artificial Sequence
  Description of Artificial Sequence: Synthetic oligonucleotide
  Target: LAMA2; (+) strand; PAM type: YTN; PAM sequence: TTT
tacactgttggtgggactgt

SEQ ID NO: 362181 - DNA, 20 bp, Artificial Sequence
  Description of Artificial Sequence: Synthetic oligonucleotide
  Target: LAMA2; (+) strand; PAM type: YTN; PAM sequence: TTT
acactgttggtgggactgta

SEQ ID NO: 362182 - DNA, 20 bp, Artificial Sequence
  Description of Artificial Sequence: Synthetic oligonucleotide
  Target: LAMA2; (+) strand; PAM type: YTN; PAM sequence: TTA
cactgttggtgggactgtaa

SEQ ID NO: 362183 - DNA, 20 bp, Artificial Sequence
  Description of Artificial Sequence: Synthetic oligonucleotide
  Target: LAMA2; (+) strand; PAM type: YTN; PAM sequence: CTG
ttggtgggactgtaaactag

SEQ ID NO: 362184 - DNA, 20 bp, Artificial Sequence
  Description of Artificial Sequence: Synthetic oligonucleotide
  Target: LAMA2; (+) strand; PAM type: YTN; PAM sequence: TTG
gtgggactgtaaactagttt

SEQ ID NO: 362185 - DNA, 20 bp, Artificial Sequence
  Description of Artificial Sequence: Synthetic oligonucleotide
  Target: LAMA2; (+) strand; PAM type: YTN; PAM sequence: CTG
taaactagtttaaccattgt

SEQ ID NO: 362186 - DNA, 20 bp, Artificial Sequence
  Description of Artificial Sequence: Synthetic oligonucleotide
  Target: LAMA2; (+) strand; PAM type: YTN; PAM sequence: CTA
gtttaaccattgtggaagtc

SEQ ID NO: 362187 - DNA, 20 bp, Artificial Sequence
  Description of Artificial Sequence: Synthetic oligonucleotide
  Target: LAMA2; (+) strand; PAM type: YTN; PAM sequence: TTT
aaccattgtggaagtcagtg

SEQ ID NO: 362188 - DNA, 20 bp, Artificial Sequence
  Description of Artificial Sequence: Synthetic oligonucleotide
  Target: LAMA2; (+) strand; PAM type: YTN; PAM sequence: TTA
accattgtggaagtcagtgt

SEQ ID NO: 362189 - DNA, 20 bp, Artificial Sequence
  Description of Artificial Sequence: Synthetic oligonucleotide
  Target: LAMA2; (+) strand; PAM type: YTN; PAM sequence: TTG
tggaagtcagtgtggtgatt

SEQ ID NO: 362190 - DNA, 20 bp, Artificial Sequence
  Description of Artificial Sequence: Synthetic oligonucleotide
  Target: LAMA2; (+) strand; PAM type: YTN; PAM sequence: TTC
ctcagggatctagaacttga

SEQ ID NO: 362191 - DNA, 20 bp, Artificial Sequence
  Description of Artificial Sequence: Synthetic oligonucleotide
  Target: LAMA2; (+) strand; PAM type: YTN; PAM sequence: CTC
agggatctagaacttgaaat

SEQ ID NO: 362192 - DNA, 20 bp, Artificial Sequence
  Description of Artificial Sequence: Synthetic oligonucleotide
  Target: LAMA2; (+) strand; PAM type: YTN; PAM sequence: CTA
gaacttgaaataccatttga

SEQ ID NO: 362193 - DNA, 20 bp, Artificial Sequence
  Description of Artificial Sequence: Synthetic oligonucleotide
  Target: LAMA2; (+) strand; PAM type: YTN; PAM sequence: CTT
gaaataccatttgacccagc

SEQ ID NO: 362194 - DNA, 20 bp, Artificial Sequence
  Description of Artificial Sequence: Synthetic oligonucleotide
  Target: LAMA2; (+) strand; PAM type: YTN; PAM sequence: TTG
aaataccatttgacccagcc

SEQ ID NO: 362195 - DNA, 20 bp, Artificial Sequence
  Description of Artificial Sequence: Synthetic oligonucleotide
  Target: LAMA2; (+) strand; PAM type: YTN; PAM sequence: TTT
gacccagccatcccattact

SEQ ID NO: 362196 - DNA, 20 bp, Artificial Sequence
  Description of Artificial Sequence: Synthetic oligonucleotide
  Target: LAMA2; (+) strand; PAM type: YTN; PAM sequence: TTG
acccagccatcccattactg

SEQ ID NO: 362197 - DNA, 20 bp, Artificial Sequence
  Description of Artificial Sequence: Synthetic oligonucleotide
  Target: LAMA2; (+) strand; PAM type: YTN; PAM sequence: TTA
ctgggtatgtacccaaagga

SEQ ID NO: 362198 - DNA, 20 bp, Artificial Sequence
  Description of Artificial Sequence: Synthetic oligonucleotide
  Target: LAMA2; (+) strand; PAM type: YTN; PAM sequence: CTG
ggtatgtacccaaaggacta

SEQ ID NO: 362199 - DNA, 20 bp, Artificial Sequence
  Description of Artificial Sequence: Synthetic oligonucleotide
  Target: LAMA2; (+) strand; PAM type: YTN; PAM sequence: CTA
taaatcatgctgctataaag

SEQ ID NO: 362200 - DNA, 20 bp, Artificial Sequence
  Description of Artificial Sequence: Synthetic oligonucleotide
  Target: LAMA2; (+) strand; PAM type: YTN; PAM sequence: CTG
ctataaagacacatgcacac

SEQ ID NO: 362201 - DNA, 20 bp, Artificial Sequence
  Description of Artificial Sequence: Synthetic oligonucleotide
  Target: LAMA2; (+) strand; PAM type: YTN; PAM sequence: CTA
taaagacacatgcacacgta

SEQ ID NO: 362202 - DNA, 20 bp, Artificial Sequence
  Description of Artificial Sequence: Synthetic oligonucleotide
  Target: LAMA2; (+) strand; PAM type: YTN; PAM sequence: TTT
attgtggcactattcacaat

SEQ ID NO: 362203 - DNA, 20 bp, Artificial Sequence
  Description of Artificial Sequence: Synthetic oligonucleotide
  Target: LAMA2; (+) strand; PAM type: YTN; PAM sequence: TTA
ttgtggcactattcacaata

SEQ ID NO: 362204 - DNA, 20 bp, Artificial Sequence
  Description of Artificial Sequence: Synthetic oligonucleotide
  Target: LAMA2; (+) strand; PAM type: YTN; PAM sequence: TTG
tggcactattcacaatagca

SEQ ID NO: 362205 - DNA, 20 bp, Artificial Sequence
  Description of Artificial Sequence: Synthetic oligonucleotide
  Target: LAMA2; (+) strand; PAM type: YTN; PAM sequence: CTA
ttcacaatagcaaagacttg

SEQ ID NO: 362206 - DNA, 20 bp, Artificial Sequence
  Description of Artificial Sequence: Synthetic oligonucleotide
  Target: LAMA2; (+) strand; PAM type: YTN; PAM sequence: TTC
acaatagcaaagacttggaa

SEQ ID NO: 362207 - DNA, 20 bp, Artificial Sequence
  Description of Artificial Sequence: Synthetic oligonucleotide
  Target: LAMA2; (+) strand; PAM type: YTN; PAM sequence: CTT
ggaaccaacccaaatgtcca

SEQ ID NO: 362208 - DNA, 20 bp, Artificial Sequence
  Description of Artificial Sequence: Synthetic oligonucleotide
  Target: LAMA2; (+) strand; PAM type: YTN; PAM sequence: TTG
gaaccaacccaaatgtccaa

SEQ ID NO: 362209 - DNA, 20 bp, Artificial Sequence
  Description of Artificial Sequence: Synthetic oligonucleotide
  Target: LAMA2; (+) strand; PAM type: YTN; PAM sequence: CTG
gattaagaaaatgtggcaca

SEQ ID NO: 362210 - DNA, 20 bp, Artificial Sequence
  Description of Artificial Sequence: Synthetic oligonucleotide
  Target: LAMA2; (+) strand; PAM type: YTN; PAM sequence: TTA
agaaaatgtggcacatatac

SEQ ID NO: 362211 - DNA, 20 bp, Artificial Sequence
  Description of Artificial Sequence: Synthetic oligonucleotide
  Target: LAMA2; (+) strand; PAM type: YTN; PAM sequence: CTA
tgcagccataaaaaatgatg

SEQ ID NO: 362212 - DNA, 20 bp, Artificial Sequence
  Description of Artificial Sequence: Synthetic oligonucleotide
  Target: LAMA2; (+) strand; PAM type: YTN; PAM sequence: TTC
atgtcctttgtagggacatg

SEQ ID NO: 362213 - DNA, 20 bp, Artificial Sequence
  Description of Artificial Sequence: Synthetic oligonucleotide
  Target: LAMA2; (+) strand; PAM type: YTN; PAM sequence: CTT
tgtagggacatggatgaaat

SEQ ID NO: 362214 - DNA, 20 bp, Artificial Sequence
  Description of Artificial Sequence: Synthetic oligonucleotide
  Target: LAMA2; (+) strand; PAM type: YTN; PAM sequence: TTT
gtagggacatggatgaaatt

SEQ ID NO: 362215 - DNA, 20 bp, Artificial Sequence
  Description of Artificial Sequence: Synthetic oligonucleotide
  Target: LAMA2; (+) strand; PAM type: YTN; PAM sequence: TTG
tagggacatggatgaaattg

SEQ ID NO: 362216 - DNA, 20 bp, Artificial Sequence
  Description of Artificial Sequence: Synthetic oligonucleotide
  Target: LAMA2; (+) strand; PAM type: YTN; PAM sequence: TTG
gaaatcatcattctcagtaa

SEQ ID NO: 362217 - DNA, 20 bp, Artificial Sequence
  Description of Artificial Sequence: Synthetic oligonucleotide
  Target: LAMA2; (+) strand; PAM type: YTN; PAM sequence: TTC
tcagtaaactatcacaagga

SEQ ID NO: 362218 - DNA, 20 bp, Artificial Sequence
  Description of Artificial Sequence: Synthetic oligonucleotide
  Target: LAMA2; (+) strand; PAM type: YTN; PAM sequence: CTC
agtaaactatcacaaggaca

SEQ ID NO: 362219 - DNA, 20 bp, Artificial Sequence
  Description of Artificial Sequence: Synthetic oligonucleotide
  Target: LAMA2; (+) strand; PAM type: YTN; PAM sequence: CTA
tcacaaggacaaaaaaacaa

SEQ ID NO: 362220 - DNA, 20 bp, Artificial Sequence
  Description of Artificial Sequence: Synthetic oligonucleotide
  Target: LAMA2; (+) strand; PAM type: YTN; PAM sequence: TTC
tcactcataggtgggaattg

SEQ ID NO: 362221 - DNA, 20 bp, Artificial Sequence
  Description of Artificial Sequence: Synthetic oligonucleotide
  Target: LAMA2; (+) strand; PAM type: YTN; PAM sequence: CTC
actcataggtgggaattgaa

SEQ ID NO: 362222 - DNA, 20 bp, Artificial Sequence
  Description of Artificial Sequence: Synthetic oligonucleotide
  Target: LAMA2; (+) strand; PAM type: YTN; PAM sequence: CTC
ataggtgggaattgaacaat

SEQ ID NO: 362223 - DNA, 20 bp, Artificial Sequence
  Description of Artificial Sequence: Synthetic oligonucleotide
  Target: LAMA2; (+) strand; PAM type: YTN; PAM sequence: TTG
aacaatgagaacacatggac

SEQ ID NO: 362224 - DNA, 20 bp, Artificial Sequence
  Description of Artificial Sequence: Synthetic oligonucleotide
  Target: LAMA2; (+) strand; PAM type: YTN; PAM sequence: CTC
tggggactgttgtggggtgg

SEQ ID NO: 362225 - DNA, 20 bp, Artificial Sequence
  Description of Artificial Sequence: Synthetic oligonucleotide
  Target: LAMA2; (+) strand; PAM type: YTN; PAM sequence: CTG
gggactgttgtggggtgggg

SEQ ID NO: 362226 - DNA, 20 bp, Artificial Sequence
  Description of Artificial Sequence: Synthetic oligonucleotide
  Target: LAMA2; (+) strand; PAM type: YTN; PAM sequence: CTG
ttgtggggtgggggggaggg

SEQ ID NO: 362227 - DNA, 20 bp, Artificial Sequence
  Description of Artificial Sequence: Synthetic oligonucleotide
  Target: LAMA2; (+) strand; PAM type: YTN; PAM sequence: TTG
tggggtgggggggagggggg

SEQ ID NO: 362228 - DNA, 20 bp, Artificial Sequence
  Description of Artificial Sequence: Synthetic oligonucleotide
  Target: LAMA2; (+) strand; PAM type: YTN; PAM sequence: TTA
ggagatgctaaatgacgagt

SEQ ID NO: 362229 - DNA, 20 bp, Artificial Sequence
  Description of Artificial Sequence: Synthetic oligonucleotide
  Target: LAMA2; (+) strand; PAM type: YTN; PAM sequence: CTA
aatgacgagttaatgggtgc

SEQ ID NO: 362230 - DNA, 20 bp, Artificial Sequence
  Description of Artificial Sequence: Synthetic oligonucleotide
  Target: LAMA2; (+) strand; PAM type: YTN; PAM sequence: TTA
atgggtgcagcacaccagca

SEQ ID NO: 362231 - DNA, 20 bp, Artificial Sequence
  Description of Artificial Sequence: Synthetic oligonucleotide
  Target: LAMA2; (+) strand; PAM type: YTN; PAM sequence: CTA
actggcacatggtgcacatg

SEQ ID NO: 362232 - DNA, 20 bp, Artificial Sequence
  Description of Artificial Sequence: Synthetic oligonucleotide
  Target: LAMA2; (+) strand; PAM type: YTN; PAM sequence: CTG
gcacatggtgcacatgtacc

SEQ ID NO: 362233 - DNA, 20 bp, Artificial Sequence
  Description of Artificial Sequence: Synthetic oligonucleotide
  Target: LAMA2; (+) strand; PAM type: YTN; PAM sequence: CTA
aaacttaaagtataataata

SEQ ID NO: 362234 - DNA, 20 bp, Artificial Sequence
  Description of Artificial Sequence: Synthetic oligonucleotide
  Target: LAMA2; (+) strand; PAM type: YTN; PAM sequence: CTT
aaagtataataataataaaa

SEQ ID NO: 362235 - DNA, 20 bp, Artificial Sequence
  Description of Artificial Sequence: Synthetic oligonucleotide
  Target: LAMA2; (+) strand; PAM type: YTN; PAM sequence: TTA
aagtataataataataaaat

SEQ ID NO: 362236 - DNA, 20 bp, Artificial Sequence
  Description of Artificial Sequence: Synthetic oligonucleotide
  Target: LAMA2; (+) strand; PAM type: YTN; PAM sequence: TTA
aaaaaaagttcatcgtatgg

SEQ ID NO: 362237 - DNA, 20 bp, Artificial Sequence
  Description of Artificial Sequence: Synthetic oligonucleotide
  Target: LAMA2; (+) strand; PAM type: YTN; PAM sequence: TTC
atcgtatggattgacactgg

SEQ ID NO: 362238 - DNA, 20 bp, Artificial Sequence
  Description of Artificial Sequence: Synthetic oligonucleotide
  Target: LAMA2; (+) strand; PAM type: YTN; PAM sequence: TTG
acactgggctgctccctggt

SEQ ID NO: 362239 - DNA, 20 bp, Artificial Sequence
  Description of Artificial Sequence: Synthetic oligonucleotide
  Target: LAMA2; (+) strand; PAM type: YTN; PAM sequence: CTG
ggctgctccctggtggagta

SEQ ID NO: 362240 - DNA, 20 bp, Artificial Sequence
  Description of Artificial Sequence: Synthetic oligonucleotide
  Target: LAMA2; (+) strand; PAM type: YTN; PAM sequence: CTG
ctccctggtggagtaccagc

SEQ ID NO: 362241 - DNA, 20 bp, Artificial Sequence
  Description of Artificial Sequence: Synthetic oligonucleotide
  Target: LAMA2; (+) strand; PAM type: YTN; PAM sequence: CTC
cctggtggagtaccagctca

SEQ ID NO: 362242 - DNA, 20 bp, Artificial Sequence
  Description of Artificial Sequence: Synthetic oligonucleotide
  Target: LAMA2; (+) strand; PAM type: YTN; PAM sequence: CTG
gtggagtaccagctcaagat

SEQ ID NO: 362243 - DNA, 20 bp, Artificial Sequence
  Description of Artificial Sequence: Synthetic oligonucleotide
  Target: LAMA2; (+) strand; PAM type: YTN; PAM sequence: CTC
aagatgttttgaggaaaaaa

SEQ ID NO: 362244 - DNA, 20 bp, Artificial Sequence
  Description of Artificial Sequence: Synthetic oligonucleotide
  Target: LAMA2; (+) strand; PAM type: YTN; PAM sequence: TTT
tgaggaaaaaatttgcattt

SEQ ID NO: 362245 - DNA, 20 bp, Artificial Sequence
  Description of Artificial Sequence: Synthetic oligonucleotide
  Target: LAMA2; (+) strand; PAM type: YTN; PAM sequence: TTT
gaggaaaaaatttgcattta

SEQ ID NO: 362246 - DNA, 20 bp, Artificial Sequence
  Description of Artificial Sequence: Synthetic oligonucleotide
  Target: LAMA2; (+) strand; PAM type: YTN; PAM sequence: TTG
aggaaaaaatttgcatttac

SEQ ID NO: 362247 - DNA, 20 bp, Artificial Sequence
  Description of Artificial Sequence: Synthetic oligonucleotide
  Target: LAMA2; (+) strand; PAM type: YTN; PAM sequence: TTT
gcatttaccaagtgggagga

SEQ ID NO: 362248 - DNA, 20 bp, Artificial Sequence
  Description of Artificial Sequence: Synthetic oligonucleotide
  Target: LAMA2; (+) strand; PAM type: YTN; PAM sequence: TTG
catttaccaagtgggaggat

SEQ ID NO: 362249 - DNA, 20 bp, Artificial Sequence
  Description of Artificial Sequence: Synthetic oligonucleotide
  Target: LAMA2; (+) strand; PAM type: YTN; PAM sequence: TTT
accaagtgggaggatttata

SEQ ID NO: 362250 - DNA, 20 bp, Artificial Sequence
  Description of Artificial Sequence: Synthetic oligonucleotide
  Target: LAMA2; (+) strand; PAM type: YTN; PAM sequence: TTA
ccaagtgggaggatttatag

SEQ ID NO: 362251 - DNA, 20 bp, Artificial Sequence
  Description of Artificial Sequence: Synthetic oligonucleotide
  Target: LAMA2; (+) strand; PAM type: YTN; PAM sequence: TTT
atagtggtgatttcacttgt

SEQ ID NO: 362252 - DNA, 20 bp, Artificial Sequence
  Description of Artificial Sequence: Synthetic oligonucleotide
  Target: LAMA2; (+) strand; PAM type: YTN; PAM sequence: TTA
tagtggtgatttcacttgtt

SEQ ID NO: 362253 - DNA, 20 bp, Artificial Sequence
  Description of Artificial Sequence: Synthetic oligonucleotide
  Target: LAMA2; (+) strand; PAM type: YTN; PAM sequence: TTT
cacttgttcattgatttaga

SEQ ID NO: 362254 - DNA, 20 bp, Artificial Sequence
  Description of Artificial Sequence: Synthetic oligonucleotide
  Target: LAMA2; (+) strand; PAM type: YTN; PAM sequence: TTC
acttgttcattgatttagac

SEQ ID NO: 362255 - DNA, 20 bp, Artificial Sequence
  Description of Artificial Sequence: Synthetic oligonucleotide
  Target: LAMA2; (+) strand; PAM type: YTN; PAM sequence: CTT
gttcattgatttagacatat

SEQ ID NO: 362256 - DNA, 20 bp, Artificial Sequence
  Description of Artificial Sequence: Synthetic oligonucleotide
  Target: LAMA2; (+) strand; PAM type: YTN; PAM sequence: TTG
ttcattgatttagacatatg

SEQ ID NO: 362257 - DNA, 20 bp, Artificial Sequence
  Description of Artificial Sequence: Synthetic oligonucleotide
  Target: LAMA2; (+) strand; PAM type: YTN; PAM sequence: TTC
attgatttagacatatgaaa

SEQ ID NO: 362258 - DNA, 20 bp, Artificial Sequence
  Description of Artificial Sequence: Synthetic oligonucleotide
  Target: LAMA2; (+) strand; PAM type: YTN; PAM sequence: TTG
atttagacatatgaaatatt

SEQ ID NO: 362259 - DNA, 20 bp, Artificial Sequence
  Description of Artificial Sequence: Synthetic oligonucleotide
  Target: LAMA2; (+) strand; PAM type: YTN; PAM sequence: TTT
agacatatgaaatattatat

SEQ ID NO: 362260 - DNA, 20 bp, Artificial Sequence
  Description of Artificial Sequence: Synthetic oligonucleotide
  Target: LAMA2; (+) strand; PAM type: YTN; PAM sequence: TTA
gacatatgaaatattatatt

SEQ ID NO: 362261 - DNA, 20 bp, Artificial Sequence
  Description of Artificial Sequence: Synthetic oligonucleotide
  Target: LAMA2; (+) strand; PAM type: YTN; PAM sequence: TTA
tattttttgcacaactaagt

SEQ ID NO: 362262 - DNA, 20 bp, Artificial Sequence
  Description of Artificial Sequence: Synthetic oligonucleotide
  Target: LAMA2; (+) strand; PAM type: YTN; PAM sequence: TTT
tttgcacaactaagttggct

SEQ ID NO: 362263 - DNA, 20 bp, Artificial Sequence
  Description of Artificial Sequence: Synthetic oligonucleotide
  Target: LAMA2; (+) strand; PAM type: YTN; PAM sequence: TTT
ttgcacaactaagttggctt

SEQ ID NO: 362264 - DNA, 20 bp, Artificial Sequence
  Description of Artificial Sequence: Synthetic oligonucleotide
  Target: LAMA2; (+) strand; PAM type: YTN; PAM sequence: TTT
tgcacaactaagttggcttt

SEQ ID NO: 362265 - DNA, 20 bp, Artificial Sequence
  Description of Artificial Sequence: Synthetic oligonucleotide
  Target: LAMA2; (+) strand; PAM type: YTN; PAM sequence: TTT
gcacaactaagttggctttc

SEQ ID NO: 362266 - DNA, 20 bp, Artificial Sequence
  Description of Artificial Sequence: Synthetic oligonucleotide
  Target: LAMA2; (+) strand; PAM type: YTN; PAM sequence: TTG
cacaactaagttggctttca

SEQ ID NO: 362267 - DNA, 20 bp, Artificial Sequence
  Description of Artificial Sequence: Synthetic oligonucleotide
  Target: LAMA2; (+) strand; PAM type: YTN; PAM sequence: CTA
agttggctttcagattatat

SEQ ID NO: 362268 - DNA, 20 bp, Artificial Sequence
  Description of Artificial Sequence: Synthetic oligonucleotide
  Target: LAMA2; (+) strand; PAM type: YTN; PAM sequence: TTG
gctttcagattatatgacca

SEQ ID NO: 362269 - DNA, 20 bp, Artificial Sequence
  Description of Artificial Sequence: Synthetic oligonucleotide
  Target: LAMA2; (+) strand; PAM type: YTN; PAM sequence: CTT
tcagattatatgaccatatt

SEQ ID NO: 362270 - DNA, 20 bp, Artificial Sequence
  Description of Artificial Sequence: Synthetic oligonucleotide
  Target: LAMA2; (+) strand; PAM type: YTN; PAM sequence: TTT
cagattatatgaccatattt

SEQ ID NO: 362271 - DNA, 20 bp, Artificial Sequence
  Description of Artificial Sequence: Synthetic oligonucleotide
  Target: LAMA2; (+) strand; PAM type: YTN; PAM sequence: TTC
agattatatgaccatatttt

SEQ ID NO: 362272 - DNA, 20 bp, Artificial Sequence
  Description of Artificial Sequence: Synthetic oligonucleotide
  Target: LAMA2; (+) strand; PAM type: YTN; PAM sequence: TTA
tatgaccatatttttaacta

SEQ ID NO: 362273 - DNA, 20 bp, Artificial Sequence
  Description of Artificial Sequence: Synthetic oligonucleotide
  Target: LAMA2; (+) strand; PAM type: YTN; PAM sequence: TTT
ttaactaaatgaagctttgc

SEQ ID NO: 362274 - DNA, 20 bp, Artificial Sequence
  Description of Artificial Sequence: Synthetic oligonucleotide
  Target: LAMA2; (+) strand; PAM type: YTN; PAM sequence: TTT
taactaaatgaagctttgct

SEQ ID NO: 362275 - DNA, 20 bp, Artificial Sequence
  Description of Artificial Sequence: Synthetic oligonucleotide
  Target: LAMA2; (+) strand; PAM type: YTN; PAM sequence: TTT
aactaaatgaagctttgctg

SEQ ID NO: 362276 - DNA, 20 bp, Artificial Sequence
  Description of Artificial Sequence: Synthetic oligonucleotide
  Target: LAMA2; (+) strand; PAM type: YTN; PAM sequence: TTA
actaaatgaagctttgctga

SEQ ID NO: 362277 - DNA, 20 bp, Artificial Sequence
  Description of Artificial Sequence: Synthetic oligonucleotide
  Target: LAMA2; (+) strand; PAM type: YTN; PAM sequence: CTA
aatgaagctttgctgaataa

SEQ ID NO: 362278 - DNA, 20 bp, Artificial Sequence
  Description of Artificial Sequence: Synthetic oligonucleotide
  Target: LAMA2; (+) strand; PAM type: YTN; PAM sequence: CTT
tgctgaataaatacatgact

SEQ ID NO: 362279 - DNA, 20 bp, Artificial Sequence
  Description of Artificial Sequence: Synthetic oligonucleotide
  Target: LAMA2; (+) strand; PAM type: YTN; PAM sequence: TTT
gctgaataaatacatgactt

SEQ ID NO: 362280 - DNA, 20 bp, Artificial Sequence
  Description of Artificial Sequence: Synthetic oligonucleotide
  Target: LAMA2; (+) strand; PAM type: YTN; PAM sequence: TTG
ctgaataaatacatgactta

SEQ ID NO: 362281 - DNA, 20 bp, Artificial Sequence
  Description of Artificial Sequence: Synthetic oligonucleotide
  Target: LAMA2; (+) strand; PAM type: YTN; PAM sequence: CTG
aataaatacatgacttaata

SEQ ID NO: 362282 - DNA, 20 bp, Artificial Sequence
  Description of Artificial Sequence: Synthetic oligonucleotide
  Target: LAMA2; (+) strand; PAM type: YTN; PAM sequence: CTT
aatatattccttcaaaaaac

SEQ ID NO: 362283 - DNA, 20 bp, Artificial Sequence
  Description of Artificial Sequence: Synthetic oligonucleotide
  Target: LAMA2; (+) strand; PAM type: YTN; PAM sequence: TTA
atatattccttcaaaaaaca

SEQ ID NO: 362284 - DNA, 20 bp, Artificial Sequence
  Description of Artificial Sequence: Synthetic oligonucleotide
  Target: LAMA2; (+) strand; PAM type: YTN; PAM sequence: TTC
cttcaaaaaacatatagtga

SEQ ID NO: 362285 - DNA, 20 bp, Artificial Sequence
  Description of Artificial Sequence: Synthetic oligonucleotide
  Target: LAMA2; (+) strand; PAM type: YTN; PAM sequence: CTT
caaaaaacatatagtgaaat

SEQ ID NO: 362286 - DNA, 20 bp, Artificial Sequence
  Description of Artificial Sequence: Synthetic oligonucleotide
  Target: LAMA2; (+) strand; PAM type: YTN; PAM sequence: TTC
aaaaaacatatagtgaaata

SEQ ID NO: 362287 - DNA, 20 bp, Artificial Sequence
  Description of Artificial Sequence: Synthetic oligonucleotide
  Target: LAMA2; (+) strand; PAM type: YTN; PAM sequence: TTA
actacacaaagataagcaat

SEQ ID NO: 362288 - DNA, 20 bp, Artificial Sequence
  Description of Artificial Sequence: Synthetic oligonucleotide
  Target: LAMA2; (+) strand; PAM type: YTN; PAM sequence: CTA
cacaaagataagcaatgagc

SEQ ID NO: 362289 - DNA, 20 bp, Artificial Sequence
  Description of Artificial Sequence: Synthetic oligonucleotide
  Target: LAMA2; (+) strand; PAM type: YTN; PAM sequence: CTA
gtgcttaccactgctcttgg

SEQ ID NO: 362290 - DNA, 20 bp, Artificial Sequence
  Description of Artificial Sequence: Synthetic oligonucleotide
  Target: LAMA2; (+) strand; PAM type: YTN; PAM sequence: CTT
accactgctcttggtaagag

SEQ ID NO: 362291 - DNA, 20 bp, Artificial Sequence
  Description of Artificial Sequence: Synthetic oligonucleotide
  Target: LAMA2; (+) strand; PAM type: YTN; PAM sequence: TTA
ccactgctcttggtaagagc

SEQ ID NO: 362292 - DNA, 20 bp, Artificial Sequence
  Description of Artificial Sequence: Synthetic oligonucleotide
  Target: LAMA2; (+) strand; PAM type: YTN; PAM sequence: CTG
ctcttggtaagagctttcct

SEQ ID NO: 362293 - DNA, 20 bp, Artificial Sequence
  Description of Artificial Sequence: Synthetic oligonucleotide
  Target: LAMA2; (+) strand; PAM type: YTN; PAM sequence: CTC
ttggtaagagctttccttca

SEQ ID NO: 362294 - DNA, 20 bp, Artificial Sequence
  Description of Artificial Sequence: Synthetic oligonucleotide
  Target: LAMA2; (+) strand; PAM type: YTN; PAM sequence: CTT
ggtaagagctttccttcagg

SEQ ID NO: 362295 - DNA, 20 bp, Artificial Sequence
  Description of Artificial Sequence: Synthetic oligonucleotide
  Target: LAMA2; (+) strand; PAM type: YTN; PAM sequence: TTG
gtaagagctttccttcaggc

SEQ ID NO: 362296 - DNA, 20 bp, Artificial Sequence
  Description of Artificial Sequence: Synthetic oligonucleotide
  Target: LAMA2; (+) strand; PAM type: YTN; PAM sequence: CTT
tccttcaggcacaaaatgag

SEQ ID NO: 362297 - DNA, 20 bp, Artificial Sequence
  Description of Artificial Sequence: Synthetic oligonucleotide
  Target: LAMA2; (+) strand; PAM type: YTN; PAM sequence: TTT
ccttcaggcacaaaatgaga

SEQ ID NO: 362298 - DNA, 20 bp, Artificial Sequence
  Description of Artificial Sequence: Synthetic oligonucleotide
  Target: LAMA2; (+) strand; PAM type: YTN; PAM sequence: TTC
cttcaggcacaaaatgagat

SEQ ID NO: 362299 - DNA, 20 bp, Artificial Sequence
  Description of Artificial Sequence: Synthetic oligonucleotide
  Target: LAMA2; (+) strand; PAM type: YTN; PAM sequence: CTT
caggcacaaaatgagataaa

SEQ ID NO: 362300 - DNA, 20 bp, Artificial Sequence
  Description of Artificial Sequence: Synthetic oligonucleotide
  Target: LAMA2; (+) strand; PAM type: YTN; PAM sequence: TTC
aggcacaaaatgagataaaa

SEQ ID NO: 362301 - DNA, 20 bp, Artificial Sequence
  Description of Artificial Sequence: Synthetic oligonucleotide
  Target: LAMA2; (+) strand; PAM type: YTN; PAM sequence: CTG
gatgaaaattggtcaacaag

SEQ ID NO: 362302 - DNA, 20 bp, Artificial Sequence
  Description of Artificial Sequence: Synthetic oligonucleotide
  Target: LAMA2; (+) strand; PAM type: YTN; PAM sequence: TTG
gtcaacaagtgaggaattaa

SEQ ID NO: 362303 - DNA, 20 bp, Artificial Sequence
  Description of Artificial Sequence: Synthetic oligonucleotide
  Target: LAMA2; (+) strand; PAM type: YTN; PAM sequence: TTA
actgccttgcaaaagcagtt

SEQ ID NO: 362304 - DNA, 20 bp, Artificial Sequence
  Description of Artificial Sequence: Synthetic oligonucleotide
  Target: LAMA2; (+) strand; PAM type: YTN; PAM sequence: CTG
ccttgcaaaagcagttttta

SEQ ID NO: 362305 - DNA, 20 bp, Artificial Sequence
  Description of Artificial Sequence: Synthetic oligonucleotide
  Target: LAMA2; (+) strand; PAM type: YTN; PAM sequence: CTT
gcaaaagcagtttttattat

SEQ ID NO: 362306 - DNA, 20 bp, Artificial Sequence
  Description of Artificial Sequence: Synthetic oligonucleotide
  Target: LAMA2; (+) strand; PAM type: YTN; PAM sequence: TTG
caaaagcagtttttattata

SEQ ID NO: 362307 - DNA, 20 bp, Artificial Sequence
  Description of Artificial Sequence: Synthetic oligonucleotide
  Target: LAMA2; (+) strand; PAM type: YTN; PAM sequence: TTT
ttattatacagaaaccattt

SEQ ID NO: 362308 - DNA, 20 bp, Artificial Sequence
  Description of Artificial Sequence: Synthetic oligonucleotide
  Target: LAMA2; (+) strand; PAM type: YTN; PAM sequence: TTT
tattatacagaaaccatttt

SEQ ID NO: 362309 - DNA, 20 bp, Artificial Sequence
  Description of Artificial Sequence: Synthetic oligonucleotide
  Target: LAMA2; (+) strand; PAM type: YTN; PAM sequence: TTT
attatacagaaaccattttg

SEQ ID NO: 362310 - DNA, 20 bp, Artificial Sequence
  Description of Artificial Sequence: Synthetic oligonucleotide
  Target: LAMA2; (+) strand; PAM type: YTN; PAM sequence: TTA
ttatacagaaaccattttga

SEQ ID NO: 362311 - DNA, 20 bp, Artificial Sequence
  Description of Artificial Sequence: Synthetic oligonucleotide
  Target: LAMA2; (+) strand; PAM type: YTN; PAM sequence: TTA
tacagaaaccattttgaaag

SEQ ID NO: 362312 - DNA, 20 bp, Artificial Sequence
  Description of Artificial Sequence: Synthetic oligonucleotide
  Target: LAMA2; (+) strand; PAM type: YTN; PAM sequence: TTT
tgaaagcagttattcagaaa

SEQ ID NO: 362313 - DNA, 20 bp, Artificial Sequence
  Description of Artificial Sequence: Synthetic oligonucleotide
  Target: LAMA2; (+) strand; PAM type: YTN; PAM sequence: TTT
gaaagcagttattcagaaag

SEQ ID NO: 362314 - DNA, 20 bp, Artificial Sequence
  Description of Artificial Sequence: Synthetic oligonucleotide
  Target: LAMA2; (+) strand; PAM type: YTN; PAM sequence: TTG
aaagcagttattcagaaagt

SEQ ID NO: 362315 - DNA, 20 bp, Artificial Sequence
  Description of Artificial Sequence: Synthetic oligonucleotide
  Target: LAMA2; (+) strand; PAM type: YTN; PAM sequence: TTA
ttcagaaagtttctatcagt

SEQ ID NO: 362316 - DNA, 20 bp, Artificial Sequence
  Description of Artificial Sequence: Synthetic oligonucleotide
  Target: LAMA2; (+) strand; PAM type: YTN; PAM sequence: TTC
agaaagtttctatcagtata

SEQ ID NO: 362317 - DNA, 20 bp, Artificial Sequence
  Description of Artificial Sequence: Synthetic oligonucleotide
  Target: LAMA2; (+) strand; PAM type: YTN; PAM sequence: TTT
ctatcagtatatgatttgta

SEQ ID NO: 362318 - DNA, 20 bp, Artificial Sequence
  Description of Artificial Sequence: Synthetic oligonucleotide
  Target: LAMA2; (+) strand; PAM type: YTN; PAM sequence: TTC
tatcagtatatgatttgtag

SEQ ID NO: 362319 - DNA, 20 bp, Artificial Sequence
  Description of Artificial Sequence: Synthetic oligonucleotide
  Target: LAMA2; (+) strand; PAM type: YTN; PAM sequence: CTA
tcagtatatgatttgtagct

SEQ ID NO: 362320 - DNA, 20 bp, Artificial Sequence
  Description of Artificial Sequence: Synthetic oligonucleotide
  Target: LAMA2; (+) strand; PAM type: YTN; PAM sequence: TTT
gtagctcaaattattgttgg

SEQ ID NO: 362321 - DNA, 20 bp, Artificial Sequence
  Description of Artificial Sequence: Synthetic oligonucleotide
  Target: LAMA2; (+) strand; PAM type: YTN; PAM sequence: TTG
tagctcaaattattgttggt

SEQ ID NO: 362322 - DNA, 20 bp, Artificial Sequence
  Description of Artificial Sequence: Synthetic oligonucleotide
  Target: LAMA2; (+) strand; PAM type: YTN; PAM sequence: CTC
aaattattgttggtctatca

SEQ ID NO: 362323 - DNA, 20 bp, Artificial Sequence
  Description of Artificial Sequence: Synthetic oligonucleotide
  Target: LAMA2; (+) strand; PAM type: YTN; PAM sequence: TTA
ttgttggtctatcaatcaca

SEQ ID NO: 362324 - DNA, 20 bp, Artificial Sequence
  Description of Artificial Sequence: Synthetic oligonucleotide
  Target: LAMA2; (+) strand; PAM type: YTN; PAM sequence: TTG
ttggtctatcaatcacaaat

SEQ ID NO: 362325 - DNA, 20 bp, Artificial Sequence
  Description of Artificial Sequence: Synthetic oligonucleotide
  Target: LAMA2; (+) strand; PAM type: YTN; PAM sequence: TTG
gtctatcaatcacaaatact

SEQ ID NO: 362326 - DNA, 20 bp, Artificial Sequence
  Description of Artificial Sequence: Synthetic oligonucleotide
  Target: LAMA2; (+) strand; PAM type: YTN; PAM sequence: CTA
tcaatcacaaatactatttt

SEQ ID NO: 362327 - DNA, 20 bp, Artificial Sequence
  Description of Artificial Sequence: Synthetic oligonucleotide
  Target: LAMA2; (+) strand; PAM type: YTN; PAM sequence: CTA
ttttctgcataatatagcta

SEQ ID NO: 362328 - DNA, 20 bp, Artificial Sequence
  Description of Artificial Sequence: Synthetic oligonucleotide
  Target: LAMA2; (+) strand; PAM type: YTN; PAM sequence: TTT
tctgcataatatagctagaa

SEQ ID NO: 362329 - DNA, 20 bp, Artificial Sequence
  Description of Artificial Sequence: Synthetic oligonucleotide
  Target: LAMA2; (+) strand; PAM type: YTN; PAM sequence: TTT
ctgcataatatagctagaaa

SEQ ID NO: 362330 - DNA, 20 bp, Artificial Sequence
  Description of Artificial Sequence: Synthetic oligonucleotide
  Target: LAMA2; (+) strand; PAM type: YTN; PAM sequence: TTC
tgcataatatagctagaaaa

SEQ ID NO: 362331 - DNA, 20 bp, Artificial Sequence
  Description of Artificial Sequence: Synthetic oligonucleotide
  Target: LAMA2; (+) strand; PAM type: YTN; PAM sequence: CTG
cataatatagctagaaaata

SEQ ID NO: 362332 - DNA, 20 bp, Artificial Sequence
  Description of Artificial Sequence: Synthetic oligonucleotide
  Target: LAMA2; (+) strand; PAM type: YTN; PAM sequence: CTA
gaaaatataattatctaact

SEQ ID NO: 362333 - DNA, 20 bp, Artificial Sequence
  Description of Artificial Sequence: Synthetic oligonucleotide
  Target: LAMA2; (+) strand; PAM type: YTN; PAM sequence: TTA
tctaacttatttttaaagtc

SEQ ID NO: 362334 - DNA, 20 bp, Artificial Sequence
  Description of Artificial Sequence: Synthetic oligonucleotide
  Target: LAMA2; (+) strand; PAM type: YTN; PAM sequence: CTA
acttatttttaaagtcttct

SEQ ID NO: 362335 - DNA, 20 bp, Artificial Sequence
  Description of Artificial Sequence: Synthetic oligonucleotide
  Target: LAMA2; (+) strand; PAM type: YTN; PAM sequence: CTT
atttttaaagtcttctaaac

SEQ ID NO: 362336 - DNA, 20 bp, Artificial Sequence
  Description of Artificial Sequence: Synthetic oligonucleotide
  Target: LAMA2; (+) strand; PAM type: YTN; PAM sequence: TTA
tttttaaagtcttctaaaca

SEQ ID NO: 362337 - DNA, 20 bp, Artificial Sequence
  Description of Artificial Sequence: Synthetic oligonucleotide
  Target: LAMA2; (+) strand; PAM type: YTN; PAM sequence: TTT
ttaaagtcttctaaacatga

SEQ ID NO: 362338 - DNA, 20 bp, Artificial Sequence
  Description of Artificial Sequence: Synthetic oligonucleotide
  Target: LAMA2; (+) strand; PAM type: YTN; PAM sequence: TTT
taaagtcttctaaacatgaa

SEQ ID NO: 362339 - DNA, 20 bp, Artificial Sequence
  Description of Artificial Sequence: Synthetic oligonucleotide
  Target: LAMA2; (+) strand; PAM type: YTN; PAM sequence: TTT
aaagtcttctaaacatgaag

SEQ ID NO: 362340 - DNA, 20 bp, Artificial Sequence
  Description of Artificial Sequence: Synthetic oligonucleotide
  Target: LAMA2; (+) strand; PAM type: YTN; PAM sequence: TTA
aagtcttctaaacatgaagt

SEQ ID NO: 362341 - DNA, 20 bp, Artificial Sequence
  Description of Artificial Sequence: Synthetic oligonucleotide
  Target: LAMA2; (+) strand; PAM type: YTN; PAM sequence: CTT
ctaaacatgaagtttcagtg

SEQ ID NO: 362342 - DNA, 20 bp, Artificial Sequence
  Description of Artificial Sequence: Synthetic oligonucleotide
  Target: LAMA2; (+) strand; PAM type: YTN; PAM sequence: TTC
taaacatgaagtttcagtga

SEQ ID NO: 362343 - DNA, 20 bp, Artificial Sequence
  Description of Artificial Sequence: Synthetic oligonucleotide
  Target: LAMA2; (+) strand; PAM type: YTN; PAM sequence: CTA
aacatgaagtttcagtgagc

SEQ ID NO: 362344 - DNA, 20 bp, Artificial Sequence
  Description of Artificial Sequence: Synthetic oligonucleotide
  Target: LAMA2; (+) strand; PAM type: YTN; PAM sequence: TTT
cagtgagctttgaagctttt

SEQ ID NO: 362345 - DNA, 20 bp, Artificial Sequence
  Description of Artificial Sequence: Synthetic oligonucleotide
  Target: LAMA2; (+) strand; PAM type: YTN; PAM sequence: TTC
agtgagctttgaagcttttt

SEQ ID NO: 362346 - DNA, 20 bp, Artificial Sequence
  Description of Artificial Sequence: Synthetic oligonucleotide
  Target: LAMA2; (+) strand; PAM type: YTN; PAM sequence: CTT
tgaagctttttgttaaatat

SEQ ID NO: 362347 - DNA, 20 bp, Artificial Sequence
  Description of Artificial Sequence: Synthetic oligonucleotide
  Target: LAMA2; (+) strand; PAM type: YTN; PAM sequence: TTT
gaagctttttgttaaatatg

SEQ ID NO: 362348 - DNA, 20 bp, Artificial Sequence
  Description of Artificial Sequence: Synthetic oligonucleotide
  Target: LAMA2; (+) strand; PAM type: YTN; PAM sequence: TTG
aagctttttgttaaatatgt

SEQ ID NO: 362349 - DNA, 20 bp, Artificial Sequence
  Description of Artificial Sequence: Synthetic oligonucleotide
  Target: LAMA2; (+) strand; PAM type: YTN; PAM sequence: CTT
tttgttaaatatgttaaaat

SEQ ID NO: 362350 - DNA, 20 bp, Artificial Sequence
  Description of Artificial Sequence: Synthetic oligonucleotide
  Target: LAMA2; (+) strand; PAM type: YTN; PAM sequence: TTT
ttgttaaatatgttaaaatg

SEQ ID NO: 362351 - DNA, 20 bp, Artificial Sequence
  Description of Artificial Sequence: Synthetic oligonucleotide
  Target: LAMA2; (+) strand; PAM type: YTN; PAM sequence: TTT
tgttaaatatgttaaaatgt

SEQ ID NO: 362352 - DNA, 20 bp, Artificial Sequence
  Description of Artificial Sequence: Synthetic oligonucleotide
  Target: LAMA2; (+) strand; PAM type: YTN; PAM sequence: TTT
gttaaatatgttaaaatgtc

SEQ ID NO: 362353 - DNA, 20 bp, Artificial Sequence
  Description of Artificial Sequence: Synthetic oligonucleotide
  Target: LAMA2; (+) strand; PAM type: YTN; PAM sequence: TTG
ttaaatatgttaaaatgtca

SEQ ID NO: 362354 - DNA, 20 bp, Artificial Sequence
  Description of Artificial Sequence: Synthetic oligonucleotide
  Target: LAMA2; (+) strand; PAM type: YTN; PAM sequence: TTA
aatatgttaaaatgtcatac

SEQ ID NO: 362355 - DNA, 20 bp, Artificial Sequence
  Description of Artificial Sequence: Synthetic oligonucleotide
  Target: LAMA2; (+) strand; PAM type: YTN; PAM sequence: TTA
aaatgtcatactttccaaat

SEQ ID NO: 362356 - DNA, 20 bp, Artificial Sequence
  Description of Artificial Sequence: Synthetic oligonucleotide
  Target: LAMA2; (+) strand; PAM type: YTN; PAM sequence: CTT
tccaaatagtttccaattat

SEQ ID NO: 362357 - DNA, 20 bp, Artificial Sequence
  Description of Artificial Sequence: Synthetic oligonucleotide
  Target: LAMA2; (+) strand; PAM type: YTN; PAM sequence: TTT
ccaaatagtttccaattata

SEQ ID NO: 362358 - DNA, 20 bp, Artificial Sequence
  Description of Artificial Sequence: Synthetic oligonucleotide
  Target: LAMA2; (+) strand; PAM type: YTN; PAM sequence: TTC
caaatagtttccaattataa

SEQ ID NO: 362359 - DNA, 20 bp, Artificial Sequence
  Description of Artificial Sequence: Synthetic oligonucleotide
  Target: LAMA2; (+) strand; PAM type: YTN; PAM sequence: TTT
ccaattataaccaattagca

SEQ ID NO: 362360 - DNA, 20 bp, Artificial Sequence
  Description of Artificial Sequence: Synthetic oligonucleotide
  Target: LAMA2; (+) strand; PAM type: YTN; PAM sequence: TTC
caattataaccaattagcat

SEQ ID NO: 362361 - DNA, 20 bp, Artificial Sequence
  Description of Artificial Sequence: Synthetic oligonucleotide
  Target: LAMA2; (+) strand; PAM type: YTN; PAM sequence: TTA
taaccaattagcatcagaaa

SEQ ID NO: 362362 - DNA, 20 bp, Artificial Sequence
  Description of Artificial Sequence: Synthetic oligonucleotide
  Target: LAMA2; (+) strand; PAM type: YTN; PAM sequence: TTA
gcatcagaaaatttattagc

SEQ ID NO: 362363 - DNA, 20 bp, Artificial Sequence
  Description of Artificial Sequence: Synthetic oligonucleotide
  Target: LAMA2; (+) strand; PAM type: YTN; PAM sequence: TTT
attagccaaatttcaccaag

SEQ ID NO: 362364 - DNA, 20 bp, Artificial Sequence
  Description of Artificial Sequence: Synthetic oligonucleotide
  Target: LAMA2; (+) strand; PAM type: YTN; PAM sequence: TTA
ttagccaaatttcaccaaga

SEQ ID NO: 362365 - DNA, 20 bp, Artificial Sequence
  Description of Artificial Sequence: Synthetic oligonucleotide
  Target: LAMA2; (+) strand; PAM type: YTN; PAM sequence: TTA
gccaaatttcaccaagaacc

SEQ ID NO: 362366 - DNA, 20 bp, Artificial Sequence
  Description of Artificial Sequence: Synthetic oligonucleotide
  Target: LAMA2; (+) strand; PAM type: YTN; PAM sequence: TTT
caccaagaacctaatttgtg

SEQ ID NO: 362367 - DNA, 20 bp, Artificial Sequence
  Description of Artificial Sequence: Synthetic oligonucleotide
  Target: LAMA2; (+) strand; PAM type: YTN; PAM sequence: TTC
accaagaacctaatttgtga

SEQ ID NO: 362368 - DNA, 20 bp, Artificial Sequence
  Description of Artificial Sequence: Synthetic oligonucleotide
  Target: LAMA2; (+) strand; PAM type: YTN; PAM sequence: CTA
atttgtgagagaattgaaaa

SEQ ID NO: 362369 - DNA, 20 bp, Artificial Sequence
  Description of Artificial Sequence: Synthetic oligonucleotide
  Target: LAMA2; (+) strand; PAM type: YTN; PAM sequence: TTT
gtgagagaattgaaaaatga

SEQ ID NO: 362370 - DNA, 20 bp, Artificial Sequence
  Description of Artificial Sequence: Synthetic oligonucleotide
  Target: LAMA2; (+) strand; PAM type: YTN; PAM sequence: TTG
tgagagaattgaaaaatgag

SEQ ID NO: 362371 - DNA, 20 bp, Artificial Sequence
  Description of Artificial Sequence: Synthetic oligonucleotide
  Target: LAMA2; (+) strand; PAM type: YTN; PAM sequence: TTG
aaaaatgagtaccataattt

SEQ ID NO: 362372 - DNA, 20 bp, Artificial Sequence
  Description of Artificial Sequence: Synthetic oligonucleotide
  Target: LAMA2; (+) strand; PAM type: YTN; PAM sequence: TTT
agtatgctcagccactgatg

SEQ ID NO: 362373 - DNA, 20 bp, Artificial Sequence
  Description of Artificial Sequence: Synthetic oligonucleotide
  Target: LAMA2; (+) strand; PAM type: YTN; PAM sequence: TTA
gtatgctcagccactgatgt

SEQ ID NO: 362374 - DNA, 20 bp, Artificial Sequence
  Description of Artificial Sequence: Synthetic oligonucleotide
  Target: LAMA2; (+) strand; PAM type: YTN; PAM sequence: CTC
agccactgatgtaatgctta

SEQ ID NO: 362375 - DNA, 20 bp, Artificial Sequence
  Description of Artificial Sequence: Synthetic oligonucleotide
  Target: LAMA2; (+) strand; PAM type: YTN; PAM sequence: CTG
atgtaatgcttataatggga

SEQ ID NO: 362376 - DNA, 20 bp, Artificial Sequence
  Description of Artificial Sequence: Synthetic oligonucleotide
  Target: LAMA2; (+) strand; PAM type: YTN; PAM sequence: CTT
ataatgggacctgtgtattt

SEQ ID NO: 362377 - DNA, 20 bp, Artificial Sequence
  Description of Artificial Sequence: Synthetic oligonucleotide
  Target: LAMA2; (+) strand; PAM type: YTN; PAM sequence: TTA
taatgggacctgtgtatttt

SEQ ID NO: 362378 - DNA, 20 bp, Artificial Sequence
  Description of Artificial Sequence: Synthetic oligonucleotide
  Target: LAMA2; (+) strand; PAM type: YTN; PAM sequence: CTG
tgtattttttgtctgtgctg

SEQ ID NO: 362379 - DNA, 20 bp, Artificial Sequence
  Description of Artificial Sequence: Synthetic oligonucleotide
  Target: LAMA2; (+) strand; PAM type: YTN; PAM sequence: TTT
tttgtctgtgctgtatctct

SEQ ID NO: 362380 - DNA, 20 bp, Artificial Sequence
  Description of Artificial Sequence: Synthetic oligonucleotide
  Target: LAMA2; (+) strand; PAM type: YTN; PAM sequence: TTT
ttgtctgtgctgtatctctt

SEQ ID NO: 362381 - DNA, 20 bp, Artificial Sequence
  Description of Artificial Sequence: Synthetic oligonucleotide
  Target: LAMA2; (+) strand; PAM type: YTN; PAM sequence: TTT
tgtctgtgctgtatctcttt

SEQ ID NO: 362382 - DNA, 20 bp, Artificial Sequence
  Description of Artificial Sequence: Synthetic oligonucleotide
  Target: LAMA2; (+) strand; PAM type: YTN; PAM sequence: TTT
gtctgtgctgtatctctttt

SEQ ID NO: 362383 - DNA, 20 bp, Artificial Sequence
  Description of Artificial Sequence: Synthetic oligonucleotide
  Target: LAMA2; (+) strand; PAM type: YTN; PAM sequence: TTG
tctgtgctgtatctcttttc

SEQ ID NO: 362384 - DNA, 20 bp, Artificial Sequence
  Description of Artificial Sequence: Synthetic oligonucleotide
  Target: LAMA2; (+) strand; PAM type: YTN; PAM sequence: CTG
tgctgtatctcttttcagct

SEQ ID NO: 362385 - DNA, 20 bp, Artificial Sequence
  Description of Artificial Sequence: Synthetic oligonucleotide
  Target: LAMA2; (+) strand; PAM type: YTN; PAM sequence: CTG
tatctcttttcagctgtgaa

SEQ ID NO: 362386 - DNA, 20 bp, Artificial Sequence
  Description of Artificial Sequence: Synthetic oligonucleotide
  Target: LAMA2; (+) strand; PAM type: YTN; PAM sequence: CTC
ttttcagctgtgaaaactat

SEQ ID NO: 362387 - DNA, 20 bp, Artificial Sequence
  Description of Artificial Sequence: Synthetic oligonucleotide
  Target: LAMA2; (+) strand; PAM type: YTN; PAM sequence: CTT
ttcagctgtgaaaactatta

SEQ ID NO: 362388 - DNA, 20 bp, Artificial Sequence
  Description of Artificial Sequence: Synthetic oligonucleotide
  Target: LAMA2; (+) strand; PAM type: YTN; PAM sequence: TTT
tcagctgtgaaaactattat

SEQ ID NO: 362389 - DNA, 20 bp, Artificial Sequence
  Description of Artificial Sequence: Synthetic oligonucleotide
  Target: LAMA2; (+) strand; PAM type: YTN; PAM sequence: TTT
cagctgtgaaaactattatt

SEQ ID NO: 362390 - DNA, 20 bp, Artificial Sequence
  Description of Artificial Sequence: Synthetic oligonucleotide
  Target: LAMA2; (+) strand; PAM type: YTN; PAM sequence: TTC
agctgtgaaaactattatta

SEQ ID NO: 362391 - DNA, 20 bp, Artificial Sequence
  Description of Artificial Sequence: Synthetic oligonucleotide
  Target: LAMA2; (+) strand; PAM type: YTN; PAM sequence: CTG
tgaaaactattattactaag

SEQ ID NO: 362392 - DNA, 20 bp, Artificial Sequence
  Description of Artificial Sequence: Synthetic oligonucleotide
  Target: LAMA2; (+) strand; PAM type: YTN; PAM sequence: CTA
ttattactaagtattaaaac

SEQ ID NO: 362393 - DNA, 20 bp, Artificial Sequence
  Description of Artificial Sequence: Synthetic oligonucleotide
  Target: LAMA2; (+) strand; PAM type: YTN; PAM sequence: TTA
ttactaagtattaaaacaaa

SEQ ID NO: 362394 - DNA, 20 bp, Artificial Sequence
  Description of Artificial Sequence: Synthetic oligonucleotide
  Target: LAMA2; (+) strand; PAM type: YTN; PAM sequence: TTA
ctaagtattaaaacaaactg

SEQ ID NO: 362395 - DNA, 20 bp, Artificial Sequence
  Description of Artificial Sequence: Synthetic oligonucleotide
  Target: LAMA2; (+) strand; PAM type: YTN; PAM sequence: CTA
agtattaaaacaaactgagg

SEQ ID NO: 362396 - DNA, 20 bp, Artificial Sequence
  Description of Artificial Sequence: Synthetic oligonucleotide
  Target: LAMA2; (+) strand; PAM type: YTN; PAM sequence: TTA
aaacaaactgagggcaaggc

SEQ ID NO: 362397 - DNA, 20 bp, Artificial Sequence
  Description of Artificial Sequence: Synthetic oligonucleotide
  Target: LAMA2; (+) strand; PAM type: YTN; PAM sequence: CTG
agggcaaggcacggtggctc

SEQ ID NO: 362398 - DNA, 20 bp, Artificial Sequence
  Description of Artificial Sequence: Synthetic oligonucleotide
  Target: LAMA2; (+) strand; PAM type: YTN; PAM sequence: CTC
atgcccgtattcccagcact

SEQ ID NO: 362399 - DNA, 20 bp, Artificial Sequence
  Description of Artificial Sequence: Synthetic oligonucleotide
  Target: LAMA2; (+) strand; PAM type: YTN; PAM sequence: TTC
ccagcactgtgggaggccga

SEQ ID NO: 362400 - DNA, 20 bp, Artificial Sequence
  Description of Artificial Sequence: Synthetic oligonucleotide
  Target: LAMA2; (+) strand; PAM type: YTN; PAM sequence: CTG
tgggaggccgaggagggtgg

SEQ ID NO: 362401 - DNA, 20 bp, Artificial Sequence
  Description of Artificial Sequence: Synthetic oligonucleotide
  Target: LAMA2; (+) strand; PAM type: YTN; PAM sequence: CTT
cagatcaggagttcaagacc

SEQ ID NO: 362402 - DNA, 20 bp, Artificial Sequence
  Description of Artificial Sequence: Synthetic oligonucleotide
  Target: LAMA2; (+) strand; PAM type: YTN; PAM sequence: TTC
agatcaggagttcaagacca

SEQ ID NO: 362403 - DNA, 20 bp, Artificial Sequence
  Description of Artificial Sequence: Synthetic oligonucleotide
  Target: LAMA2; (+) strand; PAM type: YTN; PAM sequence: TTC
aagaccagccttgccaacgc

SEQ ID NO: 362404 - DNA, 20 bp, Artificial Sequence
  Description of Artificial Sequence: Synthetic oligonucleotide
  Target: LAMA2; (+) strand; PAM type: YTN; PAM sequence: CTT
gccaacgcggtgaaaccctg

SEQ ID NO: 362405 - DNA, 20 bp, Artificial Sequence
  Description of Artificial Sequence: Synthetic oligonucleotide
  Target: LAMA2; (+) strand; PAM type: YTN; PAM sequence: TTG
ccaacgcggtgaaaccctgt

SEQ ID NO: 362406 - DNA, 20 bp, Artificial Sequence
  Description of Artificial Sequence: Synthetic oligonucleotide
  Target: LAMA2; (+) strand; PAM type: YTN; PAM sequence: CTG
tctctactaaaaatacaaaa

SEQ ID NO: 362407 - DNA, 20 bp, Artificial Sequence
  Description of Artificial Sequence: Synthetic oligonucleotide
  Target: LAMA2; (+) strand; PAM type: YTN; PAM sequence: CTC
tactaaaaatacaaaaatta

SEQ ID NO: 362408 - DNA, 20 bp, Artificial Sequence
  Description of Artificial Sequence: Synthetic oligonucleotide
  Target: LAMA2; (+) strand; PAM type: YTN; PAM sequence: CTA
ctaaaaatacaaaaattagc

SEQ ID NO: 362409 - DNA, 20 bp, Artificial Sequence
  Description of Artificial Sequence: Synthetic oligonucleotide
  Target: LAMA2; (+) strand; PAM type: YTN; PAM sequence: CTA
aaaatacaaaaattagccgg

SEQ ID NO: 362410 - DNA, 20 bp, Artificial Sequence
  Description of Artificial Sequence: Synthetic oligonucleotide
  Target: LAMA2; (+) strand; PAM type: YTN; PAM sequence: TTA
gccgggcatggtggcacatg

SEQ ID NO: 362411 - DNA, 20 bp, Artificial Sequence
  Description of Artificial Sequence: Synthetic oligonucleotide
  Target: LAMA2; (+) strand; PAM type: YTN; PAM sequence: CTG
taatcccagctactcgtgag

SEQ ID NO: 362412 - DNA, 20 bp, Artificial Sequence
  Description of Artificial Sequence: Synthetic oligonucleotide
  Target: LAMA2; (+) strand; PAM type: YTN; PAM sequence: CTA
ctcgtgaggctgaggcagga

SEQ ID NO: 362413 - DNA, 20 bp, Artificial Sequence
  Description of Artificial Sequence: Synthetic oligonucleotide
  Target: LAMA2; (+) strand; PAM type: YTN; PAM sequence: CTC
gtgaggctgaggcaggagaa

SEQ ID NO: 362414 - DNA, 20 bp, Artificial Sequence
  Description of Artificial Sequence: Synthetic oligonucleotide
  Target: LAMA2; (+) strand; PAM type: YTN; PAM sequence: CTG
aggcaggagaatcgcttgaa

SEQ ID NO: 362415 - DNA, 20 bp, Artificial Sequence
  Description of Artificial Sequence: Synthetic oligonucleotide
  Target: LAMA2; (+) strand; PAM type: YTN; PAM sequence: CTT
gaacctgggagacaagaggt

SEQ ID NO: 362416 - DNA, 20 bp, Artificial Sequence
  Description of Artificial Sequence: Synthetic oligonucleotide
  Target: LAMA2; (+) strand; PAM type: YTN; PAM sequence: TTG
aacctgggagacaagaggtt

SEQ ID NO: 362417 - DNA, 20 bp, Artificial Sequence
  Description of Artificial Sequence: Synthetic oligonucleotide
  Target: LAMA2; (+) strand; PAM type: YTN; PAM sequence: CTG
ggagacaagaggttgcagtg

SEQ ID NO: 362418 - DNA, 20 bp, Artificial Sequence
  Description of Artificial Sequence: Synthetic oligonucleotide
  Target: LAMA2; (+) strand; PAM type: YTN; PAM sequence: TTG
cagtgagccaagatcacacc

SEQ ID NO: 362419 - DNA, 20 bp, Artificial Sequence
  Description of Artificial Sequence: Synthetic oligonucleotide
  Target: LAMA2; (+) strand; PAM type: YTN; PAM sequence: CTG
cactccagcctgggagacag

SEQ ID NO: 362420 - DNA, 20 bp, Artificial Sequence
  Description of Artificial Sequence: Synthetic oligonucleotide
  Target: LAMA2; (+) strand; PAM type: YTN; PAM sequence: CTC
cagcctgggagacagagcaa

SEQ ID NO: 362421 - DNA, 20 bp, Artificial Sequence
  Description of Artificial Sequence: Synthetic oligonucleotide
  Target: LAMA2; (+) strand; PAM type: YTN; PAM sequence: CTG
ggagacagagcaagactcca

SEQ ID NO: 362422 - DNA, 20 bp, Artificial Sequence
  Description of Artificial Sequence: Synthetic oligonucleotide
  Target: LAMA2; (+) strand; PAM type: YTN; PAM sequence: CTC
catctcaaaaaaaaaataaa

SEQ ID NO: 362423 - DNA, 20 bp, Artificial Sequence
  Description of Artificial Sequence: Synthetic oligonucleotide
  Target: LAMA2; (+) strand; PAM type: YTN; PAM sequence: CTC
aaaaaaaaaataaaaattaa

SEQ ID NO: 362424 - DNA, 20 bp, Artificial Sequence
  Description of Artificial Sequence: Synthetic oligonucleotide
  Target: LAMA2; (+) strand; PAM type: YTN; PAM sequence: TTA
aaaaaaaagcctgaacctag

SEQ ID NO: 362425 - DNA, 20 bp, Artificial Sequence
  Description of Artificial Sequence: Synthetic oligonucleotide
  Target: LAMA2; (+) strand; PAM type: YTN; PAM sequence: CTG
aacctagaaacggacctaca

SEQ ID NO: 362426 - DNA, 20 bp, Artificial Sequence
  Description of Artificial Sequence: Synthetic oligonucleotide
  Target: LAMA2; (+) strand; PAM type: YTN; PAM sequence: CTA
gaaacggacctacaaatgtc

SEQ ID NO: 362427 - DNA, 20 bp, Artificial Sequence
  Description of Artificial Sequence: Synthetic oligonucleotide
  Target: LAMA2; (+) strand; PAM type: YTN; PAM sequence: CTA
caaatgtcaatacttagtaa

SEQ ID NO: 362428 - DNA, 20 bp, Artificial Sequence
  Description of Artificial Sequence: Synthetic oligonucleotide
  Target: LAMA2; (+) strand; PAM type: YTN; PAM sequence: CTT
agtaatatttttaattatta

SEQ ID NO: 362429 - DNA, 20 bp, Artificial Sequence
  Description of Artificial Sequence: Synthetic oligonucleotide
  Target: LAMA2; (+) strand; PAM type: YTN; PAM sequence: TTA
gtaatatttttaattattaa

SEQ ID NO: 362430 - DNA, 20 bp, Artificial Sequence
  Description of Artificial Sequence: Synthetic oligonucleotide
  Target: LAMA2; (+) strand; PAM type: YTN; PAM sequence: TTT
ttaattattaagccaagatt

SEQ ID NO: 362431 - DNA, 20 bp, Artificial Sequence
  Description of Artificial Sequence: Synthetic oligonucleotide
  Target: LAMA2; (+) strand; PAM type: YTN; PAM sequence: TTT
taattattaagccaagattt

SEQ ID NO: 362432 - DNA, 20 bp, Artificial Sequence
  Description of Artificial Sequence: Synthetic oligonucleotide
  Target: LAMA2; (+) strand; PAM type: YTN; PAM sequence: TTT
aattattaagccaagatttc

SEQ ID NO: 362433 - DNA, 20 bp, Artificial Sequence
  Description of Artificial Sequence: Synthetic oligonucleotide
  Target: LAMA2; (+) strand; PAM type: YTN; PAM sequence: TTA
attattaagccaagatttcc

SEQ ID NO: 362434 - DNA, 20 bp, Artificial Sequence
  Description of Artificial Sequence: Synthetic oligonucleotide
  Target: LAMA2; (+) strand; PAM type: YTN; PAM sequence: TTA
ttaagccaagatttccaaaa

SEQ ID NO: 362435 - DNA, 20 bp, Artificial Sequence
  Description of Artificial Sequence: Synthetic oligonucleotide
  Target: LAMA2; (+) strand; PAM type: YTN; PAM sequence: TTA
agccaagatttccaaaaata

SEQ ID NO: 362436 - DNA, 20 bp, Artificial Sequence
  Description of Artificial Sequence: Synthetic oligonucleotide
  Target: LAMA2; (+) strand; PAM type: YTN; PAM sequence: TTT
ccaaaaataagaaaagcata

SEQ ID NO: 362437 - DNA, 20 bp, Artificial Sequence
  Description of Artificial Sequence: Synthetic oligonucleotide
  Target: LAMA2; (+) strand; PAM type: YTN; PAM sequence: TTC
caaaaataagaaaagcataa

SEQ ID NO: 362438 - DNA, 20 bp, Artificial Sequence
  Description of Artificial Sequence: Synthetic oligonucleotide
  Target: LAMA2; (+) strand; PAM type: YTN; PAM sequence: TTG
attatactggtttctttttt

SEQ ID NO: 362439 - DNA, 20 bp, Artificial Sequence
  Description of Artificial Sequence: Synthetic oligonucleotide
  Target: LAMA2; (+) strand; PAM type: YTN; PAM sequence: TTA
tactggtttctttttttttt

SEQ ID NO: 362440 - DNA, 20 bp, Artificial Sequence
  Description of Artificial Sequence: Synthetic oligonucleotide
  Target: LAMA2; (+) strand; PAM type: YTN; PAM sequence: CTG
gtttcttttttttttttttt

SEQ ID NO: 362441 - DNA, 20 bp, Artificial Sequence
  Description of Artificial Sequence: Synthetic oligonucleotide
  Target: LAMA2; (+) strand; PAM type: YTN; PAM sequence: TTT
ctttttttttttttttcatt

SEQ ID NO: 362442 - DNA, 20 bp, Artificial Sequence
  Description of Artificial Sequence: Synthetic oligonucleotide
  Target: LAMA2; (+) strand; PAM type: YTN; PAM sequence: TTC
tttttttttttttttcattt

SEQ ID NO: 362443 - DNA, 20 bp, Artificial Sequence
  Description of Artificial Sequence: Synthetic oligonucleotide
  Target: LAMA2; (+) strand; PAM type: YTN; PAM sequence: CTT
tttttttttttttcatttgg

SEQ ID NO: 362444 - DNA, 20 bp, Artificial Sequence
  Description of Artificial Sequence: Synthetic oligonucleotide
  Target: LAMA2; (+) strand; PAM type: YTN; PAM sequence: TTT
ttttttttttttcatttgga

SEQ ID NO: 362445 - DNA, 20 bp, Artificial Sequence
  Description of Artificial Sequence: Synthetic oligonucleotide
  Target: LAMA2; (+) strand; PAM type: YTN; PAM sequence: TTT
tttttttttttcatttggaa

SEQ ID NO: 362446 - DNA, 20 bp, Artificial Sequence
  Description of Artificial Sequence: Synthetic oligonucleotide
  Target: LAMA2; (+) strand; PAM type: YTN; PAM sequence: TTT
ttttttttttcatttggaac

SEQ ID NO: 362447 - DNA, 20 bp, Artificial Sequence
  Description of Artificial Sequence: Synthetic oligonucleotide
  Target: LAMA2; (+) strand; PAM type: YTN; PAM sequence: TTT
tttttttttcatttggaaca

SEQ ID NO: 362448 - DNA, 20 bp, Artificial Sequence
  Description of Artificial Sequence: Synthetic oligonucleotide
  Target: LAMA2; (+) strand; PAM type: YTN; PAM sequence: TTT
ttttttttcatttggaacat

SEQ ID NO: 362449 - DNA, 20 bp, Artificial Sequence
  Description of Artificial Sequence: Synthetic oligonucleotide
  Target: LAMA2; (+) strand; PAM type: YTN; PAM sequence: TTT
tttttttcatttggaacata

SEQ ID NO: 362450 - DNA, 20 bp, Artificial Sequence
  Description of Artificial Sequence: Synthetic oligonucleotide
  Target: LAMA2; (+) strand; PAM type: YTN; PAM sequence: TTT
ttttttcatttggaacatat

SEQ ID NO: 362451 - DNA, 20 bp, Artificial Sequence
  Description of Artificial Sequence: Synthetic oligonucleotide
  Target: LAMA2; (+) strand; PAM type: YTN; PAM sequence: TTT
tttttcatttggaacatata

SEQ ID NO: 362452 - DNA, 20 bp, Artificial Sequence
  Description of Artificial Sequence: Synthetic oligonucleotide
  Target: LAMA2; (+) strand; PAM type: YTN; PAM sequence: TTT
ttttcatttggaacatataa

SEQ ID NO: 362453 - DNA, 20 bp, Artificial Sequence
  Description of Artificial Sequence: Synthetic oligonucleotide
  Target: LAMA2; (+) strand; PAM type: YTN; PAM sequence: TTT
tttcatttggaacatataat

SEQ ID NO: 362454 - DNA, 20 bp, Artificial Sequence
  Description of Artificial Sequence: Synthetic oligonucleotide
  Target: LAMA2; (+) strand; PAM type: YTN; PAM sequence: TTT
ttcatttggaacatataatt

SEQ ID NO: 362455 - DNA, 20 bp, Artificial Sequence
  Description of Artificial Sequence: Synthetic oligonucleotide
  Target: LAMA2; (+) strand; PAM type: YTN; PAM sequence: TTT
tcatttggaacatataattg

SEQ ID NO: 362456 - DNA, 20 bp, Artificial Sequence
  Description of Artificial Sequence: Synthetic oligonucleotide
  Target: LAMA2; (+) strand; PAM type: YTN; PAM sequence: TTT
catttggaacatataattga

SEQ ID NO: 362457 - DNA, 20 bp, Artificial Sequence
  Description of Artificial Sequence: Synthetic oligonucleotide
  Target: LAMA2; (+) strand; PAM type: YTN; PAM sequence: TTC
atttggaacatataattgag

SEQ ID NO: 362458 - DNA, 20 bp, Artificial Sequence
  Description of Artificial Sequence: Synthetic oligonucleotide
  Target: LAMA2; (+) strand; PAM type: YTN; PAM sequence: TTT
ggaacatataattgagaaag

SEQ ID NO: 362459 - DNA, 20 bp, Artificial Sequence
  Description of Artificial Sequence: Synthetic oligonucleotide
  Target: LAMA2; (+) strand; PAM type: YTN; PAM sequence: TTG
gaacatataattgagaaagc

SEQ ID NO: 362460 - DNA, 20 bp, Artificial Sequence
  Description of Artificial Sequence: Synthetic oligonucleotide
  Target: LAMA2; (+) strand; PAM type: YTN; PAM sequence: TTG
agaaagctttagtatcaagc

SEQ ID NO: 362461 - DNA, 20 bp, Artificial Sequence
  Description of Artificial Sequence: Synthetic oligonucleotide
  Target: LAMA2; (+) strand; PAM type: YTN; PAM sequence: CTT
tagtatcaagcatatgtaaa

SEQ ID NO: 362462 - DNA, 20 bp, Artificial Sequence
  Description of Artificial Sequence: Synthetic oligonucleotide
  Target: LAMA2; (+) strand; PAM type: YTN; PAM sequence: TTT
agtatcaagcatatgtaaag

SEQ ID NO: 362463 - DNA, 20 bp, Artificial Sequence
  Description of Artificial Sequence: Synthetic oligonucleotide
  Target: LAMA2; (+) strand; PAM type: YTN; PAM sequence: TTA
gtatcaagcatatgtaaaga

SEQ ID NO: 362464 - DNA, 20 bp, Artificial Sequence
  Description of Artificial Sequence: Synthetic oligonucleotide
  Target: LAMA2; (+) strand; PAM type: YTN; PAM sequence: CTC
ataaaataataaggaaaggc

SEQ ID NO: 362465 - DNA, 20 bp, Artificial Sequence
  Description of Artificial Sequence: Synthetic oligonucleotide
  Target: LAMA2; (+) strand; PAM type: YTN; PAM sequence: CTG
cctgatagaccaaaaaaaaa

SEQ ID NO: 362466 - DNA, 20 bp, Artificial Sequence
  Description of Artificial Sequence: Synthetic oligonucleotide
  Target: LAMA2; (+) strand; PAM type: YTN; PAM sequence: CTG
atagaccaaaaaaaaaaaaa

SEQ ID NO: 362467 - DNA, 20 bp, Artificial Sequence
  Description of Artificial Sequence: Synthetic oligonucleotide
  Target: LAMA2; (+) strand; PAM type: YTN; PAM sequence: TTT
tacagaggagaaacagagaa

SEQ ID NO: 362468 - DNA, 20 bp, Artificial Sequence
  Description of Artificial Sequence: Synthetic oligonucleotide
  Target: LAMA2; (+) strand; PAM type: YTN; PAM sequence: TTT
acagaggagaaacagagaaa

SEQ ID NO: 362469 - DNA, 20 bp, Artificial Sequence
  Description of Artificial Sequence: Synthetic oligonucleotide
  Target: LAMA2; (+) strand; PAM type: YTN; PAM sequence: TTA
cagaggagaaacagagaaac

SEQ ID NO: 362470 - DNA, 20 bp, Artificial Sequence
  Description of Artificial Sequence: Synthetic oligonucleotide
  Target: LAMA2; (+) strand; PAM type: YTN; PAM sequence: CTA
aaaacatatggaaggatctt

SEQ ID NO: 362471 - DNA, 20 bp, Artificial Sequence
  Description of Artificial Sequence: Synthetic oligonucleotide
  Target: LAMA2; (+) strand; PAM type: YTN; PAM sequence: CTT
gagtcttatagcaatattga

SEQ ID NO: 362472 - DNA, 20 bp, Artificial Sequence
  Description of Artificial Sequence: Synthetic oligonucleotide
  Target: LAMA2; (+) strand; PAM type: YTN; PAM sequence: TTG
agtcttatagcaatattgat

SEQ ID NO: 362473 - DNA, 20 bp, Artificial Sequence
  Description of Artificial Sequence: Synthetic oligonucleotide
  Target: LAMA2; (+) strand; PAM type: YTN; PAM sequence: CTT
atagcaatattgatgagcaa

SEQ ID NO: 362474 - DNA, 20 bp, Artificial Sequence
  Description of Artificial Sequence: Synthetic oligonucleotide
  Target: LAMA2; (+) strand; PAM type: YTN; PAM sequence: TTA
tagcaatattgatgagcaaa

SEQ ID NO: 362475 - DNA, 20 bp, Artificial Sequence
  Description of Artificial Sequence: Synthetic oligonucleotide
  Target: LAMA2; (+) strand; PAM type: YTN; PAM sequence: TTG
atgagcaaatcaatatgtag

SEQ ID NO: 362476 - DNA, 20 bp, Artificial Sequence
  Description of Artificial Sequence: Synthetic oligonucleotide
  Target: LAMA2; (+) strand; PAM type: YTN; PAM sequence: TTA
tcaaagagataatggatatc

SEQ ID NO: 362477 - DNA, 20 bp, Artificial Sequence
  Description of Artificial Sequence: Synthetic oligonucleotide
  Target: LAMA2; (+) strand; PAM type: YTN; PAM sequence: CTC
tttatactcaatttattggc

SEQ ID NO: 362478 - DNA, 20 bp, Artificial Sequence
  Description of Artificial Sequence: Synthetic oligonucleotide
  Target: LAMA2; (+) strand; PAM type: YTN; PAM sequence: CTT
tatactcaatttattggcaa

SEQ ID NO: 362479 - DNA, 20 bp, Artificial Sequence
  Description of Artificial Sequence: Synthetic oligonucleotide
  Target: LAMA2; (+) strand; PAM type: YTN; PAM sequence: TTT
atactcaatttattggcaat

SEQ ID NO: 362480 - DNA, 20 bp, Artificial Sequence
  Description of Artificial Sequence: Synthetic oligonucleotide
  Target: LAMA2; (+) strand; PAM type: YTN; PAM sequence: TTA
tactcaatttattggcaata

SEQ ID NO: 362481 - DNA, 20 bp, Artificial Sequence
  Description of Artificial Sequence: Synthetic oligonucleotide
  Target: LAMA2; (+) strand; PAM type: YTN; PAM sequence: CTC
aatttattggcaataattaa

SEQ ID NO: 362482 - DNA, 20 bp, Artificial Sequence
  Description of Artificial Sequence: Synthetic oligonucleotide
  Target: LAMA2; (+) strand; PAM type: YTN; PAM sequence: TTT
attggcaataattaagaatt

SEQ ID NO: 362483 - DNA, 20 bp, Artificial Sequence
  Description of Artificial Sequence: Synthetic oligonucleotide
  Target: LAMA2; (+) strand; PAM type: YTN; PAM sequence: TTA
ttggcaataattaagaattt

SEQ ID NO: 362484 - DNA, 20 bp, Artificial Sequence
  Description of Artificial Sequence: Synthetic oligonucleotide
  Target: LAMA2; (+) strand; PAM type: YTN; PAM sequence: TTG
gcaataattaagaatttaaa

SEQ ID NO: 362485 - DNA, 20 bp, Artificial Sequence
  Description of Artificial Sequence: Synthetic oligonucleotide
  Target: LAMA2; (+) strand; PAM type: YTN; PAM sequence: TTA
agaatttaaactacagaaat

SEQ ID NO: 362486 - DNA, 20 bp, Artificial Sequence
  Description of Artificial Sequence: Synthetic oligonucleotide
  Target: LAMA2; (+) strand; PAM type: YTN; PAM sequence: TTT
aaactacagaaatattgaaa

SEQ ID NO: 362487 - DNA, 20 bp, Artificial Sequence
  Description of Artificial Sequence: Synthetic oligonucleotide
  Target: LAMA2; (+) strand; PAM type: YTN; PAM sequence: TTA
aactacagaaatattgaaaa

SEQ ID NO: 362488 - DNA, 20 bp, Artificial Sequence
  Description of Artificial Sequence: Synthetic oligonucleotide
  Target: LAMA2; (+) strand; PAM type: YTN; PAM sequence: CTA
cagaaatattgaaaagtatt

SEQ ID NO: 362489 - DNA, 20 bp, Artificial Sequence
  Description of Artificial Sequence: Synthetic oligonucleotide
  Target: LAMA2; (+) strand; PAM type: YTN; PAM sequence: TTG
aaaagtatttgaatcaacca

SEQ ID NO: 362490 - DNA, 20 bp, Artificial Sequence
  Description of Artificial Sequence: Synthetic oligonucleotide
  Target: LAMA2; (+) strand; PAM type: YTN; PAM sequence: TTT
gaatcaaccagatttcttat

SEQ ID NO: 362491 - DNA, 20 bp, Artificial Sequence
  Description of Artificial Sequence: Synthetic oligonucleotide
  Target: LAMA2; (+) strand; PAM type: YTN; PAM sequence: TTG
aatcaaccagatttcttata

SEQ ID NO: 362492 - DNA, 20 bp, Artificial Sequence
  Description of Artificial Sequence: Synthetic oligonucleotide
  Target: LAMA2; (+) strand; PAM type: YTN; PAM sequence: TTT
cttatatagtgctaatataa

SEQ ID NO: 362493 - DNA, 20 bp, Artificial Sequence
  Description of Artificial Sequence: Synthetic oligonucleotide
  Target: LAMA2; (+) strand; PAM type: YTN; PAM sequence: TTC
ttatatagtgctaatataaa

SEQ ID NO: 362494 - DNA, 20 bp, Artificial Sequence
  Description of Artificial Sequence: Synthetic oligonucleotide
  Target: LAMA2; (+) strand; PAM type: YTN; PAM sequence: CTT
atatagtgctaatataaatt

SEQ ID NO: 362495 - DNA, 20 bp, Artificial Sequence
  Description of Artificial Sequence: Synthetic oligonucleotide
  Target: LAMA2; (+) strand; PAM type: YTN; PAM sequence: TTA
tatagtgctaatataaattg

SEQ ID NO: 362496 - DNA, 20 bp, Artificial Sequence
  Description of Artificial Sequence: Synthetic oligonucleotide
  Target: LAMA2; (+) strand; PAM type: YTN; PAM sequence: CTA
atataaattggttaaccact

SEQ ID NO: 362497 - DNA, 20 bp, Artificial Sequence
  Description of Artificial Sequence: Synthetic oligonucleotide
  Target: LAMA2; (+) strand; PAM type: YTN; PAM sequence: TTG
gttaaccacttgacattatc

SEQ ID NO: 362498 - DNA, 20 bp, Artificial Sequence
  Description of Artificial Sequence: Synthetic oligonucleotide
  Target: LAMA2; (+) strand; PAM type: YTN; PAM sequence: TTA
accacttgacattatctttt

SEQ ID NO: 362499 - DNA, 20 bp, Artificial Sequence
  Description of Artificial Sequence: Synthetic oligonucleotide
  Target: LAMA2; (+) strand; PAM type: YTN; PAM sequence: CTT
gacattatcttttaaagttt

SEQ ID NO: 362500 - DNA, 20 bp, Artificial Sequence
  Description of Artificial Sequence: Synthetic oligonucleotide
  Target: LAMA2; (+) strand; PAM type: YTN; PAM sequence: TTG
acattatcttttaaagttta

SEQ ID NO: 362501 - DNA, 20 bp, Artificial Sequence
  Description of Artificial Sequence: Synthetic oligonucleotide
  Target: LAMA2; (+) strand; PAM type: YTN; PAM sequence: TTA
tcttttaaagtttaatattc

SEQ ID NO: 362502 - DNA, 20 bp, Artificial Sequence
  Description of Artificial Sequence: Synthetic oligonucleotide
  Target: LAMA2; (+) strand; PAM type: YTN; PAM sequence: CTT
ttaaagtttaatattcacac

SEQ ID NO: 362503 - DNA, 20 bp, Artificial Sequence
  Description of Artificial Sequence: Synthetic oligonucleotide
  Target: LAMA2; (+) strand; PAM type: YTN; PAM sequence: TTT
taaagtttaatattcacaca

SEQ ID NO: 362504 - DNA, 20 bp, Artificial Sequence
  Description of Artificial Sequence: Synthetic oligonucleotide
  Target: LAMA2; (+) strand; PAM type: YTN; PAM sequence: TTT
aaagtttaatattcacacac

SEQ ID NO: 362505 - DNA, 20 bp, Artificial Sequence
  Description of Artificial Sequence: Synthetic oligonucleotide
  Target: LAMA2; (+) strand; PAM type: YTN; PAM sequence: TTA
aagtttaatattcacacacc

SEQ ID NO: 362506 - DNA, 20 bp, Artificial Sequence
  Description of Artificial Sequence: Synthetic oligonucleotide
  Target: LAMA2; (+) strand; PAM type: YTN; PAM sequence: TTT
aatattcacacaccctatga

SEQ ID NO: 362507 - DNA, 20 bp, Artificial Sequence
  Description of Artificial Sequence: Synthetic oligonucleotide
  Target: LAMA2; (+) strand; PAM type: YTN; PAM sequence: TTA
atattcacacaccctatgac

SEQ ID NO: 362508 - DNA, 20 bp, Artificial Sequence
  Description of Artificial Sequence: Synthetic oligonucleotide
  Target: LAMA2; (+) strand; PAM type: YTN; PAM sequence: TTC
acacaccctatgacccaaca

SEQ ID NO: 362509 - DNA, 20 bp, Artificial Sequence
  Description of Artificial Sequence: Synthetic oligonucleotide
  Target: LAMA2; (+) strand; PAM type: YTN; PAM sequence: CTA
tgacccaacaattttctaga

SEQ ID NO: 362510 - DNA, 20 bp, Artificial Sequence
  Description of Artificial Sequence: Synthetic oligonucleotide
  Target: LAMA2; (+) strand; PAM type: YTN; PAM sequence: TTT
tctagatgtatatactaaag

SEQ ID NO: 362511 - DNA, 20 bp, Artificial Sequence
  Description of Artificial Sequence: Synthetic oligonucleotide
  Target: LAMA2; (+) strand; PAM type: YTN; PAM sequence: TTT
ctagatgtatatactaaagg

SEQ ID NO: 362512 - DNA, 20 bp, Artificial Sequence
  Description of Artificial Sequence: Synthetic oligonucleotide
  Target: LAMA2; (+) strand; PAM type: YTN; PAM sequence: TTC
tagatgtatatactaaagga

SEQ ID NO: 362513 - DNA, 20 bp, Artificial Sequence
  Description of Artificial Sequence: Synthetic oligonucleotide
  Target: LAMA2; (+) strand; PAM type: YTN; PAM sequence: CTA
gatgtatatactaaaggaaa

SEQ ID NO: 362514 - DNA, 20 bp, Artificial Sequence
  Description of Artificial Sequence: Synthetic oligonucleotide
  Target: LAMA2; (+) strand; PAM type: YTN; PAM sequence: CTA
aaggaaattattacatttgt

SEQ ID NO: 362515 - DNA, 20 bp, Artificial Sequence
  Description of Artificial Sequence: Synthetic oligonucleotide
  Target: LAMA2; (+) strand; PAM type: YTN; PAM sequence: TTA
ttacatttgtgcacccagat

SEQ ID NO: 362516 - DNA, 20 bp, Artificial Sequence
  Description of Artificial Sequence: Synthetic oligonucleotide
  Target: LAMA2; (+) strand; PAM type: YTN; PAM sequence: TTA
catttgtgcacccagataaa

SEQ ID NO: 362517 - DNA, 20 bp, Artificial Sequence
  Description of Artificial Sequence: Synthetic oligonucleotide
  Target: LAMA2; (+) strand; PAM type: YTN; PAM sequence: TTT
gtgcacccagataaacacat

SEQ ID NO: 362518 - DNA, 20 bp, Artificial Sequence
  Description of Artificial Sequence: Synthetic oligonucleotide
  Target: LAMA2; (+) strand; PAM type: YTN; PAM sequence: TTG
tgcacccagataaacacata

SEQ ID NO: 362519 - DNA, 20 bp, Artificial Sequence
  Description of Artificial Sequence: Synthetic oligonucleotide
  Target: LAMA2; (+) strand; PAM type: YTN; PAM sequence: TTC
ataaaagtactgtttatatt

SEQ ID NO: 362520 - DNA, 20 bp, Artificial Sequence
  Description of Artificial Sequence: Synthetic oligonucleotide
  Target: LAMA2; (+) strand; PAM type: YTN; PAM sequence: CTG
tttatattaagaagagccga

SEQ ID NO: 362521 - DNA, 20 bp, Artificial Sequence
  Description of Artificial Sequence: Synthetic oligonucleotide
  Target: LAMA2; (+) strand; PAM type: YTN; PAM sequence: TTT
atattaagaagagccgacag

SEQ ID NO: 362522 - DNA, 20 bp, Artificial Sequence
  Description of Artificial Sequence: Synthetic oligonucleotide
  Target: LAMA2; (+) strand; PAM type: YTN; PAM sequence: TTA
tattaagaagagccgacagc

SEQ ID NO: 362523 - DNA, 20 bp, Artificial Sequence
  Description of Artificial Sequence: Synthetic oligonucleotide
  Target: LAMA2; (+) strand; PAM type: YTN; PAM sequence: TTA
agaagagccgacagcagatg

SEQ ID NO: 362524 - DNA, 20 bp, Artificial Sequence
  Description of Artificial Sequence: Synthetic oligonucleotide
  Target: LAMA2; (+) strand; PAM type: YTN; PAM sequence: CTA
tccagaggtaaacaaattgt

SEQ ID NO: 362525 - DNA, 20 bp, Artificial Sequence
  Description of Artificial Sequence: Synthetic oligonucleotide
  Target: LAMA2; (+) strand; PAM type: YTN; PAM sequence: TTG
taatatatctggaataactt

SEQ ID NO: 362526 - DNA, 20 bp, Artificial Sequence
  Description of Artificial Sequence: Synthetic oligonucleotide
  Target: LAMA2; (+) strand; PAM type: YTN; PAM sequence: CTG
gaataacttgttgcaatgaa

SEQ ID NO: 362527 - DNA, 20 bp, Artificial Sequence
  Description of Artificial Sequence: Synthetic oligonucleotide
  Target: LAMA2; (+) strand; PAM type: YTN; PAM sequence: CTT
gttgcaatgaaaataaatga

SEQ ID NO: 362528 - DNA, 20 bp, Artificial Sequence
  Description of Artificial Sequence: Synthetic oligonucleotide
  Target: LAMA2; (+) strand; PAM type: YTN; PAM sequence: TTG
ttgcaatgaaaataaatgaa

SEQ ID NO: 362529 - DNA, 20 bp, Artificial Sequence
  Description of Artificial Sequence: Synthetic oligonucleotide
  Target: LAMA2; (+) strand; PAM type: YTN; PAM sequence: TTG
caatgaaaataaatgaacta

SEQ ID NO: 362530 - DNA, 20 bp, Artificial Sequence
  Description of Artificial Sequence: Synthetic oligonucleotide
  Target: LAMA2; (+) strand; PAM type: YTN; PAM sequence: CTA
caggtatacgtgataatatg

SEQ ID NO: 362531 - DNA, 20 bp, Artificial Sequence
  Description of Artificial Sequence: Synthetic oligonucleotide
  Target: LAMA2; (+) strand; PAM type: YTN; PAM sequence: CTT
agtgataggttctcagatga

SEQ ID NO: 362532 - DNA, 20 bp, Artificial Sequence
  Description of Artificial Sequence: Synthetic oligonucleotide
  Target: LAMA2; (+) strand; PAM type: YTN; PAM sequence: TTA
gtgataggttctcagatgat

SEQ ID NO: 362533 - DNA, 20 bp, Artificial Sequence
  Description of Artificial Sequence: Synthetic oligonucleotide
  Target: LAMA2; (+) strand; PAM type: YTN; PAM sequence: TTC
tcagatgatcacagcatgat

SEQ ID NO: 362534 - DNA, 20 bp, Artificial Sequence
  Description of Artificial Sequence: Synthetic oligonucleotide
  Target: LAMA2; (+) strand; PAM type: YTN; PAM sequence: CTC
agatgatcacagcatgatgg

SEQ ID NO: 362535 - DNA, 20 bp, Artificial Sequence
  Description of Artificial Sequence: Synthetic oligonucleotide
  Target: LAMA2; (+) strand; PAM type: YTN; PAM sequence: CTT
tataagcaataacatttttg

SEQ ID NO: 362536 - DNA, 20 bp, Artificial Sequence
  Description of Artificial Sequence: Synthetic oligonucleotide
  Target: LAMA2; (+) strand; PAM type: YTN; PAM sequence: TTT
ataagcaataacatttttga

SEQ ID NO: 362537 - DNA, 20 bp, Artificial Sequence
  Description of Artificial Sequence: Synthetic oligonucleotide
  Target: LAMA2; (+) strand; PAM type: YTN; PAM sequence: TTA
taagcaataacatttttgag

SEQ ID NO: 362538 - DNA, 20 bp, Artificial Sequence
  Description of Artificial Sequence: Synthetic oligonucleotide
  Target: LAMA2; (+) strand; PAM type: YTN; PAM sequence: TTT
ttgagcaaacatatatttgc

SEQ ID NO: 362539 - DNA, 20 bp, Artificial Sequence
  Description of Artificial Sequence: Synthetic oligonucleotide
  Target: LAMA2; (+) strand; PAM type: YTN; PAM sequence: TTT
tgagcaaacatatatttgct

SEQ ID NO: 362540 - DNA, 20 bp, Artificial Sequence
  Description of Artificial Sequence: Synthetic oligonucleotide
  Target: LAMA2; (+) strand; PAM type: YTN; PAM sequence: TTT
gagcaaacatatatttgctg

SEQ ID NO: 362541 - DNA, 20 bp, Artificial Sequence
  Description of Artificial Sequence: Synthetic oligonucleotide
  Target: LAMA2; (+) strand; PAM type: YTN; PAM sequence: TTG
agcaaacatatatttgctga

SEQ ID NO: 362542 - DNA, 20 bp, Artificial Sequence
  Description of Artificial Sequence: Synthetic oligonucleotide
  Target: LAMA2; (+) strand; PAM type: YTN; PAM sequence: TTT
gctgaaattatctttttaaa

SEQ ID NO: 362543 - DNA, 20 bp, Artificial Sequence
  Description of Artificial Sequence: Synthetic oligonucleotide
  Target: LAMA2; (+) strand; PAM type: YTN; PAM sequence: TTG
ctgaaattatctttttaaaa

SEQ ID NO: 362544 - DNA, 20 bp, Artificial Sequence
  Description of Artificial Sequence: Synthetic oligonucleotide
  Target: LAMA2; (+) strand; PAM type: YTN; PAM sequence: CTG
aaattatctttttaaaaatg

SEQ ID NO: 362545 - DNA, 20 bp, Artificial Sequence
  Description of Artificial Sequence: Synthetic oligonucleotide
  Target: LAMA2; (+) strand; PAM type: YTN; PAM sequence: TTA
tctttttaaaaatgtaagaa

SEQ ID NO: 362546 - DNA, 20 bp, Artificial Sequence
  Description of Artificial Sequence: Synthetic oligonucleotide
  Target: LAMA2; (+) strand; PAM type: YTN; PAM sequence: CTT
tttaaaaatgtaagaaaata

SEQ ID NO: 362547 - DNA, 20 bp, Artificial Sequence
  Description of Artificial Sequence: Synthetic oligonucleotide
  Target: LAMA2; (+) strand; PAM type: YTN; PAM sequence: TTT
ttaaaaatgtaagaaaataa

SEQ ID NO: 362548 - DNA, 20 bp, Artificial Sequence
  Description of Artificial Sequence: Synthetic oligonucleotide
  Target: LAMA2; (+) strand; PAM type: YTN; PAM sequence: TTT
taaaaatgtaagaaaataat

SEQ ID NO: 362549 - DNA, 20 bp, Artificial Sequence
  Description of Artificial Sequence: Synthetic oligonucleotide
  Target: LAMA2; (+) strand; PAM type: YTN; PAM sequence: TTT
aaaaatgtaagaaaataata

SEQ ID NO: 362550 - DNA, 20 bp, Artificial Sequence
  Description of Artificial Sequence: Synthetic oligonucleotide
  Target: LAMA2; (+) strand; PAM type: YTN; PAM sequence: TTA
aaaatgtaagaaaataatat

SEQ ID NO: 362551 - DNA, 20 bp, Artificial Sequence
  Description of Artificial Sequence: Synthetic oligonucleotide
  Target: LAMA2; (+) strand; PAM type: YTN; PAM sequence: TTC
agcatgtcagggttatgctg

SEQ ID NO: 362552 - DNA, 20 bp, Artificial Sequence
  Description of Artificial Sequence: Synthetic oligonucleotide
  Target: LAMA2; (+) strand; PAM type: YTN; PAM sequence: TTA
tgctgcagggtaacggggtg

SEQ ID NO: 362553 - DNA, 20 bp, Artificial Sequence
  Description of Artificial Sequence: Synthetic oligonucleotide
  Target: LAMA2; (+) strand; PAM type: YTN; PAM sequence: CTG
cagggtaacggggtggtgag

SEQ ID NO: 362554 - DNA, 20 bp, Artificial Sequence
  Description of Artificial Sequence: Synthetic oligonucleotide
  Target: LAMA2; (+) strand; PAM type: YTN; PAM sequence: TTG
tatagatagttgcaaacatt

SEQ ID NO: 362555 - DNA, 20 bp, Artificial Sequence
  Description of Artificial Sequence: Synthetic oligonucleotide
  Target: LAMA2; (+) strand; PAM type: YTN; PAM sequence: TTG
caaacattgctcatgttcaa

SEQ ID NO: 362556 - DNA, 20 bp, Artificial Sequence
  Description of Artificial Sequence: Synthetic oligonucleotide
  Target: LAMA2; (+) strand; PAM type: YTN; PAM sequence: TTG
ctcatgttcaacttcttggg

SEQ ID NO: 362557 - DNA, 20 bp, Artificial Sequence
  Description of Artificial Sequence: Synthetic oligonucleotide
  Target: LAMA2; (+) strand; PAM type: YTN; PAM sequence: CTC
atgttcaacttcttgggttg

SEQ ID NO: 362558 - DNA, 20 bp, Artificial Sequence
  Description of Artificial Sequence: Synthetic oligonucleotide
  Target: LAMA2; (+) strand; PAM type: YTN; PAM sequence: TTC
aacttcttgggttgggtagt

SEQ ID NO: 362559 - DNA, 20 bp, Artificial Sequence
  Description of Artificial Sequence: Synthetic oligonucleotide
  Target: LAMA2; (+) strand; PAM type: YTN; PAM sequence: CTT
cttgggttgggtagttggct

SEQ ID NO: 362560 - DNA, 20 bp, Artificial Sequence
  Description of Artificial Sequence: Synthetic oligonucleotide
  Target: LAMA2; (+) strand; PAM type: YTN; PAM sequence: TTC
ttgggttgggtagttggctt

SEQ ID NO: 362561 - DNA, 20 bp, Artificial Sequence
  Description of Artificial Sequence: Synthetic oligonucleotide
  Target: LAMA2; (+) strand; PAM type: YTN; PAM sequence: CTT
gggttgggtagttggctttt

SEQ ID NO: 362562 - DNA, 20 bp, Artificial Sequence
  Description of Artificial Sequence: Synthetic oligonucleotide
  Target: LAMA2; (+) strand; PAM type: YTN; PAM sequence: TTG
ggttgggtagttggctttta

SEQ ID NO: 362563 - DNA, 20 bp, Artificial Sequence
  Description of Artificial Sequence: Synthetic oligonucleotide
  Target: LAMA2; (+) strand; PAM type: YTN; PAM sequence: TTG
ggtagttggcttttatcact

SEQ ID NO: 362564 - DNA, 20 bp, Artificial Sequence
  Description of Artificial Sequence: Synthetic oligonucleotide
  Target: LAMA2; (+) strand; PAM type: YTN; PAM sequence: TTG
gcttttatcactaacaaagt

SEQ ID NO: 362565 - DNA, 20 bp, Artificial Sequence
  Description of Artificial Sequence: Synthetic oligonucleotide
  Target: LAMA2; (+) strand; PAM type: YTN; PAM sequence: CTT
ttatcactaacaaagtaata

SEQ ID NO: 362566 - DNA, 20 bp, Artificial Sequence
  Description of Artificial Sequence: Synthetic oligonucleotide
  Target: LAMA2; (+) strand; PAM type: YTN; PAM sequence: TTT
tatcactaacaaagtaataa

SEQ ID NO: 362567 - DNA, 20 bp, Artificial Sequence
  Description of Artificial Sequence: Synthetic oligonucleotide
  Target: LAMA2; (+) strand; PAM type: YTN; PAM sequence: TTT
atcactaacaaagtaataag

SEQ ID NO: 362568 - DNA, 20 bp, Artificial Sequence
  Description of Artificial Sequence: Synthetic oligonucleotide
  Target: LAMA2; (+) strand; PAM type: YTN; PAM sequence: TTA
tcactaacaaagtaataagc

SEQ ID NO: 362569 - DNA, 20 bp, Artificial Sequence
  Description of Artificial Sequence: Synthetic oligonucleotide
  Target: LAMA2; (+) strand; PAM type: YTN; PAM sequence: CTA
acaaagtaataagccaggga

SEQ ID NO: 362570 - DNA, 20 bp, Artificial Sequence
  Description of Artificial Sequence: Synthetic oligonucleotide
  Target: LAMA2; (+) strand; PAM type: YTN; PAM sequence: TTA
gaccaatgatgatagtatat

SEQ ID NO: 362571 - DNA, 20 bp, Artificial Sequence
  Description of Artificial Sequence: Synthetic oligonucleotide
  Target: LAMA2; (+) strand; PAM type: YTN; PAM sequence: CTT
ctcatctttaaaatggaatt

SEQ ID NO: 362572 - DNA, 20 bp, Artificial Sequence
  Description of Artificial Sequence: Synthetic oligonucleotide
  Target: LAMA2; (+) strand; PAM type: YTN; PAM sequence: TTC
tcatctttaaaatggaatta

SEQ ID NO: 362573 - DNA, 20 bp, Artificial Sequence
  Description of Artificial Sequence: Synthetic oligonucleotide
  Target: LAMA2; (+) strand; PAM type: YTN; PAM sequence: CTC
atctttaaaatggaattagt

SEQ ID NO: 362574 - DNA, 20 bp, Artificial Sequence
  Description of Artificial Sequence: Synthetic oligonucleotide
  Target: LAMA2; (+) strand; PAM type: YTN; PAM sequence: CTT
taaaatggaattagtaggag

SEQ ID NO: 362575 - DNA, 20 bp, Artificial Sequence
  Description of Artificial Sequence: Synthetic oligonucleotide
  Target: LAMA2; (+) strand; PAM type: YTN; PAM sequence: TTT
aaaatggaattagtaggagt

SEQ ID NO: 362576 - DNA, 20 bp, Artificial Sequence
  Description of Artificial Sequence: Synthetic oligonucleotide
  Target: LAMA2; (+) strand; PAM type: YTN; PAM sequence: TTA
aaatggaattagtaggagta

SEQ ID NO: 362577 - DNA, 20 bp, Artificial Sequence
  Description of Artificial Sequence: Synthetic oligonucleotide
  Target: LAMA2; (+) strand; PAM type: YTN; PAM sequence: TTA
gtaggagtacttagcttcct

SEQ ID NO: 362578 - DNA, 20 bp, Artificial Sequence
  Description of Artificial Sequence: Synthetic oligonucleotide
  Target: LAMA2; (+) strand; PAM type: YTN; PAM sequence: CTT
agcttcctagggttgttatg

SEQ ID NO: 362579 - DNA, 20 bp, Artificial Sequence
  Description of Artificial Sequence: Synthetic oligonucleotide
  Target: LAMA2; (+) strand; PAM type: YTN; PAM sequence: TTA
gcttcctagggttgttatga

SEQ ID NO: 362580 - DNA, 20 bp, Artificial Sequence
  Description of Artificial Sequence: Synthetic oligonucleotide
  Target: LAMA2; (+) strand; PAM type: YTN; PAM sequence: CTT
cctagggttgttatgaaggt

SEQ ID NO: 362581 - DNA, 20 bp, Artificial Sequence
  Description of Artificial Sequence: Synthetic oligonucleotide
  Target: LAMA2; (+) strand; PAM type: YTN; PAM sequence: TTC
ctagggttgttatgaaggtt

SEQ ID NO: 362582 - DNA, 20 bp, Artificial Sequence
  Description of Artificial Sequence: Synthetic oligonucleotide
  Target: LAMA2; (+) strand; PAM type: YTN; PAM sequence: CTA
gggttgttatgaaggttgaa

SEQ ID NO: 362583 - DNA, 20 bp, Artificial Sequence
  Description of Artificial Sequence: Synthetic oligonucleotide
  Target: LAMA2; (+) strand; PAM type: YTN; PAM sequence: TTG
ttatgaaggttgaaattctt

SEQ ID NO: 362584 - DNA, 20 bp, Artificial Sequence
  Description of Artificial Sequence: Synthetic oligonucleotide
  Target: LAMA2; (+) strand; PAM type: YTN; PAM sequence: TTA
tgaaggttgaaattcttaga

SEQ ID NO: 362585 - DNA, 20 bp, Artificial Sequence
  Description of Artificial Sequence: Synthetic oligonucleotide
  Target: LAMA2; (+) strand; PAM type: YTN; PAM sequence: TTG
aaattcttagaataatgcct

SEQ ID NO: 362586 - DNA, 20 bp, Artificial Sequence
  Description of Artificial Sequence: Synthetic oligonucleotide
  Target: LAMA2; (+) strand; PAM type: YTN; PAM sequence: TTC
ttagaataatgcctggtaca

SEQ ID NO: 362587 - DNA, 20 bp, Artificial Sequence
  Description of Artificial Sequence: Synthetic oligonucleotide
  Target: LAMA2; (+) strand; PAM type: YTN; PAM sequence: CTT
agaataatgcctggtacata

SEQ ID NO: 362588 - DNA, 20 bp, Artificial Sequence
  Description of Artificial Sequence: Synthetic oligonucleotide
  Target: LAMA2; (+) strand; PAM type: YTN; PAM sequence: TTA
gaataatgcctggtacatag

SEQ ID NO: 362589 - DNA, 20 bp, Artificial Sequence
  Description of Artificial Sequence: Synthetic oligonucleotide
  Target: LAMA2; (+) strand; PAM type: YTN; PAM sequence: CTG
gtacatagcatttttttttt

SEQ ID NO: 362590 - DNA, 20 bp, Artificial Sequence
  Description of Artificial Sequence: Synthetic oligonucleotide
  Target: LAMA2; (+) strand; PAM type: YTN; PAM sequence: TTT
ttttttttaagttaagttct

SEQ ID NO: 362591 - DNA, 20 bp, Artificial Sequence
  Description of Artificial Sequence: Synthetic oligonucleotide
  Target: LAMA2; (+) strand; PAM type: YTN; PAM sequence: TTT
tttttttaagttaagttcta

SEQ ID NO: 362592 - DNA, 20 bp, Artificial Sequence
  Description of Artificial Sequence: Synthetic oligonucleotide
  Target: LAMA2; (+) strand; PAM type: YTN; PAM sequence: TTT
ttttttaagttaagttctag

SEQ ID NO: 362593 - DNA, 20 bp, Artificial Sequence
  Description of Artificial Sequence: Synthetic oligonucleotide
  Target: LAMA2; (+) strand; PAM type: YTN; PAM sequence: TTT
tttttaagttaagttctagg

SEQ ID NO: 362594 - DNA, 20 bp, Artificial Sequence
  Description of Artificial Sequence: Synthetic oligonucleotide
  Target: LAMA2; (+) strand; PAM type: YTN; PAM sequence: TTT
ttttaagttaagttctaggg

SEQ ID NO: 362595 - DNA, 20 bp, Artificial Sequence
  Description of Artificial Sequence: Synthetic oligonucleotide
  Target: LAMA2; (+) strand; PAM type: YTN; PAM sequence: TTT
tttaagttaagttctagggt

SEQ ID NO: 362596 - DNA, 20 bp, Artificial Sequence
  Description of Artificial Sequence: Synthetic oligonucleotide
  Target: LAMA2; (+) strand; PAM type: YTN; PAM sequence: TTT
ttaagttaagttctagggta

SEQ ID NO: 362597 - DNA, 20 bp, Artificial Sequence
  Description of Artificial Sequence: Synthetic oligonucleotide
  Target: LAMA2; (+) strand; PAM type: YTN; PAM sequence: TTT
taagttaagttctagggtac

SEQ ID NO: 362598 - DNA, 20 bp, Artificial Sequence
  Description of Artificial Sequence: Synthetic oligonucleotide
  Target: LAMA2; (+) strand; PAM type: YTN; PAM sequence: TTT
aagttaagttctagggtaca

SEQ ID NO: 362599 - DNA, 20 bp, Artificial Sequence
  Description of Artificial Sequence: Synthetic oligonucleotide
  Target: LAMA2; (+) strand; PAM type: YTN; PAM sequence: TTA
agttaagttctagggtacat

SEQ ID NO: 362600 - DNA, 20 bp, Artificial Sequence
  Description of Artificial Sequence: Synthetic oligonucleotide
  Target: LAMA2; (+) strand; PAM type: YTN; PAM sequence: TTA
agttctagggtacatgtgca

SEQ ID NO: 362601 - DNA, 20 bp, Artificial Sequence
  Description of Artificial Sequence: Synthetic oligonucleotide
  Target: LAMA2; (+) strand; PAM type: YTN; PAM sequence: TTC
tagggtacatgtgcacaatg

SEQ ID NO: 362602 - DNA, 20 bp, Artificial Sequence
  Description of Artificial Sequence: Synthetic oligonucleotide
  Target: LAMA2; (+) strand; PAM type: YTN; PAM sequence: CTA
gggtacatgtgcacaatgtg

SEQ ID NO: 362603 - DNA, 20 bp, Artificial Sequence
  Description of Artificial Sequence: Synthetic oligonucleotide
  Target: LAMA2; (+) strand; PAM type: YTN; PAM sequence: TTT
gttatgtatgtgtacatgtg

SEQ ID NO: 362604 - DNA, 20 bp, Artificial Sequence
  Description of Artificial Sequence: Synthetic oligonucleotide
  Target: LAMA2; (+) strand; PAM type: YTN; PAM sequence: TTG
ttatgtatgtgtacatgtgc

SEQ ID NO: 362605 - DNA, 20 bp, Artificial Sequence
  Description of Artificial Sequence: Synthetic oligonucleotide
  Target: LAMA2; (+) strand; PAM type: YTN; PAM sequence: TTA
tgtatgtgtacatgtgccat

SEQ ID NO: 362606 - DNA, 20 bp, Artificial Sequence
  Description of Artificial Sequence: Synthetic oligonucleotide
  Target: LAMA2; (+) strand; PAM type: YTN; PAM sequence: TTG
gtgtgctgcatccattaact

SEQ ID NO: 362607 - DNA, 20 bp, Artificial Sequence
  Description of Artificial Sequence: Synthetic oligonucleotide
  Target: LAMA2; (+) strand; PAM type: YTN; PAM sequence: CTG
catccattaactcgttattt

SEQ ID NO: 362608 - DNA, 20 bp, Artificial Sequence
  Description of Artificial Sequence: Synthetic oligonucleotide
  Target: LAMA2; (+) strand; PAM type: YTN; PAM sequence: TTA
actcgttatttacgttaggt

SEQ ID NO: 362609 - DNA, 20 bp, Artificial Sequence
  Description of Artificial Sequence: Synthetic oligonucleotide
  Target: LAMA2; (+) strand; PAM type: YTN; PAM sequence: CTC
gttatttacgttaggtatat

SEQ ID NO: 362610 - DNA, 20 bp, Artificial Sequence
  Description of Artificial Sequence: Synthetic oligonucleotide
  Target: LAMA2; (+) strand; PAM type: YTN; PAM sequence: TTA
tttacgttaggtatatctcc

SEQ ID NO: 362611 - DNA, 20 bp, Artificial Sequence
  Description of Artificial Sequence: Synthetic oligonucleotide
  Target: LAMA2; (+) strand; PAM type: YTN; PAM sequence: TTT
acgttaggtatatctcctaa

SEQ ID NO: 362612 - DNA, 20 bp, Artificial Sequence
  Description of Artificial Sequence: Synthetic oligonucleotide
  Target: LAMA2; (+) strand; PAM type: YTN; PAM sequence: TTA
cgttaggtatatctcctaat

SEQ ID NO: 362613 - DNA, 20 bp, Artificial Sequence
  Description of Artificial Sequence: Synthetic oligonucleotide
  Target: LAMA2; (+) strand; PAM type: YTN; PAM sequence: TTA
ggtatatctcctaatgctat

SEQ ID NO: 362614 - DNA, 20 bp, Artificial Sequence
  Description of Artificial Sequence: Synthetic oligonucleotide
  Target: LAMA2; (+) strand; PAM type: YTN; PAM sequence: CTC
ctaatgctatccctcccccc

SEQ ID NO: 362615 - DNA, 20 bp, Artificial Sequence
  Description of Artificial Sequence: Synthetic oligonucleotide
  Target: LAMA2; (+) strand; PAM type: YTN; PAM sequence: CTA
atgctatccctcccccctcc

SEQ ID NO: 362616 - DNA, 20 bp, Artificial Sequence
  Description of Artificial Sequence: Synthetic oligonucleotide
  Target: LAMA2; (+) strand; PAM type: YTN; PAM sequence: CTA
tccctcccccctccccccac

SEQ ID NO: 362617 - DNA, 20 bp, Artificial Sequence
  Description of Artificial Sequence: Synthetic oligonucleotide
  Target: LAMA2; (+) strand; PAM type: YTN; PAM sequence: CTC
ccccctccccccaccctacg

SEQ ID NO: 362618 - DNA, 20 bp, Artificial Sequence
  Description of Artificial Sequence: Synthetic oligonucleotide
  Target: LAMA2; (+) strand; PAM type: YTN; PAM sequence: CTC
cccccaccctacgacaggcc

SEQ ID NO: 362619 - DNA, 20 bp, Artificial Sequence
  Description of Artificial Sequence: Synthetic oligonucleotide
  Target: LAMA2; (+) strand; PAM type: YTN; PAM sequence: CTA
cgacaggccccggtgtgtga

SEQ ID NO: 362620 - DNA, 20 bp, Artificial Sequence
  Description of Artificial Sequence: Synthetic oligonucleotide
  Target: LAMA2; (+) strand; PAM type: YTN; PAM sequence: TTC
cccttcctgtgtccaagtgt

SEQ ID NO: 362621 - DNA, 20 bp, Artificial Sequence
  Description of Artificial Sequence: Synthetic oligonucleotide
  Target: LAMA2; (+) strand; PAM type: YTN; PAM sequence: CTT
cctgtgtccaagtgttttca

SEQ ID NO: 362622 - DNA, 20 bp, Artificial Sequence
  Description of Artificial Sequence: Synthetic oligonucleotide
  Target: LAMA2; (+) strand; PAM type: YTN; PAM sequence: TTC
ctgtgtccaagtgttttcat

SEQ ID NO: 362623 - DNA, 20 bp, Artificial Sequence
  Description of Artificial Sequence: Synthetic oligonucleotide
  Target: LAMA2; (+) strand; PAM type: YTN; PAM sequence: CTG
tgtccaagtgttttcattgt

SEQ ID NO: 362624 - DNA, 20 bp, Artificial Sequence
  Description of Artificial Sequence: Synthetic oligonucleotide
  Target: LAMA2; (+) strand; PAM type: YTN; PAM sequence: TTT
tcattgttcagttcccacct

SEQ ID NO: 362625 - DNA, 20 bp, Artificial Sequence
  Description of Artificial Sequence: Synthetic oligonucleotide
  Target: LAMA2; (+) strand; PAM type: YTN; PAM sequence: TTT
cattgttcagttcccaccta

SEQ ID NO: 362626 - DNA, 20 bp, Artificial Sequence
  Description of Artificial Sequence: Synthetic oligonucleotide
  Target: LAMA2; (+) strand; PAM type: YTN; PAM sequence: TTC
attgttcagttcccacctat

SEQ ID NO: 362627 - DNA, 20 bp, Artificial Sequence
  Description of Artificial Sequence: Synthetic oligonucleotide
  Target: LAMA2; (+) strand; PAM type: YTN; PAM sequence: TTG
ttcagttcccacctatgagt

SEQ ID NO: 362628 - DNA, 20 bp, Artificial Sequence
  Description of Artificial Sequence: Synthetic oligonucleotide
  Target: LAMA2; (+) strand; PAM type: YTN; PAM sequence: TTC
agttcccacctatgagtgag

SEQ ID NO: 362629 - DNA, 20 bp, Artificial Sequence
  Description of Artificial Sequence: Synthetic oligonucleotide
  Target: LAMA2; (+) strand; PAM type: YTN; PAM sequence: TTC
ccacctatgagtgagaatat

SEQ ID NO: 362630 - DNA, 20 bp, Artificial Sequence
  Description of Artificial Sequence: Synthetic oligonucleotide
  Target: LAMA2; (+) strand; PAM type: YTN; PAM sequence: CTA
tgagtgagaatatgcgatgt

SEQ ID NO: 362631 - DNA, 20 bp, Artificial Sequence
  Description of Artificial Sequence: Synthetic oligonucleotide
  Target: LAMA2; (+) strand; PAM type: YTN; PAM sequence: TTT
agtttgttgtccttgtgata

SEQ ID NO: 362632 - DNA, 20 bp, Artificial Sequence
  Description of Artificial Sequence: Synthetic oligonucleotide
  Target: LAMA2; (+) strand; PAM type: YTN; PAM sequence: TTA
gtttgttgtccttgtgatag

SEQ ID NO: 362633 - DNA, 20 bp, Artificial Sequence
  Description of Artificial Sequence: Synthetic oligonucleotide
  Target: LAMA2; (+) strand; PAM type: YTN; PAM sequence: TTT
gttgtccttgtgatagtttg

SEQ ID NO: 362634 - DNA, 20 bp, Artificial Sequence
  Description of Artificial Sequence: Synthetic oligonucleotide
  Target: LAMA2; (+) strand; PAM type: YTN; PAM sequence: TTG
ttgtccttgtgatagtttgc

SEQ ID NO: 362635 - DNA, 20 bp, Artificial Sequence
  Description of Artificial Sequence: Synthetic oligonucleotide
  Target: LAMA2; (+) strand; PAM type: YTN; PAM sequence: TTG
tccttgtgatagtttgctga

SEQ ID NO: 362636 - DNA, 20 bp, Artificial Sequence
  Description of Artificial Sequence: Synthetic oligonucleotide
  Target: LAMA2; (+) strand; PAM type: YTN; PAM sequence: CTT
gtgatagtttgctgagaatg

SEQ ID NO: 362637 - DNA, 20 bp, Artificial Sequence
  Description of Artificial Sequence: Synthetic oligonucleotide
  Target: LAMA2; (+) strand; PAM type: YTN; PAM sequence: TTG
tgatagtttgctgagaatga

SEQ ID NO: 362638 - DNA, 20 bp, Artificial Sequence
  Description of Artificial Sequence: Synthetic oligonucleotide
  Target: LAMA2; (+) strand; PAM type: YTN; PAM sequence: TTT
gctgagaatgatggtttcta

SEQ ID NO: 362639 - DNA, 20 bp, Artificial Sequence
  Description of Artificial Sequence: Synthetic oligonucleotide
  Target: LAMA2; (+) strand; PAM type: YTN; PAM sequence: TTG
ctgagaatgatggtttctag

SEQ ID NO: 362640 - DNA, 20 bp, Artificial Sequence
  Description of Artificial Sequence: Synthetic oligonucleotide
  Target: LAMA2; (+) strand; PAM type: YTN; PAM sequence: CTG
agaatgatggtttctagctt

SEQ ID NO: 362641 - DNA, 20 bp, Artificial Sequence
  Description of Artificial Sequence: Synthetic oligonucleotide
  Target: LAMA2; (+) strand; PAM type: YTN; PAM sequence: TTT
ctagcttcatccatgtccct

SEQ ID NO: 362642 - DNA, 20 bp, Artificial Sequence
  Description of Artificial Sequence: Synthetic oligonucleotide
  Target: LAMA2; (+) strand; PAM type: YTN; PAM sequence: TTC
tagcttcatccatgtcccta

SEQ ID NO: 362643 - DNA, 20 bp, Artificial Sequence
  Description of Artificial Sequence: Synthetic oligonucleotide
  Target: LAMA2; (+) strand; PAM type: YTN; PAM sequence: CTA
gcttcatccatgtccctaca

SEQ ID NO: 362644 - DNA, 20 bp, Artificial Sequence
  Description of Artificial Sequence: Synthetic oligonucleotide
  Target: LAMA2; (+) strand; PAM type: YTN; PAM sequence: CTT
catccatgtccctacaaagg

SEQ ID NO: 362645 - DNA, 20 bp, Artificial Sequence
  Description of Artificial Sequence: Synthetic oligonucleotide
  Target: LAMA2; (+) strand; PAM type: YTN; PAM sequence: TTC
atccatgtccctacaaagga

SEQ ID NO: 362646 - DNA, 20 bp, Artificial Sequence
  Description of Artificial Sequence: Synthetic oligonucleotide
  Target: LAMA2; (+) strand; PAM type: YTN; PAM sequence: CTA
caaaggacgtgaactcatcc

SEQ ID NO: 362647 - DNA, 20 bp, Artificial Sequence
  Description of Artificial Sequence: Synthetic oligonucleotide
  Target: LAMA2; (+) strand; PAM type: YTN; PAM sequence: CTC
atccttttttatggctgcat

SEQ ID NO: 362648 - DNA, 20 bp, Artificial Sequence
  Description of Artificial Sequence: Synthetic oligonucleotide
  Target: LAMA2; (+) strand; PAM type: YTN; PAM sequence: CTT
ttttatggctgcatagtatt

SEQ ID NO: 362649 - DNA, 20 bp, Artificial Sequence
  Description of Artificial Sequence: Synthetic oligonucleotide
  Target: LAMA2; (+) strand; PAM type: YTN; PAM sequence: TTT
tttatggctgcatagtattc

SEQ ID NO: 362650 - DNA, 20 bp, Artificial Sequence
  Description of Artificial Sequence: Synthetic oligonucleotide
  Target: LAMA2; (+) strand; PAM type: YTN; PAM sequence: TTT
ttatggctgcatagtattcc

SEQ ID NO: 362651 - DNA, 20 bp, Artificial Sequence
  Description of Artificial Sequence: Synthetic oligonucleotide
  Target: LAMA2; (+) strand; PAM type: YTN; PAM sequence: TTT
tatggctgcatagtattcca

SEQ ID NO: 362652 - DNA, 20 bp, Artificial Sequence
  Description of Artificial Sequence: Synthetic oligonucleotide
  Target: LAMA2; (+) strand; PAM type: YTN; PAM sequence: TTT
atggctgcatagtattccat

SEQ ID NO: 362653 - DNA, 20 bp, Artificial Sequence
  Description of Artificial Sequence: Synthetic oligonucleotide
  Target: LAMA2; (+) strand; PAM type: YTN; PAM sequence: TTA
tggctgcatagtattccatg

SEQ ID NO: 362654 - DNA, 20 bp, Artificial Sequence
  Description of Artificial Sequence: Synthetic oligonucleotide
  Target: LAMA2; (+) strand; PAM type: YTN; PAM sequence: CTG
catagtattccatggtgtat

SEQ ID NO: 362655 - DNA, 20 bp, Artificial Sequence
  Description of Artificial Sequence: Synthetic oligonucleotide
  Target: LAMA2; (+) strand; PAM type: YTN; PAM sequence: TTC
catggtgtatacatgccaca

SEQ ID NO: 362656 - DNA, 20 bp, Artificial Sequence
  Description of Artificial Sequence: Synthetic oligonucleotide
  Target: LAMA2; (+) strand; PAM type: YTN; PAM sequence: TTT
tcttaatccagtctatcatt

SEQ ID NO: 362657 - DNA, 20 bp, Artificial Sequence
  Description of Artificial Sequence: Synthetic oligonucleotide
  Target: LAMA2; (+) strand; PAM type: YTN; PAM sequence: TTT
cttaatccagtctatcattg

SEQ ID NO: 362658 - DNA, 20 bp, Artificial Sequence
  Description of Artificial Sequence: Synthetic oligonucleotide
  Target: LAMA2; (+) strand; PAM type: YTN; PAM sequence: TTC
ttaatccagtctatcattga

SEQ ID NO: 362659 - DNA, 20 bp, Artificial Sequence
  Description of Artificial Sequence: Synthetic oligonucleotide
  Target: LAMA2; (+) strand; PAM type: YTN; PAM sequence: CTT
aatccagtctatcattgatg

SEQ ID NO: 362660 - DNA, 20 bp, Artificial Sequence
  Description of Artificial Sequence: Synthetic oligonucleotide
  Target: LAMA2; (+) strand; PAM type: YTN; PAM sequence: TTA
atccagtctatcattgatgg

SEQ ID NO: 362661 - DNA, 20 bp, Artificial Sequence
  Description of Artificial Sequence: Synthetic oligonucleotide
  Target: LAMA2; (+) strand; PAM type: YTN; PAM sequence: CTA
tcattgatggacatttgggt

SEQ ID NO: 362662 - DNA, 20 bp, Artificial Sequence
  Description of Artificial Sequence: Synthetic oligonucleotide
  Target: LAMA2; (+) strand; PAM type: YTN; PAM sequence: TTG
atggacatttgggttggttc

SEQ ID NO: 362663 - DNA, 20 bp, Artificial Sequence
  Description of Artificial Sequence: Synthetic oligonucleotide
  Target: LAMA2; (+) strand; PAM type: YTN; PAM sequence: TTT
gggttggttccaagtctttg

SEQ ID NO: 362664 - DNA, 20 bp, Artificial Sequence
  Description of Artificial Sequence: Synthetic oligonucleotide
  Target: LAMA2; (+) strand; PAM type: YTN; PAM sequence: TTG
ggttggttccaagtctttgc

SEQ ID NO: 362665 - DNA, 20 bp, Artificial Sequence
  Description of Artificial Sequence: Synthetic oligonucleotide
  Target: LAMA2; (+) strand; PAM type: YTN; PAM sequence: TTG
gttccaagtctttgctatta

SEQ ID NO: 362666 - DNA, 20 bp, Artificial Sequence
  Description of Artificial Sequence: Synthetic oligonucleotide
  Target: LAMA2; (+) strand; PAM type: YTN; PAM sequence: TTC
caagtctttgctattatgaa

SEQ ID NO: 362667 - DNA, 20 bp, Artificial Sequence
  Description of Artificial Sequence: Synthetic oligonucleotide
  Target: LAMA2; (+) strand; PAM type: YTN; PAM sequence: CTT
tgctattatgaatagtgccg

SEQ ID NO: 362668 - DNA, 20 bp, Artificial Sequence
  Description of Artificial Sequence: Synthetic oligonucleotide
  Target: LAMA2; (+) strand; PAM type: YTN; PAM sequence: TTT
gctattatgaatagtgccgc

SEQ ID NO: 362669 - DNA, 20 bp, Artificial Sequence
  Description of Artificial Sequence: Synthetic oligonucleotide
  Target: LAMA2; (+) strand; PAM type: YTN; PAM sequence: TTG
ctattatgaatagtgccgca

SEQ ID NO: 362670 - DNA, 20 bp, Artificial Sequence
  Description of Artificial Sequence: Synthetic oligonucleotide
  Target: LAMA2; (+) strand; PAM type: YTN; PAM sequence: CTA
ttatgaatagtgccgcaata

SEQ ID NO: 362671 - DNA, 20 bp, Artificial Sequence
  Description of Artificial Sequence: Synthetic oligonucleotide
  Target: LAMA2; (+) strand; PAM type: YTN; PAM sequence: TTA
tgaatagtgccgcaataaac

SEQ ID NO: 362672 - DNA, 20 bp, Artificial Sequence
  Description of Artificial Sequence: Synthetic oligonucleotide
  Target: LAMA2; (+) strand; PAM type: YTN; PAM sequence: CTT
tatagcagcatgatttataa

SEQ ID NO: 362673 - DNA, 20 bp, Artificial Sequence
  Description of Artificial Sequence: Synthetic oligonucleotide
  Target: LAMA2; (+) strand; PAM type: YTN; PAM sequence: TTT
atagcagcatgatttataat

SEQ ID NO: 362674 - DNA, 20 bp, Artificial Sequence
  Description of Artificial Sequence: Synthetic oligonucleotide
  Target: LAMA2; (+) strand; PAM type: YTN; PAM sequence: TTA
tagcagcatgatttataatc

SEQ ID NO: 362675 - DNA, 20 bp, Artificial Sequence
  Description of Artificial Sequence: Synthetic oligonucleotide
  Target: LAMA2; (+) strand; PAM type: YTN; PAM sequence: TTT
ataatcctttgggtatatac

SEQ ID NO: 362676 - DNA, 20 bp, Artificial Sequence
  Description of Artificial Sequence: Synthetic oligonucleotide
  Target: LAMA2; (+) strand; PAM type: YTN; PAM sequence: TTA
taatcctttgggtatatacc

SEQ ID NO: 362677 - DNA, 20 bp, Artificial Sequence
  Description of Artificial Sequence: Synthetic oligonucleotide
  Target: LAMA2; (+) strand; PAM type: YTN; PAM sequence: CTT
tgggtatatacccagtaatg

SEQ ID NO: 362678 - DNA, 20 bp, Artificial Sequence
  Description of Artificial Sequence: Synthetic oligonucleotide
  Target: LAMA2; (+) strand; PAM type: YTN; PAM sequence: TTT
gggtatatacccagtaatgg

SEQ ID NO: 362679 - DNA, 20 bp, Artificial Sequence
  Description of Artificial Sequence: Synthetic oligonucleotide
  Target: LAMA2; (+) strand; PAM type: YTN; PAM sequence: TTG
ggtatatacccagtaatggg

SEQ ID NO: 362680 - DNA, 20 bp, Artificial Sequence
  Description of Artificial Sequence: Synthetic oligonucleotide
  Target: LAMA2; (+) strand; PAM type: YTN; PAM sequence: CTG
ggtcaaatggtatttctagt

SEQ ID NO: 362681 - DNA, 20 bp, Artificial Sequence
  Description of Artificial Sequence: Synthetic oligonucleotide
  Target: LAMA2; (+) strand; PAM type: YTN; PAM sequence: TTT
ctagttctagatccttgagg

SEQ ID NO: 362682 - DNA, 20 bp, Artificial Sequence
  Description of Artificial Sequence: Synthetic oligonucleotide
  Target: LAMA2; (+) strand; PAM type: YTN; PAM sequence: TTC
tagttctagatccttgagga

SEQ ID NO: 362683 - DNA, 20 bp, Artificial Sequence
  Description of Artificial Sequence: Synthetic oligonucleotide
  Target: LAMA2; (+) strand; PAM type: YTN; PAM sequence: CTA
gttctagatccttgaggaat

SEQ ID NO: 362684 - DNA, 20 bp, Artificial Sequence
  Description of Artificial Sequence: Synthetic oligonucleotide
  Target: LAMA2; (+) strand; PAM type: YTN; PAM sequence: TTC
tagatccttgaggaatcgcc

SEQ ID NO: 362685 - DNA, 20 bp, Artificial Sequence
  Description of Artificial Sequence: Synthetic oligonucleotide
  Target: LAMA2; (+) strand; PAM type: YTN; PAM sequence: CTA
gatccttgaggaatcgcccc

SEQ ID NO: 362686 - DNA, 20 bp, Artificial Sequence
  Description of Artificial Sequence: Synthetic oligonucleotide
  Target: LAMA2; (+) strand; PAM type: YTN; PAM sequence: CTT
gaggaatcgccccactgtct

SEQ ID NO: 362687 - DNA, 20 bp, Artificial Sequence
  Description of Artificial Sequence: Synthetic oligonucleotide
  Target: LAMA2; (+) strand; PAM type: YTN; PAM sequence: TTG
aggaatcgccccactgtctt

SEQ ID NO: 362688 - DNA, 20 bp, Artificial Sequence
  Description of Artificial Sequence: Synthetic oligonucleotide
  Target: LAMA2; (+) strand; PAM type: YTN; PAM sequence: CTG
tcttccacaatggttgaact

SEQ ID NO: 362689 - DNA, 20 bp, Artificial Sequence
  Description of Artificial Sequence: Synthetic oligonucleotide
  Target: LAMA2; (+) strand; PAM type: YTN; PAM sequence: CTT
ccacaatggttgaactagtt

SEQ ID NO: 362690 - DNA, 20 bp, Artificial Sequence
  Description of Artificial Sequence: Synthetic oligonucleotide
  Target: LAMA2; (+) strand; PAM type: YTN; PAM sequence: TTC
cacaatggttgaactagttt

SEQ ID NO: 362691 - DNA, 20 bp, Artificial Sequence
  Description of Artificial Sequence: Synthetic oligonucleotide
  Target: LAMA2; (+) strand; PAM type: YTN; PAM sequence: TTG
aactagtttacaatcccacc

SEQ ID NO: 362692 - DNA, 20 bp, Artificial Sequence
  Description of Artificial Sequence: Synthetic oligonucleotide
  Target: LAMA2; (+) strand; PAM type: YTN; PAM sequence: CTA
gtttacaatcccaccaacag

SEQ ID NO: 362693 - DNA, 20 bp, Artificial Sequence
  Description of Artificial Sequence: Synthetic oligonucleotide
  Target: LAMA2; (+) strand; PAM type: YTN; PAM sequence: TTT
acaatcccaccaacagtgta

SEQ ID NO: 362694 - DNA, 20 bp, Artificial Sequence
  Description of Artificial Sequence: Synthetic oligonucleotide
  Target: LAMA2; (+) strand; PAM type: YTN; PAM sequence: TTA
caatcccaccaacagtgtaa

SEQ ID NO: 362695 - DNA, 20 bp, Artificial Sequence
  Description of Artificial Sequence: Synthetic oligonucleotide
  Target: LAMA2; (+) strand; PAM type: YTN; PAM sequence: TTC
ctatttctccacatcctctc

SEQ ID NO: 362696 - DNA, 20 bp, Artificial Sequence
  Description of Artificial Sequence: Synthetic oligonucleotide
  Target: LAMA2; (+) strand; PAM type: YTN; PAM sequence: CTA
tttctccacatcctctccag

SEQ ID NO: 362697 - DNA, 20 bp, Artificial Sequence
  Description of Artificial Sequence: Synthetic oligonucleotide
  Target: LAMA2; (+) strand; PAM type: YTN; PAM sequence: TTT
ctccacatcctctccagcac

SEQ ID NO: 362698 - DNA, 20 bp, Artificial Sequence
  Description of Artificial Sequence: Synthetic oligonucleotide
  Target: LAMA2; (+) strand; PAM type: YTN; PAM sequence: TTC
tccacatcctctccagcacc

SEQ ID NO: 362699 - DNA, 20 bp, Artificial Sequence
  Description of Artificial Sequence: Synthetic oligonucleotide
  Target: LAMA2; (+) strand; PAM type: YTN; PAM sequence: CTC
cacatcctctccagcacctg

SEQ ID NO: 362700 - DNA, 20 bp, Artificial Sequence
  Description of Artificial Sequence: Synthetic oligonucleotide
  Target: LAMA2; (+) strand; PAM type: YTN; PAM sequence: CTC
tccagcacctgttgtttcca

SEQ ID NO: 362701 - DNA, 20 bp, Artificial Sequence
  Description of Artificial Sequence: Synthetic oligonucleotide
  Target: LAMA2; (+) strand; PAM type: YTN; PAM sequence: CTC
cagcacctgttgtttccaga

SEQ ID NO: 362702 - DNA, 20 bp, Artificial Sequence
  Description of Artificial Sequence: Synthetic oligonucleotide
  Target: LAMA2; (+) strand; PAM type: YTN; PAM sequence: CTG
ttgtttccagactttttaat

SEQ ID NO: 362703 - DNA, 20 bp, Artificial Sequence
  Description of Artificial Sequence: Synthetic oligonucleotide
  Target: LAMA2; (+) strand; PAM type: YTN; PAM sequence: TTG
tttccagactttttaatgat

SEQ ID NO: 362704 - DNA, 20 bp, Artificial Sequence
  Description of Artificial Sequence: Synthetic oligonucleotide
  Target: LAMA2; (+) strand; PAM type: YTN; PAM sequence: TTT
ccagactttttaatgatcac

SEQ ID NO: 362705 - DNA, 20 bp, Artificial Sequence
  Description of Artificial Sequence: Synthetic oligonucleotide
  Target: LAMA2; (+) strand; PAM type: YTN; PAM sequence: TTC
cagactttttaatgatcacc

SEQ ID NO: 362706 - DNA, 20 bp, Artificial Sequence
  Description of Artificial Sequence: Synthetic oligonucleotide
  Target: LAMA2; (+) strand; PAM type: YTN; PAM sequence: CTT
tttaatgatcaccagtctaa

SEQ ID NO: 362707 - DNA, 20 bp, Artificial Sequence
  Description of Artificial Sequence: Synthetic oligonucleotide
  Target: LAMA2; (+) strand; PAM type: YTN; PAM sequence: TTT
ttaatgatcaccagtctaac

SEQ ID NO: 362708 - DNA, 20 bp, Artificial Sequence
  Description of Artificial Sequence: Synthetic oligonucleotide
  Target: LAMA2; (+) strand; PAM type: YTN; PAM sequence: TTT
taatgatcaccagtctaact

SEQ ID NO: 362709 - DNA, 20 bp, Artificial Sequence
  Description of Artificial Sequence: Synthetic oligonucleotide
  Target: LAMA2; (+) strand; PAM type: YTN; PAM sequence: TTT
aatgatcaccagtctaactg

SEQ ID NO: 362710 - DNA, 20 bp, Artificial Sequence
  Description of Artificial Sequence: Synthetic oligonucleotide
  Target: LAMA2; (+) strand; PAM type: YTN; PAM sequence: TTA
atgatcaccagtctaactgg

SEQ ID NO: 362711 - DNA, 20 bp, Artificial Sequence
  Description of Artificial Sequence: Synthetic oligonucleotide
  Target: LAMA2; (+) strand; PAM type: YTN; PAM sequence: CTA
actggtgtaggatggtatct

SEQ ID NO: 362712 - DNA, 20 bp, Artificial Sequence
  Description of Artificial Sequence: Synthetic oligonucleotide
  Target: LAMA2; (+) strand; PAM type: YTN; PAM sequence: CTG
gtgtaggatggtatctcatt

SEQ ID NO: 362713 - DNA, 20 bp, Artificial Sequence
  Description of Artificial Sequence: Synthetic oligonucleotide
  Target: LAMA2; (+) strand; PAM type: YTN; PAM sequence: CTC
attgtggttttgatttgcat

SEQ ID NO: 362714 - DNA, 20 bp, Artificial Sequence
  Description of Artificial Sequence: Synthetic oligonucleotide
  Target: LAMA2; (+) strand; PAM type: YTN; PAM sequence: TTG
tggttttgatttgcatttct

SEQ ID NO: 362715 - DNA, 20 bp, Artificial Sequence
  Description of Artificial Sequence: Synthetic oligonucleotide
  Target: LAMA2; (+) strand; PAM type: YTN; PAM sequence: TTT
tgatttgcatttctctgatg

SEQ ID NO: 362716 - DNA, 20 bp, Artificial Sequence
  Description of Artificial Sequence: Synthetic oligonucleotide
  Target: LAMA2; (+) strand; PAM type: YTN; PAM sequence: TTT
gatttgcatttctctgatgg

SEQ ID NO: 362717 - DNA, 20 bp, Artificial Sequence
  Description of Artificial Sequence: Synthetic oligonucleotide
  Target: LAMA2; (+) strand; PAM type: YTN; PAM sequence: TTG
atttgcatttctctgatggc

SEQ ID NO: 362718 - DNA, 20 bp, Artificial Sequence
  Description of Artificial Sequence: Synthetic oligonucleotide
  Target: LAMA2; (+) strand; PAM type: YTN; PAM sequence: TTT
gcatttctctgatggccagt

SEQ ID NO: 362719 - DNA, 20 bp, Artificial Sequence
  Description of Artificial Sequence: Synthetic oligonucleotide
  Target: LAMA2; (+) strand; PAM type: YTN; PAM sequence: TTG
catttctctgatggccagtg

SEQ ID NO: 362720 - DNA, 20 bp, Artificial Sequence
  Description of Artificial Sequence: Synthetic oligonucleotide
  Target: LAMA2; (+) strand; PAM type: YTN; PAM sequence: TTT
ctctgatggccagtgatgat

SEQ ID NO: 362721 - DNA, 20 bp, Artificial Sequence
  Description of Artificial Sequence: Synthetic oligonucleotide
  Target: LAMA2; (+) strand; PAM type: YTN; PAM sequence: TTC
tctgatggccagtgatgatg

SEQ ID NO: 362722 - DNA, 20 bp, Artificial Sequence
  Description of Artificial Sequence: Synthetic oligonucleotide
  Target: LAMA2; (+) strand; PAM type: YTN; PAM sequence: CTC
tgatggccagtgatgatgag

SEQ ID NO: 362723 - DNA, 20 bp, Artificial Sequence
  Description of Artificial Sequence: Synthetic oligonucleotide
  Target: LAMA2; (+) strand; PAM type: YTN; PAM sequence: CTG
atggccagtgatgatgagca

SEQ ID NO: 362724 - DNA, 20 bp, Artificial Sequence
  Description of Artificial Sequence: Synthetic oligonucleotide
  Target: LAMA2; (+) strand; PAM type: YTN; PAM sequence: TTT
tttcatgtgtctgctggctg

SEQ ID NO: 362725 - DNA, 20 bp, Artificial Sequence
  Description of Artificial Sequence: Synthetic oligonucleotide
  Target: LAMA2; (+) strand; PAM type: YTN; PAM sequence: TTT
ttcatgtgtctgctggctgc

SEQ ID NO: 362726 - DNA, 20 bp, Artificial Sequence
  Description of Artificial Sequence: Synthetic oligonucleotide
  Target: LAMA2; (+) strand; PAM type: YTN; PAM sequence: TTT
tcatgtgtctgctggctgca

SEQ ID NO: 362727 - DNA, 20 bp, Artificial Sequence
  Description of Artificial Sequence: Synthetic oligonucleotide
  Target: LAMA2; (+) strand; PAM type: YTN; PAM sequence: TTT
catgtgtctgctggctgcat

SEQ ID NO: 362728 - DNA, 20 bp, Artificial Sequence
  Description of Artificial Sequence: Synthetic oligonucleotide
  Target: LAMA2; (+) strand; PAM type: YTN; PAM sequence: TTC
atgtgtctgctggctgcatc

SEQ ID NO: 362729 - DNA, 20 bp, Artificial Sequence
  Description of Artificial Sequence: Synthetic oligonucleotide
  Target: LAMA2; (+) strand; PAM type: YTN; PAM sequence: CTG
ctggctgcatcagtgtcttc

SEQ ID NO: 362730 - DNA, 20 bp, Artificial Sequence
  Description of Artificial Sequence: Synthetic oligonucleotide
  Target: LAMA2; (+) strand; PAM type: YTN; PAM sequence: CTG
gctgcatcagtgtcttcttt

SEQ ID NO: 362731 - DNA, 20 bp, Artificial Sequence
  Description of Artificial Sequence: Synthetic oligonucleotide
  Target: LAMA2; (+) strand; PAM type: YTN; PAM sequence: CTG
catcagtgtcttcttttgag

SEQ ID NO: 362732 - DNA, 20 bp, Artificial Sequence
  Description of Artificial Sequence: Synthetic oligonucleotide
  Target: LAMA2; (+) strand; PAM type: YTN; PAM sequence: CTT
cttttgagaagtgtctgttc

SEQ ID NO: 362733 - DNA, 20 bp, Artificial Sequence
  Description of Artificial Sequence: Synthetic oligonucleotide
  Target: LAMA2; (+) strand; PAM type: YTN; PAM sequence: TTC
ttttgagaagtgtctgttca

SEQ ID NO: 362734 - DNA, 20 bp, Artificial Sequence
  Description of Artificial Sequence: Synthetic oligonucleotide
  Target: LAMA2; (+) strand; PAM type: YTN; PAM sequence: CTT
ttgagaagtgtctgttcata

SEQ ID NO: 362735 - DNA, 20 bp, Artificial Sequence
  Description of Artificial Sequence: Synthetic oligonucleotide
  Target: LAMA2; (+) strand; PAM type: YTN; PAM sequence: TTT
tgagaagtgtctgttcatat

SEQ ID NO: 362736 - DNA, 20 bp, Artificial Sequence
  Description of Artificial Sequence: Synthetic oligonucleotide
  Target: LAMA2; (+) strand; PAM type: YTN; PAM sequence: TTT
gagaagtgtctgttcatatc

SEQ ID NO: 362737 - DNA, 20 bp, Artificial Sequence
  Description of Artificial Sequence: Synthetic oligonucleotide
  Target: LAMA2; (+) strand; PAM type: YTN; PAM sequence: TTG
agaagtgtctgttcatatcc

SEQ ID NO: 362738 - DNA, 20 bp, Artificial Sequence
  Description of Artificial Sequence: Synthetic oligonucleotide
  Target: LAMA2; (+) strand; PAM type: YTN; PAM sequence: CTG
ttcatatcctttgcccaatt

SEQ ID NO: 362739 - DNA, 20 bp, Artificial Sequence
  Description of Artificial Sequence: Synthetic oligonucleotide
  Target: LAMA2; (+) strand; PAM type: YTN; PAM sequence: TTC
atatcctttgcccaattttg

SEQ ID NO: 362740 - DNA, 20 bp, Artificial Sequence
  Description of Artificial Sequence: Synthetic oligonucleotide
  Target: LAMA2; (+) strand; PAM type: YTN; PAM sequence: CTT
tgcccaattttgatggggtt

SEQ ID NO: 362741 - DNA, 20 bp, Artificial Sequence
  Description of Artificial Sequence: Synthetic oligonucleotide
  Target: LAMA2; (+) strand; PAM type: YTN; PAM sequence: TTT
gcccaattttgatggggtta

SEQ ID NO: 362742 - DNA, 20 bp, Artificial Sequence
  Description of Artificial Sequence: Synthetic oligonucleotide
  Target: LAMA2; (+) strand; PAM type: YTN; PAM sequence: TTG
cccaattttgatggggttat

SEQ ID NO: 362743 - DNA, 20 bp, Artificial Sequence
  Description of Artificial Sequence: Synthetic oligonucleotide
  Target: LAMA2; (+) strand; PAM type: YTN; PAM sequence: TTT
tgatggggttatttgttttt

SEQ ID NO: 362744 - DNA, 20 bp, Artificial Sequence
  Description of Artificial Sequence: Synthetic oligonucleotide
  Target: LAMA2; (+) strand; PAM type: YTN; PAM sequence: TTT
gatggggttatttgtttttt

SEQ ID NO: 362745 - DNA, 20 bp, Artificial Sequence
  Description of Artificial Sequence: Synthetic oligonucleotide
  Target: LAMA2; (+) strand; PAM type: YTN; PAM sequence: TTG
atggggttatttgttttttt

SEQ ID NO: 362746 - DNA, 20 bp, Artificial Sequence
  Description of Artificial Sequence: Synthetic oligonucleotide
  Target: LAMA2; (+) strand; PAM type: YTN; PAM sequence: TTA
tttgtttttttcttgtaagt

SEQ ID NO: 362747 - DNA, 20 bp, Artificial Sequence
  Description of Artificial Sequence: Synthetic oligonucleotide
  Target: LAMA2; (+) strand; PAM type: YTN; PAM sequence: TTT
gtttttttcttgtaagtttg

SEQ ID NO: 362748 - DNA, 20 bp, Artificial Sequence
  Description of Artificial Sequence: Synthetic oligonucleotide
  Target: LAMA2; (+) strand; PAM type: YTN; PAM sequence: TTG
tttttttcttgtaagtttgt

SEQ ID NO: 362749 - DNA, 20 bp, Artificial Sequence
  Description of Artificial Sequence: Synthetic oligonucleotide
  Target: LAMA2; (+) strand; PAM type: YTN; PAM sequence: TTT
ttttcttgtaagtttgtttg

SEQ ID NO: 362750 - DNA, 20 bp, Artificial Sequence
  Description of Artificial Sequence: Synthetic oligonucleotide
  Target: LAMA2; (+) strand; PAM type: YTN; PAM sequence: TTT
tttcttgtaagtttgtttga

SEQ ID NO: 362751 - DNA, 20 bp, Artificial Sequence
  Description of Artificial Sequence: Synthetic oligonucleotide
  Target: LAMA2; (+) strand; PAM type: YTN; PAM sequence: TTT
ttcttgtaagtttgtttgag

SEQ ID NO: 362752 - DNA, 20 bp, Artificial Sequence
  Description of Artificial Sequence: Synthetic oligonucleotide
  Target: LAMA2; (+) strand; PAM type: YTN; PAM sequence: TTT
tcttgtaagtttgtttgagt

SEQ ID NO: 362753 - DNA, 20 bp, Artificial Sequence
  Description of Artificial Sequence: Synthetic oligonucleotide
  Target: LAMA2; (+) strand; PAM type: YTN; PAM sequence: TTT
cttgtaagtttgtttgagtt

SEQ ID NO: 362754 - DNA, 20 bp, Artificial Sequence
  Description of Artificial Sequence: Synthetic oligonucleotide
  Target: LAMA2; (+) strand; PAM type: YTN; PAM sequence: TTC
ttgtaagtttgtttgagttc

SEQ ID NO: 362755 - DNA, 20 bp, Artificial Sequence
  Description of Artificial Sequence: Synthetic oligonucleotide
  Target: LAMA2; (+) strand; PAM type: YTN; PAM sequence: CTT
gtaagtttgtttgagttctt

SEQ ID NO: 362756 - DNA, 20 bp, Artificial Sequence
  Description of Artificial Sequence: Synthetic oligonucleotide
  Target: LAMA2; (+) strand; PAM type: YTN; PAM sequence: TTG
taagtttgtttgagttcttt

SEQ ID NO: 362757 - DNA, 20 bp, Artificial Sequence
  Description of Artificial Sequence: Synthetic oligonucleotide
  Target: LAMA2; (+) strand; PAM type: YTN; PAM sequence: TTT
gtttgagttctttgtagatt

SEQ ID NO: 362758 - DNA, 20 bp, Artificial Sequence
  Description of Artificial Sequence: Synthetic oligonucleotide
  Target: LAMA2; (+) strand; PAM type: YTN; PAM sequence: TTG
tttgagttctttgtagattc

SEQ ID NO: 362759 - DNA, 20 bp, Artificial Sequence
  Description of Artificial Sequence: Synthetic oligonucleotide
  Target: LAMA2; (+) strand; PAM type: YTN; PAM sequence: TTT
gagttctttgtagattctgg

SEQ ID NO: 362760 - DNA, 20 bp, Artificial Sequence
  Description of Artificial Sequence: Synthetic oligonucleotide
  Target: LAMA2; (+) strand; PAM type: YTN; PAM sequence: TTG
agttctttgtagattctgga

SEQ ID NO: 362761 - DNA, 20 bp, Artificial Sequence
  Description of Artificial Sequence: Synthetic oligonucleotide
  Target: LAMA2; (+) strand; PAM type: YTN; PAM sequence: TTC
tttgtagattctggatatta

SEQ ID NO: 362762 - DNA, 20 bp, Artificial Sequence
  Description of Artificial Sequence: Synthetic oligonucleotide
  Target: LAMA2; (+) strand; PAM type: YTN; PAM sequence: CTT
tgtagattctggatattagc

SEQ ID NO: 362763 - DNA, 20 bp, Artificial Sequence
  Description of Artificial Sequence: Synthetic oligonucleotide
  Target: LAMA2; (+) strand; PAM type: YTN; PAM sequence: TTT
gtagattctggatattagcc

SEQ ID NO: 362764 - DNA, 20 bp, Artificial Sequence
  Description of Artificial Sequence: Synthetic oligonucleotide
  Target: LAMA2; (+) strand; PAM type: YTN; PAM sequence: TTG
tagattctggatattagccc

SEQ ID NO: 362765 - DNA, 20 bp, Artificial Sequence
  Description of Artificial Sequence: Synthetic oligonucleotide
  Target: LAMA2; (+) strand; PAM type: YTN; PAM sequence: TTC
tggatattagccctttgtca

SEQ ID NO: 362766 - DNA, 20 bp, Artificial Sequence
  Description of Artificial Sequence: Synthetic oligonucleotide
  Target: LAMA2; (+) strand; PAM type: YTN; PAM sequence: CTG
gatattagccctttgtcaga

SEQ ID NO: 362767 - DNA, 20 bp, Artificial Sequence
  Description of Artificial Sequence: Synthetic oligonucleotide
  Target: LAMA2; (+) strand; PAM type: YTN; PAM sequence: TTA
gccctttgtcagatgagtag

SEQ ID NO: 362768 - DNA, 20 bp, Artificial Sequence
  Description of Artificial Sequence: Synthetic oligonucleotide
  Target: LAMA2; (+) strand; PAM type: YTN; PAM sequence: CTT
tgtcagatgagtagattgca

SEQ ID NO: 362769 - DNA, 20 bp, Artificial Sequence
  Description of Artificial Sequence: Synthetic oligonucleotide
  Target: LAMA2; (+) strand; PAM type: YTN; PAM sequence: TTT
gtcagatgagtagattgcaa

SEQ ID NO: 362770 - DNA, 20 bp, Artificial Sequence
  Description of Artificial Sequence: Synthetic oligonucleotide
  Target: LAMA2; (+) strand; PAM type: YTN; PAM sequence: TTG
tcagatgagtagattgcaaa

SEQ ID NO: 362771 - DNA, 20 bp, Artificial Sequence
  Description of Artificial Sequence: Synthetic oligonucleotide
  Target: LAMA2; (+) strand; PAM type: YTN; PAM sequence: TTG
caaaaatcttctcccattct

SEQ ID NO: 362772 - DNA, 20 bp, Artificial Sequence
  Description of Artificial Sequence: Synthetic oligonucleotide
  Target: LAMA2; (+) strand; PAM type: YTN; PAM sequence: CTT
ctcccattctgtaggttgcc

SEQ ID NO: 362773 - DNA, 20 bp, Artificial Sequence
  Description of Artificial Sequence: Synthetic oligonucleotide
  Target: LAMA2; (+) strand; PAM type: YTN; PAM sequence: TTC
tcccattctgtaggttgcct

SEQ ID NO: 362774 - DNA, 20 bp, Artificial Sequence
  Description of Artificial Sequence: Synthetic oligonucleotide
  Target: LAMA2; (+) strand; PAM type: YTN; PAM sequence: CTC
ccattctgtaggttgcctgt

SEQ ID NO: 362775 - DNA, 20 bp, Artificial Sequence
  Description of Artificial Sequence: Synthetic oligonucleotide
  Target: LAMA2; (+) strand; PAM type: YTN; PAM sequence: TTC
tgtaggttgcctgttcactc

SEQ ID NO: 362776 - DNA, 20 bp, Artificial Sequence
  Description of Artificial Sequence: Synthetic oligonucleotide
  Target: LAMA2; (+) strand; PAM type: YTN; PAM sequence: CTG
taggttgcctgttcactctg

SEQ ID NO: 362777 - DNA, 20 bp, Artificial Sequence
  Description of Artificial Sequence: Synthetic oligonucleotide
  Target: LAMA2; (+) strand; PAM type: YTN; PAM sequence: TTG
cctgttcactctgatggtag

SEQ ID NO: 362778 - DNA, 20 bp, Artificial Sequence
  Description of Artificial Sequence: Synthetic oligonucleotide
  Target: LAMA2; (+) strand; PAM type: YTN; PAM sequence: CTG
ttcactctgatggtagtttc

SEQ ID NO: 362779 - DNA, 20 bp, Artificial Sequence
  Description of Artificial Sequence: Synthetic oligonucleotide
  Target: LAMA2; (+) strand; PAM type: YTN; PAM sequence: TTC
actctgatggtagtttcttt

SEQ ID NO: 362780 - DNA, 20 bp, Artificial Sequence
  Description of Artificial Sequence: Synthetic oligonucleotide
  Target: LAMA2; (+) strand; PAM type: YTN; PAM sequence: CTC
tgatggtagtttcttttgct

SEQ ID NO: 362781 - DNA, 20 bp, Artificial Sequence
  Description of Artificial Sequence: Synthetic oligonucleotide
  Target: LAMA2; (+) strand; PAM type: YTN; PAM sequence: CTG
atggtagtttcttttgctgt

SEQ ID NO: 362782 - DNA, 20 bp, Artificial Sequence
  Description of Artificial Sequence: Synthetic oligonucleotide
  Target: LAMA2; (+) strand; PAM type: YTN; PAM sequence: TTT
cttttgctgtgcagaagctc

SEQ ID NO: 362783 - DNA, 20 bp, Artificial Sequence
  Description of Artificial Sequence: Synthetic oligonucleotide
  Target: LAMA2; (+) strand; PAM type: YTN; PAM sequence: TTC
ttttgctgtgcagaagctct

SEQ ID NO: 362784 - DNA, 20 bp, Artificial Sequence
  Description of Artificial Sequence: Synthetic oligonucleotide
  Target: LAMA2; (+) strand; PAM type: YTN; PAM sequence: CTT
ttgctgtgcagaagctcttt

SEQ ID NO: 362785 - DNA, 20 bp, Artificial Sequence
  Description of Artificial Sequence: Synthetic oligonucleotide
  Target: LAMA2; (+) strand; PAM type: YTN; PAM sequence: TTT
tgctgtgcagaagctcttta

SEQ ID NO: 362786 - DNA, 20 bp, Artificial Sequence
  Description of Artificial Sequence: Synthetic oligonucleotide
  Target: LAMA2; (+) strand; PAM type: YTN; PAM sequence: TTT
gctgtgcagaagctctttag

SEQ ID NO: 362787 - DNA, 20 bp, Artificial Sequence
  Description of Artificial Sequence: Synthetic oligonucleotide
  Target: LAMA2; (+) strand; PAM type: YTN; PAM sequence: TTG
ctgtgcagaagctctttagt

SEQ ID NO: 362788 - DNA, 20 bp, Artificial Sequence
  Description of Artificial Sequence: Synthetic oligonucleotide
  Target: LAMA2; (+) strand; PAM type: YTN; PAM sequence: CTG
tgcagaagctctttagttta

SEQ ID NO: 362789 - DNA, 20 bp, Artificial Sequence
  Description of Artificial Sequence: Synthetic oligonucleotide
  Target: LAMA2; (+) strand; PAM type: YTN; PAM sequence: CTC
tttagtttaattagatccca

SEQ ID NO: 362790 - DNA, 20 bp, Artificial Sequence
  Description of Artificial Sequence: Synthetic oligonucleotide
  Target: LAMA2; (+) strand; PAM type: YTN; PAM sequence: CTT
tagtttaattagatcccatt

SEQ ID NO: 362791 - DNA, 20 bp, Artificial Sequence
  Description of Artificial Sequence: Synthetic oligonucleotide
  Target: LAMA2; (+) strand; PAM type: YTN; PAM sequence: TTT
agtttaattagatcccattt

SEQ ID NO: 362792 - DNA, 20 bp, Artificial Sequence
  Description of Artificial Sequence: Synthetic oligonucleotide
  Target: LAMA2; (+) strand; PAM type: YTN; PAM sequence: TTA
gtttaattagatcccatttg

SEQ ID NO: 362793 - DNA, 20 bp, Artificial Sequence
  Description of Artificial Sequence: Synthetic oligonucleotide
  Target: LAMA2; (+) strand; PAM type: YTN; PAM sequence: TTT
aattagatcccatttgtcaa

SEQ ID NO: 362794 - DNA, 20 bp, Artificial Sequence
  Description of Artificial Sequence: Synthetic oligonucleotide
  Target: LAMA2; (+) strand; PAM type: YTN; PAM sequence: TTA
attagatcccatttgtcaac

SEQ ID NO: 362795 - DNA, 20 bp, Artificial Sequence
  Description of Artificial Sequence: Synthetic oligonucleotide
  Target: LAMA2; (+) strand; PAM type: YTN; PAM sequence: TTA
gatcccatttgtcaactttg

SEQ ID NO: 362796 - DNA, 20 bp, Artificial Sequence
  Description of Artificial Sequence: Synthetic oligonucleotide
  Target: LAMA2; (+) strand; PAM type: YTN; PAM sequence: TTT
gtcaactttggcttttgttg

SEQ ID NO: 362797 - DNA, 20 bp, Artificial Sequence
  Description of Artificial Sequence: Synthetic oligonucleotide
  Target: LAMA2; (+) strand; PAM type: YTN; PAM sequence: TTG
tcaactttggcttttgttgc

SEQ ID NO: 362798 - DNA, 20 bp, Artificial Sequence
  Description of Artificial Sequence: Synthetic oligonucleotide
  Target: LAMA2; (+) strand; PAM type: YTN; PAM sequence: CTT
tggcttttgttgcccttgct

SEQ ID NO: 362799 - DNA, 20 bp, Artificial Sequence
  Description of Artificial Sequence: Synthetic oligonucleotide
  Target: LAMA2; (+) strand; PAM type: YTN; PAM sequence: TTT
ggcttttgttgcccttgctt

SEQ ID NO: 362800 - DNA, 20 bp, Artificial Sequence
  Description of Artificial Sequence: Synthetic oligonucleotide
  Target: LAMA2; (+) strand; PAM type: YTN; PAM sequence: TTG
gcttttgttgcccttgcttt

SEQ ID NO: 362801 - DNA, 20 bp, Artificial Sequence
  Description of Artificial Sequence: Synthetic oligonucleotide
  Target: LAMA2; (+) strand; PAM type: YTN; PAM sequence: CTT
ttgttgcccttgcttttcgt

SEQ ID NO: 362802 - DNA, 20 bp, Artificial Sequence
  Description of Artificial Sequence: Synthetic oligonucleotide
  Target: LAMA2; (+) strand; PAM type: YTN; PAM sequence: TTT
tgttgcccttgcttttcgtg

SEQ ID NO: 362803 - DNA, 20 bp, Artificial Sequence
  Description of Artificial Sequence: Synthetic oligonucleotide
  Target: LAMA2; (+) strand; PAM type: YTN; PAM sequence: TTT
gttgcccttgcttttcgtgt

SEQ ID NO: 362804 - DNA, 20 bp, Artificial Sequence
  Description of Artificial Sequence: Synthetic oligonucleotide
  Target: LAMA2; (+) strand; PAM type: YTN; PAM sequence: TTG
ttgcccttgcttttcgtgtt

SEQ ID NO: 362805 - DNA, 20 bp, Artificial Sequence
  Description of Artificial Sequence: Synthetic oligonucleotide
  Target: LAMA2; (+) strand; PAM type: YTN; PAM sequence: TTG
cccttgcttttcgtgtttta

SEQ ID NO: 362806 - DNA, 20 bp, Artificial Sequence
  Description of Artificial Sequence: Synthetic oligonucleotide
  Target: LAMA2; (+) strand; PAM type: YTN; PAM sequence: CTT
gcttttcgtgttttagacaa

SEQ ID NO: 362807 - DNA, 20 bp, Artificial Sequence
  Description of Artificial Sequence: Synthetic oligonucleotide
  Target: LAMA2; (+) strand; PAM type: YTN; PAM sequence: TTG
cttttcgtgttttagacaaa

SEQ ID NO: 362808 - DNA, 20 bp, Artificial Sequence
  Description of Artificial Sequence: Synthetic oligonucleotide
  Target: LAMA2; (+) strand; PAM type: YTN; PAM sequence: CTT
ttcgtgttttagacaaaaag

SEQ ID NO: 362809 - DNA, 20 bp, Artificial Sequence
  Description of Artificial Sequence: Synthetic oligonucleotide
  Target: LAMA2; (+) strand; PAM type: YTN; PAM sequence: TTT
tcgtgttttagacaaaaagt

SEQ ID NO: 362810 - DNA, 20 bp, Artificial Sequence
  Description of Artificial Sequence: Synthetic oligonucleotide
  Target: LAMA2; (+) strand; PAM type: YTN; PAM sequence: TTT
cgtgttttagacaaaaagtc

SEQ ID NO: 362811 - DNA, 20 bp, Artificial Sequence
  Description of Artificial Sequence: Synthetic oligonucleotide
  Target: LAMA2; (+) strand; PAM type: YTN; PAM sequence: TTC
gtgttttagacaaaaagtcc

SEQ ID NO: 362812 - DNA, 20 bp, Artificial Sequence
  Description of Artificial Sequence: Synthetic oligonucleotide
  Target: LAMA2; (+) strand; PAM type: YTN; PAM sequence: TTT
tagacaaaaagtccttaccc

SEQ ID NO: 362813 - DNA, 20 bp, Artificial Sequence
  Description of Artificial Sequence: Synthetic oligonucleotide
  Target: LAMA2; (+) strand; PAM type: YTN; PAM sequence: TTT
agacaaaaagtccttaccca

SEQ ID NO: 362814 - DNA, 20 bp, Artificial Sequence
  Description of Artificial Sequence: Synthetic oligonucleotide
  Target: LAMA2; (+) strand; PAM type: YTN; PAM sequence: TTA
gacaaaaagtccttacccat

SEQ ID NO: 362815 - DNA, 20 bp, Artificial Sequence
  Description of Artificial Sequence: Synthetic oligonucleotide
  Target: LAMA2; (+) strand; PAM type: YTN; PAM sequence: CTT
acccatgcctatgtcctcaa

SEQ ID NO: 362816 - DNA, 20 bp, Artificial Sequence
  Description of Artificial Sequence: Synthetic oligonucleotide
  Target: LAMA2; (+) strand; PAM type: YTN; PAM sequence: TTA
cccatgcctatgtcctcaat

SEQ ID NO: 362817 - DNA, 20 bp, Artificial Sequence
  Description of Artificial Sequence: Synthetic oligonucleotide
  Target: LAMA2; (+) strand; PAM type: YTN; PAM sequence: CTA
tgtcctcaatggtattgcct

SEQ ID NO: 362818 - DNA, 20 bp, Artificial Sequence
  Description of Artificial Sequence: Synthetic oligonucleotide
  Target: LAMA2; (+) strand; PAM type: YTN; PAM sequence: CTC
aatggtattgcctaggtttt

SEQ ID NO: 362819 - DNA, 20 bp, Artificial Sequence
  Description of Artificial Sequence: Synthetic oligonucleotide
  Target: LAMA2; (+) strand; PAM type: YTN; PAM sequence: TTG
cctaggttttcttctagggt

SEQ ID NO: 362820 - DNA, 20 bp, Artificial Sequence
  Description of Artificial Sequence: Synthetic oligonucleotide
  Target: LAMA2; (+) strand; PAM type: YTN; PAM sequence: CTA
ggttttcttctagggttttt

SEQ ID NO: 362821 - DNA, 20 bp, Artificial Sequence
  Description of Artificial Sequence: Synthetic oligonucleotide
  Target: LAMA2; (+) strand; PAM type: YTN; PAM sequence: TTT
tcttctagggtttttatggt

SEQ ID NO: 362822 - DNA, 20 bp, Artificial Sequence
  Description of Artificial Sequence: Synthetic oligonucleotide
  Target: LAMA2; (+) strand; PAM type: YTN; PAM sequence: TTT
cttctagggtttttatggtt

SEQ ID NO: 362823 - DNA, 20 bp, Artificial Sequence
  Description of Artificial Sequence: Synthetic oligonucleotide
  Target: LAMA2; (+) strand; PAM type: YTN; PAM sequence: TTC
ttctagggtttttatggttt

SEQ ID NO: 362824 - DNA, 20 bp, Artificial Sequence
  Description of Artificial Sequence: Synthetic oligonucleotide
  Target: LAMA2; (+) strand; PAM type: YTN; PAM sequence: CTT
ctagggtttttatggtttta

SEQ ID NO: 362825 - DNA, 20 bp, Artificial Sequence
  Description of Artificial Sequence: Synthetic oligonucleotide
  Target: LAMA2; (+) strand; PAM type: YTN; PAM sequence: TTC
tagggtttttatggttttat

SEQ ID NO: 362826 - DNA, 20 bp, Artificial Sequence
  Description of Artificial Sequence: Synthetic oligonucleotide
  Target: LAMA2; (+) strand; PAM type: YTN; PAM sequence: CTA
gggtttttatggttttatgt

SEQ ID NO: 362827 - DNA, 20 bp, Artificial Sequence
  Description of Artificial Sequence: Synthetic oligonucleotide
  Target: LAMA2; (+) strand; PAM type: YTN; PAM sequence: TTT
ttatggttttatgtctaaca

SEQ ID NO: 362828 - DNA, 20 bp, Artificial Sequence
  Description of Artificial Sequence: Synthetic oligonucleotide
  Target: LAMA2; (+) strand; PAM type: YTN; PAM sequence: TTT
tatggttttatgtctaacat

SEQ ID NO: 362829 - DNA, 20 bp, Artificial Sequence
  Description of Artificial Sequence: Synthetic oligonucleotide
  Target: LAMA2; (+) strand; PAM type: YTN; PAM sequence: TTT
atggttttatgtctaacatt

SEQ ID NO: 362830 - DNA, 20 bp, Artificial Sequence
  Description of Artificial Sequence: Synthetic oligonucleotide
  Target: LAMA2; (+) strand; PAM type: YTN; PAM sequence: TTA
tggttttatgtctaacattt

SEQ ID NO: 362831 - DNA, 20 bp, Artificial Sequence
  Description of Artificial Sequence: Synthetic oligonucleotide
  Target: LAMA2; (+) strand; PAM type: YTN; PAM sequence: TTT
tatgtctaacatttaagtct

SEQ ID NO: 362832 - DNA, 20 bp, Artificial Sequence
  Description of Artificial Sequence: Synthetic oligonucleotide
  Target: LAMA2; (+) strand; PAM type: YTN; PAM sequence: TTT
atgtctaacatttaagtctt

SEQ ID NO: 362833 - DNA, 20 bp, Artificial Sequence
  Description of Artificial Sequence: Synthetic oligonucleotide
  Target: LAMA2; (+) strand; PAM type: YTN; PAM sequence: TTA
tgtctaacatttaagtcttt

SEQ ID NO: 362834 - DNA, 20 bp, Artificial Sequence
  Description of Artificial Sequence: Synthetic oligonucleotide
  Target: LAMA2; (+) strand; PAM type: YTN; PAM sequence: CTA
acatttaagtctttaatcca

SEQ ID NO: 362835 - DNA, 20 bp, Artificial Sequence
  Description of Artificial Sequence: Synthetic oligonucleotide
  Target: LAMA2; (+) strand; PAM type: YTN; PAM sequence: TTT
aagtctttaatccatcttga

SEQ ID NO: 362836 - DNA, 20 bp, Artificial Sequence
  Description of Artificial Sequence: Synthetic oligonucleotide
  Target: LAMA2; (+) strand; PAM type: YTN; PAM sequence: TTA
agtctttaatccatcttgaa

SEQ ID NO: 362837 - DNA, 20 bp, Artificial Sequence
  Description of Artificial Sequence: Synthetic oligonucleotide
  Target: LAMA2; (+) strand; PAM type: YTN; PAM sequence: CTT
taatccatcttgaattaatt

SEQ ID NO: 362838 - DNA, 20 bp, Artificial Sequence
  Description of Artificial Sequence: Synthetic oligonucleotide
  Target: LAMA2; (+) strand; PAM type: YTN; PAM sequence: TTT
aatccatcttgaattaattt

SEQ ID NO: 362839 - DNA, 20 bp, Artificial Sequence
  Description of Artificial Sequence: Synthetic oligonucleotide
  Target: LAMA2; (+) strand; PAM type: YTN; PAM sequence: TTA
atccatcttgaattaatttt

SEQ ID NO: 362840 - DNA, 20 bp, Artificial Sequence
  Description of Artificial Sequence: Synthetic oligonucleotide
  Target: LAMA2; (+) strand; PAM type: YTN; PAM sequence: CTT
gaattaatttttgtataagg

SEQ ID NO: 362841 - DNA, 20 bp, Artificial Sequence
  Description of Artificial Sequence: Synthetic oligonucleotide
  Target: LAMA2; (+) strand; PAM type: YTN; PAM sequence: TTG
aattaatttttgtataaggt

SEQ ID NO: 362842 - DNA, 20 bp, Artificial Sequence
  Description of Artificial Sequence: Synthetic oligonucleotide
  Target: LAMA2; (+) strand; PAM type: YTN; PAM sequence: TTA
atttttgtataaggtgtaag

SEQ ID NO: 362843 - DNA, 20 bp, Artificial Sequence
  Description of Artificial Sequence: Synthetic oligonucleotide
  Target: LAMA2; (+) strand; PAM type: YTN; PAM sequence: TTT
ttgtataaggtgtaaggaag

SEQ ID NO: 362844 - DNA, 20 bp, Artificial Sequence
  Description of Artificial Sequence: Synthetic oligonucleotide
  Target: LAMA2; (+) strand; PAM type: YTN; PAM sequence: TTT
tgtataaggtgtaaggaagg

SEQ ID NO: 362845 - DNA, 20 bp, Artificial Sequence
  Description of Artificial Sequence: Synthetic oligonucleotide
  Target: LAMA2; (+) strand; PAM type: YTN; PAM sequence: TTT
gtataaggtgtaaggaaggg

SEQ ID NO: 362846 - DNA, 20 bp, Artificial Sequence
  Description of Artificial Sequence: Synthetic oligonucleotide
  Target: LAMA2; (+) strand; PAM type: YTN; PAM sequence: TTG
tataaggtgtaaggaaggga

SEQ ID NO: 362847 - DNA, 20 bp, Artificial Sequence
  Description of Artificial Sequence: Synthetic oligonucleotide
  Target: LAMA2; (+) strand; PAM type: YTN; PAM sequence: TTT
cagctttctacatatggcta

SEQ ID NO: 362848 - DNA, 20 bp, Artificial Sequence
  Description of Artificial Sequence: Synthetic oligonucleotide
  Target: LAMA2; (+) strand; PAM type: YTN; PAM sequence: TTC
agctttctacatatggctag

SEQ ID NO: 362849 - DNA, 20 bp, Artificial Sequence
  Description of Artificial Sequence: Synthetic oligonucleotide
  Target: LAMA2; (+) strand; PAM type: YTN; PAM sequence: CTT
tctacatatggctagccagt

SEQ ID NO: 362850 - DNA, 20 bp, Artificial Sequence
  Description of Artificial Sequence: Synthetic oligonucleotide
  Target: LAMA2; (+) strand; PAM type: YTN; PAM sequence: TTT
ctacatatggctagccagtt

SEQ ID NO: 362851 - DNA, 20 bp, Artificial Sequence
  Description of Artificial Sequence: Synthetic oligonucleotide
  Target: LAMA2; (+) strand; PAM type: YTN; PAM sequence: TTC
tacatatggctagccagttt

SEQ ID NO: 362852 - DNA, 20 bp, Artificial Sequence
  Description of Artificial Sequence: Synthetic oligonucleotide
  Target: LAMA2; (+) strand; PAM type: YTN; PAM sequence: CTA
catatggctagccagttttc

SEQ ID NO: 362853 - DNA, 20 bp, Artificial Sequence
  Description of Artificial Sequence: Synthetic oligonucleotide
  Target: LAMA2; (+) strand; PAM type: YTN; PAM sequence: CTA
gccagttttcccagcaccat

SEQ ID NO: 362854 - DNA, 20 bp, Artificial Sequence
  Description of Artificial Sequence: Synthetic oligonucleotide
  Target: LAMA2; (+) strand; PAM type: YTN; PAM sequence: TTT
tcccagcaccatttattaaa

SEQ ID NO: 362855 - DNA, 20 bp, Artificial Sequence
  Description of Artificial Sequence: Synthetic oligonucleotide
  Target: LAMA2; (+) strand; PAM type: YTN; PAM sequence: TTT
cccagcaccatttattaaat

SEQ ID NO: 362856 - DNA, 20 bp, Artificial Sequence
  Description of Artificial Sequence: Synthetic oligonucleotide
  Target: LAMA2; (+) strand; PAM type: YTN; PAM sequence: TTC
ccagcaccatttattaaata

SEQ ID NO: 362857 - DNA, 20 bp, Artificial Sequence
  Description of Artificial Sequence: Synthetic oligonucleotide
  Target: LAMA2; (+) strand; PAM type: YTN; PAM sequence: TTT
attaaatagggaatccattc

SEQ ID NO: 362858 - DNA, 20 bp, Artificial Sequence
  Description of Artificial Sequence: Synthetic oligonucleotide
  Target: LAMA2; (+) strand; PAM type: YTN; PAM sequence: TTA
ttaaatagggaatccattcc

SEQ ID NO: 362859 - DNA, 20 bp, Artificial Sequence
  Description of Artificial Sequence: Synthetic oligonucleotide
  Target: LAMA2; (+) strand; PAM type: YTN; PAM sequence: TTA
aatagggaatccattcccca

SEQ ID NO: 362860 - DNA, 20 bp, Artificial Sequence
  Description of Artificial Sequence: Synthetic oligonucleotide
  Target: LAMA2; (+) strand; PAM type: YTN; PAM sequence: TTC
cccattgcttgtttttgtca

SEQ ID NO: 362861 - DNA, 20 bp, Artificial Sequence
  Description of Artificial Sequence: Synthetic oligonucleotide
  Target: LAMA2; (+) strand; PAM type: YTN; PAM sequence: TTG
cttgtttttgtcaggtttgt

SEQ ID NO: 362862 - DNA, 20 bp, Artificial Sequence
  Description of Artificial Sequence: Synthetic oligonucleotide
  Target: LAMA2; (+) strand; PAM type: YTN; PAM sequence: CTT
gtttttgtcaggtttgtcaa

SEQ ID NO: 362863 - DNA, 20 bp, Artificial Sequence
  Description of Artificial Sequence: Synthetic oligonucleotide
  Target: LAMA2; (+) strand; PAM type: YTN; PAM sequence: TTG
tttttgtcaggtttgtcaaa

SEQ ID NO: 362864 - DNA, 20 bp, Artificial Sequence
  Description of Artificial Sequence: Synthetic oligonucleotide
  Target: LAMA2; (+) strand; PAM type: YTN; PAM sequence: TTT
ttgtcaggtttgtcaaagat

SEQ ID NO: 362865 - DNA, 20 bp, Artificial Sequence
  Description of Artificial Sequence: Synthetic oligonucleotide
  Target: LAMA2; (+) strand; PAM type: YTN; PAM sequence: TTT
tgtcaggtttgtcaaagatc

SEQ ID NO: 362866 - DNA, 20 bp, Artificial Sequence
  Description of Artificial Sequence: Synthetic oligonucleotide
  Target: LAMA2; (+) strand; PAM type: YTN; PAM sequence: TTT
gtcaggtttgtcaaagatca

SEQ ID NO: 362867 - DNA, 20 bp, Artificial Sequence
  Description of Artificial Sequence: Synthetic oligonucleotide
  Target: LAMA2; (+) strand; PAM type: YTN; PAM sequence: TTG
tcaggtttgtcaaagatcag

SEQ ID NO: 362868 - DNA, 20 bp, Artificial Sequence
  Description of Artificial Sequence: Synthetic oligonucleotide
  Target: LAMA2; (+) strand; PAM type: YTN; PAM sequence: TTT
gtcaaagatcagatggttgt

SEQ ID NO: 362869 - DNA, 20 bp, Artificial Sequence
  Description of Artificial Sequence: Synthetic oligonucleotide
  Target: LAMA2; (+) strand; PAM type: YTN; PAM sequence: TTG
tcaaagatcagatggttgta

SEQ ID NO: 362870 - DNA, 20 bp, Artificial Sequence
  Description of Artificial Sequence: Synthetic oligonucleotide
  Target: LAMA2; (+) strand; PAM type: YTN; PAM sequence: TTG
tagatgtgtggtattatttc

SEQ ID NO: 362871 - DNA, 20 bp, Artificial Sequence
  Description of Artificial Sequence: Synthetic oligonucleotide
  Target: LAMA2; (+) strand; PAM type: YTN; PAM sequence: TTA
tttctgagggctctattctg

SEQ ID NO: 362872 - DNA, 20 bp, Artificial Sequence
  Description of Artificial Sequence: Synthetic oligonucleotide
  Target: LAMA2; (+) strand; PAM type: YTN; PAM sequence: TTT
ctgagggctctattctgttc

SEQ ID NO: 362873 - DNA, 20 bp, Artificial Sequence
  Description of Artificial Sequence: Synthetic oligonucleotide
  Target: LAMA2; (+) strand; PAM type: YTN; PAM sequence: TTC
tgagggctctattctgttcc

SEQ ID NO: 362874 - DNA, 20 bp, Artificial Sequence
  Description of Artificial Sequence: Synthetic oligonucleotide
  Target: LAMA2; (+) strand; PAM type: YTN; PAM sequence: CTG
agggctctattctgttccat

SEQ ID NO: 362875 - DNA, 20 bp, Artificial Sequence
  Description of Artificial Sequence: Synthetic oligonucleotide
  Target: LAMA2; (+) strand; PAM type: YTN; PAM sequence: CTC
tattctgttccattgatcta

SEQ ID NO: 362876 - DNA, 20 bp, Artificial Sequence
  Description of Artificial Sequence: Synthetic oligonucleotide
  Target: LAMA2; (+) strand; PAM type: YTN; PAM sequence: CTA
ttctgttccattgatctaca

SEQ ID NO: 362877 - DNA, 20 bp, Artificial Sequence
  Description of Artificial Sequence: Synthetic oligonucleotide
  Target: LAMA2; (+) strand; PAM type: YTN; PAM sequence: TTC
tgttccattgatctacatct

SEQ ID NO: 362878 - DNA, 20 bp, Artificial Sequence
  Description of Artificial Sequence: Synthetic oligonucleotide
  Target: LAMA2; (+) strand; PAM type: YTN; PAM sequence: CTG
ttccattgatctacatctct

SEQ ID NO: 362879 - DNA, 20 bp, Artificial Sequence
  Description of Artificial Sequence: Synthetic oligonucleotide
  Target: LAMA2; (+) strand; PAM type: YTN; PAM sequence: TTC
cattgatctacatctctctt

SEQ ID NO: 362880 - DNA, 20 bp, Artificial Sequence
  Description of Artificial Sequence: Synthetic oligonucleotide
  Target: LAMA2; (+) strand; PAM type: YTN; PAM sequence: TTG
atctacatctctcttttggt

SEQ ID NO: 362881 - DNA, 20 bp, Artificial Sequence
  Description of Artificial Sequence: Synthetic oligonucleotide
  Target: LAMA2; (+) strand; PAM type: YTN; PAM sequence: CTA
catctctcttttggtaccag

SEQ ID NO: 362882 - DNA, 20 bp, Artificial Sequence
  Description of Artificial Sequence: Synthetic oligonucleotide
  Target: LAMA2; (+) strand; PAM type: YTN; PAM sequence: CTC
tcttttggtaccagtaccat

SEQ ID NO: 362883 - DNA, 20 bp, Artificial Sequence
  Description of Artificial Sequence: Synthetic oligonucleotide
  Target: LAMA2; (+) strand; PAM type: YTN; PAM sequence: CTC
ttttggtaccagtaccatgc

SEQ ID NO: 362884 - DNA, 20 bp, Artificial Sequence
  Description of Artificial Sequence: Synthetic oligonucleotide
  Target: LAMA2; (+) strand; PAM type: YTN; PAM sequence: CTT
ttggtaccagtaccatgctg

SEQ ID NO: 362885 - DNA, 20 bp, Artificial Sequence
  Description of Artificial Sequence: Synthetic oligonucleotide
  Target: LAMA2; (+) strand; PAM type: YTN; PAM sequence: TTT
tggtaccagtaccatgctgt

SEQ ID NO: 362886 - DNA, 20 bp, Artificial Sequence
  Description of Artificial Sequence: Synthetic oligonucleotide
  Target: LAMA2; (+) strand; PAM type: YTN; PAM sequence: TTT
ggtaccagtaccatgctgtt

SEQ ID NO: 362887 - DNA, 20 bp, Artificial Sequence
  Description of Artificial Sequence: Synthetic oligonucleotide
  Target: LAMA2; (+) strand; PAM type: YTN; PAM sequence: TTG
gtaccagtaccatgctgttt

SEQ ID NO: 362888 - DNA, 20 bp, Artificial Sequence
  Description of Artificial Sequence: Synthetic oligonucleotide
  Target: LAMA2; (+) strand; PAM type: YTN; PAM sequence: CTG
ttttggttactgtagccttg

SEQ ID NO: 362889 - DNA, 20 bp, Artificial Sequence
  Description of Artificial Sequence: Synthetic oligonucleotide
  Target: LAMA2; (+) strand; PAM type: YTN; PAM sequence: TTT
tggttactgtagccttgtag

SEQ ID NO: 362890 - DNA, 20 bp, Artificial Sequence
  Description of Artificial Sequence: Synthetic oligonucleotide
  Target: LAMA2; (+) strand; PAM type: YTN; PAM sequence: TTT
ggttactgtagccttgtagt

SEQ ID NO: 362891 - DNA, 20 bp, Artificial Sequence
  Description of Artificial Sequence: Synthetic oligonucleotide
  Target: LAMA2; (+) strand; PAM type: YTN; PAM sequence: TTG
gttactgtagccttgtagta

SEQ ID NO: 362892 - DNA, 20 bp, Artificial Sequence
  Description of Artificial Sequence: Synthetic oligonucleotide
  Target: LAMA2; (+) strand; PAM type: YTN; PAM sequence: TTA
ctgtagccttgtagtatagt

SEQ ID NO: 362893 - DNA, 20 bp, Artificial Sequence
  Description of Artificial Sequence: Synthetic oligonucleotide
  Target: LAMA2; (+) strand; PAM type: YTN; PAM sequence: CTG
tagccttgtagtatagtttg

SEQ ID NO: 362894 - DNA, 20 bp, Artificial Sequence
  Description of Artificial Sequence: Synthetic oligonucleotide
  Target: LAMA2; (+) strand; PAM type: YTN; PAM sequence: CTT
gtagtatagtttgaagtcag

SEQ ID NO: 362895 - DNA, 20 bp, Artificial Sequence
  Description of Artificial Sequence: Synthetic oligonucleotide
  Target: LAMA2; (+) strand; PAM type: YTN; PAM sequence: TTG
tagtatagtttgaagtcagg

SEQ ID NO: 362896 - DNA, 20 bp, Artificial Sequence
  Description of Artificial Sequence: Synthetic oligonucleotide
  Target: LAMA2; (+) strand; PAM type: YTN; PAM sequence: TTT
gaagtcaggtagcatgatgc

SEQ ID NO: 362897 - DNA, 20 bp, Artificial Sequence
  Description of Artificial Sequence: Synthetic oligonucleotide
  Target: LAMA2; (+) strand; PAM type: YTN; PAM sequence: TTG
aagtcaggtagcatgatgcc

SEQ ID NO: 362898 - DNA, 20 bp, Artificial Sequence
  Description of Artificial Sequence: Synthetic oligonucleotide
  Target: LAMA2; (+) strand; PAM type: YTN; PAM sequence: CTC
cagctttgttcttttggctt

SEQ ID NO: 362899 - DNA, 20 bp, Artificial Sequence
  Description of Artificial Sequence: Synthetic oligonucleotide
  Target: LAMA2; (+) strand; PAM type: YTN; PAM sequence: CTT
tgttcttttggcttaggatt

SEQ ID NO: 362900 - DNA, 20 bp, Artificial Sequence
  Description of Artificial Sequence: Synthetic oligonucleotide
  Target: LAMA2; (+) strand; PAM type: YTN; PAM sequence: TTT
gttcttttggcttaggattg

SEQ ID NO: 362901 - DNA, 20 bp, Artificial Sequence
  Description of Artificial Sequence: Synthetic oligonucleotide
  Target: LAMA2; (+) strand; PAM type: YTN; PAM sequence: TTG
ttcttttggcttaggattga

SEQ ID NO: 362902 - DNA, 20 bp, Artificial Sequence
  Description of Artificial Sequence: Synthetic oligonucleotide
  Target: LAMA2; (+) strand; PAM type: YTN; PAM sequence: TTC
ttttggcttaggattgactt

SEQ ID NO: 362903 - DNA, 20 bp, Artificial Sequence
  Description of Artificial Sequence: Synthetic oligonucleotide
  Target: LAMA2; (+) strand; PAM type: YTN; PAM sequence: CTT
ttggcttaggattgacttgg

SEQ ID NO: 362904 - DNA, 20 bp, Artificial Sequence
  Description of Artificial Sequence: Synthetic oligonucleotide
  Target: LAMA2; (+) strand; PAM type: YTN; PAM sequence: TTT
tggcttaggattgacttggg

SEQ ID NO: 362905 - DNA, 20 bp, Artificial Sequence
  Description of Artificial Sequence: Synthetic oligonucleotide
  Target: LAMA2; (+) strand; PAM type: YTN; PAM sequence: TTT
ggcttaggattgacttggga

SEQ ID NO: 362906 - DNA, 20 bp, Artificial Sequence
  Description of Artificial Sequence: Synthetic oligonucleotide
  Target: LAMA2; (+) strand; PAM type: YTN; PAM sequence: TTG
gcttaggattgacttgggaa

SEQ ID NO: 362907 - DNA, 20 bp, Artificial Sequence
  Description of Artificial Sequence: Synthetic oligonucleotide
  Target: LAMA2; (+) strand; PAM type: YTN; PAM sequence: CTT
aggattgacttgggaatgtg

SEQ ID NO: 362908 - DNA, 20 bp, Artificial Sequence
  Description of Artificial Sequence: Synthetic oligonucleotide
  Target: LAMA2; (+) strand; PAM type: YTN; PAM sequence: TTA
ggattgacttgggaatgtgg

SEQ ID NO: 362909 - DNA, 20 bp, Artificial Sequence
  Description of Artificial Sequence: Synthetic oligonucleotide
  Target: LAMA2; (+) strand; PAM type: YTN; PAM sequence: TTG
acttgggaatgtgggctctt

SEQ ID NO: 362910 - DNA, 20 bp, Artificial Sequence
  Description of Artificial Sequence: Synthetic oligonucleotide
  Target: LAMA2; (+) strand; PAM type: YTN; PAM sequence: CTT
gggaatgtgggctctttttt

SEQ ID NO: 362911 - DNA, 20 bp, Artificial Sequence
  Description of Artificial Sequence: Synthetic oligonucleotide
  Target: LAMA2; (+) strand; PAM type: YTN; PAM sequence: TTG
ggaatgtgggctcttttttg

SEQ ID NO: 362912 - DNA, 20 bp, Artificial Sequence
  Description of Artificial Sequence: Synthetic oligonucleotide
  Target: LAMA2; (+) strand; PAM type: YTN; PAM sequence: CTC
ttttttggttccatatgaac

SEQ ID NO: 362913 - DNA, 20 bp, Artificial Sequence
  Description of Artificial Sequence: Synthetic oligonucleotide
  Target: LAMA2; (+) strand; PAM type: YTN; PAM sequence: CTT
ttttggttccatatgaactt

SEQ ID NO: 362914 - DNA, 20 bp, Artificial Sequence
  Description of Artificial Sequence: Synthetic oligonucleotide
  Target: LAMA2; (+) strand; PAM type: YTN; PAM sequence: TTT
tttggttccatatgaacttt

SEQ ID NO: 362915 - DNA, 20 bp, Artificial Sequence
  Description of Artificial Sequence: Synthetic oligonucleotide
  Target: LAMA2; (+) strand; PAM type: YTN; PAM sequence: TTT
ttggttccatatgaacttta

SEQ ID NO: 362916 - DNA, 20 bp, Artificial Sequence
  Description of Artificial Sequence: Synthetic oligonucleotide
  Target: LAMA2; (+) strand; PAM type: YTN; PAM sequence: TTT
tggttccatatgaactttaa

SEQ ID NO: 362917 - DNA, 20 bp, Artificial Sequence
  Description of Artificial Sequence: Synthetic oligonucleotide
  Target: LAMA2; (+) strand; PAM type: YTN; PAM sequence: TTT
ggttccatatgaactttaaa

SEQ ID NO: 362918 - DNA, 20 bp, Artificial Sequence
  Description of Artificial Sequence: Synthetic oligonucleotide
  Target: LAMA2; (+) strand; PAM type: YTN; PAM sequence: TTG
gttccatatgaactttaaag

SEQ ID NO: 362919 - DNA, 20 bp, Artificial Sequence
  Description of Artificial Sequence: Synthetic oligonucleotide
  Target: LAMA2; (+) strand; PAM type: YTN; PAM sequence: TTC
catatgaactttaaagtagt

SEQ ID NO: 362920 - DNA, 20 bp, Artificial Sequence
  Description of Artificial Sequence: Synthetic oligonucleotide
  Target: LAMA2; (+) strand; PAM type: YTN; PAM sequence: CTT
taaagtagttttttttccaa

SEQ ID NO: 362921 - DNA, 20 bp, Artificial Sequence
  Description of Artificial Sequence: Synthetic oligonucleotide
  Target: LAMA2; (+) strand; PAM type: YTN; PAM sequence: TTT
aaagtagttttttttccaat

SEQ ID NO: 362922 - DNA, 20 bp, Artificial Sequence
  Description of Artificial Sequence: Synthetic oligonucleotide
  Target: LAMA2; (+) strand; PAM type: YTN; PAM sequence: TTA
aagtagttttttttccaatt

SEQ ID NO: 362923 - DNA, 20 bp, Artificial Sequence
  Description of Artificial Sequence: Synthetic oligonucleotide
  Target: LAMA2; (+) strand; PAM type: YTN; PAM sequence: TTT
tttttccaattctgtgaaga

SEQ ID NO: 362924 - DNA, 20 bp, Artificial Sequence
  Description of Artificial Sequence: Synthetic oligonucleotide
  Target: LAMA2; (+) strand; PAM type: YTN; PAM sequence: TTT
ttttccaattctgtgaagaa

SEQ ID NO: 362925 - DNA, 20 bp, Artificial Sequence
  Description of Artificial Sequence: Synthetic oligonucleotide
  Target: LAMA2; (+) strand; PAM type: YTN; PAM sequence: TTT
tttccaattctgtgaagaaa

SEQ ID NO: 362926 - DNA, 20 bp, Artificial Sequence
  Description of Artificial Sequence: Synthetic oligonucleotide
  Target: LAMA2; (+) strand; PAM type: YTN; PAM sequence: TTT
ttccaattctgtgaagaaag

SEQ ID NO: 362927 - DNA, 20 bp, Artificial Sequence
  Description of Artificial Sequence: Synthetic oligonucleotide
  Target: LAMA2; (+) strand; PAM type: YTN; PAM sequence: TTT
tccaattctgtgaagaaagt

SEQ ID NO: 362928 - DNA, 20 bp, Artificial Sequence
  Description of Artificial Sequence: Synthetic oligonucleotide
  Target: LAMA2; (+) strand; PAM type: YTN; PAM sequence: TTT
ccaattctgtgaagaaagtc

SEQ ID NO: 362929 - DNA, 20 bp, Artificial Sequence
  Description of Artificial Sequence: Synthetic oligonucleotide
  Target: LAMA2; (+) strand; PAM type: YTN; PAM sequence: TTC
caattctgtgaagaaagtca

SEQ ID NO: 362930 - DNA, 20 bp, Artificial Sequence
  Description of Artificial Sequence: Synthetic oligonucleotide
  Target: LAMA2; (+) strand; PAM type: YTN; PAM sequence: TTC
tgtgaagaaagtcactggta

SEQ ID NO: 362931 - DNA, 20 bp, Artificial Sequence
  Description of Artificial Sequence: Synthetic oligonucleotide
  Target: LAMA2; (+) strand; PAM type: YTN; PAM sequence: CTG
tgaagaaagtcactggtagc

SEQ ID NO: 362932 - DNA, 20 bp, Artificial Sequence
  Description of Artificial Sequence: Synthetic oligonucleotide
  Target: LAMA2; (+) strand; PAM type: YTN; PAM sequence: CTG
gtagcttgatagggatggca

SEQ ID NO: 362933 - DNA, 20 bp, Artificial Sequence
  Description of Artificial Sequence: Synthetic oligonucleotide
  Target: LAMA2; (+) strand; PAM type: YTN; PAM sequence: CTT
gatagggatggcattgaatc

SEQ ID NO: 362934 - DNA, 20 bp, Artificial Sequence
  Description of Artificial Sequence: Synthetic oligonucleotide
  Target: LAMA2; (+) strand; PAM type: YTN; PAM sequence: TTG
atagggatggcattgaatct

SEQ ID NO: 362935 - DNA, 20 bp, Artificial Sequence
  Description of Artificial Sequence: Synthetic oligonucleotide
  Target: LAMA2; (+) strand; PAM type: YTN; PAM sequence: TTG
aatctatgaattaccttggg

SEQ ID NO: 362936 - DNA, 20 bp, Artificial Sequence
  Description of Artificial Sequence: Synthetic oligonucleotide
  Target: LAMA2; (+) strand; PAM type: YTN; PAM sequence: CTA
tgaattaccttgggcagtat

SEQ ID NO: 362937 - DNA, 20 bp, Artificial Sequence
  Description of Artificial Sequence: Synthetic oligonucleotide
  Target: LAMA2; (+) strand; PAM type: YTN; PAM sequence: TTA
ccttgggcagtatggccatt

SEQ ID NO: 362938 - DNA, 20 bp, Artificial Sequence
  Description of Artificial Sequence: Synthetic oligonucleotide
  Target: LAMA2; (+) strand; PAM type: YTN; PAM sequence: CTT
gggcagtatggccattttca

SEQ ID NO: 362939 - DNA, 20 bp, Artificial Sequence
  Description of Artificial Sequence: Synthetic oligonucleotide
  Target: LAMA2; (+) strand; PAM type: YTN; PAM sequence: TTG
ggcagtatggccattttcac

SEQ ID NO: 362940 - DNA, 20 bp, Artificial Sequence
  Description of Artificial Sequence: Synthetic oligonucleotide
  Target: LAMA2; (+) strand; PAM type: YTN; PAM sequence: TTT
tcacgatattgattcttcct

SEQ ID NO: 362941 - DNA, 20 bp, Artificial Sequence
  Description of Artificial Sequence: Synthetic oligonucleotide
  Target: LAMA2; (+) strand; PAM type: YTN; PAM sequence: TTT
cacgatattgattcttccta

SEQ ID NO: 362942 - DNA, 20 bp, Artificial Sequence
  Description of Artificial Sequence: Synthetic oligonucleotide
  Target: LAMA2; (+) strand; PAM type: YTN; PAM sequence: TTC
acgatattgattcttcctat

SEQ ID NO: 362943 - DNA, 20 bp, Artificial Sequence
  Description of Artificial Sequence: Synthetic oligonucleotide
  Target: LAMA2; (+) strand; PAM type: YTN; PAM sequence: TTG
attcttcctatccataagca

SEQ ID NO: 362944 - DNA, 20 bp, Artificial Sequence
  Description of Artificial Sequence: Synthetic oligonucleotide
  Target: LAMA2; (+) strand; PAM type: YTN; PAM sequence: TTC
ttcctatccataagcatgga

SEQ ID NO: 362945 - DNA, 20 bp, Artificial Sequence
  Description of Artificial Sequence: Synthetic oligonucleotide
  Target: LAMA2; (+) strand; PAM type: YTN; PAM sequence: CTT
cctatccataagcatggaat

SEQ ID NO: 362946 - DNA, 20 bp, Artificial Sequence
  Description of Artificial Sequence: Synthetic oligonucleotide
  Target: LAMA2; (+) strand; PAM type: YTN; PAM sequence: TTC
ctatccataagcatggaatg

SEQ ID NO: 362947 - DNA, 20 bp, Artificial Sequence
  Description of Artificial Sequence: Synthetic oligonucleotide
  Target: LAMA2; (+) strand; PAM type: YTN; PAM sequence: CTA
tccataagcatggaatgttc

SEQ ID NO: 362948 - DNA, 20 bp, Artificial Sequence
  Description of Artificial Sequence: Synthetic oligonucleotide
  Target: LAMA2; (+) strand; PAM type: YTN; PAM sequence: TTC
ttccatttgtttgtgtcctc

SEQ ID NO: 362949 - DNA, 20 bp, Artificial Sequence
  Description of Artificial Sequence: Synthetic oligonucleotide
  Target: LAMA2; (+) strand; PAM type: YTN; PAM sequence: CTT
ccatttgtttgtgtcctctt

SEQ ID NO: 362950 - DNA, 20 bp, Artificial Sequence
  Description of Artificial Sequence: Synthetic oligonucleotide
  Target: LAMA2; (+) strand; PAM type: YTN; PAM sequence: TTC
catttgtttgtgtcctcttt

SEQ ID NO: 362951 - DNA, 20 bp, Artificial Sequence
  Description of Artificial Sequence: Synthetic oligonucleotide
  Target: LAMA2; (+) strand; PAM type: YTN; PAM sequence: TTT
gtttgtgtcctcttttattt

SEQ ID NO: 362952 - DNA, 20 bp, Artificial Sequence
  Description of Artificial Sequence: Synthetic oligonucleotide
  Target: LAMA2; (+) strand; PAM type: YTN; PAM sequence: TTG
tttgtgtcctcttttatttt

SEQ ID NO: 362953 - DNA, 20 bp, Artificial Sequence
  Description of Artificial Sequence: Synthetic oligonucleotide
  Target: LAMA2; (+) strand; PAM type: YTN; PAM sequence: TTT
gtgtcctcttttattttgtt

SEQ ID NO: 362954 - DNA, 20 bp, Artificial Sequence
  Description of Artificial Sequence: Synthetic oligonucleotide
  Target: LAMA2; (+) strand; PAM type: YTN; PAM sequence: TTG
tgtcctcttttattttgttg

SEQ ID NO: 362955 - DNA, 20 bp, Artificial Sequence
  Description of Artificial Sequence: Synthetic oligonucleotide
  Target: LAMA2; (+) strand; PAM type: YTN; PAM sequence: CTC
ttttattttgttgagcagta

SEQ ID NO: 362956 - DNA, 20 bp, Artificial Sequence
  Description of Artificial Sequence: Synthetic oligonucleotide
  Target: LAMA2; (+) strand; PAM type: YTN; PAM sequence: CTT
ttattttgttgagcagtaat

SEQ ID NO: 362957 - DNA, 20 bp, Artificial Sequence
  Description of Artificial Sequence: Synthetic oligonucleotide
  Target: LAMA2; (+) strand; PAM type: YTN; PAM sequence: TTT
tattttgttgagcagtaatt

SEQ ID NO: 362958 - DNA, 20 bp, Artificial Sequence
  Description of Artificial Sequence: Synthetic oligonucleotide
  Target: LAMA2; (+) strand; PAM type: YTN; PAM sequence: TTT
attttgttgagcagtaattt

SEQ ID NO: 362959 - DNA, 20 bp, Artificial Sequence
  Description of Artificial Sequence: Synthetic oligonucleotide
  Target: LAMA2; (+) strand; PAM type: YTN; PAM sequence: TTA
ttttgttgagcagtaatttg

SEQ ID NO: 362960 - DNA, 20 bp, Artificial Sequence
  Description of Artificial Sequence: Synthetic oligonucleotide
  Target: LAMA2; (+) strand; PAM type: YTN; PAM sequence: TTT
tgttgagcagtaatttgcag

SEQ ID NO: 362961 - DNA, 20 bp, Artificial Sequence
  Description of Artificial Sequence: Synthetic oligonucleotide
  Target: LAMA2; (+) strand; PAM type: YTN; PAM sequence: TTT
gttgagcagtaatttgcagt

SEQ ID NO: 362962 - DNA, 20 bp, Artificial Sequence
  Description of Artificial Sequence: Synthetic oligonucleotide
  Target: LAMA2; (+) strand; PAM type: YTN; PAM sequence: TTG
ttgagcagtaatttgcagtt

SEQ ID NO: 362963 - DNA, 20 bp, Artificial Sequence
  Description of Artificial Sequence: Synthetic oligonucleotide
  Target: LAMA2; (+) strand; PAM type: YTN; PAM sequence: TTG
agcagtaatttgcagttctc

SEQ ID NO: 362964 - DNA, 20 bp, Artificial Sequence
  Description of Artificial Sequence: Synthetic oligonucleotide
  Target: LAMA2; (+) strand; PAM type: YTN; PAM sequence: TTT
gcagttctccttgaagaggt

SEQ ID NO: 362965 - DNA, 20 bp, Artificial Sequence
  Description of Artificial Sequence: Synthetic oligonucleotide
  Target: LAMA2; (+) strand; PAM type: YTN; PAM sequence: TTG
cagttctccttgaagaggtc

SEQ ID NO: 362966 - DNA, 20 bp, Artificial Sequence
  Description of Artificial Sequence: Synthetic oligonucleotide
  Target: LAMA2; (+) strand; PAM type: YTN; PAM sequence: TTC
tccttgaagaggtccttcac

SEQ ID NO: 362967 - DNA, 20 bp, Artificial Sequence
  Description of Artificial Sequence: Synthetic oligonucleotide
  Target: LAMA2; (+) strand; PAM type: YTN; PAM sequence: CTC
cttgaagaggtccttcacat

SEQ ID NO: 362968 - DNA, 20 bp, Artificial Sequence
  Description of Artificial Sequence: Synthetic oligonucleotide
  Target: LAMA2; (+) strand; PAM type: YTN; PAM sequence: CTT
gaagaggtccttcacatccc

SEQ ID NO: 362969 - DNA, 20 bp, Artificial Sequence
  Description of Artificial Sequence: Synthetic oligonucleotide
  Target: LAMA2; (+) strand; PAM type: YTN; PAM sequence: TTG
aagaggtccttcacatccct

SEQ ID NO: 362970 - DNA, 20 bp, Artificial Sequence
  Description of Artificial Sequence: Synthetic oligonucleotide
  Target: LAMA2; (+) strand; PAM type: YTN; PAM sequence: CTT
cacatcccttgtaagttgga

SEQ ID NO: 362971 - DNA, 20 bp, Artificial Sequence
  Description of Artificial Sequence: Synthetic oligonucleotide
  Target: LAMA2; (+) strand; PAM type: YTN; PAM sequence: TTC
acatcccttgtaagttggat

SEQ ID NO: 362972 - DNA, 20 bp, Artificial Sequence
  Description of Artificial Sequence: Synthetic oligonucleotide
  Target: LAMA2; (+) strand; PAM type: YTN; PAM sequence: CTT
gtaagttggattcctaggta

SEQ ID NO: 362973 - DNA, 20 bp, Artificial Sequence
  Description of Artificial Sequence: Synthetic oligonucleotide
  Target: LAMA2; (+) strand; PAM type: YTN; PAM sequence: TTG
taagttggattcctaggtat

SEQ ID NO: 362974 - DNA, 20 bp, Artificial Sequence
  Description of Artificial Sequence: Synthetic oligonucleotide
  Target: LAMA2; (+) strand; PAM type: YTN; PAM sequence: TTG
gattcctaggtattttattc

SEQ ID NO: 362975 - DNA, 20 bp, Artificial Sequence
  Description of Artificial Sequence: Synthetic oligonucleotide
  Target: LAMA2; (+) strand; PAM type: YTN; PAM sequence: TTC
ctaggtattttattctcttt

SEQ ID NO: 362976 - DNA, 20 bp, Artificial Sequence
  Description of Artificial Sequence: Synthetic oligonucleotide
  Target: LAMA2; (+) strand; PAM type: YTN; PAM sequence: CTA
ggtattttattctctttgaa

SEQ ID NO: 362977 - DNA, 20 bp, Artificial Sequence
  Description of Artificial Sequence: Synthetic oligonucleotide
  Target: LAMA2; (+) strand; PAM type: YTN; PAM sequence: TTT
tattctctttgaagcaattg

SEQ ID NO: 362978 - DNA, 20 bp, Artificial Sequence
  Description of Artificial Sequence: Synthetic oligonucleotide
  Target: LAMA2; (+) strand; PAM type: YTN; PAM sequence: TTT
attctctttgaagcaattgt

SEQ ID NO: 362979 - DNA, 20 bp, Artificial Sequence
  Description of Artificial Sequence: Synthetic oligonucleotide
  Target: LAMA2; (+) strand; PAM type: YTN; PAM sequence: TTA
ttctctttgaagcaattgtg

SEQ ID NO: 362980 - DNA, 20 bp, Artificial Sequence
  Description of Artificial Sequence: Synthetic oligonucleotide
  Target: LAMA2; (+) strand; PAM type: YTN; PAM sequence: TTC
tctttgaagcaattgtgaat

SEQ ID NO: 362981 - DNA, 20 bp, Artificial Sequence
  Description of Artificial Sequence: Synthetic oligonucleotide
  Target: LAMA2; (+) strand; PAM type: YTN; PAM sequence: CTC
tttgaagcaattgtgaatag

SEQ ID NO: 362982 - DNA, 20 bp, Artificial Sequence
  Description of Artificial Sequence: Synthetic oligonucleotide
  Target: LAMA2; (+) strand; PAM type: YTN; PAM sequence: CTT
tgaagcaattgtgaatagga

SEQ ID NO: 362983 - DNA, 20 bp, Artificial Sequence
  Description of Artificial Sequence: Synthetic oligonucleotide
  Target: LAMA2; (+) strand; PAM type: YTN; PAM sequence: TTT
gaagcaattgtgaataggag

SEQ ID NO: 362984 - DNA, 20 bp, Artificial Sequence
  Description of Artificial Sequence: Synthetic oligonucleotide
  Target: LAMA2; (+) strand; PAM type: YTN; PAM sequence: TTG
aagcaattgtgaataggagt

SEQ ID NO: 362985 - DNA, 20 bp, Artificial Sequence
  Description of Artificial Sequence: Synthetic oligonucleotide
  Target: LAMA2; (+) strand; PAM type: YTN; PAM sequence: TTG
tgaataggagttcactcatg

SEQ ID NO: 362986 - DNA, 20 bp, Artificial Sequence
  Description of Artificial Sequence: Synthetic oligonucleotide
  Target: LAMA2; (+) strand; PAM type: YTN; PAM sequence: TTC
actcatgatttggctctctg

SEQ ID NO: 362987 - DNA, 20 bp, Artificial Sequence
  Description of Artificial Sequence: Synthetic oligonucleotide
  Target: LAMA2; (+) strand; PAM type: YTN; PAM sequence: CTC
atgatttggctctctgattg

SEQ ID NO: 362988 - DNA, 20 bp, Artificial Sequence
  Description of Artificial Sequence: Synthetic oligonucleotide
  Target: LAMA2; (+) strand; PAM type: YTN; PAM sequence: TTT
ggctctctgattgtctgttg

SEQ ID NO: 362989 - DNA, 20 bp, Artificial Sequence
  Description of Artificial Sequence: Synthetic oligonucleotide
  Target: LAMA2; (+) strand; PAM type: YTN; PAM sequence: TTG
gctctctgattgtctgttgt

SEQ ID NO: 362990 - DNA, 20 bp, Artificial Sequence
  Description of Artificial Sequence: Synthetic oligonucleotide
  Target: LAMA2; (+) strand; PAM type: YTN; PAM sequence: CTC
tctgattgtctgttgttagt

SEQ ID NO: 362991 - DNA, 20 bp, Artificial Sequence
  Description of Artificial Sequence: Synthetic oligonucleotide
  Target: LAMA2; (+) strand; PAM type: YTN; PAM sequence: CTC
tgattgtctgttgttagtgt

SEQ ID NO: 362992 - DNA, 20 bp, Artificial Sequence
  Description of Artificial Sequence: Synthetic oligonucleotide
  Target: LAMA2; (+) strand; PAM type: YTN; PAM sequence: CTG
attgtctgttgttagtgtat

SEQ ID NO: 362993 - DNA, 20 bp, Artificial Sequence
  Description of Artificial Sequence: Synthetic oligonucleotide
  Target: LAMA2; (+) strand; PAM type: YTN; PAM sequence: TTG
tctgttgttagtgtataaga

SEQ ID NO: 362994 - DNA, 20 bp, Artificial Sequence
  Description of Artificial Sequence: Synthetic oligonucleotide
  Target: LAMA2; (+) strand; PAM type: YTN; PAM sequence: CTG
ttgttagtgtataagaatgc

SEQ ID NO: 362995 - DNA, 20 bp, Artificial Sequence
  Description of Artificial Sequence: Synthetic oligonucleotide
  Target: LAMA2; (+) strand; PAM type: YTN; PAM sequence: TTG
ttagtgtataagaatgcttg

SEQ ID NO: 362996 - DNA, 20 bp, Artificial Sequence
  Description of Artificial Sequence: Synthetic oligonucleotide
  Target: LAMA2; (+) strand; PAM type: YTN; PAM sequence: TTA
gtgtataagaatgcttgtga

SEQ ID NO: 362997 - DNA, 20 bp, Artificial Sequence
  Description of Artificial Sequence: Synthetic oligonucleotide
  Target: LAMA2; (+) strand; PAM type: YTN; PAM sequence: CTT
gtgatttttctacattgatt

SEQ ID NO: 362998 - DNA, 20 bp, Artificial Sequence
  Description of Artificial Sequence: Synthetic oligonucleotide
  Target: LAMA2; (+) strand; PAM type: YTN; PAM sequence: TTG
tgatttttctacattgattt

SEQ ID NO: 362999 - DNA, 20 bp, Artificial Sequence
  Description of Artificial Sequence: Synthetic oligonucleotide
  Target: LAMA2; (+) strand; PAM type: YTN; PAM sequence: TTT
ttctacattgattttgtatc

SEQ ID NO: 363000 - DNA, 20 bp, Artificial Sequence
  Description of Artificial Sequence: Synthetic oligonucleotide
  Target: LAMA2; (+) strand; PAM type: YTN; PAM sequence: TTT
tctacattgattttgtatcc

SEQ ID NO: 363001 - DNA, 20 bp, Artificial Sequence
  Description of Artificial Sequence: Synthetic oligonucleotide
  Target: LAMA2; (+) strand; PAM type: YTN; PAM sequence: TTT
ctacattgattttgtatcct

SEQ ID NO: 363002 - DNA, 20 bp, Artificial Sequence
  Description of Artificial Sequence: Synthetic oligonucleotide
  Target: LAMA2; (+) strand; PAM type: YTN; PAM sequence: TTC
tacattgattttgtatcctg

SEQ ID NO: 363003 - DNA, 20 bp, Artificial Sequence
  Description of Artificial Sequence: Synthetic oligonucleotide
  Target: LAMA2; (+) strand; PAM type: YTN; PAM sequence: CTA
cattgattttgtatcctgag

SEQ ID NO: 363004 - DNA, 20 bp, Artificial Sequence
  Description of Artificial Sequence: Synthetic oligonucleotide
  Target: LAMA2; (+) strand; PAM type: YTN; PAM sequence: TTG
attttgtatcctgagacttt

SEQ ID NO: 363005 - DNA, 20 bp, Artificial Sequence
  Description of Artificial Sequence: Synthetic oligonucleotide
  Target: LAMA2; (+) strand; PAM type: YTN; PAM sequence: TTT
tgtatcctgagactttggtg

SEQ ID NO: 363006 - DNA, 20 bp, Artificial Sequence
  Description of Artificial Sequence: Synthetic oligonucleotide
  Target: LAMA2; (+) strand; PAM type: YTN; PAM sequence: TTT
gtatcctgagactttggtga

SEQ ID NO: 363007 - DNA, 20 bp, Artificial Sequence
  Description of Artificial Sequence: Synthetic oligonucleotide
  Target: LAMA2; (+) strand; PAM type: YTN; PAM sequence: TTG
tatcctgagactttggtgaa

SEQ ID NO: 363008 - DNA, 20 bp, Artificial Sequence
  Description of Artificial Sequence: Synthetic oligonucleotide
  Target: LAMA2; (+) strand; PAM type: YTN; PAM sequence: CTG
agactttggtgaagttgctt

SEQ ID NO: 363009 - DNA, 20 bp, Artificial Sequence
  Description of Artificial Sequence: Synthetic oligonucleotide
  Target: LAMA2; (+) strand; PAM type: YTN; PAM sequence: CTT
tggtgaagttgcttatcagc

SEQ ID NO: 363010 - DNA, 20 bp, Artificial Sequence
  Description of Artificial Sequence: Synthetic oligonucleotide
  Target: LAMA2; (+) strand; PAM type: YTN; PAM sequence: TTT
ggtgaagttgcttatcagct

SEQ ID NO: 363011 - DNA, 20 bp, Artificial Sequence
  Description of Artificial Sequence: Synthetic oligonucleotide
  Target: LAMA2; (+) strand; PAM type: YTN; PAM sequence: TTG
gtgaagttgcttatcagctt

SEQ ID NO: 363012 - DNA, 20 bp, Artificial Sequence
  Description of Artificial Sequence: Synthetic oligonucleotide
  Target: LAMA2; (+) strand; PAM type: YTN; PAM sequence: TTG
cttatcagctttaggagatt

SEQ ID NO: 363013 - DNA, 20 bp, Artificial Sequence
  Description of Artificial Sequence: Synthetic oligonucleotide
  Target: LAMA2; (+) strand; PAM type: YTN; PAM sequence: CTT
atcagctttaggagattttg

SEQ ID NO: 363014 - DNA, 20 bp, Artificial Sequence
  Description of Artificial Sequence: Synthetic oligonucleotide
  Target: LAMA2; (+) strand; PAM type: YTN; PAM sequence: TTA
tcagctttaggagattttgg

SEQ ID NO: 363015 - DNA, 20 bp, Artificial Sequence
  Description of Artificial Sequence: Synthetic oligonucleotide
  Target: LAMA2; (+) strand; PAM type: YTN; PAM sequence: CTT
taggagattttgggctgaga

SEQ ID NO: 363016 - DNA, 20 bp, Artificial Sequence
  Description of Artificial Sequence: Synthetic oligonucleotide
  Target: LAMA2; (+) strand; PAM type: YTN; PAM sequence: TTT
aggagattttgggctgagac

SEQ ID NO: 363017 - DNA, 20 bp, Artificial Sequence
  Description of Artificial Sequence: Synthetic oligonucleotide
  Target: LAMA2; (+) strand; PAM type: YTN; PAM sequence: TTA
ggagattttgggctgagaca

SEQ ID NO: 363018 - DNA, 20 bp, Artificial Sequence
  Description of Artificial Sequence: Synthetic oligonucleotide
  Target: LAMA2; (+) strand; PAM type: YTN; PAM sequence: TTT
tgggctgagacaatggggtt

SEQ ID NO: 363019 - DNA, 20 bp, Artificial Sequence
  Description of Artificial Sequence: Synthetic oligonucleotide
  Target: LAMA2; (+) strand; PAM type: YTN; PAM sequence: TTT
gggctgagacaatggggttt

SEQ ID NO: 363020 - DNA, 20 bp, Artificial Sequence
  Description of Artificial Sequence: Synthetic oligonucleotide
  Target: LAMA2; (+) strand; PAM type: YTN; PAM sequence: TTG
ggctgagacaatggggtttt

SEQ ID NO: 363021 - DNA, 20 bp, Artificial Sequence
  Description of Artificial Sequence: Synthetic oligonucleotide
  Target: LAMA2; (+) strand; PAM type: YTN; PAM sequence: CTG
agacaatggggttttctaaa

SEQ ID NO: 363022 - DNA, 20 bp, Artificial Sequence
  Description of Artificial Sequence: Synthetic oligonucleotide
  Target: LAMA2; (+) strand; PAM type: YTN; PAM sequence: TTT
tctaaatatacaattatgtc

SEQ ID NO: 363023 - DNA, 20 bp, Artificial Sequence
  Description of Artificial Sequence: Synthetic oligonucleotide
  Target: LAMA2; (+) strand; PAM type: YTN; PAM sequence: TTT
ctaaatatacaattatgtca

SEQ ID NO: 363024 - DNA, 20 bp, Artificial Sequence
  Description of Artificial Sequence: Synthetic oligonucleotide
  Target: LAMA2; (+) strand; PAM type: YTN; PAM sequence: TTC
taaatatacaattatgtcat

SEQ ID NO: 363025 - DNA, 20 bp, Artificial Sequence
  Description of Artificial Sequence: Synthetic oligonucleotide
  Target: LAMA2; (+) strand; PAM type: YTN; PAM sequence: CTA
aatatacaattatgtcatct

SEQ ID NO: 363026 - DNA, 20 bp, Artificial Sequence
  Description of Artificial Sequence: Synthetic oligonucleotide
  Target: LAMA2; (+) strand; PAM type: YTN; PAM sequence: TTA
tgtcatctgcaaacagggac

SEQ ID NO: 363027 - DNA, 20 bp, Artificial Sequence
  Description of Artificial Sequence: Synthetic oligonucleotide
  Target: LAMA2; (+) strand; PAM type: YTN; PAM sequence: CTG
caaacagggacaatttgact

SEQ ID NO: 363028 - DNA, 20 bp, Artificial Sequence
  Description of Artificial Sequence: Synthetic oligonucleotide
  Target: LAMA2; (+) strand; PAM type: YTN; PAM sequence: TTT
gactacctcttttcctaatt

SEQ ID NO: 363029 - DNA, 20 bp, Artificial Sequence
  Description of Artificial Sequence: Synthetic oligonucleotide
  Target: LAMA2; (+) strand; PAM type: YTN; PAM sequence: TTG
actacctcttttcctaatta

SEQ ID NO: 363030 - DNA, 20 bp, Artificial Sequence
  Description of Artificial Sequence: Synthetic oligonucleotide
  Target: LAMA2; (+) strand; PAM type: YTN; PAM sequence: CTA
cctcttttcctaattaaata

SEQ ID NO: 363031 - DNA, 20 bp, Artificial Sequence
  Description of Artificial Sequence: Synthetic oligonucleotide
  Target: LAMA2; (+) strand; PAM type: YTN; PAM sequence: CTC
ttttcctaattaaataccct

SEQ ID NO: 363032 - DNA, 20 bp, Artificial Sequence
  Description of Artificial Sequence: Synthetic oligonucleotide
  Target: LAMA2; (+) strand; PAM type: YTN; PAM sequence: CTT
ttcctaattaaatacccttc

SEQ ID NO: 363033 - DNA, 20 bp, Artificial Sequence
  Description of Artificial Sequence: Synthetic oligonucleotide
  Target: LAMA2; (+) strand; PAM type: YTN; PAM sequence: TTT
tcctaattaaatacccttca

SEQ ID NO: 363034 - DNA, 20 bp, Artificial Sequence
  Description of Artificial Sequence: Synthetic oligonucleotide
  Target: LAMA2; (+) strand; PAM type: YTN; PAM sequence: TTT
cctaattaaatacccttcat

SEQ ID NO: 363035 - DNA, 20 bp, Artificial Sequence
  Description of Artificial Sequence: Synthetic oligonucleotide
  Target: LAMA2; (+) strand; PAM type: YTN; PAM sequence: TTC
ctaattaaatacccttcatt

SEQ ID NO: 363036 - DNA, 20 bp, Artificial Sequence
  Description of Artificial Sequence: Synthetic oligonucleotide
  Target: LAMA2; (+) strand; PAM type: YTN; PAM sequence: CTA
attaaatacccttcattact

SEQ ID NO: 363037 - DNA, 20 bp, Artificial Sequence
  Description of Artificial Sequence: Synthetic oligonucleotide
  Target: LAMA2; (+) strand; PAM type: YTN; PAM sequence: TTA
aatacccttcattactttct

SEQ ID NO: 363038 - DNA, 20 bp, Artificial Sequence
  Description of Artificial Sequence: Synthetic oligonucleotide
  Target: LAMA2; (+) strand; PAM type: YTN; PAM sequence: CTT
cattactttctcctgcctga

SEQ ID NO: 363039 - DNA, 20 bp, Artificial Sequence
  Description of Artificial Sequence: Synthetic oligonucleotide
  Target: LAMA2; (+) strand; PAM type: YTN; PAM sequence: TTC
attactttctcctgcctgat

SEQ ID NO: 363040 - DNA, 20 bp, Artificial Sequence
  Description of Artificial Sequence: Synthetic oligonucleotide
  Target: LAMA2; (+) strand; PAM type: YTN; PAM sequence: TTA
ctttctcctgcctgattgcc

SEQ ID NO: 363041 - DNA, 20 bp, Artificial Sequence
  Description of Artificial Sequence: Synthetic oligonucleotide
  Target: LAMA2; (+) strand; PAM type: YTN; PAM sequence: CTT
tctcctgcctgattgccctg

SEQ ID NO: 363042 - DNA, 20 bp, Artificial Sequence
  Description of Artificial Sequence: Synthetic oligonucleotide
  Target: LAMA2; (+) strand; PAM type: YTN; PAM sequence: TTT
ctcctgcctgattgccctgg

SEQ ID NO: 363043 - DNA, 20 bp, Artificial Sequence
  Description of Artificial Sequence: Synthetic oligonucleotide
  Target: LAMA2; (+) strand; PAM type: YTN; PAM sequence: TTC
tcctgcctgattgccctggc

SEQ ID NO: 363044 - DNA, 20 bp, Artificial Sequence
  Description of Artificial Sequence: Synthetic oligonucleotide
  Target: LAMA2; (+) strand; PAM type: YTN; PAM sequence: CTC
ctgcctgattgccctggcca

SEQ ID NO: 363045 - DNA, 20 bp, Artificial Sequence
  Description of Artificial Sequence: Synthetic oligonucleotide
  Target: LAMA2; (+) strand; PAM type: YTN; PAM sequence: CTG
cctgattgccctggccagaa

SEQ ID NO: 363046 - DNA, 20 bp, Artificial Sequence
  Description of Artificial Sequence: Synthetic oligonucleotide
  Target: LAMA2; (+) strand; PAM type: YTN; PAM sequence: CTG
attgccctggccagaacttc

SEQ ID NO: 363047 - DNA, 20 bp, Artificial Sequence
  Description of Artificial Sequence: Synthetic oligonucleotide
  Target: LAMA2; (+) strand; PAM type: YTN; PAM sequence: TTG
ccctggccagaacttccaac

SEQ ID NO: 363048 - DNA, 20 bp, Artificial Sequence
  Description of Artificial Sequence: Synthetic oligonucleotide
  Target: LAMA2; (+) strand; PAM type: YTN; PAM sequence: CTG
gccagaacttccaacactat

SEQ ID NO: 363049 - DNA, 20 bp, Artificial Sequence
  Description of Artificial Sequence: Synthetic oligonucleotide
  Target: LAMA2; (+) strand; PAM type: YTN; PAM sequence: CTT
ccaacactatgttgaatagg

SEQ ID NO: 363050 - DNA, 20 bp, Artificial Sequence
  Description of Artificial Sequence: Synthetic oligonucleotide
  Target: LAMA2; (+) strand; PAM type: YTN; PAM sequence: TTC
caacactatgttgaatagga

SEQ ID NO: 363051 - DNA, 20 bp, Artificial Sequence
  Description of Artificial Sequence: Synthetic oligonucleotide
  Target: LAMA2; (+) strand; PAM type: YTN; PAM sequence: CTA
tgttgaataggagtggtgag

SEQ ID NO: 363052 - DNA, 20 bp, Artificial Sequence
  Description of Artificial Sequence: Synthetic oligonucleotide
  Target: LAMA2; (+) strand; PAM type: YTN; PAM sequence: TTG
aataggagtggtgagagagg

SEQ ID NO: 363053 - DNA, 20 bp, Artificial Sequence
  Description of Artificial Sequence: Synthetic oligonucleotide
  Target: LAMA2; (+) strand; PAM type: YTN; PAM sequence: CTG
tcttgtgccagttttcaaag

SEQ ID NO: 363054 - DNA, 20 bp, Artificial Sequence
  Description of Artificial Sequence: Synthetic oligonucleotide
  Target: LAMA2; (+) strand; PAM type: YTN; PAM sequence: CTT
gtgccagttttcaaagggaa

SEQ ID NO: 363055 - DNA, 20 bp, Artificial Sequence
  Description of Artificial Sequence: Synthetic oligonucleotide
  Target: LAMA2; (+) strand; PAM type: YTN; PAM sequence: TTG
tgccagttttcaaagggaat

SEQ ID NO: 363056 - DNA, 20 bp, Artificial Sequence
  Description of Artificial Sequence: Synthetic oligonucleotide
  Target: LAMA2; (+) strand; PAM type: YTN; PAM sequence: TTT
tcaaagggaatgcttccagt

SEQ ID NO: 363057 - DNA, 20 bp, Artificial Sequence
  Description of Artificial Sequence: Synthetic oligonucleotide
  Target: LAMA2; (+) strand; PAM type: YTN; PAM sequence: TTT
caaagggaatgcttccagtt

SEQ ID NO: 363058 - DNA, 20 bp, Artificial Sequence
  Description of Artificial Sequence: Synthetic oligonucleotide
  Target: LAMA2; (+) strand; PAM type: YTN; PAM sequence: TTC
aaagggaatgcttccagttt

SEQ ID NO: 363059 - DNA, 20 bp, Artificial Sequence
  Description of Artificial Sequence: Synthetic oligonucleotide
  Target: LAMA2; (+) strand; PAM type: YTN; PAM sequence: CTT
ccagtttttgcccattcagt

SEQ ID NO: 363060 - DNA, 20 bp, Artificial Sequence
  Description of Artificial Sequence: Synthetic oligonucleotide
  Target: LAMA2; (+) strand; PAM type: YTN; PAM sequence: TTC
cagtttttgcccattcagta

SEQ ID NO: 363061 - DNA, 20 bp, Artificial Sequence
  Description of Artificial Sequence: Synthetic oligonucleotide
  Target: LAMA2; (+) strand; PAM type: YTN; PAM sequence: TTT
ttgcccattcagtatgatat

SEQ ID NO: 363062 - DNA, 20 bp, Artificial Sequence
  Description of Artificial Sequence: Synthetic oligonucleotide
  Target: LAMA2; (+) strand; PAM type: YTN; PAM sequence: TTT
tgcccattcagtatgatatt

SEQ ID NO: 363063 - DNA, 20 bp, Artificial Sequence
  Description of Artificial Sequence: Synthetic oligonucleotide
  Target: LAMA2; (+) strand; PAM type: YTN; PAM sequence: TTT
gcccattcagtatgatattg

SEQ ID NO: 363064 - DNA, 20 bp, Artificial Sequence
  Description of Artificial Sequence: Synthetic oligonucleotide
  Target: LAMA2; (+) strand; PAM type: YTN; PAM sequence: TTG
cccattcagtatgatattgg

SEQ ID NO: 363065 - DNA, 20 bp, Artificial Sequence
  Description of Artificial Sequence: Synthetic oligonucleotide
  Target: LAMA2; (+) strand; PAM type: YTN; PAM sequence: TTC
agtatgatattggctgtggg

SEQ ID NO: 363066 - DNA, 20 bp, Artificial Sequence
  Description of Artificial Sequence: Synthetic oligonucleotide
  Target: LAMA2; (+) strand; PAM type: YTN; PAM sequence: TTG
gctgtgggtttgtcatagat

SEQ ID NO: 363067 - DNA, 20 bp, Artificial Sequence
  Description of Artificial Sequence: Synthetic oligonucleotide
  Target: LAMA2; (+) strand; PAM type: YTN; PAM sequence: CTG
tgggtttgtcatagatagct

SEQ ID NO: 363068 - DNA, 20 bp, Artificial Sequence
  Description of Artificial Sequence: Synthetic oligonucleotide
  Target: LAMA2; (+) strand; PAM type: YTN; PAM sequence: TTT
gtcatagatagctcttatta

SEQ ID NO: 363069 - DNA, 20 bp, Artificial Sequence
  Description of Artificial Sequence: Synthetic oligonucleotide
  Target: LAMA2; (+) strand; PAM type: YTN; PAM sequence: TTG
tcatagatagctcttattat

SEQ ID NO: 363070 - DNA, 20 bp, Artificial Sequence
  Description of Artificial Sequence: Synthetic oligonucleotide
  Target: LAMA2; (+) strand; PAM type: YTN; PAM sequence: CTC
ttattattttgagatacatc

SEQ ID NO: 363071 - DNA, 20 bp, Artificial Sequence
  Description of Artificial Sequence: Synthetic oligonucleotide
  Target: LAMA2; (+) strand; PAM type: YTN; PAM sequence: CTT
attattttgagatacatccc

SEQ ID NO: 363072 - DNA, 20 bp, Artificial Sequence
  Description of Artificial Sequence: Synthetic oligonucleotide
  Target: LAMA2; (+) strand; PAM type: YTN; PAM sequence: TTA
ttattttgagatacatccca

SEQ ID NO: 363073 - DNA, 20 bp, Artificial Sequence
  Description of Artificial Sequence: Synthetic oligonucleotide
  Target: LAMA2; (+) strand; PAM type: YTN; PAM sequence: TTA
ttttgagatacatcccatca

SEQ ID NO: 363074 - DNA, 20 bp, Artificial Sequence
  Description of Artificial Sequence: Synthetic oligonucleotide
  Target: LAMA2; (+) strand; PAM type: YTN; PAM sequence: TTT
tgagatacatcccatcaata

SEQ ID NO: 363075 - DNA, 20 bp, Artificial Sequence
  Description of Artificial Sequence: Synthetic oligonucleotide
  Target: LAMA2; (+) strand; PAM type: YTN; PAM sequence: TTT
gagatacatcccatcaatac

SEQ ID NO: 363076 - DNA, 20 bp, Artificial Sequence
  Description of Artificial Sequence: Synthetic oligonucleotide
  Target: LAMA2; (+) strand; PAM type: YTN; PAM sequence: TTG
agatacatcccatcaatacc

SEQ ID NO: 363077 - DNA, 20 bp, Artificial Sequence
  Description of Artificial Sequence: Synthetic oligonucleotide
  Target: LAMA2; (+) strand; PAM type: YTN; PAM sequence: CTA
atttattgagagtttttggc

SEQ ID NO: 363078 - DNA, 20 bp, Artificial Sequence
  Description of Artificial Sequence: Synthetic oligonucleotide
  Target: LAMA2; (+) strand; PAM type: YTN; PAM sequence: TTT
attgagagtttttggcatga

SEQ ID NO: 363079 - DNA, 20 bp, Artificial Sequence
  Description of Artificial Sequence: Synthetic oligonucleotide
  Target: LAMA2; (+) strand; PAM type: YTN; PAM sequence: TTA
ttgagagtttttggcatgaa

SEQ ID NO: 363080 - DNA, 20 bp, Artificial Sequence
  Description of Artificial Sequence: Synthetic oligonucleotide
  Target: LAMA2; (+) strand; PAM type: YTN; PAM sequence: TTG
agagtttttggcatgaaggg

SEQ ID NO: 363081 - DNA, 20 bp, Artificial Sequence
  Description of Artificial Sequence: Synthetic oligonucleotide
  Target: LAMA2; (+) strand; PAM type: YTN; PAM sequence: TTT
ttggcatgaagggctgttga

SEQ ID NO: 363082 - DNA, 20 bp, Artificial Sequence
  Description of Artificial Sequence: Synthetic oligonucleotide
  Target: LAMA2; (+) strand; PAM type: YTN; PAM sequence: TTT
tggcatgaagggctgttgaa

SEQ ID NO: 363083 - DNA, 20 bp, Artificial Sequence
  Description of Artificial Sequence: Synthetic oligonucleotide
  Target: LAMA2; (+) strand; PAM type: YTN; PAM sequence: TTT
ggcatgaagggctgttgaat

SEQ ID NO: 363084 - DNA, 20 bp, Artificial Sequence
  Description of Artificial Sequence: Synthetic oligonucleotide
  Target: LAMA2; (+) strand; PAM type: YTN; PAM sequence: TTG
gcatgaagggctgttgaatt

SEQ ID NO: 363085 - DNA, 20 bp, Artificial Sequence
  Description of Artificial Sequence: Synthetic oligonucleotide
  Target: LAMA2; (+) strand; PAM type: YTN; PAM sequence: CTG
ttgaattttgtcaaaggcct

SEQ ID NO: 363086 - DNA, 20 bp, Artificial Sequence
  Description of Artificial Sequence: Synthetic oligonucleotide
  Target: LAMA2; (+) strand; PAM type: YTN; PAM sequence: TTG
aattttgtcaaaggcctttt

SEQ ID NO: 363087 - DNA, 20 bp, Artificial Sequence
  Description of Artificial Sequence: Synthetic oligonucleotide
  Target: LAMA2; (+) strand; PAM type: YTN; PAM sequence: TTT
tgtcaaaggccttttctgca

SEQ ID NO: 363088 - DNA, 20 bp, Artificial Sequence
  Description of Artificial Sequence: Synthetic oligonucleotide
  Target: LAMA2; (+) strand; PAM type: YTN; PAM sequence: TTT
gtcaaaggccttttctgcat

SEQ ID NO: 363089 - DNA, 20 bp, Artificial Sequence
  Description of Artificial Sequence: Synthetic oligonucleotide
  Target: LAMA2; (+) strand; PAM type: YTN; PAM sequence: TTG
tcaaaggccttttctgcatt

SEQ ID NO: 363090 - DNA, 20 bp, Artificial Sequence
  Description of Artificial Sequence: Synthetic oligonucleotide
  Target: LAMA2; (+) strand; PAM type: YTN; PAM sequence: CTT
ttctgcatttattgagataa

SEQ ID NO: 363091 - DNA, 20 bp, Artificial Sequence
  Description of Artificial Sequence: Synthetic oligonucleotide
  Target: LAMA2; (+) strand; PAM type: YTN; PAM sequence: TTT
tctgcatttattgagataat

SEQ ID NO: 363092 - DNA, 20 bp, Artificial Sequence
  Description of Artificial Sequence: Synthetic oligonucleotide
  Target: LAMA2; (+) strand; PAM type: YTN; PAM sequence: TTT
ctgcatttattgagataatc

SEQ ID NO: 363093 - DNA, 20 bp, Artificial Sequence
  Description of Artificial Sequence: Synthetic oligonucleotide
  Target: LAMA2; (+) strand; PAM type: YTN; PAM sequence: TTC
tgcatttattgagataatca

SEQ ID NO: 363094 - DNA, 20 bp, Artificial Sequence
  Description of Artificial Sequence: Synthetic oligonucleotide
  Target: LAMA2; (+) strand; PAM type: YTN; PAM sequence: CTG
catttattgagataatcatg

SEQ ID NO: 363095 - DNA, 20 bp, Artificial Sequence
  Description of Artificial Sequence: Synthetic oligonucleotide
  Target: LAMA2; (+) strand; PAM type: YTN; PAM sequence: TTT
attgagataatcatgtggtt

SEQ ID NO: 363096 - DNA, 20 bp, Artificial Sequence
  Description of Artificial Sequence: Synthetic oligonucleotide
  Target: LAMA2; (+) strand; PAM type: YTN; PAM sequence: TTA
ttgagataatcatgtggttt

SEQ ID NO: 363097 - DNA, 20 bp, Artificial Sequence
  Description of Artificial Sequence: Synthetic oligonucleotide
  Target: LAMA2; (+) strand; PAM type: YTN; PAM sequence: TTG
agataatcatgtggtttttg

SEQ ID NO: 363098 - DNA, 20 bp, Artificial Sequence
  Description of Artificial Sequence: Synthetic oligonucleotide
  Target: LAMA2; (+) strand; PAM type: YTN; PAM sequence: TTT
ttgtttatatgctggattac

SEQ ID NO: 363099 - DNA, 20 bp, Artificial Sequence
  Description of Artificial Sequence: Synthetic oligonucleotide
  Target: LAMA2; (+) strand; PAM type: YTN; PAM sequence: TTT
tgtttatatgctggattacg

SEQ ID NO: 363100 - DNA, 20 bp, Artificial Sequence
  Description of Artificial Sequence: Synthetic oligonucleotide
  Target: LAMA2; (+) strand; PAM type: YTN; PAM sequence: TTT
gtttatatgctggattacgt

SEQ ID NO: 363101 - DNA, 20 bp, Artificial Sequence
  Description of Artificial Sequence: Synthetic oligonucleotide
  Target: LAMA2; (+) strand; PAM type: YTN; PAM sequence: TTG
tttatatgctggattacgtt

SEQ ID NO: 363102 - DNA, 20 bp, Artificial Sequence
  Description of Artificial Sequence: Synthetic oligonucleotide
  Target: LAMA2; (+) strand; PAM type: YTN; PAM sequence: TTT
atatgctggattacgtttat

SEQ ID NO: 363103 - DNA, 20 bp, Artificial Sequence
  Description of Artificial Sequence: Synthetic oligonucleotide
  Target: LAMA2; (+) strand; PAM type: YTN; PAM sequence: TTA
tatgctggattacgtttatt

SEQ ID NO: 363104 - DNA, 20 bp, Artificial Sequence
  Description of Artificial Sequence: Synthetic oligonucleotide
  Target: LAMA2; (+) strand; PAM type: YTN; PAM sequence: CTG
gattacgtttattgatttgt

SEQ ID NO: 363105 - DNA, 20 bp, Artificial Sequence
  Description of Artificial Sequence: Synthetic oligonucleotide
  Target: LAMA2; (+) strand; PAM type: YTN; PAM sequence: TTA
cgtttattgatttgtgtatg

SEQ ID NO: 363106 - DNA, 20 bp, Artificial Sequence
  Description of Artificial Sequence: Synthetic oligonucleotide
  Target: LAMA2; (+) strand; PAM type: YTN; PAM sequence: TTT
attgatttgtgtatgttgaa

SEQ ID NO: 363107 - DNA, 20 bp, Artificial Sequence
  Description of Artificial Sequence: Synthetic oligonucleotide
  Target: LAMA2; (+) strand; PAM type: YTN; PAM sequence: TTA
ttgatttgtgtatgttgaac

SEQ ID NO: 363108 - DNA, 20 bp, Artificial Sequence
  Description of Artificial Sequence: Synthetic oligonucleotide
  Target: LAMA2; (+) strand; PAM type: YTN; PAM sequence: TTG
atttgtgtatgttgaaccag

SEQ ID NO: 363109 - DNA, 20 bp, Artificial Sequence
  Description of Artificial Sequence: Synthetic oligonucleotide
  Target: LAMA2; (+) strand; PAM type: YTN; PAM sequence: TTT
gtgtatgttgaaccagcctt

SEQ ID NO: 363110 - DNA, 20 bp, Artificial Sequence
  Description of Artificial Sequence: Synthetic oligonucleotide
  Target: LAMA2; (+) strand; PAM type: YTN; PAM sequence: TTG
tgtatgttgaaccagccttg

SEQ ID NO: 363111 - DNA, 20 bp, Artificial Sequence
  Description of Artificial Sequence: Synthetic oligonucleotide
  Target: LAMA2; (+) strand; PAM type: YTN; PAM sequence: TTG
aaccagccttgcatcccgtg

SEQ ID NO: 363112 - DNA, 20 bp, Artificial Sequence
  Description of Artificial Sequence: Synthetic oligonucleotide
  Target: LAMA2; (+) strand; PAM type: YTN; PAM sequence: CTT
gcatcccgtggatgaagccc

SEQ ID NO: 363113 - DNA, 20 bp, Artificial Sequence
  Description of Artificial Sequence: Synthetic oligonucleotide
  Target: LAMA2; (+) strand; PAM type: YTN; PAM sequence: TTG
catcccgtggatgaagccca

SEQ ID NO: 363114 - DNA, 20 bp, Artificial Sequence
  Description of Artificial Sequence: Synthetic oligonucleotide
  Target: LAMA2; (+) strand; PAM type: YTN; PAM sequence: CTT
gatcgtggtggataagcttt

SEQ ID NO: 363115 - DNA, 20 bp, Artificial Sequence
  Description of Artificial Sequence: Synthetic oligonucleotide
  Target: LAMA2; (+) strand; PAM type: YTN; PAM sequence: TTG
atcgtggtggataagctttt

SEQ ID NO: 363116 - DNA, 20 bp, Artificial Sequence
  Description of Artificial Sequence: Synthetic oligonucleotide
  Target: LAMA2; (+) strand; PAM type: YTN; PAM sequence: CTT
tttgatgtgctgctgcattc

SEQ ID NO: 363117 - DNA, 20 bp, Artificial Sequence
  Description of Artificial Sequence: Synthetic oligonucleotide
  Target: LAMA2; (+) strand; PAM type: YTN; PAM sequence: TTT
ttgatgtgctgctgcattca

SEQ ID NO: 363118 - DNA, 20 bp, Artificial Sequence
  Description of Artificial Sequence: Synthetic oligonucleotide
  Target: LAMA2; (+) strand; PAM type: YTN; PAM sequence: TTT
tgatgtgctgctgcattcag

SEQ ID NO: 363119 - DNA, 20 bp, Artificial Sequence
  Description of Artificial Sequence: Synthetic oligonucleotide
  Target: LAMA2; (+) strand; PAM type: YTN; PAM sequence: TTT
gatgtgctgctgcattcagt

SEQ ID NO: 363120 - DNA, 20 bp, Artificial Sequence
  Description of Artificial Sequence: Synthetic oligonucleotide
  Target: LAMA2; (+) strand; PAM type: YTN; PAM sequence: TTG
atgtgctgctgcattcagtt

SEQ ID NO: 363121 - DNA, 20 bp, Artificial Sequence
  Description of Artificial Sequence: Synthetic oligonucleotide
  Target: LAMA2; (+) strand; PAM type: YTN; PAM sequence: CTG
ctgcattcagtttgccatta

SEQ ID NO: 363122 - DNA, 20 bp, Artificial Sequence
  Description of Artificial Sequence: Synthetic oligonucleotide
  Target: LAMA2; (+) strand; PAM type: YTN; PAM sequence: CTG
cattcagtttgccattattt

SEQ ID NO: 363123 - DNA, 20 bp, Artificial Sequence
  Description of Artificial Sequence: Synthetic oligonucleotide
  Target: LAMA2; (+) strand; PAM type: YTN; PAM sequence: TTC
agtttgccattattttattg

SEQ ID NO: 363124 - DNA, 20 bp, Artificial Sequence
  Description of Artificial Sequence: Synthetic oligonucleotide
  Target: LAMA2; (+) strand; PAM type: YTN; PAM sequence: TTT
gccattattttattgaggat

SEQ ID NO: 363125 - DNA, 20 bp, Artificial Sequence
  Description of Artificial Sequence: Synthetic oligonucleotide
  Target: LAMA2; (+) strand; PAM type: YTN; PAM sequence: TTG
ccattattttattgaggatt

SEQ ID NO: 363126 - DNA, 20 bp, Artificial Sequence
  Description of Artificial Sequence: Synthetic oligonucleotide
  Target: LAMA2; (+) strand; PAM type: YTN; PAM sequence: TTA
ttttattgaggatttttgca

SEQ ID NO: 363127 - DNA, 20 bp, Artificial Sequence
  Description of Artificial Sequence: Synthetic oligonucleotide
  Target: LAMA2; (+) strand; PAM type: YTN; PAM sequence: TTT
tattgaggatttttgcattg

SEQ ID NO: 363128 - DNA, 20 bp, Artificial Sequence
  Description of Artificial Sequence: Synthetic oligonucleotide
  Target: LAMA2; (+) strand; PAM type: YTN; PAM sequence: TTT
attgaggatttttgcattga

SEQ ID NO: 363129 - DNA, 20 bp, Artificial Sequence
  Description of Artificial Sequence: Synthetic oligonucleotide
  Target: LAMA2; (+) strand; PAM type: YTN; PAM sequence: TTA
ttgaggatttttgcattgat

SEQ ID NO: 363130 - DNA, 20 bp, Artificial Sequence
  Description of Artificial Sequence: Synthetic oligonucleotide
  Target: LAMA2; (+) strand; PAM type: YTN; PAM sequence: TTG
aggatttttgcattgatgtt

SEQ ID NO: 363131 - DNA, 20 bp, Artificial Sequence
  Description of Artificial Sequence: Synthetic oligonucleotide
  Target: LAMA2; (+) strand; PAM type: YTN; PAM sequence: TTT
ttgcattgatgttcatcagg

SEQ ID NO: 363132 - DNA, 20 bp, Artificial Sequence
  Description of Artificial Sequence: Synthetic oligonucleotide
  Target: LAMA2; (+) strand; PAM type: YTN; PAM sequence: TTT
tgcattgatgttcatcaggg

SEQ ID NO: 363133 - DNA, 20 bp, Artificial Sequence
  Description of Artificial Sequence: Synthetic oligonucleotide
  Target: LAMA2; (+) strand; PAM type: YTN; PAM sequence: TTT
gcattgatgttcatcaggga

SEQ ID NO: 363134 - DNA, 20 bp, Artificial Sequence
  Description of Artificial Sequence: Synthetic oligonucleotide
  Target: LAMA2; (+) strand; PAM type: YTN; PAM sequence: TTG
cattgatgttcatcagggat

SEQ ID NO: 363135 - DNA, 20 bp, Artificial Sequence
  Description of Artificial Sequence: Synthetic oligonucleotide
  Target: LAMA2; (+) strand; PAM type: YTN; PAM sequence: TTG
atgttcatcagggatattag

SEQ ID NO: 363136 - DNA, 20 bp, Artificial Sequence
  Description of Artificial Sequence: Synthetic oligonucleotide
  Target: LAMA2; (+) strand; PAM type: YTN; PAM sequence: TTC
atcagggatattagtcaaaa

SEQ ID NO: 363137 - DNA, 20 bp, Artificial Sequence
  Description of Artificial Sequence: Synthetic oligonucleotide
  Target: LAMA2; (+) strand; PAM type: YTN; PAM sequence: TTA
gtcaaaaattctcttttttg

SEQ ID NO: 363138 - DNA, 20 bp, Artificial Sequence
  Description of Artificial Sequence: Synthetic oligonucleotide
  Target: LAMA2; (+) strand; PAM type: YTN; PAM sequence: TTC
tcttttttgttgtgtctctg

SEQ ID NO: 363139 - DNA, 20 bp, Artificial Sequence
  Description of Artificial Sequence: Synthetic oligonucleotide
  Target: LAMA2; (+) strand; PAM type: YTN; PAM sequence: CTC
ttttttgttgtgtctctgcc

SEQ ID NO: 363140 - DNA, 20 bp, Artificial Sequence
  Description of Artificial Sequence: Synthetic oligonucleotide
  Target: LAMA2; (+) strand; PAM type: YTN; PAM sequence: CTT
ttttgttgtgtctctgccag

SEQ ID NO: 363141 - DNA, 20 bp, Artificial Sequence
  Description of Artificial Sequence: Synthetic oligonucleotide
  Target: LAMA2; (+) strand; PAM type: YTN; PAM sequence: TTT
tttgttgtgtctctgccagg

SEQ ID NO: 363142 - DNA, 20 bp, Artificial Sequence
  Description of Artificial Sequence: Synthetic oligonucleotide
  Target: LAMA2; (+) strand; PAM type: YTN; PAM sequence: TTT
ttgttgtgtctctgccaggc

SEQ ID NO: 363143 - DNA, 20 bp, Artificial Sequence
  Description of Artificial Sequence: Synthetic oligonucleotide
  Target: LAMA2; (+) strand; PAM type: YTN; PAM sequence: TTT
tgttgtgtctctgccaggct

SEQ ID NO: 363144 - DNA, 20 bp, Artificial Sequence
  Description of Artificial Sequence: Synthetic oligonucleotide
  Target: LAMA2; (+) strand; PAM type: YTN; PAM sequence: TTT
gttgtgtctctgccaggctt

SEQ ID NO: 363145 - DNA, 20 bp, Artificial Sequence
  Description of Artificial Sequence: Synthetic oligonucleotide
  Target: LAMA2; (+) strand; PAM type: YTN; PAM sequence: TTG
ttgtgtctctgccaggcttt

SEQ ID NO: 363146 - DNA, 20 bp, Artificial Sequence
  Description of Artificial Sequence: Synthetic oligonucleotide
  Target: LAMA2; (+) strand; PAM type: YTN; PAM sequence: TTG
tgtctctgccaggcttttgt

SEQ ID NO: 363147 - DNA, 20 bp, Artificial Sequence
  Description of Artificial Sequence: Synthetic oligonucleotide
  Target: LAMA2; (+) strand; PAM type: YTN; PAM sequence: CTC
tgccaggcttttgtatcagg

SEQ ID NO: 363148 - DNA, 20 bp, Artificial Sequence
  Description of Artificial Sequence: Synthetic oligonucleotide
  Target: LAMA2; (+) strand; PAM type: YTN; PAM sequence: CTG
ccaggcttttgtatcaggag

SEQ ID NO: 363149 - DNA, 20 bp, Artificial Sequence
  Description of Artificial Sequence: Synthetic oligonucleotide
  Target: LAMA2; (+) strand; PAM type: YTN; PAM sequence: CTT
ttgtatcaggaggatgctgg

SEQ ID NO: 363150 - DNA, 20 bp, Artificial Sequence
  Description of Artificial Sequence: Synthetic oligonucleotide
  Target: LAMA2; (+) strand; PAM type: YTN; PAM sequence: TTT
tgtatcaggaggatgctggc

SEQ ID NO: 363151 - DNA, 20 bp, Artificial Sequence
  Description of Artificial Sequence: Synthetic oligonucleotide
  Target: LAMA2; (+) strand; PAM type: YTN; PAM sequence: TTT
gtatcaggaggatgctggcc

SEQ ID NO: 363152 - DNA, 20 bp, Artificial Sequence
  Description of Artificial Sequence: Synthetic oligonucleotide
  Target: LAMA2; (+) strand; PAM type: YTN; PAM sequence: TTG
tatcaggaggatgctggcct

SEQ ID NO: 363153 - DNA, 20 bp, Artificial Sequence
  Description of Artificial Sequence: Synthetic oligonucleotide
  Target: LAMA2; (+) strand; PAM type: YTN; PAM sequence: CTG
gcctcatcaaatgagttaga

SEQ ID NO: 363154 - DNA, 20 bp, Artificial Sequence
  Description of Artificial Sequence: Synthetic oligonucleotide
  Target: LAMA2; (+) strand; PAM type: YTN; PAM sequence: CTC
atcaaatgagttagagagga

SEQ ID NO: 363155 - DNA, 20 bp, Artificial Sequence
  Description of Artificial Sequence: Synthetic oligonucleotide
  Target: LAMA2; (+) strand; PAM type: YTN; PAM sequence: TTA
gagaggattccctctttttc

SEQ ID NO: 363156 - DNA, 20 bp, Artificial Sequence
  Description of Artificial Sequence: Synthetic oligonucleotide
  Target: LAMA2; (+) strand; PAM type: YTN; PAM sequence: TTC
cctctttttctattgattgg

SEQ ID NO: 363157 - DNA, 20 bp, Artificial Sequence
  Description of Artificial Sequence: Synthetic oligonucleotide
  Target: LAMA2; (+) strand; PAM type: YTN; PAM sequence: CTC
tttttctattgattggaata

SEQ ID NO: 363158 - DNA, 20 bp, Artificial Sequence
  Description of Artificial Sequence: Synthetic oligonucleotide
  Target: LAMA2; (+) strand; PAM type: YTN; PAM sequence: CTT
tttctattgattggaatagt

SEQ ID NO: 363159 - DNA, 20 bp, Artificial Sequence
  Description of Artificial Sequence: Synthetic oligonucleotide
  Target: LAMA2; (+) strand; PAM type: YTN; PAM sequence: TTT
ttctattgattggaatagtt

SEQ ID NO: 363160 - DNA, 20 bp, Artificial Sequence
  Description of Artificial Sequence: Synthetic oligonucleotide
  Target: LAMA2; (+) strand; PAM type: YTN; PAM sequence: TTT
tctattgattggaatagttt

SEQ ID NO: 363161 - DNA, 20 bp, Artificial Sequence
  Description of Artificial Sequence: Synthetic oligonucleotide
  Target: LAMA2; (+) strand; PAM type: YTN; PAM sequence: TTT
ctattgattggaatagtttc

SEQ ID NO: 363162 - DNA, 20 bp, Artificial Sequence
  Description of Artificial Sequence: Synthetic oligonucleotide
  Target: LAMA2; (+) strand; PAM type: YTN; PAM sequence: TTC
tattgattggaatagtttca

SEQ ID NO: 363163 - DNA, 20 bp, Artificial Sequence
  Description of Artificial Sequence: Synthetic oligonucleotide
  Target: LAMA2; (+) strand; PAM type: YTN; PAM sequence: CTA
ttgattggaatagtttcaga

SEQ ID NO: 363164 - DNA, 20 bp, Artificial Sequence
  Description of Artificial Sequence: Synthetic oligonucleotide
  Target: LAMA2; (+) strand; PAM type: YTN; PAM sequence: TTG
attggaatagtttcagaagg

SEQ ID NO: 363165 - DNA, 20 bp, Artificial Sequence
  Description of Artificial Sequence: Synthetic oligonucleotide
  Target: LAMA2; (+) strand; PAM type: YTN; PAM sequence: TTG
gaatagtttcagaaggaatg

SEQ ID NO: 363166 - DNA, 20 bp, Artificial Sequence
  Description of Artificial Sequence: Synthetic oligonucleotide
  Target: LAMA2; (+) strand; PAM type: YTN; PAM sequence: TTT
cagaaggaatggtaccacct

SEQ ID NO: 363167 - DNA, 20 bp, Artificial Sequence
  Description of Artificial Sequence: Synthetic oligonucleotide
  Target: LAMA2; (+) strand; PAM type: YTN; PAM sequence: TTC
agaaggaatggtaccacctc

SEQ ID NO: 363168 - DNA, 20 bp, Artificial Sequence
  Description of Artificial Sequence: Synthetic oligonucleotide
  Target: LAMA2; (+) strand; PAM type: YTN; PAM sequence: CTC
ctccttgtacctctggtaga

SEQ ID NO: 363169 - DNA, 20 bp, Artificial Sequence
  Description of Artificial Sequence: Synthetic oligonucleotide
  Target: LAMA2; (+) strand; PAM type: YTN; PAM sequence: CTC
cttgtacctctggtagaatt

SEQ ID NO: 363170 - DNA, 20 bp, Artificial Sequence
  Description of Artificial Sequence: Synthetic oligonucleotide
  Target: LAMA2; (+) strand; PAM type: YTN; PAM sequence: CTT
gtacctctggtagaattcgg

SEQ ID NO: 363171 - DNA, 20 bp, Artificial Sequence
  Description of Artificial Sequence: Synthetic oligonucleotide
  Target: LAMA2; (+) strand; PAM type: YTN; PAM sequence: TTG
tacctctggtagaattcggc

SEQ ID NO: 363172 - DNA, 20 bp, Artificial Sequence
  Description of Artificial Sequence: Synthetic oligonucleotide
  Target: LAMA2; (+) strand; PAM type: YTN; PAM sequence: CTC
tggtagaattcggctgtgaa

SEQ ID NO: 363173 - DNA, 20 bp, Artificial Sequence
  Description of Artificial Sequence: Synthetic oligonucleotide
  Target: LAMA2; (+) strand; PAM type: YTN; PAM sequence: CTG
gtagaattcggctgtgaatc

SEQ ID NO: 363174 - DNA, 20 bp, Artificial Sequence
  Description of Artificial Sequence: Synthetic oligonucleotide
  Target: LAMA2; (+) strand; PAM type: YTN; PAM sequence: TTC
ggctgtgaatccatctggtc

SEQ ID NO: 363175 - DNA, 20 bp, Artificial Sequence
  Description of Artificial Sequence: Synthetic oligonucleotide
  Target: LAMA2; (+) strand; PAM type: YTN; PAM sequence: CTG
tgaatccatctggtcctgga

SEQ ID NO: 363176 - DNA, 20 bp, Artificial Sequence
  Description of Artificial Sequence: Synthetic oligonucleotide
  Target: LAMA2; (+) strand; PAM type: YTN; PAM sequence: CTG
gtcctggactttttttggtt

SEQ ID NO: 363177 - DNA, 20 bp, Artificial Sequence
  Description of Artificial Sequence: Synthetic oligonucleotide
  Target: LAMA2; (+) strand; PAM type: YTN; PAM sequence: CTG
gactttttttggttggtagg

SEQ ID NO: 363178 - DNA, 20 bp, Artificial Sequence
  Description of Artificial Sequence: Synthetic oligonucleotide
  Target: LAMA2; (+) strand; PAM type: YTN; PAM sequence: CTT
tttttggttggtaggctatt

SEQ ID NO: 363179 - DNA, 20 bp, Artificial Sequence
  Description of Artificial Sequence: Synthetic oligonucleotide
  Target: LAMA2; (+) strand; PAM type: YTN; PAM sequence: TTT
ttttggttggtaggctatta

SEQ ID NO: 363180 - DNA, 20 bp, Artificial Sequence
  Description of Artificial Sequence: Synthetic oligonucleotide
  Target: LAMA2; (+) strand; PAM type: YTN; PAM sequence: TTT
tttggttggtaggctattaa

SEQ ID NO: 363181 - DNA, 20 bp, Artificial Sequence
  Description of Artificial Sequence: Synthetic oligonucleotide
  Target: LAMA2; (+) strand; PAM type: YTN; PAM sequence: TTT
ttggttggtaggctattaat

SEQ ID NO: 363182 - DNA, 20 bp, Artificial Sequence
  Description of Artificial Sequence: Synthetic oligonucleotide
  Target: LAMA2; (+) strand; PAM type: YTN; PAM sequence: TTT
tggttggtaggctattaatt

SEQ ID NO: 363183 - DNA, 20 bp, Artificial Sequence
  Description of Artificial Sequence: Synthetic oligonucleotide
  Target: LAMA2; (+) strand; PAM type: YTN; PAM sequence: TTT
ggttggtaggctattaatta

SEQ ID NO: 363184 - DNA, 20 bp, Artificial Sequence
  Description of Artificial Sequence: Synthetic oligonucleotide
  Target: LAMA2; (+) strand; PAM type: YTN; PAM sequence: TTG
gttggtaggctattaattat

SEQ ID NO: 363185 - DNA, 20 bp, Artificial Sequence
  Description of Artificial Sequence: Synthetic oligonucleotide
  Target: LAMA2; (+) strand; PAM type: YTN; PAM sequence: TTG
gtaggctattaattattgcc

SEQ ID NO: 363186 - DNA, 20 bp, Artificial Sequence
  Description of Artificial Sequence: Synthetic oligonucleotide
  Target: LAMA2; (+) strand; PAM type: YTN; PAM sequence: CTA
ttaattattgcctcaatttc

SEQ ID NO: 363187 - DNA, 20 bp, Artificial Sequence
  Description of Artificial Sequence: Synthetic oligonucleotide
  Target: LAMA2; (+) strand; PAM type: YTN; PAM sequence: TTA
attattgcctcaatttcaga

SEQ ID NO: 363188 - DNA, 20 bp, Artificial Sequence
  Description of Artificial Sequence: Synthetic oligonucleotide
  Target: LAMA2; (+) strand; PAM type: YTN; PAM sequence: TTA
ttgcctcaatttcagagcct

SEQ ID NO: 363189 - DNA, 20 bp, Artificial Sequence
  Description of Artificial Sequence: Synthetic oligonucleotide
  Target: LAMA2; (+) strand; PAM type: YTN; PAM sequence: TTG
cctcaatttcagagcctgtt

SEQ ID NO: 363190 - DNA, 20 bp, Artificial Sequence
  Description of Artificial Sequence: Synthetic oligonucleotide
  Target: LAMA2; (+) strand; PAM type: YTN; PAM sequence: CTC
aatttcagagcctgttattg

SEQ ID NO: 363191 - DNA, 20 bp, Artificial Sequence
  Description of Artificial Sequence: Synthetic oligonucleotide
  Target: LAMA2; (+) strand; PAM type: YTN; PAM sequence: TTT
cagagcctgttattggtcta

SEQ ID NO: 363192 - DNA, 20 bp, Artificial Sequence
  Description of Artificial Sequence: Synthetic oligonucleotide
  Target: LAMA2; (+) strand; PAM type: YTN; PAM sequence: TTC
agagcctgttattggtctat

SEQ ID NO: 363193 - DNA, 20 bp, Artificial Sequence
  Description of Artificial Sequence: Synthetic oligonucleotide
  Target: LAMA2; (+) strand; PAM type: YTN; PAM sequence: CTG
ttattggtctattcagagat

SEQ ID NO: 363194 - DNA, 20 bp, Artificial Sequence
  Description of Artificial Sequence: Synthetic oligonucleotide
  Target: LAMA2; (+) strand; PAM type: YTN; PAM sequence: TTA
ttggtctattcagagattca

SEQ ID NO: 363195 - DNA, 20 bp, Artificial Sequence
  Description of Artificial Sequence: Synthetic oligonucleotide
  Target: LAMA2; (+) strand; PAM type: YTN; PAM sequence: TTG
gtctattcagagattcaact

SEQ ID NO: 363196 - DNA, 20 bp, Artificial Sequence
  Description of Artificial Sequence: Synthetic oligonucleotide
  Target: LAMA2; (+) strand; PAM type: YTN; PAM sequence: CTA
ttcagagattcaacttcttc

SEQ ID NO: 363197 - DNA, 20 bp, Artificial Sequence
  Description of Artificial Sequence: Synthetic oligonucleotide
  Target: LAMA2; (+) strand; PAM type: YTN; PAM sequence: TTC
agagattcaacttcttcctt

SEQ ID NO: 363198 - DNA, 20 bp, Artificial Sequence
  Description of Artificial Sequence: Synthetic oligonucleotide
  Target: LAMA2; (+) strand; PAM type: YTN; PAM sequence: TTC
aacttcttccttgtttagta

SEQ ID NO: 363199 - DNA, 20 bp, Artificial Sequence
  Description of Artificial Sequence: Synthetic oligonucleotide
  Target: LAMA2; (+) strand; PAM type: YTN; PAM sequence: CTT
cttccttgtttagtattggg

SEQ ID NO: 363200 - DNA, 20 bp, Artificial Sequence
  Description of Artificial Sequence: Synthetic oligonucleotide
  Target: LAMA2; (+) strand; PAM type: YTN; PAM sequence: TTC
ttccttgtttagtattggga

SEQ ID NO: 363201 - DNA, 20 bp, Artificial Sequence
  Description of Artificial Sequence: Synthetic oligonucleotide
  Target: LAMA2; (+) strand; PAM type: YTN; PAM sequence: CTT
ccttgtttagtattgggagg

SEQ ID NO: 363202 - DNA, 20 bp, Artificial Sequence
  Description of Artificial Sequence: Synthetic oligonucleotide
  Target: LAMA2; (+) strand; PAM type: YTN; PAM sequence: TTC
cttgtttagtattgggaggg

SEQ ID NO: 363203 - DNA, 20 bp, Artificial Sequence
  Description of Artificial Sequence: Synthetic oligonucleotide
  Target: LAMA2; (+) strand; PAM type: YTN; PAM sequence: CTT
gtttagtattgggagggtgt

SEQ ID NO: 363204 - DNA, 20 bp, Artificial Sequence
  Description of Artificial Sequence: Synthetic oligonucleotide
  Target: LAMA2; (+) strand; PAM type: YTN; PAM sequence: TTG
tttagtattgggagggtgta

SEQ ID NO: 363205 - DNA, 20 bp, Artificial Sequence
  Description of Artificial Sequence: Synthetic oligonucleotide
  Target: LAMA2; (+) strand; PAM type: YTN; PAM sequence: TTT
agtattgggagggtgtatgt

SEQ ID NO: 363206 - DNA, 20 bp, Artificial Sequence
  Description of Artificial Sequence: Synthetic oligonucleotide
  Target: LAMA2; (+) strand; PAM type: YTN; PAM sequence: TTA
gtattgggagggtgtatgtg

SEQ ID NO: 363207 - DNA, 20 bp, Artificial Sequence
  Description of Artificial Sequence: Synthetic oligonucleotide
  Target: LAMA2; (+) strand; PAM type: YTN; PAM sequence: TTG
ggagggtgtatgtgtccagg

SEQ ID NO: 363208 - DNA, 20 bp, Artificial Sequence
  Description of Artificial Sequence: Synthetic oligonucleotide
  Target: LAMA2; (+) strand; PAM type: YTN; PAM sequence: CTA
tccatttcttcaagattttc

SEQ ID NO: 363209 - DNA, 20 bp, Artificial Sequence
  Description of Artificial Sequence: Synthetic oligonucleotide
  Target: LAMA2; (+) strand; PAM type: YTN; PAM sequence: TTT
cttcaagattttctagttta

SEQ ID NO: 363210 - DNA, 20 bp, Artificial Sequence
  Description of Artificial Sequence: Synthetic oligonucleotide
  Target: LAMA2; (+) strand; PAM type: YTN; PAM sequence: TTC
ttcaagattttctagtttat

SEQ ID NO: 363211 - DNA, 20 bp, Artificial Sequence
  Description of Artificial Sequence: Synthetic oligonucleotide
  Target: LAMA2; (+) strand; PAM type: YTN; PAM sequence: CTT
caagattttctagtttattt

SEQ ID NO: 363212 - DNA, 20 bp, Artificial Sequence
  Description of Artificial Sequence: Synthetic oligonucleotide
  Target: LAMA2; (+) strand; PAM type: YTN; PAM sequence: TTC
aagattttctagtttatttg

SEQ ID NO: 363213 - DNA, 20 bp, Artificial Sequence
  Description of Artificial Sequence: Synthetic oligonucleotide
  Target: LAMA2; (+) strand; PAM type: YTN; PAM sequence: TTT
tctagtttatttgcatagag

SEQ ID NO: 363214 - DNA, 20 bp, Artificial Sequence
  Description of Artificial Sequence: Synthetic oligonucleotide
  Target: LAMA2; (+) strand; PAM type: YTN; PAM sequence: TTT
ctagtttatttgcatagagg

SEQ ID NO: 363215 - DNA, 20 bp, Artificial Sequence
  Description of Artificial Sequence: Synthetic oligonucleotide
  Target: LAMA2; (+) strand; PAM type: YTN; PAM sequence: TTC
tagtttatttgcatagaggt

SEQ ID NO: 363216 - DNA, 20 bp, Artificial Sequence
  Description of Artificial Sequence: Synthetic oligonucleotide
  Target: LAMA2; (+) strand; PAM type: YTN; PAM sequence: CTA
gtttatttgcatagaggtgt

SEQ ID NO: 363217 - DNA, 20 bp, Artificial Sequence
  Description of Artificial Sequence: Synthetic oligonucleotide
  Target: LAMA2; (+) strand; PAM type: YTN; PAM sequence: TTT
atttgcatagaggtgtttat

SEQ ID NO: 363218 - DNA, 20 bp, Artificial Sequence
  Description of Artificial Sequence: Synthetic oligonucleotide
  Target: LAMA2; (+) strand; PAM type: YTN; PAM sequence: TTA
tttgcatagaggtgtttata

SEQ ID NO: 363219 - DNA, 20 bp, Artificial Sequence
  Description of Artificial Sequence: Synthetic oligonucleotide
  Target: LAMA2; (+) strand; PAM type: YTN; PAM sequence: TTT
gcatagaggtgtttatagta

SEQ ID NO: 363220 - DNA, 20 bp, Artificial Sequence
  Description of Artificial Sequence: Synthetic oligonucleotide
  Target: LAMA2; (+) strand; PAM type: YTN; PAM sequence: TTG
catagaggtgtttatagtat

SEQ ID NO: 363221 - DNA, 20 bp, Artificial Sequence
  Description of Artificial Sequence: Synthetic oligonucleotide
  Target: LAMA2; (+) strand; PAM type: YTN; PAM sequence: TTT
atagtattctctgatggtag

SEQ ID NO: 363222 - DNA, 20 bp, Artificial Sequence
  Description of Artificial Sequence: Synthetic oligonucleotide
  Target: LAMA2; (+) strand; PAM type: YTN; PAM sequence: TTA
tagtattctctgatggtagt

SEQ ID NO: 363223 - DNA, 20 bp, Artificial Sequence
  Description of Artificial Sequence: Synthetic oligonucleotide
  Target: LAMA2; (+) strand; PAM type: YTN; PAM sequence: TTC
tctgatggtagtttgtattt

SEQ ID NO: 363224 - DNA, 20 bp, Artificial Sequence
  Description of Artificial Sequence: Synthetic oligonucleotide
  Target: LAMA2; (+) strand; PAM type: YTN; PAM sequence: CTC
tgatggtagtttgtatttct

SEQ ID NO: 363225 - DNA, 20 bp, Artificial Sequence
  Description of Artificial Sequence: Synthetic oligonucleotide
  Target: LAMA2; (+) strand; PAM type: YTN; PAM sequence: CTG
atggtagtttgtatttctgt

SEQ ID NO: 363226 - DNA, 20 bp, Artificial Sequence
  Description of Artificial Sequence: Synthetic oligonucleotide
  Target: LAMA2; (+) strand; PAM type: YTN; PAM sequence: TTT
gtatttctgtgggatcggtg

SEQ ID NO: 363227 - DNA, 20 bp, Artificial Sequence
  Description of Artificial Sequence: Synthetic oligonucleotide
  Target: LAMA2; (+) strand; PAM type: YTN; PAM sequence: TTG
tatttctgtgggatcggtgg

SEQ ID NO: 363228 - DNA, 20 bp, Artificial Sequence
  Description of Artificial Sequence: Synthetic oligonucleotide
  Target: LAMA2; (+) strand; PAM type: YTN; PAM sequence: TTT
ctgtgggatcggtggtgata

SEQ ID NO: 363229 - DNA, 20 bp, Artificial Sequence
  Description of Artificial Sequence: Synthetic oligonucleotide
  Target: LAMA2; (+) strand; PAM type: YTN; PAM sequence: TTC
tgtgggatcggtggtgatat

SEQ ID NO: 363230 - DNA, 20 bp, Artificial Sequence
  Description of Artificial Sequence: Synthetic oligonucleotide
  Target: LAMA2; (+) strand; PAM type: YTN; PAM sequence: CTG
tgggatcggtggtgatatcc

SEQ ID NO: 363231 - DNA, 20 bp, Artificial Sequence
  Description of Artificial Sequence: Synthetic oligonucleotide
  Target: LAMA2; (+) strand; PAM type: YTN; PAM sequence: CTT
tatcattttttattgcatct

SEQ ID NO: 363232 - DNA, 20 bp, Artificial Sequence
  Description of Artificial Sequence: Synthetic oligonucleotide
  Target: LAMA2; (+) strand; PAM type: YTN; PAM sequence: TTT
atcattttttattgcatcta

SEQ ID NO: 363233 - DNA, 20 bp, Artificial Sequence
  Description of Artificial Sequence: Synthetic oligonucleotide
  Target: LAMA2; (+) strand; PAM type: YTN; PAM sequence: TTA
tcattttttattgcatctat

SEQ ID NO: 363234 - DNA, 20 bp, Artificial Sequence
  Description of Artificial Sequence: Synthetic oligonucleotide
  Target: LAMA2; (+) strand; PAM type: YTN; PAM sequence: TTT
tttattgcatctatttgatt

SEQ ID NO: 363235 - DNA, 20 bp, Artificial Sequence
  Description of Artificial Sequence: Synthetic oligonucleotide
  Target: LAMA2; (+) strand; PAM type: YTN; PAM sequence: TTT
ttattgcatctatttgattc

SEQ ID NO: 363236 - DNA, 20 bp, Artificial Sequence
  Description of Artificial Sequence: Synthetic oligonucleotide
  Target: LAMA2; (+) strand; PAM type: YTN; PAM sequence: TTT
tattgcatctatttgattct

SEQ ID NO: 363237 - DNA, 20 bp, Artificial Sequence
  Description of Artificial Sequence: Synthetic oligonucleotide
  Target: LAMA2; (+) strand; PAM type: YTN; PAM sequence: TTT
attgcatctatttgattctt

SEQ ID NO: 363238 - DNA, 20 bp, Artificial Sequence
  Description of Artificial Sequence: Synthetic oligonucleotide
  Target: LAMA2; (+) strand; PAM type: YTN; PAM sequence: TTA
ttgcatctatttgattcttc

SEQ ID NO: 363239 - DNA, 20 bp, Artificial Sequence
  Description of Artificial Sequence: Synthetic oligonucleotide
  Target: LAMA2; (+) strand; PAM type: YTN; PAM sequence: TTG
catctatttgattcttctct

SEQ ID NO: 363240 - DNA, 20 bp, Artificial Sequence
  Description of Artificial Sequence: Synthetic oligonucleotide
  Target: LAMA2; (+) strand; PAM type: YTN; PAM sequence: CTA
tttgattcttctctcttttc

SEQ ID NO: 363241 - DNA, 20 bp, Artificial Sequence
  Description of Artificial Sequence: Synthetic oligonucleotide
  Target: LAMA2; (+) strand; PAM type: YTN; PAM sequence: TTT
gattcttctctcttttcttc

SEQ ID NO: 363242 - DNA, 20 bp, Artificial Sequence
  Description of Artificial Sequence: Synthetic oligonucleotide
  Target: LAMA2; (+) strand; PAM type: YTN; PAM sequence: TTG
attcttctctcttttcttct

SEQ ID NO: 363243 - DNA, 20 bp, Artificial Sequence
  Description of Artificial Sequence: Synthetic oligonucleotide
  Target: LAMA2; (+) strand; PAM type: YTN; PAM sequence: TTC
ttctctcttttcttctttat

SEQ ID NO: 363244 - DNA, 20 bp, Artificial Sequence
  Description of Artificial Sequence: Synthetic oligonucleotide
  Target: LAMA2; (+) strand; PAM type: YTN; PAM sequence: CTT
ctctcttttcttctttatta

SEQ ID NO: 363245 - DNA, 20 bp, Artificial Sequence
  Description of Artificial Sequence: Synthetic oligonucleotide
  Target: LAMA2; (+) strand; PAM type: YTN; PAM sequence: TTC
tctcttttcttctttattag

SEQ ID NO: 363246 - DNA, 20 bp, Artificial Sequence
  Description of Artificial Sequence: Synthetic oligonucleotide
  Target: LAMA2; (+) strand; PAM type: YTN; PAM sequence: CTC
tcttttcttctttattagtc

SEQ ID NO: 363247 - DNA, 20 bp, Artificial Sequence
  Description of Artificial Sequence: Synthetic oligonucleotide
  Target: LAMA2; (+) strand; PAM type: YTN; PAM sequence: CTC
ttttcttctttattagtctt

SEQ ID NO: 363248 - DNA, 20 bp, Artificial Sequence
  Description of Artificial Sequence: Synthetic oligonucleotide
  Target: LAMA2; (+) strand; PAM type: YTN; PAM sequence: CTT
ttcttctttattagtcttgc

SEQ ID NO: 363249 - DNA, 20 bp, Artificial Sequence
  Description of Artificial Sequence: Synthetic oligonucleotide
  Target: LAMA2; (+) strand; PAM type: YTN; PAM sequence: TTT
tcttctttattagtcttgct

SEQ ID NO: 363250 - DNA, 20 bp, Artificial Sequence
  Description of Artificial Sequence: Synthetic oligonucleotide
  Target: LAMA2; (+) strand; PAM type: YTN; PAM sequence: TTT
cttctttattagtcttgcta

SEQ ID NO: 363251 - DNA, 20 bp, Artificial Sequence
  Description of Artificial Sequence: Synthetic oligonucleotide
  Target: LAMA2; (+) strand; PAM type: YTN; PAM sequence: TTC
ttctttattagtcttgctag

SEQ ID NO: 363252 - DNA, 20 bp, Artificial Sequence
  Description of Artificial Sequence: Synthetic oligonucleotide
  Target: LAMA2; (+) strand; PAM type: YTN; PAM sequence: CTT
ctttattagtcttgctagca

SEQ ID NO: 363253 - DNA, 20 bp, Artificial Sequence
  Description of Artificial Sequence: Synthetic oligonucleotide
  Target: LAMA2; (+) strand; PAM type: YTN; PAM sequence: TTC
tttattagtcttgctagcag

SEQ ID NO: 363254 - DNA, 20 bp, Artificial Sequence
  Description of Artificial Sequence: Synthetic oligonucleotide
  Target: LAMA2; (+) strand; PAM type: YTN; PAM sequence: CTT
tattagtcttgctagcagtc

SEQ ID NO: 363255 - DNA, 20 bp, Artificial Sequence
  Description of Artificial Sequence: Synthetic oligonucleotide
  Target: LAMA2; (+) strand; PAM type: YTN; PAM sequence: TTT
attagtcttgctagcagtct

SEQ ID NO: 363256 - DNA, 20 bp, Artificial Sequence
  Description of Artificial Sequence: Synthetic oligonucleotide
  Target: LAMA2; (+) strand; PAM type: YTN; PAM sequence: TTA
ttagtcttgctagcagtcta

SEQ ID NO: 363257 - DNA, 20 bp, Artificial Sequence
  Description of Artificial Sequence: Synthetic oligonucleotide
  Target: LAMA2; (+) strand; PAM type: YTN; PAM sequence: TTA
gtcttgctagcagtctatca

SEQ ID NO: 363258 - DNA, 20 bp, Artificial Sequence
  Description of Artificial Sequence: Synthetic oligonucleotide
  Target: LAMA2; (+) strand; PAM type: YTN; PAM sequence: CTT
gctagcagtctatcaatttt

SEQ ID NO: 363259 - DNA, 20 bp, Artificial Sequence
  Description of Artificial Sequence: Synthetic oligonucleotide
  Target: LAMA2; (+) strand; PAM type: YTN; PAM sequence: TTG
ctagcagtctatcaattttg

SEQ ID NO: 363260 - DNA, 20 bp, Artificial Sequence
  Description of Artificial Sequence: Synthetic oligonucleotide
  Target: LAMA2; (+) strand; PAM type: YTN; PAM sequence: CTA
gcagtctatcaattttgttg

SEQ ID NO: 363261 - DNA, 20 bp, Artificial Sequence
  Description of Artificial Sequence: Synthetic oligonucleotide
  Target: LAMA2; (+) strand; PAM type: YTN; PAM sequence: CTA
tcaattttgttgatcttttc

SEQ ID NO: 363262 - DNA, 20 bp, Artificial Sequence
  Description of Artificial Sequence: Synthetic oligonucleotide
  Target: LAMA2; (+) strand; PAM type: YTN; PAM sequence: TTT
tgttgatcttttcaaaaaat

SEQ ID NO: 363263 - DNA, 20 bp, Artificial Sequence
  Description of Artificial Sequence: Synthetic oligonucleotide
  Target: LAMA2; (+) strand; PAM type: YTN; PAM sequence: TTT
gttgatcttttcaaaaaatc

SEQ ID NO: 363264 - DNA, 20 bp, Artificial Sequence
  Description of Artificial Sequence: Synthetic oligonucleotide
  Target: LAMA2; (+) strand; PAM type: YTN; PAM sequence: TTG
ttgatcttttcaaaaaatca

SEQ ID NO: 363265 - DNA, 20 bp, Artificial Sequence
  Description of Artificial Sequence: Synthetic oligonucleotide
  Target: LAMA2; (+) strand; PAM type: YTN; PAM sequence: TTG
atcttttcaaaaaatcatct

SEQ ID NO: 363266 - DNA, 20 bp, Artificial Sequence
  Description of Artificial Sequence: Synthetic oligonucleotide
  Target: LAMA2; (+) strand; PAM type: YTN; PAM sequence: CTT
ttcaaaaaatcatctcctgg

SEQ ID NO: 363267 - DNA, 20 bp, Artificial Sequence
  Description of Artificial Sequence: Synthetic oligonucleotide
  Target: LAMA2; (+) strand; PAM type: YTN; PAM sequence: TTT
tcaaaaaatcatctcctgga

SEQ ID NO: 363268 - DNA, 20 bp, Artificial Sequence
  Description of Artificial Sequence: Synthetic oligonucleotide
  Target: LAMA2; (+) strand; PAM type: YTN; PAM sequence: TTT
caaaaaatcatctcctggat

SEQ ID NO: 363269 - DNA, 20 bp, Artificial Sequence
  Description of Artificial Sequence: Synthetic oligonucleotide
  Target: LAMA2; (+) strand; PAM type: YTN; PAM sequence: TTC
aaaaaatcatctcctggatt

SEQ ID NO: 363270 - DNA, 20 bp, Artificial Sequence
  Description of Artificial Sequence: Synthetic oligonucleotide
  Target: LAMA2; (+) strand; PAM type: YTN; PAM sequence: CTC
ctggattcactgatttgttg

SEQ ID NO: 363271 - DNA, 20 bp, Artificial Sequence
  Description of Artificial Sequence: Synthetic oligonucleotide
  Target: LAMA2; (+) strand; PAM type: YTN; PAM sequence: CTG
gattcactgatttgttgaag

SEQ ID NO: 363272 - DNA, 20 bp, Artificial Sequence
  Description of Artificial Sequence: Synthetic oligonucleotide
  Target: LAMA2; (+) strand; PAM type: YTN; PAM sequence: TTC
actgatttgttgaagggttt

SEQ ID NO: 363273 - DNA, 20 bp, Artificial Sequence
  Description of Artificial Sequence: Synthetic oligonucleotide
  Target: LAMA2; (+) strand; PAM type: YTN; PAM sequence: CTG
atttgttgaagggttttttg

SEQ ID NO: 363274 - DNA, 20 bp, Artificial Sequence
  Description of Artificial Sequence: Synthetic oligonucleotide
  Target: LAMA2; (+) strand; PAM type: YTN; PAM sequence: TTT
gttgaagggttttttgtgac

SEQ ID NO: 363275 - DNA, 20 bp, Artificial Sequence
  Description of Artificial Sequence: Synthetic oligonucleotide
  Target: LAMA2; (+) strand; PAM type: YTN; PAM sequence: TTG
ttgaagggttttttgtgact

SEQ ID NO: 363276 - DNA, 20 bp, Artificial Sequence
  Description of Artificial Sequence: Synthetic oligonucleotide
  Target: LAMA2; (+) strand; PAM type: YTN; PAM sequence: TTG
aagggttttttgtgactcta

SEQ ID NO: 363277 - DNA, 20 bp, Artificial Sequence
  Description of Artificial Sequence: Synthetic oligonucleotide
  Target: LAMA2; (+) strand; PAM type: YTN; PAM sequence: TTT
tttgtgactctatctccttc

SEQ ID NO: 363278 - DNA, 20 bp, Artificial Sequence
  Description of Artificial Sequence: Synthetic oligonucleotide
  Target: LAMA2; (+) strand; PAM type: YTN; PAM sequence: TTT
ttgtgactctatctccttca

SEQ ID NO: 363279 - DNA, 20 bp, Artificial Sequence
  Description of Artificial Sequence: Synthetic oligonucleotide
  Target: LAMA2; (+) strand; PAM type: YTN; PAM sequence: TTT
tgtgactctatctccttcag

SEQ ID NO: 363280 - DNA, 20 bp, Artificial Sequence
  Description of Artificial Sequence: Synthetic oligonucleotide
  Target: LAMA2; (+) strand; PAM type: YTN; PAM sequence: TTT
gtgactctatctccttcagt

SEQ ID NO: 363281 - DNA, 20 bp, Artificial Sequence
  Description of Artificial Sequence: Synthetic oligonucleotide
  Target: LAMA2; (+) strand; PAM type: YTN; PAM sequence: TTG
tgactctatctccttcagtt

SEQ ID NO: 363282 - DNA, 20 bp, Artificial Sequence
  Description of Artificial Sequence: Synthetic oligonucleotide
  Target: LAMA2; (+) strand; PAM type: YTN; PAM sequence: CTC
tatctccttcagttctgctc

SEQ ID NO: 363283 - DNA, 20 bp, Artificial Sequence
  Description of Artificial Sequence: Synthetic oligonucleotide
  Target: LAMA2; (+) strand; PAM type: YTN; PAM sequence: CTA
tctccttcagttctgctctg

SEQ ID NO: 363284 - DNA, 20 bp, Artificial Sequence
  Description of Artificial Sequence: Synthetic oligonucleotide
  Target: LAMA2; (+) strand; PAM type: YTN; PAM sequence: CTC
cttcagttctgctctgatct

SEQ ID NO: 363285 - DNA, 20 bp, Artificial Sequence
  Description of Artificial Sequence: Synthetic oligonucleotide
  Target: LAMA2; (+) strand; PAM type: YTN; PAM sequence: CTT
cagttctgctctgatcttag

SEQ ID NO: 363286 - DNA, 20 bp, Artificial Sequence
  Description of Artificial Sequence: Synthetic oligonucleotide
  Target: LAMA2; (+) strand; PAM type: YTN; PAM sequence: TTC
agttctgctctgatcttagt

SEQ ID NO: 363287 - DNA, 20 bp, Artificial Sequence
  Description of Artificial Sequence: Synthetic oligonucleotide
  Target: LAMA2; (+) strand; PAM type: YTN; PAM sequence: TTC
tgctctgatcttagttattt

SEQ ID NO: 363288 - DNA, 20 bp, Artificial Sequence
  Description of Artificial Sequence: Synthetic oligonucleotide
  Target: LAMA2; (+) strand; PAM type: YTN; PAM sequence: CTG
ctctgatcttagttatttct

SEQ ID NO: 363289 - DNA, 20 bp, Artificial Sequence
  Description of Artificial Sequence: Synthetic oligonucleotide
  Target: LAMA2; (+) strand; PAM type: YTN; PAM sequence: CTC
tgatcttagttatttcttgc

SEQ ID NO: 363290 - DNA, 20 bp, Artificial Sequence
  Description of Artificial Sequence: Synthetic oligonucleotide
  Target: LAMA2; (+) strand; PAM type: YTN; PAM sequence: CTG
atcttagttatttcttgcct

SEQ ID NO: 363291 - DNA, 20 bp, Artificial Sequence
  Description of Artificial Sequence: Synthetic oligonucleotide
  Target: LAMA2; (+) strand; PAM type: YTN; PAM sequence: CTT
agttatttcttgccttctgc

SEQ ID NO: 363292 - DNA, 20 bp, Artificial Sequence
  Description of Artificial Sequence: Synthetic oligonucleotide
  Target: LAMA2; (+) strand; PAM type: YTN; PAM sequence: TTA
gttatttcttgccttctgct

SEQ ID NO: 363293 - DNA, 20 bp, Artificial Sequence
  Description of Artificial Sequence: Synthetic oligonucleotide
  Target: LAMA2; (+) strand; PAM type: YTN; PAM sequence: TTA
tttcttgccttctgctagct

SEQ ID NO: 363294 - DNA, 20 bp, Artificial Sequence
  Description of Artificial Sequence: Synthetic oligonucleotide
  Target: LAMA2; (+) strand; PAM type: YTN; PAM sequence: TTT
cttgccttctgctagctttt

SEQ ID NO: 363295 - DNA, 20 bp, Artificial Sequence
  Description of Artificial Sequence: Synthetic oligonucleotide
  Target: LAMA2; (+) strand; PAM type: YTN; PAM sequence: TTC
ttgccttctgctagcttttg

SEQ ID NO: 363296 - DNA, 20 bp, Artificial Sequence
  Description of Artificial Sequence: Synthetic oligonucleotide
  Target: LAMA2; (+) strand; PAM type: YTN; PAM sequence: CTT
gccttctgctagcttttgag

SEQ ID NO: 363297 - DNA, 20 bp, Artificial Sequence
  Description of Artificial Sequence: Synthetic oligonucleotide
  Target: LAMA2; (+) strand; PAM type: YTN; PAM sequence: TTG
ccttctgctagcttttgagt

SEQ ID NO: 363298 - DNA, 20 bp, Artificial Sequence
  Description of Artificial Sequence: Synthetic oligonucleotide
  Target: LAMA2; (+) strand; PAM type: YTN; PAM sequence: CTT
ctgctagcttttgagtgtgt

SEQ ID NO: 363299 - DNA, 20 bp, Artificial Sequence
  Description of Artificial Sequence: Synthetic oligonucleotide
  Target: LAMA2; (+) strand; PAM type: YTN; PAM sequence: TTC
tgctagcttttgagtgtgtt

SEQ ID NO: 363300 - DNA, 20 bp, Artificial Sequence
  Description of Artificial Sequence: Synthetic oligonucleotide
  Target: LAMA2; (+) strand; PAM type: YTN; PAM sequence: CTG
ctagcttttgagtgtgtttg

SEQ ID NO: 363301 - DNA, 20 bp, Artificial Sequence
  Description of Artificial Sequence: Synthetic oligonucleotide
  Target: LAMA2; (+) strand; PAM type: YTN; PAM sequence: CTA
gcttttgagtgtgtttgctc

SEQ ID NO: 363302 - DNA, 20 bp, Artificial Sequence
  Description of Artificial Sequence: Synthetic oligonucleotide
  Target: LAMA2; (+) strand; PAM type: YTN; PAM sequence: CTT
ttgagtgtgtttgctcttgc

SEQ ID NO: 363303 - DNA, 20 bp, Artificial Sequence
  Description of Artificial Sequence: Synthetic oligonucleotide
  Target: LAMA2; (+) strand; PAM type: YTN; PAM sequence: TTT
tgagtgtgtttgctcttgct

SEQ ID NO: 363304 - DNA, 20 bp, Artificial Sequence
  Description of Artificial Sequence: Synthetic oligonucleotide
  Target: LAMA2; (+) strand; PAM type: YTN; PAM sequence: TTT
gagtgtgtttgctcttgctt

SEQ ID NO: 363305 - DNA, 20 bp, Artificial Sequence
  Description of Artificial Sequence: Synthetic oligonucleotide
  Target: LAMA2; (+) strand; PAM type: YTN; PAM sequence: TTG
agtgtgtttgctcttgcttc

SEQ ID NO: 363306 - DNA, 20 bp, Artificial Sequence
  Description of Artificial Sequence: Synthetic oligonucleotide
  Target: LAMA2; (+) strand; PAM type: YTN; PAM sequence: TTT
gctcttgcttctctagttct

SEQ ID NO: 363307 - DNA, 20 bp, Artificial Sequence
  Description of Artificial Sequence: Synthetic oligonucleotide
  Target: LAMA2; (+) strand; PAM type: YTN; PAM sequence: TTG
ctcttgcttctctagttctt

SEQ ID NO: 363308 - DNA, 20 bp, Artificial Sequence
  Description of Artificial Sequence: Synthetic oligonucleotide
  Target: LAMA2; (+) strand; PAM type: YTN; PAM sequence: CTC
ttgcttctctagttctttta

SEQ ID NO: 363309 - DNA, 20 bp, Artificial Sequence
  Description of Artificial Sequence: Synthetic oligonucleotide
  Target: LAMA2; (+) strand; PAM type: YTN; PAM sequence: CTT
gcttctctagttcttttaat

SEQ ID NO: 363310 - DNA, 20 bp, Artificial Sequence
  Description of Artificial Sequence: Synthetic oligonucleotide
  Target: LAMA2; (+) strand; PAM type: YTN; PAM sequence: TTG
cttctctagttcttttaatt

SEQ ID NO: 363311 - DNA, 20 bp, Artificial Sequence
  Description of Artificial Sequence: Synthetic oligonucleotide
  Target: LAMA2; (+) strand; PAM type: YTN; PAM sequence: CTT
ctctagttcttttaattgtg

SEQ ID NO: 363312 - DNA, 20 bp, Artificial Sequence
  Description of Artificial Sequence: Synthetic oligonucleotide
  Target: LAMA2; (+) strand; PAM type: YTN; PAM sequence: TTC
tctagttcttttaattgtga

SEQ ID NO: 363313 - DNA, 20 bp, Artificial Sequence
  Description of Artificial Sequence: Synthetic oligonucleotide
  Target: LAMA2; (+) strand; PAM type: YTN; PAM sequence: CTC
tagttcttttaattgtgatg

SEQ ID NO: 363314 - DNA, 20 bp, Artificial Sequence
  Description of Artificial Sequence: Synthetic oligonucleotide
  Target: LAMA2; (+) strand; PAM type: YTN; PAM sequence: CTA
gttcttttaattgtgatgtt

SEQ ID NO: 363315 - DNA, 20 bp, Artificial Sequence
  Description of Artificial Sequence: Synthetic oligonucleotide
  Target: LAMA2; (+) strand; PAM type: YTN; PAM sequence: TTC
ttttaattgtgatgttaggg

SEQ ID NO: 363316 - DNA, 20 bp, Artificial Sequence
  Description of Artificial Sequence: Synthetic oligonucleotide
  Target: LAMA2; (+) strand; PAM type: YTN; PAM sequence: CTT
ttaattgtgatgttagggtg

SEQ ID NO: 363317 - DNA, 20 bp, Artificial Sequence
  Description of Artificial Sequence: Synthetic oligonucleotide
  Target: LAMA2; (+) strand; PAM type: YTN; PAM sequence: TTT
taattgtgatgttagggtgt

SEQ ID NO: 363318 - DNA, 20 bp, Artificial Sequence
  Description of Artificial Sequence: Synthetic oligonucleotide
  Target: LAMA2; (+) strand; PAM type: YTN; PAM sequence: TTT
aattgtgatgttagggtgtc

SEQ ID NO: 363319 - DNA, 20 bp, Artificial Sequence
  Description of Artificial Sequence: Synthetic oligonucleotide
  Target: LAMA2; (+) strand; PAM type: YTN; PAM sequence: TTA
attgtgatgttagggtgtca

SEQ ID NO: 363320 - DNA, 20 bp, Artificial Sequence
  Description of Artificial Sequence: Synthetic oligonucleotide
  Target: LAMA2; (+) strand; PAM type: YTN; PAM sequence: TTG
tgatgttagggtgtcaattt

SEQ ID NO: 363321 - DNA, 20 bp, Artificial Sequence
  Description of Artificial Sequence: Synthetic oligonucleotide
  Target: LAMA2; (+) strand; PAM type: YTN; PAM sequence: TTA
gggtgtcaattttggatctt

SEQ ID NO: 363322 - DNA, 20 bp, Artificial Sequence
  Description of Artificial Sequence: Synthetic oligonucleotide
  Target: LAMA2; (+) strand; PAM type: YTN; PAM sequence: TTT
tggatctttcctgctttctc

SEQ ID NO: 363323 - DNA, 20 bp, Artificial Sequence
  Description of Artificial Sequence: Synthetic oligonucleotide
  Target: LAMA2; (+) strand; PAM type: YTN; PAM sequence: TTT
ggatctttcctgctttctct

SEQ ID NO: 363324 - DNA, 20 bp, Artificial Sequence
  Description of Artificial Sequence: Synthetic oligonucleotide
  Target: LAMA2; (+) strand; PAM type: YTN; PAM sequence: TTG
gatctttcctgctttctctt

SEQ ID NO: 363325 - DNA, 20 bp, Artificial Sequence
  Description of Artificial Sequence: Synthetic oligonucleotide
  Target: LAMA2; (+) strand; PAM type: YTN; PAM sequence: CTT
tcctgctttctcttgtgggc

SEQ ID NO: 363326 - DNA, 20 bp, Artificial Sequence
  Description of Artificial Sequence: Synthetic oligonucleotide
  Target: LAMA2; (+) strand; PAM type: YTN; PAM sequence: TTT
cctgctttctcttgtgggca

SEQ ID NO: 363327 - DNA, 20 bp, Artificial Sequence
  Description of Artificial Sequence: Synthetic oligonucleotide
  Target: LAMA2; (+) strand; PAM type: YTN; PAM sequence: TTC
ctgctttctcttgtgggcat

SEQ ID NO: 363328 - DNA, 20 bp, Artificial Sequence
  Description of Artificial Sequence: Synthetic oligonucleotide
  Target: LAMA2; (+) strand; PAM type: YTN; PAM sequence: CTG
ctttctcttgtgggcattta

SEQ ID NO: 363329 - DNA, 20 bp, Artificial Sequence
  Description of Artificial Sequence: Synthetic oligonucleotide
  Target: LAMA2; (+) strand; PAM type: YTN; PAM sequence: CTT
tctcttgtgggcatttagtg

SEQ ID NO: 363330 - DNA, 20 bp, Artificial Sequence
  Description of Artificial Sequence: Synthetic oligonucleotide
  Target: LAMA2; (+) strand; PAM type: YTN; PAM sequence: TTT
ctcttgtgggcatttagtgc

SEQ ID NO: 363331 - DNA, 20 bp, Artificial Sequence
  Description of Artificial Sequence: Synthetic oligonucleotide
  Target: LAMA2; (+) strand; PAM type: YTN; PAM sequence: TTC
tcttgtgggcatttagtgct

SEQ ID NO: 363332 - DNA, 20 bp, Artificial Sequence
  Description of Artificial Sequence: Synthetic oligonucleotide
  Target: LAMA2; (+) strand; PAM type: YTN; PAM sequence: CTC
ttgtgggcatttagtgctat

SEQ ID NO: 363333 - DNA, 20 bp, Artificial Sequence
  Description of Artificial Sequence: Synthetic oligonucleotide
  Target: LAMA2; (+) strand; PAM type: YTN; PAM sequence: CTT
gtgggcatttagtgctataa

SEQ ID NO: 363334 - DNA, 20 bp, Artificial Sequence
  Description of Artificial Sequence: Synthetic oligonucleotide
  Target: LAMA2; (+) strand; PAM type: YTN; PAM sequence: TTG
tgggcatttagtgctataaa

SEQ ID NO: 363335 - DNA, 20 bp, Artificial Sequence
  Description of Artificial Sequence: Synthetic oligonucleotide
  Target: LAMA2; (+) strand; PAM type: YTN; PAM sequence: TTT
agtgctataaatttccctct

SEQ ID NO: 363336 - DNA, 20 bp, Artificial Sequence
  Description of Artificial Sequence: Synthetic oligonucleotide
  Target: LAMA2; (+) strand; PAM type: YTN; PAM sequence: TTA
gtgctataaatttccctcta

SEQ ID NO: 363337 - DNA, 20 bp, Artificial Sequence
  Description of Artificial Sequence: Synthetic oligonucleotide
  Target: LAMA2; (+) strand; PAM type: YTN; PAM sequence: CTA
taaatttccctctacacact

SEQ ID NO: 363338 - DNA, 20 bp, Artificial Sequence
  Description of Artificial Sequence: Synthetic oligonucleotide
  Target: LAMA2; (+) strand; PAM type: YTN; PAM sequence: TTT
ccctctacacactgctttaa

SEQ ID NO: 363339 - DNA, 20 bp, Artificial Sequence
  Description of Artificial Sequence: Synthetic oligonucleotide
  Target: LAMA2; (+) strand; PAM type: YTN; PAM sequence: TTC
cctctacacactgctttaaa

SEQ ID NO: 363340 - DNA, 20 bp, Artificial Sequence
  Description of Artificial Sequence: Synthetic oligonucleotide
  Target: LAMA2; (+) strand; PAM type: YTN; PAM sequence: CTC
tacacactgctttaaatgtg

SEQ ID NO: 363341 - DNA, 20 bp, Artificial Sequence
  Description of Artificial Sequence: Synthetic oligonucleotide
  Target: LAMA2; (+) strand; PAM type: YTN; PAM sequence: CTA
cacactgctttaaatgtgtc

SEQ ID NO: 363342 - DNA, 20 bp, Artificial Sequence
  Description of Artificial Sequence: Synthetic oligonucleotide
  Target: LAMA2; (+) strand; PAM type: YTN; PAM sequence: CTG
ctttaaatgtgtcccagaga

SEQ ID NO: 363343 - DNA, 20 bp, Artificial Sequence
  Description of Artificial Sequence: Synthetic oligonucleotide
  Target: LAMA2; (+) strand; PAM type: YTN; PAM sequence: CTT
taaatgtgtcccagagattc

SEQ ID NO: 363344 - DNA, 20 bp, Artificial Sequence
  Description of Artificial Sequence: Synthetic oligonucleotide
  Target: LAMA2; (+) strand; PAM type: YTN; PAM sequence: TTT
aaatgtgtcccagagattct

SEQ ID NO: 363345 - DNA, 20 bp, Artificial Sequence
  Description of Artificial Sequence: Synthetic oligonucleotide
  Target: LAMA2; (+) strand; PAM type: YTN; PAM sequence: TTA
aatgtgtcccagagattctg

SEQ ID NO: 363346 - DNA, 20 bp, Artificial Sequence
  Description of Artificial Sequence: Synthetic oligonucleotide
  Target: LAMA2; (+) strand; PAM type: YTN; PAM sequence: TTC
tggtatgttgtatctttgtt

SEQ ID NO: 363347 - DNA, 20 bp, Artificial Sequence
  Description of Artificial Sequence: Synthetic oligonucleotide
  Target: LAMA2; (+) strand; PAM type: YTN; PAM sequence: CTG
gtatgttgtatctttgttct

SEQ ID NO: 363348 - DNA, 20 bp, Artificial Sequence
  Description of Artificial Sequence: Synthetic oligonucleotide
  Target: LAMA2; (+) strand; PAM type: YTN; PAM sequence: TTG
tatctttgttctcattagtt

SEQ ID NO: 363349 - DNA, 20 bp, Artificial Sequence
  Description of Artificial Sequence: Synthetic oligonucleotide
  Target: LAMA2; (+) strand; PAM type: YTN; PAM sequence: CTT
tgttctcattagtttcaaag

SEQ ID NO: 363350 - DNA, 20 bp, Artificial Sequence
  Description of Artificial Sequence: Synthetic oligonucleotide
  Target: LAMA2; (+) strand; PAM type: YTN; PAM sequence: TTT
gttctcattagtttcaaaga

SEQ ID NO: 363351 - DNA, 20 bp, Artificial Sequence
  Description of Artificial Sequence: Synthetic oligonucleotide
  Target: LAMA2; (+) strand; PAM type: YTN; PAM sequence: TTG
ttctcattagtttcaaagaa

SEQ ID NO: 363352 - DNA, 20 bp, Artificial Sequence
  Description of Artificial Sequence: Synthetic oligonucleotide
  Target: LAMA2; (+) strand; PAM type: YTN; PAM sequence: TTC
tcattagtttcaaagaacat

SEQ ID NO: 363353 - DNA, 20 bp, Artificial Sequence
  Description of Artificial Sequence: Synthetic oligonucleotide
  Target: LAMA2; (+) strand; PAM type: YTN; PAM sequence: CTC
attagtttcaaagaacatct

SEQ ID NO: 363354 - DNA, 20 bp, Artificial Sequence
  Description of Artificial Sequence: Synthetic oligonucleotide
  Target: LAMA2; (+) strand; PAM type: YTN; PAM sequence: TTA
gtttcaaagaacatctttat

SEQ ID NO: 363355 - DNA, 20 bp, Artificial Sequence
  Description of Artificial Sequence: Synthetic oligonucleotide
  Target: LAMA2; (+) strand; PAM type: YTN; PAM sequence: TTT
caaagaacatctttattcca

SEQ ID NO: 363356 - DNA, 20 bp, Artificial Sequence
  Description of Artificial Sequence: Synthetic oligonucleotide
  Target: LAMA2; (+) strand; PAM type: YTN; PAM sequence: TTC
aaagaacatctttattccag

SEQ ID NO: 363357 - DNA, 20 bp, Artificial Sequence
  Description of Artificial Sequence: Synthetic oligonucleotide
  Target: LAMA2; (+) strand; PAM type: YTN; PAM sequence: CTT
tattccagccttcatttcgt

SEQ ID NO: 363358 - DNA, 20 bp, Artificial Sequence
  Description of Artificial Sequence: Synthetic oligonucleotide
  Target: LAMA2; (+) strand; PAM type: YTN; PAM sequence: TTT
attccagccttcatttcgtt

SEQ ID NO: 363359 - DNA, 20 bp, Artificial Sequence
  Description of Artificial Sequence: Synthetic oligonucleotide
  Target: LAMA2; (+) strand; PAM type: YTN; PAM sequence: TTA
ttccagccttcatttcgtta

SEQ ID NO: 363360 - DNA, 20 bp, Artificial Sequence
  Description of Artificial Sequence: Synthetic oligonucleotide
  Target: LAMA2; (+) strand; PAM type: YTN; PAM sequence: TTC
cagccttcatttcgttatat

SEQ ID NO: 363361 - DNA, 20 bp, Artificial Sequence
  Description of Artificial Sequence: Synthetic oligonucleotide
  Target: LAMA2; (+) strand; PAM type: YTN; PAM sequence: CTT
catttcgttatatacccagt

SEQ ID NO: 363362 - DNA, 20 bp, Artificial Sequence
  Description of Artificial Sequence: Synthetic oligonucleotide
  Target: LAMA2; (+) strand; PAM type: YTN; PAM sequence: TTC
atttcgttatatacccagta

SEQ ID NO: 363363 - DNA, 20 bp, Artificial Sequence
  Description of Artificial Sequence: Synthetic oligonucleotide
  Target: LAMA2; (+) strand; PAM type: YTN; PAM sequence: TTT
cgttatatacccagtagtca

SEQ ID NO: 363364 - DNA, 20 bp, Artificial Sequence
  Description of Artificial Sequence: Synthetic oligonucleotide
  Target: LAMA2; (+) strand; PAM type: YTN; PAM sequence: TTC
gttatatacccagtagtcat

SEQ ID NO: 363365 - DNA, 20 bp, Artificial Sequence
  Description of Artificial Sequence: Synthetic oligonucleotide
  Target: LAMA2; (+) strand; PAM type: YTN; PAM sequence: TTA
tatacccagtagtcattcag

SEQ ID NO: 363366 - DNA, 20 bp, Artificial Sequence
  Description of Artificial Sequence: Synthetic oligonucleotide
  Target: LAMA2; (+) strand; PAM type: YTN; PAM sequence: TTC
aggaacaggttgttcagttt

SEQ ID NO: 363367 - DNA, 20 bp, Artificial Sequence
  Description of Artificial Sequence: Synthetic oligonucleotide
  Target: LAMA2; (+) strand; PAM type: YTN; PAM sequence: TTG
ttcagtttccatgtagttga

SEQ ID NO: 363368 - DNA, 20 bp, Artificial Sequence
  Description of Artificial Sequence: Synthetic oligonucleotide
  Target: LAMA2; (+) strand; PAM type: YTN; PAM sequence: TTC
agtttccatgtagttgagcc

SEQ ID NO: 363369 - DNA, 20 bp, Artificial Sequence
  Description of Artificial Sequence: Synthetic oligonucleotide
  Target: LAMA2; (+) strand; PAM type: YTN; PAM sequence: TTT
ccatgtagttgagccgtttt

SEQ ID NO: 363370 - DNA, 20 bp, Artificial Sequence
  Description of Artificial Sequence: Synthetic oligonucleotide
  Target: LAMA2; (+) strand; PAM type: YTN; PAM sequence: TTC
catgtagttgagccgttttc

SEQ ID NO: 363371 - DNA, 20 bp, Artificial Sequence
  Description of Artificial Sequence: Synthetic oligonucleotide
  Target: LAMA2; (+) strand; PAM type: YTN; PAM sequence: TTG
agccgttttcagtgagtttc

SEQ ID NO: 363372 - DNA, 20 bp, Artificial Sequence
  Description of Artificial Sequence: Synthetic oligonucleotide
  Target: LAMA2; (+) strand; PAM type: YTN; PAM sequence: TTT
tcagtgagtttcttaatcct

SEQ ID NO: 363373 - DNA, 20 bp, Artificial Sequence
  Description of Artificial Sequence: Synthetic oligonucleotide
  Target: LAMA2; (+) strand; PAM type: YTN; PAM sequence: TTT
cagtgagtttcttaatcctg

SEQ ID NO: 363374 - DNA, 20 bp, Artificial Sequence
  Description of Artificial Sequence: Synthetic oligonucleotide
  Target: LAMA2; (+) strand; PAM type: YTN; PAM sequence: TTC
agtgagtttcttaatcctga

SEQ ID NO: 363375 - DNA, 20 bp, Artificial Sequence
  Description of Artificial Sequence: Synthetic oligonucleotide
  Target: LAMA2; (+) strand; PAM type: YTN; PAM sequence: TTT
cttaatcctgagttctagtt

SEQ ID NO: 363376 - DNA, 20 bp, Artificial Sequence
  Description of Artificial Sequence: Synthetic oligonucleotide
  Target: LAMA2; (+) strand; PAM type: YTN; PAM sequence: TTC
ttaatcctgagttctagttt

SEQ ID NO: 363377 - DNA, 20 bp, Artificial Sequence
  Description of Artificial Sequence: Synthetic oligonucleotide
  Target: LAMA2; (+) strand; PAM type: YTN; PAM sequence: CTT
aatcctgagttctagtttga

SEQ ID NO: 363378 - DNA, 20 bp, Artificial Sequence
  Description of Artificial Sequence: Synthetic oligonucleotide
  Target: LAMA2; (+) strand; PAM type: YTN; PAM sequence: TTA
atcctgagttctagtttgat

SEQ ID NO: 363379 - DNA, 20 bp, Artificial Sequence
  Description of Artificial Sequence: Synthetic oligonucleotide
  Target: LAMA2; (+) strand; PAM type: YTN; PAM sequence: CTG
agttctagtttgattgcact

SEQ ID NO: 363380 - DNA, 20 bp, Artificial Sequence
  Description of Artificial Sequence: Synthetic oligonucleotide
  Target: LAMA2; (+) strand; PAM type: YTN; PAM sequence: TTC
tagtttgattgcactgtggt

SEQ ID NO: 363381 - DNA, 20 bp, Artificial Sequence
  Description of Artificial Sequence: Synthetic oligonucleotide
  Target: LAMA2; (+) strand; PAM type: YTN; PAM sequence: CTA
gtttgattgcactgtggtct

SEQ ID NO: 363382 - DNA, 20 bp, Artificial Sequence
  Description of Artificial Sequence: Synthetic oligonucleotide
  Target: LAMA2; (+) strand; PAM type: YTN; PAM sequence: TTT
gattgcactgtggtctgaga

SEQ ID NO: 363383 - DNA, 20 bp, Artificial Sequence
  Description of Artificial Sequence: Synthetic oligonucleotide
  Target: LAMA2; (+) strand; PAM type: YTN; PAM sequence: TTG
attgcactgtggtctgagag

SEQ ID NO: 363384 - DNA, 20 bp, Artificial Sequence
  Description of Artificial Sequence: Synthetic oligonucleotide
  Target: LAMA2; (+) strand; PAM type: YTN; PAM sequence: TTG
cactgtggtctgagagacag

SEQ ID NO: 363385 - DNA, 20 bp, Artificial Sequence
  Description of Artificial Sequence: Synthetic oligonucleotide
  Target: LAMA2; (+) strand; PAM type: YTN; PAM sequence: CTG
tggtctgagagacagtttgt

SEQ ID NO: 363386 - DNA, 20 bp, Artificial Sequence
  Description of Artificial Sequence: Synthetic oligonucleotide
  Target: LAMA2; (+) strand; PAM type: YTN; PAM sequence: CTG
agagacagtttgttataatt

SEQ ID NO: 363387 - DNA, 20 bp, Artificial Sequence
  Description of Artificial Sequence: Synthetic oligonucleotide
  Target: LAMA2; (+) strand; PAM type: YTN; PAM sequence: TTT
gttataatttctgatctttt

SEQ ID NO: 363388 - DNA, 20 bp, Artificial Sequence
  Description of Artificial Sequence: Synthetic oligonucleotide
  Target: LAMA2; (+) strand; PAM type: YTN; PAM sequence: TTG
ttataatttctgatctttta

SEQ ID NO: 363389 - DNA, 20 bp, Artificial Sequence
  Description of Artificial Sequence: Synthetic oligonucleotide
  Target: LAMA2; (+) strand; PAM type: YTN; PAM sequence: TTA
taatttctgatcttttacat

SEQ ID NO: 363390 - DNA, 20 bp, Artificial Sequence
  Description of Artificial Sequence: Synthetic oligonucleotide
  Target: LAMA2; (+) strand; PAM type: YTN; PAM sequence: TTT
ctgatcttttacatttgctg

SEQ ID NO: 363391 - DNA, 20 bp, Artificial Sequence
  Description of Artificial Sequence: Synthetic oligonucleotide
  Target: LAMA2; (+) strand; PAM type: YTN; PAM sequence: TTC
tgatcttttacatttgctga

SEQ ID NO: 363392 - DNA, 20 bp, Artificial Sequence
  Description of Artificial Sequence: Synthetic oligonucleotide
  Target: LAMA2; (+) strand; PAM type: YTN; PAM sequence: CTG
atcttttacatttgctgagg

SEQ ID NO: 363393 - DNA, 20 bp, Artificial Sequence
  Description of Artificial Sequence: Synthetic oligonucleotide
  Target: LAMA2; (+) strand; PAM type: YTN; PAM sequence: CTT
ttacatttgctgaggagtgc

SEQ ID NO: 363394 - DNA, 20 bp, Artificial Sequence
  Description of Artificial Sequence: Synthetic oligonucleotide
  Target: LAMA2; (+) strand; PAM type: YTN; PAM sequence: TTT
tacatttgctgaggagtgct

SEQ ID NO: 363395 - DNA, 20 bp, Artificial Sequence
  Description of Artificial Sequence: Synthetic oligonucleotide
  Target: LAMA2; (+) strand; PAM type: YTN; PAM sequence: TTT
acatttgctgaggagtgctt

SEQ ID NO: 363396 - DNA, 20 bp, Artificial Sequence
  Description of Artificial Sequence: Synthetic oligonucleotide
  Target: LAMA2; (+) strand; PAM type: YTN; PAM sequence: TTA
catttgctgaggagtgcttt

SEQ ID NO: 363397 - DNA, 20 bp, Artificial Sequence
  Description of Artificial Sequence: Synthetic oligonucleotide
  Target: LAMA2; (+) strand; PAM type: YTN; PAM sequence: TTT
gctgaggagtgctttacttc

SEQ ID NO: 363398 - DNA, 20 bp, Artificial Sequence
  Description of Artificial Sequence: Synthetic oligonucleotide
  Target: LAMA2; (+) strand; PAM type: YTN; PAM sequence: TTG
ctgaggagtgctttacttcc

SEQ ID NO: 363399 - DNA, 20 bp, Artificial Sequence
  Description of Artificial Sequence: Synthetic oligonucleotide
  Target: LAMA2; (+) strand; PAM type: YTN; PAM sequence: CTG
aggagtgctttacttccaac

SEQ ID NO: 363400 - DNA, 20 bp, Artificial Sequence
  Description of Artificial Sequence: Synthetic oligonucleotide
  Target: LAMA2; (+) strand; PAM type: YTN; PAM sequence: CTT
tacttccaactatgtggtca

SEQ ID NO: 363401 - DNA, 20 bp, Artificial Sequence
  Description of Artificial Sequence: Synthetic oligonucleotide
  Target: LAMA2; (+) strand; PAM type: YTN; PAM sequence: TTT
acttccaactatgtggtcaa

SEQ ID NO: 363402 - DNA, 20 bp, Artificial Sequence
  Description of Artificial Sequence: Synthetic oligonucleotide
  Target: LAMA2; (+) strand; PAM type: YTN; PAM sequence: TTA
cttccaactatgtggtcaat

SEQ ID NO: 363403 - DNA, 20 bp, Artificial Sequence
  Description of Artificial Sequence: Synthetic oligonucleotide
  Target: LAMA2; (+) strand; PAM type: YTN; PAM sequence: CTT
ccaactatgtggtcaatttt

SEQ ID NO: 363404 - DNA, 20 bp, Artificial Sequence
  Description of Artificial Sequence: Synthetic oligonucleotide
  Target: LAMA2; (+) strand; PAM type: YTN; PAM sequence: TTC
caactatgtggtcaattttg

SEQ ID NO: 363405 - DNA, 20 bp, Artificial Sequence
  Description of Artificial Sequence: Synthetic oligonucleotide
  Target: LAMA2; (+) strand; PAM type: YTN; PAM sequence: CTA
tgtggtcaattttggaataa

SEQ ID NO: 363406 - DNA, 20 bp, Artificial Sequence
  Description of Artificial Sequence: Synthetic oligonucleotide
  Target: LAMA2; (+) strand; PAM type: YTN; PAM sequence: TTT
tggaataagtgtgatgtggt

SEQ ID NO: 363407 - DNA, 20 bp, Artificial Sequence
  Description of Artificial Sequence: Synthetic oligonucleotide
  Target: LAMA2; (+) strand; PAM type: YTN; PAM sequence: TTT
ggaataagtgtgatgtggtg

SEQ ID NO: 363408 - DNA, 20 bp, Artificial Sequence
  Description of Artificial Sequence: Synthetic oligonucleotide
  Target: LAMA2; (+) strand; PAM type: YTN; PAM sequence: TTG
gaataagtgtgatgtggtgc

SEQ ID NO: 363409 - DNA, 20 bp, Artificial Sequence
  Description of Artificial Sequence: Synthetic oligonucleotide
  Target: LAMA2; (+) strand; PAM type: YTN; PAM sequence: CTG
agcagaatgtatattctgtt

SEQ ID NO: 363410 - DNA, 20 bp, Artificial Sequence
  Description of Artificial Sequence: Synthetic oligonucleotide
  Target: LAMA2; (+) strand; PAM type: YTN; PAM sequence: TTC
tgttgatttggggtggagag

SEQ ID NO: 363411 - DNA, 20 bp, Artificial Sequence
  Description of Artificial Sequence: Synthetic oligonucleotide
  Target: LAMA2; (+) strand; PAM type: YTN; PAM sequence: CTG
ttgatttggggtggagagtt

SEQ ID NO: 363412 - DNA, 20 bp, Artificial Sequence
  Description of Artificial Sequence: Synthetic oligonucleotide
  Target: LAMA2; (+) strand; PAM type: YTN; PAM sequence: TTG
atttggggtggagagttctg

SEQ ID NO: 363413 - DNA, 20 bp, Artificial Sequence
  Description of Artificial Sequence: Synthetic oligonucleotide
  Target: LAMA2; (+) strand; PAM type: YTN; PAM sequence: TTT
ggggtggagagttctgcaaa

SEQ ID NO: 363414 - DNA, 20 bp, Artificial Sequence
  Description of Artificial Sequence: Synthetic oligonucleotide
  Target: LAMA2; (+) strand; PAM type: YTN; PAM sequence: TTG
gggtggagagttctgcaaat

SEQ ID NO: 363415 - DNA, 20 bp, Artificial Sequence
  Description of Artificial Sequence: Synthetic oligonucleotide
  Target: LAMA2; (+) strand; PAM type: YTN; PAM sequence: TTC
tgcaaatgtctattaggtcc

SEQ ID NO: 363416 - DNA, 20 bp, Artificial Sequence
  Description of Artificial Sequence: Synthetic oligonucleotide
  Target: LAMA2; (+) strand; PAM type: YTN; PAM sequence: CTG
caaatgtctattaggtccac

SEQ ID NO: 363417 - DNA, 20 bp, Artificial Sequence
  Description of Artificial Sequence: Synthetic oligonucleotide
  Target: LAMA2; (+) strand; PAM type: YTN; PAM sequence: CTA
ttaggtccacttggtgcaga

SEQ ID NO: 363418 - DNA, 20 bp, Artificial Sequence
  Description of Artificial Sequence: Synthetic oligonucleotide
  Target: LAMA2; (+) strand; PAM type: YTN; PAM sequence: TTA
ggtccacttggtgcagagct

SEQ ID NO: 363419 - DNA, 20 bp, Artificial Sequence
  Description of Artificial Sequence: Synthetic oligonucleotide
  Target: LAMA2; (+) strand; PAM type: YTN; PAM sequence: CTT
ggtgcagagctgagttcaat

SEQ ID NO: 363420 - DNA, 20 bp, Artificial Sequence
  Description of Artificial Sequence: Synthetic oligonucleotide
  Target: LAMA2; (+) strand; PAM type: YTN; PAM sequence: TTG
gtgcagagctgagttcaatt

SEQ ID NO: 363421 - DNA, 20 bp, Artificial Sequence
  Description of Artificial Sequence: Synthetic oligonucleotide
  Target: LAMA2; (+) strand; PAM type: YTN; PAM sequence: CTG
agttcaattcctggatatcc

SEQ ID NO: 363422 - DNA, 20 bp, Artificial Sequence
  Description of Artificial Sequence: Synthetic oligonucleotide
  Target: LAMA2; (+) strand; PAM type: YTN; PAM sequence: TTC
aattcctggatatccttgtt

SEQ ID NO: 363423 - DNA, 20 bp, Artificial Sequence
  Description of Artificial Sequence: Synthetic oligonucleotide
  Target: LAMA2; (+) strand; PAM type: YTN; PAM sequence: TTC
ctggatatccttgttacctt

SEQ ID NO: 363424 - DNA, 20 bp, Artificial Sequence
  Description of Artificial Sequence: Synthetic oligonucleotide
  Target: LAMA2; (+) strand; PAM type: YTN; PAM sequence: CTG
gatatccttgttacctttct

SEQ ID NO: 363425 - DNA, 20 bp, Artificial Sequence
  Description of Artificial Sequence: Synthetic oligonucleotide
  Target: LAMA2; (+) strand; PAM type: YTN; PAM sequence: CTT
gttacctttctgtctcgttg

SEQ ID NO: 363426 - DNA, 20 bp, Artificial Sequence
  Description of Artificial Sequence: Synthetic oligonucleotide
  Target: LAMA2; (+) strand; PAM type: YTN; PAM sequence: TTG
ttacctttctgtctcgttga

SEQ ID NO: 363427 - DNA, 20 bp, Artificial Sequence
  Description of Artificial Sequence: Synthetic oligonucleotide
  Target: LAMA2; (+) strand; PAM type: YTN; PAM sequence: TTA
cctttctgtctcgttgatct

SEQ ID NO: 363428 - DNA, 20 bp, Artificial Sequence
  Description of Artificial Sequence: Synthetic oligonucleotide
  Target: LAMA2; (+) strand; PAM type: YTN; PAM sequence: CTT
tctgtctcgttgatctgtct

SEQ ID NO: 363429 - DNA, 20 bp, Artificial Sequence
  Description of Artificial Sequence: Synthetic oligonucleotide
  Target: LAMA2; (+) strand; PAM type: YTN; PAM sequence: TTT
ctgtctcgttgatctgtcta

SEQ ID NO: 363430 - DNA, 20 bp, Artificial Sequence
  Description of Artificial Sequence: Synthetic oligonucleotide
  Target: LAMA2; (+) strand; PAM type: YTN; PAM sequence: TTC
tgtctcgttgatctgtctaa

SEQ ID NO: 363431 - DNA, 20 bp, Artificial Sequence
  Description of Artificial Sequence: Synthetic oligonucleotide
  Target: LAMA2; (+) strand; PAM type: YTN; PAM sequence: CTG
tctcgttgatctgtctaatg

SEQ ID NO: 363432 - DNA, 20 bp, Artificial Sequence
  Description of Artificial Sequence: Synthetic oligonucleotide
  Target: LAMA2; (+) strand; PAM type: YTN; PAM sequence: CTC
gttgatctgtctaatgttga

SEQ ID NO: 363433 - DNA, 20 bp, Artificial Sequence
  Description of Artificial Sequence: Synthetic oligonucleotide
  Target: LAMA2; (+) strand; PAM type: YTN; PAM sequence: TTG
atctgtctaatgttgacagt

SEQ ID NO: 363434 - DNA, 20 bp, Artificial Sequence
  Description of Artificial Sequence: Synthetic oligonucleotide
  Target: LAMA2; (+) strand; PAM type: YTN; PAM sequence: CTG
tctaatgttgacagtggggt

SEQ ID NO: 363435 - DNA, 20 bp, Artificial Sequence
  Description of Artificial Sequence: Synthetic oligonucleotide
  Target: LAMA2; (+) strand; PAM type: YTN; PAM sequence: CTA
atgttgacagtggggtgtta

SEQ ID NO: 363436 - DNA, 20 bp, Artificial Sequence
  Description of Artificial Sequence: Synthetic oligonucleotide
  Target: LAMA2; (+) strand; PAM type: YTN; PAM sequence: TTG
acagtggggtgttaaagtct

SEQ ID NO: 363437 - DNA, 20 bp, Artificial Sequence
  Description of Artificial Sequence: Synthetic oligonucleotide
  Target: LAMA2; (+) strand; PAM type: YTN; PAM sequence: TTA
aagtctcccattattattgt

SEQ ID NO: 363438 - DNA, 20 bp, Artificial Sequence
  Description of Artificial Sequence: Synthetic oligonucleotide
  Target: LAMA2; (+) strand; PAM type: YTN; PAM sequence: CTC
ccattattattgtgtgggag

SEQ ID NO: 363439 - DNA, 20 bp, Artificial Sequence
  Description of Artificial Sequence: Synthetic oligonucleotide
  Target: LAMA2; (+) strand; PAM type: YTN; PAM sequence: TTA
ttattgtgtgggagtctaag

SEQ ID NO: 363440 - DNA, 20 bp, Artificial Sequence
  Description of Artificial Sequence: Synthetic oligonucleotide
  Target: LAMA2; (+) strand; PAM type: YTN; PAM sequence: TTA
ttgtgtgggagtctaagtct

SEQ ID NO: 363441 - DNA, 20 bp, Artificial Sequence
  Description of Artificial Sequence: Synthetic oligonucleotide
  Target: LAMA2; (+) strand; PAM type: YTN; PAM sequence: TTG
tgtgggagtctaagtctctt

SEQ ID NO: 363442 - DNA, 20 bp, Artificial Sequence
  Description of Artificial Sequence: Synthetic oligonucleotide
  Target: LAMA2; (+) strand; PAM type: YTN; PAM sequence: CTA
agtctctttgtaggtctcta

SEQ ID NO: 363443 - DNA, 20 bp, Artificial Sequence
  Description of Artificial Sequence: Synthetic oligonucleotide
  Target: LAMA2; (+) strand; PAM type: YTN; PAM sequence: CTC
tttgtaggtctctaaggact

SEQ ID NO: 363444 - DNA, 20 bp, Artificial Sequence
  Description of Artificial Sequence: Synthetic oligonucleotide
  Target: LAMA2; (+) strand; PAM type: YTN; PAM sequence: CTT
tgtaggtctctaaggacttg

SEQ ID NO: 363445 - DNA, 20 bp, Artificial Sequence
  Description of Artificial Sequence: Synthetic oligonucleotide
  Target: LAMA2; (+) strand; PAM type: YTN; PAM sequence: TTT
gtaggtctctaaggacttgc

SEQ ID NO: 363446 - DNA, 20 bp, Artificial Sequence
  Description of Artificial Sequence: Synthetic oligonucleotide
  Target: LAMA2; (+) strand; PAM type: YTN; PAM sequence: TTG
taggtctctaaggacttgct

SEQ ID NO: 363447 - DNA, 20 bp, Artificial Sequence
  Description of Artificial Sequence: Synthetic oligonucleotide
  Target: LAMA2; (+) strand; PAM type: YTN; PAM sequence: CTC
taaggacttgctttatgaat

SEQ ID NO: 363448 - DNA, 20 bp, Artificial Sequence
  Description of Artificial Sequence: Synthetic oligonucleotide
  Target: LAMA2; (+) strand; PAM type: YTN; PAM sequence: CTA
aggacttgctttatgaatct

SEQ ID NO: 363449 - DNA, 20 bp, Artificial Sequence
  Description of Artificial Sequence: Synthetic oligonucleotide
  Target: LAMA2; (+) strand; PAM type: YTN; PAM sequence: CTT
gctttatgaatctgagtgct

SEQ ID NO: 363450 - DNA, 20 bp, Artificial Sequence
  Description of Artificial Sequence: Synthetic oligonucleotide
  Target: LAMA2; (+) strand; PAM type: YTN; PAM sequence: TTG
ctttatgaatctgagtgctc

SEQ ID NO: 363451 - DNA, 20 bp, Artificial Sequence
  Description of Artificial Sequence: Synthetic oligonucleotide
  Target: LAMA2; (+) strand; PAM type: YTN; PAM sequence: CTT
tatgaatctgagtgctcctg

SEQ ID NO: 363452 - DNA, 20 bp, Artificial Sequence
  Description of Artificial Sequence: Synthetic oligonucleotide
  Target: LAMA2; (+) strand; PAM type: YTN; PAM sequence: TTT
atgaatctgagtgctcctgt

SEQ ID NO: 363453 - DNA, 20 bp, Artificial Sequence
  Description of Artificial Sequence: Synthetic oligonucleotide
  Target: LAMA2; (+) strand; PAM type: YTN; PAM sequence: TTA
tgaatctgagtgctcctgta

SEQ ID NO: 363454 - DNA, 20 bp, Artificial Sequence
  Description of Artificial Sequence: Synthetic oligonucleotide
  Target: LAMA2; (+) strand; PAM type: YTN; PAM sequence: CTG
agtgctcctgtattgggtgc

SEQ ID NO: 363455 - DNA, 20 bp, Artificial Sequence
  Description of Artificial Sequence: Synthetic oligonucleotide
  Target: LAMA2; (+) strand; PAM type: YTN; PAM sequence: CTC
ctgtattgggtgcatatata

SEQ ID NO: 363456 - DNA, 20 bp, Artificial Sequence
  Description of Artificial Sequence: Synthetic oligonucleotide
  Target: LAMA2; (+) strand; PAM type: YTN; PAM sequence: CTG
tattgggtgcatatatattt

SEQ ID NO: 363457 - DNA, 20 bp, Artificial Sequence
  Description of Artificial Sequence: Synthetic oligonucleotide
  Target: LAMA2; (+) strand; PAM type: YTN; PAM sequence: TTG
ggtgcatatatatttaggat

SEQ ID NO: 363458 - DNA, 20 bp, Artificial Sequence
  Description of Artificial Sequence: Synthetic oligonucleotide
  Target: LAMA2; (+) strand; PAM type: YTN; PAM sequence: TTT
aggatagttagctcttcttg

SEQ ID NO: 363459 - DNA, 20 bp, Artificial Sequence
  Description of Artificial Sequence: Synthetic oligonucleotide
  Target: LAMA2; (+) strand; PAM type: YTN; PAM sequence: TTA
ggatagttagctcttcttgt

SEQ ID NO: 363460 - DNA, 20 bp, Artificial Sequence
  Description of Artificial Sequence: Synthetic oligonucleotide
  Target: LAMA2; (+) strand; PAM type: YTN; PAM sequence: TTA
gctcttcttgttgaattgat

SEQ ID NO: 363461 - DNA, 20 bp, Artificial Sequence
  Description of Artificial Sequence: Synthetic oligonucleotide
  Target: LAMA2; (+) strand; PAM type: YTN; PAM sequence: CTC
ttcttgttgaattgatccct

SEQ ID NO: 363462 - DNA, 20 bp, Artificial Sequence
  Description of Artificial Sequence: Synthetic oligonucleotide
  Target: LAMA2; (+) strand; PAM type: YTN; PAM sequence: CTT
cttgttgaattgatcccttt

SEQ ID NO: 363463 - DNA, 20 bp, Artificial Sequence
  Description of Artificial Sequence: Synthetic oligonucleotide
  Target: LAMA2; (+) strand; PAM type: YTN; PAM sequence: TTC
ttgttgaattgatcccttta

SEQ ID NO: 363464 - DNA, 20 bp, Artificial Sequence
  Description of Artificial Sequence: Synthetic oligonucleotide
  Target: LAMA2; (+) strand; PAM type: YTN; PAM sequence: CTT
gttgaattgatccctttacc

SEQ ID NO: 363465 - DNA, 20 bp, Artificial Sequence
  Description of Artificial Sequence: Synthetic oligonucleotide
  Target: LAMA2; (+) strand; PAM type: YTN; PAM sequence: TTG
ttgaattgatccctttacca

SEQ ID NO: 363466 - DNA, 20 bp, Artificial Sequence
  Description of Artificial Sequence: Synthetic oligonucleotide
  Target: LAMA2; (+) strand; PAM type: YTN; PAM sequence: TTG
aattgatccctttaccatta

SEQ ID NO: 363467 - DNA, 20 bp, Artificial Sequence
  Description of Artificial Sequence: Synthetic oligonucleotide
  Target: LAMA2; (+) strand; PAM type: YTN; PAM sequence: TTG
atccctttaccattatgtaa

SEQ ID NO: 363468 - DNA, 20 bp, Artificial Sequence
  Description of Artificial Sequence: Synthetic oligonucleotide
  Target: LAMA2; (+) strand; PAM type: YTN; PAM sequence: CTT
taccattatgtaatggcctt

SEQ ID NO: 363469 - DNA, 20 bp, Artificial Sequence
  Description of Artificial Sequence: Synthetic oligonucleotide
  Target: LAMA2; (+) strand; PAM type: YTN; PAM sequence: TTT
accattatgtaatggccttc

SEQ ID NO: 363470 - DNA, 20 bp, Artificial Sequence
  Description of Artificial Sequence: Synthetic oligonucleotide
  Target: LAMA2; (+) strand; PAM type: YTN; PAM sequence: TTA
ccattatgtaatggccttct

SEQ ID NO: 363471 - DNA, 20 bp, Artificial Sequence
  Description of Artificial Sequence: Synthetic oligonucleotide
  Target: LAMA2; (+) strand; PAM type: YTN; PAM sequence: TTA
tgtaatggccttctttgtct

SEQ ID NO: 363472 - DNA, 20 bp, Artificial Sequence
  Description of Artificial Sequence: Synthetic oligonucleotide
  Target: LAMA2; (+) strand; PAM type: YTN; PAM sequence: CTT
ctttgtctcttttgatcttt

SEQ ID NO: 363473 - DNA, 20 bp, Artificial Sequence
  Description of Artificial Sequence: Synthetic oligonucleotide
  Target: LAMA2; (+) strand; PAM type: YTN; PAM sequence: TTC
tttgtctcttttgatctttg

SEQ ID NO: 363474 - DNA, 20 bp, Artificial Sequence
  Description of Artificial Sequence: Synthetic oligonucleotide
  Target: LAMA2; (+) strand; PAM type: YTN; PAM sequence: CTT
tgtctcttttgatctttgtt

SEQ ID NO: 363475 - DNA, 20 bp, Artificial Sequence
  Description of Artificial Sequence: Synthetic oligonucleotide
  Target: LAMA2; (+) strand; PAM type: YTN; PAM sequence: TTT
gtctcttttgatctttgttg

SEQ ID NO: 363476 - DNA, 20 bp, Artificial Sequence
  Description of Artificial Sequence: Synthetic oligonucleotide
  Target: LAMA2; (+) strand; PAM type: YTN; PAM sequence: TTG
tctcttttgatctttgttgg

SEQ ID NO: 363477 - DNA, 20 bp, Artificial Sequence
  Description of Artificial Sequence: Synthetic oligonucleotide
  Target: LAMA2; (+) strand; PAM type: YTN; PAM sequence: CTC
ttttgatctttgttggttta

SEQ ID NO: 363478 - DNA, 20 bp, Artificial Sequence
  Description of Artificial Sequence: Synthetic oligonucleotide
  Target: LAMA2; (+) strand; PAM type: YTN; PAM sequence: CTT
ttgatctttgttggtttaat

SEQ ID NO: 363479 - DNA, 20 bp, Artificial Sequence
  Description of Artificial Sequence: Synthetic oligonucleotide
  Target: LAMA2; (+) strand; PAM type: YTN; PAM sequence: TTT
tgatctttgttggtttaatg

SEQ ID NO: 363480 - DNA, 20 bp, Artificial Sequence
  Description of Artificial Sequence: Synthetic oligonucleotide
  Target: LAMA2; (+) strand; PAM type: YTN; PAM sequence: TTT
gatctttgttggtttaatgt

SEQ ID NO: 363481 - DNA, 20 bp, Artificial Sequence
  Description of Artificial Sequence: Synthetic oligonucleotide
  Target: LAMA2; (+) strand; PAM type: YTN; PAM sequence: TTG
atctttgttggtttaatgtc

SEQ ID NO: 363482 - DNA, 20 bp, Artificial Sequence
  Description of Artificial Sequence: Synthetic oligonucleotide
  Target: LAMA2; (+) strand; PAM type: YTN; PAM sequence: CTT
tgttggtttaatgtctgttt

SEQ ID NO: 363483 - DNA, 20 bp, Artificial Sequence
  Description of Artificial Sequence: Synthetic oligonucleotide
  Target: LAMA2; (+) strand; PAM type: YTN; PAM sequence: TTT
gttggtttaatgtctgtttt

SEQ ID NO: 363484 - DNA, 20 bp, Artificial Sequence
  Description of Artificial Sequence: Synthetic oligonucleotide
  Target: LAMA2; (+) strand; PAM type: YTN; PAM sequence: TTG
ttggtttaatgtctgtttta

SEQ ID NO: 363485 - DNA, 20 bp, Artificial Sequence
  Description of Artificial Sequence: Synthetic oligonucleotide
  Target: LAMA2; (+) strand; PAM type: YTN; PAM sequence: TTG
gtttaatgtctgttttatca

SEQ ID NO: 363486 - DNA, 20 bp, Artificial Sequence
  Description of Artificial Sequence: Synthetic oligonucleotide
  Target: LAMA2; (+) strand; PAM type: YTN; PAM sequence: TTT
aatgtctgttttatcagaga

SEQ ID NO: 363487 - DNA, 20 bp, Artificial Sequence
  Description of Artificial Sequence: Synthetic oligonucleotide
  Target: LAMA2; (+) strand; PAM type: YTN; PAM sequence: TTA
atgtctgttttatcagagac

SEQ ID NO: 363488 - DNA, 20 bp, Artificial Sequence
  Description of Artificial Sequence: Synthetic oligonucleotide
  Target: LAMA2; (+) strand; PAM type: YTN; PAM sequence: CTG
ttttatcagagactaggttt

SEQ ID NO: 363489 - DNA, 20 bp, Artificial Sequence
  Description of Artificial Sequence: Synthetic oligonucleotide
  Target: LAMA2; (+) strand; PAM type: YTN; PAM sequence: TTT
tatcagagactaggtttgca

SEQ ID NO: 363490 - DNA, 20 bp, Artificial Sequence
  Description of Artificial Sequence: Synthetic oligonucleotide
  Target: LAMA2; (+) strand; PAM type: YTN; PAM sequence: TTT
atcagagactaggtttgcaa

SEQ ID NO: 363491 - DNA, 20 bp, Artificial Sequence
  Description of Artificial Sequence: Synthetic oligonucleotide
  Target: LAMA2; (+) strand; PAM type: YTN; PAM sequence: TTA
tcagagactaggtttgcaac

SEQ ID NO: 363492 - DNA, 20 bp, Artificial Sequence
  Description of Artificial Sequence: Synthetic oligonucleotide
  Target: LAMA2; (+) strand; PAM type: YTN; PAM sequence: CTA
ggtttgcaacccctgccttt

SEQ ID NO: 363493 - DNA, 20 bp, Artificial Sequence
  Description of Artificial Sequence: Synthetic oligonucleotide
  Target: LAMA2; (+) strand; PAM type: YTN; PAM sequence: TTT
gcaacccctgcctttttttg

SEQ ID NO: 363494 - DNA, 20 bp, Artificial Sequence
  Description of Artificial Sequence: Synthetic oligonucleotide
  Target: LAMA2; (+) strand; PAM type: YTN; PAM sequence: TTG
caacccctgcctttttttgt

SEQ ID NO: 363495 - DNA, 20 bp, Artificial Sequence
  Description of Artificial Sequence: Synthetic oligonucleotide
  Target: LAMA2; (+) strand; PAM type: YTN; PAM sequence: CTG
cctttttttgttttctattt

SEQ ID NO: 363496 - DNA, 20 bp, Artificial Sequence
  Description of Artificial Sequence: Synthetic oligonucleotide
  Target: LAMA2; (+) strand; PAM type: YTN; PAM sequence: CTT
tttttgttttctatttcctt

SEQ ID NO: 363497 - DNA, 20 bp, Artificial Sequence
  Description of Artificial Sequence: Synthetic oligonucleotide
  Target: LAMA2; (+) strand; PAM type: YTN; PAM sequence: TTT
ttttgttttctatttccttg

SEQ ID NO: 363498 - DNA, 20 bp, Artificial Sequence
  Description of Artificial Sequence: Synthetic oligonucleotide
  Target: LAMA2; (+) strand; PAM type: YTN; PAM sequence: TTT
tttgttttctatttccttgg

SEQ ID NO: 363499 - DNA, 20 bp, Artificial Sequence
  Description of Artificial Sequence: Synthetic oligonucleotide
  Target: LAMA2; (+) strand; PAM type: YTN; PAM sequence: TTT
ttgttttctatttccttggt

SEQ ID NO: 363500 - DNA, 20 bp, Artificial Sequence
  Description of Artificial Sequence: Synthetic oligonucleotide
  Target: LAMA2; (+) strand; PAM type: YTN; PAM sequence: TTT
tgttttctatttccttggta

SEQ ID NO: 363501 - DNA, 20 bp, Artificial Sequence
  Description of Artificial Sequence: Synthetic oligonucleotide
  Target: LAMA2; (+) strand; PAM type: YTN; PAM sequence: TTT
gttttctatttccttggtag

SEQ ID NO: 363502 - DNA, 20 bp, Artificial Sequence
  Description of Artificial Sequence: Synthetic oligonucleotide
  Target: LAMA2; (+) strand; PAM type: YTN; PAM sequence: TTG
ttttctatttccttggtaga

SEQ ID NO: 363503 - DNA, 20 bp, Artificial Sequence
  Description of Artificial Sequence: Synthetic oligonucleotide
  Target: LAMA2; (+) strand; PAM type: YTN; PAM sequence: TTT
tctatttccttggtagatct

SEQ ID NO: 363504 - DNA, 20 bp, Artificial Sequence
  Description of Artificial Sequence: Synthetic oligonucleotide
  Target: LAMA2; (+) strand; PAM type: YTN; PAM sequence: TTT
ctatttccttggtagatctt

SEQ ID NO: 363505 - DNA, 20 bp, Artificial Sequence
  Description of Artificial Sequence: Synthetic oligonucleotide
  Target: LAMA2; (+) strand; PAM type: YTN; PAM sequence: TTC
tatttccttggtagatcttc

SEQ ID NO: 363506 - DNA, 20 bp, Artificial Sequence
  Description of Artificial Sequence: Synthetic oligonucleotide
  Target: LAMA2; (+) strand; PAM type: YTN; PAM sequence: CTA
tttccttggtagatcttcct

SEQ ID NO: 363507 - DNA, 20 bp, Artificial Sequence
  Description of Artificial Sequence: Synthetic oligonucleotide
  Target: LAMA2; (+) strand; PAM type: YTN; PAM sequence: TTT
ccttggtagatcttcctcca

SEQ ID NO: 363508 - DNA, 20 bp, Artificial Sequence
  Description of Artificial Sequence: Synthetic oligonucleotide
  Target: LAMA2; (+) strand; PAM type: YTN; PAM sequence: TTC
cttggtagatcttcctccat

SEQ ID NO: 363509 - DNA, 20 bp, Artificial Sequence
  Description of Artificial Sequence: Synthetic oligonucleotide
  Target: LAMA2; (+) strand; PAM type: YTN; PAM sequence: CTT
ggtagatcttcctccatccc

SEQ ID NO: 363510 - DNA, 20 bp, Artificial Sequence
  Description of Artificial Sequence: Synthetic oligonucleotide
  Target: LAMA2; (+) strand; PAM type: YTN; PAM sequence: TTG
gtagatcttcctccatccct

SEQ ID NO: 363511 - DNA, 20 bp, Artificial Sequence
  Description of Artificial Sequence: Synthetic oligonucleotide
  Target: LAMA2; (+) strand; PAM type: YTN; PAM sequence: CTT
cctccatccctttattttga

SEQ ID NO: 363512 - DNA, 20 bp, Artificial Sequence
  Description of Artificial Sequence: Synthetic oligonucleotide
  Target: LAMA2; (+) strand; PAM type: YTN; PAM sequence: TTC
ctccatccctttattttgag

SEQ ID NO: 363513 - DNA, 20 bp, Artificial Sequence
  Description of Artificial Sequence: Synthetic oligonucleotide
  Target: LAMA2; (+) strand; PAM type: YTN; PAM sequence: CTC
catccctttattttgagcct

SEQ ID NO: 363514 - DNA, 20 bp, Artificial Sequence
  Description of Artificial Sequence: Synthetic oligonucleotide
  Target: LAMA2; (+) strand; PAM type: YTN; PAM sequence: CTT
tattttgagcctgtgtgtgt

SEQ ID NO: 363515 - DNA, 20 bp, Artificial Sequence
  Description of Artificial Sequence: Synthetic oligonucleotide
  Target: LAMA2; (+) strand; PAM type: YTN; PAM sequence: TTT
attttgagcctgtgtgtgtc

SEQ ID NO: 363516 - DNA, 20 bp, Artificial Sequence
  Description of Artificial Sequence: Synthetic oligonucleotide
  Target: LAMA2; (+) strand; PAM type: YTN; PAM sequence: TTA
ttttgagcctgtgtgtgtct

SEQ ID NO: 363517 - DNA, 20 bp, Artificial Sequence
  Description of Artificial Sequence: Synthetic oligonucleotide
  Target: LAMA2; (+) strand; PAM type: YTN; PAM sequence: TTT
tgagcctgtgtgtgtctctg

SEQ ID NO: 363518 - DNA, 20 bp, Artificial Sequence
  Description of Artificial Sequence: Synthetic oligonucleotide
  Target: LAMA2; (+) strand; PAM type: YTN; PAM sequence: TTT
gagcctgtgtgtgtctctgc

SEQ ID NO: 363519 - DNA, 20 bp, Artificial Sequence
  Description of Artificial Sequence: Synthetic oligonucleotide
  Target: LAMA2; (+) strand; PAM type: YTN; PAM sequence: TTG
agcctgtgtgtgtctctgca

SEQ ID NO: 363520 - DNA, 20 bp, Artificial Sequence
  Description of Artificial Sequence: Synthetic oligonucleotide
  Target: LAMA2; (+) strand; PAM type: YTN; PAM sequence: CTG
tgtgtgtctctgcacatgag

SEQ ID NO: 363521 - DNA, 20 bp, Artificial Sequence
  Description of Artificial Sequence: Synthetic oligonucleotide
  Target: LAMA2; (+) strand; PAM type: YTN; PAM sequence: CTC
tgcacatgagatgggtctct

SEQ ID NO: 363522 - DNA, 20 bp, Artificial Sequence
  Description of Artificial Sequence: Synthetic oligonucleotide
  Target: LAMA2; (+) strand; PAM type: YTN; PAM sequence: CTG
cacatgagatgggtctcttg

SEQ ID NO: 363523 - DNA, 20 bp, Artificial Sequence
  Description of Artificial Sequence: Synthetic oligonucleotide
  Target: LAMA2; (+) strand; PAM type: YTN; PAM sequence: CTC
ttgaatacagcacactgatg

SEQ ID NO: 363524 - DNA, 20 bp, Artificial Sequence
  Description of Artificial Sequence: Synthetic oligonucleotide
  Target: LAMA2; (+) strand; PAM type: YTN; PAM sequence: CTT
gaatacagcacactgatggg

SEQ ID NO: 363525 - DNA, 20 bp, Artificial Sequence
  Description of Artificial Sequence: Synthetic oligonucleotide
  Target: LAMA2; (+) strand; PAM type: YTN; PAM sequence: TTG
aatacagcacactgatgggt

SEQ ID NO: 363526 - DNA, 20 bp, Artificial Sequence
  Description of Artificial Sequence: Synthetic oligonucleotide
  Target: LAMA2; (+) strand; PAM type: YTN; PAM sequence: CTG
atgggtcttgagtctttatc

SEQ ID NO: 363527 - DNA, 20 bp, Artificial Sequence
  Description of Artificial Sequence: Synthetic oligonucleotide
  Target: LAMA2; (+) strand; PAM type: YTN; PAM sequence: CTT
gagtctttatccaatttgcc

SEQ ID NO: 363528 - DNA, 20 bp, Artificial Sequence
  Description of Artificial Sequence: Synthetic oligonucleotide
  Target: LAMA2; (+) strand; PAM type: YTN; PAM sequence: TTG
agtctttatccaatttgcca

SEQ ID NO: 363529 - DNA, 20 bp, Artificial Sequence
  Description of Artificial Sequence: Synthetic oligonucleotide
  Target: LAMA2; (+) strand; PAM type: YTN; PAM sequence: CTT
tatccaatttgccagtctgt

SEQ ID NO: 363530 - DNA, 20 bp, Artificial Sequence
  Description of Artificial Sequence: Synthetic oligonucleotide
  Target: LAMA2; (+) strand; PAM type: YTN; PAM sequence: TTT
atccaatttgccagtctgtg

SEQ ID NO: 363531 - DNA, 20 bp, Artificial Sequence
  Description of Artificial Sequence: Synthetic oligonucleotide
  Target: LAMA2; (+) strand; PAM type: YTN; PAM sequence: TTA
tccaatttgccagtctgtgt

SEQ ID NO: 363532 - DNA, 20 bp, Artificial Sequence
  Description of Artificial Sequence: Synthetic oligonucleotide
  Target: LAMA2; (+) strand; PAM type: YTN; PAM sequence: TTT
gccagtctgtgtcttttaat

SEQ ID NO: 363533 - DNA, 20 bp, Artificial Sequence
  Description of Artificial Sequence: Synthetic oligonucleotide
  Target: LAMA2; (+) strand; PAM type: YTN; PAM sequence: TTG
ccagtctgtgtcttttaatt

SEQ ID NO: 363534 - DNA, 20 bp, Artificial Sequence
  Description of Artificial Sequence: Synthetic oligonucleotide
  Target: LAMA2; (+) strand; PAM type: YTN; PAM sequence: CTG
tgtcttttaattagagcatt

SEQ ID NO: 363535 - DNA, 20 bp, Artificial Sequence
  Description of Artificial Sequence: Synthetic oligonucleotide
  Target: LAMA2; (+) strand; PAM type: YTN; PAM sequence: CTT
ttaattagagcatttagccc

SEQ ID NO: 363536 - DNA, 20 bp, Artificial Sequence
  Description of Artificial Sequence: Synthetic oligonucleotide
  Target: LAMA2; (+) strand; PAM type: YTN; PAM sequence: TTT
taattagagcatttagccca

SEQ ID NO: 363537 - DNA, 20 bp, Artificial Sequence
  Description of Artificial Sequence: Synthetic oligonucleotide
  Target: LAMA2; (+) strand; PAM type: YTN; PAM sequence: TTT
aattagagcatttagcccat

SEQ ID NO: 363538 - DNA, 20 bp, Artificial Sequence
  Description of Artificial Sequence: Synthetic oligonucleotide
  Target: LAMA2; (+) strand; PAM type: YTN; PAM sequence: TTA
attagagcatttagcccatt

SEQ ID NO: 363539 - DNA, 20 bp, Artificial Sequence
  Description of Artificial Sequence: Synthetic oligonucleotide
  Target: LAMA2; (+) strand; PAM type: YTN; PAM sequence: TTA
gagcatttagcccatttacg

SEQ ID NO: 363540 - DNA, 20 bp, Artificial Sequence
  Description of Artificial Sequence: Synthetic oligonucleotide
  Target: LAMA2; (+) strand; PAM type: YTN; PAM sequence: TTT
agcccatttacgtttaaggt

SEQ ID NO: 363541 - DNA, 20 bp, Artificial Sequence
  Description of Artificial Sequence: Synthetic oligonucleotide
  Target: LAMA2; (+) strand; PAM type: YTN; PAM sequence: TTA
gcccatttacgtttaaggtt

SEQ ID NO: 363542 - DNA, 20 bp, Artificial Sequence
  Description of Artificial Sequence: Synthetic oligonucleotide
  Target: LAMA2; (+) strand; PAM type: YTN; PAM sequence: TTT
acgtttaaggttaatattat

SEQ ID NO: 363543 - DNA, 20 bp, Artificial Sequence
  Description of Artificial Sequence: Synthetic oligonucleotide
  Target: LAMA2; (+) strand; PAM type: YTN; PAM sequence: TTA
cgtttaaggttaatattatg

SEQ ID NO: 363544 - DNA, 20 bp, Artificial Sequence
  Description of Artificial Sequence: Synthetic oligonucleotide
  Target: LAMA2; (+) strand; PAM type: YTN; PAM sequence: TTT
aaggttaatattatgtgtga

SEQ ID NO: 363545 - DNA, 20 bp, Artificial Sequence
  Description of Artificial Sequence: Synthetic oligonucleotide
  Target: LAMA2; (+) strand; PAM type: YTN; PAM sequence: TTA
aggttaatattatgtgtgaa

SEQ ID NO: 363546 - DNA, 20 bp, Artificial Sequence
  Description of Artificial Sequence: Synthetic oligonucleotide
  Target: LAMA2; (+) strand; PAM type: YTN; PAM sequence: TTA
atattatgtgtgaatatgat

SEQ ID NO: 363547 - DNA, 20 bp, Artificial Sequence
  Description of Artificial Sequence: Synthetic oligonucleotide
  Target: LAMA2; (+) strand; PAM type: YTN; PAM sequence: TTA
tgtgtgaatatgatcctgtc

SEQ ID NO: 363548 - DNA, 20 bp, Artificial Sequence
  Description of Artificial Sequence: Synthetic oligonucleotide
  Target: LAMA2; (+) strand; PAM type: YTN; PAM sequence: CTG
tcattatgatgttagctggt

SEQ ID NO: 363549 - DNA, 20 bp, Artificial Sequence
  Description of Artificial Sequence: Synthetic oligonucleotide
  Target: LAMA2; (+) strand; PAM type: YTN; PAM sequence: TTA
tgatgttagctggttatttt

SEQ ID NO: 363550 - DNA, 20 bp, Artificial Sequence
  Description of Artificial Sequence: Synthetic oligonucleotide
  Target: LAMA2; (+) strand; PAM type: YTN; PAM sequence: TTA
gctggttattttgctcgtta

SEQ ID NO: 363551 - DNA, 20 bp, Artificial Sequence
  Description of Artificial Sequence: Synthetic oligonucleotide
  Target: LAMA2; (+) strand; PAM type: YTN; PAM sequence: CTG
gttattttgctcgttagttg

SEQ ID NO: 363552 - DNA, 20 bp, Artificial Sequence
  Description of Artificial Sequence: Synthetic oligonucleotide
  Target: LAMA2; (+) strand; PAM type: YTN; PAM sequence: TTA
ttttgctcgttagttgtttc

SEQ ID NO: 363553 - DNA, 20 bp, Artificial Sequence
  Description of Artificial Sequence: Synthetic oligonucleotide
  Target: LAMA2; (+) strand; PAM type: YTN; PAM sequence: TTT
tgctcgttagttgtttcagt

SEQ ID NO: 363554 - DNA, 20 bp, Artificial Sequence
  Description of Artificial Sequence: Synthetic oligonucleotide
  Target: LAMA2; (+) strand; PAM type: YTN; PAM sequence: TTT
gctcgttagttgtttcagtt

SEQ ID NO: 363555 - DNA, 20 bp, Artificial Sequence
  Description of Artificial Sequence: Synthetic oligonucleotide
  Target: LAMA2; (+) strand; PAM type: YTN; PAM sequence: TTG
ctcgttagttgtttcagttt

SEQ ID NO: 363556 - DNA, 20 bp, Artificial Sequence
  Description of Artificial Sequence: Synthetic oligonucleotide
  Target: LAMA2; (+) strand; PAM type: YTN; PAM sequence: CTC
gttagttgtttcagtttctt

SEQ ID NO: 363557 - DNA, 20 bp, Artificial Sequence
  Description of Artificial Sequence: Synthetic oligonucleotide
  Target: LAMA2; (+) strand; PAM type: YTN; PAM sequence: TTA
gttgtttcagtttcttccta

SEQ ID NO: 363558 - DNA, 20 bp, Artificial Sequence
  Description of Artificial Sequence: Synthetic oligonucleotide
  Target: LAMA2; (+) strand; PAM type: YTN; PAM sequence: TTG
tttcagtttcttcctagcat

SEQ ID NO: 363559 - DNA, 20 bp, Artificial Sequence
  Description of Artificial Sequence: Synthetic oligonucleotide
  Target: LAMA2; (+) strand; PAM type: YTN; PAM sequence: TTT
cagtttcttcctagcatcga

SEQ ID NO: 363560 - DNA, 20 bp, Artificial Sequence
  Description of Artificial Sequence: Synthetic oligonucleotide
  Target: LAMA2; (+) strand; PAM type: YTN; PAM sequence: TTC
agtttcttcctagcatcgat

SEQ ID NO: 363561 - DNA, 20 bp, Artificial Sequence
  Description of Artificial Sequence: Synthetic oligonucleotide
  Target: LAMA2; (+) strand; PAM type: YTN; PAM sequence: TTT
cttcctagcatcgatggtct

SEQ ID NO: 363562 - DNA, 20 bp, Artificial Sequence
  Description of Artificial Sequence: Synthetic oligonucleotide
  Target: LAMA2; (+) strand; PAM type: YTN; PAM sequence: TTC
ttcctagcatcgatggtctt

SEQ ID NO: 363563 - DNA, 20 bp, Artificial Sequence
  Description of Artificial Sequence: Synthetic oligonucleotide
  Target: LAMA2; (+) strand; PAM type: YTN; PAM sequence: CTT
cctagcatcgatggtcttta

SEQ ID NO: 363564 - DNA, 20 bp, Artificial Sequence
  Description of Artificial Sequence: Synthetic oligonucleotide
  Target: LAMA2; (+) strand; PAM type: YTN; PAM sequence: TTC
ctagcatcgatggtctttac

SEQ ID NO: 363565 - DNA, 20 bp, Artificial Sequence
  Description of Artificial Sequence: Synthetic oligonucleotide
  Target: LAMA2; (+) strand; PAM type: YTN; PAM sequence: CTA
gcatcgatggtctttacaat

SEQ ID NO: 363566 - DNA, 20 bp, Artificial Sequence
  Description of Artificial Sequence: Synthetic oligonucleotide
  Target: LAMA2; (+) strand; PAM type: YTN; PAM sequence: CTT
tacaatttggcatgtttttg

SEQ ID NO: 363567 - DNA, 20 bp, Artificial Sequence
  Description of Artificial Sequence: Synthetic oligonucleotide
  Target: LAMA2; (+) strand; PAM type: YTN; PAM sequence: TTT
acaatttggcatgtttttgc

SEQ ID NO: 363568 - DNA, 20 bp, Artificial Sequence
  Description of Artificial Sequence: Synthetic oligonucleotide
  Target: LAMA2; (+) strand; PAM type: YTN; PAM sequence: TTA
caatttggcatgtttttgca

SEQ ID NO: 363569 - DNA, 20 bp, Artificial Sequence
  Description of Artificial Sequence: Synthetic oligonucleotide
  Target: LAMA2; (+) strand; PAM type: YTN; PAM sequence: TTT
ggcatgtttttgcagtggct

SEQ ID NO: 363570 - DNA, 20 bp, Artificial Sequence
  Description of Artificial Sequence: Synthetic oligonucleotide
  Target: LAMA2; (+) strand; PAM type: YTN; PAM sequence: TTG
gcatgtttttgcagtggctg

SEQ ID NO: 363571 - DNA, 20 bp, Artificial Sequence
  Description of Artificial Sequence: Synthetic oligonucleotide
  Target: LAMA2; (+) strand; PAM type: YTN; PAM sequence: TTT
ttgcagtggctggtactggt

SEQ ID NO: 363572 - DNA, 20 bp, Artificial Sequence
  Description of Artificial Sequence: Synthetic oligonucleotide
  Target: LAMA2; (+) strand; PAM type: YTN; PAM sequence: TTT
tgcagtggctggtactggtt

SEQ ID NO: 363573 - DNA, 20 bp, Artificial Sequence
  Description of Artificial Sequence: Synthetic oligonucleotide
  Target: LAMA2; (+) strand; PAM type: YTN; PAM sequence: TTT
gcagtggctggtactggttg

SEQ ID NO: 363574 - DNA, 20 bp, Artificial Sequence
  Description of Artificial Sequence: Synthetic oligonucleotide
  Target: LAMA2; (+) strand; PAM type: YTN; PAM sequence: TTG
cagtggctggtactggttgt

SEQ ID NO: 363575 - DNA, 20 bp, Artificial Sequence
  Description of Artificial Sequence: Synthetic oligonucleotide
  Target: LAMA2; (+) strand; PAM type: YTN; PAM sequence: CTG
gtactggttgttcctttcca

SEQ ID NO: 363576 - DNA, 20 bp, Artificial Sequence
  Description of Artificial Sequence: Synthetic oligonucleotide
  Target: LAMA2; (+) strand; PAM type: YTN; PAM sequence: CTG
gttgttcctttccatgttta

SEQ ID NO: 363577 - DNA, 20 bp, Artificial Sequence
  Description of Artificial Sequence: Synthetic oligonucleotide
  Target: LAMA2; (+) strand; PAM type: YTN; PAM sequence: TTG
ttcctttccatgtttagcac

SEQ ID NO: 363578 - DNA, 20 bp, Artificial Sequence
  Description of Artificial Sequence: Synthetic oligonucleotide
  Target: LAMA2; (+) strand; PAM type: YTN; PAM sequence: TTC
ctttccatgtttagcacttc

SEQ ID NO: 363579 - DNA, 20 bp, Artificial Sequence
  Description of Artificial Sequence: Synthetic oligonucleotide
  Target: LAMA2; (+) strand; PAM type: YTN; PAM sequence: CTT
tccatgtttagcacttcctt

SEQ ID NO: 363580 - DNA, 20 bp, Artificial Sequence
  Description of Artificial Sequence: Synthetic oligonucleotide
  Target: LAMA2; (+) strand; PAM type: YTN; PAM sequence: TTT
ccatgtttagcacttccttc

SEQ ID NO: 363581 - DNA, 20 bp, Artificial Sequence
  Description of Artificial Sequence: Synthetic oligonucleotide
  Target: LAMA2; (+) strand; PAM type: YTN; PAM sequence: TTC
catgtttagcacttccttca

SEQ ID NO: 363582 - DNA, 20 bp, Artificial Sequence
  Description of Artificial Sequence: Synthetic oligonucleotide
  Target: LAMA2; (+) strand; PAM type: YTN; PAM sequence: TTT
agcacttccttcaggagctc

SEQ ID NO: 363583 - DNA, 20 bp, Artificial Sequence
  Description of Artificial Sequence: Synthetic oligonucleotide
  Target: LAMA2; (+) strand; PAM type: YTN; PAM sequence: TTA
gcacttccttcaggagctct

SEQ ID NO: 363584 - DNA, 20 bp, Artificial Sequence
  Description of Artificial Sequence: Synthetic oligonucleotide
  Target: LAMA2; (+) strand; PAM type: YTN; PAM sequence: CTT
ccttcaggagctcttttagg

SEQ ID NO: 363585 - DNA, 20 bp, Artificial Sequence
  Description of Artificial Sequence: Synthetic oligonucleotide
  Target: LAMA2; (+) strand; PAM type: YTN; PAM sequence: TTC
cttcaggagctcttttaggg

SEQ ID NO: 363586 - DNA, 20 bp, Artificial Sequence
  Description of Artificial Sequence: Synthetic oligonucleotide
  Target: LAMA2; (+) strand; PAM type: YTN; PAM sequence: CTT
caggagctcttttagggcag

SEQ ID NO: 363587 - DNA, 20 bp, Artificial Sequence
  Description of Artificial Sequence: Synthetic oligonucleotide
  Target: LAMA2; (+) strand; PAM type: YTN; PAM sequence: TTC
aggagctcttttagggcagg

SEQ ID NO: 363588 - DNA, 20 bp, Artificial Sequence
  Description of Artificial Sequence: Synthetic oligonucleotide
  Target: LAMA2; (+) strand; PAM type: YTN; PAM sequence: CTC
ttttagggcaggcctggtgg

SEQ ID NO: 363589 - DNA, 20 bp, Artificial Sequence
  Description of Artificial Sequence: Synthetic oligonucleotide
  Target: LAMA2; (+) strand; PAM type: YTN; PAM sequence: CTT
ttagggcaggcctggtggtg

SEQ ID NO: 363590 - DNA, 20 bp, Artificial Sequence
  Description of Artificial Sequence: Synthetic oligonucleotide
  Target: LAMA2; (+) strand; PAM type: YTN; PAM sequence: TTT
tagggcaggcctggtggtga

SEQ ID NO: 363591 - DNA, 20 bp, Artificial Sequence
  Description of Artificial Sequence: Synthetic oligonucleotide
  Target: LAMA2; (+) strand; PAM type: YTN; PAM sequence: TTT
agggcaggcctggtggtgac

SEQ ID NO: 363592 - DNA, 20 bp, Artificial Sequence
  Description of Artificial Sequence: Synthetic oligonucleotide
  Target: LAMA2; (+) strand; PAM type: YTN; PAM sequence: TTA
gggcaggcctggtggtgaca

SEQ ID NO: 363593 - DNA, 20 bp, Artificial Sequence
  Description of Artificial Sequence: Synthetic oligonucleotide
  Target: LAMA2; (+) strand; PAM type: YTN; PAM sequence: CTG
gtggtgacaaaatctctcag

SEQ ID NO: 363594 - DNA, 20 bp, Artificial Sequence
  Description of Artificial Sequence: Synthetic oligonucleotide
  Target: LAMA2; (+) strand; PAM type: YTN; PAM sequence: CTC
tcagcatttgcttgtctgta

SEQ ID NO: 363595 - DNA, 20 bp, Artificial Sequence
  Description of Artificial Sequence: Synthetic oligonucleotide
  Target: LAMA2; (+) strand; PAM type: YTN; PAM sequence: CTC
agcatttgcttgtctgtaaa

SEQ ID NO: 363596 - DNA, 20 bp, Artificial Sequence
  Description of Artificial Sequence: Synthetic oligonucleotide
  Target: LAMA2; (+) strand; PAM type: YTN; PAM sequence: TTT
gcttgtctgtaaagtatttt

SEQ ID NO: 363597 - DNA, 20 bp, Artificial Sequence
  Description of Artificial Sequence: Synthetic oligonucleotide
  Target: LAMA2; (+) strand; PAM type: YTN; PAM sequence: TTG
cttgtctgtaaagtatttta

SEQ ID NO: 363598 - DNA, 20 bp, Artificial Sequence
  Description of Artificial Sequence: Synthetic oligonucleotide
  Target: LAMA2; (+) strand; PAM type: YTN; PAM sequence: CTT
gtctgtaaagtattttattt

SEQ ID NO: 363599 - DNA, 20 bp, Artificial Sequence
  Description of Artificial Sequence: Synthetic oligonucleotide
  Target: LAMA2; (+) strand; PAM type: YTN; PAM sequence: TTG
tctgtaaagtattttatttc

SEQ ID NO: 363600 - DNA, 20 bp, Artificial Sequence
  Description of Artificial Sequence: Synthetic oligonucleotide
  Target: LAMA2; (+) strand; PAM type: YTN; PAM sequence: CTG
taaagtattttatttctcct

SEQ ID NO: 363601 - DNA, 20 bp, Artificial Sequence
  Description of Artificial Sequence: Synthetic oligonucleotide
  Target: LAMA2; (+) strand; PAM type: YTN; PAM sequence: TTT
tatttctccttcacttatga

SEQ ID NO: 363602 - DNA, 20 bp, Artificial Sequence
  Description of Artificial Sequence: Synthetic oligonucleotide
  Target: LAMA2; (+) strand; PAM type: YTN; PAM sequence: TTT
atttctccttcacttatgaa

SEQ ID NO: 363603 - DNA, 20 bp, Artificial Sequence
  Description of Artificial Sequence: Synthetic oligonucleotide
  Target: LAMA2; (+) strand; PAM type: YTN; PAM sequence: TTA
tttctccttcacttatgaag

SEQ ID NO: 363604 - DNA, 20 bp, Artificial Sequence
  Description of Artificial Sequence: Synthetic oligonucleotide
  Target: LAMA2; (+) strand; PAM type: YTN; PAM sequence: TTT
ctccttcacttatgaagctt

SEQ ID NO: 363605 - DNA, 20 bp, Artificial Sequence
  Description of Artificial Sequence: Synthetic oligonucleotide
  Target: LAMA2; (+) strand; PAM type: YTN; PAM sequence: TTC
tccttcacttatgaagctta

SEQ ID NO: 363606 - DNA, 20 bp, Artificial Sequence
  Description of Artificial Sequence: Synthetic oligonucleotide
  Target: LAMA2; (+) strand; PAM type: YTN; PAM sequence: CTC
cttcacttatgaagcttagt

SEQ ID NO: 363607 - DNA, 20 bp, Artificial Sequence
  Description of Artificial Sequence: Synthetic oligonucleotide
  Target: LAMA2; (+) strand; PAM type: YTN; PAM sequence: CTT
cacttatgaagcttagtttg

SEQ ID NO: 363608 - DNA, 20 bp, Artificial Sequence
  Description of Artificial Sequence: Synthetic oligonucleotide
  Target: LAMA2; (+) strand; PAM type: YTN; PAM sequence: TTC
acttatgaagcttagtttgg

SEQ ID NO: 363609 - DNA, 20 bp, Artificial Sequence
  Description of Artificial Sequence: Synthetic oligonucleotide
  Target: LAMA2; (+) strand; PAM type: YTN; PAM sequence: CTT
atgaagcttagtttggctgg

SEQ ID NO: 363610 - DNA, 20 bp, Artificial Sequence
  Description of Artificial Sequence: Synthetic oligonucleotide
  Target: LAMA2; (+) strand; PAM type: YTN; PAM sequence: TTA
tgaagcttagtttggctgga

SEQ ID NO: 363611 - DNA, 20 bp, Artificial Sequence
  Description of Artificial Sequence: Synthetic oligonucleotide
  Target: LAMA2; (+) strand; PAM type: YTN; PAM sequence: CTT
agtttggctggatatgaaat

SEQ ID NO: 363612 - DNA, 20 bp, Artificial Sequence
  Description of Artificial Sequence: Synthetic oligonucleotide
  Target: LAMA2; (+) strand; PAM type: YTN; PAM sequence: TTA
gtttggctggatatgaaatt

SEQ ID NO: 363613 - DNA, 20 bp, Artificial Sequence
  Description of Artificial Sequence: Synthetic oligonucleotide
  Target: LAMA2; (+) strand; PAM type: YTN; PAM sequence: TTT
ggctggatatgaaattctgg

SEQ ID NO: 363614 - DNA, 20 bp, Artificial Sequence
  Description of Artificial Sequence: Synthetic oligonucleotide
  Target: LAMA2; (+) strand; PAM type: YTN; PAM sequence: TTG
gctggatatgaaattctggg

SEQ ID NO: 363615 - DNA, 20 bp, Artificial Sequence
  Description of Artificial Sequence: Synthetic oligonucleotide
  Target: LAMA2; (+) strand; PAM type: YTN; PAM sequence: CTG
gatatgaaattctgggttga

SEQ ID NO: 363616 - DNA, 20 bp, Artificial Sequence
  Description of Artificial Sequence: Synthetic oligonucleotide
  Target: LAMA2; (+) strand; PAM type: YTN; PAM sequence: TTC
tgggttgaaaattcttttct

SEQ ID NO: 363617 - DNA, 20 bp, Artificial Sequence
  Description of Artificial Sequence: Synthetic oligonucleotide
  Target: LAMA2; (+) strand; PAM type: YTN; PAM sequence: CTG
ggttgaaaattcttttcttt

SEQ ID NO: 363618 - DNA, 20 bp, Artificial Sequence
  Description of Artificial Sequence: Synthetic oligonucleotide
  Target: LAMA2; (+) strand; PAM type: YTN; PAM sequence: TTG
aaaattcttttctttaagaa

SEQ ID NO: 363619 - DNA, 20 bp, Artificial Sequence
  Description of Artificial Sequence: Synthetic oligonucleotide
  Target: LAMA2; (+) strand; PAM type: YTN; PAM sequence: TTC
ttttctttaagaatgttgaa

SEQ ID NO: 363620 - DNA, 20 bp, Artificial Sequence
  Description of Artificial Sequence: Synthetic oligonucleotide
  Target: LAMA2; (+) strand; PAM type: YTN; PAM sequence: CTT
ttctttaagaatgttgaata

SEQ ID NO: 363621 - DNA, 20 bp, Artificial Sequence
  Description of Artificial Sequence: Synthetic oligonucleotide
  Target: LAMA2; (+) strand; PAM type: YTN; PAM sequence: TTT
tctttaagaatgttgaatat

SEQ ID NO: 363622 - DNA, 20 bp, Artificial Sequence
  Description of Artificial Sequence: Synthetic oligonucleotide
  Target: LAMA2; (+) strand; PAM type: YTN; PAM sequence: TTT
ctttaagaatgttgaatatt

SEQ ID NO: 363623 - DNA, 20 bp, Artificial Sequence
  Description of Artificial Sequence: Synthetic oligonucleotide
  Target: LAMA2; (+) strand; PAM type: YTN; PAM sequence: TTC
tttaagaatgttgaatattg

SEQ ID NO: 363624 - DNA, 20 bp, Artificial Sequence
  Description of Artificial Sequence: Synthetic oligonucleotide
  Target: LAMA2; (+) strand; PAM type: YTN; PAM sequence: CTT
taagaatgttgaatattggc

SEQ ID NO: 363625 - DNA, 20 bp, Artificial Sequence
  Description of Artificial Sequence: Synthetic oligonucleotide
  Target: LAMA2; (+) strand; PAM type: YTN; PAM sequence: TTT
aagaatgttgaatattggcc

SEQ ID NO: 363626 - DNA, 20 bp, Artificial Sequence
  Description of Artificial Sequence: Synthetic oligonucleotide
  Target: LAMA2; (+) strand; PAM type: YTN; PAM sequence: TTA
agaatgttgaatattggccc

SEQ ID NO: 363627 - DNA, 20 bp, Artificial Sequence
  Description of Artificial Sequence: Synthetic oligonucleotide
  Target: LAMA2; (+) strand; PAM type: YTN; PAM sequence: TTG
aatattggcccccactctct

SEQ ID NO: 363628 - DNA, 20 bp, Artificial Sequence
  Description of Artificial Sequence: Synthetic oligonucleotide
  Target: LAMA2; (+) strand; PAM type: YTN; PAM sequence: TTG
gcccccactctcttccggct

SEQ ID NO: 363629 - DNA, 20 bp, Artificial Sequence
  Description of Artificial Sequence: Synthetic oligonucleotide
  Target: LAMA2; (+) strand; PAM type: YTN; PAM sequence: CTC
tcttccggcttgtagagttt

SEQ ID NO: 363630 - DNA, 20 bp, Artificial Sequence
  Description of Artificial Sequence: Synthetic oligonucleotide
  Target: LAMA2; (+) strand; PAM type: YTN; PAM sequence: CTC
ttccggcttgtagagtttct

SEQ ID NO: 363631 - DNA, 20 bp, Artificial Sequence
  Description of Artificial Sequence: Synthetic oligonucleotide
  Target: LAMA2; (+) strand; PAM type: YTN; PAM sequence: CTT
ccggcttgtagagtttctgc

SEQ ID NO: 363632 - DNA, 20 bp, Artificial Sequence
  Description of Artificial Sequence: Synthetic oligonucleotide
  Target: LAMA2; (+) strand; PAM type: YTN; PAM sequence: TTC
cggcttgtagagtttctgcc

SEQ ID NO: 363633 - DNA, 20 bp, Artificial Sequence
  Description of Artificial Sequence: Synthetic oligonucleotide
  Target: LAMA2; (+) strand; PAM type: YTN; PAM sequence: CTT
gtagagtttctgccgagcga

SEQ ID NO: 363634 - DNA, 20 bp, Artificial Sequence
  Description of Artificial Sequence: Synthetic oligonucleotide
  Target: LAMA2; (+) strand; PAM type: YTN; PAM sequence: TTG
tagagtttctgccgagcgat

SEQ ID NO: 363635 - DNA, 20 bp, Artificial Sequence
  Description of Artificial Sequence: Synthetic oligonucleotide
  Target: LAMA2; (+) strand; PAM type: YTN; PAM sequence: TTT
ctgccgagcgatctgctgtt

SEQ ID NO: 363636 - DNA, 20 bp, Artificial Sequence
  Description of Artificial Sequence: Synthetic oligonucleotide
  Target: LAMA2; (+) strand; PAM type: YTN; PAM sequence: TTC
tgccgagcgatctgctgtta

SEQ ID NO: 363637 - DNA, 20 bp, Artificial Sequence
  Description of Artificial Sequence: Synthetic oligonucleotide
  Target: LAMA2; (+) strand; PAM type: YTN; PAM sequence: CTG
ccgagcgatctgctgttagt

SEQ ID NO: 363638 - DNA, 20 bp, Artificial Sequence
  Description of Artificial Sequence: Synthetic oligonucleotide
  Target: LAMA2; (+) strand; PAM type: YTN; PAM sequence: CTG
ctgttagtctgatgggcttc

SEQ ID NO: 363639 - DNA, 20 bp, Artificial Sequence
  Description of Artificial Sequence: Synthetic oligonucleotide
  Target: LAMA2; (+) strand; PAM type: YTN; PAM sequence: CTG
ttagtctgatgggcttccct

SEQ ID NO: 363640 - DNA, 20 bp, Artificial Sequence
  Description of Artificial Sequence: Synthetic oligonucleotide
  Target: LAMA2; (+) strand; PAM type: YTN; PAM sequence: TTA
gtctgatgggcttccctttg

SEQ ID NO: 363641 - DNA, 20 bp, Artificial Sequence
  Description of Artificial Sequence: Synthetic oligonucleotide
  Target: LAMA2; (+) strand; PAM type: YTN; PAM sequence: CTG
atgggcttccctttgagggt

SEQ ID NO: 363642 - DNA, 20 bp, Artificial Sequence
  Description of Artificial Sequence: Synthetic oligonucleotide
  Target: LAMA2; (+) strand; PAM type: YTN; PAM sequence: CTT
ccctttgagggtaacccgac

SEQ ID NO: 363643 - DNA, 20 bp, Artificial Sequence
  Description of Artificial Sequence: Synthetic oligonucleotide
  Target: LAMA2; (+) strand; PAM type: YTN; PAM sequence: TTC
cctttgagggtaacccgacc

SEQ ID NO: 363644 - DNA, 20 bp, Artificial Sequence
  Description of Artificial Sequence: Synthetic oligonucleotide
  Target: LAMA2; (+) strand; PAM type: YTN; PAM sequence: CTT
tgagggtaacccgacctttc

SEQ ID NO: 363645 - DNA, 20 bp, Artificial Sequence
  Description of Artificial Sequence: Synthetic oligonucleotide
  Target: LAMA2; (+) strand; PAM type: YTN; PAM sequence: TTT
gagggtaacccgacctttct

SEQ ID NO: 363646 - DNA, 20 bp, Artificial Sequence
  Description of Artificial Sequence: Synthetic oligonucleotide
  Target: LAMA2; (+) strand; PAM type: YTN; PAM sequence: TTG
agggtaacccgacctttctc

SEQ ID NO: 363647 - DNA, 20 bp, Artificial Sequence
  Description of Artificial Sequence: Synthetic oligonucleotide
  Target: LAMA2; (+) strand; PAM type: YTN; PAM sequence: CTT
tctctctggctgcccttaac

SEQ ID NO: 363648 - DNA, 20 bp, Artificial Sequence
  Description of Artificial Sequence: Synthetic oligonucleotide
  Target: LAMA2; (+) strand; PAM type: YTN; PAM sequence: TTT
ctctctggctgcccttaaca

SEQ ID NO: 363649 - DNA, 20 bp, Artificial Sequence
  Description of Artificial Sequence: Synthetic oligonucleotide
  Target: LAMA2; (+) strand; PAM type: YTN; PAM sequence: TTC
tctctggctgcccttaacat

SEQ ID NO: 363650 - DNA, 20 bp, Artificial Sequence
  Description of Artificial Sequence: Synthetic oligonucleotide
  Target: LAMA2; (+) strand; PAM type: YTN; PAM sequence: CTC
tctggctgcccttaacattt

SEQ ID NO: 363651 - DNA, 20 bp, Artificial Sequence
  Description of Artificial Sequence: Synthetic oligonucleotide
  Target: LAMA2; (+) strand; PAM type: YTN; PAM sequence: CTC
tggctgcccttaacattttt

SEQ ID NO: 363652 - DNA, 20 bp, Artificial Sequence
  Description of Artificial Sequence: Synthetic oligonucleotide
  Target: LAMA2; (+) strand; PAM type: YTN; PAM sequence: CTG
gctgcccttaacattttttc

SEQ ID NO: 363653 - DNA, 20 bp, Artificial Sequence
  Description of Artificial Sequence: Synthetic oligonucleotide
  Target: LAMA2; (+) strand; PAM type: YTN; PAM sequence: CTG
cccttaacattttttccttc

SEQ ID NO: 363654 - DNA, 20 bp, Artificial Sequence
  Description of Artificial Sequence: Synthetic oligonucleotide
  Target: LAMA2; (+) strand; PAM type: YTN; PAM sequence: CTT
aacattttttccttcatttc

SEQ ID NO: 363655 - DNA, 20 bp, Artificial Sequence
  Description of Artificial Sequence: Synthetic oligonucleotide
  Target: LAMA2; (+) strand; PAM type: YTN; PAM sequence: TTA
acattttttccttcatttca

SEQ ID NO: 363656 - DNA, 20 bp, Artificial Sequence
  Description of Artificial Sequence: Synthetic oligonucleotide
  Target: LAMA2; (+) strand; PAM type: YTN; PAM sequence: TTT
tttccttcatttcaactttg

SEQ ID NO: 363657 - DNA, 20 bp, Artificial Sequence
  Description of Artificial Sequence: Synthetic oligonucleotide
  Target: LAMA2; (+) strand; PAM type: YTN; PAM sequence: TTT
ttccttcatttcaactttgg

SEQ ID NO: 363658 - DNA, 20 bp, Artificial Sequence
  Description of Artificial Sequence: Synthetic oligonucleotide
  Target: LAMA2; (+) strand; PAM type: YTN; PAM sequence: TTT
tccttcatttcaactttggt

SEQ ID NO: 363659 - DNA, 20 bp, Artificial Sequence
  Description of Artificial Sequence: Synthetic oligonucleotide
  Target: LAMA2; (+) strand; PAM type: YTN; PAM sequence: TTT
ccttcatttcaactttggtg

SEQ ID NO: 363660 - DNA, 20 bp, Artificial Sequence
  Description of Artificial Sequence: Synthetic oligonucleotide
  Target: LAMA2; (+) strand; PAM type: YTN; PAM sequence: TTC
cttcatttcaactttggtga

SEQ ID NO: 363661 - DNA, 20 bp, Artificial Sequence
  Description of Artificial Sequence: Synthetic oligonucleotide
  Target: LAMA2; (+) strand; PAM type: YTN; PAM sequence: CTT
catttcaactttggtgaatc

SEQ ID NO: 363662 - DNA, 20 bp, Artificial Sequence
  Description of Artificial Sequence: Synthetic oligonucleotide
  Target: LAMA2; (+) strand; PAM type: YTN; PAM sequence: TTC
atttcaactttggtgaatct

SEQ ID NO: 363663 - DNA, 20 bp, Artificial Sequence
  Description of Artificial Sequence: Synthetic oligonucleotide
  Target: LAMA2; (+) strand; PAM type: YTN; PAM sequence: TTT
caactttggtgaatctgaca

SEQ ID NO: 363664 - DNA, 20 bp, Artificial Sequence
  Description of Artificial Sequence: Synthetic oligonucleotide
  Target: LAMA2; (+) strand; PAM type: YTN; PAM sequence: TTC
aactttggtgaatctgacaa

SEQ ID NO: 363665 - DNA, 20 bp, Artificial Sequence
  Description of Artificial Sequence: Synthetic oligonucleotide
  Target: LAMA2; (+) strand; PAM type: YTN; PAM sequence: CTT
tggtgaatctgacaattatg

SEQ ID NO: 363666 - DNA, 20 bp, Artificial Sequence
  Description of Artificial Sequence: Synthetic oligonucleotide
  Target: LAMA2; (+) strand; PAM type: YTN; PAM sequence: TTT
ggtgaatctgacaattatgt

SEQ ID NO: 363667 - DNA, 20 bp, Artificial Sequence
  Description of Artificial Sequence: Synthetic oligonucleotide
  Target: LAMA2; (+) strand; PAM type: YTN; PAM sequence: TTG
gtgaatctgacaattatgtg

SEQ ID NO: 363668 - DNA, 20 bp, Artificial Sequence
  Description of Artificial Sequence: Synthetic oligonucleotide
  Target: LAMA2; (+) strand; PAM type: YTN; PAM sequence: CTG
acaattatgtgtcttgaagt

SEQ ID NO: 363669 - DNA, 20 bp, Artificial Sequence
  Description of Artificial Sequence: Synthetic oligonucleotide
  Target: LAMA2; (+) strand; PAM type: YTN; PAM sequence: TTA
tgtgtcttgaagttgctctt

SEQ ID NO: 363670 - DNA, 20 bp, Artificial Sequence
  Description of Artificial Sequence: Synthetic oligonucleotide
  Target: LAMA2; (+) strand; PAM type: YTN; PAM sequence: CTT
gaagttgctcttctcgagga

SEQ ID NO: 363671 - DNA, 20 bp, Artificial Sequence
  Description of Artificial Sequence: Synthetic oligonucleotide
  Target: LAMA2; (+) strand; PAM type: YTN; PAM sequence: TTG
aagttgctcttctcgaggag

SEQ ID NO: 363672 - DNA, 20 bp, Artificial Sequence
  Description of Artificial Sequence: Synthetic oligonucleotide
  Target: LAMA2; (+) strand; PAM type: YTN; PAM sequence: TTG
ctcttctcgaggagtatctt

SEQ ID NO: 363673 - DNA, 20 bp, Artificial Sequence
  Description of Artificial Sequence: Synthetic oligonucleotide
  Target: LAMA2; (+) strand; PAM type: YTN; PAM sequence: CTC
ttctcgaggagtatctttgt

SEQ ID NO: 363674 - DNA, 20 bp, Artificial Sequence
  Description of Artificial Sequence: Synthetic oligonucleotide
  Target: LAMA2; (+) strand; PAM type: YTN; PAM sequence: CTT
ctcgaggagtatctttgtgg

SEQ ID NO: 363675 - DNA, 20 bp, Artificial Sequence
  Description of Artificial Sequence: Synthetic oligonucleotide
  Target: LAMA2; (+) strand; PAM type: YTN; PAM sequence: TTC
tcgaggagtatctttgtggc

SEQ ID NO: 363676 - DNA, 20 bp, Artificial Sequence
  Description of Artificial Sequence: Synthetic oligonucleotide
  Target: LAMA2; (+) strand; PAM type: YTN; PAM sequence: CTC
gaggagtatctttgtggcat

SEQ ID NO: 363677 - DNA, 20 bp, Artificial Sequence
  Description of Artificial Sequence: Synthetic oligonucleotide
  Target: LAMA2; (+) strand; PAM type: YTN; PAM sequence: CTT
tgtggcattctctgtgtttc

SEQ ID NO: 363678 - DNA, 20 bp, Artificial Sequence
  Description of Artificial Sequence: Synthetic oligonucleotide
  Target: LAMA2; (+) strand; PAM type: YTN; PAM sequence: TTT
gtggcattctctgtgtttcc

SEQ ID NO: 363679 - DNA, 20 bp, Artificial Sequence
  Description of Artificial Sequence: Synthetic oligonucleotide
  Target: LAMA2; (+) strand; PAM type: YTN; PAM sequence: TTG
tggcattctctgtgtttcct

SEQ ID NO: 363680 - DNA, 20 bp, Artificial Sequence
  Description of Artificial Sequence: Synthetic oligonucleotide
  Target: LAMA2; (+) strand; PAM type: YTN; PAM sequence: TTC
tctgtgtttcctgaatttga

SEQ ID NO: 363681 - DNA, 20 bp, Artificial Sequence
  Description of Artificial Sequence: Synthetic oligonucleotide
  Target: LAMA2; (+) strand; PAM type: YTN; PAM sequence: CTC
tgtgtttcctgaatttgaat

SEQ ID NO: 363682 - DNA, 20 bp, Artificial Sequence
  Description of Artificial Sequence: Synthetic oligonucleotide
  Target: LAMA2; (+) strand; PAM type: YTN; PAM sequence: CTG
tgtttcctgaatttgaatgt

SEQ ID NO: 363683 - DNA, 20 bp, Artificial Sequence
  Description of Artificial Sequence: Synthetic oligonucleotide
  Target: LAMA2; (+) strand; PAM type: YTN; PAM sequence: TTT
cctgaatttgaatgttggcc

SEQ ID NO: 363684 - DNA, 20 bp, Artificial Sequence
  Description of Artificial Sequence: Synthetic oligonucleotide
  Target: LAMA2; (+) strand; PAM type: YTN; PAM sequence: TTC
ctgaatttgaatgttggcct

SEQ ID NO: 363685 - DNA, 20 bp, Artificial Sequence
  Description of Artificial Sequence: Synthetic oligonucleotide
  Target: LAMA2; (+) strand; PAM type: YTN; PAM sequence: CTG
aatttgaatgttggcctgcc

SEQ ID NO: 363686 - DNA, 20 bp, Artificial Sequence
  Description of Artificial Sequence: Synthetic oligonucleotide
  Target: LAMA2; (+) strand; PAM type: YTN; PAM sequence: TTT
gaatgttggcctgccttgct

SEQ ID NO: 363687 - DNA, 20 bp, Artificial Sequence
  Description of Artificial Sequence: Synthetic oligonucleotide
  Target: LAMA2; (+) strand; PAM type: YTN; PAM sequence: TTG
aatgttggcctgccttgcta

SEQ ID NO: 363688 - DNA, 20 bp, Artificial Sequence
  Description of Artificial Sequence: Synthetic oligonucleotide
  Target: LAMA2; (+) strand; PAM type: YTN; PAM sequence: TTG
gcctgccttgctaggttggg

SEQ ID NO: 363689 - DNA, 20 bp, Artificial Sequence
  Description of Artificial Sequence: Synthetic oligonucleotide
  Target: LAMA2; (+) strand; PAM type: YTN; PAM sequence: CTG
ccttgctaggttggggaagt

SEQ ID NO: 363690 - DNA, 20 bp, Artificial Sequence
  Description of Artificial Sequence: Synthetic oligonucleotide
  Target: LAMA2; (+) strand; PAM type: YTN; PAM sequence: CTT
gctaggttggggaagttctc

SEQ ID NO: 363691 - DNA, 20 bp, Artificial Sequence
  Description of Artificial Sequence: Synthetic oligonucleotide
  Target: LAMA2; (+) strand; PAM type: YTN; PAM sequence: TTG
ctaggttggggaagttctcc

SEQ ID NO: 363692 - DNA, 20 bp, Artificial Sequence
  Description of Artificial Sequence: Synthetic oligonucleotide
  Target: LAMA2; (+) strand; PAM type: YTN; PAM sequence: CTA
ggttggggaagttctcctgg

SEQ ID NO: 363693 - DNA, 20 bp, Artificial Sequence
  Description of Artificial Sequence: Synthetic oligonucleotide
  Target: LAMA2; (+) strand; PAM type: YTN; PAM sequence: TTG
gggaagttctcctggataat

SEQ ID NO: 363694 - DNA, 20 bp, Artificial Sequence
  Description of Artificial Sequence: Synthetic oligonucleotide
  Target: LAMA2; (+) strand; PAM type: YTN; PAM sequence: TTC
tcctggataatatcctgcag

SEQ ID NO: 363695 - DNA, 20 bp, Artificial Sequence
  Description of Artificial Sequence: Synthetic oligonucleotide
  Target: LAMA2; (+) strand; PAM type: YTN; PAM sequence: CTC
ctggataatatcctgcagaa

SEQ ID NO: 363696 - DNA, 20 bp, Artificial Sequence
  Description of Artificial Sequence: Synthetic oligonucleotide
  Target: LAMA2; (+) strand; PAM type: YTN; PAM sequence: CTG
gataatatcctgcagaatgt

SEQ ID NO: 363697 - DNA, 20 bp, Artificial Sequence
  Description of Artificial Sequence: Synthetic oligonucleotide
  Target: LAMA2; (+) strand; PAM type: YTN; PAM sequence: CTG
cagaatgttttccaacttgg

SEQ ID NO: 363698 - DNA, 20 bp, Artificial Sequence
  Description of Artificial Sequence: Synthetic oligonucleotide
  Target: LAMA2; (+) strand; PAM type: YTN; PAM sequence: TTT
tccaacttggttccattctc

SEQ ID NO: 363699 - DNA, 20 bp, Artificial Sequence
  Description of Artificial Sequence: Synthetic oligonucleotide
  Target: LAMA2; (+) strand; PAM type: YTN; PAM sequence: TTT
ccaacttggttccattctcc

SEQ ID NO: 363700 - DNA, 20 bp, Artificial Sequence
  Description of Artificial Sequence: Synthetic oligonucleotide
  Target: LAMA2; (+) strand; PAM type: YTN; PAM sequence: TTC
caacttggttccattctccc

SEQ ID NO: 363701 - DNA, 20 bp, Artificial Sequence
  Description of Artificial Sequence: Synthetic oligonucleotide
  Target: LAMA2; (+) strand; PAM type: YTN; PAM sequence: CTT
ggttccattctccccgccac

SEQ ID NO: 363702 - DNA, 20 bp, Artificial Sequence
  Description of Artificial Sequence: Synthetic oligonucleotide
  Target: LAMA2; (+) strand; PAM type: YTN; PAM sequence: TTG
gttccattctccccgccact

SEQ ID NO: 363703 - DNA, 20 bp, Artificial Sequence
  Description of Artificial Sequence: Synthetic oligonucleotide
  Target: LAMA2; (+) strand; PAM type: YTN; PAM sequence: TTC
cattctccccgccactttca

SEQ ID NO: 363704 - DNA, 20 bp, Artificial Sequence
  Description of Artificial Sequence: Synthetic oligonucleotide
  Target: LAMA2; (+) strand; PAM type: YTN; PAM sequence: TTC
tccccgccactttcatgtac

SEQ ID NO: 363705 - DNA, 20 bp, Artificial Sequence
  Description of Artificial Sequence: Synthetic oligonucleotide
  Target: LAMA2; (+) strand; PAM type: YTN; PAM sequence: CTC
cccgccactttcatgtaccc

SEQ ID NO: 363706 - DNA, 20 bp, Artificial Sequence
  Description of Artificial Sequence: Synthetic oligonucleotide
  Target: LAMA2; (+) strand; PAM type: YTN; PAM sequence: CTT
tcatgtacccaatcaggcat

SEQ ID NO: 363707 - DNA, 20 bp, Artificial Sequence
  Description of Artificial Sequence: Synthetic oligonucleotide
  Target: LAMA2; (+) strand; PAM type: YTN; PAM sequence: TTT
catgtacccaatcaggcata

SEQ ID NO: 363708 - DNA, 20 bp, Artificial Sequence
  Description of Artificial Sequence: Synthetic oligonucleotide
  Target: LAMA2; (+) strand; PAM type: YTN; PAM sequence: TTC
atgtacccaatcaggcatag

SEQ ID NO: 363709 - DNA, 20 bp, Artificial Sequence
  Description of Artificial Sequence: Synthetic oligonucleotide
  Target: LAMA2; (+) strand; PAM type: YTN; PAM sequence: TTT
ggtcttttcacatagtccca

SEQ ID NO: 363710 - DNA, 20 bp, Artificial Sequence
  Description of Artificial Sequence: Synthetic oligonucleotide
  Target: LAMA2; (+) strand; PAM type: YTN; PAM sequence: TTG
gtcttttcacatagtcccat

SEQ ID NO: 363711 - DNA, 20 bp, Artificial Sequence
  Description of Artificial Sequence: Synthetic oligonucleotide
  Target: LAMA2; (+) strand; PAM type: YTN; PAM sequence: CTT
ttcacatagtcccatatttc

SEQ ID NO: 363712 - DNA, 20 bp, Artificial Sequence
  Description of Artificial Sequence: Synthetic oligonucleotide
  Target: LAMA2; (+) strand; PAM type: YTN; PAM sequence: TTT
tcacatagtcccatatttct

SEQ ID NO: 363713 - DNA, 20 bp, Artificial Sequence
  Description of Artificial Sequence: Synthetic oligonucleotide
  Target: LAMA2; (+) strand; PAM type: YTN; PAM sequence: TTT
cacatagtcccatatttctt

SEQ ID NO: 363714 - DNA, 20 bp, Artificial Sequence
  Description of Artificial Sequence: Synthetic oligonucleotide
  Target: LAMA2; (+) strand; PAM type: YTN; PAM sequence: TTC
acatagtcccatatttcttg

SEQ ID NO: 363715 - DNA, 20 bp, Artificial Sequence
  Description of Artificial Sequence: Synthetic oligonucleotide
  Target: LAMA2; (+) strand; PAM type: YTN; PAM sequence: TTT
cttggaggctttgttcgttt

SEQ ID NO: 363716 - DNA, 20 bp, Artificial Sequence
  Description of Artificial Sequence: Synthetic oligonucleotide
  Target: LAMA2; (+) strand; PAM type: YTN; PAM sequence: TTC
ttggaggctttgttcgtttc

SEQ ID NO: 363717 - DNA, 20 bp, Artificial Sequence
  Description of Artificial Sequence: Synthetic oligonucleotide
  Target: LAMA2; (+) strand; PAM type: YTN; PAM sequence: CTT
ggaggctttgttcgtttcct

SEQ ID NO: 363718 - DNA, 20 bp, Artificial Sequence
  Description of Artificial Sequence: Synthetic oligonucleotide
  Target: LAMA2; (+) strand; PAM type: YTN; PAM sequence: TTG
gaggctttgttcgtttcctt

SEQ ID NO: 363719 - DNA, 20 bp, Artificial Sequence
  Description of Artificial Sequence: Synthetic oligonucleotide
  Target: LAMA2; (+) strand; PAM type: YTN; PAM sequence: CTT
tgttcgtttccttttactct

SEQ ID NO: 363720 - DNA, 20 bp, Artificial Sequence
  Description of Artificial Sequence: Synthetic oligonucleotide
  Target: LAMA2; (+) strand; PAM type: YTN; PAM sequence: TTT
gttcgtttccttttactctt

SEQ ID NO: 363721 - DNA, 20 bp, Artificial Sequence
  Description of Artificial Sequence: Synthetic oligonucleotide
  Target: LAMA2; (+) strand; PAM type: YTN; PAM sequence: TTG
ttcgtttccttttactcttt

SEQ ID NO: 363722 - DNA, 20 bp, Artificial Sequence
  Description of Artificial Sequence: Synthetic oligonucleotide
  Target: LAMA2; (+) strand; PAM type: YTN; PAM sequence: TTC
gtttccttttactctttttt

SEQ ID NO: 363723 - DNA, 20 bp, Artificial Sequence
  Description of Artificial Sequence: Synthetic oligonucleotide
  Target: LAMA2; (+) strand; PAM type: YTN; PAM sequence: TTT
ccttttactcttttttctct

SEQ ID NO: 363724 - DNA, 20 bp, Artificial Sequence
  Description of Artificial Sequence: Synthetic oligonucleotide
  Target: LAMA2; (+) strand; PAM type: YTN; PAM sequence: TTC
cttttactcttttttctcta

SEQ ID NO: 363725 - DNA, 20 bp, Artificial Sequence
  Description of Artificial Sequence: Synthetic oligonucleotide
  Target: LAMA2; (+) strand; PAM type: YTN; PAM sequence: CTT
ttactcttttttctctaaac

SEQ ID NO: 363726 - DNA, 20 bp, Artificial Sequence
  Description of Artificial Sequence: Synthetic oligonucleotide
  Target: LAMA2; (+) strand; PAM type: YTN; PAM sequence: TTT
tactcttttttctctaaact

SEQ ID NO: 363727 - DNA, 20 bp, Artificial Sequence
  Description of Artificial Sequence: Synthetic oligonucleotide
  Target: LAMA2; (+) strand; PAM type: YTN; PAM sequence: TTT
actcttttttctctaaactt

SEQ ID NO: 363728 - DNA, 20 bp, Artificial Sequence
  Description of Artificial Sequence: Synthetic oligonucleotide
  Target: LAMA2; (+) strand; PAM type: YTN; PAM sequence: TTA
ctcttttttctctaaacttc

SEQ ID NO: 363729 - DNA, 20 bp, Artificial Sequence
  Description of Artificial Sequence: Synthetic oligonucleotide
  Target: LAMA2; (+) strand; PAM type: YTN; PAM sequence: CTC
ttttttctctaaacttctct

SEQ ID NO: 363730 - DNA, 20 bp, Artificial Sequence
  Description of Artificial Sequence: Synthetic oligonucleotide
  Target: LAMA2; (+) strand; PAM type: YTN; PAM sequence: CTT
ttttctctaaacttctcttc

SEQ ID NO: 363731 - DNA, 20 bp, Artificial Sequence
  Description of Artificial Sequence: Synthetic oligonucleotide
  Target: LAMA2; (+) strand; PAM type: YTN; PAM sequence: TTT
tttctctaaacttctcttct

SEQ ID NO: 363732 - DNA, 20 bp, Artificial Sequence
  Description of Artificial Sequence: Synthetic oligonucleotide
  Target: LAMA2; (+) strand; PAM type: YTN; PAM sequence: TTT
ttctctaaacttctcttctc

SEQ ID NO: 363733 - DNA, 20 bp, Artificial Sequence
  Description of Artificial Sequence: Synthetic oligonucleotide
  Target: LAMA2; (+) strand; PAM type: YTN; PAM sequence: TTT
tctctaaacttctcttctca

SEQ ID NO: 363734 - DNA, 20 bp, Artificial Sequence
  Description of Artificial Sequence: Synthetic oligonucleotide
  Target: LAMA2; (+) strand; PAM type: YTN; PAM sequence: TTT
ctctaaacttctcttctcac

SEQ ID NO: 363735 - DNA, 20 bp, Artificial Sequence
  Description of Artificial Sequence: Synthetic oligonucleotide
  Target: LAMA2; (+) strand; PAM type: YTN; PAM sequence: TTC
tctaaacttctcttctcact

SEQ ID NO: 363736 - DNA, 20 bp, Artificial Sequence
  Description of Artificial Sequence: Synthetic oligonucleotide
  Target: LAMA2; (+) strand; PAM type: YTN; PAM sequence: CTC
taaacttctcttctcacttc

SEQ ID NO: 363737 - DNA, 20 bp, Artificial Sequence
  Description of Artificial Sequence: Synthetic oligonucleotide
  Target: LAMA2; (+) strand; PAM type: YTN; PAM sequence: CTA
aacttctcttctcacttcat

SEQ ID NO: 363738 - DNA, 20 bp, Artificial Sequence
  Description of Artificial Sequence: Synthetic oligonucleotide
  Target: LAMA2; (+) strand; PAM type: YTN; PAM sequence: CTT
ctcttctcacttcatttcat

SEQ ID NO: 363739 - DNA, 20 bp, Artificial Sequence
  Description of Artificial Sequence: Synthetic oligonucleotide
  Target: LAMA2; (+) strand; PAM type: YTN; PAM sequence: TTC
tcttctcacttcatttcatt

SEQ ID NO: 363740 - DNA, 20 bp, Artificial Sequence
  Description of Artificial Sequence: Synthetic oligonucleotide
  Target: LAMA2; (+) strand; PAM type: YTN; PAM sequence: CTC
ttctcacttcatttcattca

SEQ ID NO: 363741 - DNA, 20 bp, Artificial Sequence
  Description of Artificial Sequence: Synthetic oligonucleotide
  Target: LAMA2; (+) strand; PAM type: YTN; PAM sequence: CTT
ctcacttcatttcattcatt

SEQ ID NO: 363742 - DNA, 20 bp, Artificial Sequence
  Description of Artificial Sequence: Synthetic oligonucleotide
  Target: LAMA2; (+) strand; PAM type: YTN; PAM sequence: TTC
tcacttcatttcattcattt

SEQ ID NO: 363743 - DNA, 20 bp, Artificial Sequence
  Description of Artificial Sequence: Synthetic oligonucleotide
  Target: LAMA2; (+) strand; PAM type: YTN; PAM sequence: CTC
acttcatttcattcatttga

SEQ ID NO: 363744 - DNA, 20 bp, Artificial Sequence
  Description of Artificial Sequence: Synthetic oligonucleotide
  Target: LAMA2; (+) strand; PAM type: YTN; PAM sequence: CTT
catttcattcatttgatctt

SEQ ID NO: 363745 - DNA, 20 bp, Artificial Sequence
  Description of Artificial Sequence: Synthetic oligonucleotide
  Target: LAMA2; (+) strand; PAM type: YTN; PAM sequence: TTC
atttcattcatttgatcttc

SEQ ID NO: 363746 - DNA, 20 bp, Artificial Sequence
  Description of Artificial Sequence: Synthetic oligonucleotide
  Target: LAMA2; (+) strand; PAM type: YTN; PAM sequence: TTT
cattcatttgatcttcaatc

SEQ ID NO: 363747 - DNA, 20 bp, Artificial Sequence
  Description of Artificial Sequence: Synthetic oligonucleotide
  Target: LAMA2; (+) strand; PAM type: YTN; PAM sequence: TTC
attcatttgatcttcaatca

SEQ ID NO: 363748 - DNA, 20 bp, Artificial Sequence
  Description of Artificial Sequence: Synthetic oligonucleotide
  Target: LAMA2; (+) strand; PAM type: YTN; PAM sequence: TTC
atttgatcttcaatcactga

SEQ ID NO: 363749 - DNA, 20 bp, Artificial Sequence
  Description of Artificial Sequence: Synthetic oligonucleotide
  Target: LAMA2; (+) strand; PAM type: YTN; PAM sequence: TTT
gatcttcaatcactgatacc

SEQ ID NO: 363750 - DNA, 20 bp, Artificial Sequence
  Description of Artificial Sequence: Synthetic oligonucleotide
  Target: LAMA2; (+) strand; PAM type: YTN; PAM sequence: TTG
atcttcaatcactgataccc

SEQ ID NO: 363751 - DNA, 20 bp, Artificial Sequence
  Description of Artificial Sequence: Synthetic oligonucleotide
  Target: LAMA2; (+) strand; PAM type: YTN; PAM sequence: CTT
caatcactgataccctttct

SEQ ID NO: 363752 - DNA, 20 bp, Artificial Sequence
  Description of Artificial Sequence: Synthetic oligonucleotide
  Target: LAMA2; (+) strand; PAM type: YTN; PAM sequence: TTC
aatcactgataccctttctt

SEQ ID NO: 363753 - DNA, 20 bp, Artificial Sequence
  Description of Artificial Sequence: Synthetic oligonucleotide
  Target: LAMA2; (+) strand; PAM type: YTN; PAM sequence: CTG
ataccctttcttccagttga

SEQ ID NO: 363754 - DNA, 20 bp, Artificial Sequence
  Description of Artificial Sequence: Synthetic oligonucleotide
  Target: LAMA2; (+) strand; PAM type: YTN; PAM sequence: CTT
tcttccagttgatcgaatca

SEQ ID NO: 363755 - DNA, 20 bp, Artificial Sequence
  Description of Artificial Sequence: Synthetic oligonucleotide
  Target: LAMA2; (+) strand; PAM type: YTN; PAM sequence: TTT
cttccagttgatcgaatcag

SEQ ID NO: 363756 - DNA, 20 bp, Artificial Sequence
  Description of Artificial Sequence: Synthetic oligonucleotide
  Target: LAMA2; (+) strand; PAM type: YTN; PAM sequence: TTC
ttccagttgatcgaatcagc

SEQ ID NO: 363757 - DNA, 20 bp, Artificial Sequence
  Description of Artificial Sequence: Synthetic oligonucleotide
  Target: LAMA2; (+) strand; PAM type: YTN; PAM sequence: CTT
ccagttgatcgaatcagctc

SEQ ID NO: 363758 - DNA, 20 bp, Artificial Sequence
  Description of Artificial Sequence: Synthetic oligonucleotide
  Target: LAMA2; (+) strand; PAM type: YTN; PAM sequence: TTC
cagttgatcgaatcagctcc

SEQ ID NO: 363759 - DNA, 20 bp, Artificial Sequence
  Description of Artificial Sequence: Synthetic oligonucleotide
  Target: LAMA2; (+) strand; PAM type: YTN; PAM sequence: TTG
atcgaatcagctcctgaggc

SEQ ID NO: 363760 - DNA, 20 bp, Artificial Sequence
  Description of Artificial Sequence: Synthetic oligonucleotide
  Target: LAMA2; (+) strand; PAM type: YTN; PAM sequence: CTC
ctgaggcttgtgcatttgtc

SEQ ID NO: 363761 - DNA, 20 bp, Artificial Sequence
  Description of Artificial Sequence: Synthetic oligonucleotide
  Target: LAMA2; (+) strand; PAM type: YTN; PAM sequence: CTG
aggcttgtgcatttgtcagg

SEQ ID NO: 363762 - DNA, 20 bp, Artificial Sequence
  Description of Artificial Sequence: Synthetic oligonucleotide
  Target: LAMA2; (+) strand; PAM type: YTN; PAM sequence: CTT
gtgcatttgtcaggtacttc

SEQ ID NO: 363763 - DNA, 20 bp, Artificial Sequence
  Description of Artificial Sequence: Synthetic oligonucleotide
  Target: LAMA2; (+) strand; PAM type: YTN; PAM sequence: TTG
tgcatttgtcaggtacttct

SEQ ID NO: 363764 - DNA, 20 bp, Artificial Sequence
  Description of Artificial Sequence: Synthetic oligonucleotide
  Target: LAMA2; (+) strand; PAM type: YTN; PAM sequence: TTT
gtcaggtacttctcgtgcca

SEQ ID NO: 363765 - DNA, 20 bp, Artificial Sequence
  Description of Artificial Sequence: Synthetic oligonucleotide
  Target: LAMA2; (+) strand; PAM type: YTN; PAM sequence: TTG
tcaggtacttctcgtgccat

SEQ ID NO: 363766 - DNA, 20 bp, Artificial Sequence
  Description of Artificial Sequence: Synthetic oligonucleotide
  Target: LAMA2; (+) strand; PAM type: YTN; PAM sequence: CTT
ctcgtgccatagttttcagc

SEQ ID NO: 363767 - DNA, 20 bp, Artificial Sequence
  Description of Artificial Sequence: Synthetic oligonucleotide
  Target: LAMA2; (+) strand; PAM type: YTN; PAM sequence: TTC
tcgtgccatagttttcagct

SEQ ID NO: 363768 - DNA, 20 bp, Artificial Sequence
  Description of Artificial Sequence: Synthetic oligonucleotide
  Target: LAMA2; (+) strand; PAM type: YTN; PAM sequence: CTC
gtgccatagttttcagctcc

SEQ ID NO: 363769 - DNA, 20 bp, Artificial Sequence
  Description of Artificial Sequence: Synthetic oligonucleotide
  Target: LAMA2; (+) strand; PAM type: YTN; PAM sequence: TTT
tcagctccatcaggtcattt

SEQ ID NO: 363770 - DNA, 20 bp, Artificial Sequence
  Description of Artificial Sequence: Synthetic oligonucleotide
  Target: LAMA2; (+) strand; PAM type: YTN; PAM sequence: TTT
cagctccatcaggtcattta

SEQ ID NO: 363771 - DNA, 20 bp, Artificial Sequence
  Description of Artificial Sequence: Synthetic oligonucleotide
  Target: LAMA2; (+) strand; PAM type: YTN; PAM sequence: TTC
agctccatcaggtcatttaa

SEQ ID NO: 363772 - DNA, 20 bp, Artificial Sequence
  Description of Artificial Sequence: Synthetic oligonucleotide
  Target: LAMA2; (+) strand; PAM type: YTN; PAM sequence: CTC
catcaggtcatttaaggact

SEQ ID NO: 363773 - DNA, 20 bp, Artificial Sequence
  Description of Artificial Sequence: Synthetic oligonucleotide
  Target: LAMA2; (+) strand; PAM type: YTN; PAM sequence: TTT
aaggacttctctacactggt

SEQ ID NO: 363774 - DNA, 20 bp, Artificial Sequence
  Description of Artificial Sequence: Synthetic oligonucleotide
  Target: LAMA2; (+) strand; PAM type: YTN; PAM sequence: TTA
aggacttctctacactggtt

SEQ ID NO: 363775 - DNA, 20 bp, Artificial Sequence
  Description of Artificial Sequence: Synthetic oligonucleotide
  Target: LAMA2; (+) strand; PAM type: YTN; PAM sequence: CTT
ctctacactggttattctag

SEQ ID NO: 363776 - DNA, 20 bp, Artificial Sequence
  Description of Artificial Sequence: Synthetic oligonucleotide
  Target: LAMA2; (+) strand; PAM type: YTN; PAM sequence: TTC
tctacactggttattctagg

SEQ ID NO: 363777 - DNA, 20 bp, Artificial Sequence
  Description of Artificial Sequence: Synthetic oligonucleotide
  Target: LAMA2; (+) strand; PAM type: YTN; PAM sequence: CTC
tacactggttattctaggta

SEQ ID NO: 363778 - DNA, 20 bp, Artificial Sequence
  Description of Artificial Sequence: Synthetic oligonucleotide
  Target: LAMA2; (+) strand; PAM type: YTN; PAM sequence: CTA
cactggttattctaggtagc

SEQ ID NO: 363779 - DNA, 20 bp, Artificial Sequence
  Description of Artificial Sequence: Synthetic oligonucleotide
  Target: LAMA2; (+) strand; PAM type: YTN; PAM sequence: CTG
gttattctaggtagccattt

SEQ ID NO: 363780 - DNA, 20 bp, Artificial Sequence
  Description of Artificial Sequence: Synthetic oligonucleotide
  Target: LAMA2; (+) strand; PAM type: YTN; PAM sequence: TTA
ttctaggtagccatttgtcc

SEQ ID NO: 363781 - DNA, 20 bp, Artificial Sequence
  Description of Artificial Sequence: Synthetic oligonucleotide
  Target: LAMA2; (+) strand; PAM type: YTN; PAM sequence: TTC
taggtagccatttgtcctat

SEQ ID NO: 363782 - DNA, 20 bp, Artificial Sequence
  Description of Artificial Sequence: Synthetic oligonucleotide
  Target: LAMA2; (+) strand; PAM type: YTN; PAM sequence: CTA
ggtagccatttgtcctatct

SEQ ID NO: 363783 - DNA, 20 bp, Artificial Sequence
  Description of Artificial Sequence: Synthetic oligonucleotide
  Target: LAMA2; (+) strand; PAM type: YTN; PAM sequence: TTT
gtcctatcttttttcaaggt

SEQ ID NO: 363784 - DNA, 20 bp, Artificial Sequence
  Description of Artificial Sequence: Synthetic oligonucleotide
  Target: LAMA2; (+) strand; PAM type: YTN; PAM sequence: TTG
tcctatcttttttcaaggtt

SEQ ID NO: 363785 - DNA, 20 bp, Artificial Sequence
  Description of Artificial Sequence: Synthetic oligonucleotide
  Target: LAMA2; (+) strand; PAM type: YTN; PAM sequence: CTA
tcttttttcaaggtttttag

SEQ ID NO: 363786 - DNA, 20 bp, Artificial Sequence
  Description of Artificial Sequence: Synthetic oligonucleotide
  Target: LAMA2; (+) strand; PAM type: YTN; PAM sequence: CTT
ttttcaaggtttttagcttc

SEQ ID NO: 363787 - DNA, 20 bp, Artificial Sequence
  Description of Artificial Sequence: Synthetic oligonucleotide
  Target: LAMA2; (+) strand; PAM type: YTN; PAM sequence: TTT
tttcaaggtttttagcttct

SEQ ID NO: 363788 - DNA, 20 bp, Artificial Sequence
  Description of Artificial Sequence: Synthetic oligonucleotide
  Target: LAMA2; (+) strand; PAM type: YTN; PAM sequence: TTT
ttcaaggtttttagcttctt

SEQ ID NO: 363789 - DNA, 20 bp, Artificial Sequence
  Description of Artificial Sequence: Synthetic oligonucleotide
  Target: LAMA2; (+) strand; PAM type: YTN; PAM sequence: TTT
tcaaggtttttagcttcttt

SEQ ID NO: 363790 - DNA, 20 bp, Artificial Sequence
  Description of Artificial Sequence: Synthetic oligonucleotide
  Target: LAMA2; (+) strand; PAM type: YTN; PAM sequence: TTT
caaggtttttagcttctttg

SEQ ID NO: 363791 - DNA, 20 bp, Artificial Sequence
  Description of Artificial Sequence: Synthetic oligonucleotide
  Target: LAMA2; (+) strand; PAM type: YTN; PAM sequence: TTC
aaggtttttagcttctttgt

SEQ ID NO: 363792 - DNA, 20 bp, Artificial Sequence
  Description of Artificial Sequence: Synthetic oligonucleotide
  Target: LAMA2; (+) strand; PAM type: YTN; PAM sequence: TTT
ttagcttctttgtgatgggt

SEQ ID NO: 363793 - DNA, 20 bp, Artificial Sequence
  Description of Artificial Sequence: Synthetic oligonucleotide
  Target: LAMA2; (+) strand; PAM type: YTN; PAM sequence: TTT
tagcttctttgtgatgggtt

SEQ ID NO: 363794 - DNA, 20 bp, Artificial Sequence
  Description of Artificial Sequence: Synthetic oligonucleotide
  Target: LAMA2; (+) strand; PAM type: YTN; PAM sequence: TTT
agcttctttgtgatgggttc

SEQ ID NO: 363795 - DNA, 20 bp, Artificial Sequence
  Description of Artificial Sequence: Synthetic oligonucleotide
  Target: LAMA2; (+) strand; PAM type: YTN; PAM sequence: TTA
gcttctttgtgatgggttcg

SEQ ID NO: 363796 - DNA, 20 bp, Artificial Sequence
  Description of Artificial Sequence: Synthetic oligonucleotide
  Target: LAMA2; (+) strand; PAM type: YTN; PAM sequence: CTT
ctttgtgatgggttcgaact

SEQ ID NO: 363797 - DNA, 20 bp, Artificial Sequence
  Description of Artificial Sequence: Synthetic oligonucleotide
  Target: LAMA2; (+) strand; PAM type: YTN; PAM sequence: TTC
tttgtgatgggttcgaactt

SEQ ID NO: 363798 - DNA, 20 bp, Artificial Sequence
  Description of Artificial Sequence: Synthetic oligonucleotide
  Target: LAMA2; (+) strand; PAM type: YTN; PAM sequence: CTT
tgtgatgggttcgaacttcc

SEQ ID NO: 363799 - DNA, 20 bp, Artificial Sequence
  Description of Artificial Sequence: Synthetic oligonucleotide
  Target: LAMA2; (+) strand; PAM type: YTN; PAM sequence: TTT
gtgatgggttcgaacttcct

SEQ ID NO: 363800 - DNA, 20 bp, Artificial Sequence
  Description of Artificial Sequence: Synthetic oligonucleotide
  Target: LAMA2; (+) strand; PAM type: YTN; PAM sequence: TTG
tgatgggttcgaacttcctc

SEQ ID NO: 363801 - DNA, 20 bp, Artificial Sequence
  Description of Artificial Sequence: Synthetic oligonucleotide
  Target: LAMA2; (+) strand; PAM type: YTN; PAM sequence: TTC
gaacttcctcctttagctca

SEQ ID NO: 363802 - DNA, 20 bp, Artificial Sequence
  Description of Artificial Sequence: Synthetic oligonucleotide
  Target: LAMA2; (+) strand; PAM type: YTN; PAM sequence: CTT
cctcctttagctcagagaag

SEQ ID NO: 363803 - DNA, 20 bp, Artificial Sequence
  Description of Artificial Sequence: Synthetic oligonucleotide
  Target: LAMA2; (+) strand; PAM type: YTN; PAM sequence: TTC
ctcctttagctcagagaagt

SEQ ID NO: 363804 - DNA, 20 bp, Artificial Sequence
  Description of Artificial Sequence: Synthetic oligonucleotide
  Target: LAMA2; (+) strand; PAM type: YTN; PAM sequence: CTC
ctttagctcagagaagtttg

SEQ ID NO: 363805 - DNA, 20 bp, Artificial Sequence
  Description of Artificial Sequence: Synthetic oligonucleotide
  Target: LAMA2; (+) strand; PAM type: YTN; PAM sequence: CTT
tagctcagagaagtttgatc

SEQ ID NO: 363806 - DNA, 20 bp, Artificial Sequence
  Description of Artificial Sequence: Synthetic oligonucleotide
  Target: LAMA2; (+) strand; PAM type: YTN; PAM sequence: TTT
agctcagagaagtttgatcg

SEQ ID NO: 363807 - DNA, 20 bp, Artificial Sequence
  Description of Artificial Sequence: Synthetic oligonucleotide
  Target: LAMA2; (+) strand; PAM type: YTN; PAM sequence: TTA
gctcagagaagtttgatcgt

SEQ ID NO: 363808 - DNA, 20 bp, Artificial Sequence
  Description of Artificial Sequence: Synthetic oligonucleotide
  Target: LAMA2; (+) strand; PAM type: YTN; PAM sequence: CTC
agagaagtttgatcgtctga

SEQ ID NO: 363809 - DNA, 20 bp, Artificial Sequence
  Description of Artificial Sequence: Synthetic oligonucleotide
  Target: LAMA2; (+) strand; PAM type: YTN; PAM sequence: TTT
gatcgtctgaagccttcttc

SEQ ID NO: 363810 - DNA, 20 bp, Artificial Sequence
  Description of Artificial Sequence: Synthetic oligonucleotide
  Target: LAMA2; (+) strand; PAM type: YTN; PAM sequence: TTG
atcgtctgaagccttcttct

SEQ ID NO: 363811 - DNA, 20 bp, Artificial Sequence
  Description of Artificial Sequence: Synthetic oligonucleotide
  Target: LAMA2; (+) strand; PAM type: YTN; PAM sequence: CTG
aagccttcttctctcaactc

SEQ ID NO: 363812 - DNA, 20 bp, Artificial Sequence
  Description of Artificial Sequence: Synthetic oligonucleotide
  Target: LAMA2; (+) strand; PAM type: YTN; PAM sequence: CTT
cttctctcaactcctcaaag

SEQ ID NO: 363813 - DNA, 20 bp, Artificial Sequence
  Description of Artificial Sequence: Synthetic oligonucleotide
  Target: LAMA2; (+) strand; PAM type: YTN; PAM sequence: TTC
ttctctcaactcctcaaagt

SEQ ID NO: 363814 - DNA, 20 bp, Artificial Sequence
  Description of Artificial Sequence: Synthetic oligonucleotide
  Target: LAMA2; (+) strand; PAM type: YTN; PAM sequence: CTT
ctctcaactcctcaaagtca

SEQ ID NO: 363815 - DNA, 20 bp, Artificial Sequence
  Description of Artificial Sequence: Synthetic oligonucleotide
  Target: LAMA2; (+) strand; PAM type: YTN; PAM sequence: TTC
tctcaactcctcaaagtcat

SEQ ID NO: 363816 - DNA, 20 bp, Artificial Sequence
  Description of Artificial Sequence: Synthetic oligonucleotide
  Target: LAMA2; (+) strand; PAM type: YTN; PAM sequence: CTC
tcaactcctcaaagtcattc

SEQ ID NO: 363817 - DNA, 20 bp, Artificial Sequence
  Description of Artificial Sequence: Synthetic oligonucleotide
  Target: LAMA2; (+) strand; PAM type: YTN; PAM sequence: CTC
aactcctcaaagtcattctc

SEQ ID NO: 363818 - DNA, 20 bp, Artificial Sequence
  Description of Artificial Sequence: Synthetic oligonucleotide
  Target: LAMA2; (+) strand; PAM type: YTN; PAM sequence: CTC
ctcaaagtcattctccatcc

SEQ ID NO: 363819 - DNA, 20 bp, Artificial Sequence
  Description of Artificial Sequence: Synthetic oligonucleotide
  Target: LAMA2; (+) strand; PAM type: YTN; PAM sequence: CTC
aaagtcattctccatccagc

SEQ ID NO: 363820 - DNA, 20 bp, Artificial Sequence
  Description of Artificial Sequence: Synthetic oligonucleotide
  Target: LAMA2; (+) strand; PAM type: YTN; PAM sequence: TTC
tccatccagctttgttccat

SEQ ID NO: 363821 - DNA, 20 bp, Artificial Sequence
  Description of Artificial Sequence: Synthetic oligonucleotide
  Target: LAMA2; (+) strand; PAM type: YTN; PAM sequence: CTC
catccagctttgttccattg

SEQ ID NO: 363822 - DNA, 20 bp, Artificial Sequence
  Description of Artificial Sequence: Synthetic oligonucleotide
  Target: LAMA2; (+) strand; PAM type: YTN; PAM sequence: CTT
tgttccattgctggcaagga

SEQ ID NO: 363823 - DNA, 20 bp, Artificial Sequence
  Description of Artificial Sequence: Synthetic oligonucleotide
  Target: LAMA2; (+) strand; PAM type: YTN; PAM sequence: TTT
gttccattgctggcaaggag

SEQ ID NO: 363824 - DNA, 20 bp, Artificial Sequence
  Description of Artificial Sequence: Synthetic oligonucleotide
  Target: LAMA2; (+) strand; PAM type: YTN; PAM sequence: TTG
ttccattgctggcaaggagc

SEQ ID NO: 363825 - DNA, 20 bp, Artificial Sequence
  Description of Artificial Sequence: Synthetic oligonucleotide
  Target: LAMA2; (+) strand; PAM type: YTN; PAM sequence: TTC
cattgctggcaaggagcttc

SEQ ID NO: 363826 - DNA, 20 bp, Artificial Sequence
  Description of Artificial Sequence: Synthetic oligonucleotide
  Target: LAMA2; (+) strand; PAM type: YTN; PAM sequence: TTG
ctggcaaggagcttcattcc

SEQ ID NO: 363827 - DNA, 20 bp, Artificial Sequence
  Description of Artificial Sequence: Synthetic oligonucleotide
  Target: LAMA2; (+) strand; PAM type: YTN; PAM sequence: CTG
gcaaggagcttcattccttt

SEQ ID NO: 363828 - DNA, 20 bp, Artificial Sequence
  Description of Artificial Sequence: Synthetic oligonucleotide
  Target: LAMA2; (+) strand; PAM type: YTN; PAM sequence: CTT
cattcctttggaggaggaga

SEQ ID NO: 363829 - DNA, 20 bp, Artificial Sequence
  Description of Artificial Sequence: Synthetic oligonucleotide
  Target: LAMA2; (+) strand; PAM type: YTN; PAM sequence: TTC
attcctttggaggaggagag

SEQ ID NO: 363830 - DNA, 20 bp, Artificial Sequence
  Description of Artificial Sequence: Synthetic oligonucleotide
  Target: LAMA2; (+) strand; PAM type: YTN; PAM sequence: TTC
ctttggaggaggagaggcgc

SEQ ID NO: 363831 - DNA, 20 bp, Artificial Sequence
  Description of Artificial Sequence: Synthetic oligonucleotide
  Target: LAMA2; (+) strand; PAM type: YTN; PAM sequence: CTT
tggaggaggagaggcgctct

SEQ ID NO: 363832 - DNA, 20 bp, Artificial Sequence
  Description of Artificial Sequence: Synthetic oligonucleotide
  Target: LAMA2; (+) strand; PAM type: YTN; PAM sequence: TTT
ggaggaggagaggcgctctg

SEQ ID NO: 363833 - DNA, 20 bp, Artificial Sequence
  Description of Artificial Sequence: Synthetic oligonucleotide
  Target: LAMA2; (+) strand; PAM type: YTN; PAM sequence: TTG
gaggaggagaggcgctctga

SEQ ID NO: 363834 - DNA, 20 bp, Artificial Sequence
  Description of Artificial Sequence: Synthetic oligonucleotide
  Target: LAMA2; (+) strand; PAM type: YTN; PAM sequence: CTC
tgatttttagagttttcagc

SEQ ID NO: 363835 - DNA, 20 bp, Artificial Sequence
  Description of Artificial Sequence: Synthetic oligonucleotide
  Target: LAMA2; (+) strand; PAM type: YTN; PAM sequence: CTG
atttttagagttttcagctt

SEQ ID NO: 363836 - DNA, 20 bp, Artificial Sequence
  Description of Artificial Sequence: Synthetic oligonucleotide
  Target: LAMA2; (+) strand; PAM type: YTN; PAM sequence: TTT
ttagagttttcagcttctct

SEQ ID NO: 363837 - DNA, 20 bp, Artificial Sequence
  Description of Artificial Sequence: Synthetic oligonucleotide
  Target: LAMA2; (+) strand; PAM type: YTN; PAM sequence: TTT
tagagttttcagcttctctg

SEQ ID NO: 363838 - DNA, 20 bp, Artificial Sequence
  Description of Artificial Sequence: Synthetic oligonucleotide
  Target: LAMA2; (+) strand; PAM type: YTN; PAM sequence: TTT
agagttttcagcttctctgc

SEQ ID NO: 363839 - DNA, 20 bp, Artificial Sequence
  Description of Artificial Sequence: Synthetic oligonucleotide
  Target: LAMA2; (+) strand; PAM type: YTN; PAM sequence: TTA
gagttttcagcttctctgct

SEQ ID NO: 363840 - DNA, 20 bp, Artificial Sequence
  Description of Artificial Sequence: Synthetic oligonucleotide
  Target: LAMA2; (+) strand; PAM type: YTN; PAM sequence: TTT
tcagcttctctgctctgttt

SEQ ID NO: 363841 - DNA, 20 bp, Artificial Sequence
  Description of Artificial Sequence: Synthetic oligonucleotide
  Target: LAMA2; (+) strand; PAM type: YTN; PAM sequence: TTT
cagcttctctgctctgtttt

SEQ ID NO: 363842 - DNA, 20 bp, Artificial Sequence
  Description of Artificial Sequence: Synthetic oligonucleotide
  Target: LAMA2; (+) strand; PAM type: YTN; PAM sequence: TTC
agcttctctgctctgttttt

SEQ ID NO: 363843 - DNA, 20 bp, Artificial Sequence
  Description of Artificial Sequence: Synthetic oligonucleotide
  Target: LAMA2; (+) strand; PAM type: YTN; PAM sequence: CTT
ctctgctctgttttttcccc

SEQ ID NO: 363844 - DNA, 20 bp, Artificial Sequence
  Description of Artificial Sequence: Synthetic oligonucleotide
  Target: LAMA2; (+) strand; PAM type: YTN; PAM sequence: TTC
tctgctctgttttttcccca

SEQ ID NO: 363845 - DNA, 20 bp, Artificial Sequence
  Description of Artificial Sequence: Synthetic oligonucleotide
  Target: LAMA2; (+) strand; PAM type: YTN; PAM sequence: CTC
tgctctgttttttccccatc

SEQ ID NO: 363846 - DNA, 20 bp, Artificial Sequence
  Description of Artificial Sequence: Synthetic oligonucleotide
  Target: LAMA2; (+) strand; PAM type: YTN; PAM sequence: CTG
ctctgttttttccccatctt

SEQ ID NO: 363847 - DNA, 20 bp, Artificial Sequence
  Description of Artificial Sequence: Synthetic oligonucleotide
  Target: LAMA2; (+) strand; PAM type: YTN; PAM sequence: CTC
tgttttttccccatctttgt

SEQ ID NO: 363848 - DNA, 20 bp, Artificial Sequence
  Description of Artificial Sequence: Synthetic oligonucleotide
  Target: LAMA2; (+) strand; PAM type: YTN; PAM sequence: CTG
ttttttccccatctttgtgg

SEQ ID NO: 363849 - DNA, 20 bp, Artificial Sequence
  Description of Artificial Sequence: Synthetic oligonucleotide
  Target: LAMA2; (+) strand; PAM type: YTN; PAM sequence: TTT
tttccccatctttgtggttt

SEQ ID NO: 363850 - DNA, 20 bp, Artificial Sequence
  Description of Artificial Sequence: Synthetic oligonucleotide
  Target: LAMA2; (+) strand; PAM type: YTN; PAM sequence: TTT
ttccccatctttgtggtttt

SEQ ID NO: 363851 - DNA, 20 bp, Artificial Sequence
  Description of Artificial Sequence: Synthetic oligonucleotide
  Target: LAMA2; (+) strand; PAM type: YTN; PAM sequence: TTT
tccccatctttgtggtttta

SEQ ID NO: 363852 - DNA, 20 bp, Artificial Sequence
  Description of Artificial Sequence: Synthetic oligonucleotide
  Target: LAMA2; (+) strand; PAM type: YTN; PAM sequence: TTT
ccccatctttgtggttttat

SEQ ID NO: 363853 - DNA, 20 bp, Artificial Sequence
  Description of Artificial Sequence: Synthetic oligonucleotide
  Target: LAMA2; (+) strand; PAM type: YTN; PAM sequence: TTC
cccatctttgtggttttatc

SEQ ID NO: 363854 - DNA, 20 bp, Artificial Sequence
  Description of Artificial Sequence: Synthetic oligonucleotide
  Target: LAMA2; (+) strand; PAM type: YTN; PAM sequence: CTT
tgtggttttatctacctttg

SEQ ID NO: 363855 - DNA, 20 bp, Artificial Sequence
  Description of Artificial Sequence: Synthetic oligonucleotide
  Target: LAMA2; (+) strand; PAM type: YTN; PAM sequence: TTT
gtggttttatctacctttgg

SEQ ID NO: 363856 - DNA, 20 bp, Artificial Sequence
  Description of Artificial Sequence: Synthetic oligonucleotide
  Target: LAMA2; (+) strand; PAM type: YTN; PAM sequence: TTG
tggttttatctacctttggt

SEQ ID NO: 363857 - DNA, 20 bp, Artificial Sequence
  Description of Artificial Sequence: Synthetic oligonucleotide
  Target: LAMA2; (+) strand; PAM type: YTN; PAM sequence: TTT
tatctacctttggtctttga

SEQ ID NO: 363858 - DNA, 20 bp, Artificial Sequence
  Description of Artificial Sequence: Synthetic oligonucleotide
  Target: LAMA2; (+) strand; PAM type: YTN; PAM sequence: TTT
atctacctttggtctttgat

SEQ ID NO: 363859 - DNA, 20 bp, Artificial Sequence
  Description of Artificial Sequence: Synthetic oligonucleotide
  Target: LAMA2; (+) strand; PAM type: YTN; PAM sequence: TTA
tctacctttggtctttgatg

SEQ ID NO: 363860 - DNA, 20 bp, Artificial Sequence
  Description of Artificial Sequence: Synthetic oligonucleotide
  Target: LAMA2; (+) strand; PAM type: YTN; PAM sequence: CTA
cctttggtctttgatgatga

SEQ ID NO: 363861 - DNA, 20 bp, Artificial Sequence
  Description of Artificial Sequence: Synthetic oligonucleotide
  Target: LAMA2; (+) strand; PAM type: YTN; PAM sequence: CTT
tggtctttgatgatgatgta

SEQ ID NO: 363862 - DNA, 20 bp, Artificial Sequence
  Description of Artificial Sequence: Synthetic oligonucleotide
  Target: LAMA2; (+) strand; PAM type: YTN; PAM sequence: TTT
ggtctttgatgatgatgtac

SEQ ID NO: 363863 - DNA, 20 bp, Artificial Sequence
  Description of Artificial Sequence: Synthetic oligonucleotide
  Target: LAMA2; (+) strand; PAM type: YTN; PAM sequence: TTG
gtctttgatgatgatgtacg

SEQ ID NO: 363864 - DNA, 20 bp, Artificial Sequence
  Description of Artificial Sequence: Synthetic oligonucleotide
  Target: LAMA2; (+) strand; PAM type: YTN; PAM sequence: CTT
tgatgatgatgtacggatgg

SEQ ID NO: 363865 - DNA, 20 bp, Artificial Sequence
  Description of Artificial Sequence: Synthetic oligonucleotide
  Target: LAMA2; (+) strand; PAM type: YTN; PAM sequence: TTT
gatgatgatgtacggatggg

SEQ ID NO: 363866 - DNA, 20 bp, Artificial Sequence
  Description of Artificial Sequence: Synthetic oligonucleotide
  Target: LAMA2; (+) strand; PAM type: YTN; PAM sequence: TTG
atgatgatgtacggatgggg

SEQ ID NO: 363867 - DNA, 20 bp, Artificial Sequence
  Description of Artificial Sequence: Synthetic oligonucleotide
  Target: LAMA2; (+) strand; PAM type: YTN; PAM sequence: TTT
tggtgtgggtgtcctttcta

SEQ ID NO: 363868 - DNA, 20 bp, Artificial Sequence
  Description of Artificial Sequence: Synthetic oligonucleotide
  Target: LAMA2; (+) strand; PAM type: YTN; PAM sequence: TTT
ggtgtgggtgtcctttctat

SEQ ID NO: 363869 - DNA, 20 bp, Artificial Sequence
  Description of Artificial Sequence: Synthetic oligonucleotide
  Target: LAMA2; (+) strand; PAM type: YTN; PAM sequence: TTG
gtgtgggtgtcctttctatt

SEQ ID NO: 363870 - DNA, 20 bp, Artificial Sequence
  Description of Artificial Sequence: Synthetic oligonucleotide
  Target: LAMA2; (+) strand; PAM type: YTN; PAM sequence: CTT
tctatttgttagttttcctt

SEQ ID NO: 363871 - DNA, 20 bp, Artificial Sequence
  Description of Artificial Sequence: Synthetic oligonucleotide
  Target: LAMA2; (+) strand; PAM type: YTN; PAM sequence: TTT
ctatttgttagttttccttc

SEQ ID NO: 363872 - DNA, 20 bp, Artificial Sequence
  Description of Artificial Sequence: Synthetic oligonucleotide
  Target: LAMA2; (+) strand; PAM type: YTN; PAM sequence: TTC
tatttgttagttttccttct

SEQ ID NO: 363873 - DNA, 20 bp, Artificial Sequence
  Description of Artificial Sequence: Synthetic oligonucleotide
  Target: LAMA2; (+) strand; PAM type: YTN; PAM sequence: CTA
tttgttagttttccttctta

SEQ ID NO: 363874 - DNA, 20 bp, Artificial Sequence
  Description of Artificial Sequence: Synthetic oligonucleotide
  Target: LAMA2; (+) strand; PAM type: YTN; PAM sequence: TTT
gttagttttccttcttacag

SEQ ID NO: 363875 - DNA, 20 bp, Artificial Sequence
  Description of Artificial Sequence: Synthetic oligonucleotide
  Target: LAMA2; (+) strand; PAM type: YTN; PAM sequence: TTG
ttagttttccttcttacagt

SEQ ID NO: 363876 - DNA, 20 bp, Artificial Sequence
  Description of Artificial Sequence: Synthetic oligonucleotide
  Target: LAMA2; (+) strand; PAM type: YTN; PAM sequence: TTA
gttttccttcttacagtcag

SEQ ID NO: 363877 - DNA, 20 bp, Artificial Sequence
  Description of Artificial Sequence: Synthetic oligonucleotide
  Target: LAMA2; (+) strand; PAM type: YTN; PAM sequence: TTT
tccttcttacagtcaggacc

SEQ ID NO: 363878 - DNA, 20 bp, Artificial Sequence
  Description of Artificial Sequence: Synthetic oligonucleotide
  Target: LAMA2; (+) strand; PAM type: YTN; PAM sequence: TTT
ccttcttacagtcaggaccc

SEQ ID NO: 363879 - DNA, 20 bp, Artificial Sequence
  Description of Artificial Sequence: Synthetic oligonucleotide
  Target: LAMA2; (+) strand; PAM type: YTN; PAM sequence: TTC
cttcttacagtcaggaccct

SEQ ID NO: 363880 - DNA, 20 bp, Artificial Sequence
  Description of Artificial Sequence: Synthetic oligonucleotide
  Target: LAMA2; (+) strand; PAM type: YTN; PAM sequence: CTT
cttacagtcaggaccctcag

SEQ ID NO: 363881 - DNA, 20 bp, Artificial Sequence
  Description of Artificial Sequence: Synthetic oligonucleotide
  Target: LAMA2; (+) strand; PAM type: YTN; PAM sequence: TTC
ttacagtcaggaccctcagc

SEQ ID NO: 363882 - DNA, 20 bp, Artificial Sequence
  Description of Artificial Sequence: Synthetic oligonucleotide
  Target: LAMA2; (+) strand; PAM type: YTN; PAM sequence: CTT
acagtcaggaccctcagctg

SEQ ID NO: 363883 - DNA, 20 bp, Artificial Sequence
  Description of Artificial Sequence: Synthetic oligonucleotide
  Target: LAMA2; (+) strand; PAM type: YTN; PAM sequence: TTA
cagtcaggaccctcagctgc

SEQ ID NO: 363884 - DNA, 20 bp, Artificial Sequence
  Description of Artificial Sequence: Synthetic oligonucleotide
  Target: LAMA2; (+) strand; PAM type: YTN; PAM sequence: CTC
agctgcaggtctgttggagt

SEQ ID NO: 363885 - DNA, 20 bp, Artificial Sequence
  Description of Artificial Sequence: Synthetic oligonucleotide
  Target: LAMA2; (+) strand; PAM type: YTN; PAM sequence: CTG
caggtctgttggagtttgct

SEQ ID NO: 363886 - DNA, 20 bp, Artificial Sequence
  Description of Artificial Sequence: Synthetic oligonucleotide
  Target: LAMA2; (+) strand; PAM type: YTN; PAM sequence: CTG
ttggagtttgctggaggtcc

SEQ ID NO: 363887 - DNA, 20 bp, Artificial Sequence
  Description of Artificial Sequence: Synthetic oligonucleotide
  Target: LAMA2; (+) strand; PAM type: YTN; PAM sequence: TTG
gagtttgctggaggtccact

SEQ ID NO: 363888 - DNA, 20 bp, Artificial Sequence
  Description of Artificial Sequence: Synthetic oligonucleotide
  Target: LAMA2; (+) strand; PAM type: YTN; PAM sequence: TTT
gctggaggtccactccagac

SEQ ID NO: 363889 - DNA, 20 bp, Artificial Sequence
  Description of Artificial Sequence: Synthetic oligonucleotide
  Target: LAMA2; (+) strand; PAM type: YTN; PAM sequence: TTG
ctggaggtccactccagacc

SEQ ID NO: 363890 - DNA, 20 bp, Artificial Sequence
  Description of Artificial Sequence: Synthetic oligonucleotide
  Target: LAMA2; (+) strand; PAM type: YTN; PAM sequence: CTG
gaggtccactccagaccctg

SEQ ID NO: 363891 - DNA, 20 bp, Artificial Sequence
  Description of Artificial Sequence: Synthetic oligonucleotide
  Target: LAMA2; (+) strand; PAM type: YTN; PAM sequence: CTC
cagaccctgtttgcctgggt

SEQ ID NO: 363892 - DNA, 20 bp, Artificial Sequence
  Description of Artificial Sequence: Synthetic oligonucleotide
  Target: LAMA2; (+) strand; PAM type: YTN; PAM sequence: CTG
tttgcctgggtatcagcagc

SEQ ID NO: 363893 - DNA, 20 bp, Artificial Sequence
  Description of Artificial Sequence: Synthetic oligonucleotide
  Target: LAMA2; (+) strand; PAM type: YTN; PAM sequence: TTT
gcctgggtatcagcagcgga

SEQ ID NO: 363894 - DNA, 20 bp, Artificial Sequence
  Description of Artificial Sequence: Synthetic oligonucleotide
  Target: LAMA2; (+) strand; PAM type: YTN; PAM sequence: TTG
cctgggtatcagcagcggag

SEQ ID NO: 363895 - DNA, 20 bp, Artificial Sequence
  Description of Artificial Sequence: Synthetic oligonucleotide
  Target: LAMA2; (+) strand; PAM type: YTN; PAM sequence: CTG
ggtatcagcagcggaggctg

SEQ ID NO: 363896 - DNA, 20 bp, Artificial Sequence
  Description of Artificial Sequence: Synthetic oligonucleotide
  Target: LAMA2; (+) strand; PAM type: YTN; PAM sequence: CTG
cagaacagcagatattgctg

SEQ ID NO: 363897 - DNA, 20 bp, Artificial Sequence
  Description of Artificial Sequence: Synthetic oligonucleotide
  Target: LAMA2; (+) strand; PAM type: YTN; PAM sequence: TTG
ctgaacagcaaatgttgccg

SEQ ID NO: 363898 - DNA, 20 bp, Artificial Sequence
  Description of Artificial Sequence: Synthetic oligonucleotide
  Target: LAMA2; (+) strand; PAM type: YTN; PAM sequence: CTG
aacagcaaatgttgccgcct

SEQ ID NO: 363899 - DNA, 20 bp, Artificial Sequence
  Description of Artificial Sequence: Synthetic oligonucleotide
  Target: LAMA2; (+) strand; PAM type: YTN; PAM sequence: TTG
ccgcctgatcgttcctctgg

SEQ ID NO: 363900 - DNA, 20 bp, Artificial Sequence
  Description of Artificial Sequence: Synthetic oligonucleotide
  Target: LAMA2; (+) strand; PAM type: YTN; PAM sequence: CTG
atcgttcctctggaagcttc

SEQ ID NO: 363901 - DNA, 20 bp, Artificial Sequence
  Description of Artificial Sequence: Synthetic oligonucleotide
  Target: LAMA2; (+) strand; PAM type: YTN; PAM sequence: TTC
ctctggaagcttcgtctcag

SEQ ID NO: 363902 - DNA, 20 bp, Artificial Sequence
  Description of Artificial Sequence: Synthetic oligonucleotide
  Target: LAMA2; (+) strand; PAM type: YTN; PAM sequence: CTC
tggaagcttcgtctcagagg

SEQ ID NO: 363903 - DNA, 20 bp, Artificial Sequence
  Description of Artificial Sequence: Synthetic oligonucleotide
  Target: LAMA2; (+) strand; PAM type: YTN; PAM sequence: CTG
gaagcttcgtctcagagggg

SEQ ID NO: 363904 - DNA, 20 bp, Artificial Sequence
  Description of Artificial Sequence: Synthetic oligonucleotide
  Target: LAMA2; (+) strand; PAM type: YTN; PAM sequence: CTT
cgtctcagaggggtactcgg

SEQ ID NO: 363905 - DNA, 20 bp, Artificial Sequence
  Description of Artificial Sequence: Synthetic oligonucleotide
  Target: LAMA2; (+) strand; PAM type: YTN; PAM sequence: TTC
gtctcagaggggtactcggc

SEQ ID NO: 363906 - DNA, 20 bp, Artificial Sequence
  Description of Artificial Sequence: Synthetic oligonucleotide
  Target: LAMA2; (+) strand; PAM type: YTN; PAM sequence: CTC
agaggggtactcggccgtgt

SEQ ID NO: 363907 - DNA, 20 bp, Artificial Sequence
  Description of Artificial Sequence: Synthetic oligonucleotide
  Target: LAMA2; (+) strand; PAM type: YTN; PAM sequence: CTC
ggccgtgtgggatgtcagtc

SEQ ID NO: 363908 - DNA, 20 bp, Artificial Sequence
  Description of Artificial Sequence: Synthetic oligonucleotide
  Target: LAMA2; (+) strand; PAM type: YTN; PAM sequence: CTG
cccctactgggtggtgcctc

SEQ ID NO: 363909 - DNA, 20 bp, Artificial Sequence
  Description of Artificial Sequence: Synthetic oligonucleotide
  Target: LAMA2; (+) strand; PAM type: YTN; PAM sequence: CTA
ctgggtggtgcctcacagtt

SEQ ID NO: 363910 - DNA, 20 bp, Artificial Sequence
  Description of Artificial Sequence: Synthetic oligonucleotide
  Target: LAMA2; (+) strand; PAM type: YTN; PAM sequence: CTG
ggtggtgcctcacagttagg

SEQ ID NO: 363911 - DNA, 20 bp, Artificial Sequence
  Description of Artificial Sequence: Synthetic oligonucleotide
  Target: LAMA2; (+) strand; PAM type: YTN; PAM sequence: CTC
acagttaggctattcagggc

SEQ ID NO: 363912 - DNA, 20 bp, Artificial Sequence
  Description of Artificial Sequence: Synthetic oligonucleotide
  Target: LAMA2; (+) strand; PAM type: YTN; PAM sequence: TTA
ggctattcagggctcaggga

SEQ ID NO: 363913 - DNA, 20 bp, Artificial Sequence
  Description of Artificial Sequence: Synthetic oligonucleotide
  Target: LAMA2; (+) strand; PAM type: YTN; PAM sequence: CTA
ttcagggctcagggatccac

SEQ ID NO: 363914 - DNA, 20 bp, Artificial Sequence
  Description of Artificial Sequence: Synthetic oligonucleotide
  Target: LAMA2; (+) strand; PAM type: YTN; PAM sequence: TTC
agggctcagggatccacttg

SEQ ID NO: 363915 - DNA, 20 bp, Artificial Sequence
  Description of Artificial Sequence: Synthetic oligonucleotide
  Target: LAMA2; (+) strand; PAM type: YTN; PAM sequence: CTC
agggatccacttgaggaggc

SEQ ID NO: 363916 - DNA, 20 bp, Artificial Sequence
  Description of Artificial Sequence: Synthetic oligonucleotide
  Target: LAMA2; (+) strand; PAM type: YTN; PAM sequence: CTT
gaggaggcagtctgttcatt

SEQ ID NO: 363917 - DNA, 20 bp, Artificial Sequence
  Description of Artificial Sequence: Synthetic oligonucleotide
  Target: LAMA2; (+) strand; PAM type: YTN; PAM sequence: TTG
aggaggcagtctgttcattc

SEQ ID NO: 363918 - DNA, 20 bp, Artificial Sequence
  Description of Artificial Sequence: Synthetic oligonucleotide
  Target: LAMA2; (+) strand; PAM type: YTN; PAM sequence: CTG
ttcattctcagatctcaaac

SEQ ID NO: 363919 - DNA, 20 bp, Artificial Sequence
  Description of Artificial Sequence: Synthetic oligonucleotide
  Target: LAMA2; (+) strand; PAM type: YTN; PAM sequence: TTC
attctcagatctcaaactcc

SEQ ID NO: 363920 - DNA, 20 bp, Artificial Sequence
  Description of Artificial Sequence: Synthetic oligonucleotide
  Target: LAMA2; (+) strand; PAM type: YTN; PAM sequence: TTC
tcagatctcaaactccatgc

SEQ ID NO: 363921 - DNA, 20 bp, Artificial Sequence
  Description of Artificial Sequence: Synthetic oligonucleotide
  Target: LAMA2; (+) strand; PAM type: YTN; PAM sequence: CTC
agatctcaaactccatgctg

SEQ ID NO: 363922 - DNA, 20 bp, Artificial Sequence
  Description of Artificial Sequence: Synthetic oligonucleotide
  Target: LAMA2; (+) strand; PAM type: YTN; PAM sequence: CTC
aaactccatgctgggagaac

SEQ ID NO: 363923 - DNA, 20 bp, Artificial Sequence
  Description of Artificial Sequence: Synthetic oligonucleotide
  Target: LAMA2; (+) strand; PAM type: YTN; PAM sequence: CTC
catgctgggagaaccactac

SEQ ID NO: 363924 - DNA, 20 bp, Artificial Sequence
  Description of Artificial Sequence: Synthetic oligonucleotide
  Target: LAMA2; (+) strand; PAM type: YTN; PAM sequence: CTG
ggagaaccactactctcttc

SEQ ID NO: 363925 - DNA, 20 bp, Artificial Sequence
  Description of Artificial Sequence: Synthetic oligonucleotide
  Target: LAMA2; (+) strand; PAM type: YTN; PAM sequence: CTA
ctctcttcaaagctgtcaga

SEQ ID NO: 363926 - DNA, 20 bp, Artificial Sequence
  Description of Artificial Sequence: Synthetic oligonucleotide
  Target: LAMA2; (+) strand; PAM type: YTN; PAM sequence: CTC
tcttcaaagctgtcagacag

SEQ ID NO: 363927 - DNA, 20 bp, Artificial Sequence
  Description of Artificial Sequence: Synthetic oligonucleotide
  Target: LAMA2; (+) strand; PAM type: YTN; PAM sequence: CTC
ttcaaagctgtcagacaggg

SEQ ID NO: 363928 - DNA, 20 bp, Artificial Sequence
  Description of Artificial Sequence: Synthetic oligonucleotide
  Target: LAMA2; (+) strand; PAM type: YTN; PAM sequence: CTT
caaagctgtcagacagggac

SEQ ID NO: 363929 - DNA, 20 bp, Artificial Sequence
  Description of Artificial Sequence: Synthetic oligonucleotide
  Target: LAMA2; (+) strand; PAM type: YTN; PAM sequence: TTC
aaagctgtcagacagggaca

SEQ ID NO: 363930 - DNA, 20 bp, Artificial Sequence
  Description of Artificial Sequence: Synthetic oligonucleotide
  Target: LAMA2; (+) strand; PAM type: YTN; PAM sequence: CTG
tcagacagggacatttaagt

SEQ ID NO: 363931 - DNA, 20 bp, Artificial Sequence
  Description of Artificial Sequence: Synthetic oligonucleotide
  Target: LAMA2; (+) strand; PAM type: YTN; PAM sequence: TTT
aagtctgcagaggtttctgc

SEQ ID NO: 363932 - DNA, 20 bp, Artificial Sequence
  Description of Artificial Sequence: Synthetic oligonucleotide
  Target: LAMA2; (+) strand; PAM type: YTN; PAM sequence: TTA
agtctgcagaggtttctgct

SEQ ID NO: 363933 - DNA, 20 bp, Artificial Sequence
  Description of Artificial Sequence: Synthetic oligonucleotide
  Target: LAMA2; (+) strand; PAM type: YTN; PAM sequence: CTG
cagaggtttctgctgtcttt

SEQ ID NO: 363934 - DNA, 20 bp, Artificial Sequence
  Description of Artificial Sequence: Synthetic oligonucleotide
  Target: LAMA2; (+) strand; PAM type: YTN; PAM sequence: TTT
ctgctgtcttttgttcggct

SEQ ID NO: 363935 - DNA, 20 bp, Artificial Sequence
  Description of Artificial Sequence: Synthetic oligonucleotide
  Target: LAMA2; (+) strand; PAM type: YTN; PAM sequence: TTC
tgctgtcttttgttcggcta

SEQ ID NO: 363936 - DNA, 20 bp, Artificial Sequence
  Description of Artificial Sequence: Synthetic oligonucleotide
  Target: LAMA2; (+) strand; PAM type: YTN; PAM sequence: CTG
ctgtcttttgttcggctatg

SEQ ID NO: 363937 - DNA, 20 bp, Artificial Sequence
  Description of Artificial Sequence: Synthetic oligonucleotide
  Target: LAMA2; (+) strand; PAM type: YTN; PAM sequence: CTG
tcttttgttcggctatgtcc

SEQ ID NO: 363938 - DNA, 20 bp, Artificial Sequence
  Description of Artificial Sequence: Synthetic oligonucleotide
  Target: LAMA2; (+) strand; PAM type: YTN; PAM sequence: CTT
ttgttcggctatgtcctact

SEQ ID NO: 363939 - DNA, 20 bp, Artificial Sequence
  Description of Artificial Sequence: Synthetic oligonucleotide
  Target: LAMA2; (+) strand; PAM type: YTN; PAM sequence: TTT
tgttcggctatgtcctactc

SEQ ID NO: 363940 - DNA, 20 bp, Artificial Sequence
  Description of Artificial Sequence: Synthetic oligonucleotide
  Target: LAMA2; (+) strand; PAM type: YTN; PAM sequence: TTT
gttcggctatgtcctactcc

SEQ ID NO: 363941 - DNA, 20 bp, Artificial Sequence
  Description of Artificial Sequence: Synthetic oligonucleotide
  Target: LAMA2; (+) strand; PAM type: YTN; PAM sequence: TTG
ttcggctatgtcctactccc

SEQ ID NO: 363942 - DNA, 20 bp, Artificial Sequence
  Description of Artificial Sequence: Synthetic oligonucleotide
  Target: LAMA2; (+) strand; PAM type: YTN; PAM sequence: TTC
ggctatgtcctactcccaga

SEQ ID NO: 363943 - DNA, 20 bp, Artificial Sequence
  Description of Artificial Sequence: Synthetic oligonucleotide
  Target: LAMA2; (+) strand; PAM type: YTN; PAM sequence: CTA
tgtcctactcccagaggtgg

SEQ ID NO: 363944 - DNA, 20 bp, Artificial Sequence
  Description of Artificial Sequence: Synthetic oligonucleotide
  Target: LAMA2; (+) strand; PAM type: YTN; PAM sequence: CTA
ctcccagaggtggagtctac

SEQ ID NO: 363945 - DNA, 20 bp, Artificial Sequence
  Description of Artificial Sequence: Synthetic oligonucleotide
  Target: LAMA2; (+) strand; PAM type: YTN; PAM sequence: CTC
ccagaggtggagtctacaga

SEQ ID NO: 363946 - DNA, 20 bp, Artificial Sequence
  Description of Artificial Sequence: Synthetic oligonucleotide
  Target: LAMA2; (+) strand; PAM type: YTN; PAM sequence: CTA
cagaggcaggcaggcatcct

SEQ ID NO: 363947 - DNA, 20 bp, Artificial Sequence
  Description of Artificial Sequence: Synthetic oligonucleotide
  Target: LAMA2; (+) strand; PAM type: YTN; PAM sequence: CTT
gagctgcagtgggcttcacc

SEQ ID NO: 363948 - DNA, 20 bp, Artificial Sequence
  Description of Artificial Sequence: Synthetic oligonucleotide
  Target: LAMA2; (+) strand; PAM type: YTN; PAM sequence: TTG
agctgcagtgggcttcaccc

SEQ ID NO: 363949 - DNA, 20 bp, Artificial Sequence
  Description of Artificial Sequence: Synthetic oligonucleotide
  Target: LAMA2; (+) strand; PAM type: YTN; PAM sequence: CTG
cagtgggcttcacccagttc

SEQ ID NO: 363950 - DNA, 20 bp, Artificial Sequence
  Description of Artificial Sequence: Synthetic oligonucleotide
  Target: LAMA2; (+) strand; PAM type: YTN; PAM sequence: CTT
cacccagttcaagcttccca

SEQ ID NO: 363951 - DNA, 20 bp, Artificial Sequence
  Description of Artificial Sequence: Synthetic oligonucleotide
  Target: LAMA2; (+) strand; PAM type: YTN; PAM sequence: TTC
acccagttcaagcttcccag

SEQ ID NO: 363952 - DNA, 20 bp, Artificial Sequence
  Description of Artificial Sequence: Synthetic oligonucleotide
  Target: LAMA2; (+) strand; PAM type: YTN; PAM sequence: TTC
aagcttcccagccacagttt

SEQ ID NO: 363953 - DNA, 20 bp, Artificial Sequence
  Description of Artificial Sequence: Synthetic oligonucleotide
  Target: LAMA2; (+) strand; PAM type: YTN; PAM sequence: CTT
cccagccacagtttgtttgc

SEQ ID NO: 363954 - DNA, 20 bp, Artificial Sequence
  Description of Artificial Sequence: Synthetic oligonucleotide
  Target: LAMA2; (+) strand; PAM type: YTN; PAM sequence: TTC
ccagccacagtttgtttgcc

SEQ ID NO: 363955 - DNA, 20 bp, Artificial Sequence
  Description of Artificial Sequence: Synthetic oligonucleotide
  Target: LAMA2; (+) strand; PAM type: YTN; PAM sequence: TTT
gtttgcctactcaagcctcg

SEQ ID NO: 363956 - DNA, 20 bp, Artificial Sequence
  Description of Artificial Sequence: Synthetic oligonucleotide
  Target: LAMA2; (+) strand; PAM type: YTN; PAM sequence: TTG
tttgcctactcaagcctcgg

SEQ ID NO: 363957 - DNA, 20 bp, Artificial Sequence
  Description of Artificial Sequence: Synthetic oligonucleotide
  Target: LAMA2; (+) strand; PAM type: YTN; PAM sequence: TTT
gcctactcaagcctcggcaa

SEQ ID NO: 363958 - DNA, 20 bp, Artificial Sequence
  Description of Artificial Sequence: Synthetic oligonucleotide
  Target: LAMA2; (+) strand; PAM type: YTN; PAM sequence: TTG
cctactcaagcctcggcaat

SEQ ID NO: 363959 - DNA, 20 bp, Artificial Sequence
  Description of Artificial Sequence: Synthetic oligonucleotide
  Target: LAMA2; (+) strand; PAM type: YTN; PAM sequence: CTA
ctcaagcctcggcaatggcg

SEQ ID NO: 363960 - DNA, 20 bp, Artificial Sequence
  Description of Artificial Sequence: Synthetic oligonucleotide
  Target: LAMA2; (+) strand; PAM type: YTN; PAM sequence: CTC
aagcctcggcaatggcgggc

SEQ ID NO: 363961 - DNA, 20 bp, Artificial Sequence
  Description of Artificial Sequence: Synthetic oligonucleotide
  Target: LAMA2; (+) strand; PAM type: YTN; PAM sequence: CTC
ggcaatggcgggcgcccctc

SEQ ID NO: 363962 - DNA, 20 bp, Artificial Sequence
  Description of Artificial Sequence: Synthetic oligonucleotide
  Target: LAMA2; (+) strand; PAM type: YTN; PAM sequence: CTC
tcccaaccttgctgccacct

SEQ ID NO: 363963 - DNA, 20 bp, Artificial Sequence
  Description of Artificial Sequence: Synthetic oligonucleotide
  Target: LAMA2; (+) strand; PAM type: YTN; PAM sequence: CTC
ccaaccttgctgccaccttg

SEQ ID NO: 363964 - DNA, 20 bp, Artificial Sequence
  Description of Artificial Sequence: Synthetic oligonucleotide
  Target: LAMA2; (+) strand; PAM type: YTN; PAM sequence: CTT
gctgccaccttgcagttcag

SEQ ID NO: 363965 - DNA, 20 bp, Artificial Sequence
  Description of Artificial Sequence: Synthetic oligonucleotide
  Target: LAMA2; (+) strand; PAM type: YTN; PAM sequence: TTG
ctgccaccttgcagttcagt

SEQ ID NO: 363966 - DNA, 20 bp, Artificial Sequence
  Description of Artificial Sequence: Synthetic oligonucleotide
  Target: LAMA2; (+) strand; PAM type: YTN; PAM sequence: CTG
ccaccttgcagttcagtctc

SEQ ID NO: 363967 - DNA, 20 bp, Artificial Sequence
  Description of Artificial Sequence: Synthetic oligonucleotide
  Target: LAMA2; (+) strand; PAM type: YTN; PAM sequence: CTT
gcagttcagtctcagactgc

SEQ ID NO: 363968 - DNA, 20 bp, Artificial Sequence
  Description of Artificial Sequence: Synthetic oligonucleotide
  Target: LAMA2; (+) strand; PAM type: YTN; PAM sequence: TTG
cagttcagtctcagactgct

SEQ ID NO: 363969 - DNA, 20 bp, Artificial Sequence
  Description of Artificial Sequence: Synthetic oligonucleotide
  Target: LAMA2; (+) strand; PAM type: YTN; PAM sequence: TTC
agtctcagactgctgggcta

SEQ ID NO: 363970 - DNA, 20 bp, Artificial Sequence
  Description of Artificial Sequence: Synthetic oligonucleotide
  Target: LAMA2; (+) strand; PAM type: YTN; PAM sequence: CTC
agactgctgggctagcaatg

SEQ ID NO: 363971 - DNA, 20 bp, Artificial Sequence
  Description of Artificial Sequence: Synthetic oligonucleotide
  Target: LAMA2; (+) strand; PAM type: YTN; PAM sequence: CTG
ctgggctagcaatgaacaag

SEQ ID NO: 363972 - DNA, 20 bp, Artificial Sequence
  Description of Artificial Sequence: Synthetic oligonucleotide
  Target: LAMA2; (+) strand; PAM type: YTN; PAM sequence: CTG
ggctagcaatgaacaaggct

SEQ ID NO: 363973 - DNA, 20 bp, Artificial Sequence
  Description of Artificial Sequence: Synthetic oligonucleotide
  Target: LAMA2; (+) strand; PAM type: YTN; PAM sequence: CTA
gcaatgaacaaggctccgta

SEQ ID NO: 363974 - DNA, 20 bp, Artificial Sequence
  Description of Artificial Sequence: Synthetic oligonucleotide
  Target: LAMA2; (+) strand; PAM type: YTN; PAM sequence: CTC
cgtaggcatgggaccctccg

SEQ ID NO: 363975 - DNA, 20 bp, Artificial Sequence
  Description of Artificial Sequence: Synthetic oligonucleotide
  Target: LAMA2; (+) strand; PAM type: YTN; PAM sequence: CTC
cgagccaggtgtgggatata

SEQ ID NO: 363976 - DNA, 20 bp, Artificial Sequence
  Description of Artificial Sequence: Synthetic oligonucleotide
  Target: LAMA2; (+) strand; PAM type: YTN; PAM sequence: CTC
ctggtgtgccgtttgctaag

SEQ ID NO: 363977 - DNA, 20 bp, Artificial Sequence
  Description of Artificial Sequence: Synthetic oligonucleotide
  Target: LAMA2; (+) strand; PAM type: YTN; PAM sequence: CTG
gtgtgccgtttgctaagacc

SEQ ID NO: 363978 - DNA, 20 bp, Artificial Sequence
  Description of Artificial Sequence: Synthetic oligonucleotide
  Target: LAMA2; (+) strand; PAM type: YTN; PAM sequence: TTT
gctaagaccattggaaaagc

SEQ ID NO: 363979 - DNA, 20 bp, Artificial Sequence
  Description of Artificial Sequence: Synthetic oligonucleotide
  Target: LAMA2; (+) strand; PAM type: YTN; PAM sequence: TTG
ctaagaccattggaaaagcg

SEQ ID NO: 363980 - DNA, 20 bp, Artificial Sequence
  Description of Artificial Sequence: Synthetic oligonucleotide
  Target: LAMA2; (+) strand; PAM type: YTN; PAM sequence: CTA
agaccattggaaaagcgtgg

SEQ ID NO: 363981 - DNA, 20 bp, Artificial Sequence
  Description of Artificial Sequence: Synthetic oligonucleotide
  Target: LAMA2; (+) strand; PAM type: YTN; PAM sequence: TTG
gaaaagcgtggtattagggt

SEQ ID NO: 363982 - DNA, 20 bp, Artificial Sequence
  Description of Artificial Sequence: Synthetic oligonucleotide
  Target: LAMA2; (+) strand; PAM type: YTN; PAM sequence: TTA
gggtgggagtgacccgattt

SEQ ID NO: 363983 - DNA, 20 bp, Artificial Sequence
  Description of Artificial Sequence: Synthetic oligonucleotide
  Target: LAMA2; (+) strand; PAM type: YTN; PAM sequence: TTT
tccaggtgccgtctgtcaca

SEQ ID NO: 363984 - DNA, 20 bp, Artificial Sequence
  Description of Artificial Sequence: Synthetic oligonucleotide
  Target: LAMA2; (+) strand; PAM type: YTN; PAM sequence: TTT
ccaggtgccgtctgtcacag

SEQ ID NO: 363985 - DNA, 20 bp, Artificial Sequence
  Description of Artificial Sequence: Synthetic oligonucleotide
  Target: LAMA2; (+) strand; PAM type: YTN; PAM sequence: TTC
caggtgccgtctgtcacagc

SEQ ID NO: 363986 - DNA, 20 bp, Artificial Sequence
  Description of Artificial Sequence: Synthetic oligonucleotide
  Target: LAMA2; (+) strand; PAM type: YTN; PAM sequence: CTG
tcacagcttcccttggctag

SEQ ID NO: 363987 - DNA, 20 bp, Artificial Sequence
  Description of Artificial Sequence: Synthetic oligonucleotide
  Target: LAMA2; (+) strand; PAM type: YTN; PAM sequence: CTT
cccttggctaggaaagggaa

SEQ ID NO: 363988 - DNA, 20 bp, Artificial Sequence
  Description of Artificial Sequence: Synthetic oligonucleotide
  Target: LAMA2; (+) strand; PAM type: YTN; PAM sequence: TTC
ccttggctaggaaagggaat

SEQ ID NO: 363989 - DNA, 20 bp, Artificial Sequence
  Description of Artificial Sequence: Synthetic oligonucleotide
  Target: LAMA2; (+) strand; PAM type: YTN; PAM sequence: CTT
ggctaggaaagggaatttcc

SEQ ID NO: 363990 - DNA, 20 bp, Artificial Sequence
  Description of Artificial Sequence: Synthetic oligonucleotide
  Target: LAMA2; (+) strand; PAM type: YTN; PAM sequence: TTG
gctaggaaagggaatttcct

SEQ ID NO: 363991 - DNA, 20 bp, Artificial Sequence
  Description of Artificial Sequence: Synthetic oligonucleotide
  Target: LAMA2; (+) strand; PAM type: YTN; PAM sequence: CTA
ggaaagggaatttcctgacc

SEQ ID NO: 363992 - DNA, 20 bp, Artificial Sequence
  Description of Artificial Sequence: Synthetic oligonucleotide
  Target: LAMA2; (+) strand; PAM type: YTN; PAM sequence: TTT
cctgaccccttgtgcttccc

SEQ ID NO: 363993 - DNA, 20 bp, Artificial Sequence
  Description of Artificial Sequence: Synthetic oligonucleotide
  Target: LAMA2; (+) strand; PAM type: YTN; PAM sequence: TTC
ctgaccccttgtgcttcccg

SEQ ID NO: 363994 - DNA, 20 bp, Artificial Sequence
  Description of Artificial Sequence: Synthetic oligonucleotide
  Target: LAMA2; (+) strand; PAM type: YTN; PAM sequence: CTG
accccttgtgcttcccgggt

SEQ ID NO: 363995 - DNA, 20 bp, Artificial Sequence
  Description of Artificial Sequence: Synthetic oligonucleotide
  Target: LAMA2; (+) strand; PAM type: YTN; PAM sequence: CTT
gtgcttcccgggtgaggtga

SEQ ID NO: 363996 - DNA, 20 bp, Artificial Sequence
  Description of Artificial Sequence: Synthetic oligonucleotide
  Target: LAMA2; (+) strand; PAM type: YTN; PAM sequence: TTG
tgcttcccgggtgaggtgat

SEQ ID NO: 363997 - DNA, 20 bp, Artificial Sequence
  Description of Artificial Sequence: Synthetic oligonucleotide
  Target: LAMA2; (+) strand; PAM type: YTN; PAM sequence: CTT
cccgggtgaggtgatgcctc

SEQ ID NO: 363998 - DNA, 20 bp, Artificial Sequence
  Description of Artificial Sequence: Synthetic oligonucleotide
  Target: LAMA2; (+) strand; PAM type: YTN; PAM sequence: TTC
ccgggtgaggtgatgcctcg

SEQ ID NO: 363999 - DNA, 20 bp, Artificial Sequence
  Description of Artificial Sequence: Synthetic oligonucleotide
  Target: LAMA2; (+) strand; PAM type: YTN; PAM sequence: CTC
gccctgctttggctgacact

SEQ ID NO: 364000 - DNA, 20 bp, Artificial Sequence
  Description of Artificial Sequence: Synthetic oligonucleotide
  Target: LAMA2; (+) strand; PAM type: YTN; PAM sequence: CTG
ctttggctgacacttgatgg

SEQ ID NO: 364001 - DNA, 20 bp, Artificial Sequence
  Description of Artificial Sequence: Synthetic oligonucleotide
  Target: LAMA2; (+) strand; PAM type: YTN; PAM sequence: CTT
tggctgacacttgatgggct

SEQ ID NO: 364002 - DNA, 20 bp, Artificial Sequence
  Description of Artificial Sequence: Synthetic oligonucleotide
  Target: LAMA2; (+) strand; PAM type: YTN; PAM sequence: TTT
ggctgacacttgatgggctg

SEQ ID NO: 364003 - DNA, 20 bp, Artificial Sequence
  Description of Artificial Sequence: Synthetic oligonucleotide
  Target: LAMA2; (+) strand; PAM type: YTN; PAM sequence: TTG
gctgacacttgatgggctgc

SEQ ID NO: 364004 - DNA, 20 bp, Artificial Sequence
  Description of Artificial Sequence: Synthetic oligonucleotide
  Target: LAMA2; (+) strand; PAM type: YTN; PAM sequence: CTG
acacttgatgggctgcaacc

SEQ ID NO: 364005 - DNA, 20 bp, Artificial Sequence
  Description of Artificial Sequence: Synthetic oligonucleotide
  Target: LAMA2; (+) strand; PAM type: YTN; PAM sequence: CTT
gatgggctgcaaccactgtc

SEQ ID NO: 364006 - DNA, 20 bp, Artificial Sequence
  Description of Artificial Sequence: Synthetic oligonucleotide
  Target: LAMA2; (+) strand; PAM type: YTN; PAM sequence: TTG
atgggctgcaaccactgtcc

SEQ ID NO: 364007 - DNA, 20 bp, Artificial Sequence
  Description of Artificial Sequence: Synthetic oligonucleotide
  Target: LAMA2; (+) strand; PAM type: YTN; PAM sequence: CTG
caaccactgtcctgcaccca

SEQ ID NO: 364008 - DNA, 20 bp, Artificial Sequence
  Description of Artificial Sequence: Synthetic oligonucleotide
  Target: LAMA2; (+) strand; PAM type: YTN; PAM sequence: CTG
tcctgcacccactgtcagac

SEQ ID NO: 364009 - DNA, 20 bp, Artificial Sequence
  Description of Artificial Sequence: Synthetic oligonucleotide
  Target: LAMA2; (+) strand; PAM type: YTN; PAM sequence: CTG
cacccactgtcagacaagcc

SEQ ID NO: 364010 - DNA, 20 bp, Artificial Sequence
  Description of Artificial Sequence: Synthetic oligonucleotide
  Target: LAMA2; (+) strand; PAM type: YTN; PAM sequence: CTG
tcagacaagccccagtgagg

SEQ ID NO: 364011 - DNA, 20 bp, Artificial Sequence
  Description of Artificial Sequence: Synthetic oligonucleotide
  Target: LAMA2; (+) strand; PAM type: YTN; PAM sequence: CTG
gtacctcaattggaaatgtg

SEQ ID NO: 364012 - DNA, 20 bp, Artificial Sequence
  Description of Artificial Sequence: Synthetic oligonucleotide
  Target: LAMA2; (+) strand; PAM type: YTN; PAM sequence: CTC
aattggaaatgtggaagtca

SEQ ID NO: 364013 - DNA, 20 bp, Artificial Sequence
  Description of Artificial Sequence: Synthetic oligonucleotide
  Target: LAMA2; (+) strand; PAM type: YTN; PAM sequence: TTG
gaaatgtggaagtcacccat

SEQ ID NO: 364014 - DNA, 20 bp, Artificial Sequence
  Description of Artificial Sequence: Synthetic oligonucleotide
  Target: LAMA2; (+) strand; PAM type: YTN; PAM sequence: TTC
tgtgtcgctcatgctgggag

SEQ ID NO: 364015 - DNA, 20 bp, Artificial Sequence
  Description of Artificial Sequence: Synthetic oligonucleotide
  Target: LAMA2; (+) strand; PAM type: YTN; PAM sequence: CTG
tgtcgctcatgctgggagct

SEQ ID NO: 364016 - DNA, 20 bp, Artificial Sequence
  Description of Artificial Sequence: Synthetic oligonucleotide
  Target: LAMA2; (+) strand; PAM type: YTN; PAM sequence: CTC
atgctgggagctgtagactg

SEQ ID NO: 364017 - DNA, 20 bp, Artificial Sequence
  Description of Artificial Sequence: Synthetic oligonucleotide
  Target: LAMA2; (+) strand; PAM type: YTN; PAM sequence: CTG
ggagctgtagactggagctg

SEQ ID NO: 364018 - DNA, 20 bp, Artificial Sequence
  Description of Artificial Sequence: Synthetic oligonucleotide
  Target: LAMA2; (+) strand; PAM type: YTN; PAM sequence: CTG
tagactggagctgttcctat

SEQ ID NO: 364019 - DNA, 20 bp, Artificial Sequence
  Description of Artificial Sequence: Synthetic oligonucleotide
  Target: LAMA2; (+) strand; PAM type: YTN; PAM sequence: CTG
gagctgttcctattccaatt

SEQ ID NO: 364020 - DNA, 20 bp, Artificial Sequence
  Description of Artificial Sequence: Synthetic oligonucleotide
  Target: LAMA2; (+) strand; PAM type: YTN; PAM sequence: CTG
ttcctattccaattatactg

SEQ ID NO: 364021 - DNA, 20 bp, Artificial Sequence
  Description of Artificial Sequence: Synthetic oligonucleotide
  Target: LAMA2; (+) strand; PAM type: YTN; PAM sequence: TTC
ctattccaattatactggtt

SEQ ID NO: 364022 - DNA, 20 bp, Artificial Sequence
  Description of Artificial Sequence: Synthetic oligonucleotide
  Target: LAMA2; (+) strand; PAM type: YTN; PAM sequence: CTA
ttccaattatactggtttct

SEQ ID NO: 364023 - DNA, 20 bp, Artificial Sequence
  Description of Artificial Sequence: Synthetic oligonucleotide
  Target: LAMA2; (+) strand; PAM type: YTN; PAM sequence: TTC
caattatactggtttctaaa

SEQ ID NO: 364024 - DNA, 20 bp, Artificial Sequence
  Description of Artificial Sequence: Synthetic oligonucleotide
  Target: LAMA2; (+) strand; PAM type: YTN; PAM sequence: TTA
tactggtttctaaaaaagat

SEQ ID NO: 364025 - DNA, 20 bp, Artificial Sequence
  Description of Artificial Sequence: Synthetic oligonucleotide
  Target: LAMA2; (+) strand; PAM type: YTN; PAM sequence: CTG
gtttctaaaaaagattgtaa

SEQ ID NO: 364026 - DNA, 20 bp, Artificial Sequence
  Description of Artificial Sequence: Synthetic oligonucleotide
  Target: LAMA2; (+) strand; PAM type: YTN; PAM sequence: TTT
ctaaaaaagattgtaatata

SEQ ID NO: 364027 - DNA, 20 bp, Artificial Sequence
  Description of Artificial Sequence: Synthetic oligonucleotide
  Target: LAMA2; (+) strand; PAM type: YTN; PAM sequence: TTC
taaaaaagattgtaatatat

SEQ ID NO: 364028 - DNA, 20 bp, Artificial Sequence
  Description of Artificial Sequence: Synthetic oligonucleotide
  Target: LAMA2; (+) strand; PAM type: YTN; PAM sequence: CTA
aaaaagattgtaatatattg

SEQ ID NO: 364029 - DNA, 20 bp, Artificial Sequence
  Description of Artificial Sequence: Synthetic oligonucleotide
  Target: LAMA2; (+) strand; PAM type: YTN; PAM sequence: TTG
taatatattgttgagagtga

SEQ ID NO: 364030 - DNA, 20 bp, Artificial Sequence
  Description of Artificial Sequence: Synthetic oligonucleotide
  Target: LAMA2; (+) strand; PAM type: YTN; PAM sequence: TTG
ttgagagtgaagggagtttt

SEQ ID NO: 364031 - DNA, 20 bp, Artificial Sequence
  Description of Artificial Sequence: Synthetic oligonucleotide
  Target: LAMA2; (+) strand; PAM type: YTN; PAM sequence: TTG
agagtgaagggagttttata

SEQ ID NO: 364032 - DNA, 20 bp, Artificial Sequence
  Description of Artificial Sequence: Synthetic oligonucleotide
  Target: LAMA2; (+) strand; PAM type: YTN; PAM sequence: TTT
tatatcaataattaaattat

SEQ ID NO: 364033 - DNA, 20 bp, Artificial Sequence
  Description of Artificial Sequence: Synthetic oligonucleotide
  Target: LAMA2; (+) strand; PAM type: YTN; PAM sequence: TTT
atatcaataattaaattatt

SEQ ID NO: 364034 - DNA, 20 bp, Artificial Sequence
  Description of Artificial Sequence: Synthetic oligonucleotide
  Target: LAMA2; (+) strand; PAM type: YTN; PAM sequence: TTA
tatcaataattaaattattt

SEQ ID NO: 364035 - DNA, 20 bp, Artificial Sequence
  Description of Artificial Sequence: Synthetic oligonucleotide
  Target: LAMA2; (+) strand; PAM type: YTN; PAM sequence: TTA
aattattttaaaatattgtt

SEQ ID NO: 364036 - DNA, 20 bp, Artificial Sequence
  Description of Artificial Sequence: Synthetic oligonucleotide
  Target: LAMA2; (+) strand; PAM type: YTN; PAM sequence: TTA
ttttaaaatattgtttattt

SEQ ID NO: 364037 - DNA, 20 bp, Artificial Sequence
  Description of Artificial Sequence: Synthetic oligonucleotide
  Target: LAMA2; (+) strand; PAM type: YTN; PAM sequence: TTT
taaaatattgtttatttcat

SEQ ID NO: 364038 - DNA, 20 bp, Artificial Sequence
  Description of Artificial Sequence: Synthetic oligonucleotide
  Target: LAMA2; (+) strand; PAM type: YTN; PAM sequence: TTT
aaaatattgtttatttcatt

SEQ ID NO: 364039 - DNA, 20 bp, Artificial Sequence
  Description of Artificial Sequence: Synthetic oligonucleotide
  Target: LAMA2; (+) strand; PAM type: YTN; PAM sequence: TTA
aaatattgtttatttcattt

SEQ ID NO: 364040 - DNA, 20 bp, Artificial Sequence
  Description of Artificial Sequence: Synthetic oligonucleotide
  Target: LAMA2; (+) strand; PAM type: YTN; PAM sequence: TTG
tttatttcatttctcatact

SEQ ID NO: 364041 - DNA, 20 bp, Artificial Sequence
  Description of Artificial Sequence: Synthetic oligonucleotide
  Target: LAMA2; (+) strand; PAM type: YTN; PAM sequence: TTT
atttcatttctcatacttca

SEQ ID NO: 364042 - DNA, 20 bp, Artificial Sequence
  Description of Artificial Sequence: Synthetic oligonucleotide
  Target: LAMA2; (+) strand; PAM type: YTN; PAM sequence: TTA
tttcatttctcatacttcaa

SEQ ID NO: 364043 - DNA, 20 bp, Artificial Sequence
  Description of Artificial Sequence: Synthetic oligonucleotide
  Target: LAMA2; (+) strand; PAM type: YTN; PAM sequence: TTT
catttctcatacttcaaatt

SEQ ID NO: 364044 - DNA, 20 bp, Artificial Sequence
  Description of Artificial Sequence: Synthetic oligonucleotide
  Target: LAMA2; (+) strand; PAM type: YTN; PAM sequence: TTC
atttctcatacttcaaatta

SEQ ID NO: 364045 - DNA, 20 bp, Artificial Sequence
  Description of Artificial Sequence: Synthetic oligonucleotide
  Target: LAMA2; (+) strand; PAM type: YTN; PAM sequence: TTT
ctcatacttcaaattactta

SEQ ID NO: 364046 - DNA, 20 bp, Artificial Sequence
  Description of Artificial Sequence: Synthetic oligonucleotide
  Target: LAMA2; (+) strand; PAM type: YTN; PAM sequence: TTC
tcatacttcaaattacttat

SEQ ID NO: 364047 - DNA, 20 bp, Artificial Sequence
  Description of Artificial Sequence: Synthetic oligonucleotide
  Target: LAMA2; (+) strand; PAM type: YTN; PAM sequence: CTC
atacttcaaattacttattt

SEQ ID NO: 364048 - DNA, 20 bp, Artificial Sequence
  Description of Artificial Sequence: Synthetic oligonucleotide
  Target: LAMA2; (+) strand; PAM type: YTN; PAM sequence: CTT
caaattacttatttacattt

SEQ ID NO: 364049 - DNA, 20 bp, Artificial Sequence
  Description of Artificial Sequence: Synthetic oligonucleotide
  Target: LAMA2; (+) strand; PAM type: YTN; PAM sequence: TTC
aaattacttatttacatttt

SEQ ID NO: 364050 - DNA, 20 bp, Artificial Sequence
  Description of Artificial Sequence: Synthetic oligonucleotide
  Target: LAMA2; (+) strand; PAM type: YTN; PAM sequence: TTA
cttatttacattttaataat

SEQ ID NO: 364051 - DNA, 20 bp, Artificial Sequence
  Description of Artificial Sequence: Synthetic oligonucleotide
  Target: LAMA2; (+) strand; PAM type: YTN; PAM sequence: CTT
atttacattttaataatata

SEQ ID NO: 364052 - DNA, 20 bp, Artificial Sequence
  Description of Artificial Sequence: Synthetic oligonucleotide
  Target: LAMA2; (+) strand; PAM type: YTN; PAM sequence: TTA
tttacattttaataatatat

SEQ ID NO: 364053 - DNA, 20 bp, Artificial Sequence
  Description of Artificial Sequence: Synthetic oligonucleotide
  Target: LAMA2; (+) strand; PAM type: YTN; PAM sequence: TTT
acattttaataatatattag

SEQ ID NO: 364054 - DNA, 20 bp, Artificial Sequence
  Description of Artificial Sequence: Synthetic oligonucleotide
  Target: LAMA2; (+) strand; PAM type: YTN; PAM sequence: TTA
cattttaataatatattagt

SEQ ID NO: 364055 - DNA, 20 bp, Artificial Sequence
  Description of Artificial Sequence: Synthetic oligonucleotide
  Target: LAMA2; (+) strand; PAM type: YTN; PAM sequence: TTT
taataatatattagtatcat

SEQ ID NO: 364056 - DNA, 20 bp, Artificial Sequence
  Description of Artificial Sequence: Synthetic oligonucleotide
  Target: LAMA2; (+) strand; PAM type: YTN; PAM sequence: TTT
aataatatattagtatcata

SEQ ID NO: 364057 - DNA, 20 bp, Artificial Sequence
  Description of Artificial Sequence: Synthetic oligonucleotide
  Target: LAMA2; (+) strand; PAM type: YTN; PAM sequence: TTA
ataatatattagtatcataa

SEQ ID NO: 364058 - DNA, 20 bp, Artificial Sequence
  Description of Artificial Sequence: Synthetic oligonucleotide
  Target: LAMA2; (+) strand; PAM type: YTN; PAM sequence: TTA
gtatcataacacatgtgtat

SEQ ID NO: 364059 - DNA, 20 bp, Artificial Sequence
  Description of Artificial Sequence: Synthetic oligonucleotide
  Target: LAMA2; (+) strand; PAM type: YTN; PAM sequence: CTA
gaaagagagagcatatatac

SEQ ID NO: 364060 - DNA, 20 bp, Artificial Sequence
  Description of Artificial Sequence: Synthetic oligonucleotide
  Target: LAMA2; (+) strand; PAM type: YTN; PAM sequence: CTG
aaggcatttttaattataat

SEQ ID NO: 364061 - DNA, 20 bp, Artificial Sequence
  Description of Artificial Sequence: Synthetic oligonucleotide
  Target: LAMA2; (+) strand; PAM type: YTN; PAM sequence: TTT
ttaattataatattgtaaaa

SEQ ID NO: 364062 - DNA, 20 bp, Artificial Sequence
  Description of Artificial Sequence: Synthetic oligonucleotide
  Target: LAMA2; (+) strand; PAM type: YTN; PAM sequence: TTT
taattataatattgtaaaac

SEQ ID NO: 364063 - DNA, 20 bp, Artificial Sequence
  Description of Artificial Sequence: Synthetic oligonucleotide
  Target: LAMA2; (+) strand; PAM type: YTN; PAM sequence: TTT
aattataatattgtaaaacc

SEQ ID NO: 364064 - DNA, 20 bp, Artificial Sequence
  Description of Artificial Sequence: Synthetic oligonucleotide
  Target: LAMA2; (+) strand; PAM type: YTN; PAM sequence: TTA
attataatattgtaaaacca

SEQ ID NO: 364065 - DNA, 20 bp, Artificial Sequence
  Description of Artificial Sequence: Synthetic oligonucleotide
  Target: LAMA2; (+) strand; PAM type: YTN; PAM sequence: TTA
taatattgtaaaaccaaact

SEQ ID NO: 364066 - DNA, 20 bp, Artificial Sequence
  Description of Artificial Sequence: Synthetic oligonucleotide
  Target: LAMA2; (+) strand; PAM type: YTN; PAM sequence: TTG
taaaaccaaactctaaagac

SEQ ID NO: 364067 - DNA, 20 bp, Artificial Sequence
  Description of Artificial Sequence: Synthetic oligonucleotide
  Target: LAMA2; (+) strand; PAM type: YTN; PAM sequence: CTC
taaagactcctgttctaggt

SEQ ID NO: 364068 - DNA, 20 bp, Artificial Sequence
  Description of Artificial Sequence: Synthetic oligonucleotide
  Target: LAMA2; (+) strand; PAM type: YTN; PAM sequence: CTA
aagactcctgttctaggtaa

SEQ ID NO: 364069 - DNA, 20 bp, Artificial Sequence
  Description of Artificial Sequence: Synthetic oligonucleotide
  Target: LAMA2; (+) strand; PAM type: YTN; PAM sequence: CTC
ctgttctaggtaattgatta

SEQ ID NO: 364070 - DNA, 20 bp, Artificial Sequence
  Description of Artificial Sequence: Synthetic oligonucleotide
  Target: LAMA2; (+) strand; PAM type: YTN; PAM sequence: CTG
ttctaggtaattgattagtc

SEQ ID NO: 364071 - DNA, 20 bp, Artificial Sequence
  Description of Artificial Sequence: Synthetic oligonucleotide
  Target: LAMA2; (+) strand; PAM type: YTN; PAM sequence: TTC
taggtaattgattagtccag

SEQ ID NO: 364072 - DNA, 20 bp, Artificial Sequence
  Description of Artificial Sequence: Synthetic oligonucleotide
  Target: LAMA2; (+) strand; PAM type: YTN; PAM sequence: CTA
ggtaattgattagtccagta

SEQ ID NO: 364073 - DNA, 20 bp, Artificial Sequence
  Description of Artificial Sequence: Synthetic oligonucleotide
  Target: LAMA2; (+) strand; PAM type: YTN; PAM sequence: TTG
attagtccagtaaatgtagg

SEQ ID NO: 364074 - DNA, 20 bp, Artificial Sequence
  Description of Artificial Sequence: Synthetic oligonucleotide
  Target: LAMA2; (+) strand; PAM type: YTN; PAM sequence: TTA
gtccagtaaatgtaggcata

SEQ ID NO: 364075 - DNA, 20 bp, Artificial Sequence
  Description of Artificial Sequence: Synthetic oligonucleotide
  Target: LAMA2; (+) strand; PAM type: YTN; PAM sequence: TTA
atctttcatgcacaataaca

SEQ ID NO: 364076 - DNA, 20 bp, Artificial Sequence
  Description of Artificial Sequence: Synthetic oligonucleotide
  Target: LAMA2; (+) strand; PAM type: YTN; PAM sequence: CTT
tcatgcacaataacaccttt

SEQ ID NO: 364077 - DNA, 20 bp, Artificial Sequence
  Description of Artificial Sequence: Synthetic oligonucleotide
  Target: LAMA2; (+) strand; PAM type: YTN; PAM sequence: TTT
catgcacaataacacctttc

SEQ ID NO: 364078 - DNA, 20 bp, Artificial Sequence
  Description of Artificial Sequence: Synthetic oligonucleotide
  Target: LAMA2; (+) strand; PAM type: YTN; PAM sequence: TTC
atgcacaataacacctttct

SEQ ID NO: 364079 - DNA, 20 bp, Artificial Sequence
  Description of Artificial Sequence: Synthetic oligonucleotide
  Target: LAMA2; (+) strand; PAM type: YTN; PAM sequence: CTT
tctccagctgtggctctaac

SEQ ID NO: 364080 - DNA, 20 bp, Artificial Sequence
  Description of Artificial Sequence: Synthetic oligonucleotide
  Target: LAMA2; (+) strand; PAM type: YTN; PAM sequence: TTT
ctccagctgtggctctaact

SEQ ID NO: 364081 - DNA, 20 bp, Artificial Sequence
  Description of Artificial Sequence: Synthetic oligonucleotide
  Target: LAMA2; (+) strand; PAM type: YTN; PAM sequence: TTC
tccagctgtggctctaactg

SEQ ID NO: 364082 - DNA, 20 bp, Artificial Sequence
  Description of Artificial Sequence: Synthetic oligonucleotide
  Target: LAMA2; (+) strand; PAM type: YTN; PAM sequence: CTC
cagctgtggctctaactgtc

SEQ ID NO: 364083 - DNA, 20 bp, Artificial Sequence
  Description of Artificial Sequence: Synthetic oligonucleotide
  Target: LAMA2; (+) strand; PAM type: YTN; PAM sequence: CTG
tggctctaactgtcctgatg

SEQ ID NO: 364084 - DNA, 20 bp, Artificial Sequence
  Description of Artificial Sequence: Synthetic oligonucleotide
  Target: LAMA2; (+) strand; PAM type: YTN; PAM sequence: CTC
taactgtcctgatggattct

SEQ ID NO: 364085 - DNA, 20 bp, Artificial Sequence
  Description of Artificial Sequence: Synthetic oligonucleotide
  Target: LAMA2; (+) strand; PAM type: YTN; PAM sequence: CTA
actgtcctgatggattcttt

SEQ ID NO: 364086 - DNA, 20 bp, Artificial Sequence
  Description of Artificial Sequence: Synthetic oligonucleotide
  Target: LAMA2; (+) strand; PAM type: YTN; PAM sequence: CTG
tcctgatggattctttactg

SEQ ID NO: 364087 - DNA, 20 bp, Artificial Sequence
  Description of Artificial Sequence: Synthetic oligonucleotide
  Target: LAMA2; (+) strand; PAM type: YTN; PAM sequence: CTG
atggattctttactgctctc

SEQ ID NO: 364088 - DNA, 20 bp, Artificial Sequence
  Description of Artificial Sequence: Synthetic oligonucleotide
  Target: LAMA2; (+) strand; PAM type: YTN; PAM sequence: TTC
tttactgctctcagctaatc

SEQ ID NO: 364089 - DNA, 20 bp, Artificial Sequence
  Description of Artificial Sequence: Synthetic oligonucleotide
  Target: LAMA2; (+) strand; PAM type: YTN; PAM sequence: CTT
tactgctctcagctaatcca

SEQ ID NO: 364090 - DNA, 20 bp, Artificial Sequence
  Description of Artificial Sequence: Synthetic oligonucleotide
  Target: LAMA2; (+) strand; PAM type: YTN; PAM sequence: TTT
actgctctcagctaatccat

SEQ ID NO: 364091 - DNA, 20 bp, Artificial Sequence
  Description of Artificial Sequence: Synthetic oligonucleotide
  Target: LAMA2; (+) strand; PAM type: YTN; PAM sequence: TTA
ctgctctcagctaatccatt

SEQ ID NO: 364092 - DNA, 20 bp, Artificial Sequence
  Description of Artificial Sequence: Synthetic oligonucleotide
  Target: LAMA2; (+) strand; PAM type: YTN; PAM sequence: CTG
ctctcagctaatccattata

SEQ ID NO: 364093 - DNA, 20 bp, Artificial Sequence
  Description of Artificial Sequence: Synthetic oligonucleotide
  Target: LAMA2; (+) strand; PAM type: YTN; PAM sequence: CTC
tcagctaatccattatatgg

SEQ ID NO: 364094 - DNA, 20 bp, Artificial Sequence
  Description of Artificial Sequence: Synthetic oligonucleotide
  Target: LAMA2; (+) strand; PAM type: YTN; PAM sequence: CTC
agctaatccattatatggtt

SEQ ID NO: 364095 - DNA, 20 bp, Artificial Sequence
  Description of Artificial Sequence: Synthetic oligonucleotide
  Target: LAMA2; (+) strand; PAM type: YTN; PAM sequence: CTA
atccattatatggttttaga

SEQ ID NO: 364096 - DNA, 20 bp, Artificial Sequence
  Description of Artificial Sequence: Synthetic oligonucleotide
  Target: LAMA2; (+) strand; PAM type: YTN; PAM sequence: TTA
tatggttttagacatccagg

SEQ ID NO: 364097 - DNA, 20 bp, Artificial Sequence
  Description of Artificial Sequence: Synthetic oligonucleotide
  Target: LAMA2; (+) strand; PAM type: YTN; PAM sequence: TTT
tagacatccaggatagacac

SEQ ID NO: 364098 - DNA, 20 bp, Artificial Sequence
  Description of Artificial Sequence: Synthetic oligonucleotide
  Target: LAMA2; (+) strand; PAM type: YTN; PAM sequence: TTT
agacatccaggatagacact

SEQ ID NO: 364099 - DNA, 20 bp, Artificial Sequence
  Description of Artificial Sequence: Synthetic oligonucleotide
  Target: LAMA2; (+) strand; PAM type: YTN; PAM sequence: TTA
gacatccaggatagacactg

SEQ ID NO: 364100 - DNA, 20 bp, Artificial Sequence
  Description of Artificial Sequence: Synthetic oligonucleotide
  Target: LAMA2; (+) strand; PAM type: YTN; PAM sequence: CTG
aaaggaataactattacaaa

SEQ ID NO: 364101 - DNA, 20 bp, Artificial Sequence
  Description of Artificial Sequence: Synthetic oligonucleotide
  Target: LAMA2; (+) strand; PAM type: YTN; PAM sequence: CTA
ttacaaaagtaattttaaga

SEQ ID NO: 364102 - DNA, 20 bp, Artificial Sequence
  Description of Artificial Sequence: Synthetic oligonucleotide
  Target: LAMA2; (+) strand; PAM type: YTN; PAM sequence: TTA
caaaagtaattttaagagga

SEQ ID NO: 364103 - DNA, 20 bp, Artificial Sequence
  Description of Artificial Sequence: Synthetic oligonucleotide
  Target: LAMA2; (+) strand; PAM type: YTN; PAM sequence: TTT
taagaggagcatttgattga

SEQ ID NO: 364104 - DNA, 20 bp, Artificial Sequence
  Description of Artificial Sequence: Synthetic oligonucleotide
  Target: LAMA2; (+) strand; PAM type: YTN; PAM sequence: TTT
aagaggagcatttgattgac

SEQ ID NO: 364105 - DNA, 20 bp, Artificial Sequence
  Description of Artificial Sequence: Synthetic oligonucleotide
  Target: LAMA2; (+) strand; PAM type: YTN; PAM sequence: TTA
agaggagcatttgattgact

SEQ ID NO: 364106 - DNA, 20 bp, Artificial Sequence
  Description of Artificial Sequence: Synthetic oligonucleotide
  Target: LAMA2; (+) strand; PAM type: YTN; PAM sequence: TTT
gattgactgatgctcctctt

SEQ ID NO: 364107 - DNA, 20 bp, Artificial Sequence
  Description of Artificial Sequence: Synthetic oligonucleotide
  Target: LAMA2; (+) strand; PAM type: YTN; PAM sequence: TTG
attgactgatgctcctctta

SEQ ID NO: 364108 - DNA, 20 bp, Artificial Sequence
  Description of Artificial Sequence: Synthetic oligonucleotide
  Target: LAMA2; (+) strand; PAM type: YTN; PAM sequence: TTG
actgatgctcctcttatgta

SEQ ID NO: 364109 - DNA, 20 bp, Artificial Sequence
  Description of Artificial Sequence: Synthetic oligonucleotide
  Target: LAMA2; (+) strand; PAM type: YTN; PAM sequence: CTG
atgctcctcttatgtattca

SEQ ID NO: 364110 - DNA, 20 bp, Artificial Sequence
  Description of Artificial Sequence: Synthetic oligonucleotide
  Target: LAMA2; (+) strand; PAM type: YTN; PAM sequence: CTC
ctcttatgtattcattgtgt

SEQ ID NO: 364111 - DNA, 20 bp, Artificial Sequence
  Description of Artificial Sequence: Synthetic oligonucleotide
  Target: LAMA2; (+) strand; PAM type: YTN; PAM sequence: CTC
ttatgtattcattgtgtgta

SEQ ID NO: 364112 - DNA, 20 bp, Artificial Sequence
  Description of Artificial Sequence: Synthetic oligonucleotide
  Target: LAMA2; (+) strand; PAM type: YTN; PAM sequence: CTT
atgtattcattgtgtgtatg

SEQ ID NO: 364113 - DNA, 20 bp, Artificial Sequence
  Description of Artificial Sequence: Synthetic oligonucleotide
  Target: LAMA2; (+) strand; PAM type: YTN; PAM sequence: TTA
tgtattcattgtgtgtatgt

SEQ ID NO: 364114 - DNA, 20 bp, Artificial Sequence
  Description of Artificial Sequence: Synthetic oligonucleotide
  Target: LAMA2; (+) strand; PAM type: YTN; PAM sequence: TTC
attgtgtgtatgtattgaat

SEQ ID NO: 364115 - DNA, 20 bp, Artificial Sequence
  Description of Artificial Sequence: Synthetic oligonucleotide
  Target: LAMA2; (+) strand; PAM type: YTN; PAM sequence: TTG
tgtgtatgtattgaatttgt

SEQ ID NO: 364116 - DNA, 20 bp, Artificial Sequence
  Description of Artificial Sequence: Synthetic oligonucleotide
  Target: LAMA2; (+) strand; PAM type: YTN; PAM sequence: TTG
aatttgtgtattcattgtat

SEQ ID NO: 364117 - DNA, 20 bp, Artificial Sequence
  Description of Artificial Sequence: Synthetic oligonucleotide
  Target: LAMA2; (+) strand; PAM type: YTN; PAM sequence: TTT
gtgtattcattgtatgtatt

SEQ ID NO: 364118 - DNA, 20 bp, Artificial Sequence
  Description of Artificial Sequence: Synthetic oligonucleotide
  Target: LAMA2; (+) strand; PAM type: YTN; PAM sequence: TTG
tgtattcattgtatgtattc

SEQ ID NO: 364119 - DNA, 20 bp, Artificial Sequence
  Description of Artificial Sequence: Synthetic oligonucleotide
  Target: LAMA2; (+) strand; PAM type: YTN; PAM sequence: TTC
attgtatgtattcaatattc

SEQ ID NO: 364120 - DNA, 20 bp, Artificial Sequence
  Description of Artificial Sequence: Synthetic oligonucleotide
  Target: LAMA2; (+) strand; PAM type: YTN; PAM sequence: TTG
tatgtattcaatattcaatg

SEQ ID NO: 364121 - DNA, 20 bp, Artificial Sequence
  Description of Artificial Sequence: Synthetic oligonucleotide
  Target: LAMA2; (+) strand; PAM type: YTN; PAM sequence: TTC
aatattcaatgtatgtattc

SEQ ID NO: 364122 - DNA, 20 bp, Artificial Sequence
  Description of Artificial Sequence: Synthetic oligonucleotide
  Target: LAMA2; (+) strand; PAM type: YTN; PAM sequence: TTC
aatgtatgtattcattgatc

SEQ ID NO: 364123 - DNA, 20 bp, Artificial Sequence
  Description of Artificial Sequence: Synthetic oligonucleotide
  Target: LAMA2; (+) strand; PAM type: YTN; PAM sequence: TTC
attgatcctgcatatacttg

SEQ ID NO: 364124 - DNA, 20 bp, Artificial Sequence
  Description of Artificial Sequence: Synthetic oligonucleotide
  Target: LAMA2; (+) strand; PAM type: YTN; PAM sequence: TTG
atcctgcatatacttgatga

SEQ ID NO: 364125 - DNA, 20 bp, Artificial Sequence
  Description of Artificial Sequence: Synthetic oligonucleotide
  Target: LAMA2; (+) strand; PAM type: YTN; PAM sequence: CTG
catatacttgatgatttgat

SEQ ID NO: 364126 - DNA, 20 bp, Artificial Sequence
  Description of Artificial Sequence: Synthetic oligonucleotide
  Target: LAMA2; (+) strand; PAM type: YTN; PAM sequence: CTT
gatgatttgattggtggttt

SEQ ID NO: 364127 - DNA, 20 bp, Artificial Sequence
  Description of Artificial Sequence: Synthetic oligonucleotide
  Target: LAMA2; (+) strand; PAM type: YTN; PAM sequence: TTG
atgatttgattggtggtttg

SEQ ID NO: 364128 - DNA, 20 bp, Artificial Sequence
  Description of Artificial Sequence: Synthetic oligonucleotide
  Target: LAMA2; (+) strand; PAM type: YTN; PAM sequence: TTT
gattggtggtttgattccag

SEQ ID NO: 364129 - DNA, 20 bp, Artificial Sequence
  Description of Artificial Sequence: Synthetic oligonucleotide
  Target: LAMA2; (+) strand; PAM type: YTN; PAM sequence: TTG
attggtggtttgattccagt

SEQ ID NO: 364130 - DNA, 20 bp, Artificial Sequence
  Description of Artificial Sequence: Synthetic oligonucleotide
  Target: LAMA2; (+) strand; PAM type: YTN; PAM sequence: TTG
gtggtttgattccagttata

SEQ ID NO: 364131 - DNA, 20 bp, Artificial Sequence
  Description of Artificial Sequence: Synthetic oligonucleotide
  Target: LAMA2; (+) strand; PAM type: YTN; PAM sequence: TTT
gattccagttatattaactt

SEQ ID NO: 364132 - DNA, 20 bp, Artificial Sequence
  Description of Artificial Sequence: Synthetic oligonucleotide
  Target: LAMA2; (+) strand; PAM type: YTN; PAM sequence: TTG
attccagttatattaacttg

SEQ ID NO: 364133 - DNA, 20 bp, Artificial Sequence
  Description of Artificial Sequence: Synthetic oligonucleotide
  Target: LAMA2; (+) strand; PAM type: YTN; PAM sequence: TTC
cagttatattaacttgccag

SEQ ID NO: 364134 - DNA, 20 bp, Artificial Sequence
  Description of Artificial Sequence: Synthetic oligonucleotide
  Target: LAMA2; (+) strand; PAM type: YTN; PAM sequence: TTA
tattaacttgccagaaactt

SEQ ID NO: 364135 - DNA, 20 bp, Artificial Sequence
  Description of Artificial Sequence: Synthetic oligonucleotide
  Target: LAMA2; (+) strand; PAM type: YTN; PAM sequence: TTA
acttgccagaaactttctag

SEQ ID NO: 364136 - DNA, 20 bp, Artificial Sequence
  Description of Artificial Sequence: Synthetic oligonucleotide
  Target: LAMA2; (+) strand; PAM type: YTN; PAM sequence: CTT
gccagaaactttctagtttc

SEQ ID NO: 364137 - DNA, 20 bp, Artificial Sequence
  Description of Artificial Sequence: Synthetic oligonucleotide
  Target: LAMA2; (+) strand; PAM type: YTN; PAM sequence: TTG
ccagaaactttctagtttcc

SEQ ID NO: 364138 - DNA, 20 bp, Artificial Sequence
  Description of Artificial Sequence: Synthetic oligonucleotide
  Target: LAMA2; (+) strand; PAM type: YTN; PAM sequence: CTT
tctagtttccaaacagtgaa

SEQ ID NO: 364139 - DNA, 20 bp, Artificial Sequence
  Description of Artificial Sequence: Synthetic oligonucleotide
  Target: LAMA2; (+) strand; PAM type: YTN; PAM sequence: TTT
ctagtttccaaacagtgaat

SEQ ID NO: 364140 - DNA, 20 bp, Artificial Sequence
  Description of Artificial Sequence: Synthetic oligonucleotide
  Target: LAMA2; (+) strand; PAM type: YTN; PAM sequence: TTC
tagtttccaaacagtgaata

SEQ ID NO: 364141 - DNA, 20 bp, Artificial Sequence
  Description of Artificial Sequence: Synthetic oligonucleotide
  Target: LAMA2; (+) strand; PAM type: YTN; PAM sequence: CTA
gtttccaaacagtgaataca

SEQ ID NO: 364142 - DNA, 20 bp, Artificial Sequence
  Description of Artificial Sequence: Synthetic oligonucleotide
  Target: LAMA2; (+) strand; PAM type: YTN; PAM sequence: TTT
ccaaacagtgaatacaactt

SEQ ID NO: 364143 - DNA, 20 bp, Artificial Sequence
  Description of Artificial Sequence: Synthetic oligonucleotide
  Target: LAMA2; (+) strand; PAM type: YTN; PAM sequence: TTC
caaacagtgaatacaactta

SEQ ID NO: 364144 - DNA, 20 bp, Artificial Sequence
  Description of Artificial Sequence: Synthetic oligonucleotide
  Target: LAMA2; (+) strand; PAM type: YTN; PAM sequence: CTT
agacctcatgaagcttacat

SEQ ID NO: 364145 - DNA, 20 bp, Artificial Sequence
  Description of Artificial Sequence: Synthetic oligonucleotide
  Target: LAMA2; (+) strand; PAM type: YTN; PAM sequence: TTA
gacctcatgaagcttacatt

SEQ ID NO: 364146 - DNA, 20 bp, Artificial Sequence
  Description of Artificial Sequence: Synthetic oligonucleotide
  Target: LAMA2; (+) strand; PAM type: YTN; PAM sequence: CTC
atgaagcttacattctagtt

SEQ ID NO: 364147 - DNA, 20 bp, Artificial Sequence
  Description of Artificial Sequence: Synthetic oligonucleotide
  Target: LAMA2; (+) strand; PAM type: YTN; PAM sequence: CTT
acattctagttagaagagag

SEQ ID NO: 364148 - DNA, 20 bp, Artificial Sequence
  Description of Artificial Sequence: Synthetic oligonucleotide
  Target: LAMA2; (+) strand; PAM type: YTN; PAM sequence: TTA
cattctagttagaagagaga

SEQ ID NO: 364149 - DNA, 20 bp, Artificial Sequence
  Description of Artificial Sequence: Synthetic oligonucleotide
  Target: LAMA2; (+) strand; PAM type: YTN; PAM sequence: TTC
tagttagaagagagaatatt

SEQ ID NO: 364150 - DNA, 20 bp, Artificial Sequence
  Description of Artificial Sequence: Synthetic oligonucleotide
  Target: LAMA2; (+) strand; PAM type: YTN; PAM sequence: CTA
gttagaagagagaatattaa

SEQ ID NO: 364151 - DNA, 20 bp, Artificial Sequence
  Description of Artificial Sequence: Synthetic oligonucleotide
  Target: LAMA2; (+) strand; PAM type: YTN; PAM sequence: TTA
gaagagagaatattaattag

SEQ ID NO: 364152 - DNA, 20 bp, Artificial Sequence
  Description of Artificial Sequence: Synthetic oligonucleotide
  Target: LAMA2; (+) strand; PAM type: YTN; PAM sequence: TTA
attagataagcacataaaat

SEQ ID NO: 364153 - DNA, 20 bp, Artificial Sequence
  Description of Artificial Sequence: Synthetic oligonucleotide
  Target: LAMA2; (+) strand; PAM type: YTN; PAM sequence: TTA
gataagcacataaaatatac

SEQ ID NO: 364154 - DNA, 20 bp, Artificial Sequence
  Description of Artificial Sequence: Synthetic oligonucleotide
  Target: LAMA2; (+) strand; PAM type: YTN; PAM sequence: TTA
gatagtgataaatgacaaga

SEQ ID NO: 364155 - DNA, 20 bp, Artificial Sequence
  Description of Artificial Sequence: Synthetic oligonucleotide
  Target: LAMA2; (+) strand; PAM type: YTN; PAM sequence: CTA
ggaaggatgatagtggttga

SEQ ID NO: 364156 - DNA, 20 bp, Artificial Sequence
  Description of Artificial Sequence: Synthetic oligonucleotide
  Target: LAMA2; (+) strand; PAM type: YTN; PAM sequence: TTG
aatagactttaattttatat

SEQ ID NO: 364157 - DNA, 20 bp, Artificial Sequence
  Description of Artificial Sequence: Synthetic oligonucleotide
  Target: LAMA2; (+) strand; PAM type: YTN; PAM sequence: CTT
taattttatatagaatatta

SEQ ID NO: 364158 - DNA, 20 bp, Artificial Sequence
  Description of Artificial Sequence: Synthetic oligonucleotide
  Target: LAMA2; (+) strand; PAM type: YTN; PAM sequence: TTT
aattttatatagaatattag

SEQ ID NO: 364159 - DNA, 20 bp, Artificial Sequence
  Description of Artificial Sequence: Synthetic oligonucleotide
  Target: LAMA2; (+) strand; PAM type: YTN; PAM sequence: TTA
attttatatagaatattagg

SEQ ID NO: 364160 - DNA, 20 bp, Artificial Sequence
  Description of Artificial Sequence: Synthetic oligonucleotide
  Target: LAMA2; (+) strand; PAM type: YTN; PAM sequence: TTT
tatatagaatattaggtcag

SEQ ID NO: 364161 - DNA, 20 bp, Artificial Sequence
  Description of Artificial Sequence: Synthetic oligonucleotide
  Target: LAMA2; (+) strand; PAM type: YTN; PAM sequence: TTT
atatagaatattaggtcaga

SEQ ID NO: 364162 - DNA, 20 bp, Artificial Sequence
  Description of Artificial Sequence: Synthetic oligonucleotide
  Target: LAMA2; (+) strand; PAM type: YTN; PAM sequence: TTA
tatagaatattaggtcagag

SEQ ID NO: 364163 - DNA, 20 bp, Artificial Sequence
  Description of Artificial Sequence: Synthetic oligonucleotide
  Target: LAMA2; (+) strand; PAM type: YTN; PAM sequence: TTA
ggtcagagatctgaaggtga

SEQ ID NO: 364164 - DNA, 20 bp, Artificial Sequence
  Description of Artificial Sequence: Synthetic oligonucleotide
  Target: LAMA2; (+) strand; PAM type: YTN; PAM sequence: CTG
aaggtgactaggaaaaagtt

SEQ ID NO: 364165 - DNA, 20 bp, Artificial Sequence
  Description of Artificial Sequence: Synthetic oligonucleotide
  Target: LAMA2; (+) strand; PAM type: YTN; PAM sequence: CTA
ggaaaaagttatgtgggtat

SEQ ID NO: 364166 - DNA, 20 bp, Artificial Sequence
  Description of Artificial Sequence: Synthetic oligonucleotide
  Target: LAMA2; (+) strand; PAM type: YTN; PAM sequence: TTA
tgtgggtatctggagcaaga

SEQ ID NO: 364167 - DNA, 20 bp, Artificial Sequence
  Description of Artificial Sequence: Synthetic oligonucleotide
  Target: LAMA2; (+) strand; PAM type: YTN; PAM sequence: CTG
gagcaagagcatcttaggac

SEQ ID NO: 364168 - DNA, 20 bp, Artificial Sequence
  Description of Artificial Sequence: Synthetic oligonucleotide
  Target: LAMA2; (+) strand; PAM type: YTN; PAM sequence: CTT
aggacaaagagaaagtaagt

SEQ ID NO: 364169 - DNA, 20 bp, Artificial Sequence
  Description of Artificial Sequence: Synthetic oligonucleotide
  Target: LAMA2; (+) strand; PAM type: YTN; PAM sequence: TTA
ggacaaagagaaagtaagtg

SEQ ID NO: 364170 - DNA, 20 bp, Artificial Sequence
  Description of Artificial Sequence: Synthetic oligonucleotide
  Target: LAMA2; (+) strand; PAM type: YTN; PAM sequence: CTA
agatatgaatgtggctggca

SEQ ID NO: 364171 - DNA, 20 bp, Artificial Sequence
  Description of Artificial Sequence: Synthetic oligonucleotide
  Target: LAMA2; (+) strand; PAM type: YTN; PAM sequence: CTG
gcatgttcaaagaccctcaa

SEQ ID NO: 364172 - DNA, 20 bp, Artificial Sequence
  Description of Artificial Sequence: Synthetic oligonucleotide
  Target: LAMA2; (+) strand; PAM type: YTN; PAM sequence: TTC
aaagaccctcaaggatgggg

SEQ ID NO: 364173 - DNA, 20 bp, Artificial Sequence
  Description of Artificial Sequence: Synthetic oligonucleotide
  Target: LAMA2; (+) strand; PAM type: YTN; PAM sequence: CTC
aaggatggggtaagagtggg

SEQ ID NO: 364174 - DNA, 20 bp, Artificial Sequence
  Description of Artificial Sequence: Synthetic oligonucleotide
  Target: LAMA2; (+) strand; PAM type: YTN; PAM sequence: TTG
aaggatatggggaaggggaa

SEQ ID NO: 364175 - DNA, 20 bp, Artificial Sequence
  Description of Artificial Sequence: Synthetic oligonucleotide
  Target: LAMA2; (+) strand; PAM type: YTN; PAM sequence: CTT
tggcacactgtagttaatgt

SEQ ID NO: 364176 - DNA, 20 bp, Artificial Sequence
  Description of Artificial Sequence: Synthetic oligonucleotide
  Target: LAMA2; (+) strand; PAM type: YTN; PAM sequence: TTT
ggcacactgtagttaatgtc

SEQ ID NO: 364177 - DNA, 20 bp, Artificial Sequence
  Description of Artificial Sequence: Synthetic oligonucleotide
  Target: LAMA2; (+) strand; PAM type: YTN; PAM sequence: TTG
gcacactgtagttaatgtct

SEQ ID NO: 364178 - DNA, 20 bp, Artificial Sequence
  Description of Artificial Sequence: Synthetic oligonucleotide
  Target: LAMA2; (+) strand; PAM type: YTN; PAM sequence: CTG
tagttaatgtcttcacattt

SEQ ID NO: 364179 - DNA, 20 bp, Artificial Sequence
  Description of Artificial Sequence: Synthetic oligonucleotide
  Target: LAMA2; (+) strand; PAM type: YTN; PAM sequence: TTA
atgtcttcacatttttcttg

SEQ ID NO: 364180 - DNA, 20 bp, Artificial Sequence
  Description of Artificial Sequence: Synthetic oligonucleotide
  Target: LAMA2; (+) strand; PAM type: YTN; PAM sequence: CTT
cacatttttcttgcaatgca

SEQ ID NO: 364181 - DNA, 20 bp, Artificial Sequence
  Description of Artificial Sequence: Synthetic oligonucleotide
  Target: LAMA2; (+) strand; PAM type: YTN; PAM sequence: TTC
acatttttcttgcaatgcaa

SEQ ID NO: 364182 - DNA, 20 bp, Artificial Sequence
  Description of Artificial Sequence: Synthetic oligonucleotide
  Target: LAMA2; (+) strand; PAM type: YTN; PAM sequence: TTT
ttcttgcaatgcaatgagaa

SEQ ID NO: 364183 - DNA, 20 bp, Artificial Sequence
  Description of Artificial Sequence: Synthetic oligonucleotide
  Target: LAMA2; (+) strand; PAM type: YTN; PAM sequence: TTT
tcttgcaatgcaatgagaaa

SEQ ID NO: 364184 - DNA, 20 bp, Artificial Sequence
  Description of Artificial Sequence: Synthetic oligonucleotide
  Target: LAMA2; (+) strand; PAM type: YTN; PAM sequence: TTT
cttgcaatgcaatgagaaac

SEQ ID NO: 364185 - DNA, 20 bp, Artificial Sequence
  Description of Artificial Sequence: Synthetic oligonucleotide
  Target: LAMA2; (+) strand; PAM type: YTN; PAM sequence: TTC
ttgcaatgcaatgagaaaca

SEQ ID NO: 364186 - DNA, 20 bp, Artificial Sequence
  Description of Artificial Sequence: Synthetic oligonucleotide
  Target: LAMA2; (+) strand; PAM type: YTN; PAM sequence: CTT
gcaatgcaatgagaaacaca

SEQ ID NO: 364187 - DNA, 20 bp, Artificial Sequence
  Description of Artificial Sequence: Synthetic oligonucleotide
  Target: LAMA2; (+) strand; PAM type: YTN; PAM sequence: TTG
caatgcaatgagaaacacag

SEQ ID NO: 364188 - DNA, 20 bp, Artificial Sequence
  Description of Artificial Sequence: Synthetic oligonucleotide
  Target: LAMA2; (+) strand; PAM type: YTN; PAM sequence: CTG
agttatgttttaatagggtt

SEQ ID NO: 364189 - DNA, 20 bp, Artificial Sequence
  Description of Artificial Sequence: Synthetic oligonucleotide
  Target: LAMA2; (+) strand; PAM type: YTN; PAM sequence: TTA
tgttttaatagggttagtat

SEQ ID NO: 364190 - DNA, 20 bp, Artificial Sequence
  Description of Artificial Sequence: Synthetic oligonucleotide
  Target: LAMA2; (+) strand; PAM type: YTN; PAM sequence: TTT
taatagggttagtatgattg

SEQ ID NO: 364191 - DNA, 20 bp, Artificial Sequence
  Description of Artificial Sequence: Synthetic oligonucleotide
  Target: LAMA2; (+) strand; PAM type: YTN; PAM sequence: TTT
aatagggttagtatgattgt

SEQ ID NO: 364192 - DNA, 20 bp, Artificial Sequence
  Description of Artificial Sequence: Synthetic oligonucleotide
  Target: LAMA2; (+) strand; PAM type: YTN; PAM sequence: TTA
atagggttagtatgattgtt

SEQ ID NO: 364193 - DNA, 20 bp, Artificial Sequence
  Description of Artificial Sequence: Synthetic oligonucleotide
  Target: LAMA2; (+) strand; PAM type: YTN; PAM sequence: TTA
gtatgattgttactttgaga

SEQ ID NO: 364194 - DNA, 20 bp, Artificial Sequence
  Description of Artificial Sequence: Synthetic oligonucleotide
  Target: LAMA2; (+) strand; PAM type: YTN; PAM sequence: TTG
ttactttgagagttggttga

SEQ ID NO: 364195 - DNA, 20 bp, Artificial Sequence
  Description of Artificial Sequence: Synthetic oligonucleotide
  Target: LAMA2; (+) strand; PAM type: YTN; PAM sequence: TTA
ctttgagagttggttgaatg

SEQ ID NO: 364196 - DNA, 20 bp, Artificial Sequence
  Description of Artificial Sequence: Synthetic oligonucleotide
  Target: LAMA2; (+) strand; PAM type: YTN; PAM sequence: CTT
tgagagttggttgaatgagg

SEQ ID NO: 364197 - DNA, 20 bp, Artificial Sequence
  Description of Artificial Sequence: Synthetic oligonucleotide
  Target: LAMA2; (+) strand; PAM type: YTN; PAM sequence: TTT
gagagttggttgaatgagga

SEQ ID NO: 364198 - DNA, 20 bp, Artificial Sequence
  Description of Artificial Sequence: Synthetic oligonucleotide
  Target: LAMA2; (+) strand; PAM type: YTN; PAM sequence: TTG
agagttggttgaatgaggac

SEQ ID NO: 364199 - DNA, 20 bp, Artificial Sequence
  Description of Artificial Sequence: Synthetic oligonucleotide
  Target: LAMA2; (+) strand; PAM type: YTN; PAM sequence: TTG
gttgaatgaggacaaacaga

SEQ ID NO: 364200 - DNA, 20 bp, Artificial Sequence
  Description of Artificial Sequence: Synthetic oligonucleotide
  Target: LAMA2; (+) strand; PAM type: YTN; PAM sequence: TTG
aatgaggacaaacagataga

SEQ ID NO: 364201 - DNA, 20 bp, Artificial Sequence
  Description of Artificial Sequence: Synthetic oligonucleotide
  Target: LAMA2; (+) strand; PAM type: YTN; PAM sequence: TTA
agagacttggcattcatcca

SEQ ID NO: 364202 - DNA, 20 bp, Artificial Sequence
  Description of Artificial Sequence: Synthetic oligonucleotide
  Target: LAMA2; (+) strand; PAM type: YTN; PAM sequence: CTT
ggcattcatccagtcattag

SEQ ID NO: 364203 - DNA, 20 bp, Artificial Sequence
  Description of Artificial Sequence: Synthetic oligonucleotide
  Target: LAMA2; (+) strand; PAM type: YTN; PAM sequence: TTG
gcattcatccagtcattagc

SEQ ID NO: 364204 - DNA, 20 bp, Artificial Sequence
  Description of Artificial Sequence: Synthetic oligonucleotide
  Target: LAMA2; (+) strand; PAM type: YTN; PAM sequence: TTC
atccagtcattagctgtgaa

SEQ ID NO: 364205 - DNA, 20 bp, Artificial Sequence
  Description of Artificial Sequence: Synthetic oligonucleotide
  Target: LAMA2; (+) strand; PAM type: YTN; PAM sequence: TTA
gctgtgaagtcttggaccac

SEQ ID NO: 364206 - DNA, 20 bp, Artificial Sequence
  Description of Artificial Sequence: Synthetic oligonucleotide
  Target: LAMA2; (+) strand; PAM type: YTN; PAM sequence: CTG
tgaagtcttggaccacagtg

SEQ ID NO: 364207 - DNA, 20 bp, Artificial Sequence
  Description of Artificial Sequence: Synthetic oligonucleotide
  Target: LAMA2; (+) strand; PAM type: YTN; PAM sequence: CTT
ggaccacagtgataatggtg

SEQ ID NO: 364208 - DNA, 20 bp, Artificial Sequence
  Description of Artificial Sequence: Synthetic oligonucleotide
  Target: LAMA2; (+) strand; PAM type: YTN; PAM sequence: TTG
gaccacagtgataatggtga

SEQ ID NO: 364209 - DNA, 20 bp, Artificial Sequence
  Description of Artificial Sequence: Synthetic oligonucleotide
  Target: LAMA2; (+) strand; PAM type: YTN; PAM sequence: TTT
gattccagatacattttgaa

SEQ ID NO: 364210 - DNA, 20 bp, Artificial Sequence
  Description of Artificial Sequence: Synthetic oligonucleotide
  Target: LAMA2; (+) strand; PAM type: YTN; PAM sequence: TTG
attccagatacattttgaag

SEQ ID NO: 364211 - DNA, 20 bp, Artificial Sequence
  Description of Artificial Sequence: Synthetic oligonucleotide
  Target: LAMA2; (+) strand; PAM type: YTN; PAM sequence: TTC
cagatacattttgaaggtaa

SEQ ID NO: 364212 - DNA, 20 bp, Artificial Sequence
  Description of Artificial Sequence: Synthetic oligonucleotide
  Target: LAMA2; (+) strand; PAM type: YTN; PAM sequence: TTT
tgaaggtaatgctgaaaaga

SEQ ID NO: 364213 - DNA, 20 bp, Artificial Sequence
  Description of Artificial Sequence: Synthetic oligonucleotide
  Target: LAMA2; (+) strand; PAM type: YTN; PAM sequence: TTT
gaaggtaatgctgaaaagat

SEQ ID NO: 364214 - DNA, 20 bp, Artificial Sequence
  Description of Artificial Sequence: Synthetic oligonucleotide
  Target: LAMA2; (+) strand; PAM type: YTN; PAM sequence: TTG
aaggtaatgctgaaaagata

SEQ ID NO: 364215 - DNA, 20 bp, Artificial Sequence
  Description of Artificial Sequence: Synthetic oligonucleotide
  Target: LAMA2; (+) strand; PAM type: YTN; PAM sequence: CTG
aaaagatatgctaatagttt

SEQ ID NO: 364216 - DNA, 20 bp, Artificial Sequence
  Description of Artificial Sequence: Synthetic oligonucleotide
  Target: LAMA2; (+) strand; PAM type: YTN; PAM sequence: CTA
atagtttggctgtggaacat

SEQ ID NO: 364217 - DNA, 20 bp, Artificial Sequence
  Description of Artificial Sequence: Synthetic oligonucleotide
  Target: LAMA2; (+) strand; PAM type: YTN; PAM sequence: TTT
ggctgtggaacatgaaagaa

SEQ ID NO: 364218 - DNA, 20 bp, Artificial Sequence
  Description of Artificial Sequence: Synthetic oligonucleotide
  Target: LAMA2; (+) strand; PAM type: YTN; PAM sequence: TTG
gctgtggaacatgaaagaaa

SEQ ID NO: 364219 - DNA, 20 bp, Artificial Sequence
  Description of Artificial Sequence: Synthetic oligonucleotide
  Target: LAMA2; (+) strand; PAM type: YTN; PAM sequence: CTG
tggaacatgaaagaaagagg

SEQ ID NO: 364220 - DNA, 20 bp, Artificial Sequence
  Description of Artificial Sequence: Synthetic oligonucleotide
  Target: LAMA2; (+) strand; PAM type: YTN; PAM sequence: TTG
aggattatttcccaactatg

SEQ ID NO: 364221 - DNA, 20 bp, Artificial Sequence
  Description of Artificial Sequence: Synthetic oligonucleotide
  Target: LAMA2; (+) strand; PAM type: YTN; PAM sequence: TTA
tttcccaactatggacctga

SEQ ID NO: 364222 - DNA, 20 bp, Artificial Sequence
  Description of Artificial Sequence: Synthetic oligonucleotide
  Target: LAMA2; (+) strand; PAM type: YTN; PAM sequence: TTT
cccaactatggacctgagca

SEQ ID NO: 364223 - DNA, 20 bp, Artificial Sequence
  Description of Artificial Sequence: Synthetic oligonucleotide
  Target: LAMA2; (+) strand; PAM type: YTN; PAM sequence: TTC
ccaactatggacctgagcaa

SEQ ID NO: 364224 - DNA, 20 bp, Artificial Sequence
  Description of Artificial Sequence: Synthetic oligonucleotide
  Target: LAMA2; (+) strand; PAM type: YTN; PAM sequence: CTA
tggacctgagcaactaaaag

SEQ ID NO: 364225 - DNA, 20 bp, Artificial Sequence
  Description of Artificial Sequence: Synthetic oligonucleotide
  Target: LAMA2; (+) strand; PAM type: YTN; PAM sequence: CTG
agcaactaaaagacttgtca

SEQ ID NO: 364226 - DNA, 20 bp, Artificial Sequence
  Description of Artificial Sequence: Synthetic oligonucleotide
  Target: LAMA2; (+) strand; PAM type: YTN; PAM sequence: CTA
aaagacttgtcattgattta

SEQ ID NO: 364227 - DNA, 20 bp, Artificial Sequence
  Description of Artificial Sequence: Synthetic oligonucleotide
  Target: LAMA2; (+) strand; PAM type: YTN; PAM sequence: CTT
gtcattgatttagatgggga

SEQ ID NO: 364228 - DNA, 20 bp, Artificial Sequence
  Description of Artificial Sequence: Synthetic oligonucleotide
  Target: LAMA2; (+) strand; PAM type: YTN; PAM sequence: TTG
tcattgatttagatggggaa

SEQ ID NO: 364229 - DNA, 20 bp, Artificial Sequence
  Description of Artificial Sequence: Synthetic oligonucleotide
  Target: LAMA2; (+) strand; PAM type: YTN; PAM sequence: TTG
atttagatggggaagactgt

SEQ ID NO: 364230 - DNA, 20 bp, Artificial Sequence
  Description of Artificial Sequence: Synthetic oligonucleotide
  Target: LAMA2; (+) strand; PAM type: YTN; PAM sequence: TTT
agatggggaagactgtggta

SEQ ID NO: 364231 - DNA, 20 bp, Artificial Sequence
  Description of Artificial Sequence: Synthetic oligonucleotide
  Target: LAMA2; (+) strand; PAM type: YTN; PAM sequence: TTA
gatggggaagactgtggtaa

SEQ ID NO: 364232 - DNA, 20 bp, Artificial Sequence
  Description of Artificial Sequence: Synthetic oligonucleotide
  Target: LAMA2; (+) strand; PAM type: YTN; PAM sequence: CTG
tggtaaaaacaaatttttta

SEQ ID NO: 364233 - DNA, 20 bp, Artificial Sequence
  Description of Artificial Sequence: Synthetic oligonucleotide
  Target: LAMA2; (+) strand; PAM type: YTN; PAM sequence: TTT
tttacaggagatcatgaact

SEQ ID NO: 364234 - DNA, 20 bp, Artificial Sequence
  Description of Artificial Sequence: Synthetic oligonucleotide
  Target: LAMA2; (+) strand; PAM type: YTN; PAM sequence: TTT
ttacaggagatcatgaactc

SEQ ID NO: 364235 - DNA, 20 bp, Artificial Sequence
  Description of Artificial Sequence: Synthetic oligonucleotide
  Target: LAMA2; (+) strand; PAM type: YTN; PAM sequence: TTT
tacaggagatcatgaactca

SEQ ID NO: 364236 - DNA, 20 bp, Artificial Sequence
  Description of Artificial Sequence: Synthetic oligonucleotide
  Target: LAMA2; (+) strand; PAM type: YTN; PAM sequence: TTT
acaggagatcatgaactcag

SEQ ID NO: 364237 - DNA, 20 bp, Artificial Sequence
  Description of Artificial Sequence: Synthetic oligonucleotide
  Target: LAMA2; (+) strand; PAM type: YTN; PAM sequence: TTA
caggagatcatgaactcagc

SEQ ID NO: 364238 - DNA, 20 bp, Artificial Sequence
  Description of Artificial Sequence: Synthetic oligonucleotide
  Target: LAMA2; (+) strand; PAM type: YTN; PAM sequence: CTC
agcttagctaattatataaa

SEQ ID NO: 364239 - DNA, 20 bp, Artificial Sequence
  Description of Artificial Sequence: Synthetic oligonucleotide
  Target: LAMA2; (+) strand; PAM type: YTN; PAM sequence: CTT
agctaattatataaagttag

SEQ ID NO: 364240 - DNA, 20 bp, Artificial Sequence
  Description of Artificial Sequence: Synthetic oligonucleotide
  Target: LAMA2; (+) strand; PAM type: YTN; PAM sequence: TTA
gctaattatataaagttaga

SEQ ID NO: 364241 - DNA, 20 bp, Artificial Sequence
  Description of Artificial Sequence: Synthetic oligonucleotide
  Target: LAMA2; (+) strand; PAM type: YTN; PAM sequence: CTA
attatataaagttagagatg

SEQ ID NO: 364242 - DNA, 20 bp, Artificial Sequence
  Description of Artificial Sequence: Synthetic oligonucleotide
  Target: LAMA2; (+) strand; PAM type: YTN; PAM sequence: TTA
tataaagttagagatgccta

SEQ ID NO: 364243 - DNA, 20 bp, Artificial Sequence
  Description of Artificial Sequence: Synthetic oligonucleotide
  Target: LAMA2; (+) strand; PAM type: YTN; PAM sequence: TTA
gagatgcctattatatatcg

SEQ ID NO: 364244 - DNA, 20 bp, Artificial Sequence
  Description of Artificial Sequence: Synthetic oligonucleotide
  Target: LAMA2; (+) strand; PAM type: YTN; PAM sequence: CTA
ttatatatcgaggtgtaaat

SEQ ID NO: 364245 - DNA, 20 bp, Artificial Sequence
  Description of Artificial Sequence: Synthetic oligonucleotide
  Target: LAMA2; (+) strand; PAM type: YTN; PAM sequence: TTA
tatatcgaggtgtaaatgtt

SEQ ID NO: 364246 - DNA, 20 bp, Artificial Sequence
  Description of Artificial Sequence: Synthetic oligonucleotide
  Target: LAMA2; (+) strand; PAM type: YTN; PAM sequence: TTA
aagtgatagctagtatacaa

SEQ ID NO: 364247 - DNA, 20 bp, Artificial Sequence
  Description of Artificial Sequence: Synthetic oligonucleotide
  Target: LAMA2; (+) strand; PAM type: YTN; PAM sequence: CTA
gtatacaagtctgaagttca

SEQ ID NO: 364248 - DNA, 20 bp, Artificial Sequence
  Description of Artificial Sequence: Synthetic oligonucleotide
  Target: LAMA2; (+) strand; PAM type: YTN; PAM sequence: CTG
aagttcattgggtcaggaac

SEQ ID NO: 364249 - DNA, 20 bp, Artificial Sequence
  Description of Artificial Sequence: Synthetic oligonucleotide
  Target: LAMA2; (+) strand; PAM type: YTN; PAM sequence: TTC
attgggtcaggaacatctga

SEQ ID NO: 364250 - DNA, 20 bp, Artificial Sequence
  Description of Artificial Sequence: Synthetic oligonucleotide
  Target: LAMA2; (+) strand; PAM type: YTN; PAM sequence: TTG
ggtcaggaacatctgaactg

SEQ ID NO: 364251 - DNA, 20 bp, Artificial Sequence
  Description of Artificial Sequence: Synthetic oligonucleotide
  Target: LAMA2; (+) strand; PAM type: YTN; PAM sequence: CTG
aactgaagatgtaaaatgtt

SEQ ID NO: 364252 - DNA, 20 bp, Artificial Sequence
  Description of Artificial Sequence: Synthetic oligonucleotide
  Target: LAMA2; (+) strand; PAM type: YTN; PAM sequence: CTG
aagatgtaaaatgtttgaat

SEQ ID NO: 364253 - DNA, 20 bp, Artificial Sequence
  Description of Artificial Sequence: Synthetic oligonucleotide
  Target: LAMA2; (+) strand; PAM type: YTN; PAM sequence: TTT
gaatcatcaatccatatgtc

SEQ ID NO: 364254 - DNA, 20 bp, Artificial Sequence
  Description of Artificial Sequence: Synthetic oligonucleotide
  Target: LAMA2; (+) strand; PAM type: YTN; PAM sequence: TTG
aatcatcaatccatatgtca

SEQ ID NO: 364255 - DNA, 20 bp, Artificial Sequence
  Description of Artificial Sequence: Synthetic oligonucleotide
  Target: LAMA2; (+) strand; PAM type: YTN; PAM sequence: TTT
aaaccagaagactagatgtg

SEQ ID NO: 364256 - DNA, 20 bp, Artificial Sequence
  Description of Artificial Sequence: Synthetic oligonucleotide
  Target: LAMA2; (+) strand; PAM type: YTN; PAM sequence: TTA
aaccagaagactagatgtga

SEQ ID NO: 364257 - DNA, 20 bp, Artificial Sequence
  Description of Artificial Sequence: Synthetic oligonucleotide
  Target: LAMA2; (+) strand; PAM type: YTN; PAM sequence: CTA
gatgtgataaccaagaaaat

SEQ ID NO: 364258 - DNA, 20 bp, Artificial Sequence
  Description of Artificial Sequence: Synthetic oligonucleotide
  Target: LAMA2; (+) strand; PAM type: YTN; PAM sequence: CTA
aggattgggccctatagcac

SEQ ID NO: 364259 - DNA, 20 bp, Artificial Sequence
  Description of Artificial Sequence: Synthetic oligonucleotide
  Target: LAMA2; (+) strand; PAM type: YTN; PAM sequence: TTG
ggccctatagcaccccaaca

SEQ ID NO: 364260 - DNA, 20 bp, Artificial Sequence
  Description of Artificial Sequence: Synthetic oligonucleotide
  Target: LAMA2; (+) strand; PAM type: YTN; PAM sequence: CTA
tagcaccccaacatttagag

SEQ ID NO: 364261 - DNA, 20 bp, Artificial Sequence
  Description of Artificial Sequence: Synthetic oligonucleotide
  Target: LAMA2; (+) strand; PAM type: YTN; PAM sequence: TTT
agaggttaggaaactgagga

SEQ ID NO: 364262 - DNA, 20 bp, Artificial Sequence
  Description of Artificial Sequence: Synthetic oligonucleotide
  Target: LAMA2; (+) strand; PAM type: YTN; PAM sequence: TTA
gaggttaggaaactgaggac

SEQ ID NO: 364263 - DNA, 20 bp, Artificial Sequence
  Description of Artificial Sequence: Synthetic oligonucleotide
  Target: LAMA2; (+) strand; PAM type: YTN; PAM sequence: TTA
ggaaactgaggacgaactag

SEQ ID NO: 364264 - DNA, 20 bp, Artificial Sequence
  Description of Artificial Sequence: Synthetic oligonucleotide
  Target: LAMA2; (+) strand; PAM type: YTN; PAM sequence: CTG
aggacgaactagaaaggaga

SEQ ID NO: 364265 - DNA, 20 bp, Artificial Sequence
  Description of Artificial Sequence: Synthetic oligonucleotide
  Target: LAMA2; (+) strand; PAM type: YTN; PAM sequence: CTA
gaaaggagactaagaatcag

SEQ ID NO: 364266 - DNA, 20 bp, Artificial Sequence
  Description of Artificial Sequence: Synthetic oligonucleotide
  Target: LAMA2; (+) strand; PAM type: YTN; PAM sequence: CTA
agaatcagtgaccaaaaaag

SEQ ID NO: 364267 - DNA, 20 bp, Artificial Sequence
  Description of Artificial Sequence: Synthetic oligonucleotide
  Target: LAMA2; (+) strand; PAM type: YTN; PAM sequence: TTG
aaagtcatttgaatgaatca

SEQ ID NO: 364268 - DNA, 20 bp, Artificial Sequence
  Description of Artificial Sequence: Synthetic oligonucleotide
  Target: LAMA2; (+) strand; PAM type: YTN; PAM sequence: TTT
gaatgaatcaagtgatcaac

SEQ ID NO: 364269 - DNA, 20 bp, Artificial Sequence
  Description of Artificial Sequence: Synthetic oligonucleotide
  Target: LAMA2; (+) strand; PAM type: YTN; PAM sequence: TTG
aatgaatcaagtgatcaact

SEQ ID NO: 364270 - DNA, 20 bp, Artificial Sequence
  Description of Artificial Sequence: Synthetic oligonucleotide
  Target: LAMA2; (+) strand; PAM type: YTN; PAM sequence: CTT
tgtcagatactgttgatggg

SEQ ID NO: 364271 - DNA, 20 bp, Artificial Sequence
  Description of Artificial Sequence: Synthetic oligonucleotide
  Target: LAMA2; (+) strand; PAM type: YTN; PAM sequence: TTT
gtcagatactgttgatgggc

SEQ ID NO: 364272 - DNA, 20 bp, Artificial Sequence
  Description of Artificial Sequence: Synthetic oligonucleotide
  Target: LAMA2; (+) strand; PAM type: YTN; PAM sequence: TTG
tcagatactgttgatgggcc

SEQ ID NO: 364273 - DNA, 20 bp, Artificial Sequence
  Description of Artificial Sequence: Synthetic oligonucleotide
  Target: LAMA2; (+) strand; PAM type: YTN; PAM sequence: CTG
ttgatgggccaaataaggta

SEQ ID NO: 364274 - DNA, 20 bp, Artificial Sequence
  Description of Artificial Sequence: Synthetic oligonucleotide
  Target: LAMA2; (+) strand; PAM type: YTN; PAM sequence: TTG
atgggccaaataaggtaaga

SEQ ID NO: 364275 - DNA, 20 bp, Artificial Sequence
  Description of Artificial Sequence: Synthetic oligonucleotide
  Target: LAMA2; (+) strand; PAM type: YTN; PAM sequence: TTG
accattggatatagcaatgc

SEQ ID NO: 364276 - DNA, 20 bp, Artificial Sequence
  Description of Artificial Sequence: Synthetic oligonucleotide
  Target: LAMA2; (+) strand; PAM type: YTN; PAM sequence: TTG
gatatagcaatgcattcgac

SEQ ID NO: 364277 - DNA, 20 bp, Artificial Sequence
  Description of Artificial Sequence: Synthetic oligonucleotide
  Target: LAMA2; (+) strand; PAM type: YTN; PAM sequence: TTC
gaccaatgaccttgagaaga

SEQ ID NO: 364278 - DNA, 20 bp, Artificial Sequence
  Description of Artificial Sequence: Synthetic oligonucleotide
  Target: LAMA2; (+) strand; PAM type: YTN; PAM sequence: CTT
gagaagagtatttcagtgga

SEQ ID NO: 364279 - DNA, 20 bp, Artificial Sequence
  Description of Artificial Sequence: Synthetic oligonucleotide
  Target: LAMA2; (+) strand; PAM type: YTN; PAM sequence: TTG
agaagagtatttcagtggaa

SEQ ID NO: 364280 - DNA, 20 bp, Artificial Sequence
  Description of Artificial Sequence: Synthetic oligonucleotide
  Target: LAMA2; (+) strand; PAM type: YTN; PAM sequence: TTT
cagtggaatgaagggcaaca

SEQ ID NO: 364281 - DNA, 20 bp, Artificial Sequence
  Description of Artificial Sequence: Synthetic oligonucleotide
  Target: LAMA2; (+) strand; PAM type: YTN; PAM sequence: TTC
agtggaatgaagggcaacat

SEQ ID NO: 364282 - DNA, 20 bp, Artificial Sequence
  Description of Artificial Sequence: Synthetic oligonucleotide
  Target: LAMA2; (+) strand; PAM type: YTN; PAM sequence: CTA
gagtggatttaagagagaat

SEQ ID NO: 364283 - DNA, 20 bp, Artificial Sequence
  Description of Artificial Sequence: Synthetic oligonucleotide
  Target: LAMA2; (+) strand; PAM type: YTN; PAM sequence: TTT
aagagagaataagaagaaag

SEQ ID NO: 364284 - DNA, 20 bp, Artificial Sequence
  Description of Artificial Sequence: Synthetic oligonucleotide
  Target: LAMA2; (+) strand; PAM type: YTN; PAM sequence: TTA
agagagaataagaagaaaga

SEQ ID NO: 364285 - DNA, 20 bp, Artificial Sequence
  Description of Artificial Sequence: Synthetic oligonucleotide
  Target: LAMA2; (+) strand; PAM type: YTN; PAM sequence: CTT
gtctttttctagaaagaaaa

SEQ ID NO: 364286 - DNA, 20 bp, Artificial Sequence
  Description of Artificial Sequence: Synthetic oligonucleotide
  Target: LAMA2; (+) strand; PAM type: YTN; PAM sequence: TTG
tctttttctagaaagaaaat

SEQ ID NO: 364287 - DNA, 20 bp, Artificial Sequence
  Description of Artificial Sequence: Synthetic oligonucleotide
  Target: LAMA2; (+) strand; PAM type: YTN; PAM sequence: CTT
tttctagaaagaaaataagg

SEQ ID NO: 364288 - DNA, 20 bp, Artificial Sequence
  Description of Artificial Sequence: Synthetic oligonucleotide
  Target: LAMA2; (+) strand; PAM type: YTN; PAM sequence: TTT
ttctagaaagaaaataaggg

SEQ ID NO: 364289 - DNA, 20 bp, Artificial Sequence
  Description of Artificial Sequence: Synthetic oligonucleotide
  Target: LAMA2; (+) strand; PAM type: YTN; PAM sequence: TTT
tctagaaagaaaataagggc

SEQ ID NO: 364290 - DNA, 20 bp, Artificial Sequence
  Description of Artificial Sequence: Synthetic oligonucleotide
  Target: LAMA2; (+) strand; PAM type: YTN; PAM sequence: TTT
ctagaaagaaaataagggca

SEQ ID NO: 364291 - DNA, 20 bp, Artificial Sequence
  Description of Artificial Sequence: Synthetic oligonucleotide
  Target: LAMA2; (+) strand; PAM type: YTN; PAM sequence: TTC
tagaaagaaaataagggcat

SEQ ID NO: 364292 - DNA, 20 bp, Artificial Sequence
  Description of Artificial Sequence: Synthetic oligonucleotide
  Target: LAMA2; (+) strand; PAM type: YTN; PAM sequence: CTA
gaaagaaaataagggcatag

SEQ ID NO: 364293 - DNA, 20 bp, Artificial Sequence
  Description of Artificial Sequence: Synthetic oligonucleotide
  Target: LAMA2; (+) strand; PAM type: YTN; PAM sequence: CTT
ttatgggatgtggaatggtg

SEQ ID NO: 364294 - DNA, 20 bp, Artificial Sequence
  Description of Artificial Sequence: Synthetic oligonucleotide
  Target: LAMA2; (+) strand; PAM type: YTN; PAM sequence: TTT
tatgggatgtggaatggtgc

SEQ ID NO: 364295 - DNA, 20 bp, Artificial Sequence
  Description of Artificial Sequence: Synthetic oligonucleotide
  Target: LAMA2; (+) strand; PAM type: YTN; PAM sequence: TTT
atgggatgtggaatggtgct

SEQ ID NO: 364296 - DNA, 20 bp, Artificial Sequence
  Description of Artificial Sequence: Synthetic oligonucleotide
  Target: LAMA2; (+) strand; PAM type: YTN; PAM sequence: TTA
tgggatgtggaatggtgctg

SEQ ID NO: 364297 - DNA, 20 bp, Artificial Sequence
  Description of Artificial Sequence: Synthetic oligonucleotide
  Target: LAMA2; (+) strand; PAM type: YTN; PAM sequence: CTG
ggacatgtggaagtctcttc

SEQ ID NO: 364298 - DNA, 20 bp, Artificial Sequence
  Description of Artificial Sequence: Synthetic oligonucleotide
  Target: LAMA2; (+) strand; PAM type: YTN; PAM sequence: CTC
ttctattggtctgtatattc

SEQ ID NO: 364299 - DNA, 20 bp, Artificial Sequence
  Description of Artificial Sequence: Synthetic oligonucleotide
  Target: LAMA2; (+) strand; PAM type: YTN; PAM sequence: CTT
ctattggtctgtatattctt

SEQ ID NO: 364300 - DNA, 20 bp, Artificial Sequence
  Description of Artificial Sequence: Synthetic oligonucleotide
  Target: LAMA2; (+) strand; PAM type: YTN; PAM sequence: TTC
tattggtctgtatattctta

SEQ ID NO: 364301 - DNA, 20 bp, Artificial Sequence
  Description of Artificial Sequence: Synthetic oligonucleotide
  Target: LAMA2; (+) strand; PAM type: YTN; PAM sequence: CTA
ttggtctgtatattcttaga

SEQ ID NO: 364302 - DNA, 20 bp, Artificial Sequence
  Description of Artificial Sequence: Synthetic oligonucleotide
  Target: LAMA2; (+) strand; PAM type: YTN; PAM sequence: TTG
gtctgtatattcttagaaaa

SEQ ID NO: 364303 - DNA, 20 bp, Artificial Sequence
  Description of Artificial Sequence: Synthetic oligonucleotide
  Target: LAMA2; (+) strand; PAM type: YTN; PAM sequence: CTG
tatattcttagaaaatagaa

SEQ ID NO: 364304 - DNA, 20 bp, Artificial Sequence
  Description of Artificial Sequence: Synthetic oligonucleotide
  Target: LAMA2; (+) strand; PAM type: YTN; PAM sequence: TTC
ttagaaaatagaaaataatt

SEQ ID NO: 364305 - DNA, 20 bp, Artificial Sequence
  Description of Artificial Sequence: Synthetic oligonucleotide
  Target: LAMA2; (+) strand; PAM type: YTN; PAM sequence: CTT
agaaaatagaaaataattga

SEQ ID NO: 364306 - DNA, 20 bp, Artificial Sequence
  Description of Artificial Sequence: Synthetic oligonucleotide
  Target: LAMA2; (+) strand; PAM type: YTN; PAM sequence: TTA
gaaaatagaaaataattgag

SEQ ID NO: 364307 - DNA, 20 bp, Artificial Sequence
  Description of Artificial Sequence: Synthetic oligonucleotide
  Target: LAMA2; (+) strand; PAM type: YTN; PAM sequence: TTG
agtatgagaacatgggagga

SEQ ID NO: 364308 - DNA, 20 bp, Artificial Sequence
  Description of Artificial Sequence: Synthetic oligonucleotide
  Target: LAMA2; (+) strand; PAM type: YTN; PAM sequence: CTG
aagattcaaggagaaaagag

SEQ ID NO: 364309 - DNA, 20 bp, Artificial Sequence
  Description of Artificial Sequence: Synthetic oligonucleotide
  Target: LAMA2; (+) strand; PAM type: YTN; PAM sequence: TTC
aaggagaaaagagaaagtat

SEQ ID NO: 364310 - DNA, 20 bp, Artificial Sequence
  Description of Artificial Sequence: Synthetic oligonucleotide
  Target: LAMA2; (+) strand; PAM type: YTN; PAM sequence: TTA
gggatctatgtgagtttagt

SEQ ID NO: 364311 - DNA, 20 bp, Artificial Sequence
  Description of Artificial Sequence: Synthetic oligonucleotide
  Target: LAMA2; (+) strand; PAM type: YTN; PAM sequence: CTA
tgtgagtttagtaatcatga

SEQ ID NO: 364312 - DNA, 20 bp, Artificial Sequence
  Description of Artificial Sequence: Synthetic oligonucleotide
  Target: LAMA2; (+) strand; PAM type: YTN; PAM sequence: TTT
agtaatcatgaatttgaagc

SEQ ID NO: 364313 - DNA, 20 bp, Artificial Sequence
  Description of Artificial Sequence: Synthetic oligonucleotide
  Target: LAMA2; (+) strand; PAM type: YTN; PAM sequence: TTA
gtaatcatgaatttgaagca

SEQ ID NO: 364314 - DNA, 20 bp, Artificial Sequence
  Description of Artificial Sequence: Synthetic oligonucleotide
  Target: LAMA2; (+) strand; PAM type: YTN; PAM sequence: TTT
gaagcaaggtcagtcaacag

SEQ ID NO: 364315 - DNA, 20 bp, Artificial Sequence
  Description of Artificial Sequence: Synthetic oligonucleotide
  Target: LAMA2; (+) strand; PAM type: YTN; PAM sequence: TTG
aagcaaggtcagtcaacagg

SEQ ID NO: 364316 - DNA, 20 bp, Artificial Sequence
  Description of Artificial Sequence: Synthetic oligonucleotide
  Target: LAMA2; (+) strand; PAM type: YTN; PAM sequence: CTA
tgagtttcttcagatgtatc

SEQ ID NO: 364317 - DNA, 20 bp, Artificial Sequence
  Description of Artificial Sequence: Synthetic oligonucleotide
  Target: LAMA2; (+) strand; PAM type: YTN; PAM sequence: TTT
cttcagatgtatccagctca

SEQ ID NO: 364318 - DNA, 20 bp, Artificial Sequence
  Description of Artificial Sequence: Synthetic oligonucleotide
  Target: LAMA2; (+) strand; PAM type: YTN; PAM sequence: TTC
ttcagatgtatccagctcag

SEQ ID NO: 364319 - DNA, 20 bp, Artificial Sequence
  Description of Artificial Sequence: Synthetic oligonucleotide
  Target: LAMA2; (+) strand; PAM type: YTN; PAM sequence: CTT
cagatgtatccagctcagca

SEQ ID NO: 364320 - DNA, 20 bp, Artificial Sequence
  Description of Artificial Sequence: Synthetic oligonucleotide
  Target: LAMA2; (+) strand; PAM type: YTN; PAM sequence: TTC
agatgtatccagctcagcag

SEQ ID NO: 364321 - DNA, 20 bp, Artificial Sequence
  Description of Artificial Sequence: Synthetic oligonucleotide
  Target: LAMA2; (+) strand; PAM type: YTN; PAM sequence: CTC
agcagttgcaggtacagaga

SEQ ID NO: 364322 - DNA, 20 bp, Artificial Sequence
  Description of Artificial Sequence: Synthetic oligonucleotide
  Target: LAMA2; (+) strand; PAM type: YTN; PAM sequence: TTG
caggtacagagaagatagag

SEQ ID NO: 364323 - DNA, 20 bp, Artificial Sequence
  Description of Artificial Sequence: Synthetic oligonucleotide
  Target: LAMA2; (+) strand; PAM type: YTN; PAM sequence: TTA
gatttaactgacgttgtggt

SEQ ID NO: 364324 - DNA, 20 bp, Artificial Sequence
  Description of Artificial Sequence: Synthetic oligonucleotide
  Target: LAMA2; (+) strand; PAM type: YTN; PAM sequence: TTT
aactgacgttgtggttaagc

SEQ ID NO: 364325 - DNA, 20 bp, Artificial Sequence
  Description of Artificial Sequence: Synthetic oligonucleotide
  Target: LAMA2; (+) strand; PAM type: YTN; PAM sequence: TTA
actgacgttgtggttaagcc

SEQ ID NO: 364326 - DNA, 20 bp, Artificial Sequence
  Description of Artificial Sequence: Synthetic oligonucleotide
  Target: LAMA2; (+) strand; PAM type: YTN; PAM sequence: CTG
acgttgtggttaagccaagt

SEQ ID NO: 364327 - DNA, 20 bp, Artificial Sequence
  Description of Artificial Sequence: Synthetic oligonucleotide
  Target: LAMA2; (+) strand; PAM type: YTN; PAM sequence: TTG
tggttaagccaagtgaatac

SEQ ID NO: 364328 - DNA, 20 bp, Artificial Sequence
  Description of Artificial Sequence: Synthetic oligonucleotide
  Target: LAMA2; (+) strand; PAM type: YTN; PAM sequence: TTA
agccaagtgaatacagtaaa

SEQ ID NO: 364329 - DNA, 20 bp, Artificial Sequence
  Description of Artificial Sequence: Synthetic oligonucleotide
  Target: LAMA2; (+) strand; PAM type: YTN; PAM sequence: CTA
gagattaaaataattgacca

SEQ ID NO: 364330 - DNA, 20 bp, Artificial Sequence
  Description of Artificial Sequence: Synthetic oligonucleotide
  Target: LAMA2; (+) strand; PAM type: YTN; PAM sequence: TTA
aaataattgaccatggaatc

SEQ ID NO: 364331 - DNA, 20 bp, Artificial Sequence
  Description of Artificial Sequence: Synthetic oligonucleotide
  Target: LAMA2; (+) strand; PAM type: YTN; PAM sequence: TTG
accatggaatctaagacagt

SEQ ID NO: 364332 - DNA, 20 bp, Artificial Sequence
  Description of Artificial Sequence: Synthetic oligonucleotide
  Target: LAMA2; (+) strand; PAM type: YTN; PAM sequence: CTA
agacagtgatgagaaaccct

SEQ ID NO: 364333 - DNA, 20 bp, Artificial Sequence
  Description of Artificial Sequence: Synthetic oligonucleotide
  Target: LAMA2; (+) strand; PAM type: YTN; PAM sequence: CTC
aagctacagcgatttcccat

SEQ ID NO: 364334 - DNA, 20 bp, Artificial Sequence
  Description of Artificial Sequence: Synthetic oligonucleotide
  Target: LAMA2; (+) strand; PAM type: YTN; PAM sequence: CTA
cagcgatttcccattgtctc

SEQ ID NO: 364335 - DNA, 20 bp, Artificial Sequence
  Description of Artificial Sequence: Synthetic oligonucleotide
  Target: LAMA2; (+) strand; PAM type: YTN; PAM sequence: TTT
cccattgtctccctaaatgc

SEQ ID NO: 364336 - DNA, 20 bp, Artificial Sequence
  Description of Artificial Sequence: Synthetic oligonucleotide
  Target: LAMA2; (+) strand; PAM type: YTN; PAM sequence: TTC
ccattgtctccctaaatgct

SEQ ID NO: 364337 - DNA, 20 bp, Artificial Sequence
  Description of Artificial Sequence: Synthetic oligonucleotide
  Target: LAMA2; (+) strand; PAM type: YTN; PAM sequence: TTG
tctccctaaatgctattagt

SEQ ID NO: 364338 - DNA, 20 bp, Artificial Sequence
  Description of Artificial Sequence: Synthetic oligonucleotide
  Target: LAMA2; (+) strand; PAM type: YTN; PAM sequence: CTC
cctaaatgctattagtactg

SEQ ID NO: 364339 - DNA, 20 bp, Artificial Sequence
  Description of Artificial Sequence: Synthetic oligonucleotide
  Target: LAMA2; (+) strand; PAM type: YTN; PAM sequence: CTA
aatgctattagtactgtagc

SEQ ID NO: 364340 - DNA, 20 bp, Artificial Sequence
  Description of Artificial Sequence: Synthetic oligonucleotide
  Target: LAMA2; (+) strand; PAM type: YTN; PAM sequence: CTA
ttagtactgtagccaagaca

SEQ ID NO: 364341 - DNA, 20 bp, Artificial Sequence
  Description of Artificial Sequence: Synthetic oligonucleotide
  Target: LAMA2; (+) strand; PAM type: YTN; PAM sequence: TTA
gtactgtagccaagacaagt

SEQ ID NO: 364342 - DNA, 20 bp, Artificial Sequence
  Description of Artificial Sequence: Synthetic oligonucleotide
  Target: LAMA2; (+) strand; PAM type: YTN; PAM sequence: CTG
tagccaagacaagtctttct

SEQ ID NO: 364343 - DNA, 20 bp, Artificial Sequence
  Description of Artificial Sequence: Synthetic oligonucleotide
  Target: LAMA2; (+) strand; PAM type: YTN; PAM sequence: CTT
tcttttataggactatacaa

SEQ ID NO: 364344 - DNA, 20 bp, Artificial Sequence
  Description of Artificial Sequence: Synthetic oligonucleotide
  Target: LAMA2; (+) strand; PAM type: YTN; PAM sequence: TTT
cttttataggactatacaag

SEQ ID NO: 364345 - DNA, 20 bp, Artificial Sequence
  Description of Artificial Sequence: Synthetic oligonucleotide
  Target: LAMA2; (+) strand; PAM type: YTN; PAM sequence: TTC
ttttataggactatacaagg

SEQ ID NO: 364346 - DNA, 20 bp, Artificial Sequence
  Description of Artificial Sequence: Synthetic oligonucleotide
  Target: LAMA2; (+) strand; PAM type: YTN; PAM sequence: CTT
ttataggactatacaaggcc

SEQ ID NO: 364347 - DNA, 20 bp, Artificial Sequence
  Description of Artificial Sequence: Synthetic oligonucleotide
  Target: LAMA2; (+) strand; PAM type: YTN; PAM sequence: TTT
tataggactatacaaggcct

SEQ ID NO: 364348 - DNA, 20 bp, Artificial Sequence
  Description of Artificial Sequence: Synthetic oligonucleotide
  Target: LAMA2; (+) strand; PAM type: YTN; PAM sequence: TTT
ataggactatacaaggcctt

SEQ ID NO: 364349 - DNA, 20 bp, Artificial Sequence
  Description of Artificial Sequence: Synthetic oligonucleotide
  Target: LAMA2; (+) strand; PAM type: YTN; PAM sequence: TTA
taggactatacaaggcctta

SEQ ID NO: 364350 - DNA, 20 bp, Artificial Sequence
  Description of Artificial Sequence: Synthetic oligonucleotide
  Target: LAMA2; (+) strand; PAM type: YTN; PAM sequence: CTA
tacaaggccttagaggatat

SEQ ID NO: 364351 - DNA, 20 bp, Artificial Sequence
  Description of Artificial Sequence: Synthetic oligonucleotide
  Target: LAMA2; (+) strand; PAM type: YTN; PAM sequence: CTT
agaggatatttagtatcctt

SEQ ID NO: 364352 - DNA, 20 bp, Artificial Sequence
  Description of Artificial Sequence: Synthetic oligonucleotide
  Target: LAMA2; (+) strand; PAM type: YTN; PAM sequence: TTA
gaggatatttagtatccttg

SEQ ID NO: 364353 - DNA, 20 bp, Artificial Sequence
  Description of Artificial Sequence: Synthetic oligonucleotide
  Target: LAMA2; (+) strand; PAM type: YTN; PAM sequence: TTT
agtatccttggcctaaagga

SEQ ID NO: 364354 - DNA, 20 bp, Artificial Sequence
  Description of Artificial Sequence: Synthetic oligonucleotide
  Target: LAMA2; (+) strand; PAM type: YTN; PAM sequence: TTA
gtatccttggcctaaaggat

SEQ ID NO: 364355 - DNA, 20 bp, Artificial Sequence
  Description of Artificial Sequence: Synthetic oligonucleotide
  Target: LAMA2; (+) strand; PAM type: YTN; PAM sequence: CTT
ggcctaaaggataaaggtaa

SEQ ID NO: 364356 - DNA, 20 bp, Artificial Sequence
  Description of Artificial Sequence: Synthetic oligonucleotide
  Target: LAMA2; (+) strand; PAM type: YTN; PAM sequence: TTG
gcctaaaggataaaggtaaa

SEQ ID NO: 364357 - DNA, 20 bp, Artificial Sequence
  Description of Artificial Sequence: Synthetic oligonucleotide
  Target: LAMA2; (+) strand; PAM type: YTN; PAM sequence: CTA
aaggataaaggtaaagtggt

SEQ ID NO: 364358 - DNA, 20 bp, Artificial Sequence
  Description of Artificial Sequence: Synthetic oligonucleotide
  Target: LAMA2; (+) strand; PAM type: YTN; PAM sequence: TTT
agtgtgctgtacactaaata

SEQ ID NO: 364359 - DNA, 20 bp, Artificial Sequence
  Description of Artificial Sequence: Synthetic oligonucleotide
  Target: LAMA2; (+) strand; PAM type: YTN; PAM sequence: TTA
gtgtgctgtacactaaatat

SEQ ID NO: 364360 - DNA, 20 bp, Artificial Sequence
  Description of Artificial Sequence: Synthetic oligonucleotide
  Target: LAMA2; (+) strand; PAM type: YTN; PAM sequence: CTG
tacactaaatatcagtagca

SEQ ID NO: 364361 - DNA, 20 bp, Artificial Sequence
  Description of Artificial Sequence: Synthetic oligonucleotide
  Target: LAMA2; (+) strand; PAM type: YTN; PAM sequence: CTA
aatatcagtagcactttgcc

SEQ ID NO: 364362 - DNA, 20 bp, Artificial Sequence
  Description of Artificial Sequence: Synthetic oligonucleotide
  Target: LAMA2; (+) strand; PAM type: YTN; PAM sequence: CTT
tgccacaaattaaaggaaca

SEQ ID NO: 364363 - DNA, 20 bp, Artificial Sequence
  Description of Artificial Sequence: Synthetic oligonucleotide
  Target: LAMA2; (+) strand; PAM type: YTN; PAM sequence: TTT
gccacaaattaaaggaacag

SEQ ID NO: 364364 - DNA, 20 bp, Artificial Sequence
  Description of Artificial Sequence: Synthetic oligonucleotide
  Target: LAMA2; (+) strand; PAM type: YTN; PAM sequence: TTG
ccacaaattaaaggaacagt

SEQ ID NO: 364365 - DNA, 20 bp, Artificial Sequence
  Description of Artificial Sequence: Synthetic oligonucleotide
  Target: LAMA2; (+) strand; PAM type: YTN; PAM sequence: TTA
aaggaacagtatataatcct

SEQ ID NO: 364366 - DNA, 20 bp, Artificial Sequence
  Description of Artificial Sequence: Synthetic oligonucleotide
  Target: LAMA2; (+) strand; PAM type: YTN; PAM sequence: CTT
gacagtgctttaactccatt

SEQ ID NO: 364367 - DNA, 20 bp, Artificial Sequence
  Description of Artificial Sequence: Synthetic oligonucleotide
  Target: LAMA2; (+) strand; PAM type: YTN; PAM sequence: TTG
acagtgctttaactccattg

SEQ ID NO: 364368 - DNA, 20 bp, Artificial Sequence
  Description of Artificial Sequence: Synthetic oligonucleotide
  Target: LAMA2; (+) strand; PAM type: YTN; PAM sequence: CTT
taactccattgcatttcctt

SEQ ID NO: 364369 - DNA, 20 bp, Artificial Sequence
  Description of Artificial Sequence: Synthetic oligonucleotide
  Target: LAMA2; (+) strand; PAM type: YTN; PAM sequence: TTT
aactccattgcatttccttc

SEQ ID NO: 364370 - DNA, 20 bp, Artificial Sequence
  Description of Artificial Sequence: Synthetic oligonucleotide
  Target: LAMA2; (+) strand; PAM type: YTN; PAM sequence: TTA
actccattgcatttccttct

SEQ ID NO: 364371 - DNA, 20 bp, Artificial Sequence
  Description of Artificial Sequence: Synthetic oligonucleotide
  Target: LAMA2; (+) strand; PAM type: YTN; PAM sequence: CTC
cattgcatttccttcttttt

SEQ ID NO: 364372 - DNA, 20 bp, Artificial Sequence
  Description of Artificial Sequence: Synthetic oligonucleotide
  Target: LAMA2; (+) strand; PAM type: YTN; PAM sequence: TTG
catttccttcttttttagaa

SEQ ID NO: 364373 - DNA, 20 bp, Artificial Sequence
  Description of Artificial Sequence: Synthetic oligonucleotide
  Target: LAMA2; (+) strand; PAM type: YTN; PAM sequence: TTT
ccttcttttttagaatggaa

SEQ ID NO: 364374 - DNA, 20 bp, Artificial Sequence
  Description of Artificial Sequence: Synthetic oligonucleotide
  Target: LAMA2; (+) strand; PAM type: YTN; PAM sequence: TTC
cttcttttttagaatggaat

SEQ ID NO: 364375 - DNA, 20 bp, Artificial Sequence
  Description of Artificial Sequence: Synthetic oligonucleotide
  Target: LAMA2; (+) strand; PAM type: YTN; PAM sequence: CTT
cttttttagaatggaatttt

SEQ ID NO: 364376 - DNA, 20 bp, Artificial Sequence
  Description of Artificial Sequence: Synthetic oligonucleotide
  Target: LAMA2; (+) strand; PAM type: YTN; PAM sequence: TTC
ttttttagaatggaattttt

SEQ ID NO: 364377 - DNA, 20 bp, Artificial Sequence
  Description of Artificial Sequence: Synthetic oligonucleotide
  Target: LAMA2; (+) strand; PAM type: YTN; PAM sequence: CTT
ttttagaatggaattttttt

SEQ ID NO: 364378 - DNA, 20 bp, Artificial Sequence
  Description of Artificial Sequence: Synthetic oligonucleotide
  Target: LAMA2; (+) strand; PAM type: YTN; PAM sequence: TTT
tttagaatggaatttttttc

SEQ ID NO: 364379 - DNA, 20 bp, Artificial Sequence
  Description of Artificial Sequence: Synthetic oligonucleotide
  Target: LAMA2; (+) strand; PAM type: YTN; PAM sequence: TTT
ttagaatggaatttttttct

SEQ ID NO: 364380 - DNA, 20 bp, Artificial Sequence
  Description of Artificial Sequence: Synthetic oligonucleotide
  Target: LAMA2; (+) strand; PAM type: YTN; PAM sequence: TTT
tagaatggaatttttttcta

SEQ ID NO: 364381 - DNA, 20 bp, Artificial Sequence
  Description of Artificial Sequence: Synthetic oligonucleotide
  Target: LAMA2; (+) strand; PAM type: YTN; PAM sequence: TTT
agaatggaatttttttctat

SEQ ID NO: 364382 - DNA, 20 bp, Artificial Sequence
  Description of Artificial Sequence: Synthetic oligonucleotide
  Target: LAMA2; (+) strand; PAM type: YTN; PAM sequence: TTA
gaatggaatttttttctata

SEQ ID NO: 364383 - DNA, 20 bp, Artificial Sequence
  Description of Artificial Sequence: Synthetic oligonucleotide
  Target: LAMA2; (+) strand; PAM type: YTN; PAM sequence: TTT
ttttctatatgttccccaaa

SEQ ID NO: 364384 - DNA, 20 bp, Artificial Sequence
  Description of Artificial Sequence: Synthetic oligonucleotide
  Target: LAMA2; (+) strand; PAM type: YTN; PAM sequence: TTT
tttctatatgttccccaaag

SEQ ID NO: 364385 - DNA, 20 bp, Artificial Sequence
  Description of Artificial Sequence: Synthetic oligonucleotide
  Target: LAMA2; (+) strand; PAM type: YTN; PAM sequence: TTT
ttctatatgttccccaaagc

SEQ ID NO: 364386 - DNA, 20 bp, Artificial Sequence
  Description of Artificial Sequence: Synthetic oligonucleotide
  Target: LAMA2; (+) strand; PAM type: YTN; PAM sequence: TTT
tctatatgttccccaaagca

SEQ ID NO: 364387 - DNA, 20 bp, Artificial Sequence
  Description of Artificial Sequence: Synthetic oligonucleotide
  Target: LAMA2; (+) strand; PAM type: YTN; PAM sequence: TTT
ctatatgttccccaaagcaa

SEQ ID NO: 364388 - DNA, 20 bp, Artificial Sequence
  Description of Artificial Sequence: Synthetic oligonucleotide
  Target: LAMA2; (+) strand; PAM type: YTN; PAM sequence: TTC
tatatgttccccaaagcaag

SEQ ID NO: 364389 - DNA, 20 bp, Artificial Sequence
  Description of Artificial Sequence: Synthetic oligonucleotide
  Target: LAMA2; (+) strand; PAM type: YTN; PAM sequence: CTA
tatgttccccaaagcaaggc

SEQ ID NO: 364390 - DNA, 20 bp, Artificial Sequence
  Description of Artificial Sequence: Synthetic oligonucleotide
  Target: LAMA2; (+) strand; PAM type: YTN; PAM sequence: TTC
cccaaagcaaggctagttta

SEQ ID NO: 364391 - DNA, 20 bp, Artificial Sequence
  Description of Artificial Sequence: Synthetic oligonucleotide
  Target: LAMA2; (+) strand; PAM type: YTN; PAM sequence: CTA
gtttatataacattaaatta

SEQ ID NO: 364392 - DNA, 20 bp, Artificial Sequence
  Description of Artificial Sequence: Synthetic oligonucleotide
  Target: LAMA2; (+) strand; PAM type: YTN; PAM sequence: TTT
atataacattaaattactta

SEQ ID NO: 364393 - DNA, 20 bp, Artificial Sequence
  Description of Artificial Sequence: Synthetic oligonucleotide
  Target: LAMA2; (+) strand; PAM type: YTN; PAM sequence: TTA
tataacattaaattacttat

SEQ ID NO: 364394 - DNA, 20 bp, Artificial Sequence
  Description of Artificial Sequence: Synthetic oligonucleotide
  Target: LAMA2; (+) strand; PAM type: YTN; PAM sequence: TTA
aattacttatgcaaatgcaa

SEQ ID NO: 364395 - DNA, 20 bp, Artificial Sequence
  Description of Artificial Sequence: Synthetic oligonucleotide
  Target: LAMA2; (+) strand; PAM type: YTN; PAM sequence: TTA
cttatgcaaatgcaaaaatt

SEQ ID NO: 364396 - DNA, 20 bp, Artificial Sequence
  Description of Artificial Sequence: Synthetic oligonucleotide
  Target: LAMA2; (+) strand; PAM type: YTN; PAM sequence: CTT
atgcaaatgcaaaaattaat

SEQ ID NO: 364397 - DNA, 20 bp, Artificial Sequence
  Description of Artificial Sequence: Synthetic oligonucleotide
  Target: LAMA2; (+) strand; PAM type: YTN; PAM sequence: TTA
tgcaaatgcaaaaattaatc

SEQ ID NO: 364398 - DNA, 20 bp, Artificial Sequence
  Description of Artificial Sequence: Synthetic oligonucleotide
  Target: LAMA2; (+) strand; PAM type: YTN; PAM sequence: TTA
atctgaacatctatttatta

SEQ ID NO: 364399 - DNA, 20 bp, Artificial Sequence
  Description of Artificial Sequence: Synthetic oligonucleotide
  Target: LAMA2; (+) strand; PAM type: YTN; PAM sequence: CTG
aacatctatttattatatct

SEQ ID NO: 364400 - DNA, 20 bp, Artificial Sequence
  Description of Artificial Sequence: Synthetic oligonucleotide
  Target: LAMA2; (+) strand; PAM type: YTN; PAM sequence: CTA
tttattatatctagcacaaa

SEQ ID NO: 364401 - DNA, 20 bp, Artificial Sequence
  Description of Artificial Sequence: Synthetic oligonucleotide
  Target: LAMA2; (+) strand; PAM type: YTN; PAM sequence: TTT
attatatctagcacaaaaca

SEQ ID NO: 364402 - DNA, 20 bp, Artificial Sequence
  Description of Artificial Sequence: Synthetic oligonucleotide
  Target: LAMA2; (+) strand; PAM type: YTN; PAM sequence: TTA
ttatatctagcacaaaacat

SEQ ID NO: 364403 - DNA, 20 bp, Artificial Sequence
  Description of Artificial Sequence: Synthetic oligonucleotide
  Target: LAMA2; (+) strand; PAM type: YTN; PAM sequence: TTA
tatctagcacaaaacataga

SEQ ID NO: 364404 - DNA, 20 bp, Artificial Sequence
  Description of Artificial Sequence: Synthetic oligonucleotide
  Target: LAMA2; (+) strand; PAM type: YTN; PAM sequence: CTA
gcacaaaacatagaaacaaa

SEQ ID NO: 364405 - DNA, 20 bp, Artificial Sequence
  Description of Artificial Sequence: Synthetic oligonucleotide
  Target: LAMA2; (+) strand; PAM type: YTN; PAM sequence: TTA
ttattttgaaattatgcttt

SEQ ID NO: 364406 - DNA, 20 bp, Artificial Sequence
  Description of Artificial Sequence: Synthetic oligonucleotide
  Target: LAMA2; (+) strand; PAM type: YTN; PAM sequence: TTA
ttttgaaattatgctttact

SEQ ID NO: 364407 - DNA, 20 bp, Artificial Sequence
  Description of Artificial Sequence: Synthetic oligonucleotide
  Target: LAMA2; (+) strand; PAM type: YTN; PAM sequence: TTT
tgaaattatgctttactgaa

SEQ ID NO: 364408 - DNA, 20 bp, Artificial Sequence
  Description of Artificial Sequence: Synthetic oligonucleotide
  Target: LAMA2; (+) strand; PAM type: YTN; PAM sequence: TTT
gaaattatgctttactgaac

SEQ ID NO: 364409 - DNA, 20 bp, Artificial Sequence
  Description of Artificial Sequence: Synthetic oligonucleotide
  Target: LAMA2; (+) strand; PAM type: YTN; PAM sequence: TTG
aaattatgctttactgaaca

SEQ ID NO: 364410 - DNA, 20 bp, Artificial Sequence
  Description of Artificial Sequence: Synthetic oligonucleotide
  Target: LAMA2; (+) strand; PAM type: YTN; PAM sequence: TTA
tgctttactgaacacatagg

SEQ ID NO: 364411 - DNA, 20 bp, Artificial Sequence
  Description of Artificial Sequence: Synthetic oligonucleotide
  Target: LAMA2; (+) strand; PAM type: YTN; PAM sequence: CTT
tactgaacacataggaattg

SEQ ID NO: 364412 - DNA, 20 bp, Artificial Sequence
  Description of Artificial Sequence: Synthetic oligonucleotide
  Target: LAMA2; (+) strand; PAM type: YTN; PAM sequence: TTT
actgaacacataggaattgc

SEQ ID NO: 364413 - DNA, 20 bp, Artificial Sequence
  Description of Artificial Sequence: Synthetic oligonucleotide
  Target: LAMA2; (+) strand; PAM type: YTN; PAM sequence: TTA
ctgaacacataggaattgct

SEQ ID NO: 364414 - DNA, 20 bp, Artificial Sequence
  Description of Artificial Sequence: Synthetic oligonucleotide
  Target: LAMA2; (+) strand; PAM type: YTN; PAM sequence: CTG
aacacataggaattgctacc

SEQ ID NO: 364415 - DNA, 20 bp, Artificial Sequence
  Description of Artificial Sequence: Synthetic oligonucleotide
  Target: LAMA2; (+) strand; PAM type: YTN; PAM sequence: TTG
ctaccaatcgtttaaatagt

SEQ ID NO: 364416 - DNA, 20 bp, Artificial Sequence
  Description of Artificial Sequence: Synthetic oligonucleotide
  Target: LAMA2; (+) strand; PAM type: YTN; PAM sequence: CTA
ccaatcgtttaaatagttgc

SEQ ID NO: 364417 - DNA, 20 bp, Artificial Sequence
  Description of Artificial Sequence: Synthetic oligonucleotide
  Target: LAMA2; (+) strand; PAM type: YTN; PAM sequence: TTT
aaatagttgccttatttctt

SEQ ID NO: 364418 - DNA, 20 bp, Artificial Sequence
  Description of Artificial Sequence: Synthetic oligonucleotide
  Target: LAMA2; (+) strand; PAM type: YTN; PAM sequence: TTA
aatagttgccttatttctta

SEQ ID NO: 364419 - DNA, 20 bp, Artificial Sequence
  Description of Artificial Sequence: Synthetic oligonucleotide
  Target: LAMA2; (+) strand; PAM type: YTN; PAM sequence: TTG
ccttatttcttagacaaata

SEQ ID NO: 364420 - DNA, 20 bp, Artificial Sequence
  Description of Artificial Sequence: Synthetic oligonucleotide
  Target: LAMA2; (+) strand; PAM type: YTN; PAM sequence: CTT
atttcttagacaaatagtaa

SEQ ID NO: 364421 - DNA, 20 bp, Artificial Sequence
  Description of Artificial Sequence: Synthetic oligonucleotide
  Target: LAMA2; (+) strand; PAM type: YTN; PAM sequence: TTA
tttcttagacaaatagtaac

SEQ ID NO: 364422 - DNA, 20 bp, Artificial Sequence
  Description of Artificial Sequence: Synthetic oligonucleotide
  Target: LAMA2; (+) strand; PAM type: YTN; PAM sequence: TTT
cttagacaaatagtaactga

SEQ ID NO: 364423 - DNA, 20 bp, Artificial Sequence
  Description of Artificial Sequence: Synthetic oligonucleotide
  Target: LAMA2; (+) strand; PAM type: YTN; PAM sequence: TTC
ttagacaaatagtaactgaa

SEQ ID NO: 364424 - DNA, 20 bp, Artificial Sequence
  Description of Artificial Sequence: Synthetic oligonucleotide
  Target: LAMA2; (+) strand; PAM type: YTN; PAM sequence: CTT
agacaaatagtaactgaaat

SEQ ID NO: 364425 - DNA, 20 bp, Artificial Sequence
  Description of Artificial Sequence: Synthetic oligonucleotide
  Target: LAMA2; (+) strand; PAM type: YTN; PAM sequence: TTA
gacaaatagtaactgaaatg

SEQ ID NO: 364426 - DNA, 20 bp, Artificial Sequence
  Description of Artificial Sequence: Synthetic oligonucleotide
  Target: LAMA2; (+) strand; PAM type: YTN; PAM sequence: CTG
aaatgtatggagcattcatg

SEQ ID NO: 364427 - DNA, 20 bp, Artificial Sequence
  Description of Artificial Sequence: Synthetic oligonucleotide
  Target: LAMA2; (+) strand; PAM type: YTN; PAM sequence: TTC
atgcatatatttggaatgta

SEQ ID NO: 364428 - DNA, 20 bp, Artificial Sequence
  Description of Artificial Sequence: Synthetic oligonucleotide
  Target: LAMA2; (+) strand; PAM type: YTN; PAM sequence: TTT
ggaatgtattaagtgttcat

SEQ ID NO: 364429 - DNA, 20 bp, Artificial Sequence
  Description of Artificial Sequence: Synthetic oligonucleotide
  Target: LAMA2; (+) strand; PAM type: YTN; PAM sequence: TTG
gaatgtattaagtgttcatg

SEQ ID NO: 364430 - DNA, 20 bp, Artificial Sequence
  Description of Artificial Sequence: Synthetic oligonucleotide
  Target: LAMA2; (+) strand; PAM type: YTN; PAM sequence: TTA
agtgttcatgtgtatacctg

SEQ ID NO: 364431 - DNA, 20 bp, Artificial Sequence
  Description of Artificial Sequence: Synthetic oligonucleotide
  Target: LAMA2; (+) strand; PAM type: YTN; PAM sequence: TTC
atgtgtatacctggcgcaga

SEQ ID NO: 364432 - DNA, 20 bp, Artificial Sequence
  Description of Artificial Sequence: Synthetic oligonucleotide
  Target: LAMA2; (+) strand; PAM type: YTN; PAM sequence: CTG
gcgcagagttaattgttttg

SEQ ID NO: 364433 - DNA, 20 bp, Artificial Sequence
  Description of Artificial Sequence: Synthetic oligonucleotide
  Target: LAMA2; (+) strand; PAM type: YTN; PAM sequence: TTA
attgttttgcctgcattatc

SEQ ID NO: 364434 - DNA, 20 bp, Artificial Sequence
  Description of Artificial Sequence: Synthetic oligonucleotide
  Target: LAMA2; (+) strand; PAM type: YTN; PAM sequence: TTG
ttttgcctgcattatctgat

SEQ ID NO: 364435 - DNA, 20 bp, Artificial Sequence
  Description of Artificial Sequence: Synthetic oligonucleotide
  Target: LAMA2; (+) strand; PAM type: YTN; PAM sequence: TTT
tgcctgcattatctgatttg

SEQ ID NO: 364436 - DNA, 20 bp, Artificial Sequence
  Description of Artificial Sequence: Synthetic oligonucleotide
  Target: LAMA2; (+) strand; PAM type: YTN; PAM sequence: TTT
gcctgcattatctgatttga

SEQ ID NO: 364437 - DNA, 20 bp, Artificial Sequence
  Description of Artificial Sequence: Synthetic oligonucleotide
  Target: LAMA2; (+) strand; PAM type: YTN; PAM sequence: TTG
cctgcattatctgatttgat

SEQ ID NO: 364438 - DNA, 20 bp, Artificial Sequence
  Description of Artificial Sequence: Synthetic oligonucleotide
  Target: LAMA2; (+) strand; PAM type: YTN; PAM sequence: CTG
cattatctgatttgattttc

SEQ ID NO: 364439 - DNA, 20 bp, Artificial Sequence
  Description of Artificial Sequence: Synthetic oligonucleotide
  Target: LAMA2; (+) strand; PAM type: YTN; PAM sequence: TTA
tctgatttgattttcccaca

SEQ ID NO: 364440 - DNA, 20 bp, Artificial Sequence
  Description of Artificial Sequence: Synthetic oligonucleotide
  Target: LAMA2; (+) strand; PAM type: YTN; PAM sequence: CTG
atttgattttcccacagtgc

SEQ ID NO: 364441 - DNA, 20 bp, Artificial Sequence
  Description of Artificial Sequence: Synthetic oligonucleotide
  Target: LAMA2; (+) strand; PAM type: YTN; PAM sequence: TTT
gattttcccacagtgccatg

SEQ ID NO: 364442 - DNA, 20 bp, Artificial Sequence
  Description of Artificial Sequence: Synthetic oligonucleotide
  Target: LAMA2; (+) strand; PAM type: YTN; PAM sequence: TTG
attttcccacagtgccatga

SEQ ID NO: 364443 - DNA, 20 bp, Artificial Sequence
  Description of Artificial Sequence: Synthetic oligonucleotide
  Target: LAMA2; (+) strand; PAM type: YTN; PAM sequence: TTT
tcccacagtgccatgaagta

SEQ ID NO: 364444 - DNA, 20 bp, Artificial Sequence
  Description of Artificial Sequence: Synthetic oligonucleotide
  Target: LAMA2; (+) strand; PAM type: YTN; PAM sequence: TTT
cccacagtgccatgaagtat

SEQ ID NO: 364445 - DNA, 20 bp, Artificial Sequence
  Description of Artificial Sequence: Synthetic oligonucleotide
  Target: LAMA2; (+) strand; PAM type: YTN; PAM sequence: TTC
ccacagtgccatgaagtatg

SEQ ID NO: 364446 - DNA, 20 bp, Artificial Sequence
  Description of Artificial Sequence: Synthetic oligonucleotide
  Target: LAMA2; (+) strand; PAM type: YTN; PAM sequence: TTA
tcattatcactattatatag

SEQ ID NO: 364447 - DNA, 20 bp, Artificial Sequence
  Description of Artificial Sequence: Synthetic oligonucleotide
  Target: LAMA2; (+) strand; PAM type: YTN; PAM sequence: TTA
tcactattatatagtaaaca

SEQ ID NO: 364448 - DNA, 20 bp, Artificial Sequence
  Description of Artificial Sequence: Synthetic oligonucleotide
  Target: LAMA2; (+) strand; PAM type: YTN; PAM sequence: CTA
ttatatagtaaacagtataa

SEQ ID NO: 364449 - DNA, 20 bp, Artificial Sequence
  Description of Artificial Sequence: Synthetic oligonucleotide
  Target: LAMA2; (+) strand; PAM type: YTN; PAM sequence: TTA
tatagtaaacagtataaaaa

SEQ ID NO: 364450 - DNA, 20 bp, Artificial Sequence
  Description of Artificial Sequence: Synthetic oligonucleotide
  Target: LAMA2; (+) strand; PAM type: YTN; PAM sequence: CTA
tgacttggagaatggaaaaa

SEQ ID NO: 364451 - DNA, 20 bp, Artificial Sequence
  Description of Artificial Sequence: Synthetic oligonucleotide
  Target: LAMA2; (+) strand; PAM type: YTN; PAM sequence: CTT
ggagaatggaaaaatgtttt

SEQ ID NO: 364452 - DNA, 20 bp, Artificial Sequence
  Description of Artificial Sequence: Synthetic oligonucleotide
  Target: LAMA2; (+) strand; PAM type: YTN; PAM sequence: TTG
gagaatggaaaaatgtttta

SEQ ID NO: 364453 - DNA, 20 bp, Artificial Sequence
  Description of Artificial Sequence: Synthetic oligonucleotide
  Target: LAMA2; (+) strand; PAM type: YTN; PAM sequence: TTT
tacaatattacattctggtt

SEQ ID NO: 364454 - DNA, 20 bp, Artificial Sequence
  Description of Artificial Sequence: Synthetic oligonucleotide
  Target: LAMA2; (+) strand; PAM type: YTN; PAM sequence: TTT
acaatattacattctggttg

SEQ ID NO: 364455 - DNA, 20 bp, Artificial Sequence
  Description of Artificial Sequence: Synthetic oligonucleotide
  Target: LAMA2; (+) strand; PAM type: YTN; PAM sequence: TTA
caatattacattctggttgt

SEQ ID NO: 364456 - DNA, 20 bp, Artificial Sequence
  Description of Artificial Sequence: Synthetic oligonucleotide
  Target: LAMA2; (+) strand; PAM type: YTN; PAM sequence: TTA
cattctggttgttcacttcc

SEQ ID NO: 364457 - DNA, 20 bp, Artificial Sequence
  Description of Artificial Sequence: Synthetic oligonucleotide
  Target: LAMA2; (+) strand; PAM type: YTN; PAM sequence: TTC
tggttgttcacttcccttcc

SEQ ID NO: 364458 - DNA, 20 bp, Artificial Sequence
  Description of Artificial Sequence: Synthetic oligonucleotide
  Target: LAMA2; (+) strand; PAM type: YTN; PAM sequence: CTG
gttgttcacttcccttccat

SEQ ID NO: 364459 - DNA, 20 bp, Artificial Sequence
  Description of Artificial Sequence: Synthetic oligonucleotide
  Target: LAMA2; (+) strand; PAM type: YTN; PAM sequence: TTG
ttcacttcccttccattcat

SEQ ID NO: 364460 - DNA, 20 bp, Artificial Sequence
  Description of Artificial Sequence: Synthetic oligonucleotide
  Target: LAMA2; (+) strand; PAM type: YTN; PAM sequence: TTC
acttcccttccattcatgtt

SEQ ID NO: 364461 - DNA, 20 bp, Artificial Sequence
  Description of Artificial Sequence: Synthetic oligonucleotide
  Target: LAMA2; (+) strand; PAM type: YTN; PAM sequence: CTT
cccttccattcatgttgaca

SEQ ID NO: 364462 - DNA, 20 bp, Artificial Sequence
  Description of Artificial Sequence: Synthetic oligonucleotide
  Target: LAMA2; (+) strand; PAM type: YTN; PAM sequence: TTC
ccttccattcatgttgacat

SEQ ID NO: 364463 - DNA, 20 bp, Artificial Sequence
  Description of Artificial Sequence: Synthetic oligonucleotide
  Target: LAMA2; (+) strand; PAM type: YTN; PAM sequence: CTT
ccattcatgttgacattgaa

SEQ ID NO: 364464 - DNA, 20 bp, Artificial Sequence
  Description of Artificial Sequence: Synthetic oligonucleotide
  Target: LAMA2; (+) strand; PAM type: YTN; PAM sequence: TTC
cattcatgttgacattgaat

SEQ ID NO: 364465 - DNA, 20 bp, Artificial Sequence
  Description of Artificial Sequence: Synthetic oligonucleotide
  Target: LAMA2; (+) strand; PAM type: YTN; PAM sequence: TTC
atgttgacattgaattgttc

SEQ ID NO: 364466 - DNA, 20 bp, Artificial Sequence
  Description of Artificial Sequence: Synthetic oligonucleotide
  Target: LAMA2; (+) strand; PAM type: YTN; PAM sequence: TTG
acattgaattgttctaggct

SEQ ID NO: 364467 - DNA, 20 bp, Artificial Sequence
  Description of Artificial Sequence: Synthetic oligonucleotide
  Target: LAMA2; (+) strand; PAM type: YTN; PAM sequence: TTG
aattgttctaggctgctaag

SEQ ID NO: 364468 - DNA, 20 bp, Artificial Sequence
  Description of Artificial Sequence: Synthetic oligonucleotide
  Target: LAMA2; (+) strand; PAM type: YTN; PAM sequence: TTG
ttctaggctgctaaggcagc

SEQ ID NO: 364469 - DNA, 20 bp, Artificial Sequence
  Description of Artificial Sequence: Synthetic oligonucleotide
  Target: LAMA2; (+) strand; PAM type: YTN; PAM sequence: TTC
taggctgctaaggcagcact

SEQ ID NO: 364470 - DNA, 20 bp, Artificial Sequence
  Description of Artificial Sequence: Synthetic oligonucleotide
  Target: LAMA2; (+) strand; PAM type: YTN; PAM sequence: CTA
ggctgctaaggcagcactgt

SEQ ID NO: 364471 - DNA, 20 bp, Artificial Sequence
  Description of Artificial Sequence: Synthetic oligonucleotide
  Target: LAMA2; (+) strand; PAM type: YTN; PAM sequence: CTG
ctaaggcagcactgtcagaa

SEQ ID NO: 364472 - DNA, 20 bp, Artificial Sequence
  Description of Artificial Sequence: Synthetic oligonucleotide
  Target: LAMA2; (+) strand; PAM type: YTN; PAM sequence: CTA
aggcagcactgtcagaagcc

SEQ ID NO: 364473 - DNA, 20 bp, Artificial Sequence
  Description of Artificial Sequence: Synthetic oligonucleotide
  Target: LAMA2; (+) strand; PAM type: YTN; PAM sequence: CTG
tcagaagccacgttttttct

SEQ ID NO: 364474 - DNA, 20 bp, Artificial Sequence
  Description of Artificial Sequence: Synthetic oligonucleotide
  Target: LAMA2; (+) strand; PAM type: YTN; PAM sequence: TTT
tttctaggcatacacacact

SEQ ID NO: 364475 - DNA, 20 bp, Artificial Sequence
  Description of Artificial Sequence: Synthetic oligonucleotide
  Target: LAMA2; (+) strand; PAM type: YTN; PAM sequence: TTT
ttctaggcatacacacactt

SEQ ID NO: 364476 - DNA, 20 bp, Artificial Sequence
  Description of Artificial Sequence: Synthetic oligonucleotide
  Target: LAMA2; (+) strand; PAM type: YTN; PAM sequence: TTT
tctaggcatacacacacttt

SEQ ID NO: 364477 - DNA, 20 bp, Artificial Sequence
  Description of Artificial Sequence: Synthetic oligonucleotide
  Target: LAMA2; (+) strand; PAM type: YTN; PAM sequence: TTT
ctaggcatacacacacttta

SEQ ID NO: 364478 - DNA, 20 bp, Artificial Sequence
  Description of Artificial Sequence: Synthetic oligonucleotide
  Target: LAMA2; (+) strand; PAM type: YTN; PAM sequence: TTC
taggcatacacacactttat

SEQ ID NO: 364479 - DNA, 20 bp, Artificial Sequence
  Description of Artificial Sequence: Synthetic oligonucleotide
  Target: LAMA2; (+) strand; PAM type: YTN; PAM sequence: CTA
ggcatacacacactttattc

SEQ ID NO: 364480 - DNA, 20 bp, Artificial Sequence
  Description of Artificial Sequence: Synthetic oligonucleotide
  Target: LAMA2; (+) strand; PAM type: YTN; PAM sequence: CTT
tattcctttgtcctttagtt

SEQ ID NO: 364481 - DNA, 20 bp, Artificial Sequence
  Description of Artificial Sequence: Synthetic oligonucleotide
  Target: LAMA2; (+) strand; PAM type: YTN; PAM sequence: TTT
attcctttgtcctttagttc

SEQ ID NO: 364482 - DNA, 20 bp, Artificial Sequence
  Description of Artificial Sequence: Synthetic oligonucleotide
  Target: LAMA2; (+) strand; PAM type: YTN; PAM sequence: TTA
ttcctttgtcctttagttcc

SEQ ID NO: 364483 - DNA, 20 bp, Artificial Sequence
  Description of Artificial Sequence: Synthetic oligonucleotide
  Target: LAMA2; (+) strand; PAM type: YTN; PAM sequence: TTC
ctttgtcctttagttcctta

SEQ ID NO: 364484 - DNA, 20 bp, Artificial Sequence
  Description of Artificial Sequence: Synthetic oligonucleotide
  Target: LAMA2; (+) strand; PAM type: YTN; PAM sequence: CTT
tgtcctttagttccttaaac

SEQ ID NO: 364485 - DNA, 20 bp, Artificial Sequence
  Description of Artificial Sequence: Synthetic oligonucleotide
  Target: LAMA2; (+) strand; PAM type: YTN; PAM sequence: TTT
gtcctttagttccttaaact

SEQ ID NO: 364486 - DNA, 20 bp, Artificial Sequence
  Description of Artificial Sequence: Synthetic oligonucleotide
  Target: LAMA2; (+) strand; PAM type: YTN; PAM sequence: TTG
tcctttagttccttaaacta

SEQ ID NO: 364487 - DNA, 20 bp, Artificial Sequence
  Description of Artificial Sequence: Synthetic oligonucleotide
  Target: LAMA2; (+) strand; PAM type: YTN; PAM sequence: CTT
tagttccttaaactacccat

SEQ ID NO: 364488 - DNA, 20 bp, Artificial Sequence
  Description of Artificial Sequence: Synthetic oligonucleotide
  Target: LAMA2; (+) strand; PAM type: YTN; PAM sequence: TTT
agttccttaaactacccatg

SEQ ID NO: 364489 - DNA, 20 bp, Artificial Sequence
  Description of Artificial Sequence: Synthetic oligonucleotide
  Target: LAMA2; (+) strand; PAM type: YTN; PAM sequence: TTA
gttccttaaactacccatgc

SEQ ID NO: 364490 - DNA, 20 bp, Artificial Sequence
  Description of Artificial Sequence: Synthetic oligonucleotide
  Target: LAMA2; (+) strand; PAM type: YTN; PAM sequence: TTC
cttaaactacccatgcactt

SEQ ID NO: 364491 - DNA, 20 bp, Artificial Sequence
  Description of Artificial Sequence: Synthetic oligonucleotide
  Target: LAMA2; (+) strand; PAM type: YTN; PAM sequence: CTT
aaactacccatgcactttcc

SEQ ID NO: 364492 - DNA, 20 bp, Artificial Sequence
  Description of Artificial Sequence: Synthetic oligonucleotide
  Target: LAMA2; (+) strand; PAM type: YTN; PAM sequence: TTA
aactacccatgcactttcct

SEQ ID NO: 364493 - DNA, 20 bp, Artificial Sequence
  Description of Artificial Sequence: Synthetic oligonucleotide
  Target: LAMA2; (+) strand; PAM type: YTN; PAM sequence: CTA
cccatgcactttcctcctct

SEQ ID NO: 364494 - DNA, 20 bp, Artificial Sequence
  Description of Artificial Sequence: Synthetic oligonucleotide
  Target: LAMA2; (+) strand; PAM type: YTN; PAM sequence: CTT
tcctcctctttctttttaca

SEQ ID NO: 364495 - DNA, 20 bp, Artificial Sequence
  Description of Artificial Sequence: Synthetic oligonucleotide
  Target: LAMA2; (+) strand; PAM type: YTN; PAM sequence: TTT
cctcctctttctttttacat

SEQ ID NO: 364496 - DNA, 20 bp, Artificial Sequence
  Description of Artificial Sequence: Synthetic oligonucleotide
  Target: LAMA2; (+) strand; PAM type: YTN; PAM sequence: TTC
ctcctctttctttttacatt

SEQ ID NO: 364497 - DNA, 20 bp, Artificial Sequence
  Description of Artificial Sequence: Synthetic oligonucleotide
  Target: LAMA2; (+) strand; PAM type: YTN; PAM sequence: CTC
ctctttctttttacattgat

SEQ ID NO: 364498 - DNA, 20 bp, Artificial Sequence
  Description of Artificial Sequence: Synthetic oligonucleotide
  Target: LAMA2; (+) strand; PAM type: YTN; PAM sequence: CTC
tttctttttacattgatgat

SEQ ID NO: 364499 - DNA, 20 bp, Artificial Sequence
  Description of Artificial Sequence: Synthetic oligonucleotide
  Target: LAMA2; (+) strand; PAM type: YTN; PAM sequence: CTT
tctttttacattgatgatta

SEQ ID NO: 364500 - DNA, 20 bp, Artificial Sequence
  Description of Artificial Sequence: Synthetic oligonucleotide
  Target: LAMA2; (+) strand; PAM type: YTN; PAM sequence: TTT
ctttttacattgatgattaa

SEQ ID NO: 364501 - DNA, 20 bp, Artificial Sequence
  Description of Artificial Sequence: Synthetic oligonucleotide
  Target: LAMA2; (+) strand; PAM type: YTN; PAM sequence: TTC
tttttacattgatgattaaa

SEQ ID NO: 364502 - DNA, 20 bp, Artificial Sequence
  Description of Artificial Sequence: Synthetic oligonucleotide
  Target: LAMA2; (+) strand; PAM type: YTN; PAM sequence: CTT
tttacattgatgattaaaat

SEQ ID NO: 364503 - DNA, 20 bp, Artificial Sequence
  Description of Artificial Sequence: Synthetic oligonucleotide
  Target: LAMA2; (+) strand; PAM type: YTN; PAM sequence: TTT
ttacattgatgattaaaata

SEQ ID NO: 364504 - DNA, 20 bp, Artificial Sequence
  Description of Artificial Sequence: Synthetic oligonucleotide
  Target: LAMA2; (+) strand; PAM type: YTN; PAM sequence: TTT
tacattgatgattaaaatag

SEQ ID NO: 364505 - DNA, 20 bp, Artificial Sequence
  Description of Artificial Sequence: Synthetic oligonucleotide
  Target: LAMA2; (+) strand; PAM type: YTN; PAM sequence: TTT
acattgatgattaaaatagt

SEQ ID NO: 364506 - DNA, 20 bp, Artificial Sequence
  Description of Artificial Sequence: Synthetic oligonucleotide
  Target: LAMA2; (+) strand; PAM type: YTN; PAM sequence: TTA
cattgatgattaaaatagtg

SEQ ID NO: 364507 - DNA, 20 bp, Artificial Sequence
  Description of Artificial Sequence: Synthetic oligonucleotide
  Target: LAMA2; (+) strand; PAM type: YTN; PAM sequence: TTG
atgattaaaatagtgagcct

SEQ ID NO: 364508 - DNA, 20 bp, Artificial Sequence
  Description of Artificial Sequence: Synthetic oligonucleotide
  Target: LAMA2; (+) strand; PAM type: YTN; PAM sequence: TTA
aaatagtgagcctgaatttt

SEQ ID NO: 364509 - DNA, 20 bp, Artificial Sequence
  Description of Artificial Sequence: Synthetic oligonucleotide
  Target: LAMA2; (+) strand; PAM type: YTN; PAM sequence: CTG
aatttttttaaataaaaacc

SEQ ID NO: 364510 - DNA, 20 bp, Artificial Sequence
  Description of Artificial Sequence: Synthetic oligonucleotide
  Target: LAMA2; (+) strand; PAM type: YTN; PAM sequence: TTT
ttttaaataaaaaccaacta

SEQ ID NO: 364511 - DNA, 20 bp, Artificial Sequence
  Description of Artificial Sequence: Synthetic oligonucleotide
  Target: LAMA2; (+) strand; PAM type: YTN; PAM sequence: TTT
tttaaataaaaaccaactaa

SEQ ID NO: 364512 - DNA, 20 bp, Artificial Sequence
  Description of Artificial Sequence: Synthetic oligonucleotide
  Target: LAMA2; (+) strand; PAM type: YTN; PAM sequence: TTT
ttaaataaaaaccaactaag

SEQ ID NO: 364513 - DNA, 20 bp, Artificial Sequence
  Description of Artificial Sequence: Synthetic oligonucleotide
  Target: LAMA2; (+) strand; PAM type: YTN; PAM sequence: TTT
taaataaaaaccaactaagt

SEQ ID NO: 364514 - DNA, 20 bp, Artificial Sequence
  Description of Artificial Sequence: Synthetic oligonucleotide
  Target: LAMA2; (+) strand; PAM type: YTN; PAM sequence: TTT
aaataaaaaccaactaagtt

SEQ ID NO: 364515 - DNA, 20 bp, Artificial Sequence
  Description of Artificial Sequence: Synthetic oligonucleotide
  Target: LAMA2; (+) strand; PAM type: YTN; PAM sequence: TTA
aataaaaaccaactaagttt

SEQ ID NO: 364516 - DNA, 20 bp, Artificial Sequence
  Description of Artificial Sequence: Synthetic oligonucleotide
  Target: LAMA2; (+) strand; PAM type: YTN; PAM sequence: CTA
agttttttattatttattat

SEQ ID NO: 364517 - DNA, 20 bp, Artificial Sequence
  Description of Artificial Sequence: Synthetic oligonucleotide
  Target: LAMA2; (+) strand; PAM type: YTN; PAM sequence: TTT
tttattatttattatttgga

SEQ ID NO: 364518 - DNA, 20 bp, Artificial Sequence
  Description of Artificial Sequence: Synthetic oligonucleotide
  Target: LAMA2; (+) strand; PAM type: YTN; PAM sequence: TTT
ttattatttattatttggag

SEQ ID NO: 364519 - DNA, 20 bp, Artificial Sequence
  Description of Artificial Sequence: Synthetic oligonucleotide
  Target: LAMA2; (+) strand; PAM type: YTN; PAM sequence: TTT
tattatttattatttggagg

SEQ ID NO: 364520 - DNA, 20 bp, Artificial Sequence
  Description of Artificial Sequence: Synthetic oligonucleotide
  Target: LAMA2; (+) strand; PAM type: YTN; PAM sequence: TTT
attatttattatttggagga

SEQ ID NO: 364521 - DNA, 20 bp, Artificial Sequence
  Description of Artificial Sequence: Synthetic oligonucleotide
  Target: LAMA2; (+) strand; PAM type: YTN; PAM sequence: TTA
ttatttattatttggaggaa

SEQ ID NO: 364522 - DNA, 20 bp, Artificial Sequence
  Description of Artificial Sequence: Synthetic oligonucleotide
  Target: LAMA2; (+) strand; PAM type: YTN; PAM sequence: TTA
tttattatttggaggaacat

SEQ ID NO: 364523 - DNA, 20 bp, Artificial Sequence
  Description of Artificial Sequence: Synthetic oligonucleotide
  Target: LAMA2; (+) strand; PAM type: YTN; PAM sequence: TTT
attatttggaggaacatatg

SEQ ID NO: 364524 - DNA, 20 bp, Artificial Sequence
  Description of Artificial Sequence: Synthetic oligonucleotide
  Target: LAMA2; (+) strand; PAM type: YTN; PAM sequence: TTA
ttatttggaggaacatatgc

SEQ ID NO: 364525 - DNA, 20 bp, Artificial Sequence
  Description of Artificial Sequence: Synthetic oligonucleotide
  Target: LAMA2; (+) strand; PAM type: YTN; PAM sequence: TTA
tttggaggaacatatgccct

SEQ ID NO: 364526 - DNA, 20 bp, Artificial Sequence
  Description of Artificial Sequence: Synthetic oligonucleotide
  Target: LAMA2; (+) strand; PAM type: YTN; PAM sequence: TTT
ggaggaacatatgccctcca

SEQ ID NO: 364527 - DNA, 20 bp, Artificial Sequence
  Description of Artificial Sequence: Synthetic oligonucleotide
  Target: LAMA2; (+) strand; PAM type: YTN; PAM sequence: TTG
gaggaacatatgccctccaa

SEQ ID NO: 364528 - DNA, 20 bp, Artificial Sequence
  Description of Artificial Sequence: Synthetic oligonucleotide
  Target: LAMA2; (+) strand; PAM type: YTN; PAM sequence: CTC
caaaatatcatttagtgcat

SEQ ID NO: 364529 - DNA, 20 bp, Artificial Sequence
  Description of Artificial Sequence: Synthetic oligonucleotide
  Target: LAMA2; (+) strand; PAM type: YTN; PAM sequence: TTT
agtgcatcttagacataaaa

SEQ ID NO: 364530 - DNA, 20 bp, Artificial Sequence
  Description of Artificial Sequence: Synthetic oligonucleotide
  Target: LAMA2; (+) strand; PAM type: YTN; PAM sequence: TTA
gtgcatcttagacataaaac

SEQ ID NO: 364531 - DNA, 20 bp, Artificial Sequence
  Description of Artificial Sequence: Synthetic oligonucleotide
  Target: LAMA2; (+) strand; PAM type: YTN; PAM sequence: CTT
agacataaaacaatttaact

SEQ ID NO: 364532 - DNA, 20 bp, Artificial Sequence
  Description of Artificial Sequence: Synthetic oligonucleotide
  Target: LAMA2; (+) strand; PAM type: YTN; PAM sequence: TTA
gacataaaacaatttaactg

SEQ ID NO: 364533 - DNA, 20 bp, Artificial Sequence
  Description of Artificial Sequence: Synthetic oligonucleotide
  Target: LAMA2; (+) strand; PAM type: YTN; PAM sequence: TTT
aactgcttgaagaaaatgtc

SEQ ID NO: 364534 - DNA, 20 bp, Artificial Sequence
  Description of Artificial Sequence: Synthetic oligonucleotide
  Target: LAMA2; (+) strand; PAM type: YTN; PAM sequence: TTA
actgcttgaagaaaatgtcc

SEQ ID NO: 364535 - DNA, 20 bp, Artificial Sequence
  Description of Artificial Sequence: Synthetic oligonucleotide
  Target: LAMA2; (+) strand; PAM type: YTN; PAM sequence: CTG
cttgaagaaaatgtccagct

SEQ ID NO: 364536 - DNA, 20 bp, Artificial Sequence
  Description of Artificial Sequence: Synthetic oligonucleotide
  Target: LAMA2; (+) strand; PAM type: YTN; PAM sequence: CTT
gaagaaaatgtccagcttct

SEQ ID NO: 364537 - DNA, 20 bp, Artificial Sequence
  Description of Artificial Sequence: Synthetic oligonucleotide
  Target: LAMA2; (+) strand; PAM type: YTN; PAM sequence: TTG
aagaaaatgtccagcttctg

SEQ ID NO: 364538 - DNA, 20 bp, Artificial Sequence
  Description of Artificial Sequence: Synthetic oligonucleotide
  Target: LAMA2; (+) strand; PAM type: YTN; PAM sequence: CTT
ctgaaatggcatgccattag

SEQ ID NO: 364539 - DNA, 20 bp, Artificial Sequence
  Description of Artificial Sequence: Synthetic oligonucleotide
  Target: LAMA2; (+) strand; PAM type: YTN; PAM sequence: TTC
tgaaatggcatgccattaga

SEQ ID NO: 364540 - DNA, 20 bp, Artificial Sequence
  Description of Artificial Sequence: Synthetic oligonucleotide
  Target: LAMA2; (+) strand; PAM type: YTN; PAM sequence: CTG
aaatggcatgccattagata

SEQ ID NO: 364541 - DNA, 20 bp, Artificial Sequence
  Description of Artificial Sequence: Synthetic oligonucleotide
  Target: LAMA2; (+) strand; PAM type: YTN; PAM sequence: TTA
gatattagtgacatttgttt

SEQ ID NO: 364542 - DNA, 20 bp, Artificial Sequence
  Description of Artificial Sequence: Synthetic oligonucleotide
  Target: LAMA2; (+) strand; PAM type: YTN; PAM sequence: TTA
gtgacatttgtttataaaca

SEQ ID NO: 364543 - DNA, 20 bp, Artificial Sequence
  Description of Artificial Sequence: Synthetic oligonucleotide
  Target: LAMA2; (+) strand; PAM type: YTN; PAM sequence: TTT
gtttataaacaaataaatgt

SEQ ID NO: 364544 - DNA, 20 bp, Artificial Sequence
  Description of Artificial Sequence: Synthetic oligonucleotide
  Target: LAMA2; (+) strand; PAM type: YTN; PAM sequence: TTG
tttataaacaaataaatgtc

SEQ ID NO: 364545 - DNA, 20 bp, Artificial Sequence
  Description of Artificial Sequence: Synthetic oligonucleotide
  Target: LAMA2; (+) strand; PAM type: YTN; PAM sequence: TTT
ataaacaaataaatgtcttc

SEQ ID NO: 364546 - DNA, 20 bp, Artificial Sequence
  Description of Artificial Sequence: Synthetic oligonucleotide
  Target: LAMA2; (+) strand; PAM type: YTN; PAM sequence: TTA
taaacaaataaatgtcttca

SEQ ID NO: 364547 - DNA, 20 bp, Artificial Sequence
  Description of Artificial Sequence: Synthetic oligonucleotide
  Target: LAMA2; (+) strand; PAM type: YTN; PAM sequence: CTT
caacctctatgtagttacta

SEQ ID NO: 364548 - DNA, 20 bp, Artificial Sequence
  Description of Artificial Sequence: Synthetic oligonucleotide
  Target: LAMA2; (+) strand; PAM type: YTN; PAM sequence: TTC
aacctctatgtagttactat

SEQ ID NO: 364549 - DNA, 20 bp, Artificial Sequence
  Description of Artificial Sequence: Synthetic oligonucleotide
  Target: LAMA2; (+) strand; PAM type: YTN; PAM sequence: CTC
tatgtagttactatcaatat

SEQ ID NO: 364550 - DNA, 20 bp, Artificial Sequence
  Description of Artificial Sequence: Synthetic oligonucleotide
  Target: LAMA2; (+) strand; PAM type: YTN; PAM sequence: CTA
tgtagttactatcaatatag

SEQ ID NO: 364551 - DNA, 20 bp, Artificial Sequence
  Description of Artificial Sequence: Synthetic oligonucleotide
  Target: LAMA2; (+) strand; PAM type: YTN; PAM sequence: TTA
ctatcaatatagccatgcaa

SEQ ID NO: 364552 - DNA, 20 bp, Artificial Sequence
  Description of Artificial Sequence: Synthetic oligonucleotide
  Target: LAMA2; (+) strand; PAM type: YTN; PAM sequence: CTA
tcaatatagccatgcaatat

SEQ ID NO: 364553 - DNA, 20 bp, Artificial Sequence
  Description of Artificial Sequence: Synthetic oligonucleotide
  Target: LAMA2; (+) strand; PAM type: YTN; PAM sequence: TTC
caaatacctttcaaaaagta

SEQ ID NO: 364554 - DNA, 20 bp, Artificial Sequence
  Description of Artificial Sequence: Synthetic oligonucleotide
  Target: LAMA2; (+) strand; PAM type: YTN; PAM sequence: CTT
tcaaaaagtaatgttgatac

SEQ ID NO: 364555 - DNA, 20 bp, Artificial Sequence
  Description of Artificial Sequence: Synthetic oligonucleotide
  Target: LAMA2; (+) strand; PAM type: YTN; PAM sequence: TTT
caaaaagtaatgttgataca

SEQ ID NO: 364556 - DNA, 20 bp, Artificial Sequence
  Description of Artificial Sequence: Synthetic oligonucleotide
  Target: LAMA2; (+) strand; PAM type: YTN; PAM sequence: TTC
aaaaagtaatgttgatacag

SEQ ID NO: 364557 - DNA, 20 bp, Artificial Sequence
  Description of Artificial Sequence: Synthetic oligonucleotide
  Target: LAMA2; (+) strand; PAM type: YTN; PAM sequence: TTG
atacagtagtgatcacttat

SEQ ID NO: 364558 - DNA, 20 bp, Artificial Sequence
  Description of Artificial Sequence: Synthetic oligonucleotide
  Target: LAMA2; (+) strand; PAM type: YTN; PAM sequence: CTT
atgtccttttgattgaaact

SEQ ID NO: 364559 - DNA, 20 bp, Artificial Sequence
  Description of Artificial Sequence: Synthetic oligonucleotide
  Target: LAMA2; (+) strand; PAM type: YTN; PAM sequence: TTA
tgtccttttgattgaaactg

SEQ ID NO: 364560 - DNA, 20 bp, Artificial Sequence
  Description of Artificial Sequence: Synthetic oligonucleotide
  Target: LAMA2; (+) strand; PAM type: YTN; PAM sequence: CTT
ttgattgaaactgcattata

SEQ ID NO: 364561 - DNA, 20 bp, Artificial Sequence
  Description of Artificial Sequence: Synthetic oligonucleotide
  Target: LAMA2; (+) strand; PAM type: YTN; PAM sequence: TTT
tgattgaaactgcattatac

SEQ ID NO: 364562 - DNA, 20 bp, Artificial Sequence
  Description of Artificial Sequence: Synthetic oligonucleotide
  Target: LAMA2; (+) strand; PAM type: YTN; PAM sequence: TTT
gattgaaactgcattatacg

SEQ ID NO: 364563 - DNA, 20 bp, Artificial Sequence
  Description of Artificial Sequence: Synthetic oligonucleotide
  Target: LAMA2; (+) strand; PAM type: YTN; PAM sequence: TTG
attgaaactgcattatacga

SEQ ID NO: 364564 - DNA, 20 bp, Artificial Sequence
  Description of Artificial Sequence: Synthetic oligonucleotide
  Target: LAMA2; (+) strand; PAM type: YTN; PAM sequence: TTG
aaactgcattatacgaagtt

SEQ ID NO: 364565 - DNA, 20 bp, Artificial Sequence
  Description of Artificial Sequence: Synthetic oligonucleotide
  Target: LAMA2; (+) strand; PAM type: YTN; PAM sequence: CTG
cattatacgaagttctttcc

SEQ ID NO: 364566 - DNA, 20 bp, Artificial Sequence
  Description of Artificial Sequence: Synthetic oligonucleotide
  Target: LAMA2; (+) strand; PAM type: YTN; PAM sequence: TTA
tacgaagttctttcctttca

SEQ ID NO: 364567 - DNA, 20 bp, Artificial Sequence
  Description of Artificial Sequence: Synthetic oligonucleotide
  Target: LAMA2; (+) strand; PAM type: YTN; PAM sequence: TTC
tttcctttcagcacaataac

SEQ ID NO: 364568 - DNA, 20 bp, Artificial Sequence
  Description of Artificial Sequence: Synthetic oligonucleotide
  Target: LAMA2; (+) strand; PAM type: YTN; PAM sequence: CTT
tcctttcagcacaataacct

SEQ ID NO: 364569 - DNA, 20 bp, Artificial Sequence
  Description of Artificial Sequence: Synthetic oligonucleotide
  Target: LAMA2; (+) strand; PAM type: YTN; PAM sequence: TTT
cctttcagcacaataacctg

SEQ ID NO: 364570 - DNA, 20 bp, Artificial Sequence
  Description of Artificial Sequence: Synthetic oligonucleotide
  Target: LAMA2; (+) strand; PAM type: YTN; PAM sequence: TTC
ctttcagcacaataacctga

SEQ ID NO: 364571 - DNA, 20 bp, Artificial Sequence
  Description of Artificial Sequence: Synthetic oligonucleotide
  Target: LAMA2; (+) strand; PAM type: YTN; PAM sequence: CTT
tcagcacaataacctgaaaa

SEQ ID NO: 364572 - DNA, 20 bp, Artificial Sequence
  Description of Artificial Sequence: Synthetic oligonucleotide
  Target: LAMA2; (+) strand; PAM type: YTN; PAM sequence: TTT
cagcacaataacctgaaaaa

SEQ ID NO: 364573 - DNA, 20 bp, Artificial Sequence
  Description of Artificial Sequence: Synthetic oligonucleotide
  Target: LAMA2; (+) strand; PAM type: YTN; PAM sequence: TTC
agcacaataacctgaaaaat

SEQ ID NO: 364574 - DNA, 20 bp, Artificial Sequence
  Description of Artificial Sequence: Synthetic oligonucleotide
  Target: LAMA2; (+) strand; PAM type: YTN; PAM sequence: CTG
aaaaatatagctgtctattt

SEQ ID NO: 364575 - DNA, 20 bp, Artificial Sequence
  Description of Artificial Sequence: Synthetic oligonucleotide
  Target: LAMA2; (+) strand; PAM type: YTN; PAM sequence: CTG
tctatttaaagaagacattt

SEQ ID NO: 364576 - DNA, 20 bp, Artificial Sequence
  Description of Artificial Sequence: Synthetic oligonucleotide
  Target: LAMA2; (+) strand; PAM type: YTN; PAM sequence: CTA
tttaaagaagacattttctt

SEQ ID NO: 364577 - DNA, 20 bp, Artificial Sequence
  Description of Artificial Sequence: Synthetic oligonucleotide
  Target: LAMA2; (+) strand; PAM type: YTN; PAM sequence: TTT
aaagaagacattttcttgtt

SEQ ID NO: 364578 - DNA, 20 bp, Artificial Sequence
  Description of Artificial Sequence: Synthetic oligonucleotide
  Target: LAMA2; (+) strand; PAM type: YTN; PAM sequence: TTA
aagaagacattttcttgttt

SEQ ID NO: 364579 - DNA, 20 bp, Artificial Sequence
  Description of Artificial Sequence: Synthetic oligonucleotide
  Target: LAMA2; (+) strand; PAM type: YTN; PAM sequence: TTT
tcttgtttggcagaatatta

SEQ ID NO: 364580 - DNA, 20 bp, Artificial Sequence
  Description of Artificial Sequence: Synthetic oligonucleotide
  Target: LAMA2; (+) strand; PAM type: YTN; PAM sequence: TTT
cttgtttggcagaatattat

SEQ ID NO: 364581 - DNA, 20 bp, Artificial Sequence
  Description of Artificial Sequence: Synthetic oligonucleotide
  Target: LAMA2; (+) strand; PAM type: YTN; PAM sequence: TTC
ttgtttggcagaatattatc

SEQ ID NO: 364582 - DNA, 20 bp, Artificial Sequence
  Description of Artificial Sequence: Synthetic oligonucleotide
  Target: LAMA2; (+) strand; PAM type: YTN; PAM sequence: CTT
gtttggcagaatattatcat

SEQ ID NO: 364583 - DNA, 20 bp, Artificial Sequence
  Description of Artificial Sequence: Synthetic oligonucleotide
  Target: LAMA2; (+) strand; PAM type: YTN; PAM sequence: TTG
tttggcagaatattatcatc

SEQ ID NO: 364584 - DNA, 20 bp, Artificial Sequence
  Description of Artificial Sequence: Synthetic oligonucleotide
  Target: LAMA2; (+) strand; PAM type: YTN; PAM sequence: TTT
ggcagaatattatcatcata

SEQ ID NO: 364585 - DNA, 20 bp, Artificial Sequence
  Description of Artificial Sequence: Synthetic oligonucleotide
  Target: LAMA2; (+) strand; PAM type: YTN; PAM sequence: TTG
gcagaatattatcatcatac

SEQ ID NO: 364586 - DNA, 20 bp, Artificial Sequence
  Description of Artificial Sequence: Synthetic oligonucleotide
  Target: LAMA2; (+) strand; PAM type: YTN; PAM sequence: TTA
tcatcatacagcatatgtac

SEQ ID NO: 364587 - DNA, 20 bp, Artificial Sequence
  Description of Artificial Sequence: Synthetic oligonucleotide
  Target: LAMA2; (+) strand; PAM type: YTN; PAM sequence: CTA
atttgtgtcgatatgtgcta

SEQ ID NO: 364588 - DNA, 20 bp, Artificial Sequence
  Description of Artificial Sequence: Synthetic oligonucleotide
  Target: LAMA2; (+) strand; PAM type: YTN; PAM sequence: TTT
gtgtcgatatgtgctaggct

SEQ ID NO: 364589 - DNA, 20 bp, Artificial Sequence
  Description of Artificial Sequence: Synthetic oligonucleotide
  Target: LAMA2; (+) strand; PAM type: YTN; PAM sequence: TTG
tgtcgatatgtgctaggctt

SEQ ID NO: 364590 - DNA, 20 bp, Artificial Sequence
  Description of Artificial Sequence: Synthetic oligonucleotide
  Target: LAMA2; (+) strand; PAM type: YTN; PAM sequence: CTA
ggcttagaaaactcacttta

SEQ ID NO: 364591 - DNA, 20 bp, Artificial Sequence
  Description of Artificial Sequence: Synthetic oligonucleotide
  Target: LAMA2; (+) strand; PAM type: YTN; PAM sequence: CTT
agaaaactcactttaagttt

SEQ ID NO: 364592 - DNA, 20 bp, Artificial Sequence
  Description of Artificial Sequence: Synthetic oligonucleotide
  Target: LAMA2; (+) strand; PAM type: YTN; PAM sequence: TTA
gaaaactcactttaagtttt

SEQ ID NO: 364593 - DNA, 20 bp, Artificial Sequence
  Description of Artificial Sequence: Synthetic oligonucleotide
  Target: LAMA2; (+) strand; PAM type: YTN; PAM sequence: CTC
actttaagttttactaaatt

SEQ ID NO: 364594 - DNA, 20 bp, Artificial Sequence
  Description of Artificial Sequence: Synthetic oligonucleotide
  Target: LAMA2; (+) strand; PAM type: YTN; PAM sequence: CTT
taagttttactaaatttatt

SEQ ID NO: 364595 - DNA, 20 bp, Artificial Sequence
  Description of Artificial Sequence: Synthetic oligonucleotide
  Target: LAMA2; (+) strand; PAM type: YTN; PAM sequence: TTT
aagttttactaaatttattt

SEQ ID NO: 364596 - DNA, 20 bp, Artificial Sequence
  Description of Artificial Sequence: Synthetic oligonucleotide
  Target: LAMA2; (+) strand; PAM type: YTN; PAM sequence: TTA
agttttactaaatttatttt

SEQ ID NO: 364597 - DNA, 20 bp, Artificial Sequence
  Description of Artificial Sequence: Synthetic oligonucleotide
  Target: LAMA2; (+) strand; PAM type: YTN; PAM sequence: TTT
tactaaatttattttggagt

SEQ ID NO: 364598 - DNA, 20 bp, Artificial Sequence
  Description of Artificial Sequence: Synthetic oligonucleotide
  Target: LAMA2; (+) strand; PAM type: YTN; PAM sequence: TTT
actaaatttattttggagtt

SEQ ID NO: 364599 - DNA, 20 bp, Artificial Sequence
  Description of Artificial Sequence: Synthetic oligonucleotide
  Target: LAMA2; (+) strand; PAM type: YTN; PAM sequence: TTA
ctaaatttattttggagttt

SEQ ID NO: 364600 - DNA, 20 bp, Artificial Sequence
  Description of Artificial Sequence: Synthetic oligonucleotide
  Target: LAMA2; (+) strand; PAM type: YTN; PAM sequence: CTA
aatttattttggagtttaac

SEQ ID NO: 364601 - DNA, 20 bp, Artificial Sequence
  Description of Artificial Sequence: Synthetic oligonucleotide
  Target: LAMA2; (+) strand; PAM type: YTN; PAM sequence: TTT
attttggagtttaactctta

SEQ ID NO: 364602 - DNA, 20 bp, Artificial Sequence
  Description of Artificial Sequence: Synthetic oligonucleotide
  Target: LAMA2; (+) strand; PAM type: YTN; PAM sequence: TTA
ttttggagtttaactcttac

SEQ ID NO: 364603 - DNA, 20 bp, Artificial Sequence
  Description of Artificial Sequence: Synthetic oligonucleotide
  Target: LAMA2; (+) strand; PAM type: YTN; PAM sequence: TTT
tggagtttaactcttacttt

SEQ ID NO: 364604 - DNA, 20 bp, Artificial Sequence
  Description of Artificial Sequence: Synthetic oligonucleotide
  Target: LAMA2; (+) strand; PAM type: YTN; PAM sequence: TTT
ggagtttaactcttactttt

SEQ ID NO: 364605 - DNA, 20 bp, Artificial Sequence
  Description of Artificial Sequence: Synthetic oligonucleotide
  Target: LAMA2; (+) strand; PAM type: YTN; PAM sequence: TTG
gagtttaactcttacttttg

SEQ ID NO: 364606 - DNA, 20 bp, Artificial Sequence
  Description of Artificial Sequence: Synthetic oligonucleotide
  Target: LAMA2; (+) strand; PAM type: YTN; PAM sequence: TTT
aactcttacttttgacatga

SEQ ID NO: 364607 - DNA, 20 bp, Artificial Sequence
  Description of Artificial Sequence: Synthetic oligonucleotide
  Target: LAMA2; (+) strand; PAM type: YTN; PAM sequence: TTA
actcttacttttgacatgat

SEQ ID NO: 364608 - DNA, 20 bp, Artificial Sequence
  Description of Artificial Sequence: Synthetic oligonucleotide
  Target: LAMA2; (+) strand; PAM type: YTN; PAM sequence: CTC
ttacttttgacatgatttat

SEQ ID NO: 364609 - DNA, 20 bp, Artificial Sequence
  Description of Artificial Sequence: Synthetic oligonucleotide
  Target: LAMA2; (+) strand; PAM type: YTN; PAM sequence: CTT
acttttgacatgatttatat

SEQ ID NO: 364610 - DNA, 20 bp, Artificial Sequence
  Description of Artificial Sequence: Synthetic oligonucleotide
  Target: LAMA2; (+) strand; PAM type: YTN; PAM sequence: TTA
cttttgacatgatttatatt

SEQ ID NO: 364611 - DNA, 20 bp, Artificial Sequence
  Description of Artificial Sequence: Synthetic oligonucleotide
  Target: LAMA2; (+) strand; PAM type: YTN; PAM sequence: CTT
ttgacatgatttatattcta

SEQ ID NO: 364612 - DNA, 20 bp, Artificial Sequence
  Description of Artificial Sequence: Synthetic oligonucleotide
  Target: LAMA2; (+) strand; PAM type: YTN; PAM sequence: TTT
tgacatgatttatattctaa

SEQ ID NO: 364613 - DNA, 20 bp, Artificial Sequence
  Description of Artificial Sequence: Synthetic oligonucleotide
  Target: LAMA2; (+) strand; PAM type: YTN; PAM sequence: TTT
gacatgatttatattctaag

SEQ ID NO: 364614 - DNA, 20 bp, Artificial Sequence
  Description of Artificial Sequence: Synthetic oligonucleotide
  Target: LAMA2; (+) strand; PAM type: YTN; PAM sequence: TTG
acatgatttatattctaagg

SEQ ID NO: 364615 - DNA, 20 bp, Artificial Sequence
  Description of Artificial Sequence: Synthetic oligonucleotide
  Target: LAMA2; (+) strand; PAM type: YTN; PAM sequence: TTT
atattctaaggagatctcag

SEQ ID NO: 364616 - DNA, 20 bp, Artificial Sequence
  Description of Artificial Sequence: Synthetic oligonucleotide
  Target: LAMA2; (+) strand; PAM type: YTN; PAM sequence: TTA
tattctaaggagatctcagc

SEQ ID NO: 364617 - DNA, 20 bp, Artificial Sequence
  Description of Artificial Sequence: Synthetic oligonucleotide
  Target: LAMA2; (+) strand; PAM type: YTN; PAM sequence: TTC
taaggagatctcagcttctt

SEQ ID NO: 364618 - DNA, 20 bp, Artificial Sequence
  Description of Artificial Sequence: Synthetic oligonucleotide
  Target: LAMA2; (+) strand; PAM type: YTN; PAM sequence: CTA
aggagatctcagcttcttcc

SEQ ID NO: 364619 - DNA, 20 bp, Artificial Sequence
  Description of Artificial Sequence: Synthetic oligonucleotide
  Target: LAMA2; (+) strand; PAM type: YTN; PAM sequence: CTC
agcttcttcctgcttaaatg

SEQ ID NO: 364620 - DNA, 20 bp, Artificial Sequence
  Description of Artificial Sequence: Synthetic oligonucleotide
  Target: LAMA2; (+) strand; PAM type: YTN; PAM sequence: CTT
cttcctgcttaaatgacatt

SEQ ID NO: 364621 - DNA, 20 bp, Artificial Sequence
  Description of Artificial Sequence: Synthetic oligonucleotide
  Target: LAMA2; (+) strand; PAM type: YTN; PAM sequence: TTC
ttcctgcttaaatgacatta

SEQ ID NO: 364622 - DNA, 20 bp, Artificial Sequence
  Description of Artificial Sequence: Synthetic oligonucleotide
  Target: LAMA2; (+) strand; PAM type: YTN; PAM sequence: CTT
cctgcttaaatgacattaca

SEQ ID NO: 364623 - DNA, 20 bp, Artificial Sequence
  Description of Artificial Sequence: Synthetic oligonucleotide
  Target: LAMA2; (+) strand; PAM type: YTN; PAM sequence: TTC
ctgcttaaatgacattacat

SEQ ID NO: 364624 - DNA, 20 bp, Artificial Sequence
  Description of Artificial Sequence: Synthetic oligonucleotide
  Target: LAMA2; (+) strand; PAM type: YTN; PAM sequence: CTG
cttaaatgacattacataga

SEQ ID NO: 364625 - DNA, 20 bp, Artificial Sequence
  Description of Artificial Sequence: Synthetic oligonucleotide
  Target: LAMA2; (+) strand; PAM type: YTN; PAM sequence: CTT
aaatgacattacatagatag

SEQ ID NO: 364626 - DNA, 20 bp, Artificial Sequence
  Description of Artificial Sequence: Synthetic oligonucleotide
  Target: LAMA2; (+) strand; PAM type: YTN; PAM sequence: TTA
aatgacattacatagataga

SEQ ID NO: 364627 - DNA, 20 bp, Artificial Sequence
  Description of Artificial Sequence: Synthetic oligonucleotide
  Target: LAMA2; (+) strand; PAM type: YTN; PAM sequence: TTA
catagatagaaaggtatata

SEQ ID NO: 364628 - DNA, 20 bp, Artificial Sequence
  Description of Artificial Sequence: Synthetic oligonucleotide
  Target: LAMA2; (+) strand; PAM type: YTN; PAM sequence: TTC
ttattatagcagtgtctgcc

SEQ ID NO: 364629 - DNA, 20 bp, Artificial Sequence
  Description of Artificial Sequence: Synthetic oligonucleotide
  Target: LAMA2; (+) strand; PAM type: YTN; PAM sequence: CTT
attatagcagtgtctgccag

SEQ ID NO: 364630 - DNA, 20 bp, Artificial Sequence
  Description of Artificial Sequence: Synthetic oligonucleotide
  Target: LAMA2; (+) strand; PAM type: YTN; PAM sequence: TTA
ttatagcagtgtctgccagg

SEQ ID NO: 364631 - DNA, 20 bp, Artificial Sequence
  Description of Artificial Sequence: Synthetic oligonucleotide
  Target: LAMA2; (+) strand; PAM type: YTN; PAM sequence: TTA
tagcagtgtctgccagggct

SEQ ID NO: 364632 - DNA, 20 bp, Artificial Sequence
  Description of Artificial Sequence: Synthetic oligonucleotide
  Target: LAMA2; (+) strand; PAM type: YTN; PAM sequence: CTG
ccagggctgcagtcctgttg

SEQ ID NO: 364633 - DNA, 20 bp, Artificial Sequence
  Description of Artificial Sequence: Synthetic oligonucleotide
  Target: LAMA2; (+) strand; PAM type: YTN; PAM sequence: CTG
cagtcctgttgttagaaggc

SEQ ID NO: 364634 - DNA, 20 bp, Artificial Sequence
  Description of Artificial Sequence: Synthetic oligonucleotide
  Target: LAMA2; (+) strand; PAM type: YTN; PAM sequence: CTG
ttgttagaaggctgtcagaa

SEQ ID NO: 364635 - DNA, 20 bp, Artificial Sequence
  Description of Artificial Sequence: Synthetic oligonucleotide
  Target: LAMA2; (+) strand; PAM type: YTN; PAM sequence: TTG
ttagaaggctgtcagaattt

SEQ ID NO: 364636 - DNA, 20 bp, Artificial Sequence
  Description of Artificial Sequence: Synthetic oligonucleotide
  Target: LAMA2; (+) strand; PAM type: YTN; PAM sequence: TTA
gaaggctgtcagaattttaa

SEQ ID NO: 364637 - DNA, 20 bp, Artificial Sequence
  Description of Artificial Sequence: Synthetic oligonucleotide
  Target: LAMA2; (+) strand; PAM type: YTN; PAM sequence: CTG
tcagaattttaaatgtaagc

SEQ ID NO: 364638 - DNA, 20 bp, Artificial Sequence
  Description of Artificial Sequence: Synthetic oligonucleotide
  Target: LAMA2; (+) strand; PAM type: YTN; PAM sequence: TTT
taaatgtaagccttcctttc

SEQ ID NO: 364639 - DNA, 20 bp, Artificial Sequence
  Description of Artificial Sequence: Synthetic oligonucleotide
  Target: LAMA2; (+) strand; PAM type: YTN; PAM sequence: TTT
aaatgtaagccttcctttcc

SEQ ID NO: 364640 - DNA, 20 bp, Artificial Sequence
  Description of Artificial Sequence: Synthetic oligonucleotide
  Target: LAMA2; (+) strand; PAM type: YTN; PAM sequence: TTA
aatgtaagccttcctttccc

SEQ ID NO: 364641 - DNA, 20 bp, Artificial Sequence
  Description of Artificial Sequence: Synthetic oligonucleotide
  Target: LAMA2; (+) strand; PAM type: YTN; PAM sequence: CTT
cctttcccaggtgttataat

SEQ ID NO: 364642 - DNA, 20 bp, Artificial Sequence
  Description of Artificial Sequence: Synthetic oligonucleotide
  Target: LAMA2; (+) strand; PAM type: YTN; PAM sequence: TTC
ctttcccaggtgttataatt

SEQ ID NO: 364643 - DNA, 20 bp, Artificial Sequence
  Description of Artificial Sequence: Synthetic oligonucleotide
  Target: LAMA2; (+) strand; PAM type: YTN; PAM sequence: CTT
tcccaggtgttataatttaa

SEQ ID NO: 364644 - DNA, 20 bp, Artificial Sequence
  Description of Artificial Sequence: Synthetic oligonucleotide
  Target: LAMA2; (+) strand; PAM type: YTN; PAM sequence: TTT
cccaggtgttataatttaat

SEQ ID NO: 364645 - DNA, 20 bp, Artificial Sequence
  Description of Artificial Sequence: Synthetic oligonucleotide
  Target: LAMA2; (+) strand; PAM type: YTN; PAM sequence: TTC
ccaggtgttataatttaatc

SEQ ID NO: 364646 - DNA, 20 bp, Artificial Sequence
  Description of Artificial Sequence: Synthetic oligonucleotide
  Target: LAMA2; (+) strand; PAM type: YTN; PAM sequence: TTA
taatttaatcttctaactcc

SEQ ID NO: 364647 - DNA, 20 bp, Artificial Sequence
  Description of Artificial Sequence: Synthetic oligonucleotide
  Target: LAMA2; (+) strand; PAM type: YTN; PAM sequence: TTT
aatcttctaactcctattaa

SEQ ID NO: 364648 - DNA, 20 bp, Artificial Sequence
  Description of Artificial Sequence: Synthetic oligonucleotide
  Target: LAMA2; (+) strand; PAM type: YTN; PAM sequence: TTA
atcttctaactcctattaat

SEQ ID NO: 364649 - DNA, 20 bp, Artificial Sequence
  Description of Artificial Sequence: Synthetic oligonucleotide
  Target: LAMA2; (+) strand; PAM type: YTN; PAM sequence: CTT
ctaactcctattaatttctg

SEQ ID NO: 364650 - DNA, 20 bp, Artificial Sequence
  Description of Artificial Sequence: Synthetic oligonucleotide
  Target: LAMA2; (+) strand; PAM type: YTN; PAM sequence: TTC
taactcctattaatttctga

SEQ ID NO: 364651 - DNA, 20 bp, Artificial Sequence
  Description of Artificial Sequence: Synthetic oligonucleotide
  Target: LAMA2; (+) strand; PAM type: YTN; PAM sequence: CTA
actcctattaatttctgaag

SEQ ID NO: 364652 - DNA, 20 bp, Artificial Sequence
  Description of Artificial Sequence: Synthetic oligonucleotide
  Target: LAMA2; (+) strand; PAM type: YTN; PAM sequence: CTC
ctattaatttctgaagactg

SEQ ID NO: 364653 - DNA, 20 bp, Artificial Sequence
  Description of Artificial Sequence: Synthetic oligonucleotide
  Target: LAMA2; (+) strand; PAM type: YTN; PAM sequence: CTA
ttaatttctgaagactgtgg

SEQ ID NO: 364654 - DNA, 20 bp, Artificial Sequence
  Description of Artificial Sequence: Synthetic oligonucleotide
  Target: LAMA2; (+) strand; PAM type: YTN; PAM sequence: TTA
atttctgaagactgtggggc

SEQ ID NO: 364655 - DNA, 20 bp, Artificial Sequence
  Description of Artificial Sequence: Synthetic oligonucleotide
  Target: LAMA2; (+) strand; PAM type: YTN; PAM sequence: TTT
ctgaagactgtggggccatc

SEQ ID NO: 364656 - DNA, 20 bp, Artificial Sequence
  Description of Artificial Sequence: Synthetic oligonucleotide
  Target: LAMA2; (+) strand; PAM type: YTN; PAM sequence: TTC
tgaagactgtggggccatcc

SEQ ID NO: 364657 - DNA, 20 bp, Artificial Sequence
  Description of Artificial Sequence: Synthetic oligonucleotide
  Target: LAMA2; (+) strand; PAM type: YTN; PAM sequence: CTG
aagactgtggggccatccta

SEQ ID NO: 364658 - DNA, 20 bp, Artificial Sequence
  Description of Artificial Sequence: Synthetic oligonucleotide
  Target: LAMA2; (+) strand; PAM type: YTN; PAM sequence: CTG
tggggccatcctatatctta

SEQ ID NO: 364659 - DNA, 20 bp, Artificial Sequence
  Description of Artificial Sequence: Synthetic oligonucleotide
  Target: LAMA2; (+) strand; PAM type: YTN; PAM sequence: CTA
tatcttagaacaaaatatag

SEQ ID NO: 364660 - DNA, 20 bp, Artificial Sequence
  Description of Artificial Sequence: Synthetic oligonucleotide
  Target: LAMA2; (+) strand; PAM type: YTN; PAM sequence: CTT
agaacaaaatatagatacgt

SEQ ID NO: 364661 - DNA, 20 bp, Artificial Sequence
  Description of Artificial Sequence: Synthetic oligonucleotide
  Target: LAMA2; (+) strand; PAM type: YTN; PAM sequence: TTA
gaacaaaatatagatacgta

SEQ ID NO: 364662 - DNA, 20 bp, Artificial Sequence
  Description of Artificial Sequence: Synthetic oligonucleotide
  Target: LAMA2; (+) strand; PAM type: YTN; PAM sequence: TTC
ctgatttttttctccatatt

SEQ ID NO: 364663 - DNA, 20 bp, Artificial Sequence
  Description of Artificial Sequence: Synthetic oligonucleotide
  Target: LAMA2; (+) strand; PAM type: YTN; PAM sequence: CTG
atttttttctccatatttac

SEQ ID NO: 364664 - DNA, 20 bp, Artificial Sequence
  Description of Artificial Sequence: Synthetic oligonucleotide
  Target: LAMA2; (+) strand; PAM type: YTN; PAM sequence: TTT
ttttctccatatttaccttc

SEQ ID NO: 364665 - DNA, 20 bp, Artificial Sequence
  Description of Artificial Sequence: Synthetic oligonucleotide
  Target: LAMA2; (+) strand; PAM type: YTN; PAM sequence: TTT
tttctccatatttaccttcc

SEQ ID NO: 364666 - DNA, 20 bp, Artificial Sequence
  Description of Artificial Sequence: Synthetic oligonucleotide
  Target: LAMA2; (+) strand; PAM type: YTN; PAM sequence: TTT
ttctccatatttaccttccc

SEQ ID NO: 364667 - DNA, 20 bp, Artificial Sequence
  Description of Artificial Sequence: Synthetic oligonucleotide
  Target: LAMA2; (+) strand; PAM type: YTN; PAM sequence: TTT
tctccatatttaccttcccc

SEQ ID NO: 364668 - DNA, 20 bp, Artificial Sequence
  Description of Artificial Sequence: Synthetic oligonucleotide
  Target: LAMA2; (+) strand; PAM type: YTN; PAM sequence: TTT
ctccatatttaccttccccc

SEQ ID NO: 364669 - DNA, 20 bp, Artificial Sequence
  Description of Artificial Sequence: Synthetic oligonucleotide
  Target: LAMA2; (+) strand; PAM type: YTN; PAM sequence: TTC
tccatatttaccttccccca

SEQ ID NO: 364670 - DNA, 20 bp, Artificial Sequence
  Description of Artificial Sequence: Synthetic oligonucleotide
  Target: LAMA2; (+) strand; PAM type: YTN; PAM sequence: CTC
catatttaccttcccccaaa

SEQ ID NO: 364671 - DNA, 20 bp, Artificial Sequence
  Description of Artificial Sequence: Synthetic oligonucleotide
  Target: LAMA2; (+) strand; PAM type: YTN; PAM sequence: TTT
accttcccccaaatgtttta

SEQ ID NO: 364672 - DNA, 20 bp, Artificial Sequence
  Description of Artificial Sequence: Synthetic oligonucleotide
  Target: LAMA2; (+) strand; PAM type: YTN; PAM sequence: TTA
ccttcccccaaatgttttaa

SEQ ID NO: 364673 - DNA, 20 bp, Artificial Sequence
  Description of Artificial Sequence: Synthetic oligonucleotide
  Target: LAMA2; (+) strand; PAM type: YTN; PAM sequence: CTT
cccccaaatgttttaatttt

SEQ ID NO: 364674 - DNA, 20 bp, Artificial Sequence
  Description of Artificial Sequence: Synthetic oligonucleotide
  Target: LAMA2; (+) strand; PAM type: YTN; PAM sequence: TTC
ccccaaatgttttaatttta

SEQ ID NO: 364675 - DNA, 20 bp, Artificial Sequence
  Description of Artificial Sequence: Synthetic oligonucleotide
  Target: LAMA2; (+) strand; PAM type: YTN; PAM sequence: TTT
taattttattatttcaaaat

SEQ ID NO: 364676 - DNA, 20 bp, Artificial Sequence
  Description of Artificial Sequence: Synthetic oligonucleotide
  Target: LAMA2; (+) strand; PAM type: YTN; PAM sequence: TTT
aattttattatttcaaaatt

SEQ ID NO: 364677 - DNA, 20 bp, Artificial Sequence
  Description of Artificial Sequence: Synthetic oligonucleotide
  Target: LAMA2; (+) strand; PAM type: YTN; PAM sequence: TTA
attttattatttcaaaatta

SEQ ID NO: 364678 - DNA, 20 bp, Artificial Sequence
  Description of Artificial Sequence: Synthetic oligonucleotide
  Target: LAMA2; (+) strand; PAM type: YTN; PAM sequence: TTT
tattatttcaaaattataat

SEQ ID NO: 364679 - DNA, 20 bp, Artificial Sequence
  Description of Artificial Sequence: Synthetic oligonucleotide
  Target: LAMA2; (+) strand; PAM type: YTN; PAM sequence: TTT
attatttcaaaattataata

SEQ ID NO: 364680 - DNA, 20 bp, Artificial Sequence
  Description of Artificial Sequence: Synthetic oligonucleotide
  Target: LAMA2; (+) strand; PAM type: YTN; PAM sequence: TTA
ttatttcaaaattataataa

SEQ ID NO: 364681 - DNA, 20 bp, Artificial Sequence
  Description of Artificial Sequence: Synthetic oligonucleotide
  Target: LAMA2; (+) strand; PAM type: YTN; PAM sequence: TTA
tttcaaaattataataatag

SEQ ID NO: 364682 - DNA, 20 bp, Artificial Sequence
  Description of Artificial Sequence: Synthetic oligonucleotide
  Target: LAMA2; (+) strand; PAM type: YTN; PAM sequence: TTT
caaaattataataatagcaa

SEQ ID NO: 364683 - DNA, 20 bp, Artificial Sequence
  Description of Artificial Sequence: Synthetic oligonucleotide
  Target: LAMA2; (+) strand; PAM type: YTN; PAM sequence: TTC
aaaattataataatagcaat

SEQ ID NO: 364684 - DNA, 20 bp, Artificial Sequence
  Description of Artificial Sequence: Synthetic oligonucleotide
  Target: LAMA2; (+) strand; PAM type: YTN; PAM sequence: TTA
taataatagcaatggatttc

SEQ ID NO: 364685 - DNA, 20 bp, Artificial Sequence
  Description of Artificial Sequence: Synthetic oligonucleotide
  Target: LAMA2; (+) strand; PAM type: YTN; PAM sequence: TTT
caaattaaaattctggctag

SEQ ID NO: 364686 - DNA, 20 bp, Artificial Sequence
  Description of Artificial Sequence: Synthetic oligonucleotide
  Target: LAMA2; (+) strand; PAM type: YTN; PAM sequence: TTC
aaattaaaattctggctagt

SEQ ID NO: 364687 - DNA, 20 bp, Artificial Sequence
  Description of Artificial Sequence: Synthetic oligonucleotide
  Target: LAMA2; (+) strand; PAM type: YTN; PAM sequence: TTA
aaattctggctagtgaatcc

SEQ ID NO: 364688 - DNA, 20 bp, Artificial Sequence
  Description of Artificial Sequence: Synthetic oligonucleotide
  Target: LAMA2; (+) strand; PAM type: YTN; PAM sequence: TTC
tggctagtgaatccctcagg

SEQ ID NO: 364689 - DNA, 20 bp, Artificial Sequence
  Description of Artificial Sequence: Synthetic oligonucleotide
  Target: LAMA2; (+) strand; PAM type: YTN; PAM sequence: CTG
gctagtgaatccctcaggta

SEQ ID NO: 364690 - DNA, 20 bp, Artificial Sequence
  Description of Artificial Sequence: Synthetic oligonucleotide
  Target: LAMA2; (+) strand; PAM type: YTN; PAM sequence: CTA
gtgaatccctcaggtatttc

SEQ ID NO: 364691 - DNA, 20 bp, Artificial Sequence
  Description of Artificial Sequence: Synthetic oligonucleotide
  Target: LAMA2; (+) strand; PAM type: YTN; PAM sequence: CTC
aggtatttctttatattgac

SEQ ID NO: 364692 - DNA, 20 bp, Artificial Sequence
  Description of Artificial Sequence: Synthetic oligonucleotide
  Target: LAMA2; (+) strand; PAM type: YTN; PAM sequence: TTT
ctttatattgactgatttgt

SEQ ID NO: 364693 - DNA, 20 bp, Artificial Sequence
  Description of Artificial Sequence: Synthetic oligonucleotide
  Target: LAMA2; (+) strand; PAM type: YTN; PAM sequence: TTC
tttatattgactgatttgta

SEQ ID NO: 364694 - DNA, 20 bp, Artificial Sequence
  Description of Artificial Sequence: Synthetic oligonucleotide
  Target: LAMA2; (+) strand; PAM type: YTN; PAM sequence: CTT
tatattgactgatttgtatg

SEQ ID NO: 364695 - DNA, 20 bp, Artificial Sequence
  Description of Artificial Sequence: Synthetic oligonucleotide
  Target: LAMA2; (+) strand; PAM type: YTN; PAM sequence: TTT
atattgactgatttgtatgt

SEQ ID NO: 364696 - DNA, 20 bp, Artificial Sequence
  Description of Artificial Sequence: Synthetic oligonucleotide
  Target: LAMA2; (+) strand; PAM type: YTN; PAM sequence: TTA
tattgactgatttgtatgtt

SEQ ID NO: 364697 - DNA, 20 bp, Artificial Sequence
  Description of Artificial Sequence: Synthetic oligonucleotide
  Target: LAMA2; (+) strand; PAM type: YTN; PAM sequence: TTG
actgatttgtatgttgtagg

SEQ ID NO: 364698 - DNA, 20 bp, Artificial Sequence
  Description of Artificial Sequence: Synthetic oligonucleotide
  Target: LAMA2; (+) strand; PAM type: YTN; PAM sequence: CTG
atttgtatgttgtaggctaa

SEQ ID NO: 364699 - DNA, 20 bp, Artificial Sequence
  Description of Artificial Sequence: Synthetic oligonucleotide
  Target: LAMA2; (+) strand; PAM type: YTN; PAM sequence: TTT
gtatgttgtaggctaaataa

SEQ ID NO: 364700 - DNA, 20 bp, Artificial Sequence
  Description of Artificial Sequence: Synthetic oligonucleotide
  Target: LAMA2; (+) strand; PAM type: YTN; PAM sequence: TTG
tatgttgtaggctaaataat

SEQ ID NO: 364701 - DNA, 20 bp, Artificial Sequence
  Description of Artificial Sequence: Synthetic oligonucleotide
  Target: LAMA2; (+) strand; PAM type: YTN; PAM sequence: TTG
taggctaaataatgccctcc

SEQ ID NO: 364702 - DNA, 20 bp, Artificial Sequence
  Description of Artificial Sequence: Synthetic oligonucleotide
  Target: LAMA2; (+) strand; PAM type: YTN; PAM sequence: CTA
aataatgccctcctccaaga

SEQ ID NO: 364703 - DNA, 20 bp, Artificial Sequence
  Description of Artificial Sequence: Synthetic oligonucleotide
  Target: LAMA2; (+) strand; PAM type: YTN; PAM sequence: CTC
ctccaagatacccatagctg

SEQ ID NO: 364704 - DNA, 20 bp, Artificial Sequence
  Description of Artificial Sequence: Synthetic oligonucleotide
  Target: LAMA2; (+) strand; PAM type: YTN; PAM sequence: CTC
caagatacccatagctgaat

SEQ ID NO: 364705 - DNA, 20 bp, Artificial Sequence
  Description of Artificial Sequence: Synthetic oligonucleotide
  Target: LAMA2; (+) strand; PAM type: YTN; PAM sequence: CTG
aatttccagaacctgtaaat

SEQ ID NO: 364706 - DNA, 20 bp, Artificial Sequence
  Description of Artificial Sequence: Synthetic oligonucleotide
  Target: LAMA2; (+) strand; PAM type: YTN; PAM sequence: TTT
ccagaacctgtaaatatgtt

SEQ ID NO: 364707 - DNA, 20 bp, Artificial Sequence
  Description of Artificial Sequence: Synthetic oligonucleotide
  Target: LAMA2; (+) strand; PAM type: YTN; PAM sequence: TTC
cagaacctgtaaatatgttc

SEQ ID NO: 364708 - DNA, 20 bp, Artificial Sequence
  Description of Artificial Sequence: Synthetic oligonucleotide
  Target: LAMA2; (+) strand; PAM type: YTN; PAM sequence: CTG
taaatatgttccctcttaca

SEQ ID NO: 364709 - DNA, 20 bp, Artificial Sequence
  Description of Artificial Sequence: Synthetic oligonucleotide
  Target: LAMA2; (+) strand; PAM type: YTN; PAM sequence: TTC
cctcttacatggcaaaaggg

SEQ ID NO: 364710 - DNA, 20 bp, Artificial Sequence
  Description of Artificial Sequence: Synthetic oligonucleotide
  Target: LAMA2; (+) strand; PAM type: YTN; PAM sequence: CTC
ttacatggcaaaagggactt

SEQ ID NO: 364711 - DNA, 20 bp, Artificial Sequence
  Description of Artificial Sequence: Synthetic oligonucleotide
  Target: LAMA2; (+) strand; PAM type: YTN; PAM sequence: CTT
acatggcaaaagggactttg

SEQ ID NO: 364712 - DNA, 20 bp, Artificial Sequence
  Description of Artificial Sequence: Synthetic oligonucleotide
  Target: LAMA2; (+) strand; PAM type: YTN; PAM sequence: TTA
catggcaaaagggactttgc

SEQ ID NO: 364713 - DNA, 20 bp, Artificial Sequence
  Description of Artificial Sequence: Synthetic oligonucleotide
  Target: LAMA2; (+) strand; PAM type: YTN; PAM sequence: CTT
tgcaaatgtgactaagttta

SEQ ID NO: 364714 - DNA, 20 bp, Artificial Sequence
  Description of Artificial Sequence: Synthetic oligonucleotide
  Target: LAMA2; (+) strand; PAM type: YTN; PAM sequence: TTT
gcaaatgtgactaagtttaa

SEQ ID NO: 364715 - DNA, 20 bp, Artificial Sequence
  Description of Artificial Sequence: Synthetic oligonucleotide
  Target: LAMA2; (+) strand; PAM type: YTN; PAM sequence: TTG
caaatgtgactaagtttaag

SEQ ID NO: 364716 - DNA, 20 bp, Artificial Sequence
  Description of Artificial Sequence: Synthetic oligonucleotide
  Target: LAMA2; (+) strand; PAM type: YTN; PAM sequence: CTA
agtttaagaaccttaaggtg

SEQ ID NO: 364717 - DNA, 20 bp, Artificial Sequence
  Description of Artificial Sequence: Synthetic oligonucleotide
  Target: LAMA2; (+) strand; PAM type: YTN; PAM sequence: TTT
aagaaccttaaggtgggaag

SEQ ID NO: 364718 - DNA, 20 bp, Artificial Sequence
  Description of Artificial Sequence: Synthetic oligonucleotide
  Target: LAMA2; (+) strand; PAM type: YTN; PAM sequence: TTA
agaaccttaaggtgggaaga

SEQ ID NO: 364719 - DNA, 20 bp, Artificial Sequence
  Description of Artificial Sequence: Synthetic oligonucleotide
  Target: LAMA2; (+) strand; PAM type: YTN; PAM sequence: CTT
aaggtgggaagatgatcctg

SEQ ID NO: 364720 - DNA, 20 bp, Artificial Sequence
  Description of Artificial Sequence: Synthetic oligonucleotide
  Target: LAMA2; (+) strand; PAM type: YTN; PAM sequence: TTA
aggtgggaagatgatcctgc

SEQ ID NO: 364721 - DNA, 20 bp, Artificial Sequence
  Description of Artificial Sequence: Synthetic oligonucleotide
  Target: LAMA2; (+) strand; PAM type: YTN; PAM sequence: CTG
cgttatccaggtggaccgaa

SEQ ID NO: 364722 - DNA, 20 bp, Artificial Sequence
  Description of Artificial Sequence: Synthetic oligonucleotide
  Target: LAMA2; (+) strand; PAM type: YTN; PAM sequence: TTA
tccaggtggaccgaatccag

SEQ ID NO: 364723 - DNA, 20 bp, Artificial Sequence
  Description of Artificial Sequence: Synthetic oligonucleotide
  Target: LAMA2; (+) strand; PAM type: YTN; PAM sequence: CTT
aaaagtagaagagggggtca

SEQ ID NO: 364724 - DNA, 20 bp, Artificial Sequence
  Description of Artificial Sequence: Synthetic oligonucleotide
  Target: LAMA2; (+) strand; PAM type: YTN; PAM sequence: TTA
aaagtagaagagggggtcag

SEQ ID NO: 364725 - DNA, 20 bp, Artificial Sequence
  Description of Artificial Sequence: Synthetic oligonucleotide
  Target: LAMA2; (+) strand; PAM type: YTN; PAM sequence: TTT
gaagcatgaaaaatatttca

SEQ ID NO: 364726 - DNA, 20 bp, Artificial Sequence
  Description of Artificial Sequence: Synthetic oligonucleotide
  Target: LAMA2; (+) strand; PAM type: YTN; PAM sequence: TTG
aagcatgaaaaatatttcat

SEQ ID NO: 364727 - DNA, 20 bp, Artificial Sequence
  Description of Artificial Sequence: Synthetic oligonucleotide
  Target: LAMA2; (+) strand; PAM type: YTN; PAM sequence: TTT
cattcatcatttctggcttt

SEQ ID NO: 364728 - DNA, 20 bp, Artificial Sequence
  Description of Artificial Sequence: Synthetic oligonucleotide
  Target: LAMA2; (+) strand; PAM type: YTN; PAM sequence: TTC
attcatcatttctggcttta

SEQ ID NO: 364729 - DNA, 20 bp, Artificial Sequence
  Description of Artificial Sequence: Synthetic oligonucleotide
  Target: LAMA2; (+) strand; PAM type: YTN; PAM sequence: TTC
atcatttctggctttaaaga

SEQ ID NO: 364730 - DNA, 20 bp, Artificial Sequence
  Description of Artificial Sequence: Synthetic oligonucleotide
  Target: LAMA2; (+) strand; PAM type: YTN; PAM sequence: TTT
ctggctttaaagatggagag

SEQ ID NO: 364731 - DNA, 20 bp, Artificial Sequence
  Description of Artificial Sequence: Synthetic oligonucleotide
  Target: LAMA2; (+) strand; PAM type: YTN; PAM sequence: TTC
tggctttaaagatggagagt

SEQ ID NO: 364732 - DNA, 20 bp, Artificial Sequence
  Description of Artificial Sequence: Synthetic oligonucleotide
  Target: LAMA2; (+) strand; PAM type: YTN; PAM sequence: CTG
gctttaaagatggagagtcc

SEQ ID NO: 364733 - DNA, 20 bp, Artificial Sequence
  Description of Artificial Sequence: Synthetic oligonucleotide
  Target: LAMA2; (+) strand; PAM type: YTN; PAM sequence: CTT
taaagatggagagtcccttg

SEQ ID NO: 364734 - DNA, 20 bp, Artificial Sequence
  Description of Artificial Sequence: Synthetic oligonucleotide
  Target: LAMA2; (+) strand; PAM type: YTN; PAM sequence: TTT
aaagatggagagtcccttga

SEQ ID NO: 364735 - DNA, 20 bp, Artificial Sequence
  Description of Artificial Sequence: Synthetic oligonucleotide
  Target: LAMA2; (+) strand; PAM type: YTN; PAM sequence: TTA
aagatggagagtcccttgaa

SEQ ID NO: 364736 - DNA, 20 bp, Artificial Sequence
  Description of Artificial Sequence: Synthetic oligonucleotide
  Target: LAMA2; (+) strand; PAM type: YTN; PAM sequence: CTT
gaaccaaggaatgtgaatga

SEQ ID NO: 364737 - DNA, 20 bp, Artificial Sequence
  Description of Artificial Sequence: Synthetic oligonucleotide
  Target: LAMA2; (+) strand; PAM type: YTN; PAM sequence: TTG
aaccaaggaatgtgaatgac

SEQ ID NO: 364738 - DNA, 20 bp, Artificial Sequence
  Description of Artificial Sequence: Synthetic oligonucleotide
  Target: LAMA2; (+) strand; PAM type: YTN; PAM sequence: CTC
tagaacctggaaaagagcat

SEQ ID NO: 364739 - DNA, 20 bp, Artificial Sequence
  Description of Artificial Sequence: Synthetic oligonucleotide
  Target: LAMA2; (+) strand; PAM type: YTN; PAM sequence: CTA
gaacctggaaaagagcattg

SEQ ID NO: 364740 - DNA, 20 bp, Artificial Sequence
  Description of Artificial Sequence: Synthetic oligonucleotide
  Target: LAMA2; (+) strand; PAM type: YTN; PAM sequence: CTG
gaaaagagcattggctgaca

SEQ ID NO: 364741 - DNA, 20 bp, Artificial Sequence
  Description of Artificial Sequence: Synthetic oligonucleotide
  Target: LAMA2; (+) strand; PAM type: YTN; PAM sequence: TTG
gctgacaaacagcaaggaaa

SEQ ID NO: 364742 - DNA, 20 bp, Artificial Sequence
  Description of Artificial Sequence: Synthetic oligonucleotide
  Target: LAMA2; (+) strand; PAM type: YTN; PAM sequence: CTG
acaaacagcaaggaaatggg

SEQ ID NO: 364743 - DNA, 20 bp, Artificial Sequence
  Description of Artificial Sequence: Synthetic oligonucleotide
  Target: LAMA2; (+) strand; PAM type: YTN; PAM sequence: CTC
agttccacaaccacaagaaa

SEQ ID NO: 364744 - DNA, 20 bp, Artificial Sequence
  Description of Artificial Sequence: Synthetic oligonucleotide
  Target: LAMA2; (+) strand; PAM type: YTN; PAM sequence: TTC
cacaaccacaagaaatgaat

SEQ ID NO: 364745 - DNA, 20 bp, Artificial Sequence
  Description of Artificial Sequence: Synthetic oligonucleotide
  Target: LAMA2; (+) strand; PAM type: YTN; PAM sequence: TTC
tgccaacaacctgaatgaac

SEQ ID NO: 364746 - DNA, 20 bp, Artificial Sequence
  Description of Artificial Sequence: Synthetic oligonucleotide
  Target: LAMA2; (+) strand; PAM type: YTN; PAM sequence: CTG
ccaacaacctgaatgaacaa

SEQ ID NO: 364747 - DNA, 20 bp, Artificial Sequence
  Description of Artificial Sequence: Synthetic oligonucleotide
  Target: LAMA2; (+) strand; PAM type: YTN; PAM sequence: CTG
aatgaacaaggagatagatt

SEQ ID NO: 364748 - DNA, 20 bp, Artificial Sequence
  Description of Artificial Sequence: Synthetic oligonucleotide
  Target: LAMA2; (+) strand; PAM type: YTN; PAM sequence: TTC
tcctctagagccaccagaaa

SEQ ID NO: 364749 - DNA, 20 bp, Artificial Sequence
  Description of Artificial Sequence: Synthetic oligonucleotide
  Target: LAMA2; (+) strand; PAM type: YTN; PAM sequence: CTC
ctctagagccaccagaaagg

SEQ ID NO: 364750 - DNA, 20 bp, Artificial Sequence
  Description of Artificial Sequence: Synthetic oligonucleotide
  Target: LAMA2; (+) strand; PAM type: YTN; PAM sequence: CTC
tagagccaccagaaaggaat

SEQ ID NO: 364751 - DNA, 20 bp, Artificial Sequence
  Description of Artificial Sequence: Synthetic oligonucleotide
  Target: LAMA2; (+) strand; PAM type: YTN; PAM sequence: CTA
gagccaccagaaaggaatgt

SEQ ID NO: 364752 - DNA, 20 bp, Artificial Sequence
  Description of Artificial Sequence: Synthetic oligonucleotide
  Target: LAMA2; (+) strand; PAM type: YTN; PAM sequence: TTT
tagtcattttagctaaagga

SEQ ID NO: 364753 - DNA, 20 bp, Artificial Sequence
  Description of Artificial Sequence: Synthetic oligonucleotide
  Target: LAMA2; (+) strand; PAM type: YTN; PAM sequence: TTT
agtcattttagctaaaggag

SEQ ID NO: 364754 - DNA, 20 bp, Artificial Sequence
  Description of Artificial Sequence: Synthetic oligonucleotide
  Target: LAMA2; (+) strand; PAM type: YTN; PAM sequence: TTA
gtcattttagctaaaggaga

SEQ ID NO: 364755 - DNA, 20 bp, Artificial Sequence
  Description of Artificial Sequence: Synthetic oligonucleotide
  Target: LAMA2; (+) strand; PAM type: YTN; PAM sequence: TTT
tagctaaaggagacccatat

SEQ ID NO: 364756 - DNA, 20 bp, Artificial Sequence
  Description of Artificial Sequence: Synthetic oligonucleotide
  Target: LAMA2; (+) strand; PAM type: YTN; PAM sequence: TTT
agctaaaggagacccatatt

SEQ ID NO: 364757 - DNA, 20 bp, Artificial Sequence
  Description of Artificial Sequence: Synthetic oligonucleotide
  Target: LAMA2; (+) strand; PAM type: YTN; PAM sequence: TTA
gctaaaggagacccatattg

SEQ ID NO: 364758 - DNA, 20 bp, Artificial Sequence
  Description of Artificial Sequence: Synthetic oligonucleotide
  Target: LAMA2; (+) strand; PAM type: YTN; PAM sequence: CTA
aaggagacccatattggaat

SEQ ID NO: 364759 - DNA, 20 bp, Artificial Sequence
  Description of Artificial Sequence: Synthetic oligonucleotide
  Target: LAMA2; (+) strand; PAM type: YTN; PAM sequence: TTG
gaatattcgcctacagaact

SEQ ID NO: 364760 - DNA, 20 bp, Artificial Sequence
  Description of Artificial Sequence: Synthetic oligonucleotide
  Target: LAMA2; (+) strand; PAM type: YTN; PAM sequence: TTC
gcctacagaactgtattcca

SEQ ID NO: 364761 - DNA, 20 bp, Artificial Sequence
  Description of Artificial Sequence: Synthetic oligonucleotide
  Target: LAMA2; (+) strand; PAM type: YTN; PAM sequence: CTA
cagaactgtattccaacaag

SEQ ID NO: 364762 - DNA, 20 bp, Artificial Sequence
  Description of Artificial Sequence: Synthetic oligonucleotide
  Target: LAMA2; (+) strand; PAM type: YTN; PAM sequence: CTG
tattccaacaaggatgcata

SEQ ID NO: 364763 - DNA, 20 bp, Artificial Sequence
  Description of Artificial Sequence: Synthetic oligonucleotide
  Target: LAMA2; (+) strand; PAM type: YTN; PAM sequence: TTC
caacaaggatgcatatgttg

SEQ ID NO: 364764 - DNA, 20 bp, Artificial Sequence
  Description of Artificial Sequence: Synthetic oligonucleotide
  Target: LAMA2; (+) strand; PAM type: YTN; PAM sequence: TTG
gaatattcacctacagaacc

SEQ ID NO: 364765 - DNA, 20 bp, Artificial Sequence
  Description of Artificial Sequence: Synthetic oligonucleotide
  Target: LAMA2; (+) strand; PAM type: YTN; PAM sequence: TTC
acctacagaaccatgagata

SEQ ID NO: 364766 - DNA, 20 bp, Artificial Sequence
  Description of Artificial Sequence: Synthetic oligonucleotide
  Target: LAMA2; (+) strand; PAM type: YTN; PAM sequence: CTA
cagaaccatgagataatata

SEQ ID NO: 364767 - DNA, 20 bp, Artificial Sequence
  Description of Artificial Sequence: Synthetic oligonucleotide
  Target: LAMA2; (+) strand; PAM type: YTN; PAM sequence: TTT
gtgttgctttcaattgctaa

SEQ ID NO: 364768 - DNA, 20 bp, Artificial Sequence
  Description of Artificial Sequence: Synthetic oligonucleotide
  Target: LAMA2; (+) strand; PAM type: YTN; PAM sequence: TTG
tgttgctttcaattgctaag

SEQ ID NO: 364769 - DNA, 20 bp, Artificial Sequence
  Description of Artificial Sequence: Synthetic oligonucleotide
  Target: LAMA2; (+) strand; PAM type: YTN; PAM sequence: TTG
ctttcaattgctaagtttgt

SEQ ID NO: 364770 - DNA, 20 bp, Artificial Sequence
  Description of Artificial Sequence: Synthetic oligonucleotide
  Target: LAMA2; (+) strand; PAM type: YTN; PAM sequence: CTT
tcaattgctaagtttgttac

SEQ ID NO: 364771 - DNA, 20 bp, Artificial Sequence
  Description of Artificial Sequence: Synthetic oligonucleotide
  Target: LAMA2; (+) strand; PAM type: YTN; PAM sequence: TTT
caattgctaagtttgttacg

SEQ ID NO: 364772 - DNA, 20 bp, Artificial Sequence
  Description of Artificial Sequence: Synthetic oligonucleotide
  Target: LAMA2; (+) strand; PAM type: YTN; PAM sequence: TTC
aattgctaagtttgttacgg

SEQ ID NO: 364773 - DNA, 20 bp, Artificial Sequence
  Description of Artificial Sequence: Synthetic oligonucleotide
  Target: LAMA2; (+) strand; PAM type: YTN; PAM sequence: TTG
ctaagtttgttacggtagca

SEQ ID NO: 364774 - DNA, 20 bp, Artificial Sequence
  Description of Artificial Sequence: Synthetic oligonucleotide
  Target: LAMA2; (+) strand; PAM type: YTN; PAM sequence: CTA
agtttgttacggtagcaata

SEQ ID NO: 364775 - DNA, 20 bp, Artificial Sequence
  Description of Artificial Sequence: Synthetic oligonucleotide
  Target: LAMA2; (+) strand; PAM type: YTN; PAM sequence: TTT
gttacggtagcaataggaaa

SEQ ID NO: 364776 - DNA, 20 bp, Artificial Sequence
  Description of Artificial Sequence: Synthetic oligonucleotide
  Target: LAMA2; (+) strand; PAM type: YTN; PAM sequence: TTG
ttacggtagcaataggaaac

SEQ ID NO: 364777 - DNA, 20 bp, Artificial Sequence
  Description of Artificial Sequence: Synthetic oligonucleotide
  Target: LAMA2; (+) strand; PAM type: YTN; PAM sequence: TTA
cggtagcaataggaaactaa

SEQ ID NO: 364778 - DNA, 20 bp, Artificial Sequence
  Description of Artificial Sequence: Synthetic oligonucleotide
  Target: LAMA2; (+) strand; PAM type: YTN; PAM sequence: CTA
atgcaatgtacagttgaccc

SEQ ID NO: 364779 - DNA, 20 bp, Artificial Sequence
  Description of Artificial Sequence: Synthetic oligonucleotide
  Target: LAMA2; (+) strand; PAM type: YTN; PAM sequence: TTG
acccttgcacaatgcaggga

SEQ ID NO: 364780 - DNA, 20 bp, Artificial Sequence
  Description of Artificial Sequence: Synthetic oligonucleotide
  Target: LAMA2; (+) strand; PAM type: YTN; PAM sequence: CTT
gcacaatgcagggattaggg

SEQ ID NO: 364781 - DNA, 20 bp, Artificial Sequence
  Description of Artificial Sequence: Synthetic oligonucleotide
  Target: LAMA2; (+) strand; PAM type: YTN; PAM sequence: TTG
cacaatgcagggattaggga

SEQ ID NO: 364782 - DNA, 20 bp, Artificial Sequence
  Description of Artificial Sequence: Synthetic oligonucleotide
  Target: LAMA2; (+) strand; PAM type: YTN; PAM sequence: TTA
gggatgctgacctctacaca

SEQ ID NO: 364783 - DNA, 20 bp, Artificial Sequence
  Description of Artificial Sequence: Synthetic oligonucleotide
  Target: LAMA2; (+) strand; PAM type: YTN; PAM sequence: CTG
acctctacacagttgaaaat

SEQ ID NO: 364784 - DNA, 20 bp, Artificial Sequence
  Description of Artificial Sequence: Synthetic oligonucleotide
  Target: LAMA2; (+) strand; PAM type: YTN; PAM sequence: CTC
tacacagttgaaaatttgtt

SEQ ID NO: 364785 - DNA, 20 bp, Artificial Sequence
  Description of Artificial Sequence: Synthetic oligonucleotide
  Target: LAMA2; (+) strand; PAM type: YTN; PAM sequence: CTA
cacagttgaaaatttgttta

SEQ ID NO: 364786 - DNA, 20 bp, Artificial Sequence
  Description of Artificial Sequence: Synthetic oligonucleotide
  Target: LAMA2; (+) strand; PAM type: YTN; PAM sequence: TTG
aaaatttgtttataattttt

SEQ ID NO: 364787 - DNA, 20 bp, Artificial Sequence
  Description of Artificial Sequence: Synthetic oligonucleotide
  Target: LAMA2; (+) strand; PAM type: YTN; PAM sequence: TTT
gtttataatttttagctccc

SEQ ID NO: 364788 - DNA, 20 bp, Artificial Sequence
  Description of Artificial Sequence: Synthetic oligonucleotide
  Target: LAMA2; (+) strand; PAM type: YTN; PAM sequence: TTG
tttataatttttagctccct

SEQ ID NO: 364789 - DNA, 20 bp, Artificial Sequence
  Description of Artificial Sequence: Synthetic oligonucleotide
  Target: LAMA2; (+) strand; PAM type: YTN; PAM sequence: TTT
ataatttttagctccctaaa

SEQ ID NO: 364790 - DNA, 20 bp, Artificial Sequence
  Description of Artificial Sequence: Synthetic oligonucleotide
  Target: LAMA2; (+) strand; PAM type: YTN; PAM sequence: TTA
taatttttagctccctaaaa

SEQ ID NO: 364791 - DNA, 20 bp, Artificial Sequence
  Description of Artificial Sequence: Synthetic oligonucleotide
  Target: LAMA2; (+) strand; PAM type: YTN; PAM sequence: TTT
ttagctccctaaaaacataa

SEQ ID NO: 364792 - DNA, 20 bp, Artificial Sequence
  Description of Artificial Sequence: Synthetic oligonucleotide
  Target: LAMA2; (+) strand; PAM type: YTN; PAM sequence: TTT
tagctccctaaaaacataac

SEQ ID NO: 364793 - DNA, 20 bp, Artificial Sequence
  Description of Artificial Sequence: Synthetic oligonucleotide
  Target: LAMA2; (+) strand; PAM type: YTN; PAM sequence: TTT
agctccctaaaaacataact

SEQ ID NO: 364794 - DNA, 20 bp, Artificial Sequence
  Description of Artificial Sequence: Synthetic oligonucleotide
  Target: LAMA2; (+) strand; PAM type: YTN; PAM sequence: TTA
gctccctaaaaacataacta

SEQ ID NO: 364795 - DNA, 20 bp, Artificial Sequence
  Description of Artificial Sequence: Synthetic oligonucleotide
  Target: LAMA2; (+) strand; PAM type: YTN; PAM sequence: CTC
cctaaaaacataactactaa

SEQ ID NO: 364796 - DNA, 20 bp, Artificial Sequence
  Description of Artificial Sequence: Synthetic oligonucleotide
  Target: LAMA2; (+) strand; PAM type: YTN; PAM sequence: CTA
aaaacataactactaagagt

SEQ ID NO: 364797 - DNA, 20 bp, Artificial Sequence
  Description of Artificial Sequence: Synthetic oligonucleotide
  Target: LAMA2; (+) strand; PAM type: YTN; PAM sequence: CTA
ctaagagtctactgttgaac

SEQ ID NO: 364798 - DNA, 20 bp, Artificial Sequence
  Description of Artificial Sequence: Synthetic oligonucleotide
  Target: LAMA2; (+) strand; PAM type: YTN; PAM sequence: CTA
agagtctactgttgaacaga

SEQ ID NO: 364799 - DNA, 20 bp, Artificial Sequence
  Description of Artificial Sequence: Synthetic oligonucleotide
  Target: LAMA2; (+) strand; PAM type: YTN; PAM sequence: CTA
ctgttgaacagaagccttac

SEQ ID NO: 364800 - DNA, 20 bp, Artificial Sequence
  Description of Artificial Sequence: Synthetic oligonucleotide
  Target: LAMA2; (+) strand; PAM type: YTN; PAM sequence: CTG
ttgaacagaagccttactga

SEQ ID NO: 364801 - DNA, 20 bp, Artificial Sequence
  Description of Artificial Sequence: Synthetic oligonucleotide
  Target: LAMA2; (+) strand; PAM type: YTN; PAM sequence: TTG
aacagaagccttactgataa

SEQ ID NO: 364802 - DNA, 20 bp, Artificial Sequence
  Description of Artificial Sequence: Synthetic oligonucleotide
  Target: LAMA2; (+) strand; PAM type: YTN; PAM sequence: CTT
actgataacataagcaattt

SEQ ID NO: 364803 - DNA, 20 bp, Artificial Sequence
  Description of Artificial Sequence: Synthetic oligonucleotide
  Target: LAMA2; (+) strand; PAM type: YTN; PAM sequence: TTA
ctgataacataagcaattta

SEQ ID NO: 364804 - DNA, 20 bp, Artificial Sequence
  Description of Artificial Sequence: Synthetic oligonucleotide
  Target: LAMA2; (+) strand; PAM type: YTN; PAM sequence: CTG
ataacataagcaatttatta

SEQ ID NO: 364805 - DNA, 20 bp, Artificial Sequence
  Description of Artificial Sequence: Synthetic oligonucleotide
  Target: LAMA2; (+) strand; PAM type: YTN; PAM sequence: TTT
attaacatattttgtatttc

SEQ ID NO: 364806 - DNA, 20 bp, Artificial Sequence
  Description of Artificial Sequence: Synthetic oligonucleotide
  Target: LAMA2; (+) strand; PAM type: YTN; PAM sequence: TTA
ttaacatattttgtatttca

SEQ ID NO: 364807 - DNA, 20 bp, Artificial Sequence
  Description of Artificial Sequence: Synthetic oligonucleotide
  Target: LAMA2; (+) strand; PAM type: YTN; PAM sequence: TTA
acatattttgtatttcatat

SEQ ID NO: 364808 - DNA, 20 bp, Artificial Sequence
  Description of Artificial Sequence: Synthetic oligonucleotide
  Target: LAMA2; (+) strand; PAM type: YTN; PAM sequence: TTT
tgtatttcatatgtatatat

SEQ ID NO: 364809 - DNA, 20 bp, Artificial Sequence
  Description of Artificial Sequence: Synthetic oligonucleotide
  Target: LAMA2; (+) strand; PAM type: YTN; PAM sequence: TTT
gtatttcatatgtatatatg

SEQ ID NO: 364810 - DNA, 20 bp, Artificial Sequence
  Description of Artificial Sequence: Synthetic oligonucleotide
  Target: LAMA2; (+) strand; PAM type: YTN; PAM sequence: TTG
tatttcatatgtatatatgc

SEQ ID NO: 364811 - DNA, 20 bp, Artificial Sequence
  Description of Artificial Sequence: Synthetic oligonucleotide
  Target: LAMA2; (+) strand; PAM type: YTN; PAM sequence: TTT
catatgtatatatgctgtat

SEQ ID NO: 364812 - DNA, 20 bp, Artificial Sequence
  Description of Artificial Sequence: Synthetic oligonucleotide
  Target: LAMA2; (+) strand; PAM type: YTN; PAM sequence: TTC
atatgtatatatgctgtatt

SEQ ID NO: 364813 - DNA, 20 bp, Artificial Sequence
  Description of Artificial Sequence: Synthetic oligonucleotide
  Target: LAMA2; (+) strand; PAM type: YTN; PAM sequence: CTG
tattcttataataaagtgtg

SEQ ID NO: 364814 - DNA, 20 bp, Artificial Sequence
  Description of Artificial Sequence: Synthetic oligonucleotide
  Target: LAMA2; (+) strand; PAM type: YTN; PAM sequence: TTC
ttataataaagtgtgttaga

SEQ ID NO: 364815 - DNA, 20 bp, Artificial Sequence
  Description of Artificial Sequence: Synthetic oligonucleotide
  Target: LAMA2; (+) strand; PAM type: YTN; PAM sequence: CTT
ataataaagtgtgttagaga

SEQ ID NO: 364816 - DNA, 20 bp, Artificial Sequence
  Description of Artificial Sequence: Synthetic oligonucleotide
  Target: LAMA2; (+) strand; PAM type: YTN; PAM sequence: TTA
taataaagtgtgttagagag

SEQ ID NO: 364817 - DNA, 20 bp, Artificial Sequence
  Description of Artificial Sequence: Synthetic oligonucleotide
  Target: LAMA2; (+) strand; PAM type: YTN; PAM sequence: TTA
gagagaaaagaaaatactaa

SEQ ID NO: 364818 - DNA, 20 bp, Artificial Sequence
  Description of Artificial Sequence: Synthetic oligonucleotide
  Target: LAMA2; (+) strand; PAM type: YTN; PAM sequence: CTA
agaaaatcataaggaagata

SEQ ID NO: 364819 - DNA, 20 bp, Artificial Sequence
  Description of Artificial Sequence: Synthetic oligonucleotide
  Target: LAMA2; (+) strand; PAM type: YTN; PAM sequence: TTT
gtgttaatcaagtgaaagtt

SEQ ID NO: 364820 - DNA, 20 bp, Artificial Sequence
  Description of Artificial Sequence: Synthetic oligonucleotide
  Target: LAMA2; (+) strand; PAM type: YTN; PAM sequence: TTG
tgttaatcaagtgaaagttg

SEQ ID NO: 364821 - DNA, 20 bp, Artificial Sequence
  Description of Artificial Sequence: Synthetic oligonucleotide
  Target: LAMA2; (+) strand; PAM type: YTN; PAM sequence: TTA
atcaagtgaaagttgatcat

SEQ ID NO: 364822 - DNA, 20 bp, Artificial Sequence
  Description of Artificial Sequence: Synthetic oligonucleotide
  Target: LAMA2; (+) strand; PAM type: YTN; PAM sequence: TTG
atcatcttaaaggtcttcat

SEQ ID NO: 364823 - DNA, 20 bp, Artificial Sequence
  Description of Artificial Sequence: Synthetic oligonucleotide
  Target: LAMA2; (+) strand; PAM type: YTN; PAM sequence: CTT
aaaggtcttcatctgcatca

SEQ ID NO: 364824 - DNA, 20 bp, Artificial Sequence
  Description of Artificial Sequence: Synthetic oligonucleotide
  Target: LAMA2; (+) strand; PAM type: YTN; PAM sequence: TTA
aaggtcttcatctgcatcat

SEQ ID NO: 364825 - DNA, 20 bp, Artificial Sequence
  Description of Artificial Sequence: Synthetic oligonucleotide
  Target: LAMA2; (+) strand; PAM type: YTN; PAM sequence: CTT
catctgcatcatcttcatgt

SEQ ID NO: 364826 - DNA, 20 bp, Artificial Sequence
  Description of Artificial Sequence: Synthetic oligonucleotide
  Target: LAMA2; (+) strand; PAM type: YTN; PAM sequence: TTC
atctgcatcatcttcatgtt

SEQ ID NO: 364827 - DNA, 20 bp, Artificial Sequence
  Description of Artificial Sequence: Synthetic oligonucleotide
  Target: LAMA2; (+) strand; PAM type: YTN; PAM sequence: CTG
catcatcttcatgttgaaaa

SEQ ID NO: 364828 - DNA, 20 bp, Artificial Sequence
  Description of Artificial Sequence: Synthetic oligonucleotide
  Target: LAMA2; (+) strand; PAM type: YTN; PAM sequence: CTT
catgttgaaaaggctaagga

SEQ ID NO: 364829 - DNA, 20 bp, Artificial Sequence
  Description of Artificial Sequence: Synthetic oligonucleotide
  Target: LAMA2; (+) strand; PAM type: YTN; PAM sequence: TTC
atgttgaaaaggctaaggag

SEQ ID NO: 364830 - DNA, 20 bp, Artificial Sequence
  Description of Artificial Sequence: Synthetic oligonucleotide
  Target: LAMA2; (+) strand; PAM type: YTN; PAM sequence: TTG
aaaaggctaaggaggaggaa

SEQ ID NO: 364831 - DNA, 20 bp, Artificial Sequence
  Description of Artificial Sequence: Synthetic oligonucleotide
  Target: LAMA2; (+) strand; PAM type: YTN; PAM sequence: CTA
aggaggaggaagaagaggag

SEQ ID NO: 364832 - DNA, 20 bp, Artificial Sequence
  Description of Artificial Sequence: Synthetic oligonucleotide
  Target: LAMA2; (+) strand; PAM type: YTN; PAM sequence: TTG
gtcttgctgtctcaggggag

SEQ ID NO: 364833 - DNA, 20 bp, Artificial Sequence
  Description of Artificial Sequence: Synthetic oligonucleotide
  Target: LAMA2; (+) strand; PAM type: YTN; PAM sequence: CTT
gctgtctcaggggaggcaga

SEQ ID NO: 364834 - DNA, 20 bp, Artificial Sequence
  Description of Artificial Sequence: Synthetic oligonucleotide
  Target: LAMA2; (+) strand; PAM type: YTN; PAM sequence: TTG
ctgtctcaggggaggcagag

SEQ ID NO: 364835 - DNA, 20 bp, Artificial Sequence
  Description of Artificial Sequence: Synthetic oligonucleotide
  Target: LAMA2; (+) strand; PAM type: YTN; PAM sequence: CTG
tctcaggggaggcagagaca

SEQ ID NO: 364836 - DNA, 20 bp, Artificial Sequence
  Description of Artificial Sequence: Synthetic oligonucleotide
  Target: LAMA2; (+) strand; PAM type: YTN; PAM sequence: CTC
aggggaggcagagacagaag

SEQ ID NO: 364837 - DNA, 20 bp, Artificial Sequence
  Description of Artificial Sequence: Synthetic oligonucleotide
  Target: LAMA2; (+) strand; PAM type: YTN; PAM sequence: CTT
gcacagttcaaacctgtgtt

SEQ ID NO: 364838 - DNA, 20 bp, Artificial Sequence
  Description of Artificial Sequence: Synthetic oligonucleotide
  Target: LAMA2; (+) strand; PAM type: YTN; PAM sequence: TTG
cacagttcaaacctgtgttg

SEQ ID NO: 364839 - DNA, 20 bp, Artificial Sequence
  Description of Artificial Sequence: Synthetic oligonucleotide
  Target: LAMA2; (+) strand; PAM type: YTN; PAM sequence: TTC
aaacctgtgttgttcaggtg

SEQ ID NO: 364840 - DNA, 20 bp, Artificial Sequence
  Description of Artificial Sequence: Synthetic oligonucleotide
  Target: LAMA2; (+) strand; PAM type: YTN; PAM sequence: CTG
tgttgttcaggtgtcaactg

SEQ ID NO: 364841 - DNA, 20 bp, Artificial Sequence
  Description of Artificial Sequence: Synthetic oligonucleotide
  Target: LAMA2; (+) strand; PAM type: YTN; PAM sequence: TTG
ttcaggtgtcaactgtatat

SEQ ID NO: 364842 - DNA, 20 bp, Artificial Sequence
  Description of Artificial Sequence: Synthetic oligonucleotide
  Target: LAMA2; (+) strand; PAM type: YTN; PAM sequence: TTC
aggtgtcaactgtatatgaa

SEQ ID NO: 364843 - DNA, 20 bp, Artificial Sequence
  Description of Artificial Sequence: Synthetic oligonucleotide
  Target: LAMA2; (+) strand; PAM type: YTN; PAM sequence: CTG
tatatgaaggctttcttctt

SEQ ID NO: 364844 - DNA, 20 bp, Artificial Sequence
  Description of Artificial Sequence: Synthetic oligonucleotide
  Target: LAMA2; (+) strand; PAM type: YTN; PAM sequence: CTT
tcttctttaaacagaaagga

SEQ ID NO: 364845 - DNA, 20 bp, Artificial Sequence
  Description of Artificial Sequence: Synthetic oligonucleotide
  Target: LAMA2; (+) strand; PAM type: YTN; PAM sequence: TTT
cttctttaaacagaaaggaa

SEQ ID NO: 364846 - DNA, 20 bp, Artificial Sequence
  Description of Artificial Sequence: Synthetic oligonucleotide
  Target: LAMA2; (+) strand; PAM type: YTN; PAM sequence: TTC
ttctttaaacagaaaggaag

SEQ ID NO: 364847 - DNA, 20 bp, Artificial Sequence
  Description of Artificial Sequence: Synthetic oligonucleotide
  Target: LAMA2; (+) strand; PAM type: YTN; PAM sequence: CTT
ctttaaacagaaaggaagta

SEQ ID NO: 364848 - DNA, 20 bp, Artificial Sequence
  Description of Artificial Sequence: Synthetic oligonucleotide
  Target: LAMA2; (+) strand; PAM type: YTN; PAM sequence: TTC
tttaaacagaaaggaagtat

SEQ ID NO: 364849 - DNA, 20 bp, Artificial Sequence
  Description of Artificial Sequence: Synthetic oligonucleotide
  Target: LAMA2; (+) strand; PAM type: YTN; PAM sequence: CTT
taaacagaaaggaagtattt

SEQ ID NO: 364850 - DNA, 20 bp, Artificial Sequence
  Description of Artificial Sequence: Synthetic oligonucleotide
  Target: LAMA2; (+) strand; PAM type: YTN; PAM sequence: TTT
aaacagaaaggaagtatttt

SEQ ID NO: 364851 - DNA, 20 bp, Artificial Sequence
  Description of Artificial Sequence: Synthetic oligonucleotide
  Target: LAMA2; (+) strand; PAM type: YTN; PAM sequence: TTA
aacagaaaggaagtattttg

SEQ ID NO: 364852 - DNA, 20 bp, Artificial Sequence
  Description of Artificial Sequence: Synthetic oligonucleotide
  Target: LAMA2; (+) strand; PAM type: YTN; PAM sequence: TTT
tgtgcccaagatttggagaa

SEQ ID NO: 364853 - DNA, 20 bp, Artificial Sequence
  Description of Artificial Sequence: Synthetic oligonucleotide
  Target: LAMA2; (+) strand; PAM type: YTN; PAM sequence: TTT
gtgcccaagatttggagaaa

SEQ ID NO: 364854 - DNA, 20 bp, Artificial Sequence
  Description of Artificial Sequence: Synthetic oligonucleotide
  Target: LAMA2; (+) strand; PAM type: YTN; PAM sequence: TTG
tgcccaagatttggagaaag

SEQ ID NO: 364855 - DNA, 20 bp, Artificial Sequence
  Description of Artificial Sequence: Synthetic oligonucleotide
  Target: LAMA2; (+) strand; PAM type: YTN; PAM sequence: TTT
ggagaaagcaatgggataaa

SEQ ID NO: 364856 - DNA, 20 bp, Artificial Sequence
  Description of Artificial Sequence: Synthetic oligonucleotide
  Target: LAMA2; (+) strand; PAM type: YTN; PAM sequence: TTG
gagaaagcaatgggataaaa

SEQ ID NO: 364857 - DNA, 20 bp, Artificial Sequence
  Description of Artificial Sequence: Synthetic oligonucleotide
  Target: LAMA2; (+) strand; PAM type: YTN; PAM sequence: TTT
tatggtatttgtcctttttt

SEQ ID NO: 364858 - DNA, 20 bp, Artificial Sequence
  Description of Artificial Sequence: Synthetic oligonucleotide
  Target: LAMA2; (+) strand; PAM type: YTN; PAM sequence: TTT
atggtatttgtccttttttt

SEQ ID NO: 364859 - DNA, 20 bp, Artificial Sequence
  Description of Artificial Sequence: Synthetic oligonucleotide
  Target: LAMA2; (+) strand; PAM type: YTN; PAM sequence: TTA
tggtatttgtcctttttttc

SEQ ID NO: 364860 - DNA, 20 bp, Artificial Sequence
  Description of Artificial Sequence: Synthetic oligonucleotide
  Target: LAMA2; (+) strand; PAM type: YTN; PAM sequence: TTT
gtcctttttttccttttccc

SEQ ID NO: 364861 - DNA, 20 bp, Artificial Sequence
  Description of Artificial Sequence: Synthetic oligonucleotide
  Target: LAMA2; (+) strand; PAM type: YTN; PAM sequence: TTG
tcctttttttccttttcccc

SEQ ID NO: 364862 - DNA, 20 bp, Artificial Sequence
  Description of Artificial Sequence: Synthetic oligonucleotide
  Target: LAMA2; (+) strand; PAM type: YTN; PAM sequence: CTT
tttttccttttccccttcac

SEQ ID NO: 364863 - DNA, 20 bp, Artificial Sequence
  Description of Artificial Sequence: Synthetic oligonucleotide
  Target: LAMA2; (+) strand; PAM type: YTN; PAM sequence: TTT
ttttccttttccccttcact

SEQ ID NO: 364864 - DNA, 20 bp, Artificial Sequence
  Description of Artificial Sequence: Synthetic oligonucleotide
  Target: LAMA2; (+) strand; PAM type: YTN; PAM sequence: TTT
tttccttttccccttcacta

SEQ ID NO: 364865 - DNA, 20 bp, Artificial Sequence
  Description of Artificial Sequence: Synthetic oligonucleotide
  Target: LAMA2; (+) strand; PAM type: YTN; PAM sequence: TTT
ttccttttccccttcactaa

SEQ ID NO: 364866 - DNA, 20 bp, Artificial Sequence
  Description of Artificial Sequence: Synthetic oligonucleotide
  Target: LAMA2; (+) strand; PAM type: YTN; PAM sequence: TTT
tccttttccccttcactaag

SEQ ID NO: 364867 - DNA, 20 bp, Artificial Sequence
  Description of Artificial Sequence: Synthetic oligonucleotide
  Target: LAMA2; (+) strand; PAM type: YTN; PAM sequence: TTT
ccttttccccttcactaagg

SEQ ID NO: 364868 - DNA, 20 bp, Artificial Sequence
  Description of Artificial Sequence: Synthetic oligonucleotide
  Target: LAMA2; (+) strand; PAM type: YTN; PAM sequence: TTC
cttttccccttcactaaggg

SEQ ID NO: 364869 - DNA, 20 bp, Artificial Sequence
  Description of Artificial Sequence: Synthetic oligonucleotide
  Target: LAMA2; (+) strand; PAM type: YTN; PAM sequence: CTT
ttccccttcactaagggtct

SEQ ID NO: 364870 - DNA, 20 bp, Artificial Sequence
  Description of Artificial Sequence: Synthetic oligonucleotide
  Target: LAMA2; (+) strand; PAM type: YTN; PAM sequence: TTT
tccccttcactaagggtctt

SEQ ID NO: 364871 - DNA, 20 bp, Artificial Sequence
  Description of Artificial Sequence: Synthetic oligonucleotide
  Target: LAMA2; (+) strand; PAM type: YTN; PAM sequence: TTT
ccccttcactaagggtcttg

SEQ ID NO: 364872 - DNA, 20 bp, Artificial Sequence
  Description of Artificial Sequence: Synthetic oligonucleotide
  Target: LAMA2; (+) strand; PAM type: YTN; PAM sequence: TTC
cccttcactaagggtcttga

SEQ ID NO: 364873 - DNA, 20 bp, Artificial Sequence
  Description of Artificial Sequence: Synthetic oligonucleotide
  Target: LAMA2; (+) strand; PAM type: YTN; PAM sequence: CTT
cactaagggtcttgaaaaac

SEQ ID NO: 364874 - DNA, 20 bp, Artificial Sequence
  Description of Artificial Sequence: Synthetic oligonucleotide
  Target: LAMA2; (+) strand; PAM type: YTN; PAM sequence: TTC
actaagggtcttgaaaaact

SEQ ID NO: 364875 - DNA, 20 bp, Artificial Sequence
  Description of Artificial Sequence: Synthetic oligonucleotide
  Target: LAMA2; (+) strand; PAM type: YTN; PAM sequence: CTA
agggtcttgaaaaactggtc

SEQ ID NO: 364876 - DNA, 20 bp, Artificial Sequence
  Description of Artificial Sequence: Synthetic oligonucleotide
  Target: LAMA2; (+) strand; PAM type: YTN; PAM sequence: CTT
gaaaaactggtctgaaactc

SEQ ID NO: 364877 - DNA, 20 bp, Artificial Sequence
  Description of Artificial Sequence: Synthetic oligonucleotide
  Target: LAMA2; (+) strand; PAM type: YTN; PAM sequence: TTG
aaaaactggtctgaaactcc

SEQ ID NO: 364878 - DNA, 20 bp, Artificial Sequence
  Description of Artificial Sequence: Synthetic oligonucleotide
  Target: LAMA2; (+) strand; PAM type: YTN; PAM sequence: CTG
gtctgaaactccgctccagt

SEQ ID NO: 364879 - DNA, 20 bp, Artificial Sequence
  Description of Artificial Sequence: Synthetic oligonucleotide
  Target: LAMA2; (+) strand; PAM type: YTN; PAM sequence: CTG
aaactccgctccagtagagc

SEQ ID NO: 364880 - DNA, 20 bp, Artificial Sequence
  Description of Artificial Sequence: Synthetic oligonucleotide
  Target: LAMA2; (+) strand; PAM type: YTN; PAM sequence: CTC
cgctccagtagagcaaaaag

SEQ ID NO: 364881 - DNA, 20 bp, Artificial Sequence
  Description of Artificial Sequence: Synthetic oligonucleotide
  Target: LAMA2; (+) strand; PAM type: YTN; PAM sequence: CTC
cagtagagcaaaaagaagaa

SEQ ID NO: 364882 - DNA, 20 bp, Artificial Sequence
  Description of Artificial Sequence: Synthetic oligonucleotide
  Target: LAMA2; (+) strand; PAM type: YTN; PAM sequence: CTG
aaagttaagaagatattttt

SEQ ID NO: 364883 - DNA, 20 bp, Artificial Sequence
  Description of Artificial Sequence: Synthetic oligonucleotide
  Target: LAMA2; (+) strand; PAM type: YTN; PAM sequence: TTA
agaagatatttttgtgaaaa

SEQ ID NO: 364884 - DNA, 20 bp, Artificial Sequence
  Description of Artificial Sequence: Synthetic oligonucleotide
  Target: LAMA2; (+) strand; PAM type: YTN; PAM sequence: TTT
ttgtgaaaaatgttgtgaga

SEQ ID NO: 364885 - DNA, 20 bp, Artificial Sequence
  Description of Artificial Sequence: Synthetic oligonucleotide
  Target: LAMA2; (+) strand; PAM type: YTN; PAM sequence: TTT
tgtgaaaaatgttgtgagac

SEQ ID NO: 364886 - DNA, 20 bp, Artificial Sequence
  Description of Artificial Sequence: Synthetic oligonucleotide
  Target: LAMA2; (+) strand; PAM type: YTN; PAM sequence: TTT
gtgaaaaatgttgtgagaca

SEQ ID NO: 364887 - DNA, 20 bp, Artificial Sequence
  Description of Artificial Sequence: Synthetic oligonucleotide
  Target: LAMA2; (+) strand; PAM type: YTN; PAM sequence: TTG
tgaaaaatgttgtgagacaa

SEQ ID NO: 364888 - DNA, 20 bp, Artificial Sequence
  Description of Artificial Sequence: Synthetic oligonucleotide
  Target: LAMA2; (+) strand; PAM type: YTN; PAM sequence: TTG
tgagacaaattttgacacag

SEQ ID NO: 364889 - DNA, 20 bp, Artificial Sequence
  Description of Artificial Sequence: Synthetic oligonucleotide
  Target: LAMA2; (+) strand; PAM type: YTN; PAM sequence: TTT
tgacacagggttgaggaact

SEQ ID NO: 364890 - DNA, 20 bp, Artificial Sequence
  Description of Artificial Sequence: Synthetic oligonucleotide
  Target: LAMA2; (+) strand; PAM type: YTN; PAM sequence: TTT
gacacagggttgaggaactc

SEQ ID NO: 364891 - DNA, 20 bp, Artificial Sequence
  Description of Artificial Sequence: Synthetic oligonucleotide
  Target: LAMA2; (+) strand; PAM type: YTN; PAM sequence: TTG
acacagggttgaggaactct

SEQ ID NO: 364892 - DNA, 20 bp, Artificial Sequence
  Description of Artificial Sequence: Synthetic oligonucleotide
  Target: LAMA2; (+) strand; PAM type: YTN; PAM sequence: TTG
aggaactctttttttccgca

SEQ ID NO: 364893 - DNA, 20 bp, Artificial Sequence
  Description of Artificial Sequence: Synthetic oligonucleotide
  Target: LAMA2; (+) strand; PAM type: YTN; PAM sequence: CTC
tttttttccgcatctgacca

SEQ ID NO: 364894 - DNA, 20 bp, Artificial Sequence
  Description of Artificial Sequence: Synthetic oligonucleotide
  Target: LAMA2; (+) strand; PAM type: YTN; PAM sequence: CTT
tttttccgcatctgaccaag

SEQ ID NO: 364895 - DNA, 20 bp, Artificial Sequence
  Description of Artificial Sequence: Synthetic oligonucleotide
  Target: LAMA2; (+) strand; PAM type: YTN; PAM sequence: TTT
ttttccgcatctgaccaagg

SEQ ID NO: 364896 - DNA, 20 bp, Artificial Sequence
  Description of Artificial Sequence: Synthetic oligonucleotide
  Target: LAMA2; (+) strand; PAM type: YTN; PAM sequence: TTT
tttccgcatctgaccaaggg

SEQ ID NO: 364897 - DNA, 20 bp, Artificial Sequence
  Description of Artificial Sequence: Synthetic oligonucleotide
  Target: LAMA2; (+) strand; PAM type: YTN; PAM sequence: TTT
ttccgcatctgaccaagggc

SEQ ID NO: 364898 - DNA, 20 bp, Artificial Sequence
  Description of Artificial Sequence: Synthetic oligonucleotide
  Target: LAMA2; (+) strand; PAM type: YTN; PAM sequence: TTT
tccgcatctgaccaagggca

SEQ ID NO: 364899 - DNA, 20 bp, Artificial Sequence
  Description of Artificial Sequence: Synthetic oligonucleotide
  Target: LAMA2; (+) strand; PAM type: YTN; PAM sequence: TTT
ccgcatctgaccaagggcag

SEQ ID NO: 364900 - DNA, 20 bp, Artificial Sequence
  Description of Artificial Sequence: Synthetic oligonucleotide
  Target: LAMA2; (+) strand; PAM type: YTN; PAM sequence: TTC
cgcatctgaccaagggcagg

SEQ ID NO: 364901 - DNA, 20 bp, Artificial Sequence
  Description of Artificial Sequence: Synthetic oligonucleotide
  Target: LAMA2; (+) strand; PAM type: YTN; PAM sequence: CTG
accaagggcaggcttgatat

SEQ ID NO: 364902 - DNA, 20 bp, Artificial Sequence
  Description of Artificial Sequence: Synthetic oligonucleotide
  Target: LAMA2; (+) strand; PAM type: YTN; PAM sequence: CTT
gatatcctgaaggttaagag

SEQ ID NO: 364903 - DNA, 20 bp, Artificial Sequence
  Description of Artificial Sequence: Synthetic oligonucleotide
  Target: LAMA2; (+) strand; PAM type: YTN; PAM sequence: TTG
atatcctgaaggttaagagc

SEQ ID NO: 364904 - DNA, 20 bp, Artificial Sequence
  Description of Artificial Sequence: Synthetic oligonucleotide
  Target: LAMA2; (+) strand; PAM type: YTN; PAM sequence: CTG
aaggttaagagcggctttgc

SEQ ID NO: 364905 - DNA, 20 bp, Artificial Sequence
  Description of Artificial Sequence: Synthetic oligonucleotide
  Target: LAMA2; (+) strand; PAM type: YTN; PAM sequence: TTA
agagcggctttgcctgaagc

SEQ ID NO: 364906 - DNA, 20 bp, Artificial Sequence
  Description of Artificial Sequence: Synthetic oligonucleotide
  Target: LAMA2; (+) strand; PAM type: YTN; PAM sequence: CTT
tgcctgaagcaaagttctca

SEQ ID NO: 364907 - DNA, 20 bp, Artificial Sequence
  Description of Artificial Sequence: Synthetic oligonucleotide
  Target: LAMA2; (+) strand; PAM type: YTN; PAM sequence: TTT
gcctgaagcaaagttctcac

SEQ ID NO: 364908 - DNA, 20 bp, Artificial Sequence
  Description of Artificial Sequence: Synthetic oligonucleotide
  Target: LAMA2; (+) strand; PAM type: YTN; PAM sequence: TTG
cctgaagcaaagttctcact

SEQ ID NO: 364909 - DNA, 20 bp, Artificial Sequence
  Description of Artificial Sequence: Synthetic oligonucleotide
  Target: LAMA2; (+) strand; PAM type: YTN; PAM sequence: CTG
aagcaaagttctcactatgg

SEQ ID NO: 364910 - DNA, 20 bp, Artificial Sequence
  Description of Artificial Sequence: Synthetic oligonucleotide
  Target: LAMA2; (+) strand; PAM type: YTN; PAM sequence: TTC
tcactatgggaagttgcagc

SEQ ID NO: 364911 - DNA, 20 bp, Artificial Sequence
  Description of Artificial Sequence: Synthetic oligonucleotide
  Target: LAMA2; (+) strand; PAM type: YTN; PAM sequence: CTC
actatgggaagttgcagccg

SEQ ID NO: 364912 - DNA, 20 bp, Artificial Sequence
  Description of Artificial Sequence: Synthetic oligonucleotide
  Target: LAMA2; (+) strand; PAM type: YTN; PAM sequence: CTA
tgggaagttgcagccgagta

SEQ ID NO: 364913 - DNA, 20 bp, Artificial Sequence
  Description of Artificial Sequence: Synthetic oligonucleotide
  Target: LAMA2; (+) strand; PAM type: YTN; PAM sequence: TTG
cagccgagtagtgaagagtt

SEQ ID NO: 364914 - DNA, 20 bp, Artificial Sequence
  Description of Artificial Sequence: Synthetic oligonucleotide
  Target: LAMA2; (+) strand; PAM type: YTN; PAM sequence: TTA
tcttgatgggaggccggaac

SEQ ID NO: 364915 - DNA, 20 bp, Artificial Sequence
  Description of Artificial Sequence: Synthetic oligonucleotide
  Target: LAMA2; (+) strand; PAM type: YTN; PAM sequence: CTT
gatgggaggccggaacaaat

SEQ ID NO: 364916 - DNA, 20 bp, Artificial Sequence
  Description of Artificial Sequence: Synthetic oligonucleotide
  Target: LAMA2; (+) strand; PAM type: YTN; PAM sequence: TTG
atgggaggccggaacaaatt

SEQ ID NO: 364917 - DNA, 20 bp, Artificial Sequence
  Description of Artificial Sequence: Synthetic oligonucleotide
  Target: LAMA2; (+) strand; PAM type: YTN; PAM sequence: TTT
gctttggagacgtaaaggga

SEQ ID NO: 364918 - DNA, 20 bp, Artificial Sequence
  Description of Artificial Sequence: Synthetic oligonucleotide
  Target: LAMA2; (+) strand; PAM type: YTN; PAM sequence: TTG
ctttggagacgtaaagggaa

SEQ ID NO: 364919 - DNA, 20 bp, Artificial Sequence
  Description of Artificial Sequence: Synthetic oligonucleotide
  Target: LAMA2; (+) strand; PAM type: YTN; PAM sequence: CTT
tggagacgtaaagggaacta

SEQ ID NO: 364920 - DNA, 20 bp, Artificial Sequence
  Description of Artificial Sequence: Synthetic oligonucleotide
  Target: LAMA2; (+) strand; PAM type: YTN; PAM sequence: TTT
ggagacgtaaagggaactaa

SEQ ID NO: 364921 - DNA, 20 bp, Artificial Sequence
  Description of Artificial Sequence: Synthetic oligonucleotide
  Target: LAMA2; (+) strand; PAM type: YTN; PAM sequence: TTG
gagacgtaaagggaactaag

SEQ ID NO: 364922 - DNA, 20 bp, Artificial Sequence
  Description of Artificial Sequence: Synthetic oligonucleotide
  Target: LAMA2; (+) strand; PAM type: YTN; PAM sequence: CTA
agaactattcttactggact

SEQ ID NO: 364923 - DNA, 20 bp, Artificial Sequence
  Description of Artificial Sequence: Synthetic oligonucleotide
  Target: LAMA2; (+) strand; PAM type: YTN; PAM sequence: CTA
ttcttactggactccaatat

SEQ ID NO: 364924 - DNA, 20 bp, Artificial Sequence
  Description of Artificial Sequence: Synthetic oligonucleotide
  Target: LAMA2; (+) strand; PAM type: YTN; PAM sequence: TTC
ttactggactccaatatgag

SEQ ID NO: 364925 - DNA, 20 bp, Artificial Sequence
  Description of Artificial Sequence: Synthetic oligonucleotide
  Target: LAMA2; (+) strand; PAM type: YTN; PAM sequence: CTT
actggactccaatatgagac

SEQ ID NO: 364926 - DNA, 20 bp, Artificial Sequence
  Description of Artificial Sequence: Synthetic oligonucleotide
  Target: LAMA2; (+) strand; PAM type: YTN; PAM sequence: TTA
ctggactccaatatgagact

SEQ ID NO: 364927 - DNA, 20 bp, Artificial Sequence
  Description of Artificial Sequence: Synthetic oligonucleotide
  Target: LAMA2; (+) strand; PAM type: YTN; PAM sequence: CTG
gactccaatatgagacttta

SEQ ID NO: 364928 - DNA, 20 bp, Artificial Sequence
  Description of Artificial Sequence: Synthetic oligonucleotide
  Target: LAMA2; (+) strand; PAM type: YTN; PAM sequence: CTC
caatatgagactttatttct

SEQ ID NO: 364929 - DNA, 20 bp, Artificial Sequence
  Description of Artificial Sequence: Synthetic oligonucleotide
  Target: LAMA2; (+) strand; PAM type: YTN; PAM sequence: CTT
tatttctatccattggtttg

SEQ ID NO: 364930 - DNA, 20 bp, Artificial Sequence
  Description of Artificial Sequence: Synthetic oligonucleotide
  Target: LAMA2; (+) strand; PAM type: YTN; PAM sequence: TTT
atttctatccattggtttgc

SEQ ID NO: 364931 - DNA, 20 bp, Artificial Sequence
  Description of Artificial Sequence: Synthetic oligonucleotide
  Target: LAMA2; (+) strand; PAM type: YTN; PAM sequence: TTA
tttctatccattggtttgca

SEQ ID NO: 364932 - DNA, 20 bp, Artificial Sequence
  Description of Artificial Sequence: Synthetic oligonucleotide
  Target: LAMA2; (+) strand; PAM type: YTN; PAM sequence: TTT
ctatccattggtttgcaagg

SEQ ID NO: 364933 - DNA, 20 bp, Artificial Sequence
  Description of Artificial Sequence: Synthetic oligonucleotide
  Target: LAMA2; (+) strand; PAM type: YTN; PAM sequence: TTC
tatccattggtttgcaaggc

SEQ ID NO: 364934 - DNA, 20 bp, Artificial Sequence
  Description of Artificial Sequence: Synthetic oligonucleotide
  Target: LAMA2; (+) strand; PAM type: YTN; PAM sequence: CTA
tccattggtttgcaaggcct

SEQ ID NO: 364935 - DNA, 20 bp, Artificial Sequence
  Description of Artificial Sequence: Synthetic oligonucleotide
  Target: LAMA2; (+) strand; PAM type: YTN; PAM sequence: TTG
gtttgcaaggcctggagata

SEQ ID NO: 364936 - DNA, 20 bp, Artificial Sequence
  Description of Artificial Sequence: Synthetic oligonucleotide
  Target: LAMA2; (+) strand; PAM type: YTN; PAM sequence: TTT
gcaaggcctggagatatatg

SEQ ID NO: 364937 - DNA, 20 bp, Artificial Sequence
  Description of Artificial Sequence: Synthetic oligonucleotide
  Target: LAMA2; (+) strand; PAM type: YTN; PAM sequence: TTG
caaggcctggagatatatgc

SEQ ID NO: 364938 - DNA, 20 bp, Artificial Sequence
  Description of Artificial Sequence: Synthetic oligonucleotide
  Target: LAMA2; (+) strand; PAM type: YTN; PAM sequence: CTG
gagatatatgcattagataa

SEQ ID NO: 364939 - DNA, 20 bp, Artificial Sequence
  Description of Artificial Sequence: Synthetic oligonucleotide
  Target: LAMA2; (+) strand; PAM type: YTN; PAM sequence: TTA
gataaaaagactgtatttgt

SEQ ID NO: 364940 - DNA, 20 bp, Artificial Sequence
  Description of Artificial Sequence: Synthetic oligonucleotide
  Target: LAMA2; (+) strand; PAM type: YTN; PAM sequence: CTG
tatttgtaattagaaaagcc

SEQ ID NO: 364941 - DNA, 20 bp, Artificial Sequence
  Description of Artificial Sequence: Synthetic oligonucleotide
  Target: LAMA2; (+) strand; PAM type: YTN; PAM sequence: TTT
gtaattagaaaagcctccag

SEQ ID NO: 364942 - DNA, 20 bp, Artificial Sequence
  Description of Artificial Sequence: Synthetic oligonucleotide
  Target: LAMA2; (+) strand; PAM type: YTN; PAM sequence: TTG
taattagaaaagcctccagt

SEQ ID NO: 364943 - DNA, 20 bp, Artificial Sequence
  Description of Artificial Sequence: Synthetic oligonucleotide
  Target: LAMA2; (+) strand; PAM type: YTN; PAM sequence: TTA
gaaaagcctccagtaattaa

SEQ ID NO: 364944 - DNA, 20 bp, Artificial Sequence
  Description of Artificial Sequence: Synthetic oligonucleotide
  Target: LAMA2; (+) strand; PAM type: YTN; PAM sequence: CTC
cagtaattaatgtccaaata

SEQ ID NO: 364945 - DNA, 20 bp, Artificial Sequence
  Description of Artificial Sequence: Synthetic oligonucleotide
  Target: LAMA2; (+) strand; PAM type: YTN; PAM sequence: TTA
atgtccaaatatgcaaccaa

SEQ ID NO: 364946 - DNA, 20 bp, Artificial Sequence
  Description of Artificial Sequence: Synthetic oligonucleotide
  Target: LAMA2; (+) strand; PAM type: YTN; PAM sequence: TTT
aaatgatgtctacataatac

SEQ ID NO: 364947 - DNA, 20 bp, Artificial Sequence
  Description of Artificial Sequence: Synthetic oligonucleotide
  Target: LAMA2; (+) strand; PAM type: YTN; PAM sequence: TTA
aatgatgtctacataatacc

SEQ ID NO: 364948 - DNA, 20 bp, Artificial Sequence
  Description of Artificial Sequence: Synthetic oligonucleotide
  Target: LAMA2; (+) strand; PAM type: YTN; PAM sequence: CTA
cataataccacacatagatg

SEQ ID NO: 364949 - DNA, 20 bp, Artificial Sequence
  Description of Artificial Sequence: Synthetic oligonucleotide
  Target: LAMA2; (+) strand; PAM type: YTN; PAM sequence: TTC
attataataattcttccaat

SEQ ID NO: 364950 - DNA, 20 bp, Artificial Sequence
  Description of Artificial Sequence: Synthetic oligonucleotide
  Target: LAMA2; (+) strand; PAM type: YTN; PAM sequence: TTA
taataattcttccaatctag

SEQ ID NO: 364951 - DNA, 20 bp, Artificial Sequence
  Description of Artificial Sequence: Synthetic oligonucleotide
  Target: LAMA2; (+) strand; PAM type: YTN; PAM sequence: TTC
ttccaatctagttgttgtta

SEQ ID NO: 364952 - DNA, 20 bp, Artificial Sequence
  Description of Artificial Sequence: Synthetic oligonucleotide
  Target: LAMA2; (+) strand; PAM type: YTN; PAM sequence: CTT
ccaatctagttgttgttata

SEQ ID NO: 364953 - DNA, 20 bp, Artificial Sequence
  Description of Artificial Sequence: Synthetic oligonucleotide
  Target: LAMA2; (+) strand; PAM type: YTN; PAM sequence: TTC
caatctagttgttgttatat

SEQ ID NO: 364954 - DNA, 20 bp, Artificial Sequence
  Description of Artificial Sequence: Synthetic oligonucleotide
  Target: LAMA2; (+) strand; PAM type: YTN; PAM sequence: CTA
gttgttgttatatagaagcc

SEQ ID NO: 364955 - DNA, 20 bp, Artificial Sequence
  Description of Artificial Sequence: Synthetic oligonucleotide
  Target: LAMA2; (+) strand; PAM type: YTN; PAM sequence: TTG
ttgttatatagaagcccctc

SEQ ID NO: 364956 - DNA, 20 bp, Artificial Sequence
  Description of Artificial Sequence: Synthetic oligonucleotide
  Target: LAMA2; (+) strand; PAM type: YTN; PAM sequence: TTG
ttatatagaagcccctcaga

SEQ ID NO: 364957 - DNA, 20 bp, Artificial Sequence
  Description of Artificial Sequence: Synthetic oligonucleotide
  Target: LAMA2; (+) strand; PAM type: YTN; PAM sequence: TTA
tatagaagcccctcagaggg

SEQ ID NO: 364958 - DNA, 20 bp, Artificial Sequence
  Description of Artificial Sequence: Synthetic oligonucleotide
  Target: LAMA2; (+) strand; PAM type: YTN; PAM sequence: CTC
agagggcaccccattttgct

SEQ ID NO: 364959 - DNA, 20 bp, Artificial Sequence
  Description of Artificial Sequence: Synthetic oligonucleotide
  Target: LAMA2; (+) strand; PAM type: YTN; PAM sequence: TTT
tgctgaatttcttgagtttt

SEQ ID NO: 364960 - DNA, 20 bp, Artificial Sequence
  Description of Artificial Sequence: Synthetic oligonucleotide
  Target: LAMA2; (+) strand; PAM type: YTN; PAM sequence: TTT
gctgaatttcttgagttttt

SEQ ID NO: 364961 - DNA, 20 bp, Artificial Sequence
  Description of Artificial Sequence: Synthetic oligonucleotide
  Target: LAMA2; (+) strand; PAM type: YTN; PAM sequence: TTG
ctgaatttcttgagtttttt

SEQ ID NO: 364962 - DNA, 20 bp, Artificial Sequence
  Description of Artificial Sequence: Synthetic oligonucleotide
  Target: LAMA2; (+) strand; PAM type: YTN; PAM sequence: CTG
aatttcttgagttttttact

SEQ ID NO: 364963 - DNA, 20 bp, Artificial Sequence
  Description of Artificial Sequence: Synthetic oligonucleotide
  Target: LAMA2; (+) strand; PAM type: YTN; PAM sequence: TTT
cttgagttttttacttatat

SEQ ID NO: 364964 - DNA, 20 bp, Artificial Sequence
  Description of Artificial Sequence: Synthetic oligonucleotide
  Target: LAMA2; (+) strand; PAM type: YTN; PAM sequence: TTC
ttgagttttttacttatatc

SEQ ID NO: 364965 - DNA, 20 bp, Artificial Sequence
  Description of Artificial Sequence: Synthetic oligonucleotide
  Target: LAMA2; (+) strand; PAM type: YTN; PAM sequence: CTT
gagttttttacttatatcac

SEQ ID NO: 364966 - DNA, 20 bp, Artificial Sequence
  Description of Artificial Sequence: Synthetic oligonucleotide
  Target: LAMA2; (+) strand; PAM type: YTN; PAM sequence: TTG
agttttttacttatatcaca

SEQ ID NO: 364967 - DNA, 20 bp, Artificial Sequence
  Description of Artificial Sequence: Synthetic oligonucleotide
  Target: LAMA2; (+) strand; PAM type: YTN; PAM sequence: TTT
tttacttatatcacagaatc

SEQ ID NO: 364968 - DNA, 20 bp, Artificial Sequence
  Description of Artificial Sequence: Synthetic oligonucleotide
  Target: LAMA2; (+) strand; PAM type: YTN; PAM sequence: TTT
ttacttatatcacagaatca

SEQ ID NO: 364969 - DNA, 20 bp, Artificial Sequence
  Description of Artificial Sequence: Synthetic oligonucleotide
  Target: LAMA2; (+) strand; PAM type: YTN; PAM sequence: TTT
tacttatatcacagaatcag

SEQ ID NO: 364970 - DNA, 20 bp, Artificial Sequence
  Description of Artificial Sequence: Synthetic oligonucleotide
  Target: LAMA2; (+) strand; PAM type: YTN; PAM sequence: TTT
acttatatcacagaatcagg

SEQ ID NO: 364971 - DNA, 20 bp, Artificial Sequence
  Description of Artificial Sequence: Synthetic oligonucleotide
  Target: LAMA2; (+) strand; PAM type: YTN; PAM sequence: TTA
cttatatcacagaatcagga

SEQ ID NO: 364972 - DNA, 20 bp, Artificial Sequence
  Description of Artificial Sequence: Synthetic oligonucleotide
  Target: LAMA2; (+) strand; PAM type: YTN; PAM sequence: CTT
atatcacagaatcaggatgt

SEQ ID NO: 364973 - DNA, 20 bp, Artificial Sequence
  Description of Artificial Sequence: Synthetic oligonucleotide
  Target: LAMA2; (+) strand; PAM type: YTN; PAM sequence: TTA
tatcacagaatcaggatgtt

SEQ ID NO: 364974 - DNA, 20 bp, Artificial Sequence
  Description of Artificial Sequence: Synthetic oligonucleotide
  Target: LAMA2; (+) strand; PAM type: YTN; PAM sequence: TTC
aaagtataacaaagatgaga

SEQ ID NO: 364975 - DNA, 20 bp, Artificial Sequence
  Description of Artificial Sequence: Synthetic oligonucleotide
  Target: LAMA2; (+) strand; PAM type: YTN; PAM sequence: TTG
aaaaaagaattattagtgat

SEQ ID NO: 364976 - DNA, 20 bp, Artificial Sequence
  Description of Artificial Sequence: Synthetic oligonucleotide
  Target: LAMA2; (+) strand; PAM type: YTN; PAM sequence: TTA
ttagtgatatttcttctacc

SEQ ID NO: 364977 - DNA, 20 bp, Artificial Sequence
  Description of Artificial Sequence: Synthetic oligonucleotide
  Target: LAMA2; (+) strand; PAM type: YTN; PAM sequence: TTA
gtgatatttcttctaccata

SEQ ID NO: 364978 - DNA, 20 bp, Artificial Sequence
  Description of Artificial Sequence: Synthetic oligonucleotide
  Target: LAMA2; (+) strand; PAM type: YTN; PAM sequence: TTT
cttctaccatatacatgtta

SEQ ID NO: 364979 - DNA, 20 bp, Artificial Sequence
  Description of Artificial Sequence: Synthetic oligonucleotide
  Target: LAMA2; (+) strand; PAM type: YTN; PAM sequence: TTC
ttctaccatatacatgttat

SEQ ID NO: 364980 - DNA, 20 bp, Artificial Sequence
  Description of Artificial Sequence: Synthetic oligonucleotide
  Target: LAMA2; (+) strand; PAM type: YTN; PAM sequence: CTT
ctaccatatacatgttatct

SEQ ID NO: 364981 - DNA, 20 bp, Artificial Sequence
  Description of Artificial Sequence: Synthetic oligonucleotide
  Target: LAMA2; (+) strand; PAM type: YTN; PAM sequence: TTC
taccatatacatgttatctt

SEQ ID NO: 364982 - DNA, 20 bp, Artificial Sequence
  Description of Artificial Sequence: Synthetic oligonucleotide
  Target: LAMA2; (+) strand; PAM type: YTN; PAM sequence: CTA
ccatatacatgttatcttgg

SEQ ID NO: 364983 - DNA, 20 bp, Artificial Sequence
  Description of Artificial Sequence: Synthetic oligonucleotide
  Target: LAMA2; (+) strand; PAM type: YTN; PAM sequence: TTA
tcttggaattggaatttttt

SEQ ID NO: 364984 - DNA, 20 bp, Artificial Sequence
  Description of Artificial Sequence: Synthetic oligonucleotide
  Target: LAMA2; (+) strand; PAM type: YTN; PAM sequence: CTT
ggaattggaattttttcata

SEQ ID NO: 364985 - DNA, 20 bp, Artificial Sequence
  Description of Artificial Sequence: Synthetic oligonucleotide
  Target: LAMA2; (+) strand; PAM type: YTN; PAM sequence: TTG
gaattggaattttttcataa

SEQ ID NO: 364986 - DNA, 20 bp, Artificial Sequence
  Description of Artificial Sequence: Synthetic oligonucleotide
  Target: LAMA2; (+) strand; PAM type: YTN; PAM sequence: TTG
gaattttttcataataagaa

SEQ ID NO: 364987 - DNA, 20 bp, Artificial Sequence
  Description of Artificial Sequence: Synthetic oligonucleotide
  Target: LAMA2; (+) strand; PAM type: YTN; PAM sequence: TTT
tttcataataagaaatccat

SEQ ID NO: 364988 - DNA, 20 bp, Artificial Sequence
  Description of Artificial Sequence: Synthetic oligonucleotide
  Target: LAMA2; (+) strand; PAM type: YTN; PAM sequence: TTT
ttcataataagaaatccatt

SEQ ID NO: 364989 - DNA, 20 bp, Artificial Sequence
  Description of Artificial Sequence: Synthetic oligonucleotide
  Target: LAMA2; (+) strand; PAM type: YTN; PAM sequence: TTT
tcataataagaaatccatta

SEQ ID NO: 364990 - DNA, 20 bp, Artificial Sequence
  Description of Artificial Sequence: Synthetic oligonucleotide
  Target: LAMA2; (+) strand; PAM type: YTN; PAM sequence: TTT
cataataagaaatccattag

SEQ ID NO: 364991 - DNA, 20 bp, Artificial Sequence
  Description of Artificial Sequence: Synthetic oligonucleotide
  Target: LAMA2; (+) strand; PAM type: YTN; PAM sequence: TTC
ataataagaaatccattagc

SEQ ID NO: 364992 - DNA, 20 bp, Artificial Sequence
  Description of Artificial Sequence: Synthetic oligonucleotide
  Target: LAMA2; (+) strand; PAM type: YTN; PAM sequence: TTA
gcataaatacagtttaaatt

SEQ ID NO: 364993 - DNA, 20 bp, Artificial Sequence
  Description of Artificial Sequence: Synthetic oligonucleotide
  Target: LAMA2; (+) strand; PAM type: YTN; PAM sequence: TTT
aaattgaataagtaaatttc

SEQ ID NO: 364994 - DNA, 20 bp, Artificial Sequence
  Description of Artificial Sequence: Synthetic oligonucleotide
  Target: LAMA2; (+) strand; PAM type: YTN; PAM sequence: TTA
aattgaataagtaaatttca

SEQ ID NO: 364995 - DNA, 20 bp, Artificial Sequence
  Description of Artificial Sequence: Synthetic oligonucleotide
  Target: LAMA2; (+) strand; PAM type: YTN; PAM sequence: TTG
aataagtaaatttcattaaa

SEQ ID NO: 364996 - DNA, 20 bp, Artificial Sequence
  Description of Artificial Sequence: Synthetic oligonucleotide
  Target: LAMA2; (+) strand; PAM type: YTN; PAM sequence: TTT
cattaaaaacaaaatattta

SEQ ID NO: 364997 - DNA, 20 bp, Artificial Sequence
  Description of Artificial Sequence: Synthetic oligonucleotide
  Target: LAMA2; (+) strand; PAM type: YTN; PAM sequence: TTC
attaaaaacaaaatatttat

SEQ ID NO: 364998 - DNA, 20 bp, Artificial Sequence
  Description of Artificial Sequence: Synthetic oligonucleotide
  Target: LAMA2; (+) strand; PAM type: YTN; PAM sequence: TTA
aaaacaaaatatttatttgg

SEQ ID NO: 364999 - DNA, 20 bp, Artificial Sequence
  Description of Artificial Sequence: Synthetic oligonucleotide
  Target: LAMA2; (+) strand; PAM type: YTN; PAM sequence: TTT
atttgggggtacattttata

SEQ ID NO: 365000 - DNA, 20 bp, Artificial Sequence
  Description of Artificial Sequence: Synthetic oligonucleotide
  Target: LAMA2; (+) strand; PAM type: YTN; PAM sequence: TTA
tttgggggtacattttataa

SEQ ID NO: 365001 - DNA, 20 bp, Artificial Sequence
  Description of Artificial Sequence: Synthetic oligonucleotide
  Target: LAMA2; (+) strand; PAM type: YTN; PAM sequence: TTT
gggggtacattttataaata

SEQ ID NO: 365002 - DNA, 20 bp, Artificial Sequence
  Description of Artificial Sequence: Synthetic oligonucleotide
  Target: LAMA2; (+) strand; PAM type: YTN; PAM sequence: TTG
ggggtacattttataaatag

SEQ ID NO: 365003 - DNA, 20 bp, Artificial Sequence
  Description of Artificial Sequence: Synthetic oligonucleotide
  Target: LAMA2; (+) strand; PAM type: YTN; PAM sequence: TTT
tataaatagctgcaaaatca

SEQ ID NO: 365004 - DNA, 20 bp, Artificial Sequence
  Description of Artificial Sequence: Synthetic oligonucleotide
  Target: LAMA2; (+) strand; PAM type: YTN; PAM sequence: TTT
ataaatagctgcaaaatcaa

SEQ ID NO: 365005 - DNA, 20 bp, Artificial Sequence
  Description of Artificial Sequence: Synthetic oligonucleotide
  Target: LAMA2; (+) strand; PAM type: YTN; PAM sequence: TTA
taaatagctgcaaaatcaaa

SEQ ID NO: 365006 - DNA, 20 bp, Artificial Sequence
  Description of Artificial Sequence: Synthetic oligonucleotide
  Target: LAMA2; (+) strand; PAM type: YTN; PAM sequence: CTG
caaaatcaaaactgcatttt

SEQ ID NO: 365007 - DNA, 20 bp, Artificial Sequence
  Description of Artificial Sequence: Synthetic oligonucleotide
  Target: LAMA2; (+) strand; PAM type: YTN; PAM sequence: CTG
catttttgaaatgtaagcca

SEQ ID NO: 365008 - DNA, 20 bp, Artificial Sequence
  Description of Artificial Sequence: Synthetic oligonucleotide
  Target: LAMA2; (+) strand; PAM type: YTN; PAM sequence: TTT
ttgaaatgtaagccatattg

SEQ ID NO: 365009 - DNA, 20 bp, Artificial Sequence
  Description of Artificial Sequence: Synthetic oligonucleotide
  Target: LAMA2; (+) strand; PAM type: YTN; PAM sequence: TTT
tgaaatgtaagccatattga

SEQ ID NO: 365010 - DNA, 20 bp, Artificial Sequence
  Description of Artificial Sequence: Synthetic oligonucleotide
  Target: LAMA2; (+) strand; PAM type: YTN; PAM sequence: TTT
gaaatgtaagccatattgat

SEQ ID NO: 365011 - DNA, 20 bp, Artificial Sequence
  Description of Artificial Sequence: Synthetic oligonucleotide
  Target: LAMA2; (+) strand; PAM type: YTN; PAM sequence: TTG
aaatgtaagccatattgatg

SEQ ID NO: 365012 - DNA, 20 bp, Artificial Sequence
  Description of Artificial Sequence: Synthetic oligonucleotide
  Target: LAMA2; (+) strand; PAM type: YTN; PAM sequence: TTG
atgctagtaagtcaatatgc

SEQ ID NO: 365013 - DNA, 20 bp, Artificial Sequence
  Description of Artificial Sequence: Synthetic oligonucleotide
  Target: LAMA2; (+) strand; PAM type: YTN; PAM sequence: CTA
gtaagtcaatatgctcatta

SEQ ID NO: 365014 - DNA, 20 bp, Artificial Sequence
  Description of Artificial Sequence: Synthetic oligonucleotide
  Target: LAMA2; (+) strand; PAM type: YTN; PAM sequence: CTC
attatcaattgtgtatgtac

SEQ ID NO: 365015 - DNA, 20 bp, Artificial Sequence
  Description of Artificial Sequence: Synthetic oligonucleotide
  Target: LAMA2; (+) strand; PAM type: YTN; PAM sequence: TTA
tcaattgtgtatgtactttt

SEQ ID NO: 365016 - DNA, 20 bp, Artificial Sequence
  Description of Artificial Sequence: Synthetic oligonucleotide
  Target: LAMA2; (+) strand; PAM type: YTN; PAM sequence: TTG
tgtatgtacttttatgttat

SEQ ID NO: 365017 - DNA, 20 bp, Artificial Sequence
  Description of Artificial Sequence: Synthetic oligonucleotide
  Target: LAMA2; (+) strand; PAM type: YTN; PAM sequence: CTT
ttatgttatttagaaaattt

SEQ ID NO: 365018 - DNA, 20 bp, Artificial Sequence
  Description of Artificial Sequence: Synthetic oligonucleotide
  Target: LAMA2; (+) strand; PAM type: YTN; PAM sequence: TTT
tatgttatttagaaaattta

SEQ ID NO: 365019 - DNA, 20 bp, Artificial Sequence
  Description of Artificial Sequence: Synthetic oligonucleotide
  Target: LAMA2; (+) strand; PAM type: YTN; PAM sequence: TTT
atgttatttagaaaatttaa

SEQ ID NO: 365020 - DNA, 20 bp, Artificial Sequence
  Description of Artificial Sequence: Synthetic oligonucleotide
  Target: LAMA2; (+) strand; PAM type: YTN; PAM sequence: TTA
tgttatttagaaaatttaat

SEQ ID NO: 365021 - DNA, 20 bp, Artificial Sequence
  Description of Artificial Sequence: Synthetic oligonucleotide
  Target: LAMA2; (+) strand; PAM type: YTN; PAM sequence: TTA
tttagaaaatttaattacac

SEQ ID NO: 365022 - DNA, 20 bp, Artificial Sequence
  Description of Artificial Sequence: Synthetic oligonucleotide
  Target: LAMA2; (+) strand; PAM type: YTN; PAM sequence: TTT
agaaaatttaattacacgta

SEQ ID NO: 365023 - DNA, 20 bp, Artificial Sequence
  Description of Artificial Sequence: Synthetic oligonucleotide
  Target: LAMA2; (+) strand; PAM type: YTN; PAM sequence: TTA
gaaaatttaattacacgtac

SEQ ID NO: 365024 - DNA, 20 bp, Artificial Sequence
  Description of Artificial Sequence: Synthetic oligonucleotide
  Target: LAMA2; (+) strand; PAM type: YTN; PAM sequence: TTT
aattacacgtacggtgtttc

SEQ ID NO: 365025 - DNA, 20 bp, Artificial Sequence
  Description of Artificial Sequence: Synthetic oligonucleotide
  Target: LAMA2; (+) strand; PAM type: YTN; PAM sequence: TTA
attacacgtacggtgtttca

SEQ ID NO: 365026 - DNA, 20 bp, Artificial Sequence
  Description of Artificial Sequence: Synthetic oligonucleotide
  Target: LAMA2; (+) strand; PAM type: YTN; PAM sequence: TTA
cacgtacggtgtttcaagta

SEQ ID NO: 365027 - DNA, 20 bp, Artificial Sequence
  Description of Artificial Sequence: Synthetic oligonucleotide
  Target: LAMA2; (+) strand; PAM type: YTN; PAM sequence: TTT
caagtattcaatagataaac

SEQ ID NO: 365028 - DNA, 20 bp, Artificial Sequence
  Description of Artificial Sequence: Synthetic oligonucleotide
  Target: LAMA2; (+) strand; PAM type: YTN; PAM sequence: TTC
aagtattcaatagataaacc

SEQ ID NO: 365029 - DNA, 20 bp, Artificial Sequence
  Description of Artificial Sequence: Synthetic oligonucleotide
  Target: LAMA2; (+) strand; PAM type: YTN; PAM sequence: TTC
aatagataaaccacctagga

SEQ ID NO: 365030 - DNA, 20 bp, Artificial Sequence
  Description of Artificial Sequence: Synthetic oligonucleotide
  Target: LAMA2; (+) strand; PAM type: YTN; PAM sequence: CTA
ggaatataacagggggcata

SEQ ID NO: 365031 - DNA, 20 bp, Artificial Sequence
  Description of Artificial Sequence: Synthetic oligonucleotide
  Target: LAMA2; (+) strand; PAM type: YTN; PAM sequence: TTA
tcgactctgtgtctttatga

SEQ ID NO: 365032 - DNA, 20 bp, Artificial Sequence
  Description of Artificial Sequence: Synthetic oligonucleotide
  Target: LAMA2; (+) strand; PAM type: YTN; PAM sequence: CTC
tgtgtctttatgaaactaga

SEQ ID NO: 365033 - DNA, 20 bp, Artificial Sequence
  Description of Artificial Sequence: Synthetic oligonucleotide
  Target: LAMA2; (+) strand; PAM type: YTN; PAM sequence: CTG
tgtctttatgaaactagata

SEQ ID NO: 365034 - DNA, 20 bp, Artificial Sequence
  Description of Artificial Sequence: Synthetic oligonucleotide
  Target: LAMA2; (+) strand; PAM type: YTN; PAM sequence: CTT
tatgaaactagataaagcaa

SEQ ID NO: 365035 - DNA, 20 bp, Artificial Sequence
  Description of Artificial Sequence: Synthetic oligonucleotide
  Target: LAMA2; (+) strand; PAM type: YTN; PAM sequence: TTT
atgaaactagataaagcaaa

SEQ ID NO: 365036 - DNA, 20 bp, Artificial Sequence
  Description of Artificial Sequence: Synthetic oligonucleotide
  Target: LAMA2; (+) strand; PAM type: YTN; PAM sequence: TTA
tgaaactagataaagcaaag

SEQ ID NO: 365037 - DNA, 20 bp, Artificial Sequence
  Description of Artificial Sequence: Synthetic oligonucleotide
  Target: LAMA2; (+) strand; PAM type: YTN; PAM sequence: CTA
gataaagcaaagaaaaatct

SEQ ID NO: 365038 - DNA, 20 bp, Artificial Sequence
  Description of Artificial Sequence: Synthetic oligonucleotide
  Target: LAMA2; (+) strand; PAM type: YTN; PAM sequence: CTG
tcaattactcagccagtttc

SEQ ID NO: 365039 - DNA, 20 bp, Artificial Sequence
  Description of Artificial Sequence: Synthetic oligonucleotide
  Target: LAMA2; (+) strand; PAM type: YTN; PAM sequence: TTA
ctcagccagtttcatcttag

SEQ ID NO: 365040 - DNA, 20 bp, Artificial Sequence
  Description of Artificial Sequence: Synthetic oligonucleotide
  Target: LAMA2; (+) strand; PAM type: YTN; PAM sequence: CTC
agccagtttcatcttagtag

SEQ ID NO: 365041 - DNA, 20 bp, Artificial Sequence
  Description of Artificial Sequence: Synthetic oligonucleotide
  Target: LAMA2; (+) strand; PAM type: YTN; PAM sequence: TTT
catcttagtagcctactgta

SEQ ID NO: 365042 - DNA, 20 bp, Artificial Sequence
  Description of Artificial Sequence: Synthetic oligonucleotide
  Target: LAMA2; (+) strand; PAM type: YTN; PAM sequence: TTC
atcttagtagcctactgtaa

SEQ ID NO: 365043 - DNA, 20 bp, Artificial Sequence
  Description of Artificial Sequence: Synthetic oligonucleotide
  Target: LAMA2; (+) strand; PAM type: YTN; PAM sequence: CTT
agtagcctactgtaaattga

SEQ ID NO: 365044 - DNA, 20 bp, Artificial Sequence
  Description of Artificial Sequence: Synthetic oligonucleotide
  Target: LAMA2; (+) strand; PAM type: YTN; PAM sequence: TTA
gtagcctactgtaaattgag

SEQ ID NO: 365045 - DNA, 20 bp, Artificial Sequence
  Description of Artificial Sequence: Synthetic oligonucleotide
  Target: LAMA2; (+) strand; PAM type: YTN; PAM sequence: CTA
ctgtaaattgaggtctatgt

SEQ ID NO: 365046 - DNA, 20 bp, Artificial Sequence
  Description of Artificial Sequence: Synthetic oligonucleotide
  Target: LAMA2; (+) strand; PAM type: YTN; PAM sequence: CTG
taaattgaggtctatgtttt

SEQ ID NO: 365047 - DNA, 20 bp, Artificial Sequence
  Description of Artificial Sequence: Synthetic oligonucleotide
  Target: LAMA2; (+) strand; PAM type: YTN; PAM sequence: TTG
aggtctatgtttttgagtga

SEQ ID NO: 365048 - DNA, 20 bp, Artificial Sequence
  Description of Artificial Sequence: Synthetic oligonucleotide
  Target: LAMA2; (+) strand; PAM type: YTN; PAM sequence: CTA
tgtttttgagtgaatgaaat

SEQ ID NO: 365049 - DNA, 20 bp, Artificial Sequence
  Description of Artificial Sequence: Synthetic oligonucleotide
  Target: LAMA2; (+) strand; PAM type: YTN; PAM sequence: TTT
ttgagtgaatgaaatctagt

SEQ ID NO: 365050 - DNA, 20 bp, Artificial Sequence
  Description of Artificial Sequence: Synthetic oligonucleotide
  Target: LAMA2; (+) strand; PAM type: YTN; PAM sequence: TTT
tgagtgaatgaaatctagta

SEQ ID NO: 365051 - DNA, 20 bp, Artificial Sequence
  Description of Artificial Sequence: Synthetic oligonucleotide
  Target: LAMA2; (+) strand; PAM type: YTN; PAM sequence: TTT
gagtgaatgaaatctagtaa

SEQ ID NO: 365052 - DNA, 20 bp, Artificial Sequence
  Description of Artificial Sequence: Synthetic oligonucleotide
  Target: LAMA2; (+) strand; PAM type: YTN; PAM sequence: TTG
agtgaatgaaatctagtaaa

SEQ ID NO: 365053 - DNA, 20 bp, Artificial Sequence
  Description of Artificial Sequence: Synthetic oligonucleotide
  Target: LAMA2; (+) strand; PAM type: YTN; PAM sequence: CTA
gtaaattaagttcaccaggt

SEQ ID NO: 365054 - DNA, 20 bp, Artificial Sequence
  Description of Artificial Sequence: Synthetic oligonucleotide
  Target: LAMA2; (+) strand; PAM type: YTN; PAM sequence: TTA
agttcaccaggtcttattct

SEQ ID NO: 365055 - DNA, 20 bp, Artificial Sequence
  Description of Artificial Sequence: Synthetic oligonucleotide
  Target: LAMA2; (+) strand; PAM type: YTN; PAM sequence: TTC
accaggtcttattctagttt

SEQ ID NO: 365056 - DNA, 20 bp, Artificial Sequence
  Description of Artificial Sequence: Synthetic oligonucleotide
  Target: LAMA2; (+) strand; PAM type: YTN; PAM sequence: CTT
attctagtttattttagatg

SEQ ID NO: 365057 - DNA, 20 bp, Artificial Sequence
  Description of Artificial Sequence: Synthetic oligonucleotide
  Target: LAMA2; (+) strand; PAM type: YTN; PAM sequence: TTA
ttctagtttattttagatgg

SEQ ID NO: 365058 - DNA, 20 bp, Artificial Sequence
  Description of Artificial Sequence: Synthetic oligonucleotide
  Target: LAMA2; (+) strand; PAM type: YTN; PAM sequence: TTC
tagtttattttagatggaaa

SEQ ID NO: 365059 - DNA, 20 bp, Artificial Sequence
  Description of Artificial Sequence: Synthetic oligonucleotide
  Target: LAMA2; (+) strand; PAM type: YTN; PAM sequence: CTA
gtttattttagatggaaatg

SEQ ID NO: 365060 - DNA, 20 bp, Artificial Sequence
  Description of Artificial Sequence: Synthetic oligonucleotide
  Target: LAMA2; (+) strand; PAM type: YTN; PAM sequence: TTT
attttagatggaaatgtatg

SEQ ID NO: 365061 - DNA, 20 bp, Artificial Sequence
  Description of Artificial Sequence: Synthetic oligonucleotide
  Target: LAMA2; (+) strand; PAM type: YTN; PAM sequence: TTA
ttttagatggaaatgtatga

SEQ ID NO: 365062 - DNA, 20 bp, Artificial Sequence
  Description of Artificial Sequence: Synthetic oligonucleotide
  Target: LAMA2; (+) strand; PAM type: YTN; PAM sequence: TTT
tagatggaaatgtatgattt

SEQ ID NO: 365063 - DNA, 20 bp, Artificial Sequence
  Description of Artificial Sequence: Synthetic oligonucleotide
  Target: LAMA2; (+) strand; PAM type: YTN; PAM sequence: TTT
agatggaaatgtatgatttt

SEQ ID NO: 365064 - DNA, 20 bp, Artificial Sequence
  Description of Artificial Sequence: Synthetic oligonucleotide
  Target: LAMA2; (+) strand; PAM type: YTN; PAM sequence: TTA
gatggaaatgtatgattttt

SEQ ID NO: 365065 - DNA, 20 bp, Artificial Sequence
  Description of Artificial Sequence: Synthetic oligonucleotide
  Target: LAMA2; (+) strand; PAM type: YTN; PAM sequence: TTT
ttaaaagtgggagtaaaatc

SEQ ID NO: 365066 - DNA, 20 bp, Artificial Sequence
  Description of Artificial Sequence: Synthetic oligonucleotide
  Target: LAMA2; (+) strand; PAM type: YTN; PAM sequence: TTT
taaaagtgggagtaaaatct

SEQ ID NO: 365067 - DNA, 20 bp, Artificial Sequence
  Description of Artificial Sequence: Synthetic oligonucleotide
  Target: LAMA2; (+) strand; PAM type: YTN; PAM sequence: TTT
aaaagtgggagtaaaatctt

SEQ ID NO: 365068 - DNA, 20 bp, Artificial Sequence
  Description of Artificial Sequence: Synthetic oligonucleotide
  Target: LAMA2; (+) strand; PAM type: YTN; PAM sequence: TTA
aaagtgggagtaaaatctta

SEQ ID NO: 365069 - DNA, 20 bp, Artificial Sequence
  Description of Artificial Sequence: Synthetic oligonucleotide
  Target: LAMA2; (+) strand; PAM type: YTN; PAM sequence: CTT
acacatatttctgaaatgtt

SEQ ID NO: 365070 - DNA, 20 bp, Artificial Sequence
  Description of Artificial Sequence: Synthetic oligonucleotide
  Target: LAMA2; (+) strand; PAM type: YTN; PAM sequence: TTA
cacatatttctgaaatgtta

SEQ ID NO: 365071 - DNA, 20 bp, Artificial Sequence
  Description of Artificial Sequence: Synthetic oligonucleotide
  Target: LAMA2; (+) strand; PAM type: YTN; PAM sequence: TTT
ctgaaatgttaagaagataa

SEQ ID NO: 365072 - DNA, 20 bp, Artificial Sequence
  Description of Artificial Sequence: Synthetic oligonucleotide
  Target: LAMA2; (+) strand; PAM type: YTN; PAM sequence: TTC
tgaaatgttaagaagataat

SEQ ID NO: 365073 - DNA, 20 bp, Artificial Sequence
  Description of Artificial Sequence: Synthetic oligonucleotide
  Target: LAMA2; (+) strand; PAM type: YTN; PAM sequence: CTG
aaatgttaagaagataattt

SEQ ID NO: 365074 - DNA, 20 bp, Artificial Sequence
  Description of Artificial Sequence: Synthetic oligonucleotide
  Target: LAMA2; (+) strand; PAM type: YTN; PAM sequence: TTA
agaagataattttataattc

SEQ ID NO: 365075 - DNA, 20 bp, Artificial Sequence
  Description of Artificial Sequence: Synthetic oligonucleotide
  Target: LAMA2; (+) strand; PAM type: YTN; PAM sequence: TTT
tataattcaaacctgtacaa

SEQ ID NO: 365076 - DNA, 20 bp, Artificial Sequence
  Description of Artificial Sequence: Synthetic oligonucleotide
  Target: LAMA2; (+) strand; PAM type: YTN; PAM sequence: TTT
ataattcaaacctgtacaag

SEQ ID NO: 365077 - DNA, 20 bp, Artificial Sequence
  Description of Artificial Sequence: Synthetic oligonucleotide
  Target: LAMA2; (+) strand; PAM type: YTN; PAM sequence: TTA
taattcaaacctgtacaaga

SEQ ID NO: 365078 - DNA, 20 bp, Artificial Sequence
  Description of Artificial Sequence: Synthetic oligonucleotide
  Target: LAMA2; (+) strand; PAM type: YTN; PAM sequence: TTC
aaacctgtacaagaacttag

SEQ ID NO: 365079 - DNA, 20 bp, Artificial Sequence
  Description of Artificial Sequence: Synthetic oligonucleotide
  Target: LAMA2; (+) strand; PAM type: YTN; PAM sequence: CTG
tacaagaacttagtttgcct

SEQ ID NO: 365080 - DNA, 20 bp, Artificial Sequence
  Description of Artificial Sequence: Synthetic oligonucleotide
  Target: LAMA2; (+) strand; PAM type: YTN; PAM sequence: CTT
agtttgcctatctgagcaaa

SEQ ID NO: 365081 - DNA, 20 bp, Artificial Sequence
  Description of Artificial Sequence: Synthetic oligonucleotide
  Target: LAMA2; (+) strand; PAM type: YTN; PAM sequence: TTA
gtttgcctatctgagcaaat

SEQ ID NO: 365082 - DNA, 20 bp, Artificial Sequence
  Description of Artificial Sequence: Synthetic oligonucleotide
  Target: LAMA2; (+) strand; PAM type: YTN; PAM sequence: TTT
gcctatctgagcaaatttta

SEQ ID NO: 365083 - DNA, 20 bp, Artificial Sequence
  Description of Artificial Sequence: Synthetic oligonucleotide
  Target: LAMA2; (+) strand; PAM type: YTN; PAM sequence: TTG
cctatctgagcaaattttac

SEQ ID NO: 365084 - DNA, 20 bp, Artificial Sequence
  Description of Artificial Sequence: Synthetic oligonucleotide
  Target: LAMA2; (+) strand; PAM type: YTN; PAM sequence: CTA
tctgagcaaattttacattc

SEQ ID NO: 365085 - DNA, 20 bp, Artificial Sequence
  Description of Artificial Sequence: Synthetic oligonucleotide
  Target: LAMA2; (+) strand; PAM type: YTN; PAM sequence: CTG
agcaaattttacattcacta

SEQ ID NO: 365086 - DNA, 20 bp, Artificial Sequence
  Description of Artificial Sequence: Synthetic oligonucleotide
  Target: LAMA2; (+) strand; PAM type: YTN; PAM sequence: TTT
tacattcactagtgaatgcc

SEQ ID NO: 365087 - DNA, 20 bp, Artificial Sequence
  Description of Artificial Sequence: Synthetic oligonucleotide
  Target: LAMA2; (+) strand; PAM type: YTN; PAM sequence: TTT
acattcactagtgaatgccc

SEQ ID NO: 365088 - DNA, 20 bp, Artificial Sequence
  Description of Artificial Sequence: Synthetic oligonucleotide
  Target: LAMA2; (+) strand; PAM type: YTN; PAM sequence: TTA
cattcactagtgaatgccca

SEQ ID NO: 365089 - DNA, 20 bp, Artificial Sequence
  Description of Artificial Sequence: Synthetic oligonucleotide
  Target: LAMA2; (+) strand; PAM type: YTN; PAM sequence: TTC
actagtgaatgcccatgtga

SEQ ID NO: 365090 - DNA, 20 bp, Artificial Sequence
  Description of Artificial Sequence: Synthetic oligonucleotide
  Target: LAMA2; (+) strand; PAM type: YTN; PAM sequence: CTA
gtgaatgcccatgtgaaaga

SEQ ID NO: 365091 - DNA, 20 bp, Artificial Sequence
  Description of Artificial Sequence: Synthetic oligonucleotide
  Target: LAMA2; (+) strand; PAM type: YTN; PAM sequence: CTT
ccaggggccaaggggcttag

SEQ ID NO: 365092 - DNA, 20 bp, Artificial Sequence
  Description of Artificial Sequence: Synthetic oligonucleotide
  Target: LAMA2; (+) strand; PAM type: YTN; PAM sequence: TTC
caggggccaaggggcttaga

SEQ ID NO: 365093 - DNA, 20 bp, Artificial Sequence
  Description of Artificial Sequence: Synthetic oligonucleotide
  Target: LAMA2; (+) strand; PAM type: YTN; PAM sequence: CTT
agaaccaactgaactggtac

SEQ ID NO: 365094 - DNA, 20 bp, Artificial Sequence
  Description of Artificial Sequence: Synthetic oligonucleotide
  Target: LAMA2; (+) strand; PAM type: YTN; PAM sequence: TTA
gaaccaactgaactggtaca

SEQ ID NO: 365095 - DNA, 20 bp, Artificial Sequence
  Description of Artificial Sequence: Synthetic oligonucleotide
  Target: LAMA2; (+) strand; PAM type: YTN; PAM sequence: CTG
aactggtacaaaataaacat

SEQ ID NO: 365096 - DNA, 20 bp, Artificial Sequence
  Description of Artificial Sequence: Synthetic oligonucleotide
  Target: LAMA2; (+) strand; PAM type: YTN; PAM sequence: CTG
gtacaaaataaacattaggt

SEQ ID NO: 365097 - DNA, 20 bp, Artificial Sequence
  Description of Artificial Sequence: Synthetic oligonucleotide
  Target: LAMA2; (+) strand; PAM type: YTN; PAM sequence: TTA
ggtatttcagtacgtagagt

SEQ ID NO: 365098 - DNA, 20 bp, Artificial Sequence
  Description of Artificial Sequence: Synthetic oligonucleotide
  Target: LAMA2; (+) strand; PAM type: YTN; PAM sequence: TTT
cagtacgtagagtttgtgga

SEQ ID NO: 365099 - DNA, 20 bp, Artificial Sequence
  Description of Artificial Sequence: Synthetic oligonucleotide
  Target: LAMA2; (+) strand; PAM type: YTN; PAM sequence: TTC
agtacgtagagtttgtggac

SEQ ID NO: 365100 - DNA, 20 bp, Artificial Sequence
  Description of Artificial Sequence: Synthetic oligonucleotide
  Target: LAMA2; (+) strand; PAM type: YTN; PAM sequence: TTT
gtggacaaaaagaataggct

SEQ ID NO: 365101 - DNA, 20 bp, Artificial Sequence
  Description of Artificial Sequence: Synthetic oligonucleotide
  Target: LAMA2; (+) strand; PAM type: YTN; PAM sequence: TTG
tggacaaaaagaataggctc

SEQ ID NO: 365102 - DNA, 20 bp, Artificial Sequence
  Description of Artificial Sequence: Synthetic oligonucleotide
  Target: LAMA2; (+) strand; PAM type: YTN; PAM sequence: CTC
ttaccaattactatgctact

SEQ ID NO: 365103 - DNA, 20 bp, Artificial Sequence
  Description of Artificial Sequence: Synthetic oligonucleotide
  Target: LAMA2; (+) strand; PAM type: YTN; PAM sequence: CTT
accaattactatgctactag

SEQ ID NO: 365104 - DNA, 20 bp, Artificial Sequence
  Description of Artificial Sequence: Synthetic oligonucleotide
  Target: LAMA2; (+) strand; PAM type: YTN; PAM sequence: TTA
ccaattactatgctactaga

SEQ ID NO: 365105 - DNA, 20 bp, Artificial Sequence
  Description of Artificial Sequence: Synthetic oligonucleotide
  Target: LAMA2; (+) strand; PAM type: YTN; PAM sequence: TTA
ctatgctactagaatatcca

SEQ ID NO: 365106 - DNA, 20 bp, Artificial Sequence
  Description of Artificial Sequence: Synthetic oligonucleotide
  Target: LAMA2; (+) strand; PAM type: YTN; PAM sequence: CTA
tgctactagaatatccaatt

SEQ ID NO: 365107 - DNA, 20 bp, Artificial Sequence
  Description of Artificial Sequence: Synthetic oligonucleotide
  Target: LAMA2; (+) strand; PAM type: YTN; PAM sequence: CTA
ctagaatatccaattttgct

SEQ ID NO: 365108 - DNA, 20 bp, Artificial Sequence
  Description of Artificial Sequence: Synthetic oligonucleotide
  Target: LAMA2; (+) strand; PAM type: YTN; PAM sequence: CTA
gaatatccaattttgctttt

SEQ ID NO: 365109 - DNA, 20 bp, Artificial Sequence
  Description of Artificial Sequence: Synthetic oligonucleotide
  Target: LAMA2; (+) strand; PAM type: YTN; PAM sequence: TTT
tgcttttaccaagccttagt

SEQ ID NO: 365110 - DNA, 20 bp, Artificial Sequence
  Description of Artificial Sequence: Synthetic oligonucleotide
  Target: LAMA2; (+) strand; PAM type: YTN; PAM sequence: TTT
gcttttaccaagccttagtg

SEQ ID NO: 365111 - DNA, 20 bp, Artificial Sequence
  Description of Artificial Sequence: Synthetic oligonucleotide
  Target: LAMA2; (+) strand; PAM type: YTN; PAM sequence: TTG
cttttaccaagccttagtga

SEQ ID NO: 365112 - DNA, 20 bp, Artificial Sequence
  Description of Artificial Sequence: Synthetic oligonucleotide
  Target: LAMA2; (+) strand; PAM type: YTN; PAM sequence: CTT
ttaccaagccttagtgaaaa

SEQ ID NO: 365113 - DNA, 20 bp, Artificial Sequence
  Description of Artificial Sequence: Synthetic oligonucleotide
  Target: LAMA2; (+) strand; PAM type: YTN; PAM sequence: TTT
taccaagccttagtgaaaag

SEQ ID NO: 365114 - DNA, 20 bp, Artificial Sequence
  Description of Artificial Sequence: Synthetic oligonucleotide
  Target: LAMA2; (+) strand; PAM type: YTN; PAM sequence: TTT
accaagccttagtgaaaagt

SEQ ID NO: 365115 - DNA, 20 bp, Artificial Sequence
  Description of Artificial Sequence: Synthetic oligonucleotide
  Target: LAMA2; (+) strand; PAM type: YTN; PAM sequence: TTA
ccaagccttagtgaaaagtg

SEQ ID NO: 365116 - DNA, 20 bp, Artificial Sequence
  Description of Artificial Sequence: Synthetic oligonucleotide
  Target: LAMA2; (+) strand; PAM type: YTN; PAM sequence: CTT
agtgaaaagtgaatgaattc

SEQ ID NO: 365117 - DNA, 20 bp, Artificial Sequence
  Description of Artificial Sequence: Synthetic oligonucleotide
  Target: LAMA2; (+) strand; PAM type: YTN; PAM sequence: TTA
gtgaaaagtgaatgaattct

SEQ ID NO: 365118 - DNA, 20 bp, Artificial Sequence
  Description of Artificial Sequence: Synthetic oligonucleotide
  Target: LAMA2; (+) strand; PAM type: YTN; PAM sequence: TTC
taacaagaagactcaaagac

SEQ ID NO: 365119 - DNA, 20 bp, Artificial Sequence
  Description of Artificial Sequence: Synthetic oligonucleotide
  Target: LAMA2; (+) strand; PAM type: YTN; PAM sequence: CTA
acaagaagactcaaagacac

SEQ ID NO: 365120 - DNA, 20 bp, Artificial Sequence
  Description of Artificial Sequence: Synthetic oligonucleotide
  Target: LAMA2; (+) strand; PAM type: YTN; PAM sequence: CTC
aaagacactggtgctccccc

SEQ ID NO: 365121 - DNA, 20 bp, Artificial Sequence
  Description of Artificial Sequence: Synthetic oligonucleotide
  Target: LAMA2; (+) strand; PAM type: YTN; PAM sequence: CTG
gtgctccccctgtgtctccc

SEQ ID NO: 365122 - DNA, 20 bp, Artificial Sequence
  Description of Artificial Sequence: Synthetic oligonucleotide
  Target: LAMA2; (+) strand; PAM type: YTN; PAM sequence: CTC
cccctgtgtctcccttcact

SEQ ID NO: 365123 - DNA, 20 bp, Artificial Sequence
  Description of Artificial Sequence: Synthetic oligonucleotide
  Target: LAMA2; (+) strand; PAM type: YTN; PAM sequence: CTG
tgtctcccttcacttattct

SEQ ID NO: 365124 - DNA, 20 bp, Artificial Sequence
  Description of Artificial Sequence: Synthetic oligonucleotide
  Target: LAMA2; (+) strand; PAM type: YTN; PAM sequence: CTC
ccttcacttattctgcatgg

SEQ ID NO: 365125 - DNA, 20 bp, Artificial Sequence
  Description of Artificial Sequence: Synthetic oligonucleotide
  Target: LAMA2; (+) strand; PAM type: YTN; PAM sequence: CTT
cacttattctgcatggtcag

SEQ ID NO: 365126 - DNA, 20 bp, Artificial Sequence
  Description of Artificial Sequence: Synthetic oligonucleotide
  Target: LAMA2; (+) strand; PAM type: YTN; PAM sequence: TTC
acttattctgcatggtcagc

SEQ ID NO: 365127 - DNA, 20 bp, Artificial Sequence
  Description of Artificial Sequence: Synthetic oligonucleotide
  Target: LAMA2; (+) strand; PAM type: YTN; PAM sequence: CTT
attctgcatggtcagcacct

SEQ ID NO: 365128 - DNA, 20 bp, Artificial Sequence
  Description of Artificial Sequence: Synthetic oligonucleotide
  Target: LAMA2; (+) strand; PAM type: YTN; PAM sequence: TTA
ttctgcatggtcagcacctc

SEQ ID NO: 365129 - DNA, 20 bp, Artificial Sequence
  Description of Artificial Sequence: Synthetic oligonucleotide
  Target: LAMA2; (+) strand; PAM type: YTN; PAM sequence: TTC
tgcatggtcagcacctcttc

SEQ ID NO: 365130 - DNA, 20 bp, Artificial Sequence
  Description of Artificial Sequence: Synthetic oligonucleotide
  Target: LAMA2; (+) strand; PAM type: YTN; PAM sequence: CTG
catggtcagcacctcttcaa

SEQ ID NO: 365131 - DNA, 20 bp, Artificial Sequence
  Description of Artificial Sequence: Synthetic oligonucleotide
  Target: LAMA2; (+) strand; PAM type: YTN; PAM sequence: CTC
ttcaaaagaccaataataat

SEQ ID NO: 365132 - DNA, 20 bp, Artificial Sequence
  Description of Artificial Sequence: Synthetic oligonucleotide
  Target: LAMA2; (+) strand; PAM type: YTN; PAM sequence: CTT
caaaagaccaataataatgg

SEQ ID NO: 365133 - DNA, 20 bp, Artificial Sequence
  Description of Artificial Sequence: Synthetic oligonucleotide
  Target: LAMA2; (+) strand; PAM type: YTN; PAM sequence: TTC
aaaagaccaataataatggt

SEQ ID NO: 365134 - DNA, 20 bp, Artificial Sequence
  Description of Artificial Sequence: Synthetic oligonucleotide
  Target: LAMA2; (+) strand; PAM type: YTN; PAM sequence: CTA
caagaagtatacaattgctc

SEQ ID NO: 365135 - DNA, 20 bp, Artificial Sequence
  Description of Artificial Sequence: Synthetic oligonucleotide
  Target: LAMA2; (+) strand; PAM type: YTN; PAM sequence: TTG
ctcctctgatgtgaaagcat

SEQ ID NO: 365136 - DNA, 20 bp, Artificial Sequence
  Description of Artificial Sequence: Synthetic oligonucleotide
  Target: LAMA2; (+) strand; PAM type: YTN; PAM sequence: CTC
ctctgatgtgaaagcatatg

SEQ ID NO: 365137 - DNA, 20 bp, Artificial Sequence
  Description of Artificial Sequence: Synthetic oligonucleotide
  Target: LAMA2; (+) strand; PAM type: YTN; PAM sequence: CTC
tgatgtgaaagcatatgaag

SEQ ID NO: 365138 - DNA, 20 bp, Artificial Sequence
  Description of Artificial Sequence: Synthetic oligonucleotide
  Target: LAMA2; (+) strand; PAM type: YTN; PAM sequence: CTG
atgtgaaagcatatgaagaa

SEQ ID NO: 365139 - DNA, 20 bp, Artificial Sequence
  Description of Artificial Sequence: Synthetic oligonucleotide
  Target: LAMA2; (+) strand; PAM type: YTN; PAM sequence: CTG
cataaatatttgcacccctt

SEQ ID NO: 365140 - DNA, 20 bp, Artificial Sequence
  Description of Artificial Sequence: Synthetic oligonucleotide
  Target: LAMA2; (+) strand; PAM type: YTN; PAM sequence: TTT
gcacccctttgagagtatga

SEQ ID NO: 365141 - DNA, 20 bp, Artificial Sequence
  Description of Artificial Sequence: Synthetic oligonucleotide
  Target: LAMA2; (+) strand; PAM type: YTN; PAM sequence: TTG
cacccctttgagagtatgag

SEQ ID NO: 365142 - DNA, 20 bp, Artificial Sequence
  Description of Artificial Sequence: Synthetic oligonucleotide
  Target: LAMA2; (+) strand; PAM type: YTN; PAM sequence: CTT
tgagagtatgagaaagtgtg

SEQ ID NO: 365143 - DNA, 20 bp, Artificial Sequence
  Description of Artificial Sequence: Synthetic oligonucleotide
  Target: LAMA2; (+) strand; PAM type: YTN; PAM sequence: TTT
gagagtatgagaaagtgtgt

SEQ ID NO: 365144 - DNA, 20 bp, Artificial Sequence
  Description of Artificial Sequence: Synthetic oligonucleotide
  Target: LAMA2; (+) strand; PAM type: YTN; PAM sequence: TTG
agagtatgagaaagtgtgtg

SEQ ID NO: 365145 - DNA, 20 bp, Artificial Sequence
  Description of Artificial Sequence: Synthetic oligonucleotide
  Target: LAMA2; (+) strand; PAM type: YTN; PAM sequence: TTT
tatgttgtgattgataggac

SEQ ID NO: 365146 - DNA, 20 bp, Artificial Sequence
  Description of Artificial Sequence: Synthetic oligonucleotide
  Target: LAMA2; (+) strand; PAM type: YTN; PAM sequence: TTT
atgttgtgattgataggaca

SEQ ID NO: 365147 - DNA, 20 bp, Artificial Sequence
  Description of Artificial Sequence: Synthetic oligonucleotide
  Target: LAMA2; (+) strand; PAM type: YTN; PAM sequence: TTA
tgttgtgattgataggacaa

SEQ ID NO: 365148 - DNA, 20 bp, Artificial Sequence
  Description of Artificial Sequence: Synthetic oligonucleotide
  Target: LAMA2; (+) strand; PAM type: YTN; PAM sequence: TTG
tgattgataggacaactttc

SEQ ID NO: 365149 - DNA, 20 bp, Artificial Sequence
  Description of Artificial Sequence: Synthetic oligonucleotide
  Target: LAMA2; (+) strand; PAM type: YTN; PAM sequence: TTG
ataggacaactttcatggcc

SEQ ID NO: 365150 - DNA, 20 bp, Artificial Sequence
  Description of Artificial Sequence: Synthetic oligonucleotide
  Target: LAMA2; (+) strand; PAM type: YTN; PAM sequence: CTT
tcatggcccactttgaactc

SEQ ID NO: 365151 - DNA, 20 bp, Artificial Sequence
  Description of Artificial Sequence: Synthetic oligonucleotide
  Target: LAMA2; (+) strand; PAM type: YTN; PAM sequence: TTT
catggcccactttgaactct

SEQ ID NO: 365152 - DNA, 20 bp, Artificial Sequence
  Description of Artificial Sequence: Synthetic oligonucleotide
  Target: LAMA2; (+) strand; PAM type: YTN; PAM sequence: TTC
atggcccactttgaactctt

SEQ ID NO: 365153 - DNA, 20 bp, Artificial Sequence
  Description of Artificial Sequence: Synthetic oligonucleotide
  Target: LAMA2; (+) strand; PAM type: YTN; PAM sequence: CTT
tgaactcttagcaggaactt

SEQ ID NO: 365154 - DNA, 20 bp, Artificial Sequence
  Description of Artificial Sequence: Synthetic oligonucleotide
  Target: LAMA2; (+) strand; PAM type: YTN; PAM sequence: TTT
gaactcttagcaggaacttt

SEQ ID NO: 365155 - DNA, 20 bp, Artificial Sequence
  Description of Artificial Sequence: Synthetic oligonucleotide
  Target: LAMA2; (+) strand; PAM type: YTN; PAM sequence: TTG
aactcttagcaggaactttg

SEQ ID NO: 365156 - DNA, 20 bp, Artificial Sequence
  Description of Artificial Sequence: Synthetic oligonucleotide
  Target: LAMA2; (+) strand; PAM type: YTN; PAM sequence: CTC
ttagcaggaactttggaatg

SEQ ID NO: 365157 - DNA, 20 bp, Artificial Sequence
  Description of Artificial Sequence: Synthetic oligonucleotide
  Target: LAMA2; (+) strand; PAM type: YTN; PAM sequence: CTT
agcaggaactttggaatgtc

SEQ ID NO: 365158 - DNA, 20 bp, Artificial Sequence
  Description of Artificial Sequence: Synthetic oligonucleotide
  Target: LAMA2; (+) strand; PAM type: YTN; PAM sequence: TTA
gcaggaactttggaatgtcc

SEQ ID NO: 365159 - DNA, 20 bp, Artificial Sequence
  Description of Artificial Sequence: Synthetic oligonucleotide
  Target: LAMA2; (+) strand; PAM type: YTN; PAM sequence: CTT
tggaatgtcctgagggtctg

SEQ ID NO: 365160 - DNA, 20 bp, Artificial Sequence
  Description of Artificial Sequence: Synthetic oligonucleotide
  Target: LAMA2; (+) strand; PAM type: YTN; PAM sequence: TTT
ggaatgtcctgagggtctgt

SEQ ID NO: 365161 - DNA, 20 bp, Artificial Sequence
  Description of Artificial Sequence: Synthetic oligonucleotide
  Target: LAMA2; (+) strand; PAM type: YTN; PAM sequence: TTG
gaatgtcctgagggtctgtc

SEQ ID NO: 365162 - DNA, 20 bp, Artificial Sequence
  Description of Artificial Sequence: Synthetic oligonucleotide
  Target: LAMA2; (+) strand; PAM type: YTN; PAM sequence: CTG
agggtctgtctgcctttgta

SEQ ID NO: 365163 - DNA, 20 bp, Artificial Sequence
  Description of Artificial Sequence: Synthetic oligonucleotide
  Target: LAMA2; (+) strand; PAM type: YTN; PAM sequence: CTG
tctgcctttgtatggcagga

SEQ ID NO: 365164 - DNA, 20 bp, Artificial Sequence
  Description of Artificial Sequence: Synthetic oligonucleotide
  Target: LAMA2; (+) strand; PAM type: YTN; PAM sequence: CTG
cctttgtatggcaggaactc

SEQ ID NO: 365165 - DNA, 20 bp, Artificial Sequence
  Description of Artificial Sequence: Synthetic oligonucleotide
  Target: LAMA2; (+) strand; PAM type: YTN; PAM sequence: CTT
tgtatggcaggaactctgtt

SEQ ID NO: 365166 - DNA, 20 bp, Artificial Sequence
  Description of Artificial Sequence: Synthetic oligonucleotide
  Target: LAMA2; (+) strand; PAM type: YTN; PAM sequence: TTT
gtatggcaggaactctgttt

SEQ ID NO: 365167 - DNA, 20 bp, Artificial Sequence
  Description of Artificial Sequence: Synthetic oligonucleotide
  Target: LAMA2; (+) strand; PAM type: YTN; PAM sequence: TTG
tatggcaggaactctgtttt

SEQ ID NO: 365168 - DNA, 20 bp, Artificial Sequence
  Description of Artificial Sequence: Synthetic oligonucleotide
  Target: LAMA2; (+) strand; PAM type: YTN; PAM sequence: CTC
tgttttcttagaaaatagta

SEQ ID NO: 365169 - DNA, 20 bp, Artificial Sequence
  Description of Artificial Sequence: Synthetic oligonucleotide
  Target: LAMA2; (+) strand; PAM type: YTN; PAM sequence: CTG
ttttcttagaaaatagtaaa

SEQ ID NO: 365170 - DNA, 20 bp, Artificial Sequence
  Description of Artificial Sequence: Synthetic oligonucleotide
  Target: LAMA2; (+) strand; PAM type: YTN; PAM sequence: TTT
tcttagaaaatagtaaagaa

SEQ ID NO: 365171 - DNA, 20 bp, Artificial Sequence
  Description of Artificial Sequence: Synthetic oligonucleotide
  Target: LAMA2; (+) strand; PAM type: YTN; PAM sequence: TTT
cttagaaaatagtaaagaac

SEQ ID NO: 365172 - DNA, 20 bp, Artificial Sequence
  Description of Artificial Sequence: Synthetic oligonucleotide
  Target: LAMA2; (+) strand; PAM type: YTN; PAM sequence: TTC
ttagaaaatagtaaagaaca

SEQ ID NO: 365173 - DNA, 20 bp, Artificial Sequence
  Description of Artificial Sequence: Synthetic oligonucleotide
  Target: LAMA2; (+) strand; PAM type: YTN; PAM sequence: CTT
agaaaatagtaaagaacagt

SEQ ID NO: 365174 - DNA, 20 bp, Artificial Sequence
  Description of Artificial Sequence: Synthetic oligonucleotide
  Target: LAMA2; (+) strand; PAM type: YTN; PAM sequence: TTA
gaaaatagtaaagaacagtt

SEQ ID NO: 365175 - DNA, 20 bp, Artificial Sequence
  Description of Artificial Sequence: Synthetic oligonucleotide
  Target: LAMA2; (+) strand; PAM type: YTN; PAM sequence: TTT
gtactcctttgttctaaagg

SEQ ID NO: 365176 - DNA, 20 bp, Artificial Sequence
  Description of Artificial Sequence: Synthetic oligonucleotide
  Target: LAMA2; (+) strand; PAM type: YTN; PAM sequence: TTG
tactcctttgttctaaaggg

SEQ ID NO: 365177 - DNA, 20 bp, Artificial Sequence
  Description of Artificial Sequence: Synthetic oligonucleotide
  Target: LAMA2; (+) strand; PAM type: YTN; PAM sequence: CTC
ctttgttctaaagggtacct

SEQ ID NO: 365178 - DNA, 20 bp, Artificial Sequence
  Description of Artificial Sequence: Synthetic oligonucleotide
  Target: LAMA2; (+) strand; PAM type: YTN; PAM sequence: CTT
tgttctaaagggtacctata

SEQ ID NO: 365179 - DNA, 20 bp, Artificial Sequence
  Description of Artificial Sequence: Synthetic oligonucleotide
  Target: LAMA2; (+) strand; PAM type: YTN; PAM sequence: TTT
gttctaaagggtacctatag

SEQ ID NO: 365180 - DNA, 20 bp, Artificial Sequence
  Description of Artificial Sequence: Synthetic oligonucleotide
  Target: LAMA2; (+) strand; PAM type: YTN; PAM sequence: TTG
ttctaaagggtacctatagt

SEQ ID NO: 365181 - DNA, 20 bp, Artificial Sequence
  Description of Artificial Sequence: Synthetic oligonucleotide
  Target: LAMA2; (+) strand; PAM type: YTN; PAM sequence: TTC
taaagggtacctatagttta

SEQ ID NO: 365182 - DNA, 20 bp, Artificial Sequence
  Description of Artificial Sequence: Synthetic oligonucleotide
  Target: LAMA2; (+) strand; PAM type: YTN; PAM sequence: CTA
aagggtacctatagtttatg

SEQ ID NO: 365183 - DNA, 20 bp, Artificial Sequence
  Description of Artificial Sequence: Synthetic oligonucleotide
  Target: LAMA2; (+) strand; PAM type: YTN; PAM sequence: CTA
tagtttatgggaattgggga

SEQ ID NO: 365184 - DNA, 20 bp, Artificial Sequence
  Description of Artificial Sequence: Synthetic oligonucleotide
  Target: LAMA2; (+) strand; PAM type: YTN; PAM sequence: TTT
atgggaattggggaacttag

SEQ ID NO: 365185 - DNA, 20 bp, Artificial Sequence
  Description of Artificial Sequence: Synthetic oligonucleotide
  Target: LAMA2; (+) strand; PAM type: YTN; PAM sequence: TTA
tgggaattggggaacttagt

SEQ ID NO: 365186 - DNA, 20 bp, Artificial Sequence
  Description of Artificial Sequence: Synthetic oligonucleotide
  Target: LAMA2; (+) strand; PAM type: YTN; PAM sequence: TTG
gggaacttagtagaaaaatc

SEQ ID NO: 365187 - DNA, 20 bp, Artificial Sequence
  Description of Artificial Sequence: Synthetic oligonucleotide
  Target: LAMA2; (+) strand; PAM type: YTN; PAM sequence: CTT
agtagaaaaatcaccaacgc

SEQ ID NO: 365188 - DNA, 20 bp, Artificial Sequence
  Description of Artificial Sequence: Synthetic oligonucleotide
  Target: LAMA2; (+) strand; PAM type: YTN; PAM sequence: TTA
gtagaaaaatcaccaacgct

SEQ ID NO: 365189 - DNA, 20 bp, Artificial Sequence
  Description of Artificial Sequence: Synthetic oligonucleotide
  Target: LAMA2; (+) strand; PAM type: YTN; PAM sequence: CTC
tcatgtttctcataaaaaat

SEQ ID NO: 365190 - DNA, 20 bp, Artificial Sequence
  Description of Artificial Sequence: Synthetic oligonucleotide
  Target: LAMA2; (+) strand; PAM type: YTN; PAM sequence: CTC
atgtttctcataaaaaatgc

SEQ ID NO: 365191 - DNA, 20 bp, Artificial Sequence
  Description of Artificial Sequence: Synthetic oligonucleotide
  Target: LAMA2; (+) strand; PAM type: YTN; PAM sequence: TTT
ctcataaaaaatgctcagct

SEQ ID NO: 365192 - DNA, 20 bp, Artificial Sequence
  Description of Artificial Sequence: Synthetic oligonucleotide
  Target: LAMA2; (+) strand; PAM type: YTN; PAM sequence: TTC
tcataaaaaatgctcagctt

SEQ ID NO: 365193 - DNA, 20 bp, Artificial Sequence
  Description of Artificial Sequence: Synthetic oligonucleotide
  Target: LAMA2; (+) strand; PAM type: YTN; PAM sequence: CTC
ataaaaaatgctcagcttta

SEQ ID NO: 365194 - DNA, 20 bp, Artificial Sequence
  Description of Artificial Sequence: Synthetic oligonucleotide
  Target: LAMA2; (+) strand; PAM type: YTN; PAM sequence: CTC
agctttatttggaaactttg

SEQ ID NO: 365195 - DNA, 20 bp, Artificial Sequence
  Description of Artificial Sequence: Synthetic oligonucleotide
  Target: LAMA2; (+) strand; PAM type: YTN; PAM sequence: CTT
tatttggaaactttggccat

SEQ ID NO: 365196 - DNA, 20 bp, Artificial Sequence
  Description of Artificial Sequence: Synthetic oligonucleotide
  Target: LAMA2; (+) strand; PAM type: YTN; PAM sequence: TTT
atttggaaactttggccatt

SEQ ID NO: 365197 - DNA, 20 bp, Artificial Sequence
  Description of Artificial Sequence: Synthetic oligonucleotide
  Target: LAMA2; (+) strand; PAM type: YTN; PAM sequence: TTA
tttggaaactttggccattg

SEQ ID NO: 365198 - DNA, 20 bp, Artificial Sequence
  Description of Artificial Sequence: Synthetic oligonucleotide
  Target: LAMA2; (+) strand; PAM type: YTN; PAM sequence: TTT
ggaaactttggccattgttt

SEQ ID NO: 365199 - DNA, 20 bp, Artificial Sequence
  Description of Artificial Sequence: Synthetic oligonucleotide
  Target: LAMA2; (+) strand; PAM type: YTN; PAM sequence: TTG
gaaactttggccattgtttt

SEQ ID NO: 365200 - DNA, 20 bp, Artificial Sequence
  Description of Artificial Sequence: Synthetic oligonucleotide
  Target: LAMA2; (+) strand; PAM type: YTN; PAM sequence: CTT
tggccattgttttctttttc

SEQ ID NO: 365201 - DNA, 20 bp, Artificial Sequence
  Description of Artificial Sequence: Synthetic oligonucleotide
  Target: LAMA2; (+) strand; PAM type: YTN; PAM sequence: TTT
ggccattgttttctttttct

SEQ ID NO: 365202 - DNA, 20 bp, Artificial Sequence
  Description of Artificial Sequence: Synthetic oligonucleotide
  Target: LAMA2; (+) strand; PAM type: YTN; PAM sequence: TTG
gccattgttttctttttctt

SEQ ID NO: 365203 - DNA, 20 bp, Artificial Sequence
  Description of Artificial Sequence: Synthetic oligonucleotide
  Target: LAMA2; (+) strand; PAM type: YTN; PAM sequence: TTG
ttttctttttcttctttctt

SEQ ID NO: 365204 - DNA, 20 bp, Artificial Sequence
  Description of Artificial Sequence: Synthetic oligonucleotide
  Target: LAMA2; (+) strand; PAM type: YTN; PAM sequence: TTT
tctttttcttctttcttctt

SEQ ID NO: 365205 - DNA, 20 bp, Artificial Sequence
  Description of Artificial Sequence: Synthetic oligonucleotide
  Target: LAMA2; (+) strand; PAM type: YTN; PAM sequence: TTT
ctttttcttctttcttcttc

SEQ ID NO: 365206 - DNA, 20 bp, Artificial Sequence
  Description of Artificial Sequence: Synthetic oligonucleotide
  Target: LAMA2; (+) strand; PAM type: YTN; PAM sequence: TTC
tttttcttctttcttcttct

SEQ ID NO: 365207 - DNA, 20 bp, Artificial Sequence
  Description of Artificial Sequence: Synthetic oligonucleotide
  Target: LAMA2; (+) strand; PAM type: YTN; PAM sequence: CTT
tttcttctttcttcttctcc

SEQ ID NO: 365208 - DNA, 20 bp, Artificial Sequence
  Description of Artificial Sequence: Synthetic oligonucleotide
  Target: LAMA2; (+) strand; PAM type: YTN; PAM sequence: TTT
ttcttctttcttcttctcct

SEQ ID NO: 365209 - DNA, 20 bp, Artificial Sequence
  Description of Artificial Sequence: Synthetic oligonucleotide
  Target: LAMA2; (+) strand; PAM type: YTN; PAM sequence: TTT
tcttctttcttcttctcctt

SEQ ID NO: 365210 - DNA, 20 bp, Artificial Sequence
  Description of Artificial Sequence: Synthetic oligonucleotide
  Target: LAMA2; (+) strand; PAM type: YTN; PAM sequence: TTT
cttctttcttcttctccttc

SEQ ID NO: 365211 - DNA, 20 bp, Artificial Sequence
  Description of Artificial Sequence: Synthetic oligonucleotide
  Target: LAMA2; (+) strand; PAM type: YTN; PAM sequence: TTC
ttctttcttcttctccttcc

SEQ ID NO: 365212 - DNA, 20 bp, Artificial Sequence
  Description of Artificial Sequence: Synthetic oligonucleotide
  Target: LAMA2; (+) strand; PAM type: YTN; PAM sequence: CTT
ctttcttcttctccttcctc

SEQ ID NO: 365213 - DNA, 20 bp, Artificial Sequence
  Description of Artificial Sequence: Synthetic oligonucleotide
  Target: LAMA2; (+) strand; PAM type: YTN; PAM sequence: TTC
tttcttcttctccttcctct

SEQ ID NO: 365214 - DNA, 20 bp, Artificial Sequence
  Description of Artificial Sequence: Synthetic oligonucleotide
  Target: LAMA2; (+) strand; PAM type: YTN; PAM sequence: CTT
tcttcttctccttcctcttt

SEQ ID NO: 365215 - DNA, 20 bp, Artificial Sequence
  Description of Artificial Sequence: Synthetic oligonucleotide
  Target: LAMA2; (+) strand; PAM type: YTN; PAM sequence: TTT
cttcttctccttcctctttt

SEQ ID NO: 365216 - DNA, 20 bp, Artificial Sequence
  Description of Artificial Sequence: Synthetic oligonucleotide
  Target: LAMA2; (+) strand; PAM type: YTN; PAM sequence: TTC
ttcttctccttcctcttttg

SEQ ID NO: 365217 - DNA, 20 bp, Artificial Sequence
  Description of Artificial Sequence: Synthetic oligonucleotide
  Target: LAMA2; (+) strand; PAM type: YTN; PAM sequence: CTT
cttctccttcctcttttggg

SEQ ID NO: 365218 - DNA, 20 bp, Artificial Sequence
  Description of Artificial Sequence: Synthetic oligonucleotide
  Target: LAMA2; (+) strand; PAM type: YTN; PAM sequence: TTC
ttctccttcctcttttgggt

SEQ ID NO: 365219 - DNA, 20 bp, Artificial Sequence
  Description of Artificial Sequence: Synthetic oligonucleotide
  Target: LAMA2; (+) strand; PAM type: YTN; PAM sequence: CTT
ctccttcctcttttgggtta

SEQ ID NO: 365220 - DNA, 20 bp, Artificial Sequence
  Description of Artificial Sequence: Synthetic oligonucleotide
  Target: LAMA2; (+) strand; PAM type: YTN; PAM sequence: TTC
tccttcctcttttgggttaa

SEQ ID NO: 365221 - DNA, 20 bp, Artificial Sequence
  Description of Artificial Sequence: Synthetic oligonucleotide
  Target: LAMA2; (+) strand; PAM type: YTN; PAM sequence: CTC
cttcctcttttgggttaaaa

SEQ ID NO: 365222 - DNA, 20 bp, Artificial Sequence
  Description of Artificial Sequence: Synthetic oligonucleotide
  Target: LAMA2; (+) strand; PAM type: YTN; PAM sequence: CTT
cctcttttgggttaaaaagg

SEQ ID NO: 365223 - DNA, 20 bp, Artificial Sequence
  Description of Artificial Sequence: Synthetic oligonucleotide
  Target: LAMA2; (+) strand; PAM type: YTN; PAM sequence: TTC
ctcttttgggttaaaaaggc

SEQ ID NO: 365224 - DNA, 20 bp, Artificial Sequence
  Description of Artificial Sequence: Synthetic oligonucleotide
  Target: LAMA2; (+) strand; PAM type: YTN; PAM sequence: CTC
ttttgggttaaaaaggccac

SEQ ID NO: 365225 - DNA, 20 bp, Artificial Sequence
  Description of Artificial Sequence: Synthetic oligonucleotide
  Target: LAMA2; (+) strand; PAM type: YTN; PAM sequence: CTT
ttgggttaaaaaggccacag

SEQ ID NO: 365226 - DNA, 20 bp, Artificial Sequence
  Description of Artificial Sequence: Synthetic oligonucleotide
  Target: LAMA2; (+) strand; PAM type: YTN; PAM sequence: TTT
tgggttaaaaaggccacagt

SEQ ID NO: 365227 - DNA, 20 bp, Artificial Sequence
  Description of Artificial Sequence: Synthetic oligonucleotide
  Target: LAMA2; (+) strand; PAM type: YTN; PAM sequence: TTT
gggttaaaaaggccacagtc

SEQ ID NO: 365228 - DNA, 20 bp, Artificial Sequence
  Description of Artificial Sequence: Synthetic oligonucleotide
  Target: LAMA2; (+) strand; PAM type: YTN; PAM sequence: TTG
ggttaaaaaggccacagtct

SEQ ID NO: 365229 - DNA, 20 bp, Artificial Sequence
  Description of Artificial Sequence: Synthetic oligonucleotide
  Target: LAMA2; (+) strand; PAM type: YTN; PAM sequence: TTA
aaaaggccacagtctgacct

SEQ ID NO: 365230 - DNA, 20 bp, Artificial Sequence
  Description of Artificial Sequence: Synthetic oligonucleotide
  Target: LAMA2; (+) strand; PAM type: YTN; PAM sequence: CTG
acctacttatatgtgtgatg

SEQ ID NO: 365231 - DNA, 20 bp, Artificial Sequence
  Description of Artificial Sequence: Synthetic oligonucleotide
  Target: LAMA2; (+) strand; PAM type: YTN; PAM sequence: CTA
cttatatgtgtgatgaaatg

SEQ ID NO: 365232 - DNA, 20 bp, Artificial Sequence
  Description of Artificial Sequence: Synthetic oligonucleotide
  Target: LAMA2; (+) strand; PAM type: YTN; PAM sequence: CTT
atatgtgtgatgaaatgtgc

SEQ ID NO: 365233 - DNA, 20 bp, Artificial Sequence
  Description of Artificial Sequence: Synthetic oligonucleotide
  Target: LAMA2; (+) strand; PAM type: YTN; PAM sequence: TTA
tatgtgtgatgaaatgtgca

SEQ ID NO: 365234 - DNA, 20 bp, Artificial Sequence
  Description of Artificial Sequence: Synthetic oligonucleotide
  Target: LAMA2; (+) strand; PAM type: YTN; PAM sequence: CTC
tgccaaggctatttattcta

SEQ ID NO: 365235 - DNA, 20 bp, Artificial Sequence
  Description of Artificial Sequence: Synthetic oligonucleotide
  Target: LAMA2; (+) strand; PAM type: YTN; PAM sequence: CTG
ccaaggctatttattctaat

SEQ ID NO: 365236 - DNA, 20 bp, Artificial Sequence
  Description of Artificial Sequence: Synthetic oligonucleotide
  Target: LAMA2; (+) strand; PAM type: YTN; PAM sequence: CTA
tttattctaatgatttatct

SEQ ID NO: 365237 - DNA, 20 bp, Artificial Sequence
  Description of Artificial Sequence: Synthetic oligonucleotide
  Target: LAMA2; (+) strand; PAM type: YTN; PAM sequence: TTT
attctaatgatttatctact

SEQ ID NO: 365238 - DNA, 20 bp, Artificial Sequence
  Description of Artificial Sequence: Synthetic oligonucleotide
  Target: LAMA2; (+) strand; PAM type: YTN; PAM sequence: TTA
ttctaatgatttatctactc

SEQ ID NO: 365239 - DNA, 20 bp, Artificial Sequence
  Description of Artificial Sequence: Synthetic oligonucleotide
  Target: LAMA2; (+) strand; PAM type: YTN; PAM sequence: TTC
taatgatttatctactcaag

SEQ ID NO: 365240 - DNA, 20 bp, Artificial Sequence
  Description of Artificial Sequence: Synthetic oligonucleotide
  Target: LAMA2; (+) strand; PAM type: YTN; PAM sequence: CTA
atgatttatctactcaagat

SEQ ID NO: 365241 - DNA, 20 bp, Artificial Sequence
  Description of Artificial Sequence: Synthetic oligonucleotide
  Target: LAMA2; (+) strand; PAM type: YTN; PAM sequence: TTT
atctactcaagataaaaaga

SEQ ID NO: 365242 - DNA, 20 bp, Artificial Sequence
  Description of Artificial Sequence: Synthetic oligonucleotide
  Target: LAMA2; (+) strand; PAM type: YTN; PAM sequence: TTA
tctactcaagataaaaagaa

SEQ ID NO: 365243 - DNA, 20 bp, Artificial Sequence
  Description of Artificial Sequence: Synthetic oligonucleotide
  Target: LAMA2; (+) strand; PAM type: YTN; PAM sequence: CTA
ctcaagataaaaagaaataa

SEQ ID NO: 365244 - DNA, 20 bp, Artificial Sequence
  Description of Artificial Sequence: Synthetic oligonucleotide
  Target: LAMA2; (+) strand; PAM type: YTN; PAM sequence: CTC
aagataaaaagaaataaagt

SEQ ID NO: 365245 - DNA, 20 bp, Artificial Sequence
  Description of Artificial Sequence: Synthetic oligonucleotide
  Target: LAMA2; (+) strand; PAM type: YTN; PAM sequence: CTG
aaatactgtgcaatgtactt

SEQ ID NO: 365246 - DNA, 20 bp, Artificial Sequence
  Description of Artificial Sequence: Synthetic oligonucleotide
  Target: LAMA2; (+) strand; PAM type: YTN; PAM sequence: CTG
tgcaatgtacttacttgaaa

SEQ ID NO: 365247 - DNA, 20 bp, Artificial Sequence
  Description of Artificial Sequence: Synthetic oligonucleotide
  Target: LAMA2; (+) strand; PAM type: YTN; PAM sequence: CTT
acttgaaagcagtaagttct

SEQ ID NO: 365248 - DNA, 20 bp, Artificial Sequence
  Description of Artificial Sequence: Synthetic oligonucleotide
  Target: LAMA2; (+) strand; PAM type: YTN; PAM sequence: TTA
cttgaaagcagtaagttctc

SEQ ID NO: 365249 - DNA, 20 bp, Artificial Sequence
  Description of Artificial Sequence: Synthetic oligonucleotide
  Target: LAMA2; (+) strand; PAM type: YTN; PAM sequence: CTT
gaaagcagtaagttctcatg

SEQ ID NO: 365250 - DNA, 20 bp, Artificial Sequence
  Description of Artificial Sequence: Synthetic oligonucleotide
  Target: LAMA2; (+) strand; PAM type: YTN; PAM sequence: TTG
aaagcagtaagttctcatgt

SEQ ID NO: 365251 - DNA, 20 bp, Artificial Sequence
  Description of Artificial Sequence: Synthetic oligonucleotide
  Target: LAMA2; (+) strand; PAM type: YTN; PAM sequence: TTC
tcatgttagaaaatttccct

SEQ ID NO: 365252 - DNA, 20 bp, Artificial Sequence
  Description of Artificial Sequence: Synthetic oligonucleotide
  Target: LAMA2; (+) strand; PAM type: YTN; PAM sequence: CTC
atgttagaaaatttccctat

SEQ ID NO: 365253 - DNA, 20 bp, Artificial Sequence
  Description of Artificial Sequence: Synthetic oligonucleotide
  Target: LAMA2; (+) strand; PAM type: YTN; PAM sequence: TTA
gaaaatttccctattaagca

SEQ ID NO: 365254 - DNA, 20 bp, Artificial Sequence
  Description of Artificial Sequence: Synthetic oligonucleotide
  Target: LAMA2; (+) strand; PAM type: YTN; PAM sequence: TTT
ccctattaagcaagaaatct

SEQ ID NO: 365255 - DNA, 20 bp, Artificial Sequence
  Description of Artificial Sequence: Synthetic oligonucleotide
  Target: LAMA2; (+) strand; PAM type: YTN; PAM sequence: TTC
cctattaagcaagaaatctt

SEQ ID NO: 365256 - DNA, 20 bp, Artificial Sequence
  Description of Artificial Sequence: Synthetic oligonucleotide
  Target: LAMA2; (+) strand; PAM type: YTN; PAM sequence: CTA
ttaagcaagaaatcttgaac

SEQ ID NO: 365257 - DNA, 20 bp, Artificial Sequence
  Description of Artificial Sequence: Synthetic oligonucleotide
  Target: LAMA2; (+) strand; PAM type: YTN; PAM sequence: TTA
agcaagaaatcttgaacact

SEQ ID NO: 365258 - DNA, 20 bp, Artificial Sequence
  Description of Artificial Sequence: Synthetic oligonucleotide
  Target: LAMA2; (+) strand; PAM type: YTN; PAM sequence: CTT
gaacacttcattaaagtcat

SEQ ID NO: 365259 - DNA, 20 bp, Artificial Sequence
  Description of Artificial Sequence: Synthetic oligonucleotide
  Target: LAMA2; (+) strand; PAM type: YTN; PAM sequence: TTG
aacacttcattaaagtcata

SEQ ID NO: 365260 - DNA, 20 bp, Artificial Sequence
  Description of Artificial Sequence: Synthetic oligonucleotide
  Target: LAMA2; (+) strand; PAM type: YTN; PAM sequence: CTT
cattaaagtcatatgatctg

SEQ ID NO: 365261 - DNA, 20 bp, Artificial Sequence
  Description of Artificial Sequence: Synthetic oligonucleotide
  Target: LAMA2; (+) strand; PAM type: YTN; PAM sequence: TTC
attaaagtcatatgatctga

SEQ ID NO: 365262 - DNA, 20 bp, Artificial Sequence
  Description of Artificial Sequence: Synthetic oligonucleotide
  Target: LAMA2; (+) strand; PAM type: YTN; PAM sequence: TTA
aagtcatatgatctgatttt

SEQ ID NO: 365263 - DNA, 20 bp, Artificial Sequence
  Description of Artificial Sequence: Synthetic oligonucleotide
  Target: LAMA2; (+) strand; PAM type: YTN; PAM sequence: CTG
atttttattatcatttaagt

SEQ ID NO: 365264 - DNA, 20 bp, Artificial Sequence
  Description of Artificial Sequence: Synthetic oligonucleotide
  Target: LAMA2; (+) strand; PAM type: YTN; PAM sequence: TTT
ttattatcatttaagtcagg

SEQ ID NO: 365265 - DNA, 20 bp, Artificial Sequence
  Description of Artificial Sequence: Synthetic oligonucleotide
  Target: LAMA2; (+) strand; PAM type: YTN; PAM sequence: TTT
tattatcatttaagtcaggg

SEQ ID NO: 365266 - DNA, 20 bp, Artificial Sequence
  Description of Artificial Sequence: Synthetic oligonucleotide
  Target: LAMA2; (+) strand; PAM type: YTN; PAM sequence: TTT
attatcatttaagtcaggga

SEQ ID NO: 365267 - DNA, 20 bp, Artificial Sequence
  Description of Artificial Sequence: Synthetic oligonucleotide
  Target: LAMA2; (+) strand; PAM type: YTN; PAM sequence: TTA
ttatcatttaagtcagggaa

SEQ ID NO: 365268 - DNA, 20 bp, Artificial Sequence
  Description of Artificial Sequence: Synthetic oligonucleotide
  Target: LAMA2; (+) strand; PAM type: YTN; PAM sequence: TTA
tcatttaagtcagggaattt

SEQ ID NO: 365269 - DNA, 20 bp, Artificial Sequence
  Description of Artificial Sequence: Synthetic oligonucleotide
  Target: LAMA2; (+) strand; PAM type: YTN; PAM sequence: TTT
aagtcagggaattttagaac

SEQ ID NO: 365270 - DNA, 20 bp, Artificial Sequence
  Description of Artificial Sequence: Synthetic oligonucleotide
  Target: LAMA2; (+) strand; PAM type: YTN; PAM sequence: TTA
agtcagggaattttagaact

SEQ ID NO: 365271 - DNA, 20 bp, Artificial Sequence
  Description of Artificial Sequence: Synthetic oligonucleotide
  Target: LAMA2; (+) strand; PAM type: YTN; PAM sequence: TTT
tagaactaaatgtgtcaatt

SEQ ID NO: 365272 - DNA, 20 bp, Artificial Sequence
  Description of Artificial Sequence: Synthetic oligonucleotide
  Target: LAMA2; (+) strand; PAM type: YTN; PAM sequence: TTT
agaactaaatgtgtcaatta

SEQ ID NO: 365273 - DNA, 20 bp, Artificial Sequence
  Description of Artificial Sequence: Synthetic oligonucleotide
  Target: LAMA2; (+) strand; PAM type: YTN; PAM sequence: TTA
gaactaaatgtgtcaattat

SEQ ID NO: 365274 - DNA, 20 bp, Artificial Sequence
  Description of Artificial Sequence: Synthetic oligonucleotide
  Target: LAMA2; (+) strand; PAM type: YTN; PAM sequence: CTA
aatgtgtcaattataaaact

SEQ ID NO: 365275 - DNA, 20 bp, Artificial Sequence
  Description of Artificial Sequence: Synthetic oligonucleotide
  Target: LAMA2; (+) strand; PAM type: YTN; PAM sequence: TTA
taaaactgtacatatgtata

SEQ ID NO: 365276 - DNA, 20 bp, Artificial Sequence
  Description of Artificial Sequence: Synthetic oligonucleotide
  Target: LAMA2; (+) strand; PAM type: YTN; PAM sequence: CTG
tacatatgtatagcctccaa

SEQ ID NO: 365277 - DNA, 20 bp, Artificial Sequence
  Description of Artificial Sequence: Synthetic oligonucleotide
  Target: LAMA2; (+) strand; PAM type: YTN; PAM sequence: CTC
caaaatgtgttaaacattag

SEQ ID NO: 365278 - DNA, 20 bp, Artificial Sequence
  Description of Artificial Sequence: Synthetic oligonucleotide
  Target: LAMA2; (+) strand; PAM type: YTN; PAM sequence: TTA
aacattagttcatatgaatc

SEQ ID NO: 365279 - DNA, 20 bp, Artificial Sequence
  Description of Artificial Sequence: Synthetic oligonucleotide
  Target: LAMA2; (+) strand; PAM type: YTN; PAM sequence: TTA
gttcatatgaatctcaaaat

SEQ ID NO: 365280 - DNA, 20 bp, Artificial Sequence
  Description of Artificial Sequence: Synthetic oligonucleotide
  Target: LAMA2; (+) strand; PAM type: YTN; PAM sequence: TTC
atatgaatctcaaaatactg

SEQ ID NO: 365281 - DNA, 20 bp, Artificial Sequence
  Description of Artificial Sequence: Synthetic oligonucleotide
  Target: LAMA2; (+) strand; PAM type: YTN; PAM sequence: CTC
aaaatactgtaacacagtaa

SEQ ID NO: 365282 - DNA, 20 bp, Artificial Sequence
  Description of Artificial Sequence: Synthetic oligonucleotide
  Target: LAMA2; (+) strand; PAM type: YTN; PAM sequence: CTG
taacacagtaaaatgagcaa

SEQ ID NO: 365283 - DNA, 20 bp, Artificial Sequence
  Description of Artificial Sequence: Synthetic oligonucleotide
  Target: LAMA2; (+) strand; PAM type: YTN; PAM sequence: TTT
ttgaaatttgcacagtagag

SEQ ID NO: 365284 - DNA, 20 bp, Artificial Sequence
  Description of Artificial Sequence: Synthetic oligonucleotide
  Target: LAMA2; (+) strand; PAM type: YTN; PAM sequence: TTT
tgaaatttgcacagtagaga

SEQ ID NO: 365285 - DNA, 20 bp, Artificial Sequence
  Description of Artificial Sequence: Synthetic oligonucleotide
  Target: LAMA2; (+) strand; PAM type: YTN; PAM sequence: TTT
gaaatttgcacagtagagac

SEQ ID NO: 365286 - DNA, 20 bp, Artificial Sequence
  Description of Artificial Sequence: Synthetic oligonucleotide
  Target: LAMA2; (+) strand; PAM type: YTN; PAM sequence: TTG
aaatttgcacagtagagacg

SEQ ID NO: 365287 - DNA, 20 bp, Artificial Sequence
  Description of Artificial Sequence: Synthetic oligonucleotide
  Target: LAMA2; (+) strand; PAM type: YTN; PAM sequence: TTT
gcacagtagagacgatgctg

SEQ ID NO: 365288 - DNA, 20 bp, Artificial Sequence
  Description of Artificial Sequence: Synthetic oligonucleotide
  Target: LAMA2; (+) strand; PAM type: YTN; PAM sequence: TTG
cacagtagagacgatgctgt

SEQ ID NO: 365289 - DNA, 20 bp, Artificial Sequence
  Description of Artificial Sequence: Synthetic oligonucleotide
  Target: LAMA2; (+) strand; PAM type: YTN; PAM sequence: CTG
ttaatgttcaccgaggtaaa

SEQ ID NO: 365290 - DNA, 20 bp, Artificial Sequence
  Description of Artificial Sequence: Synthetic oligonucleotide
  Target: LAMA2; (+) strand; PAM type: YTN; PAM sequence: TTA
atgttcaccgaggtaaataa

SEQ ID NO: 365291 - DNA, 20 bp, Artificial Sequence
  Description of Artificial Sequence: Synthetic oligonucleotide
  Target: LAMA2; (+) strand; PAM type: YTN; PAM sequence: TTC
accgaggtaaataatttgtc

SEQ ID NO: 365292 - DNA, 20 bp, Artificial Sequence
  Description of Artificial Sequence: Synthetic oligonucleotide
  Target: LAMA2; (+) strand; PAM type: YTN; PAM sequence: TTT
gtccaaagttctatttctgt

SEQ ID NO: 365293 - DNA, 20 bp, Artificial Sequence
  Description of Artificial Sequence: Synthetic oligonucleotide
  Target: LAMA2; (+) strand; PAM type: YTN; PAM sequence: TTG
tccaaagttctatttctgtg

SEQ ID NO: 365294 - DNA, 20 bp, Artificial Sequence
  Description of Artificial Sequence: Synthetic oligonucleotide
  Target: LAMA2; (+) strand; PAM type: YTN; PAM sequence: TTC
tatttctgtgagatactcaa

SEQ ID NO: 365295 - DNA, 20 bp, Artificial Sequence
  Description of Artificial Sequence: Synthetic oligonucleotide
  Target: LAMA2; (+) strand; PAM type: YTN; PAM sequence: CTA
tttctgtgagatactcaact

SEQ ID NO: 365296 - DNA, 20 bp, Artificial Sequence
  Description of Artificial Sequence: Synthetic oligonucleotide
  Target: LAMA2; (+) strand; PAM type: YTN; PAM sequence: TTT
ctgtgagatactcaactgag

SEQ ID NO: 365297 - DNA, 20 bp, Artificial Sequence
  Description of Artificial Sequence: Synthetic oligonucleotide
  Target: LAMA2; (+) strand; PAM type: YTN; PAM sequence: TTC
tgtgagatactcaactgaga

SEQ ID NO: 365298 - DNA, 20 bp, Artificial Sequence
  Description of Artificial Sequence: Synthetic oligonucleotide
  Target: LAMA2; (+) strand; PAM type: YTN; PAM sequence: CTG
tgagatactcaactgagaca

SEQ ID NO: 365299 - DNA, 20 bp, Artificial Sequence
  Description of Artificial Sequence: Synthetic oligonucleotide
  Target: LAMA2; (+) strand; PAM type: YTN; PAM sequence: CTC
aactgagacataatctcagc

SEQ ID NO: 365300 - DNA, 20 bp, Artificial Sequence
  Description of Artificial Sequence: Synthetic oligonucleotide
  Target: LAMA2; (+) strand; PAM type: YTN; PAM sequence: CTG
agacataatctcagcttttt

SEQ ID NO: 365301 - DNA, 20 bp, Artificial Sequence
  Description of Artificial Sequence: Synthetic oligonucleotide
  Target: LAMA2; (+) strand; PAM type: YTN; PAM sequence: CTC
agcttttttcactttcatat

SEQ ID NO: 365302 - DNA, 20 bp, Artificial Sequence
  Description of Artificial Sequence: Synthetic oligonucleotide
  Target: LAMA2; (+) strand; PAM type: YTN; PAM sequence: CTT
ttttcactttcatattctat

SEQ ID NO: 365303 - DNA, 20 bp, Artificial Sequence
  Description of Artificial Sequence: Synthetic oligonucleotide
  Target: LAMA2; (+) strand; PAM type: YTN; PAM sequence: TTT
tttcactttcatattctata

SEQ ID NO: 365304 - DNA, 20 bp, Artificial Sequence
  Description of Artificial Sequence: Synthetic oligonucleotide
  Target: LAMA2; (+) strand; PAM type: YTN; PAM sequence: TTT
ttcactttcatattctatat

SEQ ID NO: 365305 - DNA, 20 bp, Artificial Sequence
  Description of Artificial Sequence: Synthetic oligonucleotide
  Target: LAMA2; (+) strand; PAM type: YTN; PAM sequence: TTT
tcactttcatattctatatt

SEQ ID NO: 365306 - DNA, 20 bp, Artificial Sequence
  Description of Artificial Sequence: Synthetic oligonucleotide
  Target: LAMA2; (+) strand; PAM type: YTN; PAM sequence: TTT
cactttcatattctatattt

SEQ ID NO: 365307 - DNA, 20 bp, Artificial Sequence
  Description of Artificial Sequence: Synthetic oligonucleotide
  Target: LAMA2; (+) strand; PAM type: YTN; PAM sequence: TTC
actttcatattctatatttt

SEQ ID NO: 365308 - DNA, 20 bp, Artificial Sequence
  Description of Artificial Sequence: Synthetic oligonucleotide
  Target: LAMA2; (+) strand; PAM type: YTN; PAM sequence: CTT
tcatattctatattttggtt

SEQ ID NO: 365309 - DNA, 20 bp, Artificial Sequence
  Description of Artificial Sequence: Synthetic oligonucleotide
  Target: LAMA2; (+) strand; PAM type: YTN; PAM sequence: TTT
catattctatattttggttt

SEQ ID NO: 365310 - DNA, 20 bp, Artificial Sequence
  Description of Artificial Sequence: Synthetic oligonucleotide
  Target: LAMA2; (+) strand; PAM type: YTN; PAM sequence: TTC
atattctatattttggtttt

SEQ ID NO: 365311 - DNA, 20 bp, Artificial Sequence
  Description of Artificial Sequence: Synthetic oligonucleotide
  Target: LAMA2; (+) strand; PAM type: YTN; PAM sequence: TTC
tatattttggttttcatttt

SEQ ID NO: 365312 - DNA, 20 bp, Artificial Sequence
  Description of Artificial Sequence: Synthetic oligonucleotide
  Target: LAMA2; (+) strand; PAM type: YTN; PAM sequence: CTA
tattttggttttcattttgt

SEQ ID NO: 365313 - DNA, 20 bp, Artificial Sequence
  Description of Artificial Sequence: Synthetic oligonucleotide
  Target: LAMA2; (+) strand; PAM type: YTN; PAM sequence: TTT
tggttttcattttgttctta

SEQ ID NO: 365314 - DNA, 20 bp, Artificial Sequence
  Description of Artificial Sequence: Synthetic oligonucleotide
  Target: LAMA2; (+) strand; PAM type: YTN; PAM sequence: TTT
ggttttcattttgttcttaa

SEQ ID NO: 365315 - DNA, 20 bp, Artificial Sequence
  Description of Artificial Sequence: Synthetic oligonucleotide
  Target: LAMA2; (+) strand; PAM type: YTN; PAM sequence: TTG
gttttcattttgttcttaag

SEQ ID NO: 365316 - DNA, 20 bp, Artificial Sequence
  Description of Artificial Sequence: Synthetic oligonucleotide
  Target: LAMA2; (+) strand; PAM type: YTN; PAM sequence: TTT
tcattttgttcttaagaaac

SEQ ID NO: 365317 - DNA, 20 bp, Artificial Sequence
  Description of Artificial Sequence: Synthetic oligonucleotide
  Target: LAMA2; (+) strand; PAM type: YTN; PAM sequence: TTT
cattttgttcttaagaaaca

SEQ ID NO: 365318 - DNA, 20 bp, Artificial Sequence
  Description of Artificial Sequence: Synthetic oligonucleotide
  Target: LAMA2; (+) strand; PAM type: YTN; PAM sequence: TTC
attttgttcttaagaaacaa

SEQ ID NO: 365319 - DNA, 20 bp, Artificial Sequence
  Description of Artificial Sequence: Synthetic oligonucleotide
  Target: LAMA2; (+) strand; PAM type: YTN; PAM sequence: TTT
tgttcttaagaaacaagtat

SEQ ID NO: 365320 - DNA, 20 bp, Artificial Sequence
  Description of Artificial Sequence: Synthetic oligonucleotide
  Target: LAMA2; (+) strand; PAM type: YTN; PAM sequence: TTT
gttcttaagaaacaagtatt

SEQ ID NO: 365321 - DNA, 20 bp, Artificial Sequence
  Description of Artificial Sequence: Synthetic oligonucleotide
  Target: LAMA2; (+) strand; PAM type: YTN; PAM sequence: TTG
ttcttaagaaacaagtattt

SEQ ID NO: 365322 - DNA, 20 bp, Artificial Sequence
  Description of Artificial Sequence: Synthetic oligonucleotide
  Target: LAMA2; (+) strand; PAM type: YTN; PAM sequence: TTC
ttaagaaacaagtattttta

SEQ ID NO: 365323 - DNA, 20 bp, Artificial Sequence
  Description of Artificial Sequence: Synthetic oligonucleotide
  Target: LAMA2; (+) strand; PAM type: YTN; PAM sequence: CTT
aagaaacaagtatttttaaa

SEQ ID NO: 365324 - DNA, 20 bp, Artificial Sequence
  Description of Artificial Sequence: Synthetic oligonucleotide
  Target: LAMA2; (+) strand; PAM type: YTN; PAM sequence: TTA
agaaacaagtatttttaaaa

SEQ ID NO: 365325 - DNA, 20 bp, Artificial Sequence
  Description of Artificial Sequence: Synthetic oligonucleotide
  Target: LAMA2; (+) strand; PAM type: YTN; PAM sequence: TTT
ttaaaatgaaacatctggtt

SEQ ID NO: 365326 - DNA, 20 bp, Artificial Sequence
  Description of Artificial Sequence: Synthetic oligonucleotide
  Target: LAMA2; (+) strand; PAM type: YTN; PAM sequence: TTT
taaaatgaaacatctggttt

SEQ ID NO: 365327 - DNA, 20 bp, Artificial Sequence
  Description of Artificial Sequence: Synthetic oligonucleotide
  Target: LAMA2; (+) strand; PAM type: YTN; PAM sequence: TTT
aaaatgaaacatctggtttc

SEQ ID NO: 365328 - DNA, 20 bp, Artificial Sequence
  Description of Artificial Sequence: Synthetic oligonucleotide
  Target: LAMA2; (+) strand; PAM type: YTN; PAM sequence: TTA
aaatgaaacatctggtttcg

SEQ ID NO: 365329 - DNA, 20 bp, Artificial Sequence
  Description of Artificial Sequence: Synthetic oligonucleotide
  Target: LAMA2; (+) strand; PAM type: YTN; PAM sequence: CTG
gtttcggcagtgctggctaa

SEQ ID NO: 365330 - DNA, 20 bp, Artificial Sequence
  Description of Artificial Sequence: Synthetic oligonucleotide
  Target: LAMA2; (+) strand; PAM type: YTN; PAM sequence: TTT
cggcagtgctggctaatgct

SEQ ID NO: 365331 - DNA, 20 bp, Artificial Sequence
  Description of Artificial Sequence: Synthetic oligonucleotide
  Target: LAMA2; (+) strand; PAM type: YTN; PAM sequence: TTC
ggcagtgctggctaatgctc

SEQ ID NO: 365332 - DNA, 20 bp, Artificial Sequence
  Description of Artificial Sequence: Synthetic oligonucleotide
  Target: LAMA2; (+) strand; PAM type: YTN; PAM sequence: CTG
gctaatgctcagaactccct

SEQ ID NO: 365333 - DNA, 20 bp, Artificial Sequence
  Description of Artificial Sequence: Synthetic oligonucleotide
  Target: LAMA2; (+) strand; PAM type: YTN; PAM sequence: CTA
atgctcagaactcccttccc

SEQ ID NO: 365334 - DNA, 20 bp, Artificial Sequence
  Description of Artificial Sequence: Synthetic oligonucleotide
  Target: LAMA2; (+) strand; PAM type: YTN; PAM sequence: CTC
agaactcccttcccttgttt

SEQ ID NO: 365335 - DNA, 20 bp, Artificial Sequence
  Description of Artificial Sequence: Synthetic oligonucleotide
  Target: LAMA2; (+) strand; PAM type: YTN; PAM sequence: CTC
ccttcccttgttttcttcaa

SEQ ID NO: 365336 - DNA, 20 bp, Artificial Sequence
  Description of Artificial Sequence: Synthetic oligonucleotide
  Target: LAMA2; (+) strand; PAM type: YTN; PAM sequence: CTT
cccttgttttcttcaatgtc

SEQ ID NO: 365337 - DNA, 20 bp, Artificial Sequence
  Description of Artificial Sequence: Synthetic oligonucleotide
  Target: LAMA2; (+) strand; PAM type: YTN; PAM sequence: TTC
ccttgttttcttcaatgtca

SEQ ID NO: 365338 - DNA, 20 bp, Artificial Sequence
  Description of Artificial Sequence: Synthetic oligonucleotide
  Target: LAMA2; (+) strand; PAM type: YTN; PAM sequence: CTT
gttttcttcaatgtcaccct

SEQ ID NO: 365339 - DNA, 20 bp, Artificial Sequence
  Description of Artificial Sequence: Synthetic oligonucleotide
  Target: LAMA2; (+) strand; PAM type: YTN; PAM sequence: TTG
ttttcttcaatgtcaccctt

SEQ ID NO: 365340 - DNA, 20 bp, Artificial Sequence
  Description of Artificial Sequence: Synthetic oligonucleotide
  Target: LAMA2; (+) strand; PAM type: YTN; PAM sequence: TTT
tcttcaatgtcacccttcta

SEQ ID NO: 365341 - DNA, 20 bp, Artificial Sequence
  Description of Artificial Sequence: Synthetic oligonucleotide
  Target: LAMA2; (+) strand; PAM type: YTN; PAM sequence: TTT
cttcaatgtcacccttctat

SEQ ID NO: 365342 - DNA, 20 bp, Artificial Sequence
  Description of Artificial Sequence: Synthetic oligonucleotide
  Target: LAMA2; (+) strand; PAM type: YTN; PAM sequence: TTC
ttcaatgtcacccttctata

SEQ ID NO: 365343 - DNA, 20 bp, Artificial Sequence
  Description of Artificial Sequence: Synthetic oligonucleotide
  Target: LAMA2; (+) strand; PAM type: YTN; PAM sequence: CTT
caatgtcacccttctataaa

SEQ ID NO: 365344 - DNA, 20 bp, Artificial Sequence
  Description of Artificial Sequence: Synthetic oligonucleotide
  Target: LAMA2; (+) strand; PAM type: YTN; PAM sequence: TTC
aatgtcacccttctataaaa

SEQ ID NO: 365345 - DNA, 20 bp, Artificial Sequence
  Description of Artificial Sequence: Synthetic oligonucleotide
  Target: LAMA2; (+) strand; PAM type: YTN; PAM sequence: CTT
ctataaaaacctctgaatat

SEQ ID NO: 365346 - DNA, 20 bp, Artificial Sequence
  Description of Artificial Sequence: Synthetic oligonucleotide
  Target: LAMA2; (+) strand; PAM type: YTN; PAM sequence: TTC
tataaaaacctctgaatatc

SEQ ID NO: 365347 - DNA, 20 bp, Artificial Sequence
  Description of Artificial Sequence: Synthetic oligonucleotide
  Target: LAMA2; (+) strand; PAM type: YTN; PAM sequence: CTA
taaaaacctctgaatatctg

SEQ ID NO: 365348 - DNA, 20 bp, Artificial Sequence
  Description of Artificial Sequence: Synthetic oligonucleotide
  Target: LAMA2; (+) strand; PAM type: YTN; PAM sequence: CTC
tgaatatctgaatacgtttt

SEQ ID NO: 365349 - DNA, 20 bp, Artificial Sequence
  Description of Artificial Sequence: Synthetic oligonucleotide
  Target: LAMA2; (+) strand; PAM type: YTN; PAM sequence: CTG
aatatctgaatacgttttaa

SEQ ID NO: 365350 - DNA, 20 bp, Artificial Sequence
  Description of Artificial Sequence: Synthetic oligonucleotide
  Target: LAMA2; (+) strand; PAM type: YTN; PAM sequence: CTG
aatacgttttaagagcaccc

SEQ ID NO: 365351 - DNA, 20 bp, Artificial Sequence
  Description of Artificial Sequence: Synthetic oligonucleotide
  Target: LAMA2; (+) strand; PAM type: YTN; PAM sequence: TTT
taagagcaccccttataaaa

SEQ ID NO: 365352 - DNA, 20 bp, Artificial Sequence
  Description of Artificial Sequence: Synthetic oligonucleotide
  Target: LAMA2; (+) strand; PAM type: YTN; PAM sequence: TTT
aagagcaccccttataaaac

SEQ ID NO: 365353 - DNA, 20 bp, Artificial Sequence
  Description of Artificial Sequence: Synthetic oligonucleotide
  Target: LAMA2; (+) strand; PAM type: YTN; PAM sequence: TTA
agagcaccccttataaaaca

SEQ ID NO: 365354 - DNA, 20 bp, Artificial Sequence
  Description of Artificial Sequence: Synthetic oligonucleotide
  Target: LAMA2; (+) strand; PAM type: YTN; PAM sequence: CTT
ataaaacactttttgctttg

SEQ ID NO: 365355 - DNA, 20 bp, Artificial Sequence
  Description of Artificial Sequence: Synthetic oligonucleotide
  Target: LAMA2; (+) strand; PAM type: YTN; PAM sequence: TTA
taaaacactttttgctttgt

SEQ ID NO: 365356 - DNA, 20 bp, Artificial Sequence
  Description of Artificial Sequence: Synthetic oligonucleotide
  Target: LAMA2; (+) strand; PAM type: YTN; PAM sequence: CTT
tttgctttgttatgtttcat

SEQ ID NO: 365357 - DNA, 20 bp, Artificial Sequence
  Description of Artificial Sequence: Synthetic oligonucleotide
  Target: LAMA2; (+) strand; PAM type: YTN; PAM sequence: TTT
ttgctttgttatgtttcatt

SEQ ID NO: 365358 - DNA, 20 bp, Artificial Sequence
  Description of Artificial Sequence: Synthetic oligonucleotide
  Target: LAMA2; (+) strand; PAM type: YTN; PAM sequence: TTT
tgctttgttatgtttcattt

SEQ ID NO: 365359 - DNA, 20 bp, Artificial Sequence
  Description of Artificial Sequence: Synthetic oligonucleotide
  Target: LAMA2; (+) strand; PAM type: YTN; PAM sequence: TTT
gctttgttatgtttcatttt

SEQ ID NO: 365360 - DNA, 20 bp, Artificial Sequence
  Description of Artificial Sequence: Synthetic oligonucleotide
  Target: LAMA2; (+) strand; PAM type: YTN; PAM sequence: TTG
ctttgttatgtttcattttg

SEQ ID NO: 365361 - DNA, 20 bp, Artificial Sequence
  Description of Artificial Sequence: Synthetic oligonucleotide
  Target: LAMA2; (+) strand; PAM type: YTN; PAM sequence: CTT
tgttatgtttcattttgcag

SEQ ID NO: 365362 - DNA, 20 bp, Artificial Sequence
  Description of Artificial Sequence: Synthetic oligonucleotide
  Target: LAMA2; (+) strand; PAM type: YTN; PAM sequence: TTT
gttatgtttcattttgcagg

SEQ ID NO: 365363 - DNA, 20 bp, Artificial Sequence
  Description of Artificial Sequence: Synthetic oligonucleotide
  Target: LAMA2; (+) strand; PAM type: YTN; PAM sequence: TTG
ttatgtttcattttgcaggt

SEQ ID NO: 365364 - DNA, 20 bp, Artificial Sequence
  Description of Artificial Sequence: Synthetic oligonucleotide
  Target: LAMA2; (+) strand; PAM type: YTN; PAM sequence: TTA
tgtttcattttgcaggtgcc

SEQ ID NO: 365365 - DNA, 20 bp, Artificial Sequence
  Description of Artificial Sequence: Synthetic oligonucleotide
  Target: LAMA2; (+) strand; PAM type: YTN; PAM sequence: TTT
cattttgcaggtgccaaagt

SEQ ID NO: 365366 - DNA, 20 bp, Artificial Sequence
  Description of Artificial Sequence: Synthetic oligonucleotide
  Target: LAMA2; (+) strand; PAM type: YTN; PAM sequence: TTC
attttgcaggtgccaaagtc

SEQ ID NO: 365367 - DNA, 20 bp, Artificial Sequence
  Description of Artificial Sequence: Synthetic oligonucleotide
  Target: LAMA2; (+) strand; PAM type: YTN; PAM sequence: TTT
tgcaggtgccaaagtcacaa

SEQ ID NO: 365368 - DNA, 20 bp, Artificial Sequence
  Description of Artificial Sequence: Synthetic oligonucleotide
  Target: LAMA2; (+) strand; PAM type: YTN; PAM sequence: TTT
gcaggtgccaaagtcacaaa

SEQ ID NO: 365369 - DNA, 20 bp, Artificial Sequence
  Description of Artificial Sequence: Synthetic oligonucleotide
  Target: LAMA2; (+) strand; PAM type: YTN; PAM sequence: TTG
caggtgccaaagtcacaaat

SEQ ID NO: 365370 - DNA, 20 bp, Artificial Sequence
  Description of Artificial Sequence: Synthetic oligonucleotide
  Target: LAMA2; (+) strand; PAM type: YTN; PAM sequence: TTT
cacctcattcagatattcca

SEQ ID NO: 365371 - DNA, 20 bp, Artificial Sequence
  Description of Artificial Sequence: Synthetic oligonucleotide
  Target: LAMA2; (+) strand; PAM type: YTN; PAM sequence: TTC
acctcattcagatattccag

SEQ ID NO: 365372 - DNA, 20 bp, Artificial Sequence
  Description of Artificial Sequence: Synthetic oligonucleotide
  Target: LAMA2; (+) strand; PAM type: YTN; PAM sequence: CTC
attcagatattccaggtagt

SEQ ID NO: 365373 - DNA, 20 bp, Artificial Sequence
  Description of Artificial Sequence: Synthetic oligonucleotide
  Target: LAMA2; (+) strand; PAM type: YTN; PAM sequence: TTC
agatattccaggtagtaagg

SEQ ID NO: 365374 - DNA, 20 bp, Artificial Sequence
  Description of Artificial Sequence: Synthetic oligonucleotide
  Target: LAMA2; (+) strand; PAM type: YTN; PAM sequence: TTC
caggtagtaaggctgatatt

SEQ ID NO: 365375 - DNA, 20 bp, Artificial Sequence
  Description of Artificial Sequence: Synthetic oligonucleotide
  Target: LAMA2; (+) strand; PAM type: YTN; PAM sequence: CTG
atatttttatgagtcatttc

SEQ ID NO: 365376 - DNA, 20 bp, Artificial Sequence
  Description of Artificial Sequence: Synthetic oligonucleotide
  Target: LAMA2; (+) strand; PAM type: YTN; PAM sequence: TTT
ttatgagtcatttcatctga

SEQ ID NO: 365377 - DNA, 20 bp, Artificial Sequence
  Description of Artificial Sequence: Synthetic oligonucleotide
  Target: LAMA2; (+) strand; PAM type: YTN; PAM sequence: TTT
tatgagtcatttcatctgac

SEQ ID NO: 365378 - DNA, 20 bp, Artificial Sequence
  Description of Artificial Sequence: Synthetic oligonucleotide
  Target: LAMA2; (+) strand; PAM type: YTN; PAM sequence: TTT
atgagtcatttcatctgaca

SEQ ID NO: 365379 - DNA, 20 bp, Artificial Sequence
  Description of Artificial Sequence: Synthetic oligonucleotide
  Target: LAMA2; (+) strand; PAM type: YTN; PAM sequence: TTA
tgagtcatttcatctgacaa

SEQ ID NO: 365380 - DNA, 20 bp, Artificial Sequence
  Description of Artificial Sequence: Synthetic oligonucleotide
  Target: LAMA2; (+) strand; PAM type: YTN; PAM sequence: TTT
catctgacaaaattaattta

SEQ ID NO: 365381 - DNA, 20 bp, Artificial Sequence
  Description of Artificial Sequence: Synthetic oligonucleotide
  Target: LAMA2; (+) strand; PAM type: YTN; PAM sequence: TTC
atctgacaaaattaatttaa

SEQ ID NO: 365382 - DNA, 20 bp, Artificial Sequence
  Description of Artificial Sequence: Synthetic oligonucleotide
  Target: LAMA2; (+) strand; PAM type: YTN; PAM sequence: CTG
acaaaattaatttaagaata

SEQ ID NO: 365383 - DNA, 20 bp, Artificial Sequence
  Description of Artificial Sequence: Synthetic oligonucleotide
  Target: LAMA2; (+) strand; PAM type: YTN; PAM sequence: TTA
atttaagaataaataacatt

SEQ ID NO: 365384 - DNA, 20 bp, Artificial Sequence
  Description of Artificial Sequence: Synthetic oligonucleotide
  Target: LAMA2; (+) strand; PAM type: YTN; PAM sequence: TTT
aagaataaataacattgaaa

SEQ ID NO: 365385 - DNA, 20 bp, Artificial Sequence
  Description of Artificial Sequence: Synthetic oligonucleotide
  Target: LAMA2; (+) strand; PAM type: YTN; PAM sequence: TTA
agaataaataacattgaaat

SEQ ID NO: 365386 - DNA, 20 bp, Artificial Sequence
  Description of Artificial Sequence: Synthetic oligonucleotide
  Target: LAMA2; (+) strand; PAM type: YTN; PAM sequence: TTG
aaatagtaagtagcatgtat

SEQ ID NO: 365387 - DNA, 20 bp, Artificial Sequence
  Description of Artificial Sequence: Synthetic oligonucleotide
  Target: LAMA2; (+) strand; PAM type: YTN; PAM sequence: TTT
tggacttaactcttattttc

SEQ ID NO: 365388 - DNA, 20 bp, Artificial Sequence
  Description of Artificial Sequence: Synthetic oligonucleotide
  Target: LAMA2; (+) strand; PAM type: YTN; PAM sequence: TTT
ggacttaactcttattttcc

SEQ ID NO: 365389 - DNA, 20 bp, Artificial Sequence
  Description of Artificial Sequence: Synthetic oligonucleotide
  Target: LAMA2; (+) strand; PAM type: YTN; PAM sequence: TTG
gacttaactcttattttccc

SEQ ID NO: 365390 - DNA, 20 bp, Artificial Sequence
  Description of Artificial Sequence: Synthetic oligonucleotide
  Target: LAMA2; (+) strand; PAM type: YTN; PAM sequence: CTT
aactcttattttccctattt

SEQ ID NO: 365391 - DNA, 20 bp, Artificial Sequence
  Description of Artificial Sequence: Synthetic oligonucleotide
  Target: LAMA2; (+) strand; PAM type: YTN; PAM sequence: TTA
actcttattttccctatttc

SEQ ID NO: 365392 - DNA, 20 bp, Artificial Sequence
  Description of Artificial Sequence: Synthetic oligonucleotide
  Target: LAMA2; (+) strand; PAM type: YTN; PAM sequence: CTC
ttattttccctatttctatt

SEQ ID NO: 365393 - DNA, 20 bp, Artificial Sequence
  Description of Artificial Sequence: Synthetic oligonucleotide
  Target: LAMA2; (+) strand; PAM type: YTN; PAM sequence: CTT
attttccctatttctattct

SEQ ID NO: 365394 - DNA, 20 bp, Artificial Sequence
  Description of Artificial Sequence: Synthetic oligonucleotide
  Target: LAMA2; (+) strand; PAM type: YTN; PAM sequence: TTA
ttttccctatttctattctt

SEQ ID NO: 365395 - DNA, 20 bp, Artificial Sequence
  Description of Artificial Sequence: Synthetic oligonucleotide
  Target: LAMA2; (+) strand; PAM type: YTN; PAM sequence: TTT
tccctatttctattcttcca

SEQ ID NO: 365396 - DNA, 20 bp, Artificial Sequence
  Description of Artificial Sequence: Synthetic oligonucleotide
  Target: LAMA2; (+) strand; PAM type: YTN; PAM sequence: TTT
ccctatttctattcttccat

SEQ ID NO: 365397 - DNA, 20 bp, Artificial Sequence
  Description of Artificial Sequence: Synthetic oligonucleotide
  Target: LAMA2; (+) strand; PAM type: YTN; PAM sequence: TTC
cctatttctattcttccatg

SEQ ID NO: 365398 - DNA, 20 bp, Artificial Sequence
  Description of Artificial Sequence: Synthetic oligonucleotide
  Target: LAMA2; (+) strand; PAM type: YTN; PAM sequence: CTA
tttctattcttccatgtttt

SEQ ID NO: 365399 - DNA, 20 bp, Artificial Sequence
  Description of Artificial Sequence: Synthetic oligonucleotide
  Target: LAMA2; (+) strand; PAM type: YTN; PAM sequence: TTT
ctattcttccatgttttaat

SEQ ID NO: 365400 - DNA, 20 bp, Artificial Sequence
  Description of Artificial Sequence: Synthetic oligonucleotide
  Target: LAMA2; (+) strand; PAM type: YTN; PAM sequence: TTC
tattcttccatgttttaata

SEQ ID NO: 365401 - DNA, 20 bp, Artificial Sequence
  Description of Artificial Sequence: Synthetic oligonucleotide
  Target: LAMA2; (+) strand; PAM type: YTN; PAM sequence: CTA
ttcttccatgttttaataga

SEQ ID NO: 365402 - DNA, 20 bp, Artificial Sequence
  Description of Artificial Sequence: Synthetic oligonucleotide
  Target: LAMA2; (+) strand; PAM type: YTN; PAM sequence: TTC
ttccatgttttaatagatta

SEQ ID NO: 365403 - DNA, 20 bp, Artificial Sequence
  Description of Artificial Sequence: Synthetic oligonucleotide
  Target: LAMA2; (+) strand; PAM type: YTN; PAM sequence: CTT
ccatgttttaatagattaat

SEQ ID NO: 365404 - DNA, 20 bp, Artificial Sequence
  Description of Artificial Sequence: Synthetic oligonucleotide
  Target: LAMA2; (+) strand; PAM type: YTN; PAM sequence: TTC
catgttttaatagattaata

SEQ ID NO: 365405 - DNA, 20 bp, Artificial Sequence
  Description of Artificial Sequence: Synthetic oligonucleotide
  Target: LAMA2; (+) strand; PAM type: YTN; PAM sequence: TTT
taatagattaatatatactc

SEQ ID NO: 365406 - DNA, 20 bp, Artificial Sequence
  Description of Artificial Sequence: Synthetic oligonucleotide
  Target: LAMA2; (+) strand; PAM type: YTN; PAM sequence: TTT
aatagattaatatatactca

SEQ ID NO: 365407 - DNA, 20 bp, Artificial Sequence
  Description of Artificial Sequence: Synthetic oligonucleotide
  Target: LAMA2; (+) strand; PAM type: YTN; PAM sequence: TTA
atagattaatatatactcat

SEQ ID NO: 365408 - DNA, 20 bp, Artificial Sequence
  Description of Artificial Sequence: Synthetic oligonucleotide
  Target: LAMA2; (+) strand; PAM type: YTN; PAM sequence: TTA
atatatactcatgtgtatat

SEQ ID NO: 365409 - DNA, 20 bp, Artificial Sequence
  Description of Artificial Sequence: Synthetic oligonucleotide
  Target: LAMA2; (+) strand; PAM type: YTN; PAM sequence: CTC
atgtgtatatatgtacatgc

SEQ ID NO: 365410 - DNA, 20 bp, Artificial Sequence
  Description of Artificial Sequence: Synthetic oligonucleotide
  Target: LAMA2; (+) strand; PAM type: YTN; PAM sequence: CTC
acacacatataagtatatat

SEQ ID NO: 365411 - DNA, 20 bp, Artificial Sequence
  Description of Artificial Sequence: Synthetic oligonucleotide
  Target: LAMA2; (+) strand; PAM type: YTN; PAM sequence: TTT
atttttcctcatcttataca

SEQ ID NO: 365412 - DNA, 20 bp, Artificial Sequence
  Description of Artificial Sequence: Synthetic oligonucleotide
  Target: LAMA2; (+) strand; PAM type: YTN; PAM sequence: TTA
tttttcctcatcttatacaa

SEQ ID NO: 365413 - DNA, 20 bp, Artificial Sequence
  Description of Artificial Sequence: Synthetic oligonucleotide
  Target: LAMA2; (+) strand; PAM type: YTN; PAM sequence: TTT
ttcctcatcttatacaagtg

SEQ ID NO: 365414 - DNA, 20 bp, Artificial Sequence
  Description of Artificial Sequence: Synthetic oligonucleotide
  Target: LAMA2; (+) strand; PAM type: YTN; PAM sequence: TTT
tcctcatcttatacaagtgg

SEQ ID NO: 365415 - DNA, 20 bp, Artificial Sequence
  Description of Artificial Sequence: Synthetic oligonucleotide
  Target: LAMA2; (+) strand; PAM type: YTN; PAM sequence: TTT
cctcatcttatacaagtgga

SEQ ID NO: 365416 - DNA, 20 bp, Artificial Sequence
  Description of Artificial Sequence: Synthetic oligonucleotide
  Target: LAMA2; (+) strand; PAM type: YTN; PAM sequence: TTC
ctcatcttatacaagtggaa

SEQ ID NO: 365417 - DNA, 20 bp, Artificial Sequence
  Description of Artificial Sequence: Synthetic oligonucleotide
  Target: LAMA2; (+) strand; PAM type: YTN; PAM sequence: CTC
atcttatacaagtggaaaca

SEQ ID NO: 365418 - DNA, 20 bp, Artificial Sequence
  Description of Artificial Sequence: Synthetic oligonucleotide
  Target: LAMA2; (+) strand; PAM type: YTN; PAM sequence: CTT
atacaagtggaaacatacta

SEQ ID NO: 365419 - DNA, 20 bp, Artificial Sequence
  Description of Artificial Sequence: Synthetic oligonucleotide
  Target: LAMA2; (+) strand; PAM type: YTN; PAM sequence: TTA
tacaagtggaaacatactat

SEQ ID NO: 365420 - DNA, 20 bp, Artificial Sequence
  Description of Artificial Sequence: Synthetic oligonucleotide
  Target: LAMA2; (+) strand; PAM type: YTN; PAM sequence: CTA
tacacattataagagcacag

SEQ ID NO: 365421 - DNA, 20 bp, Artificial Sequence
  Description of Artificial Sequence: Synthetic oligonucleotide
  Target: LAMA2; (+) strand; PAM type: YTN; PAM sequence: TTA
taagagcacagtataatttt

SEQ ID NO: 365422 - DNA, 20 bp, Artificial Sequence
  Description of Artificial Sequence: Synthetic oligonucleotide
  Target: LAMA2; (+) strand; PAM type: YTN; PAM sequence: TTT
ttatgtaatataatttgaag

SEQ ID NO: 365423 - DNA, 20 bp, Artificial Sequence
  Description of Artificial Sequence: Synthetic oligonucleotide
  Target: LAMA2; (+) strand; PAM type: YTN; PAM sequence: TTT
tatgtaatataatttgaagt

SEQ ID NO: 365424 - DNA, 20 bp, Artificial Sequence
  Description of Artificial Sequence: Synthetic oligonucleotide
  Target: LAMA2; (+) strand; PAM type: YTN; PAM sequence: TTT
atgtaatataatttgaagtt

SEQ ID NO: 365425 - DNA, 20 bp, Artificial Sequence
  Description of Artificial Sequence: Synthetic oligonucleotide
  Target: LAMA2; (+) strand; PAM type: YTN; PAM sequence: TTA
tgtaatataatttgaagtta

SEQ ID NO: 365426 - DNA, 20 bp, Artificial Sequence
  Description of Artificial Sequence: Synthetic oligonucleotide
  Target: LAMA2; (+) strand; PAM type: YTN; PAM sequence: TTT
gaagttaattccatattgga

SEQ ID NO: 365427 - DNA, 20 bp, Artificial Sequence
  Description of Artificial Sequence: Synthetic oligonucleotide
  Target: LAMA2; (+) strand; PAM type: YTN; PAM sequence: TTG
aagttaattccatattggat

SEQ ID NO: 365428 - DNA, 20 bp, Artificial Sequence
  Description of Artificial Sequence: Synthetic oligonucleotide
  Target: LAMA2; (+) strand; PAM type: YTN; PAM sequence: TTA
attccatattggatagtttc

SEQ ID NO: 365429 - DNA, 20 bp, Artificial Sequence
  Description of Artificial Sequence: Synthetic oligonucleotide
  Target: LAMA2; (+) strand; PAM type: YTN; PAM sequence: TTC
catattggatagtttcttca

SEQ ID NO: 365430 - DNA, 20 bp, Artificial Sequence
  Description of Artificial Sequence: Synthetic oligonucleotide
  Target: LAMA2; (+) strand; PAM type: YTN; PAM sequence: TTG
gatagtttcttcattatatg

SEQ ID NO: 365431 - DNA, 20 bp, Artificial Sequence
  Description of Artificial Sequence: Synthetic oligonucleotide
  Target: LAMA2; (+) strand; PAM type: YTN; PAM sequence: TTT
cttcattatatgtgtaagta

SEQ ID NO: 365432 - DNA, 20 bp, Artificial Sequence
  Description of Artificial Sequence: Synthetic oligonucleotide
  Target: LAMA2; (+) strand; PAM type: YTN; PAM sequence: TTC
ttcattatatgtgtaagtat

SEQ ID NO: 365433 - DNA, 20 bp, Artificial Sequence
  Description of Artificial Sequence: Synthetic oligonucleotide
  Target: LAMA2; (+) strand; PAM type: YTN; PAM sequence: CTT
cattatatgtgtaagtatat

SEQ ID NO: 365434 - DNA, 20 bp, Artificial Sequence
  Description of Artificial Sequence: Synthetic oligonucleotide
  Target: LAMA2; (+) strand; PAM type: YTN; PAM sequence: TTC
attatatgtgtaagtatatg

SEQ ID NO: 365435 - DNA, 20 bp, Artificial Sequence
  Description of Artificial Sequence: Synthetic oligonucleotide
  Target: LAMA2; (+) strand; PAM type: YTN; PAM sequence: TTA
tatgtgtaagtatatgtaat

SEQ ID NO: 365436 - DNA, 20 bp, Artificial Sequence
  Description of Artificial Sequence: Synthetic oligonucleotide
  Target: LAMA2; (+) strand; PAM type: YTN; PAM sequence: CTA
tgattgtgtatttcattgaa

SEQ ID NO: 365437 - DNA, 20 bp, Artificial Sequence
  Description of Artificial Sequence: Synthetic oligonucleotide
  Target: LAMA2; (+) strand; PAM type: YTN; PAM sequence: TTG
tgtatttcattgaatgaatg

SEQ ID NO: 365438 - DNA, 20 bp, Artificial Sequence
  Description of Artificial Sequence: Synthetic oligonucleotide
  Target: LAMA2; (+) strand; PAM type: YTN; PAM sequence: TTT
cattgaatgaatgcactcaa

SEQ ID NO: 365439 - DNA, 20 bp, Artificial Sequence
  Description of Artificial Sequence: Synthetic oligonucleotide
  Target: LAMA2; (+) strand; PAM type: YTN; PAM sequence: TTC
attgaatgaatgcactcaaa

SEQ ID NO: 365440 - DNA, 20 bp, Artificial Sequence
  Description of Artificial Sequence: Synthetic oligonucleotide
  Target: LAMA2; (+) strand; PAM type: YTN; PAM sequence: TTG
aatgaatgcactcaaacgtg

SEQ ID NO: 365441 - DNA, 20 bp, Artificial Sequence
  Description of Artificial Sequence: Synthetic oligonucleotide
  Target: LAMA2; (+) strand; PAM type: YTN; PAM sequence: CTC
aaacgtgttcagcaatcagc

SEQ ID NO: 365442 - DNA, 20 bp, Artificial Sequence
  Description of Artificial Sequence: Synthetic oligonucleotide
  Target: LAMA2; (+) strand; PAM type: YTN; PAM sequence: TTC
agcaatcagcacagaggtta

SEQ ID NO: 365443 - DNA, 20 bp, Artificial Sequence
  Description of Artificial Sequence: Synthetic oligonucleotide
  Target: LAMA2; (+) strand; PAM type: YTN; PAM sequence: TTA
aacattgactctagtactag

SEQ ID NO: 365444 - DNA, 20 bp, Artificial Sequence
  Description of Artificial Sequence: Synthetic oligonucleotide
  Target: LAMA2; (+) strand; PAM type: YTN; PAM sequence: TTG
actctagtactagactgtga

SEQ ID NO: 365445 - DNA, 20 bp, Artificial Sequence
  Description of Artificial Sequence: Synthetic oligonucleotide
  Target: LAMA2; (+) strand; PAM type: YTN; PAM sequence: CTC
tagtactagactgtgaaggt

SEQ ID NO: 365446 - DNA, 20 bp, Artificial Sequence
  Description of Artificial Sequence: Synthetic oligonucleotide
  Target: LAMA2; (+) strand; PAM type: YTN; PAM sequence: CTA
gtactagactgtgaaggttc

SEQ ID NO: 365447 - DNA, 20 bp, Artificial Sequence
  Description of Artificial Sequence: Synthetic oligonucleotide
  Target: LAMA2; (+) strand; PAM type: YTN; PAM sequence: CTA
gactgtgaaggttcaaatcc

SEQ ID NO: 365448 - DNA, 20 bp, Artificial Sequence
  Description of Artificial Sequence: Synthetic oligonucleotide
  Target: LAMA2; (+) strand; PAM type: YTN; PAM sequence: CTG
tgaaggttcaaatcctgctt

SEQ ID NO: 365449 - DNA, 20 bp, Artificial Sequence
  Description of Artificial Sequence: Synthetic oligonucleotide
  Target: LAMA2; (+) strand; PAM type: YTN; PAM sequence: TTC
aaatcctgctttcaccacct

SEQ ID NO: 365450 - DNA, 20 bp, Artificial Sequence
  Description of Artificial Sequence: Synthetic oligonucleotide
  Target: LAMA2; (+) strand; PAM type: YTN; PAM sequence: CTG
ctttcaccacctgccatctt

SEQ ID NO: 365451 - DNA, 20 bp, Artificial Sequence
  Description of Artificial Sequence: Synthetic oligonucleotide
  Target: LAMA2; (+) strand; PAM type: YTN; PAM sequence: CTT
tcaccacctgccatctttgt

SEQ ID NO: 365452 - DNA, 20 bp, Artificial Sequence
  Description of Artificial Sequence: Synthetic oligonucleotide
  Target: LAMA2; (+) strand; PAM type: YTN; PAM sequence: TTT
caccacctgccatctttgta

SEQ ID NO: 365453 - DNA, 20 bp, Artificial Sequence
  Description of Artificial Sequence: Synthetic oligonucleotide
  Target: LAMA2; (+) strand; PAM type: YTN; PAM sequence: TTC
accacctgccatctttgtaa

SEQ ID NO: 365454 - DNA, 20 bp, Artificial Sequence
  Description of Artificial Sequence: Synthetic oligonucleotide
  Target: LAMA2; (+) strand; PAM type: YTN; PAM sequence: CTG
ccatctttgtaaccttgaac

SEQ ID NO: 365455 - DNA, 20 bp, Artificial Sequence
  Description of Artificial Sequence: Synthetic oligonucleotide
  Target: LAMA2; (+) strand; PAM type: YTN; PAM sequence: CTT
tgtaaccttgaacaagttat

SEQ ID NO: 365456 - DNA, 20 bp, Artificial Sequence
  Description of Artificial Sequence: Synthetic oligonucleotide
  Target: LAMA2; (+) strand; PAM type: YTN; PAM sequence: TTT
gtaaccttgaacaagttatg

SEQ ID NO: 365457 - DNA, 20 bp, Artificial Sequence
  Description of Artificial Sequence: Synthetic oligonucleotide
  Target: LAMA2; (+) strand; PAM type: YTN; PAM sequence: TTG
taaccttgaacaagttatgt

SEQ ID NO: 365458 - DNA, 20 bp, Artificial Sequence
  Description of Artificial Sequence: Synthetic oligonucleotide
  Target: LAMA2; (+) strand; PAM type: YTN; PAM sequence: CTT
gaacaagttatgtaagtact

SEQ ID NO: 365459 - DNA, 20 bp, Artificial Sequence
  Description of Artificial Sequence: Synthetic oligonucleotide
  Target: LAMA2; (+) strand; PAM type: YTN; PAM sequence: TTG
aacaagttatgtaagtactc

SEQ ID NO: 365460 - DNA, 20 bp, Artificial Sequence
  Description of Artificial Sequence: Synthetic oligonucleotide
  Target: LAMA2; (+) strand; PAM type: YTN; PAM sequence: TTA
tgtaagtactcaatgcttca

SEQ ID NO: 365461 - DNA, 20 bp, Artificial Sequence
  Description of Artificial Sequence: Synthetic oligonucleotide
  Target: LAMA2; (+) strand; PAM type: YTN; PAM sequence: CTC
aatgcttcaattccctcatc

SEQ ID NO: 365462 - DNA, 20 bp, Artificial Sequence
  Description of Artificial Sequence: Synthetic oligonucleotide
  Target: LAMA2; (+) strand; PAM type: YTN; PAM sequence: CTT
caattccctcatctttaaaa

SEQ ID NO: 365463 - DNA, 20 bp, Artificial Sequence
  Description of Artificial Sequence: Synthetic oligonucleotide
  Target: LAMA2; (+) strand; PAM type: YTN; PAM sequence: TTC
aattccctcatctttaaaat

SEQ ID NO: 365464 - DNA, 20 bp, Artificial Sequence
  Description of Artificial Sequence: Synthetic oligonucleotide
  Target: LAMA2; (+) strand; PAM type: YTN; PAM sequence: TTC
cctcatctttaaaatcaatg

SEQ ID NO: 365465 - DNA, 20 bp, Artificial Sequence
  Description of Artificial Sequence: Synthetic oligonucleotide
  Target: LAMA2; (+) strand; PAM type: YTN; PAM sequence: CTC
atctttaaaatcaatgtaac

SEQ ID NO: 365466 - DNA, 20 bp, Artificial Sequence
  Description of Artificial Sequence: Synthetic oligonucleotide
  Target: LAMA2; (+) strand; PAM type: YTN; PAM sequence: CTT
taaaatcaatgtaacagtta

SEQ ID NO: 365467 - DNA, 20 bp, Artificial Sequence
  Description of Artificial Sequence: Synthetic oligonucleotide
  Target: LAMA2; (+) strand; PAM type: YTN; PAM sequence: TTT
aaaatcaatgtaacagttat

SEQ ID NO: 365468 - DNA, 20 bp, Artificial Sequence
  Description of Artificial Sequence: Synthetic oligonucleotide
  Target: LAMA2; (+) strand; PAM type: YTN; PAM sequence: TTA
aaatcaatgtaacagttata

SEQ ID NO: 365469 - DNA, 20 bp, Artificial Sequence
  Description of Artificial Sequence: Synthetic oligonucleotide
  Target: LAMA2; (+) strand; PAM type: YTN; PAM sequence: TTA
taagattcttaccacataag

SEQ ID NO: 365470 - DNA, 20 bp, Artificial Sequence
  Description of Artificial Sequence: Synthetic oligonucleotide
  Target: LAMA2; (+) strand; PAM type: YTN; PAM sequence: TTC
ttaccacataaggttgtgtg

SEQ ID NO: 365471 - DNA, 20 bp, Artificial Sequence
  Description of Artificial Sequence: Synthetic oligonucleotide
  Target: LAMA2; (+) strand; PAM type: YTN; PAM sequence: CTT
accacataaggttgtgtgtg

SEQ ID NO: 365472 - DNA, 20 bp, Artificial Sequence
  Description of Artificial Sequence: Synthetic oligonucleotide
  Target: LAMA2; (+) strand; PAM type: YTN; PAM sequence: TTA
ccacataaggttgtgtgtgg

SEQ ID NO: 365473 - DNA, 20 bp, Artificial Sequence
  Description of Artificial Sequence: Synthetic oligonucleotide
  Target: LAMA2; (+) strand; PAM type: YTN; PAM sequence: TTG
tgtgtggtgttttgagaatg

SEQ ID NO: 365474 - DNA, 20 bp, Artificial Sequence
  Description of Artificial Sequence: Synthetic oligonucleotide
  Target: LAMA2; (+) strand; PAM type: YTN; PAM sequence: TTT
tgagaatgtaatgaatgaac

SEQ ID NO: 365475 - DNA, 20 bp, Artificial Sequence
  Description of Artificial Sequence: Synthetic oligonucleotide
  Target: LAMA2; (+) strand; PAM type: YTN; PAM sequence: TTT
gagaatgtaatgaatgaaca

SEQ ID NO: 365476 - DNA, 20 bp, Artificial Sequence
  Description of Artificial Sequence: Synthetic oligonucleotide
  Target: LAMA2; (+) strand; PAM type: YTN; PAM sequence: TTG
agaatgtaatgaatgaacat

SEQ ID NO: 365477 - DNA, 20 bp, Artificial Sequence
  Description of Artificial Sequence: Synthetic oligonucleotide
  Target: LAMA2; (+) strand; PAM type: YTN; PAM sequence: TTG
tagagtgcttagcacttgca

SEQ ID NO: 365478 - DNA, 20 bp, Artificial Sequence
  Description of Artificial Sequence: Synthetic oligonucleotide
  Target: LAMA2; (+) strand; PAM type: YTN; PAM sequence: CTT
agcacttgcaaagcataatg

SEQ ID NO: 365479 - DNA, 20 bp, Artificial Sequence
  Description of Artificial Sequence: Synthetic oligonucleotide
  Target: LAMA2; (+) strand; PAM type: YTN; PAM sequence: TTA
gcacttgcaaagcataatgt

SEQ ID NO: 365480 - DNA, 20 bp, Artificial Sequence
  Description of Artificial Sequence: Synthetic oligonucleotide
  Target: LAMA2; (+) strand; PAM type: YTN; PAM sequence: CTT
gcaaagcataatgtcagtgt

SEQ ID NO: 365481 - DNA, 20 bp, Artificial Sequence
  Description of Artificial Sequence: Synthetic oligonucleotide
  Target: LAMA2; (+) strand; PAM type: YTN; PAM sequence: TTG
caaagcataatgtcagtgtg

SEQ ID NO: 365482 - DNA, 20 bp, Artificial Sequence
  Description of Artificial Sequence: Synthetic oligonucleotide
  Target: LAMA2; (+) strand; PAM type: YTN; PAM sequence: TTG
tcatttccatcatcattttt

SEQ ID NO: 365483 - DNA, 20 bp, Artificial Sequence
  Description of Artificial Sequence: Synthetic oligonucleotide
  Target: LAMA2; (+) strand; PAM type: YTN; PAM sequence: TTT
ccatcatcatttttaacatg

SEQ ID NO: 365484 - DNA, 20 bp, Artificial Sequence
  Description of Artificial Sequence: Synthetic oligonucleotide
  Target: LAMA2; (+) strand; PAM type: YTN; PAM sequence: TTC
catcatcatttttaacatgt

SEQ ID NO: 365485 - DNA, 20 bp, Artificial Sequence
  Description of Artificial Sequence: Synthetic oligonucleotide
  Target: LAMA2; (+) strand; PAM type: YTN; PAM sequence: TTT
ttaacatgtttaattgcaac

SEQ ID NO: 365486 - DNA, 20 bp, Artificial Sequence
  Description of Artificial Sequence: Synthetic oligonucleotide
  Target: LAMA2; (+) strand; PAM type: YTN; PAM sequence: TTT
taacatgtttaattgcaacc

SEQ ID NO: 365487 - DNA, 20 bp, Artificial Sequence
  Description of Artificial Sequence: Synthetic oligonucleotide
  Target: LAMA2; (+) strand; PAM type: YTN; PAM sequence: TTT
aacatgtttaattgcaaccc

SEQ ID NO: 365488 - DNA, 20 bp, Artificial Sequence
  Description of Artificial Sequence: Synthetic oligonucleotide
  Target: LAMA2; (+) strand; PAM type: YTN; PAM sequence: TTA
acatgtttaattgcaacccc

SEQ ID NO: 365489 - DNA, 20 bp, Artificial Sequence
  Description of Artificial Sequence: Synthetic oligonucleotide
  Target: LAMA2; (+) strand; PAM type: YTN; PAM sequence: TTT
aattgcaacccctattgatg

SEQ ID NO: 365490 - DNA, 20 bp, Artificial Sequence
  Description of Artificial Sequence: Synthetic oligonucleotide
  Target: LAMA2; (+) strand; PAM type: YTN; PAM sequence: TTA
attgcaacccctattgatgg

SEQ ID NO: 365491 - DNA, 20 bp, Artificial Sequence
  Description of Artificial Sequence: Synthetic oligonucleotide
  Target: LAMA2; (+) strand; PAM type: YTN; PAM sequence: TTG
caacccctattgatggacgt

SEQ ID NO: 365492 - DNA, 20 bp, Artificial Sequence
  Description of Artificial Sequence: Synthetic oligonucleotide
  Target: LAMA2; (+) strand; PAM type: YTN; PAM sequence: CTA
ttgatggacgtacggacatt

SEQ ID NO: 365493 - DNA, 20 bp, Artificial Sequence
  Description of Artificial Sequence: Synthetic oligonucleotide
  Target: LAMA2; (+) strand; PAM type: YTN; PAM sequence: TTG
atggacgtacggacattttc

SEQ ID NO: 365494 - DNA, 20 bp, Artificial Sequence
  Description of Artificial Sequence: Synthetic oligonucleotide
  Target: LAMA2; (+) strand; PAM type: YTN; PAM sequence: TTT
tcaatattttttactacaaa

SEQ ID NO: 365495 - DNA, 20 bp, Artificial Sequence
  Description of Artificial Sequence: Synthetic oligonucleotide
  Target: LAMA2; (+) strand; PAM type: YTN; PAM sequence: TTT
caatattttttactacaaac

SEQ ID NO: 365496 - DNA, 20 bp, Artificial Sequence
  Description of Artificial Sequence: Synthetic oligonucleotide
  Target: LAMA2; (+) strand; PAM type: YTN; PAM sequence: TTC
aatattttttactacaaacg

SEQ ID NO: 365497 - DNA, 20 bp, Artificial Sequence
  Description of Artificial Sequence: Synthetic oligonucleotide
  Target: LAMA2; (+) strand; PAM type: YTN; PAM sequence: TTT
tttactacaaacgttgttat

SEQ ID NO: 365498 - DNA, 20 bp, Artificial Sequence
  Description of Artificial Sequence: Synthetic oligonucleotide
  Target: LAMA2; (+) strand; PAM type: YTN; PAM sequence: TTT
ttactacaaacgttgttata

SEQ ID NO: 365499 - DNA, 20 bp, Artificial Sequence
  Description of Artificial Sequence: Synthetic oligonucleotide
  Target: LAMA2; (+) strand; PAM type: YTN; PAM sequence: TTT
tactacaaacgttgttatac

SEQ ID NO: 365500 - DNA, 20 bp, Artificial Sequence
  Description of Artificial Sequence: Synthetic oligonucleotide
  Target: LAMA2; (+) strand; PAM type: YTN; PAM sequence: TTT
actacaaacgttgttataca

SEQ ID NO: 365501 - DNA, 20 bp, Artificial Sequence
  Description of Artificial Sequence: Synthetic oligonucleotide
  Target: LAMA2; (+) strand; PAM type: YTN; PAM sequence: TTA
ctacaaacgttgttatacat

SEQ ID NO: 365502 - DNA, 20 bp, Artificial Sequence
  Description of Artificial Sequence: Synthetic oligonucleotide
  Target: LAMA2; (+) strand; PAM type: YTN; PAM sequence: CTA
caaacgttgttatacattgt

SEQ ID NO: 365503 - DNA, 20 bp, Artificial Sequence
  Description of Artificial Sequence: Synthetic oligonucleotide
  Target: LAMA2; (+) strand; PAM type: YTN; PAM sequence: TTG
ttatacattgtttttctgtt

SEQ ID NO: 365504 - DNA, 20 bp, Artificial Sequence
  Description of Artificial Sequence: Synthetic oligonucleotide
  Target: LAMA2; (+) strand; PAM type: YTN; PAM sequence: TTA
tacattgtttttctgttgtt

SEQ ID NO: 365505 - DNA, 20 bp, Artificial Sequence
  Description of Artificial Sequence: Synthetic oligonucleotide
  Target: LAMA2; (+) strand; PAM type: YTN; PAM sequence: TTG
tttttctgttgttgttgttg

SEQ ID NO: 365506 - DNA, 20 bp, Artificial Sequence
  Description of Artificial Sequence: Synthetic oligonucleotide
  Target: LAMA2; (+) strand; PAM type: YTN; PAM sequence: TTT
ttctgttgttgttgttgttg

SEQ ID NO: 365507 - DNA, 20 bp, Artificial Sequence
  Description of Artificial Sequence: Synthetic oligonucleotide
  Target: LAMA2; (+) strand; PAM type: YTN; PAM sequence: TTT
tctgttgttgttgttgttgt

SEQ ID NO: 365508 - DNA, 20 bp, Artificial Sequence
  Description of Artificial Sequence: Synthetic oligonucleotide
  Target: LAMA2; (+) strand; PAM type: YTN; PAM sequence: TTT
ctgttgttgttgttgttgtt

SEQ ID NO: 365509 - DNA, 20 bp, Artificial Sequence
  Description of Artificial Sequence: Synthetic oligonucleotide
  Target: LAMA2; (+) strand; PAM type: YTN; PAM sequence: TTC
tgttgttgttgttgttgttg

SEQ ID NO: 365510 - DNA, 20 bp, Artificial Sequence
  Description of Artificial Sequence: Synthetic oligonucleotide
  Target: LAMA2; (+) strand; PAM type: YTN; PAM sequence: CTG
ttgttgttgttgttgttgtt

SEQ ID NO: 365511 - DNA, 20 bp, Artificial Sequence
  Description of Artificial Sequence: Synthetic oligonucleotide
  Target: LAMA2; (+) strand; PAM type: YTN; PAM sequence: TTG
ttgttgttgttgttgttgga

SEQ ID NO: 365512 - DNA, 20 bp, Artificial Sequence
  Description of Artificial Sequence: Synthetic oligonucleotide
  Target: LAMA2; (+) strand; PAM type: YTN; PAM sequence: TTG
ttgttgttgttgttggagat

SEQ ID NO: 365513 - DNA, 20 bp, Artificial Sequence
  Description of Artificial Sequence: Synthetic oligonucleotide
  Target: LAMA2; (+) strand; PAM type: YTN; PAM sequence: TTG
ttgttgttgttggagatgga

SEQ ID NO: 365514 - DNA, 20 bp, Artificial Sequence
  Description of Artificial Sequence: Synthetic oligonucleotide
  Target: LAMA2; (+) strand; PAM type: YTN; PAM sequence: TTG
ttgttgttggagatggagtc

SEQ ID NO: 365515 - DNA, 20 bp, Artificial Sequence
  Description of Artificial Sequence: Synthetic oligonucleotide
  Target: LAMA2; (+) strand; PAM type: YTN; PAM sequence: TTG
ttgttggagatggagtcttg

SEQ ID NO: 365516 - DNA, 20 bp, Artificial Sequence
  Description of Artificial Sequence: Synthetic oligonucleotide
  Target: LAMA2; (+) strand; PAM type: YTN; PAM sequence: TTG
ttggagatggagtcttgctc

SEQ ID NO: 365517 - DNA, 20 bp, Artificial Sequence
  Description of Artificial Sequence: Synthetic oligonucleotide
  Target: LAMA2; (+) strand; PAM type: YTN; PAM sequence: TTG
gagatggagtcttgctctat

SEQ ID NO: 365518 - DNA, 20 bp, Artificial Sequence
  Description of Artificial Sequence: Synthetic oligonucleotide
  Target: LAMA2; (+) strand; PAM type: YTN; PAM sequence: CTT
gctctatcacccaggctgga

SEQ ID NO: 365519 - DNA, 20 bp, Artificial Sequence
  Description of Artificial Sequence: Synthetic oligonucleotide
  Target: LAMA2; (+) strand; PAM type: YTN; PAM sequence: TTG
ctctatcacccaggctggag

SEQ ID NO: 365520 - DNA, 20 bp, Artificial Sequence
  Description of Artificial Sequence: Synthetic oligonucleotide
  Target: LAMA2; (+) strand; PAM type: YTN; PAM sequence: CTC
tatcacccaggctggagtgc

SEQ ID NO: 365521 - DNA, 20 bp, Artificial Sequence
  Description of Artificial Sequence: Synthetic oligonucleotide
  Target: LAMA2; (+) strand; PAM type: YTN; PAM sequence: CTA
tcacccaggctggagtgcag

SEQ ID NO: 365522 - DNA, 20 bp, Artificial Sequence
  Description of Artificial Sequence: Synthetic oligonucleotide
  Target: LAMA2; (+) strand; PAM type: YTN; PAM sequence: CTG
gagtgcagtggtgtgatctc

SEQ ID NO: 365523 - DNA, 20 bp, Artificial Sequence
  Description of Artificial Sequence: Synthetic oligonucleotide
  Target: LAMA2; (+) strand; PAM type: YTN; PAM sequence: CTC
ggctcactgcaacctccacc

SEQ ID NO: 365524 - DNA, 20 bp, Artificial Sequence
  Description of Artificial Sequence: Synthetic oligonucleotide
  Target: LAMA2; (+) strand; PAM type: YTN; PAM sequence: CTC
actgcaacctccacctcccg

SEQ ID NO: 365525 - DNA, 20 bp, Artificial Sequence
  Description of Artificial Sequence: Synthetic oligonucleotide
  Target: LAMA2; (+) strand; PAM type: YTN; PAM sequence: CTG
caacctccacctcccgggtt

SEQ ID NO: 365526 - DNA, 20 bp, Artificial Sequence
  Description of Artificial Sequence: Synthetic oligonucleotide
  Target: LAMA2; (+) strand; PAM type: YTN; PAM sequence: CTC
cacctcccgggttcaagtga

SEQ ID NO: 365527 - DNA, 20 bp, Artificial Sequence
  Description of Artificial Sequence: Synthetic oligonucleotide
  Target: LAMA2; (+) strand; PAM type: YTN; PAM sequence: CTC
ccgggttcaagtgattctct

SEQ ID NO: 365528 - DNA, 20 bp, Artificial Sequence
  Description of Artificial Sequence: Synthetic oligonucleotide
  Target: LAMA2; (+) strand; PAM type: YTN; PAM sequence: TTC
aagtgattctctgcctcagc

SEQ ID NO: 365529 - DNA, 20 bp, Artificial Sequence
  Description of Artificial Sequence: Synthetic oligonucleotide
  Target: LAMA2; (+) strand; PAM type: YTN; PAM sequence: TTC
tctgcctcagcctcccgagt

SEQ ID NO: 365530 - DNA, 20 bp, Artificial Sequence
  Description of Artificial Sequence: Synthetic oligonucleotide
  Target: LAMA2; (+) strand; PAM type: YTN; PAM sequence: CTC
tgcctcagcctcccgagtag

SEQ ID NO: 365531 - DNA, 20 bp, Artificial Sequence
  Description of Artificial Sequence: Synthetic oligonucleotide
  Target: LAMA2; (+) strand; PAM type: YTN; PAM sequence: CTG
cctcagcctcccgagtagct

SEQ ID NO: 365532 - DNA, 20 bp, Artificial Sequence
  Description of Artificial Sequence: Synthetic oligonucleotide
  Target: LAMA2; (+) strand; PAM type: YTN; PAM sequence: CTC
agcctcccgagtagctggga

SEQ ID NO: 365533 - DNA, 20 bp, Artificial Sequence
  Description of Artificial Sequence: Synthetic oligonucleotide
  Target: LAMA2; (+) strand; PAM type: YTN; PAM sequence: CTC
ccgagtagctgggattacag

SEQ ID NO: 365534 - DNA, 20 bp, Artificial Sequence
  Description of Artificial Sequence: Synthetic oligonucleotide
  Target: LAMA2; (+) strand; PAM type: YTN; PAM sequence: CTG
ggattacaggtgcttgccac

SEQ ID NO: 365535 - DNA, 20 bp, Artificial Sequence
  Description of Artificial Sequence: Synthetic oligonucleotide
  Target: LAMA2; (+) strand; PAM type: YTN; PAM sequence: TTA
caggtgcttgccaccatgcc

SEQ ID NO: 365536 - DNA, 20 bp, Artificial Sequence
  Description of Artificial Sequence: Synthetic oligonucleotide
  Target: LAMA2; (+) strand; PAM type: YTN; PAM sequence: CTT
gccaccatgcccagctaatt

SEQ ID NO: 365537 - DNA, 20 bp, Artificial Sequence
  Description of Artificial Sequence: Synthetic oligonucleotide
  Target: LAMA2; (+) strand; PAM type: YTN; PAM sequence: TTG
ccaccatgcccagctaattt

SEQ ID NO: 365538 - DNA, 20 bp, Artificial Sequence
  Description of Artificial Sequence: Synthetic oligonucleotide
  Target: LAMA2; (+) strand; PAM type: YTN; PAM sequence: CTA
atttttgtatttttagtaga

SEQ ID NO: 365539 - DNA, 20 bp, Artificial Sequence
  Description of Artificial Sequence: Synthetic oligonucleotide
  Target: LAMA2; (+) strand; PAM type: YTN; PAM sequence: TTT
ttgtatttttagtagagaca

SEQ ID NO: 365540 - DNA, 20 bp, Artificial Sequence
  Description of Artificial Sequence: Synthetic oligonucleotide
  Target: LAMA2; (+) strand; PAM type: YTN; PAM sequence: TTT
tgtatttttagtagagacag

SEQ ID NO: 365541 - DNA, 20 bp, Artificial Sequence
  Description of Artificial Sequence: Synthetic oligonucleotide
  Target: LAMA2; (+) strand; PAM type: YTN; PAM sequence: TTT
gtatttttagtagagacagg

SEQ ID NO: 365542 - DNA, 20 bp, Artificial Sequence
  Description of Artificial Sequence: Synthetic oligonucleotide
  Target: LAMA2; (+) strand; PAM type: YTN; PAM sequence: TTG
tatttttagtagagacaggg

SEQ ID NO: 365543 - DNA, 20 bp, Artificial Sequence
  Description of Artificial Sequence: Synthetic oligonucleotide
  Target: LAMA2; (+) strand; PAM type: YTN; PAM sequence: TTT
ttagtagagacagggtttca

SEQ ID NO: 365544 - DNA, 20 bp, Artificial Sequence
  Description of Artificial Sequence: Synthetic oligonucleotide
  Target: LAMA2; (+) strand; PAM type: YTN; PAM sequence: TTT
tagtagagacagggtttcac

SEQ ID NO: 365545 - DNA, 20 bp, Artificial Sequence
  Description of Artificial Sequence: Synthetic oligonucleotide
  Target: LAMA2; (+) strand; PAM type: YTN; PAM sequence: TTT
agtagagacagggtttcacc

SEQ ID NO: 365546 - DNA, 20 bp, Artificial Sequence
  Description of Artificial Sequence: Synthetic oligonucleotide
  Target: LAMA2; (+) strand; PAM type: YTN; PAM sequence: TTA
gtagagacagggtttcacca

SEQ ID NO: 365547 - DNA, 20 bp, Artificial Sequence
  Description of Artificial Sequence: Synthetic oligonucleotide
  Target: LAMA2; (+) strand; PAM type: YTN; PAM sequence: TTT
caccatcttggccaggctgg

SEQ ID NO: 365548 - DNA, 20 bp, Artificial Sequence
  Description of Artificial Sequence: Synthetic oligonucleotide
  Target: LAMA2; (+) strand; PAM type: YTN; PAM sequence: TTC
accatcttggccaggctggt

SEQ ID NO: 365549 - DNA, 20 bp, Artificial Sequence
  Description of Artificial Sequence: Synthetic oligonucleotide
  Target: LAMA2; (+) strand; PAM type: YTN; PAM sequence: CTT
ggccaggctggtcttgaact

SEQ ID NO: 365550 - DNA, 20 bp, Artificial Sequence
  Description of Artificial Sequence: Synthetic oligonucleotide
  Target: LAMA2; (+) strand; PAM type: YTN; PAM sequence: TTG
gccaggctggtcttgaactc

SEQ ID NO: 365551 - DNA, 20 bp, Artificial Sequence
  Description of Artificial Sequence: Synthetic oligonucleotide
  Target: LAMA2; (+) strand; PAM type: YTN; PAM sequence: CTG
gtcttgaactcctgaactca

SEQ ID NO: 365552 - DNA, 20 bp, Artificial Sequence
  Description of Artificial Sequence: Synthetic oligonucleotide
  Target: LAMA2; (+) strand; PAM type: YTN; PAM sequence: CTT
gaactcctgaactcatgagt

SEQ ID NO: 365553 - DNA, 20 bp, Artificial Sequence
  Description of Artificial Sequence: Synthetic oligonucleotide
  Target: LAMA2; (+) strand; PAM type: YTN; PAM sequence: TTG
aactcctgaactcatgagtc

SEQ ID NO: 365554 - DNA, 20 bp, Artificial Sequence
  Description of Artificial Sequence: Synthetic oligonucleotide
  Target: LAMA2; (+) strand; PAM type: YTN; PAM sequence: CTC
ctgaactcatgagtcaccct

SEQ ID NO: 365555 - DNA, 20 bp, Artificial Sequence
  Description of Artificial Sequence: Synthetic oligonucleotide
  Target: LAMA2; (+) strand; PAM type: YTN; PAM sequence: CTG
aactcatgagtcacccttct

SEQ ID NO: 365556 - DNA, 20 bp, Artificial Sequence
  Description of Artificial Sequence: Synthetic oligonucleotide
  Target: LAMA2; (+) strand; PAM type: YTN; PAM sequence: CTC
atgagtcacccttctcagcc

SEQ ID NO: 365557 - DNA, 20 bp, Artificial Sequence
  Description of Artificial Sequence: Synthetic oligonucleotide
  Target: LAMA2; (+) strand; PAM type: YTN; PAM sequence: CTT
ctcagcctcccaaagtgctg

SEQ ID NO: 365558 - DNA, 20 bp, Artificial Sequence
  Description of Artificial Sequence: Synthetic oligonucleotide
  Target: LAMA2; (+) strand; PAM type: YTN; PAM sequence: TTC
tcagcctcccaaagtgctgg

SEQ ID NO: 365559 - DNA, 20 bp, Artificial Sequence
  Description of Artificial Sequence: Synthetic oligonucleotide
  Target: LAMA2; (+) strand; PAM type: YTN; PAM sequence: CTC
agcctcccaaagtgctggga

SEQ ID NO: 365560 - DNA, 20 bp, Artificial Sequence
  Description of Artificial Sequence: Synthetic oligonucleotide
  Target: LAMA2; (+) strand; PAM type: YTN; PAM sequence: CTC
ccaaagtgctgggattgcaa

SEQ ID NO: 365561 - DNA, 20 bp, Artificial Sequence
  Description of Artificial Sequence: Synthetic oligonucleotide
  Target: LAMA2; (+) strand; PAM type: YTN; PAM sequence: CTG
ggattgcaagcgtgtttcag

SEQ ID NO: 365562 - DNA, 20 bp, Artificial Sequence
  Description of Artificial Sequence: Synthetic oligonucleotide
  Target: LAMA2; (+) strand; PAM type: YTN; PAM sequence: TTG
caagcgtgtttcagtgaata

SEQ ID NO: 365563 - DNA, 20 bp, Artificial Sequence
  Description of Artificial Sequence: Synthetic oligonucleotide
  Target: LAMA2; (+) strand; PAM type: YTN; PAM sequence: TTT
cagtgaatagccatgtgccc

SEQ ID NO: 365564 - DNA, 20 bp, Artificial Sequence
  Description of Artificial Sequence: Synthetic oligonucleotide
  Target: LAMA2; (+) strand; PAM type: YTN; PAM sequence: TTC
agtgaatagccatgtgccca

SEQ ID NO: 365565 - DNA, 20 bp, Artificial Sequence
  Description of Artificial Sequence: Synthetic oligonucleotide
  Target: LAMA2; (+) strand; PAM type: YTN; PAM sequence: CTG
tttctcacatgcacccttat

SEQ ID NO: 365566 - DNA, 20 bp, Artificial Sequence
  Description of Artificial Sequence: Synthetic oligonucleotide
  Target: LAMA2; (+) strand; PAM type: YTN; PAM sequence: TTT
ctcacatgcacccttataac

SEQ ID NO: 365567 - DNA, 20 bp, Artificial Sequence
  Description of Artificial Sequence: Synthetic oligonucleotide
  Target: LAMA2; (+) strand; PAM type: YTN; PAM sequence: TTC
tcacatgcacccttataact

SEQ ID NO: 365568 - DNA, 20 bp, Artificial Sequence
  Description of Artificial Sequence: Synthetic oligonucleotide
  Target: LAMA2; (+) strand; PAM type: YTN; PAM sequence: CTC
acatgcacccttataactgt

SEQ ID NO: 365569 - DNA, 20 bp, Artificial Sequence
  Description of Artificial Sequence: Synthetic oligonucleotide
  Target: LAMA2; (+) strand; PAM type: YTN; PAM sequence: CTT
ataactgtgggataaatctc

SEQ ID NO: 365570 - DNA, 20 bp, Artificial Sequence
  Description of Artificial Sequence: Synthetic oligonucleotide
  Target: LAMA2; (+) strand; PAM type: YTN; PAM sequence: TTA
taactgtgggataaatctct

SEQ ID NO: 365571 - DNA, 20 bp, Artificial Sequence
  Description of Artificial Sequence: Synthetic oligonucleotide
  Target: LAMA2; (+) strand; PAM type: YTN; PAM sequence: CTG
tgggataaatctctgaaggt

SEQ ID NO: 365572 - DNA, 20 bp, Artificial Sequence
  Description of Artificial Sequence: Synthetic oligonucleotide
  Target: LAMA2; (+) strand; PAM type: YTN; PAM sequence: CTC
tgaaggtgaaactgctatgt

SEQ ID NO: 365573 - DNA, 20 bp, Artificial Sequence
  Description of Artificial Sequence: Synthetic oligonucleotide
  Target: LAMA2; (+) strand; PAM type: YTN; PAM sequence: CTG
aaggtgaaactgctatgtca

SEQ ID NO: 365574 - DNA, 20 bp, Artificial Sequence
  Description of Artificial Sequence: Synthetic oligonucleotide
  Target: LAMA2; (+) strand; PAM type: YTN; PAM sequence: CTG
ctatgtcaaagtatatatgc

SEQ ID NO: 365575 - DNA, 20 bp, Artificial Sequence
  Description of Artificial Sequence: Synthetic oligonucleotide
  Target: LAMA2; (+) strand; PAM type: YTN; PAM sequence: CTA
tgtcaaagtatatatgcatt

SEQ ID NO: 365576 - DNA, 20 bp, Artificial Sequence
  Description of Artificial Sequence: Synthetic oligonucleotide
  Target: LAMA2; (+) strand; PAM type: YTN; PAM sequence: TTT
ataattttaacagatattgc

SEQ ID NO: 365577 - DNA, 20 bp, Artificial Sequence
  Description of Artificial Sequence: Synthetic oligonucleotide
  Target: LAMA2; (+) strand; PAM type: YTN; PAM sequence: TTA
taattttaacagatattgcc

SEQ ID NO: 365578 - DNA, 20 bp, Artificial Sequence
  Description of Artificial Sequence: Synthetic oligonucleotide
  Target: LAMA2; (+) strand; PAM type: YTN; PAM sequence: TTT
taacagatattgccaaattg

SEQ ID NO: 365579 - DNA, 20 bp, Artificial Sequence
  Description of Artificial Sequence: Synthetic oligonucleotide
  Target: LAMA2; (+) strand; PAM type: YTN; PAM sequence: TTT
aacagatattgccaaattga

SEQ ID NO: 365580 - DNA, 20 bp, Artificial Sequence
  Description of Artificial Sequence: Synthetic oligonucleotide
  Target: LAMA2; (+) strand; PAM type: YTN; PAM sequence: TTA
acagatattgccaaattgaa

SEQ ID NO: 365581 - DNA, 20 bp, Artificial Sequence
  Description of Artificial Sequence: Synthetic oligonucleotide
  Target: LAMA2; (+) strand; PAM type: YTN; PAM sequence: TTG
ccaaattgaacccatatatt

SEQ ID NO: 365582 - DNA, 20 bp, Artificial Sequence
  Description of Artificial Sequence: Synthetic oligonucleotide
  Target: LAMA2; (+) strand; PAM type: YTN; PAM sequence: TTG
aacccatatattttagacat

SEQ ID NO: 365583 - DNA, 20 bp, Artificial Sequence
  Description of Artificial Sequence: Synthetic oligonucleotide
  Target: LAMA2; (+) strand; PAM type: YTN; PAM sequence: TTT
tagacatgctaccaccaatg

SEQ ID NO: 365584 - DNA, 20 bp, Artificial Sequence
  Description of Artificial Sequence: Synthetic oligonucleotide
  Target: LAMA2; (+) strand; PAM type: YTN; PAM sequence: TTT
agacatgctaccaccaatgc

SEQ ID NO: 365585 - DNA, 20 bp, Artificial Sequence
  Description of Artificial Sequence: Synthetic oligonucleotide
  Target: LAMA2; (+) strand; PAM type: YTN; PAM sequence: TTA
gacatgctaccaccaatgca

SEQ ID NO: 365586 - DNA, 20 bp, Artificial Sequence
  Description of Artificial Sequence: Synthetic oligonucleotide
  Target: LAMA2; (+) strand; PAM type: YTN; PAM sequence: CTA
ccaccaatgcatgagagtac

SEQ ID NO: 365587 - DNA, 20 bp, Artificial Sequence
  Description of Artificial Sequence: Synthetic oligonucleotide
  Target: LAMA2; (+) strand; PAM type: YTN; PAM sequence: CTT
gtttccctaaacccctctct

SEQ ID NO: 365588 - DNA, 20 bp, Artificial Sequence
  Description of Artificial Sequence: Synthetic oligonucleotide
  Target: LAMA2; (+) strand; PAM type: YTN; PAM sequence: TTG
tttccctaaacccctctcta

SEQ ID NO: 365589 - DNA, 20 bp, Artificial Sequence
  Description of Artificial Sequence: Synthetic oligonucleotide
  Target: LAMA2; (+) strand; PAM type: YTN; PAM sequence: TTT
ccctaaacccctctctaata

SEQ ID NO: 365590 - DNA, 20 bp, Artificial Sequence
  Description of Artificial Sequence: Synthetic oligonucleotide
  Target: LAMA2; (+) strand; PAM type: YTN; PAM sequence: TTC
cctaaacccctctctaatag

SEQ ID NO: 365591 - DNA, 20 bp, Artificial Sequence
  Description of Artificial Sequence: Synthetic oligonucleotide
  Target: LAMA2; (+) strand; PAM type: YTN; PAM sequence: CTA
aacccctctctaatagagta

SEQ ID NO: 365592 - DNA, 20 bp, Artificial Sequence
  Description of Artificial Sequence: Synthetic oligonucleotide
  Target: LAMA2; (+) strand; PAM type: YTN; PAM sequence: CTC
tctaatagagtatattatca

SEQ ID NO: 365593 - DNA, 20 bp, Artificial Sequence
  Description of Artificial Sequence: Synthetic oligonucleotide
  Target: LAMA2; (+) strand; PAM type: YTN; PAM sequence: CTC
taatagagtatattatcaaa

SEQ ID NO: 365594 - DNA, 20 bp, Artificial Sequence
  Description of Artificial Sequence: Synthetic oligonucleotide
  Target: LAMA2; (+) strand; PAM type: YTN; PAM sequence: CTA
atagagtatattatcaaact

SEQ ID NO: 365595 - DNA, 20 bp, Artificial Sequence
  Description of Artificial Sequence: Synthetic oligonucleotide
  Target: LAMA2; (+) strand; PAM type: YTN; PAM sequence: TTA
tcaaacttttgggtctttgg

SEQ ID NO: 365596 - DNA, 20 bp, Artificial Sequence
  Description of Artificial Sequence: Synthetic oligonucleotide
  Target: LAMA2; (+) strand; PAM type: YTN; PAM sequence: CTT
ttgggtctttggcaatccaa

SEQ ID NO: 365597 - DNA, 20 bp, Artificial Sequence
  Description of Artificial Sequence: Synthetic oligonucleotide
  Target: LAMA2; (+) strand; PAM type: YTN; PAM sequence: TTT
tgggtctttggcaatccaat

SEQ ID NO: 365598 - DNA, 20 bp, Artificial Sequence
  Description of Artificial Sequence: Synthetic oligonucleotide
  Target: LAMA2; (+) strand; PAM type: YTN; PAM sequence: TTT
gggtctttggcaatccaatg

SEQ ID NO: 365599 - DNA, 20 bp, Artificial Sequence
  Description of Artificial Sequence: Synthetic oligonucleotide
  Target: LAMA2; (+) strand; PAM type: YTN; PAM sequence: TTG
ggtctttggcaatccaatgg

SEQ ID NO: 365600 - DNA, 20 bp, Artificial Sequence
  Description of Artificial Sequence: Synthetic oligonucleotide
  Target: LAMA2; (+) strand; PAM type: YTN; PAM sequence: CTT
tggcaatccaatgggtgaaa

SEQ ID NO: 365601 - DNA, 20 bp, Artificial Sequence
  Description of Artificial Sequence: Synthetic oligonucleotide
  Target: LAMA2; (+) strand; PAM type: YTN; PAM sequence: TTT
ggcaatccaatgggtgaaaa

SEQ ID NO: 365602 - DNA, 20 bp, Artificial Sequence
  Description of Artificial Sequence: Synthetic oligonucleotide
  Target: LAMA2; (+) strand; PAM type: YTN; PAM sequence: TTG
gcaatccaatgggtgaaaaa

SEQ ID NO: 365603 - DNA, 20 bp, Artificial Sequence
  Description of Artificial Sequence: Synthetic oligonucleotide
  Target: LAMA2; (+) strand; PAM type: YTN; PAM sequence: TTT
tgggctgggtgtggtggctc

SEQ ID NO: 365604 - DNA, 20 bp, Artificial Sequence
  Description of Artificial Sequence: Synthetic oligonucleotide
  Target: LAMA2; (+) strand; PAM type: YTN; PAM sequence: TTT
gggctgggtgtggtggctca

SEQ ID NO: 365605 - DNA, 20 bp, Artificial Sequence
  Description of Artificial Sequence: Synthetic oligonucleotide
  Target: LAMA2; (+) strand; PAM type: YTN; PAM sequence: TTG
ggctgggtgtggtggctcac

SEQ ID NO: 365606 - DNA, 20 bp, Artificial Sequence
  Description of Artificial Sequence: Synthetic oligonucleotide
  Target: LAMA2; (+) strand; PAM type: YTN; PAM sequence: CTG
ggtgtggtggctcacgcctg

SEQ ID NO: 365607 - DNA, 20 bp, Artificial Sequence
  Description of Artificial Sequence: Synthetic oligonucleotide
  Target: LAMA2; (+) strand; PAM type: YTN; PAM sequence: CTC
acgcctgtaatctcaccact

SEQ ID NO: 365608 - DNA, 20 bp, Artificial Sequence
  Description of Artificial Sequence: Synthetic oligonucleotide
  Target: LAMA2; (+) strand; PAM type: YTN; PAM sequence: CTG
taatctcaccactttgggag

SEQ ID NO: 365609 - DNA, 20 bp, Artificial Sequence
  Description of Artificial Sequence: Synthetic oligonucleotide
  Target: LAMA2; (+) strand; PAM type: YTN; PAM sequence: CTC
accactttgggaggctgagg

SEQ ID NO: 365610 - DNA, 20 bp, Artificial Sequence
  Description of Artificial Sequence: Synthetic oligonucleotide
  Target: LAMA2; (+) strand; PAM type: YTN; PAM sequence: CTT
tgggaggctgaggcaggcga

SEQ ID NO: 365611 - DNA, 20 bp, Artificial Sequence
  Description of Artificial Sequence: Synthetic oligonucleotide
  Target: LAMA2; (+) strand; PAM type: YTN; PAM sequence: TTT
gggaggctgaggcaggcgaa

SEQ ID NO: 365612 - DNA, 20 bp, Artificial Sequence
  Description of Artificial Sequence: Synthetic oligonucleotide
  Target: LAMA2; (+) strand; PAM type: YTN; PAM sequence: TTG
ggaggctgaggcaggcgaat

SEQ ID NO: 365613 - DNA, 20 bp, Artificial Sequence
  Description of Artificial Sequence: Synthetic oligonucleotide
  Target: LAMA2; (+) strand; PAM type: YTN; PAM sequence: CTG
aggcaggcgaatccctgagg

SEQ ID NO: 365614 - DNA, 20 bp, Artificial Sequence
  Description of Artificial Sequence: Synthetic oligonucleotide
  Target: LAMA2; (+) strand; PAM type: YTN; PAM sequence: CTG
aggccatgagttcgagacct

SEQ ID NO: 365615 - DNA, 20 bp, Artificial Sequence
  Description of Artificial Sequence: Synthetic oligonucleotide
  Target: LAMA2; (+) strand; PAM type: YTN; PAM sequence: TTC
gagacctgcctggccaacat

SEQ ID NO: 365616 - DNA, 20 bp, Artificial Sequence
  Description of Artificial Sequence: Synthetic oligonucleotide
  Target: LAMA2; (+) strand; PAM type: YTN; PAM sequence: CTG
cctggccaacatggtgaaac

SEQ ID NO: 365617 - DNA, 20 bp, Artificial Sequence
  Description of Artificial Sequence: Synthetic oligonucleotide
  Target: LAMA2; (+) strand; PAM type: YTN; PAM sequence: CTG
gccaacatggtgaaaccctg

SEQ ID NO: 365618 - DNA, 20 bp, Artificial Sequence
  Description of Artificial Sequence: Synthetic oligonucleotide
  Target: LAMA2; (+) strand; PAM type: YTN; PAM sequence: CTG
tgtttactaaaaatacaaaa

SEQ ID NO: 365619 - DNA, 20 bp, Artificial Sequence
  Description of Artificial Sequence: Synthetic oligonucleotide
  Target: LAMA2; (+) strand; PAM type: YTN; PAM sequence: TTT
actaaaaatacaaaaaaaaa

SEQ ID NO: 365620 - DNA, 20 bp, Artificial Sequence
  Description of Artificial Sequence: Synthetic oligonucleotide
  Target: LAMA2; (+) strand; PAM type: YTN; PAM sequence: TTA
ctaaaaatacaaaaaaaaaa

SEQ ID NO: 365621 - DNA, 20 bp, Artificial Sequence
  Description of Artificial Sequence: Synthetic oligonucleotide
  Target: LAMA2; (+) strand; PAM type: YTN; PAM sequence: CTA
aaaatacaaaaaaaaaaaaa

SEQ ID NO: 365622 - DNA, 20 bp, Artificial Sequence
  Description of Artificial Sequence: Synthetic oligonucleotide
  Target: LAMA2; (+) strand; PAM type: YTN; PAM sequence: CTA
taattccagctacttgggag

SEQ ID NO: 365623 - DNA, 20 bp, Artificial Sequence
  Description of Artificial Sequence: Synthetic oligonucleotide
  Target: LAMA2; (+) strand; PAM type: YTN; PAM sequence: TTC
cagctacttgggaggctgag

SEQ ID NO: 365624 - DNA, 20 bp, Artificial Sequence
  Description of Artificial Sequence: Synthetic oligonucleotide
  Target: LAMA2; (+) strand; PAM type: YTN; PAM sequence: CTA
cttgggaggctgaggcatga

SEQ ID NO: 365625 - DNA, 20 bp, Artificial Sequence
  Description of Artificial Sequence: Synthetic oligonucleotide
  Target: LAMA2; (+) strand; PAM type: YTN; PAM sequence: CTT
gggaggctgaggcatgagaa

SEQ ID NO: 365626 - DNA, 20 bp, Artificial Sequence
  Description of Artificial Sequence: Synthetic oligonucleotide
  Target: LAMA2; (+) strand; PAM type: YTN; PAM sequence: TTG
ggaggctgaggcatgagaat

SEQ ID NO: 365627 - DNA, 20 bp, Artificial Sequence
  Description of Artificial Sequence: Synthetic oligonucleotide
  Target: LAMA2; (+) strand; PAM type: YTN; PAM sequence: CTG
aggcatgagaatcacttaat

SEQ ID NO: 365628 - DNA, 20 bp, Artificial Sequence
  Description of Artificial Sequence: Synthetic oligonucleotide
  Target: LAMA2; (+) strand; PAM type: YTN; PAM sequence: CTT
aattgcttgaacctgggaga

SEQ ID NO: 365629 - DNA, 20 bp, Artificial Sequence
  Description of Artificial Sequence: Synthetic oligonucleotide
  Target: LAMA2; (+) strand; PAM type: YTN; PAM sequence: TTA
attgcttgaacctgggagac

SEQ ID NO: 365630 - DNA, 20 bp, Artificial Sequence
  Description of Artificial Sequence: Synthetic oligonucleotide
  Target: LAMA2; (+) strand; PAM type: YTN; PAM sequence: TTG
cttgaacctgggagacagag

SEQ ID NO: 365631 - DNA, 20 bp, Artificial Sequence
  Description of Artificial Sequence: Synthetic oligonucleotide
  Target: LAMA2; (+) strand; PAM type: YTN; PAM sequence: CTT
gaacctgggagacagaggtt

SEQ ID NO: 365632 - DNA, 20 bp, Artificial Sequence
  Description of Artificial Sequence: Synthetic oligonucleotide
  Target: LAMA2; (+) strand; PAM type: YTN; PAM sequence: TTG
aacctgggagacagaggttg

SEQ ID NO: 365633 - DNA, 20 bp, Artificial Sequence
  Description of Artificial Sequence: Synthetic oligonucleotide
  Target: LAMA2; (+) strand; PAM type: YTN; PAM sequence: CTG
ggagacagaggttgcagtga

SEQ ID NO: 365634 - DNA, 20 bp, Artificial Sequence
  Description of Artificial Sequence: Synthetic oligonucleotide
  Target: LAMA2; (+) strand; PAM type: YTN; PAM sequence: TTG
cagtgagccaagatagtgcc

SEQ ID NO: 365635 - DNA, 20 bp, Artificial Sequence
  Description of Artificial Sequence: Synthetic oligonucleotide
  Target: LAMA2; (+) strand; PAM type: YTN; PAM sequence: TTG
cactccagactgggcaacag

SEQ ID NO: 365636 - DNA, 20 bp, Artificial Sequence
  Description of Artificial Sequence: Synthetic oligonucleotide
  Target: LAMA2; (+) strand; PAM type: YTN; PAM sequence: CTC
cagactgggcaacagagcaa

SEQ ID NO: 365637 - DNA, 20 bp, Artificial Sequence
  Description of Artificial Sequence: Synthetic oligonucleotide
  Target: LAMA2; (+) strand; PAM type: YTN; PAM sequence: CTG
ggcaacagagcaagactcca

SEQ ID NO: 365638 - DNA, 20 bp, Artificial Sequence
  Description of Artificial Sequence: Synthetic oligonucleotide
  Target: LAMA2; (+) strand; PAM type: YTN; PAM sequence: CTC
catctcaaaaaaaaaaaaag

SEQ ID NO: 365639 - DNA, 20 bp, Artificial Sequence
  Description of Artificial Sequence: Synthetic oligonucleotide
  Target: LAMA2; (+) strand; PAM type: YTN; PAM sequence: CTC
aaaaaaaaaaaaaggaagag

SEQ ID NO: 365640 - DNA, 20 bp, Artificial Sequence
  Description of Artificial Sequence: Synthetic oligonucleotide
  Target: LAMA2; (+) strand; PAM type: YTN; PAM sequence: TTA
tatttttttccacacaagca

SEQ ID NO: 365641 - DNA, 20 bp, Artificial Sequence
  Description of Artificial Sequence: Synthetic oligonucleotide
  Target: LAMA2; (+) strand; PAM type: YTN; PAM sequence: TTT
ttttccacacaagcatttaa

SEQ ID NO: 365642 - DNA, 20 bp, Artificial Sequence
  Description of Artificial Sequence: Synthetic oligonucleotide
  Target: LAMA2; (+) strand; PAM type: YTN; PAM sequence: TTT
tttccacacaagcatttaaa

SEQ ID NO: 365643 - DNA, 20 bp, Artificial Sequence
  Description of Artificial Sequence: Synthetic oligonucleotide
  Target: LAMA2; (+) strand; PAM type: YTN; PAM sequence: TTT
ttccacacaagcatttaaaa

SEQ ID NO: 365644 - DNA, 20 bp, Artificial Sequence
  Description of Artificial Sequence: Synthetic oligonucleotide
  Target: LAMA2; (+) strand; PAM type: YTN; PAM sequence: TTT
tccacacaagcatttaaaat

SEQ ID NO: 365645 - DNA, 20 bp, Artificial Sequence
  Description of Artificial Sequence: Synthetic oligonucleotide
  Target: LAMA2; (+) strand; PAM type: YTN; PAM sequence: TTT
ccacacaagcatttaaaatc

SEQ ID NO: 365646 - DNA, 20 bp, Artificial Sequence
  Description of Artificial Sequence: Synthetic oligonucleotide
  Target: LAMA2; (+) strand; PAM type: YTN; PAM sequence: TTC
cacacaagcatttaaaatct

SEQ ID NO: 365647 - DNA, 20 bp, Artificial Sequence
  Description of Artificial Sequence: Synthetic oligonucleotide
  Target: LAMA2; (+) strand; PAM type: YTN; PAM sequence: TTT
aaaatctaattcaaaaatct

SEQ ID NO: 365648 - DNA, 20 bp, Artificial Sequence
  Description of Artificial Sequence: Synthetic oligonucleotide
  Target: LAMA2; (+) strand; PAM type: YTN; PAM sequence: TTA
aaatctaattcaaaaatcta

SEQ ID NO: 365649 - DNA, 20 bp, Artificial Sequence
  Description of Artificial Sequence: Synthetic oligonucleotide
  Target: LAMA2; (+) strand; PAM type: YTN; PAM sequence: CTA
attcaaaaatctattctgaa

SEQ ID NO: 365650 - DNA, 20 bp, Artificial Sequence
  Description of Artificial Sequence: Synthetic oligonucleotide
  Target: LAMA2; (+) strand; PAM type: YTN; PAM sequence: TTC
aaaaatctattctgaactta

SEQ ID NO: 365651 - DNA, 20 bp, Artificial Sequence
  Description of Artificial Sequence: Synthetic oligonucleotide
  Target: LAMA2; (+) strand; PAM type: YTN; PAM sequence: CTA
ttctgaacttactgaatccc

SEQ ID NO: 365652 - DNA, 20 bp, Artificial Sequence
  Description of Artificial Sequence: Synthetic oligonucleotide
  Target: LAMA2; (+) strand; PAM type: YTN; PAM sequence: TTC
tgaacttactgaatcccaag

SEQ ID NO: 365653 - DNA, 20 bp, Artificial Sequence
  Description of Artificial Sequence: Synthetic oligonucleotide
  Target: LAMA2; (+) strand; PAM type: YTN; PAM sequence: CTG
aacttactgaatcccaagaa

SEQ ID NO: 365654 - DNA, 20 bp, Artificial Sequence
  Description of Artificial Sequence: Synthetic oligonucleotide
  Target: LAMA2; (+) strand; PAM type: YTN; PAM sequence: CTT
actgaatcccaagaataatt

SEQ ID NO: 365655 - DNA, 20 bp, Artificial Sequence
  Description of Artificial Sequence: Synthetic oligonucleotide
  Target: LAMA2; (+) strand; PAM type: YTN; PAM sequence: TTA
ctgaatcccaagaataatta

SEQ ID NO: 365656 - DNA, 20 bp, Artificial Sequence
  Description of Artificial Sequence: Synthetic oligonucleotide
  Target: LAMA2; (+) strand; PAM type: YTN; PAM sequence: CTG
aatcccaagaataattagga

SEQ ID NO: 365657 - DNA, 20 bp, Artificial Sequence
  Description of Artificial Sequence: Synthetic oligonucleotide
  Target: LAMA2; (+) strand; PAM type: YTN; PAM sequence: TTA
ggagaggaaaagaaataatg

SEQ ID NO: 365658 - DNA, 20 bp, Artificial Sequence
  Description of Artificial Sequence: Synthetic oligonucleotide
  Target: LAMA2; (+) strand; PAM type: YTN; PAM sequence: TTT
aaataaattctatctgcctg

SEQ ID NO: 365659 - DNA, 20 bp, Artificial Sequence
  Description of Artificial Sequence: Synthetic oligonucleotide
  Target: LAMA2; (+) strand; PAM type: YTN; PAM sequence: TTA
aataaattctatctgcctgt

SEQ ID NO: 365660 - DNA, 20 bp, Artificial Sequence
  Description of Artificial Sequence: Synthetic oligonucleotide
  Target: LAMA2; (+) strand; PAM type: YTN; PAM sequence: TTC
tatctgcctgttactataga

SEQ ID NO: 365661 - DNA, 20 bp, Artificial Sequence
  Description of Artificial Sequence: Synthetic oligonucleotide
  Target: LAMA2; (+) strand; PAM type: YTN; PAM sequence: CTA
tctgcctgttactatagaac

SEQ ID NO: 365662 - DNA, 20 bp, Artificial Sequence
  Description of Artificial Sequence: Synthetic oligonucleotide
  Target: LAMA2; (+) strand; PAM type: YTN; PAM sequence: CTG
cctgttactatagaacatga

SEQ ID NO: 365663 - DNA, 20 bp, Artificial Sequence
  Description of Artificial Sequence: Synthetic oligonucleotide
  Target: LAMA2; (+) strand; PAM type: YTN; PAM sequence: CTG
ttactatagaacatgaagaa

SEQ ID NO: 365664 - DNA, 20 bp, Artificial Sequence
  Description of Artificial Sequence: Synthetic oligonucleotide
  Target: LAMA2; (+) strand; PAM type: YTN; PAM sequence: TTA
ctatagaacatgaagaatgg

SEQ ID NO: 365665 - DNA, 20 bp, Artificial Sequence
  Description of Artificial Sequence: Synthetic oligonucleotide
  Target: LAMA2; (+) strand; PAM type: YTN; PAM sequence: CTA
tagaacatgaagaatgggtt

SEQ ID NO: 365666 - DNA, 20 bp, Artificial Sequence
  Description of Artificial Sequence: Synthetic oligonucleotide
  Target: LAMA2; (+) strand; PAM type: YTN; PAM sequence: TTC
tgtgttcctcttatgaattt

SEQ ID NO: 365667 - DNA, 20 bp, Artificial Sequence
  Description of Artificial Sequence: Synthetic oligonucleotide
  Target: LAMA2; (+) strand; PAM type: YTN; PAM sequence: CTG
tgttcctcttatgaatttct

SEQ ID NO: 365668 - DNA, 20 bp, Artificial Sequence
  Description of Artificial Sequence: Synthetic oligonucleotide
  Target: LAMA2; (+) strand; PAM type: YTN; PAM sequence: TTC
ctcttatgaatttcttttta

SEQ ID NO: 365669 - DNA, 20 bp, Artificial Sequence
  Description of Artificial Sequence: Synthetic oligonucleotide
  Target: LAMA2; (+) strand; PAM type: YTN; PAM sequence: CTC
ttatgaatttctttttaaaa

SEQ ID NO: 365670 - DNA, 20 bp, Artificial Sequence
  Description of Artificial Sequence: Synthetic oligonucleotide
  Target: LAMA2; (+) strand; PAM type: YTN; PAM sequence: CTT
atgaatttctttttaaaacc

SEQ ID NO: 365671 - DNA, 20 bp, Artificial Sequence
  Description of Artificial Sequence: Synthetic oligonucleotide
  Target: LAMA2; (+) strand; PAM type: YTN; PAM sequence: TTA
tgaatttctttttaaaaccc

SEQ ID NO: 365672 - DNA, 20 bp, Artificial Sequence
  Description of Artificial Sequence: Synthetic oligonucleotide
  Target: LAMA2; (+) strand; PAM type: YTN; PAM sequence: TTT
ctttttaaaacccttcaaag

SEQ ID NO: 365673 - DNA, 20 bp, Artificial Sequence
  Description of Artificial Sequence: Synthetic oligonucleotide
  Target: LAMA2; (+) strand; PAM type: YTN; PAM sequence: TTC
tttttaaaacccttcaaagt

SEQ ID NO: 365674 - DNA, 20 bp, Artificial Sequence
  Description of Artificial Sequence: Synthetic oligonucleotide
  Target: LAMA2; (+) strand; PAM type: YTN; PAM sequence: CTT
tttaaaacccttcaaagtag

SEQ ID NO: 365675 - DNA, 20 bp, Artificial Sequence
  Description of Artificial Sequence: Synthetic oligonucleotide
  Target: LAMA2; (+) strand; PAM type: YTN; PAM sequence: TTT
ttaaaacccttcaaagtagg

SEQ ID NO: 365676 - DNA, 20 bp, Artificial Sequence
  Description of Artificial Sequence: Synthetic oligonucleotide
  Target: LAMA2; (+) strand; PAM type: YTN; PAM sequence: TTT
taaaacccttcaaagtaggt

SEQ ID NO: 365677 - DNA, 20 bp, Artificial Sequence
  Description of Artificial Sequence: Synthetic oligonucleotide
  Target: LAMA2; (+) strand; PAM type: YTN; PAM sequence: TTT
aaaacccttcaaagtaggta

SEQ ID NO: 365678 - DNA, 20 bp, Artificial Sequence
  Description of Artificial Sequence: Synthetic oligonucleotide
  Target: LAMA2; (+) strand; PAM type: YTN; PAM sequence: TTA
aaacccttcaaagtaggtat

SEQ ID NO: 365679 - DNA, 20 bp, Artificial Sequence
  Description of Artificial Sequence: Synthetic oligonucleotide
  Target: LAMA2; (+) strand; PAM type: YTN; PAM sequence: CTT
caaagtaggtattttcatgc

SEQ ID NO: 365680 - DNA, 20 bp, Artificial Sequence
  Description of Artificial Sequence: Synthetic oligonucleotide
  Target: LAMA2; (+) strand; PAM type: YTN; PAM sequence: TTC
aaagtaggtattttcatgcc

SEQ ID NO: 365681 - DNA, 20 bp, Artificial Sequence
  Description of Artificial Sequence: Synthetic oligonucleotide
  Target: LAMA2; (+) strand; PAM type: YTN; PAM sequence: TTT
tcatgcccttttagacataa

SEQ ID NO: 365682 - DNA, 20 bp, Artificial Sequence
  Description of Artificial Sequence: Synthetic oligonucleotide
  Target: LAMA2; (+) strand; PAM type: YTN; PAM sequence: TTT
catgcccttttagacataac

SEQ ID NO: 365683 - DNA, 20 bp, Artificial Sequence
  Description of Artificial Sequence: Synthetic oligonucleotide
  Target: LAMA2; (+) strand; PAM type: YTN; PAM sequence: TTC
atgcccttttagacataaca

SEQ ID NO: 365684 - DNA, 20 bp, Artificial Sequence
  Description of Artificial Sequence: Synthetic oligonucleotide
  Target: LAMA2; (+) strand; PAM type: YTN; PAM sequence: CTT
ttagacataacataacgtat

SEQ ID NO: 365685 - DNA, 20 bp, Artificial Sequence
  Description of Artificial Sequence: Synthetic oligonucleotide
  Target: LAMA2; (+) strand; PAM type: YTN; PAM sequence: TTT
tagacataacataacgtata

SEQ ID NO: 365686 - DNA, 20 bp, Artificial Sequence
  Description of Artificial Sequence: Synthetic oligonucleotide
  Target: LAMA2; (+) strand; PAM type: YTN; PAM sequence: TTT
agacataacataacgtataa

SEQ ID NO: 365687 - DNA, 20 bp, Artificial Sequence
  Description of Artificial Sequence: Synthetic oligonucleotide
  Target: LAMA2; (+) strand; PAM type: YTN; PAM sequence: TTA
gacataacataacgtataat

SEQ ID NO: 365688 - DNA, 20 bp, Artificial Sequence
  Description of Artificial Sequence: Synthetic oligonucleotide
  Target: LAMA2; (+) strand; PAM type: YTN; PAM sequence: TTC
agagttgaattaattttccc

SEQ ID NO: 365689 - DNA, 20 bp, Artificial Sequence
  Description of Artificial Sequence: Synthetic oligonucleotide
  Target: LAMA2; (+) strand; PAM type: YTN; PAM sequence: TTG
aattaattttcccaaaatca

SEQ ID NO: 365690 - DNA, 20 bp, Artificial Sequence
  Description of Artificial Sequence: Synthetic oligonucleotide
  Target: LAMA2; (+) strand; PAM type: YTN; PAM sequence: TTA
attttcccaaaatcacacag

SEQ ID NO: 365691 - DNA, 20 bp, Artificial Sequence
  Description of Artificial Sequence: Synthetic oligonucleotide
  Target: LAMA2; (+) strand; PAM type: YTN; PAM sequence: TTT
tcccaaaatcacacagcaaa

SEQ ID NO: 365692 - DNA, 20 bp, Artificial Sequence
  Description of Artificial Sequence: Synthetic oligonucleotide
  Target: LAMA2; (+) strand; PAM type: YTN; PAM sequence: TTT
cccaaaatcacacagcaaat

SEQ ID NO: 365693 - DNA, 20 bp, Artificial Sequence
  Description of Artificial Sequence: Synthetic oligonucleotide
  Target: LAMA2; (+) strand; PAM type: YTN; PAM sequence: TTC
ccaaaatcacacagcaaata

SEQ ID NO: 365694 - DNA, 20 bp, Artificial Sequence
  Description of Artificial Sequence: Synthetic oligonucleotide
  Target: LAMA2; (+) strand; PAM type: YTN; PAM sequence: CTA
caattagaaagtgggtaagt

SEQ ID NO: 365695 - DNA, 20 bp, Artificial Sequence
  Description of Artificial Sequence: Synthetic oligonucleotide
  Target: LAMA2; (+) strand; PAM type: YTN; PAM sequence: TTA
gaaagtgggtaagtctcatt

SEQ ID NO: 365696 - DNA, 20 bp, Artificial Sequence
  Description of Artificial Sequence: Synthetic oligonucleotide
  Target: LAMA2; (+) strand; PAM type: YTN; PAM sequence: CTC
attcttaaacatatactttt

SEQ ID NO: 365697 - DNA, 20 bp, Artificial Sequence
  Description of Artificial Sequence: Synthetic oligonucleotide
  Target: LAMA2; (+) strand; PAM type: YTN; PAM sequence: TTC
ttaaacatatacttttgcat

SEQ ID NO: 365698 - DNA, 20 bp, Artificial Sequence
  Description of Artificial Sequence: Synthetic oligonucleotide
  Target: LAMA2; (+) strand; PAM type: YTN; PAM sequence: CTT
aaacatatacttttgcatta

SEQ ID NO: 365699 - DNA, 20 bp, Artificial Sequence
  Description of Artificial Sequence: Synthetic oligonucleotide
  Target: LAMA2; (+) strand; PAM type: YTN; PAM sequence: TTA
aacatatacttttgcattat

SEQ ID NO: 365700 - DNA, 20 bp, Artificial Sequence
  Description of Artificial Sequence: Synthetic oligonucleotide
  Target: LAMA2; (+) strand; PAM type: YTN; PAM sequence: CTT
ttgcattatagtcacatgaa

SEQ ID NO: 365701 - DNA, 20 bp, Artificial Sequence
  Description of Artificial Sequence: Synthetic oligonucleotide
  Target: LAMA2; (+) strand; PAM type: YTN; PAM sequence: TTT
tgcattatagtcacatgaaa

SEQ ID NO: 365702 - DNA, 20 bp, Artificial Sequence
  Description of Artificial Sequence: Synthetic oligonucleotide
  Target: LAMA2; (+) strand; PAM type: YTN; PAM sequence: TTT
gcattatagtcacatgaaac

SEQ ID NO: 365703 - DNA, 20 bp, Artificial Sequence
  Description of Artificial Sequence: Synthetic oligonucleotide
  Target: LAMA2; (+) strand; PAM type: YTN; PAM sequence: TTG
cattatagtcacatgaaacc

SEQ ID NO: 365704 - DNA, 20 bp, Artificial Sequence
  Description of Artificial Sequence: Synthetic oligonucleotide
  Target: LAMA2; (+) strand; PAM type: YTN; PAM sequence: TTA
tagtcacatgaaaccactga

SEQ ID NO: 365705 - DNA, 20 bp, Artificial Sequence
  Description of Artificial Sequence: Synthetic oligonucleotide
  Target: LAMA2; (+) strand; PAM type: YTN; PAM sequence: CTG
agcgtgttcatgtgtgtgtg

SEQ ID NO: 365706 - DNA, 20 bp, Artificial Sequence
  Description of Artificial Sequence: Synthetic oligonucleotide
  Target: LAMA2; (+) strand; PAM type: YTN; PAM sequence: TTC
atgtgtgtgtgtgtgtgtgt

SEQ ID NO: 365707 - DNA, 20 bp, Artificial Sequence
  Description of Artificial Sequence: Synthetic oligonucleotide
  Target: LAMA2; (+) strand; PAM type: YTN; PAM sequence: TTT
gtcttgaggagaagtgttta

SEQ ID NO: 365708 - DNA, 20 bp, Artificial Sequence
  Description of Artificial Sequence: Synthetic oligonucleotide
  Target: LAMA2; (+) strand; PAM type: YTN; PAM sequence: TTG
tcttgaggagaagtgtttaa

SEQ ID NO: 365709 - DNA, 20 bp, Artificial Sequence
  Description of Artificial Sequence: Synthetic oligonucleotide
  Target: LAMA2; (+) strand; PAM type: YTN; PAM sequence: CTT
gaggagaagtgtttaaaagg

SEQ ID NO: 365710 - DNA, 20 bp, Artificial Sequence
  Description of Artificial Sequence: Synthetic oligonucleotide
  Target: LAMA2; (+) strand; PAM type: YTN; PAM sequence: TTG
aggagaagtgtttaaaagga

SEQ ID NO: 365711 - DNA, 20 bp, Artificial Sequence
  Description of Artificial Sequence: Synthetic oligonucleotide
  Target: LAMA2; (+) strand; PAM type: YTN; PAM sequence: TTT
aaaaggaatatataaatcaa

SEQ ID NO: 365712 - DNA, 20 bp, Artificial Sequence
  Description of Artificial Sequence: Synthetic oligonucleotide
  Target: LAMA2; (+) strand; PAM type: YTN; PAM sequence: TTA
aaaggaatatataaatcaag

SEQ ID NO: 365713 - DNA, 20 bp, Artificial Sequence
  Description of Artificial Sequence: Synthetic oligonucleotide
  Target: LAMA2; (+) strand; PAM type: YTN; PAM sequence: CTA
tagtatcaccaaagtaacag

SEQ ID NO: 365714 - DNA, 20 bp, Artificial Sequence
  Description of Artificial Sequence: Synthetic oligonucleotide
  Target: LAMA2; (+) strand; PAM type: YTN; PAM sequence: CTT
gaacaatttaacctcttaga

SEQ ID NO: 365715 - DNA, 20 bp, Artificial Sequence
  Description of Artificial Sequence: Synthetic oligonucleotide
  Target: LAMA2; (+) strand; PAM type: YTN; PAM sequence: TTG
aacaatttaacctcttagag

SEQ ID NO: 365716 - DNA, 20 bp, Artificial Sequence
  Description of Artificial Sequence: Synthetic oligonucleotide
  Target: LAMA2; (+) strand; PAM type: YTN; PAM sequence: TTT
aacctcttagagccacgatt

SEQ ID NO: 365717 - DNA, 20 bp, Artificial Sequence
  Description of Artificial Sequence: Synthetic oligonucleotide
  Target: LAMA2; (+) strand; PAM type: YTN; PAM sequence: TTA
acctcttagagccacgattg

SEQ ID NO: 365718 - DNA, 20 bp, Artificial Sequence
  Description of Artificial Sequence: Synthetic oligonucleotide
  Target: LAMA2; (+) strand; PAM type: YTN; PAM sequence: CTC
ttagagccacgattgctcca

SEQ ID NO: 365719 - DNA, 20 bp, Artificial Sequence
  Description of Artificial Sequence: Synthetic oligonucleotide
  Target: LAMA2; (+) strand; PAM type: YTN; PAM sequence: CTT
agagccacgattgctccatc

SEQ ID NO: 365720 - DNA, 20 bp, Artificial Sequence
  Description of Artificial Sequence: Synthetic oligonucleotide
  Target: LAMA2; (+) strand; PAM type: YTN; PAM sequence: TTA
gagccacgattgctccatct

SEQ ID NO: 365721 - DNA, 20 bp, Artificial Sequence
  Description of Artificial Sequence: Synthetic oligonucleotide
  Target: LAMA2; (+) strand; PAM type: YTN; PAM sequence: TTG
ctccatctatacaatagaat

SEQ ID NO: 365722 - DNA, 20 bp, Artificial Sequence
  Description of Artificial Sequence: Synthetic oligonucleotide
  Target: LAMA2; (+) strand; PAM type: YTN; PAM sequence: CTC
catctatacaatagaataat

SEQ ID NO: 365723 - DNA, 20 bp, Artificial Sequence
  Description of Artificial Sequence: Synthetic oligonucleotide
  Target: LAMA2; (+) strand; PAM type: YTN; PAM sequence: CTA
tacaatagaataataataat

SEQ ID NO: 365724 - DNA, 20 bp, Artificial Sequence
  Description of Artificial Sequence: Synthetic oligonucleotide
  Target: LAMA2; (+) strand; PAM type: YTN; PAM sequence: CTA
cattatacaatttccggaga

SEQ ID NO: 365725 - DNA, 20 bp, Artificial Sequence
  Description of Artificial Sequence: Synthetic oligonucleotide
  Target: LAMA2; (+) strand; PAM type: YTN; PAM sequence: TTA
tacaatttccggagattaaa

SEQ ID NO: 365726 - DNA, 20 bp, Artificial Sequence
  Description of Artificial Sequence: Synthetic oligonucleotide
  Target: LAMA2; (+) strand; PAM type: YTN; PAM sequence: TTT
ccggagattaaatgaggata

SEQ ID NO: 365727 - DNA, 20 bp, Artificial Sequence
  Description of Artificial Sequence: Synthetic oligonucleotide
  Target: LAMA2; (+) strand; PAM type: YTN; PAM sequence: TTC
cggagattaaatgaggataa

SEQ ID NO: 365728 - DNA, 20 bp, Artificial Sequence
  Description of Artificial Sequence: Synthetic oligonucleotide
  Target: LAMA2; (+) strand; PAM type: YTN; PAM sequence: TTA
aatgaggataaagagtactt

SEQ ID NO: 365729 - DNA, 20 bp, Artificial Sequence
  Description of Artificial Sequence: Synthetic oligonucleotide
  Target: LAMA2; (+) strand; PAM type: YTN; PAM sequence: CTT
ttgaaattctaaagttccat

SEQ ID NO: 365730 - DNA, 20 bp, Artificial Sequence
  Description of Artificial Sequence: Synthetic oligonucleotide
  Target: LAMA2; (+) strand; PAM type: YTN; PAM sequence: TTT
tgaaattctaaagttccatg

SEQ ID NO: 365731 - DNA, 20 bp, Artificial Sequence
  Description of Artificial Sequence: Synthetic oligonucleotide
  Target: LAMA2; (+) strand; PAM type: YTN; PAM sequence: TTT
gaaattctaaagttccatga

SEQ ID NO: 365732 - DNA, 20 bp, Artificial Sequence
  Description of Artificial Sequence: Synthetic oligonucleotide
  Target: LAMA2; (+) strand; PAM type: YTN; PAM sequence: TTG
aaattctaaagttccatgaa

SEQ ID NO: 365733 - DNA, 20 bp, Artificial Sequence
  Description of Artificial Sequence: Synthetic oligonucleotide
  Target: LAMA2; (+) strand; PAM type: YTN; PAM sequence: TTC
taaagttccatgaaaatgtt

SEQ ID NO: 365734 - DNA, 20 bp, Artificial Sequence
  Description of Artificial Sequence: Synthetic oligonucleotide
  Target: LAMA2; (+) strand; PAM type: YTN; PAM sequence: CTA
aagttccatgaaaatgttag

SEQ ID NO: 365735 - DNA, 20 bp, Artificial Sequence
  Description of Artificial Sequence: Synthetic oligonucleotide
  Target: LAMA2; (+) strand; PAM type: YTN; PAM sequence: TTC
catgaaaatgttagctttga

SEQ ID NO: 365736 - DNA, 20 bp, Artificial Sequence
  Description of Artificial Sequence: Synthetic oligonucleotide
  Target: LAMA2; (+) strand; PAM type: YTN; PAM sequence: TTA
gctttgattacatatggttc

SEQ ID NO: 365737 - DNA, 20 bp, Artificial Sequence
  Description of Artificial Sequence: Synthetic oligonucleotide
  Target: LAMA2; (+) strand; PAM type: YTN; PAM sequence: CTT
tgattacatatggttcagca

SEQ ID NO: 365738 - DNA, 20 bp, Artificial Sequence
  Description of Artificial Sequence: Synthetic oligonucleotide
  Target: LAMA2; (+) strand; PAM type: YTN; PAM sequence: TTT
gattacatatggttcagcaa

SEQ ID NO: 365739 - DNA, 20 bp, Artificial Sequence
  Description of Artificial Sequence: Synthetic oligonucleotide
  Target: LAMA2; (+) strand; PAM type: YTN; PAM sequence: TTG
attacatatggttcagcaat

SEQ ID NO: 365740 - DNA, 20 bp, Artificial Sequence
  Description of Artificial Sequence: Synthetic oligonucleotide
  Target: LAMA2; (+) strand; PAM type: YTN; PAM sequence: TTA
catatggttcagcaattggg

SEQ ID NO: 365741 - DNA, 20 bp, Artificial Sequence
  Description of Artificial Sequence: Synthetic oligonucleotide
  Target: LAMA2; (+) strand; PAM type: YTN; PAM sequence: TTC
agcaattgggtctccttatt

SEQ ID NO: 365742 - DNA, 20 bp, Artificial Sequence
  Description of Artificial Sequence: Synthetic oligonucleotide
  Target: LAMA2; (+) strand; PAM type: YTN; PAM sequence: TTG
ggtctccttattttttgaga

SEQ ID NO: 365743 - DNA, 20 bp, Artificial Sequence
  Description of Artificial Sequence: Synthetic oligonucleotide
  Target: LAMA2; (+) strand; PAM type: YTN; PAM sequence: CTC
cttattttttgagatctacc

SEQ ID NO: 365744 - DNA, 20 bp, Artificial Sequence
  Description of Artificial Sequence: Synthetic oligonucleotide
  Target: LAMA2; (+) strand; PAM type: YTN; PAM sequence: CTT
attttttgagatctaccttt

SEQ ID NO: 365745 - DNA, 20 bp, Artificial Sequence
  Description of Artificial Sequence: Synthetic oligonucleotide
  Target: LAMA2; (+) strand; PAM type: YTN; PAM sequence: TTA
ttttttgagatctacctttt

SEQ ID NO: 365746 - DNA, 20 bp, Artificial Sequence
  Description of Artificial Sequence: Synthetic oligonucleotide
  Target: LAMA2; (+) strand; PAM type: YTN; PAM sequence: TTT
tttgagatctaccttttttt

SEQ ID NO: 365747 - DNA, 20 bp, Artificial Sequence
  Description of Artificial Sequence: Synthetic oligonucleotide
  Target: LAMA2; (+) strand; PAM type: YTN; PAM sequence: TTT
ttgagatctacctttttttt

SEQ ID NO: 365748 - DNA, 20 bp, Artificial Sequence
  Description of Artificial Sequence: Synthetic oligonucleotide
  Target: LAMA2; (+) strand; PAM type: YTN; PAM sequence: TTT
tgagatctaccttttttttt

SEQ ID NO: 365749 - DNA, 20 bp, Artificial Sequence
  Description of Artificial Sequence: Synthetic oligonucleotide
  Target: LAMA2; (+) strand; PAM type: YTN; PAM sequence: TTT
gagatctacctttttttttt

SEQ ID NO: 365750 - DNA, 20 bp, Artificial Sequence
  Description of Artificial Sequence: Synthetic oligonucleotide
  Target: LAMA2; (+) strand; PAM type: YTN; PAM sequence: TTG
agatctaccttttttttttg

SEQ ID NO: 365751 - DNA, 20 bp, Artificial Sequence
  Description of Artificial Sequence: Synthetic oligonucleotide
  Target: LAMA2; (+) strand; PAM type: YTN; PAM sequence: CTA
ccttttttttttgtattatc

SEQ ID NO: 365752 - DNA, 20 bp, Artificial Sequence
  Description of Artificial Sequence: Synthetic oligonucleotide
  Target: LAMA2; (+) strand; PAM type: YTN; PAM sequence: CTT
ttttttttgtattatctgta

SEQ ID NO: 365753 - DNA, 20 bp, Artificial Sequence
  Description of Artificial Sequence: Synthetic oligonucleotide
  Target: LAMA2; (+) strand; PAM type: YTN; PAM sequence: TTT
tttttttgtattatctgtag

SEQ ID NO: 365754 - DNA, 20 bp, Artificial Sequence
  Description of Artificial Sequence: Synthetic oligonucleotide
  Target: LAMA2; (+) strand; PAM type: YTN; PAM sequence: TTT
ttttttgtattatctgtagc

SEQ ID NO: 365755 - DNA, 20 bp, Artificial Sequence
  Description of Artificial Sequence: Synthetic oligonucleotide
  Target: LAMA2; (+) strand; PAM type: YTN; PAM sequence: TTT
tttttgtattatctgtagct

SEQ ID NO: 365756 - DNA, 20 bp, Artificial Sequence
  Description of Artificial Sequence: Synthetic oligonucleotide
  Target: LAMA2; (+) strand; PAM type: YTN; PAM sequence: TTT
ttttgtattatctgtagctt

SEQ ID NO: 365757 - DNA, 20 bp, Artificial Sequence
  Description of Artificial Sequence: Synthetic oligonucleotide
  Target: LAMA2; (+) strand; PAM type: YTN; PAM sequence: TTT
tttgtattatctgtagcttg

SEQ ID NO: 365758 - DNA, 20 bp, Artificial Sequence
  Description of Artificial Sequence: Synthetic oligonucleotide
  Target: LAMA2; (+) strand; PAM type: YTN; PAM sequence: TTT
ttgtattatctgtagcttgc

SEQ ID NO: 365759 - DNA, 20 bp, Artificial Sequence
  Description of Artificial Sequence: Synthetic oligonucleotide
  Target: LAMA2; (+) strand; PAM type: YTN; PAM sequence: TTT
tgtattatctgtagcttgct

SEQ ID NO: 365760 - DNA, 20 bp, Artificial Sequence
  Description of Artificial Sequence: Synthetic oligonucleotide
  Target: LAMA2; (+) strand; PAM type: YTN; PAM sequence: TTT
gtattatctgtagcttgcta

SEQ ID NO: 365761 - DNA, 20 bp, Artificial Sequence
  Description of Artificial Sequence: Synthetic oligonucleotide
  Target: LAMA2; (+) strand; PAM type: YTN; PAM sequence: TTG
tattatctgtagcttgctaa

SEQ ID NO: 365762 - DNA, 20 bp, Artificial Sequence
  Description of Artificial Sequence: Synthetic oligonucleotide
  Target: LAMA2; (+) strand; PAM type: YTN; PAM sequence: TTA
tctgtagcttgctaaaataa

SEQ ID NO: 365763 - DNA, 20 bp, Artificial Sequence
  Description of Artificial Sequence: Synthetic oligonucleotide
  Target: LAMA2; (+) strand; PAM type: YTN; PAM sequence: CTG
tagcttgctaaaataacata

SEQ ID NO: 365764 - DNA, 20 bp, Artificial Sequence
  Description of Artificial Sequence: Synthetic oligonucleotide
  Target: LAMA2; (+) strand; PAM type: YTN; PAM sequence: CTT
gctaaaataacataccagat

SEQ ID NO: 365765 - DNA, 20 bp, Artificial Sequence
  Description of Artificial Sequence: Synthetic oligonucleotide
  Target: LAMA2; (+) strand; PAM type: YTN; PAM sequence: TTG
ctaaaataacataccagatg

SEQ ID NO: 365766 - DNA, 20 bp, Artificial Sequence
  Description of Artificial Sequence: Synthetic oligonucleotide
  Target: LAMA2; (+) strand; PAM type: YTN; PAM sequence: CTA
aaataacataccagatgttt

SEQ ID NO: 365767 - DNA, 20 bp, Artificial Sequence
  Description of Artificial Sequence: Synthetic oligonucleotide
  Target: LAMA2; (+) strand; PAM type: YTN; PAM sequence: TTT
ttgttttcaaattttaaaaa

SEQ ID NO: 365768 - DNA, 20 bp, Artificial Sequence
  Description of Artificial Sequence: Synthetic oligonucleotide
  Target: LAMA2; (+) strand; PAM type: YTN; PAM sequence: TTT
tgttttcaaattttaaaaat

SEQ ID NO: 365769 - DNA, 20 bp, Artificial Sequence
  Description of Artificial Sequence: Synthetic oligonucleotide
  Target: LAMA2; (+) strand; PAM type: YTN; PAM sequence: TTT
gttttcaaattttaaaaatc

SEQ ID NO: 365770 - DNA, 20 bp, Artificial Sequence
  Description of Artificial Sequence: Synthetic oligonucleotide
  Target: LAMA2; (+) strand; PAM type: YTN; PAM sequence: TTG
ttttcaaattttaaaaatcc

SEQ ID NO: 365771 - DNA, 20 bp, Artificial Sequence
  Description of Artificial Sequence: Synthetic oligonucleotide
  Target: LAMA2; (+) strand; PAM type: YTN; PAM sequence: TTT
tcaaattttaaaaatccaga

SEQ ID NO: 365772 - DNA, 20 bp, Artificial Sequence
  Description of Artificial Sequence: Synthetic oligonucleotide
  Target: LAMA2; (+) strand; PAM type: YTN; PAM sequence: TTT
caaattttaaaaatccagat

SEQ ID NO: 365773 - DNA, 20 bp, Artificial Sequence
  Description of Artificial Sequence: Synthetic oligonucleotide
  Target: LAMA2; (+) strand; PAM type: YTN; PAM sequence: TTC
aaattttaaaaatccagatc

SEQ ID NO: 365774 - DNA, 20 bp, Artificial Sequence
  Description of Artificial Sequence: Synthetic oligonucleotide
  Target: LAMA2; (+) strand; PAM type: YTN; PAM sequence: TTT
taaaaatccagatcatactg

SEQ ID NO: 365775 - DNA, 20 bp, Artificial Sequence
  Description of Artificial Sequence: Synthetic oligonucleotide
  Target: LAMA2; (+) strand; PAM type: YTN; PAM sequence: TTT
aaaaatccagatcatactga

SEQ ID NO: 365776 - DNA, 20 bp, Artificial Sequence
  Description of Artificial Sequence: Synthetic oligonucleotide
  Target: LAMA2; (+) strand; PAM type: YTN; PAM sequence: TTA
aaaatccagatcatactgat

SEQ ID NO: 365777 - DNA, 20 bp, Artificial Sequence
  Description of Artificial Sequence: Synthetic oligonucleotide
  Target: LAMA2; (+) strand; PAM type: YTN; PAM sequence: CTG
atttgttgccatggtatagt

SEQ ID NO: 365778 - DNA, 20 bp, Artificial Sequence
  Description of Artificial Sequence: Synthetic oligonucleotide
  Target: LAMA2; (+) strand; PAM type: YTN; PAM sequence: TTT
gttgccatggtatagtagtc

SEQ ID NO: 365779 - DNA, 20 bp, Artificial Sequence
  Description of Artificial Sequence: Synthetic oligonucleotide
  Target: LAMA2; (+) strand; PAM type: YTN; PAM sequence: TTG
ttgccatggtatagtagtca

SEQ ID NO: 365780 - DNA, 20 bp, Artificial Sequence
  Description of Artificial Sequence: Synthetic oligonucleotide
  Target: LAMA2; (+) strand; PAM type: YTN; PAM sequence: TTG
ccatggtatagtagtcagag

SEQ ID NO: 365781 - DNA, 20 bp, Artificial Sequence
  Description of Artificial Sequence: Synthetic oligonucleotide
  Target: LAMA2; (+) strand; PAM type: YTN; PAM sequence: CTT
gctctgggcagttacaatat

SEQ ID NO: 365782 - DNA, 20 bp, Artificial Sequence
  Description of Artificial Sequence: Synthetic oligonucleotide
  Target: LAMA2; (+) strand; PAM type: YTN; PAM sequence: TTG
ctctgggcagttacaatatt

SEQ ID NO: 365783 - DNA, 20 bp, Artificial Sequence
  Description of Artificial Sequence: Synthetic oligonucleotide
  Target: LAMA2; (+) strand; PAM type: YTN; PAM sequence: CTC
tgggcagttacaatattttg

SEQ ID NO: 365784 - DNA, 20 bp, Artificial Sequence
  Description of Artificial Sequence: Synthetic oligonucleotide
  Target: LAMA2; (+) strand; PAM type: YTN; PAM sequence: CTG
ggcagttacaatattttgga

SEQ ID NO: 365785 - DNA, 20 bp, Artificial Sequence
  Description of Artificial Sequence: Synthetic oligonucleotide
  Target: LAMA2; (+) strand; PAM type: YTN; PAM sequence: TTA
caatattttggagattgttt

SEQ ID NO: 365786 - DNA, 20 bp, Artificial Sequence
  Description of Artificial Sequence: Synthetic oligonucleotide
  Target: LAMA2; (+) strand; PAM type: YTN; PAM sequence: TTT
tggagattgttttacataat

SEQ ID NO: 365787 - DNA, 20 bp, Artificial Sequence
  Description of Artificial Sequence: Synthetic oligonucleotide
  Target: LAMA2; (+) strand; PAM type: YTN; PAM sequence: TTT
ggagattgttttacataata

SEQ ID NO: 365788 - DNA, 20 bp, Artificial Sequence
  Description of Artificial Sequence: Synthetic oligonucleotide
  Target: LAMA2; (+) strand; PAM type: YTN; PAM sequence: TTG
gagattgttttacataatag

SEQ ID NO: 365789 - DNA, 20 bp, Artificial Sequence
  Description of Artificial Sequence: Synthetic oligonucleotide
  Target: LAMA2; (+) strand; PAM type: YTN; PAM sequence: TTG
ttttacataatagcaacaat

SEQ ID NO: 365790 - DNA, 20 bp, Artificial Sequence
  Description of Artificial Sequence: Synthetic oligonucleotide
  Target: LAMA2; (+) strand; PAM type: YTN; PAM sequence: TTT
tacataatagcaacaataac

SEQ ID NO: 365791 - DNA, 20 bp, Artificial Sequence
  Description of Artificial Sequence: Synthetic oligonucleotide
  Target: LAMA2; (+) strand; PAM type: YTN; PAM sequence: TTT
acataatagcaacaataaca

SEQ ID NO: 365792 - DNA, 20 bp, Artificial Sequence
  Description of Artificial Sequence: Synthetic oligonucleotide
  Target: LAMA2; (+) strand; PAM type: YTN; PAM sequence: TTA
cataatagcaacaataacag

SEQ ID NO: 365793 - DNA, 20 bp, Artificial Sequence
  Description of Artificial Sequence: Synthetic oligonucleotide
  Target: LAMA2; (+) strand; PAM type: YTN; PAM sequence: CTG
ctaacttgtttacatttaca

SEQ ID NO: 365794 - DNA, 20 bp, Artificial Sequence
  Description of Artificial Sequence: Synthetic oligonucleotide
  Target: LAMA2; (+) strand; PAM type: YTN; PAM sequence: CTA
acttgtttacatttacaaaa

SEQ ID NO: 365795 - DNA, 20 bp, Artificial Sequence
  Description of Artificial Sequence: Synthetic oligonucleotide
  Target: LAMA2; (+) strand; PAM type: YTN; PAM sequence: CTT
gtttacatttacaaaatgtc

SEQ ID NO: 365796 - DNA, 20 bp, Artificial Sequence
  Description of Artificial Sequence: Synthetic oligonucleotide
  Target: LAMA2; (+) strand; PAM type: YTN; PAM sequence: TTG
tttacatttacaaaatgtca

SEQ ID NO: 365797 - DNA, 20 bp, Artificial Sequence
  Description of Artificial Sequence: Synthetic oligonucleotide
  Target: LAMA2; (+) strand; PAM type: YTN; PAM sequence: TTT
acatttacaaaatgtcaaat

SEQ ID NO: 365798 - DNA, 20 bp, Artificial Sequence
  Description of Artificial Sequence: Synthetic oligonucleotide
  Target: LAMA2; (+) strand; PAM type: YTN; PAM sequence: TTA
catttacaaaatgtcaaata

SEQ ID NO: 365799 - DNA, 20 bp, Artificial Sequence
  Description of Artificial Sequence: Synthetic oligonucleotide
  Target: LAMA2; (+) strand; PAM type: YTN; PAM sequence: TTT
acaaaatgtcaaatactatt

SEQ ID NO: 365800 - DNA, 20 bp, Artificial Sequence
  Description of Artificial Sequence: Synthetic oligonucleotide
  Target: LAMA2; (+) strand; PAM type: YTN; PAM sequence: TTA
caaaatgtcaaatactattc

SEQ ID NO: 365801 - DNA, 20 bp, Artificial Sequence
  Description of Artificial Sequence: Synthetic oligonucleotide
  Target: LAMA2; (+) strand; PAM type: YTN; PAM sequence: CTA
ttctagattattcaattgaa

SEQ ID NO: 365802 - DNA, 20 bp, Artificial Sequence
  Description of Artificial Sequence: Synthetic oligonucleotide
  Target: LAMA2; (+) strand; PAM type: YTN; PAM sequence: TTC
tagattattcaattgaatca

SEQ ID NO: 365803 - DNA, 20 bp, Artificial Sequence
  Description of Artificial Sequence: Synthetic oligonucleotide
  Target: LAMA2; (+) strand; PAM type: YTN; PAM sequence: CTA
gattattcaattgaatcatc

SEQ ID NO: 365804 - DNA, 20 bp, Artificial Sequence
  Description of Artificial Sequence: Synthetic oligonucleotide
  Target: LAMA2; (+) strand; PAM type: YTN; PAM sequence: TTA
ttcaattgaatcatcacaac

SEQ ID NO: 365805 - DNA, 20 bp, Artificial Sequence
  Description of Artificial Sequence: Synthetic oligonucleotide
  Target: LAMA2; (+) strand; PAM type: YTN; PAM sequence: TTC
aattgaatcatcacaacaac

SEQ ID NO: 365806 - DNA, 20 bp, Artificial Sequence
  Description of Artificial Sequence: Synthetic oligonucleotide
  Target: LAMA2; (+) strand; PAM type: YTN; PAM sequence: TTG
aatcatcacaacaacgctat

SEQ ID NO: 365807 - DNA, 20 bp, Artificial Sequence
  Description of Artificial Sequence: Synthetic oligonucleotide
  Target: LAMA2; (+) strand; PAM type: YTN; PAM sequence: CTA
tgaggtagttactgttatat

SEQ ID NO: 365808 - DNA, 20 bp, Artificial Sequence
  Description of Artificial Sequence: Synthetic oligonucleotide
  Target: LAMA2; (+) strand; PAM type: YTN; PAM sequence: TTA
ctgttatattgttttgattt

SEQ ID NO: 365809 - DNA, 20 bp, Artificial Sequence
  Description of Artificial Sequence: Synthetic oligonucleotide
  Target: LAMA2; (+) strand; PAM type: YTN; PAM sequence: CTG
ttatattgttttgatttccc

SEQ ID NO: 365810 - DNA, 20 bp, Artificial Sequence
  Description of Artificial Sequence: Synthetic oligonucleotide
  Target: LAMA2; (+) strand; PAM type: YTN; PAM sequence: TTA
tattgttttgatttccctga

SEQ ID NO: 365811 - DNA, 20 bp, Artificial Sequence
  Description of Artificial Sequence: Synthetic oligonucleotide
  Target: LAMA2; (+) strand; PAM type: YTN; PAM sequence: TTG
ttttgatttccctgatggag

SEQ ID NO: 365812 - DNA, 20 bp, Artificial Sequence
  Description of Artificial Sequence: Synthetic oligonucleotide
  Target: LAMA2; (+) strand; PAM type: YTN; PAM sequence: TTT
tgatttccctgatggagact

SEQ ID NO: 365813 - DNA, 20 bp, Artificial Sequence
  Description of Artificial Sequence: Synthetic oligonucleotide
  Target: LAMA2; (+) strand; PAM type: YTN; PAM sequence: TTT
gatttccctgatggagactt

SEQ ID NO: 365814 - DNA, 20 bp, Artificial Sequence
  Description of Artificial Sequence: Synthetic oligonucleotide
  Target: LAMA2; (+) strand; PAM type: YTN; PAM sequence: TTG
atttccctgatggagacttg

SEQ ID NO: 365815 - DNA, 20 bp, Artificial Sequence
  Description of Artificial Sequence: Synthetic oligonucleotide
  Target: LAMA2; (+) strand; PAM type: YTN; PAM sequence: TTT
ccctgatggagacttgacac

SEQ ID NO: 365816 - DNA, 20 bp, Artificial Sequence
  Description of Artificial Sequence: Synthetic oligonucleotide
  Target: LAMA2; (+) strand; PAM type: YTN; PAM sequence: TTC
cctgatggagacttgacaca

SEQ ID NO: 365817 - DNA, 20 bp, Artificial Sequence
  Description of Artificial Sequence: Synthetic oligonucleotide
  Target: LAMA2; (+) strand; PAM type: YTN; PAM sequence: CTG
atggagacttgacacaaaga

SEQ ID NO: 365818 - DNA, 20 bp, Artificial Sequence
  Description of Artificial Sequence: Synthetic oligonucleotide
  Target: LAMA2; (+) strand; PAM type: YTN; PAM sequence: CTT
gacacaaagagagactaagt

SEQ ID NO: 365819 - DNA, 20 bp, Artificial Sequence
  Description of Artificial Sequence: Synthetic oligonucleotide
  Target: LAMA2; (+) strand; PAM type: YTN; PAM sequence: TTG
acacaaagagagactaagta

SEQ ID NO: 365820 - DNA, 20 bp, Artificial Sequence
  Description of Artificial Sequence: Synthetic oligonucleotide
  Target: LAMA2; (+) strand; PAM type: YTN; PAM sequence: CTA
agtaattcactcctgtcaca

SEQ ID NO: 365821 - DNA, 20 bp, Artificial Sequence
  Description of Artificial Sequence: Synthetic oligonucleotide
  Target: LAMA2; (+) strand; PAM type: YTN; PAM sequence: TTC
actcctgtcacacacagcta

SEQ ID NO: 365822 - DNA, 20 bp, Artificial Sequence
  Description of Artificial Sequence: Synthetic oligonucleotide
  Target: LAMA2; (+) strand; PAM type: YTN; PAM sequence: CTC
ctgtcacacacagctaaaaa

SEQ ID NO: 365823 - DNA, 20 bp, Artificial Sequence
  Description of Artificial Sequence: Synthetic oligonucleotide
  Target: LAMA2; (+) strand; PAM type: YTN; PAM sequence: CTG
tcacacacagctaaaaagtg

SEQ ID NO: 365824 - DNA, 20 bp, Artificial Sequence
  Description of Artificial Sequence: Synthetic oligonucleotide
  Target: LAMA2; (+) strand; PAM type: YTN; PAM sequence: CTA
aaaagtggcagagctgagtg

SEQ ID NO: 365825 - DNA, 20 bp, Artificial Sequence
  Description of Artificial Sequence: Synthetic oligonucleotide
  Target: LAMA2; (+) strand; PAM type: YTN; PAM sequence: CTG
agtgttttgccccaggtagt

SEQ ID NO: 365826 - DNA, 20 bp, Artificial Sequence
  Description of Artificial Sequence: Synthetic oligonucleotide
  Target: LAMA2; (+) strand; PAM type: YTN; PAM sequence: TTT
tgccccaggtagtccagttc

SEQ ID NO: 365827 - DNA, 20 bp, Artificial Sequence
  Description of Artificial Sequence: Synthetic oligonucleotide
  Target: LAMA2; (+) strand; PAM type: YTN; PAM sequence: TTT
gccccaggtagtccagttct

SEQ ID NO: 365828 - DNA, 20 bp, Artificial Sequence
  Description of Artificial Sequence: Synthetic oligonucleotide
  Target: LAMA2; (+) strand; PAM type: YTN; PAM sequence: TTG
ccccaggtagtccagttcta

SEQ ID NO: 365829 - DNA, 20 bp, Artificial Sequence
  Description of Artificial Sequence: Synthetic oligonucleotide
  Target: LAMA2; (+) strand; PAM type: YTN; PAM sequence: TTC
tagaactgtactcttttcca

SEQ ID NO: 365830 - DNA, 20 bp, Artificial Sequence
  Description of Artificial Sequence: Synthetic oligonucleotide
  Target: LAMA2; (+) strand; PAM type: YTN; PAM sequence: CTA
gaactgtactcttttccact

SEQ ID NO: 365831 - DNA, 20 bp, Artificial Sequence
  Description of Artificial Sequence: Synthetic oligonucleotide
  Target: LAMA2; (+) strand; PAM type: YTN; PAM sequence: CTG
tactcttttccactatgcta

SEQ ID NO: 365832 - DNA, 20 bp, Artificial Sequence
  Description of Artificial Sequence: Synthetic oligonucleotide
  Target: LAMA2; (+) strand; PAM type: YTN; PAM sequence: CTC
ttttccactatgctatacca

SEQ ID NO: 365833 - DNA, 20 bp, Artificial Sequence
  Description of Artificial Sequence: Synthetic oligonucleotide
  Target: LAMA2; (+) strand; PAM type: YTN; PAM sequence: CTT
ttccactatgctataccatc

SEQ ID NO: 365834 - DNA, 20 bp, Artificial Sequence
  Description of Artificial Sequence: Synthetic oligonucleotide
  Target: LAMA2; (+) strand; PAM type: YTN; PAM sequence: TTT
tccactatgctataccatct

SEQ ID NO: 365835 - DNA, 20 bp, Artificial Sequence
  Description of Artificial Sequence: Synthetic oligonucleotide
  Target: LAMA2; (+) strand; PAM type: YTN; PAM sequence: TTT
ccactatgctataccatctt

SEQ ID NO: 365836 - DNA, 20 bp, Artificial Sequence
  Description of Artificial Sequence: Synthetic oligonucleotide
  Target: LAMA2; (+) strand; PAM type: YTN; PAM sequence: TTC
cactatgctataccatcttc

SEQ ID NO: 365837 - DNA, 20 bp, Artificial Sequence
  Description of Artificial Sequence: Synthetic oligonucleotide
  Target: LAMA2; (+) strand; PAM type: YTN; PAM sequence: CTA
tgctataccatcttcctaat

SEQ ID NO: 365838 - DNA, 20 bp, Artificial Sequence
  Description of Artificial Sequence: Synthetic oligonucleotide
  Target: LAMA2; (+) strand; PAM type: YTN; PAM sequence: CTA
taccatcttcctaatactat

SEQ ID NO: 365839 - DNA, 20 bp, Artificial Sequence
  Description of Artificial Sequence: Synthetic oligonucleotide
  Target: LAMA2; (+) strand; PAM type: YTN; PAM sequence: CTT
cctaatactatctgtacaag

SEQ ID NO: 365840 - DNA, 20 bp, Artificial Sequence
  Description of Artificial Sequence: Synthetic oligonucleotide
  Target: LAMA2; (+) strand; PAM type: YTN; PAM sequence: TTC
ctaatactatctgtacaaga

SEQ ID NO: 365841 - DNA, 20 bp, Artificial Sequence
  Description of Artificial Sequence: Synthetic oligonucleotide
  Target: LAMA2; (+) strand; PAM type: YTN; PAM sequence: CTA
atactatctgtacaagaaat

SEQ ID NO: 365842 - DNA, 20 bp, Artificial Sequence
  Description of Artificial Sequence: Synthetic oligonucleotide
  Target: LAMA2; (+) strand; PAM type: YTN; PAM sequence: CTA
tctgtacaagaaattttctc

SEQ ID NO: 365843 - DNA, 20 bp, Artificial Sequence
  Description of Artificial Sequence: Synthetic oligonucleotide
  Target: LAMA2; (+) strand; PAM type: YTN; PAM sequence: CTG
tacaagaaattttctcctaa

SEQ ID NO: 365844 - DNA, 20 bp, Artificial Sequence
  Description of Artificial Sequence: Synthetic oligonucleotide
  Target: LAMA2; (+) strand; PAM type: YTN; PAM sequence: TTT
tctcctaatgaaatgtattg

SEQ ID NO: 365845 - DNA, 20 bp, Artificial Sequence
  Description of Artificial Sequence: Synthetic oligonucleotide
  Target: LAMA2; (+) strand; PAM type: YTN; PAM sequence: TTT
ctcctaatgaaatgtattgc

SEQ ID NO: 365846 - DNA, 20 bp, Artificial Sequence
  Description of Artificial Sequence: Synthetic oligonucleotide
  Target: LAMA2; (+) strand; PAM type: YTN; PAM sequence: TTC
tcctaatgaaatgtattgct

SEQ ID NO: 365847 - DNA, 20 bp, Artificial Sequence
  Description of Artificial Sequence: Synthetic oligonucleotide
  Target: LAMA2; (+) strand; PAM type: YTN; PAM sequence: CTC
ctaatgaaatgtattgctgt

SEQ ID NO: 365848 - DNA, 20 bp, Artificial Sequence
  Description of Artificial Sequence: Synthetic oligonucleotide
  Target: LAMA2; (+) strand; PAM type: YTN; PAM sequence: CTA
atgaaatgtattgctgtacc

SEQ ID NO: 365849 - DNA, 20 bp, Artificial Sequence
  Description of Artificial Sequence: Synthetic oligonucleotide
  Target: LAMA2; (+) strand; PAM type: YTN; PAM sequence: TTG
ctgtaccctatataagcttt

SEQ ID NO: 365850 - DNA, 20 bp, Artificial Sequence
  Description of Artificial Sequence: Synthetic oligonucleotide
  Target: LAMA2; (+) strand; PAM type: YTN; PAM sequence: CTG
taccctatataagctttagc

SEQ ID NO: 365851 - DNA, 20 bp, Artificial Sequence
  Description of Artificial Sequence: Synthetic oligonucleotide
  Target: LAMA2; (+) strand; PAM type: YTN; PAM sequence: CTA
tataagctttagctctaaaa

SEQ ID NO: 365852 - DNA, 20 bp, Artificial Sequence
  Description of Artificial Sequence: Synthetic oligonucleotide
  Target: LAMA2; (+) strand; PAM type: YTN; PAM sequence: CTT
tagctctaaaattgcagagc

SEQ ID NO: 365853 - DNA, 20 bp, Artificial Sequence
  Description of Artificial Sequence: Synthetic oligonucleotide
  Target: LAMA2; (+) strand; PAM type: YTN; PAM sequence: TTT
agctctaaaattgcagagca

SEQ ID NO: 365854 - DNA, 20 bp, Artificial Sequence
  Description of Artificial Sequence: Synthetic oligonucleotide
  Target: LAMA2; (+) strand; PAM type: YTN; PAM sequence: TTA
gctctaaaattgcagagcag

SEQ ID NO: 365855 - DNA, 20 bp, Artificial Sequence
  Description of Artificial Sequence: Synthetic oligonucleotide
  Target: LAMA2; (+) strand; PAM type: YTN; PAM sequence: CTC
taaaattgcagagcaggaag

SEQ ID NO: 365856 - DNA, 20 bp, Artificial Sequence
  Description of Artificial Sequence: Synthetic oligonucleotide
  Target: LAMA2; (+) strand; PAM type: YTN; PAM sequence: CTA
aaattgcagagcaggaagca

SEQ ID NO: 365857 - DNA, 20 bp, Artificial Sequence
  Description of Artificial Sequence: Synthetic oligonucleotide
  Target: LAMA2; (+) strand; PAM type: YTN; PAM sequence: TTG
cagagcaggaagcaggtgga

SEQ ID NO: 365858 - DNA, 20 bp, Artificial Sequence
  Description of Artificial Sequence: Synthetic oligonucleotide
  Target: LAMA2; (+) strand; PAM type: YTN; PAM sequence: CTA
attgctattctattacccta

SEQ ID NO: 365859 - DNA, 20 bp, Artificial Sequence
  Description of Artificial Sequence: Synthetic oligonucleotide
  Target: LAMA2; (+) strand; PAM type: YTN; PAM sequence: TTG
ctattctattaccctacaat

SEQ ID NO: 365860 - DNA, 20 bp, Artificial Sequence
  Description of Artificial Sequence: Synthetic oligonucleotide
  Target: LAMA2; (+) strand; PAM type: YTN; PAM sequence: CTA
ttctattaccctacaataga

SEQ ID NO: 365861 - DNA, 20 bp, Artificial Sequence
  Description of Artificial Sequence: Synthetic oligonucleotide
  Target: LAMA2; (+) strand; PAM type: YTN; PAM sequence: TTC
tattaccctacaatagaaat

SEQ ID NO: 365862 - DNA, 20 bp, Artificial Sequence
  Description of Artificial Sequence: Synthetic oligonucleotide
  Target: LAMA2; (+) strand; PAM type: YTN; PAM sequence: CTA
ttaccctacaatagaaattt

SEQ ID NO: 365863 - DNA, 20 bp, Artificial Sequence
  Description of Artificial Sequence: Synthetic oligonucleotide
  Target: LAMA2; (+) strand; PAM type: YTN; PAM sequence: TTA
ccctacaatagaaatttcag

SEQ ID NO: 365864 - DNA, 20 bp, Artificial Sequence
  Description of Artificial Sequence: Synthetic oligonucleotide
  Target: LAMA2; (+) strand; PAM type: YTN; PAM sequence: CTA
caatagaaatttcagtggac

SEQ ID NO: 365865 - DNA, 20 bp, Artificial Sequence
  Description of Artificial Sequence: Synthetic oligonucleotide
  Target: LAMA2; (+) strand; PAM type: YTN; PAM sequence: TTT
cagtggactaactctaatat

SEQ ID NO: 365866 - DNA, 20 bp, Artificial Sequence
  Description of Artificial Sequence: Synthetic oligonucleotide
  Target: LAMA2; (+) strand; PAM type: YTN; PAM sequence: TTC
agtggactaactctaatatt

SEQ ID NO: 365867 - DNA, 20 bp, Artificial Sequence
  Description of Artificial Sequence: Synthetic oligonucleotide
  Target: LAMA2; (+) strand; PAM type: YTN; PAM sequence: CTA
actctaatatttaaataacc

SEQ ID NO: 365868 - DNA, 20 bp, Artificial Sequence
  Description of Artificial Sequence: Synthetic oligonucleotide
  Target: LAMA2; (+) strand; PAM type: YTN; PAM sequence: CTC
taatatttaaataacccact

SEQ ID NO: 365869 - DNA, 20 bp, Artificial Sequence
  Description of Artificial Sequence: Synthetic oligonucleotide
  Target: LAMA2; (+) strand; PAM type: YTN; PAM sequence: CTA
atatttaaataacccactgt

SEQ ID NO: 365870 - DNA, 20 bp, Artificial Sequence
  Description of Artificial Sequence: Synthetic oligonucleotide
  Target: LAMA2; (+) strand; PAM type: YTN; PAM sequence: TTT
aaataacccactgttaataa

SEQ ID NO: 365871 - DNA, 20 bp, Artificial Sequence
  Description of Artificial Sequence: Synthetic oligonucleotide
  Target: LAMA2; (+) strand; PAM type: YTN; PAM sequence: TTA
aataacccactgttaataaa

SEQ ID NO: 365872 - DNA, 20 bp, Artificial Sequence
  Description of Artificial Sequence: Synthetic oligonucleotide
  Target: LAMA2; (+) strand; PAM type: YTN; PAM sequence: CTG
ttaataaactggcatggtgc

SEQ ID NO: 365873 - DNA, 20 bp, Artificial Sequence
  Description of Artificial Sequence: Synthetic oligonucleotide
  Target: LAMA2; (+) strand; PAM type: YTN; PAM sequence: TTA
ataaactggcatggtgcaat

SEQ ID NO: 365874 - DNA, 20 bp, Artificial Sequence
  Description of Artificial Sequence: Synthetic oligonucleotide
  Target: LAMA2; (+) strand; PAM type: YTN; PAM sequence: CTG
gcatggtgcaattgcatgtt

SEQ ID NO: 365875 - DNA, 20 bp, Artificial Sequence
  Description of Artificial Sequence: Synthetic oligonucleotide
  Target: LAMA2; (+) strand; PAM type: YTN; PAM sequence: TTG
catgtttcccagtgagatca

SEQ ID NO: 365876 - DNA, 20 bp, Artificial Sequence
  Description of Artificial Sequence: Synthetic oligonucleotide
  Target: LAMA2; (+) strand; PAM type: YTN; PAM sequence: TTT
cccagtgagatcagatctag

SEQ ID NO: 365877 - DNA, 20 bp, Artificial Sequence
  Description of Artificial Sequence: Synthetic oligonucleotide
  Target: LAMA2; (+) strand; PAM type: YTN; PAM sequence: TTC
ccagtgagatcagatctagt

SEQ ID NO: 365878 - DNA, 20 bp, Artificial Sequence
  Description of Artificial Sequence: Synthetic oligonucleotide
  Target: LAMA2; (+) strand; PAM type: YTN; PAM sequence: CTA
gtccaatgtctcagcagata

SEQ ID NO: 365879 - DNA, 20 bp, Artificial Sequence
  Description of Artificial Sequence: Synthetic oligonucleotide
  Target: LAMA2; (+) strand; PAM type: YTN; PAM sequence: CTC
agcagatataggaattcctt

SEQ ID NO: 365880 - DNA, 20 bp, Artificial Sequence
  Description of Artificial Sequence: Synthetic oligonucleotide
  Target: LAMA2; (+) strand; PAM type: YTN; PAM sequence: TTC
cttttctatcaccccagaca

SEQ ID NO: 365881 - DNA, 20 bp, Artificial Sequence
  Description of Artificial Sequence: Synthetic oligonucleotide
  Target: LAMA2; (+) strand; PAM type: YTN; PAM sequence: CTT
ttctatcaccccagacaggt

SEQ ID NO: 365882 - DNA, 20 bp, Artificial Sequence
  Description of Artificial Sequence: Synthetic oligonucleotide
  Target: LAMA2; (+) strand; PAM type: YTN; PAM sequence: TTT
tctatcaccccagacaggtg

SEQ ID NO: 365883 - DNA, 20 bp, Artificial Sequence
  Description of Artificial Sequence: Synthetic oligonucleotide
  Target: LAMA2; (+) strand; PAM type: YTN; PAM sequence: TTT
ctatcaccccagacaggtgg

SEQ ID NO: 365884 - DNA, 20 bp, Artificial Sequence
  Description of Artificial Sequence: Synthetic oligonucleotide
  Target: LAMA2; (+) strand; PAM type: YTN; PAM sequence: TTC
tatcaccccagacaggtgga

SEQ ID NO: 365885 - DNA, 20 bp, Artificial Sequence
  Description of Artificial Sequence: Synthetic oligonucleotide
  Target: LAMA2; (+) strand; PAM type: YTN; PAM sequence: CTA
tcaccccagacaggtggatc

SEQ ID NO: 365886 - DNA, 20 bp, Artificial Sequence
  Description of Artificial Sequence: Synthetic oligonucleotide
  Target: LAMA2; (+) strand; PAM type: YTN; PAM sequence: CTC
tactcatgtatcttcagaga

SEQ ID NO: 365887 - DNA, 20 bp, Artificial Sequence
  Description of Artificial Sequence: Synthetic oligonucleotide
  Target: LAMA2; (+) strand; PAM type: YTN; PAM sequence: CTA
ctcatgtatcttcagagaaa

SEQ ID NO: 365888 - DNA, 20 bp, Artificial Sequence
  Description of Artificial Sequence: Synthetic oligonucleotide
  Target: LAMA2; (+) strand; PAM type: YTN; PAM sequence: CTC
atgtatcttcagagaaatgg

SEQ ID NO: 365889 - DNA, 20 bp, Artificial Sequence
  Description of Artificial Sequence: Synthetic oligonucleotide
  Target: LAMA2; (+) strand; PAM type: YTN; PAM sequence: CTT
cagagaaatggataccctac

SEQ ID NO: 365890 - DNA, 20 bp, Artificial Sequence
  Description of Artificial Sequence: Synthetic oligonucleotide
  Target: LAMA2; (+) strand; PAM type: YTN; PAM sequence: TTC
agagaaatggataccctaca

SEQ ID NO: 365891 - DNA, 20 bp, Artificial Sequence
  Description of Artificial Sequence: Synthetic oligonucleotide
  Target: LAMA2; (+) strand; PAM type: YTN; PAM sequence: CTA
caaagcagcacattccattt

SEQ ID NO: 365892 - DNA, 20 bp, Artificial Sequence
  Description of Artificial Sequence: Synthetic oligonucleotide
  Target: LAMA2; (+) strand; PAM type: YTN; PAM sequence: TTC
cattttcaacagctctagat

SEQ ID NO: 365893 - DNA, 20 bp, Artificial Sequence
  Description of Artificial Sequence: Synthetic oligonucleotide
  Target: LAMA2; (+) strand; PAM type: YTN; PAM sequence: TTT
tcaacagctctagatattat

SEQ ID NO: 365894 - DNA, 20 bp, Artificial Sequence
  Description of Artificial Sequence: Synthetic oligonucleotide
  Target: LAMA2; (+) strand; PAM type: YTN; PAM sequence: TTT
caacagctctagatattatt

SEQ ID NO: 365895 - DNA, 20 bp, Artificial Sequence
  Description of Artificial Sequence: Synthetic oligonucleotide
  Target: LAMA2; (+) strand; PAM type: YTN; PAM sequence: TTC
aacagctctagatattattt

SEQ ID NO: 365896 - DNA, 20 bp, Artificial Sequence
  Description of Artificial Sequence: Synthetic oligonucleotide
  Target: LAMA2; (+) strand; PAM type: YTN; PAM sequence: CTC
tagatattattttatttatt

SEQ ID NO: 365897 - DNA, 20 bp, Artificial Sequence
  Description of Artificial Sequence: Synthetic oligonucleotide
  Target: LAMA2; (+) strand; PAM type: YTN; PAM sequence: CTA
gatattattttatttattta

SEQ ID NO: 365898 - DNA, 20 bp, Artificial Sequence
  Description of Artificial Sequence: Synthetic oligonucleotide
  Target: LAMA2; (+) strand; PAM type: YTN; PAM sequence: TTA
ttttatttatttattttaga

SEQ ID NO: 365899 - DNA, 20 bp, Artificial Sequence
  Description of Artificial Sequence: Synthetic oligonucleotide
  Target: LAMA2; (+) strand; PAM type: YTN; PAM sequence: TTT
tatttatttattttagatga

SEQ ID NO: 365900 - DNA, 20 bp, Artificial Sequence
  Description of Artificial Sequence: Synthetic oligonucleotide
  Target: LAMA2; (+) strand; PAM type: YTN; PAM sequence: TTT
atttatttattttagatgaa

SEQ ID NO: 365901 - DNA, 20 bp, Artificial Sequence
  Description of Artificial Sequence: Synthetic oligonucleotide
  Target: LAMA2; (+) strand; PAM type: YTN; PAM sequence: TTA
tttatttattttagatgaag

SEQ ID NO: 365902 - DNA, 20 bp, Artificial Sequence
  Description of Artificial Sequence: Synthetic oligonucleotide
  Target: LAMA2; (+) strand; PAM type: YTN; PAM sequence: TTT
atttattttagatgaagttc

SEQ ID NO: 365903 - DNA, 20 bp, Artificial Sequence
  Description of Artificial Sequence: Synthetic oligonucleotide
  Target: LAMA2; (+) strand; PAM type: YTN; PAM sequence: TTA
tttattttagatgaagttct

SEQ ID NO: 365904 - DNA, 20 bp, Artificial Sequence
  Description of Artificial Sequence: Synthetic oligonucleotide
  Target: LAMA2; (+) strand; PAM type: YTN; PAM sequence: TTT
attttagatgaagttctgct

SEQ ID NO: 365905 - DNA, 20 bp, Artificial Sequence
  Description of Artificial Sequence: Synthetic oligonucleotide
  Target: LAMA2; (+) strand; PAM type: YTN; PAM sequence: TTA
ttttagatgaagttctgctg

SEQ ID NO: 365906 - DNA, 20 bp, Artificial Sequence
  Description of Artificial Sequence: Synthetic oligonucleotide
  Target: LAMA2; (+) strand; PAM type: YTN; PAM sequence: TTT
tagatgaagttctgctgtgt

SEQ ID NO: 365907 - DNA, 20 bp, Artificial Sequence
  Description of Artificial Sequence: Synthetic oligonucleotide
  Target: LAMA2; (+) strand; PAM type: YTN; PAM sequence: TTT
agatgaagttctgctgtgtt

SEQ ID NO: 365908 - DNA, 20 bp, Artificial Sequence
  Description of Artificial Sequence: Synthetic oligonucleotide
  Target: LAMA2; (+) strand; PAM type: YTN; PAM sequence: TTA
gatgaagttctgctgtgttg

SEQ ID NO: 365909 - DNA, 20 bp, Artificial Sequence
  Description of Artificial Sequence: Synthetic oligonucleotide
  Target: LAMA2; (+) strand; PAM type: YTN; PAM sequence: TTC
tgctgtgttgtccaagctgg

SEQ ID NO: 365910 - DNA, 20 bp, Artificial Sequence
  Description of Artificial Sequence: Synthetic oligonucleotide
  Target: LAMA2; (+) strand; PAM type: YTN; PAM sequence: CTG
ctgtgttgtccaagctggtc

SEQ ID NO: 365911 - DNA, 20 bp, Artificial Sequence
  Description of Artificial Sequence: Synthetic oligonucleotide
  Target: LAMA2; (+) strand; PAM type: YTN; PAM sequence: CTG
tgttgtccaagctggtctca

SEQ ID NO: 365912 - DNA, 20 bp, Artificial Sequence
  Description of Artificial Sequence: Synthetic oligonucleotide
  Target: LAMA2; (+) strand; PAM type: YTN; PAM sequence: TTG
tccaagctggtctcaaaccc

SEQ ID NO: 365913 - DNA, 20 bp, Artificial Sequence
  Description of Artificial Sequence: Synthetic oligonucleotide
  Target: LAMA2; (+) strand; PAM type: YTN; PAM sequence: CTG
gtctcaaacccctgggctca

SEQ ID NO: 365914 - DNA, 20 bp, Artificial Sequence
  Description of Artificial Sequence: Synthetic oligonucleotide
  Target: LAMA2; (+) strand; PAM type: YTN; PAM sequence: CTC
aaacccctgggctcaagcaa

SEQ ID NO: 365915 - DNA, 20 bp, Artificial Sequence
  Description of Artificial Sequence: Synthetic oligonucleotide
  Target: LAMA2; (+) strand; PAM type: YTN; PAM sequence: CTG
ggctcaagcaatcctcctgc

SEQ ID NO: 365916 - DNA, 20 bp, Artificial Sequence
  Description of Artificial Sequence: Synthetic oligonucleotide
  Target: LAMA2; (+) strand; PAM type: YTN; PAM sequence: CTC
aagcaatcctcctgcctcag

SEQ ID NO: 365917 - DNA, 20 bp, Artificial Sequence
  Description of Artificial Sequence: Synthetic oligonucleotide
  Target: LAMA2; (+) strand; PAM type: YTN; PAM sequence: CTC
ctgcctcagcctcccaagta

SEQ ID NO: 365918 - DNA, 20 bp, Artificial Sequence
  Description of Artificial Sequence: Synthetic oligonucleotide
  Target: LAMA2; (+) strand; PAM type: YTN; PAM sequence: CTG
cctcagcctcccaagtagct

SEQ ID NO: 365919 - DNA, 20 bp, Artificial Sequence
  Description of Artificial Sequence: Synthetic oligonucleotide
  Target: LAMA2; (+) strand; PAM type: YTN; PAM sequence: CTC
agcctcccaagtagctggaa

SEQ ID NO: 365920 - DNA, 20 bp, Artificial Sequence
  Description of Artificial Sequence: Synthetic oligonucleotide
  Target: LAMA2; (+) strand; PAM type: YTN; PAM sequence: CTC
ccaagtagctggaattatag

SEQ ID NO: 365921 - DNA, 20 bp, Artificial Sequence
  Description of Artificial Sequence: Synthetic oligonucleotide
  Target: LAMA2; (+) strand; PAM type: YTN; PAM sequence: CTG
gaattatagttgtgtgccac

SEQ ID NO: 365922 - DNA, 20 bp, Artificial Sequence
  Description of Artificial Sequence: Synthetic oligonucleotide
  Target: LAMA2; (+) strand; PAM type: YTN; PAM sequence: TTA
tagttgtgtgccactgcatc

SEQ ID NO: 365923 - DNA, 20 bp, Artificial Sequence
  Description of Artificial Sequence: Synthetic oligonucleotide
  Target: LAMA2; (+) strand; PAM type: YTN; PAM sequence: TTG
tgtgccactgcatctagctc

SEQ ID NO: 365924 - DNA, 20 bp, Artificial Sequence
  Description of Artificial Sequence: Synthetic oligonucleotide
  Target: LAMA2; (+) strand; PAM type: YTN; PAM sequence: CTG
catctagctccagattttag

SEQ ID NO: 365925 - DNA, 20 bp, Artificial Sequence
  Description of Artificial Sequence: Synthetic oligonucleotide
  Target: LAMA2; (+) strand; PAM type: YTN; PAM sequence: CTA
gctccagattttagaagtta

SEQ ID NO: 365926 - DNA, 20 bp, Artificial Sequence
  Description of Artificial Sequence: Synthetic oligonucleotide
  Target: LAMA2; (+) strand; PAM type: YTN; PAM sequence: CTC
cagattttagaagttaattc

SEQ ID NO: 365927 - DNA, 20 bp, Artificial Sequence
  Description of Artificial Sequence: Synthetic oligonucleotide
  Target: LAMA2; (+) strand; PAM type: YTN; PAM sequence: TTT
tagaagttaattcttacaca

SEQ ID NO: 365928 - DNA, 20 bp, Artificial Sequence
  Description of Artificial Sequence: Synthetic oligonucleotide
  Target: LAMA2; (+) strand; PAM type: YTN; PAM sequence: TTT
agaagttaattcttacacag

SEQ ID NO: 365929 - DNA, 20 bp, Artificial Sequence
  Description of Artificial Sequence: Synthetic oligonucleotide
  Target: LAMA2; (+) strand; PAM type: YTN; PAM sequence: TTA
gaagttaattcttacacagg

SEQ ID NO: 365930 - DNA, 20 bp, Artificial Sequence
  Description of Artificial Sequence: Synthetic oligonucleotide
  Target: LAMA2; (+) strand; PAM type: YTN; PAM sequence: TTA
attcttacacagggttttct

SEQ ID NO: 365931 - DNA, 20 bp, Artificial Sequence
  Description of Artificial Sequence: Synthetic oligonucleotide
  Target: LAMA2; (+) strand; PAM type: YTN; PAM sequence: TTC
ttacacagggttttctggag

SEQ ID NO: 365932 - DNA, 20 bp, Artificial Sequence
  Description of Artificial Sequence: Synthetic oligonucleotide
  Target: LAMA2; (+) strand; PAM type: YTN; PAM sequence: CTT
acacagggttttctggaggg

SEQ ID NO: 365933 - DNA, 20 bp, Artificial Sequence
  Description of Artificial Sequence: Synthetic oligonucleotide
  Target: LAMA2; (+) strand; PAM type: YTN; PAM sequence: TTA
cacagggttttctggaggga

SEQ ID NO: 365934 - DNA, 20 bp, Artificial Sequence
  Description of Artificial Sequence: Synthetic oligonucleotide
  Target: LAMA2; (+) strand; PAM type: YTN; PAM sequence: TTT
tctggagggacagaactaat

SEQ ID NO: 365935 - DNA, 20 bp, Artificial Sequence
  Description of Artificial Sequence: Synthetic oligonucleotide
  Target: LAMA2; (+) strand; PAM type: YTN; PAM sequence: TTT
ctggagggacagaactaata

SEQ ID NO: 365936 - DNA, 20 bp, Artificial Sequence
  Description of Artificial Sequence: Synthetic oligonucleotide
  Target: LAMA2; (+) strand; PAM type: YTN; PAM sequence: TTC
tggagggacagaactaatag

SEQ ID NO: 365937 - DNA, 20 bp, Artificial Sequence
  Description of Artificial Sequence: Synthetic oligonucleotide
  Target: LAMA2; (+) strand; PAM type: YTN; PAM sequence: CTG
gagggacagaactaatagga

SEQ ID NO: 365938 - DNA, 20 bp, Artificial Sequence
  Description of Artificial Sequence: Synthetic oligonucleotide
  Target: LAMA2; (+) strand; PAM type: YTN; PAM sequence: CTA
ataggattgatgtatatatg

SEQ ID NO: 365939 - DNA, 20 bp, Artificial Sequence
  Description of Artificial Sequence: Synthetic oligonucleotide
  Target: LAMA2; (+) strand; PAM type: YTN; PAM sequence: TTG
atgtatatatgaaggggagt

SEQ ID NO: 365940 - DNA, 20 bp, Artificial Sequence
  Description of Artificial Sequence: Synthetic oligonucleotide
  Target: LAMA2; (+) strand; PAM type: YTN; PAM sequence: TTT
gttaggagaattggctcaca

SEQ ID NO: 365941 - DNA, 20 bp, Artificial Sequence
  Description of Artificial Sequence: Synthetic oligonucleotide
  Target: LAMA2; (+) strand; PAM type: YTN; PAM sequence: TTG
ttaggagaattggctcacat

SEQ ID NO: 365942 - DNA, 20 bp, Artificial Sequence
  Description of Artificial Sequence: Synthetic oligonucleotide
  Target: LAMA2; (+) strand; PAM type: YTN; PAM sequence: TTA
ggagaattggctcacatgat

SEQ ID NO: 365943 - DNA, 20 bp, Artificial Sequence
  Description of Artificial Sequence: Synthetic oligonucleotide
  Target: LAMA2; (+) strand; PAM type: YTN; PAM sequence: TTG
gctcacatgatcacaaggtg

SEQ ID NO: 365944 - DNA, 20 bp, Artificial Sequence
  Description of Artificial Sequence: Synthetic oligonucleotide
  Target: LAMA2; (+) strand; PAM type: YTN; PAM sequence: CTC
acatgatcacaaggtgaagt

SEQ ID NO: 365945 - DNA, 20 bp, Artificial Sequence
  Description of Artificial Sequence: Synthetic oligonucleotide
  Target: LAMA2; (+) strand; PAM type: YTN; PAM sequence: CTG
caagctgagtagcaagaaag

SEQ ID NO: 365946 - DNA, 20 bp, Artificial Sequence
  Description of Artificial Sequence: Synthetic oligonucleotide
  Target: LAMA2; (+) strand; PAM type: YTN; PAM sequence: CTG
agtagcaagaaagccagttc

SEQ ID NO: 365947 - DNA, 20 bp, Artificial Sequence
  Description of Artificial Sequence: Synthetic oligonucleotide
  Target: LAMA2; (+) strand; PAM type: YTN; PAM sequence: TTC
gattcccagaacctcaaaat

SEQ ID NO: 365948 - DNA, 20 bp, Artificial Sequence
  Description of Artificial Sequence: Synthetic oligonucleotide
  Target: LAMA2; (+) strand; PAM type: YTN; PAM sequence: TTC
ccagaacctcaaaattaggg

SEQ ID NO: 365949 - DNA, 20 bp, Artificial Sequence
  Description of Artificial Sequence: Synthetic oligonucleotide
  Target: LAMA2; (+) strand; PAM type: YTN; PAM sequence: CTC
aaaattagggaagccagcgg

SEQ ID NO: 365950 - DNA, 20 bp, Artificial Sequence
  Description of Artificial Sequence: Synthetic oligonucleotide
  Target: LAMA2; (+) strand; PAM type: YTN; PAM sequence: TTA
gggaagccagcggtgcagcc

SEQ ID NO: 365951 - DNA, 20 bp, Artificial Sequence
  Description of Artificial Sequence: Synthetic oligonucleotide
  Target: LAMA2; (+) strand; PAM type: YTN; PAM sequence: CTT
cagtctgtggccgaaggccc

SEQ ID NO: 365952 - DNA, 20 bp, Artificial Sequence
  Description of Artificial Sequence: Synthetic oligonucleotide
  Target: LAMA2; (+) strand; PAM type: YTN; PAM sequence: TTC
agtctgtggccgaaggcccg

SEQ ID NO: 365953 - DNA, 20 bp, Artificial Sequence
  Description of Artificial Sequence: Synthetic oligonucleotide
  Target: LAMA2; (+) strand; PAM type: YTN; PAM sequence: CTG
tggccgaaggcccgagagcc

SEQ ID NO: 365954 - DNA, 20 bp, Artificial Sequence
  Description of Artificial Sequence: Synthetic oligonucleotide
  Target: LAMA2; (+) strand; PAM type: YTN; PAM sequence: TTA
ctggtgtaagtgcaagggtc

SEQ ID NO: 365955 - DNA, 20 bp, Artificial Sequence
  Description of Artificial Sequence: Synthetic oligonucleotide
  Target: LAMA2; (+) strand; PAM type: YTN; PAM sequence: CTG
gtgtaagtgcaagggtccaa

SEQ ID NO: 365956 - DNA, 20 bp, Artificial Sequence
  Description of Artificial Sequence: Synthetic oligonucleotide
  Target: LAMA2; (+) strand; PAM type: YTN; PAM sequence: CTG
aaaaacttggaatctgatgt

SEQ ID NO: 365957 - DNA, 20 bp, Artificial Sequence
  Description of Artificial Sequence: Synthetic oligonucleotide
  Target: LAMA2; (+) strand; PAM type: YTN; PAM sequence: CTT
ggaatctgatgttcaagggc

SEQ ID NO: 365958 - DNA, 20 bp, Artificial Sequence
  Description of Artificial Sequence: Synthetic oligonucleotide
  Target: LAMA2; (+) strand; PAM type: YTN; PAM sequence: TTG
gaatctgatgttcaagggca

SEQ ID NO: 365959 - DNA, 20 bp, Artificial Sequence
  Description of Artificial Sequence: Synthetic oligonucleotide
  Target: LAMA2; (+) strand; PAM type: YTN; PAM sequence: CTG
atgttcaagggcaggaagca

SEQ ID NO: 365960 - DNA, 20 bp, Artificial Sequence
  Description of Artificial Sequence: Synthetic oligonucleotide
  Target: LAMA2; (+) strand; PAM type: YTN; PAM sequence: TTC
aagggcaggaagcatccggc

SEQ ID NO: 365961 - DNA, 20 bp, Artificial Sequence
  Description of Artificial Sequence: Synthetic oligonucleotide
  Target: LAMA2; (+) strand; PAM type: YTN; PAM sequence: CTA
gaagactgcgcaattctaga

SEQ ID NO: 365962 - DNA, 20 bp, Artificial Sequence
  Description of Artificial Sequence: Synthetic oligonucleotide
  Target: LAMA2; (+) strand; PAM type: YTN; PAM sequence: CTG
cgcaattctagaccttccac

SEQ ID NO: 365963 - DNA, 20 bp, Artificial Sequence
  Description of Artificial Sequence: Synthetic oligonucleotide
  Target: LAMA2; (+) strand; PAM type: YTN; PAM sequence: TTC
tagaccttccacgttctcct

SEQ ID NO: 365964 - DNA, 20 bp, Artificial Sequence
  Description of Artificial Sequence: Synthetic oligonucleotide
  Target: LAMA2; (+) strand; PAM type: YTN; PAM sequence: CTA
gaccttccacgttctcctgc

SEQ ID NO: 365965 - DNA, 20 bp, Artificial Sequence
  Description of Artificial Sequence: Synthetic oligonucleotide
  Target: LAMA2; (+) strand; PAM type: YTN; PAM sequence: CTT
ccacgttctcctgcctgctt

SEQ ID NO: 365966 - DNA, 20 bp, Artificial Sequence
  Description of Artificial Sequence: Synthetic oligonucleotide
  Target: LAMA2; (+) strand; PAM type: YTN; PAM sequence: TTC
cacgttctcctgcctgcttt

SEQ ID NO: 365967 - DNA, 20 bp, Artificial Sequence
  Description of Artificial Sequence: Synthetic oligonucleotide
  Target: LAMA2; (+) strand; PAM type: YTN; PAM sequence: TTC
tcctgcctgctttatcctag

SEQ ID NO: 365968 - DNA, 20 bp, Artificial Sequence
  Description of Artificial Sequence: Synthetic oligonucleotide
  Target: LAMA2; (+) strand; PAM type: YTN; PAM sequence: CTC
ctgcctgctttatcctagcc

SEQ ID NO: 365969 - DNA, 20 bp, Artificial Sequence
  Description of Artificial Sequence: Synthetic oligonucleotide
  Target: LAMA2; (+) strand; PAM type: YTN; PAM sequence: CTG
cctgctttatcctagccacg

SEQ ID NO: 365970 - DNA, 20 bp, Artificial Sequence
  Description of Artificial Sequence: Synthetic oligonucleotide
  Target: LAMA2; (+) strand; PAM type: YTN; PAM sequence: CTG
ctttatcctagccacgctgg

SEQ ID NO: 365971 - DNA, 20 bp, Artificial Sequence
  Description of Artificial Sequence: Synthetic oligonucleotide
  Target: LAMA2; (+) strand; PAM type: YTN; PAM sequence: CTT
tatcctagccacgctggcag

SEQ ID NO: 365972 - DNA, 20 bp, Artificial Sequence
  Description of Artificial Sequence: Synthetic oligonucleotide
  Target: LAMA2; (+) strand; PAM type: YTN; PAM sequence: TTT
atcctagccacgctggcagc

SEQ ID NO: 365973 - DNA, 20 bp, Artificial Sequence
  Description of Artificial Sequence: Synthetic oligonucleotide
  Target: LAMA2; (+) strand; PAM type: YTN; PAM sequence: TTA
tcctagccacgctggcagct

SEQ ID NO: 365974 - DNA, 20 bp, Artificial Sequence
  Description of Artificial Sequence: Synthetic oligonucleotide
  Target: LAMA2; (+) strand; PAM type: YTN; PAM sequence: CTA
gccacgctggcagctgatta

SEQ ID NO: 365975 - DNA, 20 bp, Artificial Sequence
  Description of Artificial Sequence: Synthetic oligonucleotide
  Target: LAMA2; (+) strand; PAM type: YTN; PAM sequence: CTG
gcagctgattaaatggtgcc

SEQ ID NO: 365976 - DNA, 20 bp, Artificial Sequence
  Description of Artificial Sequence: Synthetic oligonucleotide
  Target: LAMA2; (+) strand; PAM type: YTN; PAM sequence: CTG
attaaatggtgcctacccag

SEQ ID NO: 365977 - DNA, 20 bp, Artificial Sequence
  Description of Artificial Sequence: Synthetic oligonucleotide
  Target: LAMA2; (+) strand; PAM type: YTN; PAM sequence: TTA
aatggtgcctacccagaatg

SEQ ID NO: 365978 - DNA, 20 bp, Artificial Sequence
  Description of Artificial Sequence: Synthetic oligonucleotide
  Target: LAMA2; (+) strand; PAM type: YTN; PAM sequence: CTA
cccagaatgagggtggttct

SEQ ID NO: 365979 - DNA, 20 bp, Artificial Sequence
  Description of Artificial Sequence: Synthetic oligonucleotide
  Target: LAMA2; (+) strand; PAM type: YTN; PAM sequence: TTC
tgtctttcccagccctctga

SEQ ID NO: 365980 - DNA, 20 bp, Artificial Sequence
  Description of Artificial Sequence: Synthetic oligonucleotide
  Target: LAMA2; (+) strand; PAM type: YTN; PAM sequence: CTG
tctttcccagccctctgact

SEQ ID NO: 365981 - DNA, 20 bp, Artificial Sequence
  Description of Artificial Sequence: Synthetic oligonucleotide
  Target: LAMA2; (+) strand; PAM type: YTN; PAM sequence: CTT
tcccagccctctgactcaaa

SEQ ID NO: 365982 - DNA, 20 bp, Artificial Sequence
  Description of Artificial Sequence: Synthetic oligonucleotide
  Target: LAMA2; (+) strand; PAM type: YTN; PAM sequence: TTT
cccagccctctgactcaaat

SEQ ID NO: 365983 - DNA, 20 bp, Artificial Sequence
  Description of Artificial Sequence: Synthetic oligonucleotide
  Target: LAMA2; (+) strand; PAM type: YTN; PAM sequence: TTC
ccagccctctgactcaaatg

SEQ ID NO: 365984 - DNA, 20 bp, Artificial Sequence
  Description of Artificial Sequence: Synthetic oligonucleotide
  Target: LAMA2; (+) strand; PAM type: YTN; PAM sequence: CTC
tgactcaaatgttaatctcc

SEQ ID NO: 365985 - DNA, 20 bp, Artificial Sequence
  Description of Artificial Sequence: Synthetic oligonucleotide
  Target: LAMA2; (+) strand; PAM type: YTN; PAM sequence: CTG
actcaaatgttaatctcctt

SEQ ID NO: 365986 - DNA, 20 bp, Artificial Sequence
  Description of Artificial Sequence: Synthetic oligonucleotide
  Target: LAMA2; (+) strand; PAM type: YTN; PAM sequence: CTC
aaatgttaatctcctttggc

SEQ ID NO: 365987 - DNA, 20 bp, Artificial Sequence
  Description of Artificial Sequence: Synthetic oligonucleotide
  Target: LAMA2; (+) strand; PAM type: YTN; PAM sequence: TTA
atctcctttggcaacaccct

SEQ ID NO: 365988 - DNA, 20 bp, Artificial Sequence
  Description of Artificial Sequence: Synthetic oligonucleotide
  Target: LAMA2; (+) strand; PAM type: YTN; PAM sequence: CTC
ctttggcaacaccctcacag

SEQ ID NO: 365989 - DNA, 20 bp, Artificial Sequence
  Description of Artificial Sequence: Synthetic oligonucleotide
  Target: LAMA2; (+) strand; PAM type: YTN; PAM sequence: CTT
tggcaacaccctcacagaca

SEQ ID NO: 365990 - DNA, 20 bp, Artificial Sequence
  Description of Artificial Sequence: Synthetic oligonucleotide
  Target: LAMA2; (+) strand; PAM type: YTN; PAM sequence: TTT
ggcaacaccctcacagacac

SEQ ID NO: 365991 - DNA, 20 bp, Artificial Sequence
  Description of Artificial Sequence: Synthetic oligonucleotide
  Target: LAMA2; (+) strand; PAM type: YTN; PAM sequence: TTG
gcaacaccctcacagacaca

SEQ ID NO: 365992 - DNA, 20 bp, Artificial Sequence
  Description of Artificial Sequence: Synthetic oligonucleotide
  Target: LAMA2; (+) strand; PAM type: YTN; PAM sequence: CTC
acagacacactcaggtacaa

SEQ ID NO: 365993 - DNA, 20 bp, Artificial Sequence
  Description of Artificial Sequence: Synthetic oligonucleotide
  Target: LAMA2; (+) strand; PAM type: YTN; PAM sequence: CTC
aggtacaatactttgcatac

SEQ ID NO: 365994 - DNA, 20 bp, Artificial Sequence
  Description of Artificial Sequence: Synthetic oligonucleotide
  Target: LAMA2; (+) strand; PAM type: YTN; PAM sequence: CTT
tgcatacttcagtcaagtag

SEQ ID NO: 365995 - DNA, 20 bp, Artificial Sequence
  Description of Artificial Sequence: Synthetic oligonucleotide
  Target: LAMA2; (+) strand; PAM type: YTN; PAM sequence: TTT
gcatacttcagtcaagtaga

SEQ ID NO: 365996 - DNA, 20 bp, Artificial Sequence
  Description of Artificial Sequence: Synthetic oligonucleotide
  Target: LAMA2; (+) strand; PAM type: YTN; PAM sequence: TTG
catacttcagtcaagtagac

SEQ ID NO: 365997 - DNA, 20 bp, Artificial Sequence
  Description of Artificial Sequence: Synthetic oligonucleotide
  Target: LAMA2; (+) strand; PAM type: YTN; PAM sequence: CTT
cagtcaagtagacagtcaat

SEQ ID NO: 365998 - DNA, 20 bp, Artificial Sequence
  Description of Artificial Sequence: Synthetic oligonucleotide
  Target: LAMA2; (+) strand; PAM type: YTN; PAM sequence: TTC
agtcaagtagacagtcaata

SEQ ID NO: 365999 - DNA, 20 bp, Artificial Sequence
  Description of Artificial Sequence: Synthetic oligonucleotide
  Target: LAMA2; (+) strand; PAM type: YTN; PAM sequence: TTA
atcaccacattctccaacgc

SEQ ID NO: 366000 - DNA, 20 bp, Artificial Sequence
  Description of Artificial Sequence: Synthetic oligonucleotide
  Target: LAMA2; (+) strand; PAM type: YTN; PAM sequence: TTC
tccaacgctttctcatacag

SEQ ID NO: 366001 - DNA, 20 bp, Artificial Sequence
  Description of Artificial Sequence: Synthetic oligonucleotide
  Target: LAMA2; (+) strand; PAM type: YTN; PAM sequence: CTC
caacgctttctcatacaggt

SEQ ID NO: 366002 - DNA, 20 bp, Artificial Sequence
  Description of Artificial Sequence: Synthetic oligonucleotide
  Target: LAMA2; (+) strand; PAM type: YTN; PAM sequence: CTT
tctcatacaggttctatttc

SEQ ID NO: 366003 - DNA, 20 bp, Artificial Sequence
  Description of Artificial Sequence: Synthetic oligonucleotide
  Target: LAMA2; (+) strand; PAM type: YTN; PAM sequence: TTT
ctcatacaggttctatttct

SEQ ID NO: 366004 - DNA, 20 bp, Artificial Sequence
  Description of Artificial Sequence: Synthetic oligonucleotide
  Target: LAMA2; (+) strand; PAM type: YTN; PAM sequence: TTC
tcatacaggttctatttctc

SEQ ID NO: 366005 - DNA, 20 bp, Artificial Sequence
  Description of Artificial Sequence: Synthetic oligonucleotide
  Target: LAMA2; (+) strand; PAM type: YTN; PAM sequence: CTC
atacaggttctatttctcca

SEQ ID NO: 366006 - DNA, 20 bp, Artificial Sequence
  Description of Artificial Sequence: Synthetic oligonucleotide
  Target: LAMA2; (+) strand; PAM type: YTN; PAM sequence: TTC
tatttctccactatgaacag

SEQ ID NO: 366007 - DNA, 20 bp, Artificial Sequence
  Description of Artificial Sequence: Synthetic oligonucleotide
  Target: LAMA2; (+) strand; PAM type: YTN; PAM sequence: CTA
tttctccactatgaacagtg

SEQ ID NO: 366008 - DNA, 20 bp, Artificial Sequence
  Description of Artificial Sequence: Synthetic oligonucleotide
  Target: LAMA2; (+) strand; PAM type: YTN; PAM sequence: TTT
ctccactatgaacagtgaga

SEQ ID NO: 366009 - DNA, 20 bp, Artificial Sequence
  Description of Artificial Sequence: Synthetic oligonucleotide
  Target: LAMA2; (+) strand; PAM type: YTN; PAM sequence: TTC
tccactatgaacagtgagat

SEQ ID NO: 366010 - DNA, 20 bp, Artificial Sequence
  Description of Artificial Sequence: Synthetic oligonucleotide
  Target: LAMA2; (+) strand; PAM type: YTN; PAM sequence: CTC
cactatgaacagtgagattt

SEQ ID NO: 366011 - DNA, 20 bp, Artificial Sequence
  Description of Artificial Sequence: Synthetic oligonucleotide
  Target: LAMA2; (+) strand; PAM type: YTN; PAM sequence: CTA
tgaacagtgagatttttttt

SEQ ID NO: 366012 - DNA, 20 bp, Artificial Sequence
  Description of Artificial Sequence: Synthetic oligonucleotide
  Target: LAMA2; (+) strand; PAM type: YTN; PAM sequence: TTT
tttttctggtatacttgata

SEQ ID NO: 366013 - DNA, 20 bp, Artificial Sequence
  Description of Artificial Sequence: Synthetic oligonucleotide
  Target: LAMA2; (+) strand; PAM type: YTN; PAM sequence: TTT
ttttctggtatacttgatag

SEQ ID NO: 366014 - DNA, 20 bp, Artificial Sequence
  Description of Artificial Sequence: Synthetic oligonucleotide
  Target: LAMA2; (+) strand; PAM type: YTN; PAM sequence: TTT
tttctggtatacttgatagg

SEQ ID NO: 366015 - DNA, 20 bp, Artificial Sequence
  Description of Artificial Sequence: Synthetic oligonucleotide
  Target: LAMA2; (+) strand; PAM type: YTN; PAM sequence: TTT
ttctggtatacttgataggc

SEQ ID NO: 366016 - DNA, 20 bp, Artificial Sequence
  Description of Artificial Sequence: Synthetic oligonucleotide
  Target: LAMA2; (+) strand; PAM type: YTN; PAM sequence: TTT
tctggtatacttgataggcc

SEQ ID NO: 366017 - DNA, 20 bp, Artificial Sequence
  Description of Artificial Sequence: Synthetic oligonucleotide
  Target: LAMA2; (+) strand; PAM type: YTN; PAM sequence: TTT
ctggtatacttgataggcct

SEQ ID NO: 366018 - DNA, 20 bp, Artificial Sequence
  Description of Artificial Sequence: Synthetic oligonucleotide
  Target: LAMA2; (+) strand; PAM type: YTN; PAM sequence: TTC
tggtatacttgataggcctt

SEQ ID NO: 366019 - DNA, 20 bp, Artificial Sequence
  Description of Artificial Sequence: Synthetic oligonucleotide
  Target: LAMA2; (+) strand; PAM type: YTN; PAM sequence: CTG
gtatacttgataggccttca

SEQ ID NO: 366020 - DNA, 20 bp, Artificial Sequence
  Description of Artificial Sequence: Synthetic oligonucleotide
  Target: LAMA2; (+) strand; PAM type: YTN; PAM sequence: CTT
gataggccttcaaatgttcc

SEQ ID NO: 366021 - DNA, 20 bp, Artificial Sequence
  Description of Artificial Sequence: Synthetic oligonucleotide
  Target: LAMA2; (+) strand; PAM type: YTN; PAM sequence: TTG
ataggccttcaaatgttcca

SEQ ID NO: 366022 - DNA, 20 bp, Artificial Sequence
  Description of Artificial Sequence: Synthetic oligonucleotide
  Target: LAMA2; (+) strand; PAM type: YTN; PAM sequence: CTT
caaatgttccaagaaaacaa

SEQ ID NO: 366023 - DNA, 20 bp, Artificial Sequence
  Description of Artificial Sequence: Synthetic oligonucleotide
  Target: LAMA2; (+) strand; PAM type: YTN; PAM sequence: TTC
aaatgttccaagaaaacaat

SEQ ID NO: 366024 - DNA, 20 bp, Artificial Sequence
  Description of Artificial Sequence: Synthetic oligonucleotide
  Target: LAMA2; (+) strand; PAM type: YTN; PAM sequence: TTC
caagaaaacaatcatgcttt

SEQ ID NO: 366025 - DNA, 20 bp, Artificial Sequence
  Description of Artificial Sequence: Synthetic oligonucleotide
  Target: LAMA2; (+) strand; PAM type: YTN; PAM sequence: CTT
ttcctaagtcttctcttttt

SEQ ID NO: 366026 - DNA, 20 bp, Artificial Sequence
  Description of Artificial Sequence: Synthetic oligonucleotide
  Target: LAMA2; (+) strand; PAM type: YTN; PAM sequence: TTT
tcctaagtcttctcttttta

SEQ ID NO: 366027 - DNA, 20 bp, Artificial Sequence
  Description of Artificial Sequence: Synthetic oligonucleotide
  Target: LAMA2; (+) strand; PAM type: YTN; PAM sequence: TTT
cctaagtcttctctttttaa

SEQ ID NO: 366028 - DNA, 20 bp, Artificial Sequence
  Description of Artificial Sequence: Synthetic oligonucleotide
  Target: LAMA2; (+) strand; PAM type: YTN; PAM sequence: TTC
ctaagtcttctctttttaaa

SEQ ID NO: 366029 - DNA, 20 bp, Artificial Sequence
  Description of Artificial Sequence: Synthetic oligonucleotide
  Target: LAMA2; (+) strand; PAM type: YTN; PAM sequence: CTA
agtcttctctttttaaatac

SEQ ID NO: 366030 - DNA, 20 bp, Artificial Sequence
  Description of Artificial Sequence: Synthetic oligonucleotide
  Target: LAMA2; (+) strand; PAM type: YTN; PAM sequence: CTT
ctctttttaaatactcccat

SEQ ID NO: 366031 - DNA, 20 bp, Artificial Sequence
  Description of Artificial Sequence: Synthetic oligonucleotide
  Target: LAMA2; (+) strand; PAM type: YTN; PAM sequence: TTC
tctttttaaatactcccatt

SEQ ID NO: 366032 - DNA, 20 bp, Artificial Sequence
  Description of Artificial Sequence: Synthetic oligonucleotide
  Target: LAMA2; (+) strand; PAM type: YTN; PAM sequence: CTC
tttttaaatactcccattac

SEQ ID NO: 366033 - DNA, 20 bp, Artificial Sequence
  Description of Artificial Sequence: Synthetic oligonucleotide
  Target: LAMA2; (+) strand; PAM type: YTN; PAM sequence: CTT
tttaaatactcccattacct

SEQ ID NO: 366034 - DNA, 20 bp, Artificial Sequence
  Description of Artificial Sequence: Synthetic oligonucleotide
  Target: LAMA2; (+) strand; PAM type: YTN; PAM sequence: TTT
ttaaatactcccattacctt

SEQ ID NO: 366035 - DNA, 20 bp, Artificial Sequence
  Description of Artificial Sequence: Synthetic oligonucleotide
  Target: LAMA2; (+) strand; PAM type: YTN; PAM sequence: TTT
taaatactcccattaccttt

SEQ ID NO: 366036 - DNA, 20 bp, Artificial Sequence
  Description of Artificial Sequence: Synthetic oligonucleotide
  Target: LAMA2; (+) strand; PAM type: YTN; PAM sequence: TTT
aaatactcccattacctttc

SEQ ID NO: 366037 - DNA, 20 bp, Artificial Sequence
  Description of Artificial Sequence: Synthetic oligonucleotide
  Target: LAMA2; (+) strand; PAM type: YTN; PAM sequence: TTA
aatactcccattacctttcc

SEQ ID NO: 366038 - DNA, 20 bp, Artificial Sequence
  Description of Artificial Sequence: Synthetic oligonucleotide
  Target: LAMA2; (+) strand; PAM type: YTN; PAM sequence: CTC
ccattacctttccaaacctt

SEQ ID NO: 366039 - DNA, 20 bp, Artificial Sequence
  Description of Artificial Sequence: Synthetic oligonucleotide
  Target: LAMA2; (+) strand; PAM type: YTN; PAM sequence: TTA
cctttccaaaccttttgttc

SEQ ID NO: 366040 - DNA, 20 bp, Artificial Sequence
  Description of Artificial Sequence: Synthetic oligonucleotide
  Target: LAMA2; (+) strand; PAM type: YTN; PAM sequence: CTT
tccaaaccttttgttcagct

SEQ ID NO: 366041 - DNA, 20 bp, Artificial Sequence
  Description of Artificial Sequence: Synthetic oligonucleotide
  Target: LAMA2; (+) strand; PAM type: YTN; PAM sequence: TTT
ccaaaccttttgttcagctg

SEQ ID NO: 366042 - DNA, 20 bp, Artificial Sequence
  Description of Artificial Sequence: Synthetic oligonucleotide
  Target: LAMA2; (+) strand; PAM type: YTN; PAM sequence: TTC
caaaccttttgttcagctgt

SEQ ID NO: 366043 - DNA, 20 bp, Artificial Sequence
  Description of Artificial Sequence: Synthetic oligonucleotide
  Target: LAMA2; (+) strand; PAM type: YTN; PAM sequence: CTT
ttgttcagctgttgggacca

SEQ ID NO: 366044 - DNA, 20 bp, Artificial Sequence
  Description of Artificial Sequence: Synthetic oligonucleotide
  Target: LAMA2; (+) strand; PAM type: YTN; PAM sequence: TTT
tgttcagctgttgggaccat

SEQ ID NO: 366045 - DNA, 20 bp, Artificial Sequence
  Description of Artificial Sequence: Synthetic oligonucleotide
  Target: LAMA2; (+) strand; PAM type: YTN; PAM sequence: TTT
gttcagctgttgggaccatc

SEQ ID NO: 366046 - DNA, 20 bp, Artificial Sequence
  Description of Artificial Sequence: Synthetic oligonucleotide
  Target: LAMA2; (+) strand; PAM type: YTN; PAM sequence: TTG
ttcagctgttgggaccatca

SEQ ID NO: 366047 - DNA, 20 bp, Artificial Sequence
  Description of Artificial Sequence: Synthetic oligonucleotide
  Target: LAMA2; (+) strand; PAM type: YTN; PAM sequence: TTC
agctgttgggaccatcaaca

SEQ ID NO: 366048 - DNA, 20 bp, Artificial Sequence
  Description of Artificial Sequence: Synthetic oligonucleotide
  Target: LAMA2; (+) strand; PAM type: YTN; PAM sequence: CTG
ttgggaccatcaacatcctg

SEQ ID NO: 366049 - DNA, 20 bp, Artificial Sequence
  Description of Artificial Sequence: Synthetic oligonucleotide
  Target: LAMA2; (+) strand; PAM type: YTN; PAM sequence: TTG
ggaccatcaacatcctggtc

SEQ ID NO: 366050 - DNA, 20 bp, Artificial Sequence
  Description of Artificial Sequence: Synthetic oligonucleotide
  Target: LAMA2; (+) strand; PAM type: YTN; PAM sequence: CTG
gtcacacctctatggatgaa

SEQ ID NO: 366051 - DNA, 20 bp, Artificial Sequence
  Description of Artificial Sequence: Synthetic oligonucleotide
  Target: LAMA2; (+) strand; PAM type: YTN; PAM sequence: CTC
tatggatgaagtctaatttg

SEQ ID NO: 366052 - DNA, 20 bp, Artificial Sequence
  Description of Artificial Sequence: Synthetic oligonucleotide
  Target: LAMA2; (+) strand; PAM type: YTN; PAM sequence: CTA
tggatgaagtctaatttgtc

SEQ ID NO: 366053 - DNA, 20 bp, Artificial Sequence
  Description of Artificial Sequence: Synthetic oligonucleotide
  Target: LAMA2; (+) strand; PAM type: YTN; PAM sequence: CTA
atttgtcaactactctctta

SEQ ID NO: 366054 - DNA, 20 bp, Artificial Sequence
  Description of Artificial Sequence: Synthetic oligonucleotide
  Target: LAMA2; (+) strand; PAM type: YTN; PAM sequence: TTT
gtcaactactctcttaaatg

SEQ ID NO: 366055 - DNA, 20 bp, Artificial Sequence
  Description of Artificial Sequence: Synthetic oligonucleotide
  Target: LAMA2; (+) strand; PAM type: YTN; PAM sequence: TTG
tcaactactctcttaaatgg

SEQ ID NO: 366056 - DNA, 20 bp, Artificial Sequence
  Description of Artificial Sequence: Synthetic oligonucleotide
  Target: LAMA2; (+) strand; PAM type: YTN; PAM sequence: CTA
ctctcttaaatggtggtgtc

SEQ ID NO: 366057 - DNA, 20 bp, Artificial Sequence
  Description of Artificial Sequence: Synthetic oligonucleotide
  Target: LAMA2; (+) strand; PAM type: YTN; PAM sequence: CTC
tcttaaatggtggtgtcatg

SEQ ID NO: 366058 - DNA, 20 bp, Artificial Sequence
  Description of Artificial Sequence: Synthetic oligonucleotide
  Target: LAMA2; (+) strand; PAM type: YTN; PAM sequence: CTC
ttaaatggtggtgtcatgaa

SEQ ID NO: 366059 - DNA, 20 bp, Artificial Sequence
  Description of Artificial Sequence: Synthetic oligonucleotide
  Target: LAMA2; (+) strand; PAM type: YTN; PAM sequence: CTT
aaatggtggtgtcatgaatt

SEQ ID NO: 366060 - DNA, 20 bp, Artificial Sequence
  Description of Artificial Sequence: Synthetic oligonucleotide
  Target: LAMA2; (+) strand; PAM type: YTN; PAM sequence: TTA
aatggtggtgtcatgaattg

SEQ ID NO: 366061 - DNA, 20 bp, Artificial Sequence
  Description of Artificial Sequence: Synthetic oligonucleotide
  Target: LAMA2; (+) strand; PAM type: YTN; PAM sequence: TTG
atcacagtgctctggatgtg

SEQ ID NO: 366062 - DNA, 20 bp, Artificial Sequence
  Description of Artificial Sequence: Synthetic oligonucleotide
  Target: LAMA2; (+) strand; PAM type: YTN; PAM sequence: CTC
tggatgtgctctgactagct

SEQ ID NO: 366063 - DNA, 20 bp, Artificial Sequence
  Description of Artificial Sequence: Synthetic oligonucleotide
  Target: LAMA2; (+) strand; PAM type: YTN; PAM sequence: CTG
gatgtgctctgactagctat

SEQ ID NO: 366064 - DNA, 20 bp, Artificial Sequence
  Description of Artificial Sequence: Synthetic oligonucleotide
  Target: LAMA2; (+) strand; PAM type: YTN; PAM sequence: CTC
tgactagctatgactgctcc

SEQ ID NO: 366065 - DNA, 20 bp, Artificial Sequence
  Description of Artificial Sequence: Synthetic oligonucleotide
  Target: LAMA2; (+) strand; PAM type: YTN; PAM sequence: CTG
actagctatgactgctcctg

SEQ ID NO: 366066 - DNA, 20 bp, Artificial Sequence
  Description of Artificial Sequence: Synthetic oligonucleotide
  Target: LAMA2; (+) strand; PAM type: YTN; PAM sequence: CTA
gctatgactgctcctggatc

SEQ ID NO: 366067 - DNA, 20 bp, Artificial Sequence
  Description of Artificial Sequence: Synthetic oligonucleotide
  Target: LAMA2; (+) strand; PAM type: YTN; PAM sequence: CTA
tgactgctcctggatcgccg

SEQ ID NO: 366068 - DNA, 20 bp, Artificial Sequence
  Description of Artificial Sequence: Synthetic oligonucleotide
  Target: LAMA2; (+) strand; PAM type: YTN; PAM sequence: CTG
ctcctggatcgccgtttcct

SEQ ID NO: 366069 - DNA, 20 bp, Artificial Sequence
  Description of Artificial Sequence: Synthetic oligonucleotide
  Target: LAMA2; (+) strand; PAM type: YTN; PAM sequence: CTC
ctggatcgccgtttccttta

SEQ ID NO: 366070 - DNA, 20 bp, Artificial Sequence
  Description of Artificial Sequence: Synthetic oligonucleotide
  Target: LAMA2; (+) strand; PAM type: YTN; PAM sequence: CTG
gatcgccgtttcctttaatc

SEQ ID NO: 366071 - DNA, 20 bp, Artificial Sequence
  Description of Artificial Sequence: Synthetic oligonucleotide
  Target: LAMA2; (+) strand; PAM type: YTN; PAM sequence: TTT
cctttaatctatacactatg

SEQ ID NO: 366072 - DNA, 20 bp, Artificial Sequence
  Description of Artificial Sequence: Synthetic oligonucleotide
  Target: LAMA2; (+) strand; PAM type: YTN; PAM sequence: TTC
ctttaatctatacactatgt

SEQ ID NO: 366073 - DNA, 20 bp, Artificial Sequence
  Description of Artificial Sequence: Synthetic oligonucleotide
  Target: LAMA2; (+) strand; PAM type: YTN; PAM sequence: CTT
taatctatacactatgtgtc

SEQ ID NO: 366074 - DNA, 20 bp, Artificial Sequence
  Description of Artificial Sequence: Synthetic oligonucleotide
  Target: LAMA2; (+) strand; PAM type: YTN; PAM sequence: TTT
aatctatacactatgtgtct

SEQ ID NO: 366075 - DNA, 20 bp, Artificial Sequence
  Description of Artificial Sequence: Synthetic oligonucleotide
  Target: LAMA2; (+) strand; PAM type: YTN; PAM sequence: TTA
atctatacactatgtgtctt

SEQ ID NO: 366076 - DNA, 20 bp, Artificial Sequence
  Description of Artificial Sequence: Synthetic oligonucleotide
  Target: LAMA2; (+) strand; PAM type: YTN; PAM sequence: CTA
tacactatgtgtcttcctaa

SEQ ID NO: 366077 - DNA, 20 bp, Artificial Sequence
  Description of Artificial Sequence: Synthetic oligonucleotide
  Target: LAMA2; (+) strand; PAM type: YTN; PAM sequence: CTA
tgtgtcttcctaatacagag

SEQ ID NO: 366078 - DNA, 20 bp, Artificial Sequence
  Description of Artificial Sequence: Synthetic oligonucleotide
  Target: LAMA2; (+) strand; PAM type: YTN; PAM sequence: CTT
cctaatacagagagtatgtt

SEQ ID NO: 366079 - DNA, 20 bp, Artificial Sequence
  Description of Artificial Sequence: Synthetic oligonucleotide
  Target: LAMA2; (+) strand; PAM type: YTN; PAM sequence: TTC
ctaatacagagagtatgttg

SEQ ID NO: 366080 - DNA, 20 bp, Artificial Sequence
  Description of Artificial Sequence: Synthetic oligonucleotide
  Target: LAMA2; (+) strand; PAM type: YTN; PAM sequence: CTA
atacagagagtatgttgttt

SEQ ID NO: 366081 - DNA, 20 bp, Artificial Sequence
  Description of Artificial Sequence: Synthetic oligonucleotide
  Target: LAMA2; (+) strand; PAM type: YTN; PAM sequence: TTG
tttgcctatatatcataaca

SEQ ID NO: 366082 - DNA, 20 bp, Artificial Sequence
  Description of Artificial Sequence: Synthetic oligonucleotide
  Target: LAMA2; (+) strand; PAM type: YTN; PAM sequence: TTT
gcctatatatcataacaaat

SEQ ID NO: 366083 - DNA, 20 bp, Artificial Sequence
  Description of Artificial Sequence: Synthetic oligonucleotide
  Target: LAMA2; (+) strand; PAM type: YTN; PAM sequence: TTG
cctatatatcataacaaatt

SEQ ID NO: 366084 - DNA, 20 bp, Artificial Sequence
  Description of Artificial Sequence: Synthetic oligonucleotide
  Target: LAMA2; (+) strand; PAM type: YTN; PAM sequence: CTA
tatatcataacaaattgaaa

SEQ ID NO: 366085 - DNA, 20 bp, Artificial Sequence
  Description of Artificial Sequence: Synthetic oligonucleotide
  Target: LAMA2; (+) strand; PAM type: YTN; PAM sequence: TTG
aaaatgcatttataacttat

SEQ ID NO: 366086 - DNA, 20 bp, Artificial Sequence
  Description of Artificial Sequence: Synthetic oligonucleotide
  Target: LAMA2; (+) strand; PAM type: YTN; PAM sequence: TTT
ataacttataaagtatatat

SEQ ID NO: 366087 - DNA, 20 bp, Artificial Sequence
  Description of Artificial Sequence: Synthetic oligonucleotide
  Target: LAMA2; (+) strand; PAM type: YTN; PAM sequence: TTA
taacttataaagtatatatt

SEQ ID NO: 366088 - DNA, 20 bp, Artificial Sequence
  Description of Artificial Sequence: Synthetic oligonucleotide
  Target: LAMA2; (+) strand; PAM type: YTN; PAM sequence: CTT
ataaagtatatattactagg

SEQ ID NO: 366089 - DNA, 20 bp, Artificial Sequence
  Description of Artificial Sequence: Synthetic oligonucleotide
  Target: LAMA2; (+) strand; PAM type: YTN; PAM sequence: TTA
taaagtatatattactaggt

SEQ ID NO: 366090 - DNA, 20 bp, Artificial Sequence
  Description of Artificial Sequence: Synthetic oligonucleotide
  Target: LAMA2; (+) strand; PAM type: YTN; PAM sequence: TTA
ctaggtgctagaatttacac

SEQ ID NO: 366091 - DNA, 20 bp, Artificial Sequence
  Description of Artificial Sequence: Synthetic oligonucleotide
  Target: LAMA2; (+) strand; PAM type: YTN; PAM sequence: CTA
ggtgctagaatttacactat

SEQ ID NO: 366092 - DNA, 20 bp, Artificial Sequence
  Description of Artificial Sequence: Synthetic oligonucleotide
  Target: LAMA2; (+) strand; PAM type: YTN; PAM sequence: CTA
gaatttacactattatccta

SEQ ID NO: 366093 - DNA, 20 bp, Artificial Sequence
  Description of Artificial Sequence: Synthetic oligonucleotide
  Target: LAMA2; (+) strand; PAM type: YTN; PAM sequence: TTT
acactattatcctaatatac

SEQ ID NO: 366094 - DNA, 20 bp, Artificial Sequence
  Description of Artificial Sequence: Synthetic oligonucleotide
  Target: LAMA2; (+) strand; PAM type: YTN; PAM sequence: TTA
cactattatcctaatataca

SEQ ID NO: 366095 - DNA, 20 bp, Artificial Sequence
  Description of Artificial Sequence: Synthetic oligonucleotide
  Target: LAMA2; (+) strand; PAM type: YTN; PAM sequence: CTA
ttatcctaatatacagaagc

SEQ ID NO: 366096 - DNA, 20 bp, Artificial Sequence
  Description of Artificial Sequence: Synthetic oligonucleotide
  Target: LAMA2; (+) strand; PAM type: YTN; PAM sequence: TTA
tcctaatatacagaagctgg

SEQ ID NO: 366097 - DNA, 20 bp, Artificial Sequence
  Description of Artificial Sequence: Synthetic oligonucleotide
  Target: LAMA2; (+) strand; PAM type: YTN; PAM sequence: CTA
atatacagaagctgggaaaa

SEQ ID NO: 366098 - DNA, 20 bp, Artificial Sequence
  Description of Artificial Sequence: Synthetic oligonucleotide
  Target: LAMA2; (+) strand; PAM type: YTN; PAM sequence: CTG
ggaaaagtaatgccatagag

SEQ ID NO: 366099 - DNA, 20 bp, Artificial Sequence
  Description of Artificial Sequence: Synthetic oligonucleotide
  Target: LAMA2; (+) strand; PAM type: YTN; PAM sequence: TTG
atttatgtgtgtaaatgtct

SEQ ID NO: 366100 - DNA, 20 bp, Artificial Sequence
  Description of Artificial Sequence: Synthetic oligonucleotide
  Target: LAMA2; (+) strand; PAM type: YTN; PAM sequence: TTT
atgtgtgtaaatgtctaagt

SEQ ID NO: 366101 - DNA, 20 bp, Artificial Sequence
  Description of Artificial Sequence: Synthetic oligonucleotide
  Target: LAMA2; (+) strand; PAM type: YTN; PAM sequence: TTA
tgtgtgtaaatgtctaagtg

SEQ ID NO: 366102 - DNA, 20 bp, Artificial Sequence
  Description of Artificial Sequence: Synthetic oligonucleotide
  Target: LAMA2; (+) strand; PAM type: YTN; PAM sequence: CTA
agtgacttaaatattgattt

SEQ ID NO: 366103 - DNA, 20 bp, Artificial Sequence
  Description of Artificial Sequence: Synthetic oligonucleotide
  Target: LAMA2; (+) strand; PAM type: YTN; PAM sequence: CTT
aaatattgatttttctcctt

SEQ ID NO: 366104 - DNA, 20 bp, Artificial Sequence
  Description of Artificial Sequence: Synthetic oligonucleotide
  Target: LAMA2; (+) strand; PAM type: YTN; PAM sequence: TTA
aatattgatttttctccttc

SEQ ID NO: 366105 - DNA, 20 bp, Artificial Sequence
  Description of Artificial Sequence: Synthetic oligonucleotide
  Target: LAMA2; (+) strand; PAM type: YTN; PAM sequence: TTG
atttttctccttcaactgca

SEQ ID NO: 366106 - DNA, 20 bp, Artificial Sequence
  Description of Artificial Sequence: Synthetic oligonucleotide
  Target: LAMA2; (+) strand; PAM type: YTN; PAM sequence: TTT
ttctccttcaactgcagatc

SEQ ID NO: 366107 - DNA, 20 bp, Artificial Sequence
  Description of Artificial Sequence: Synthetic oligonucleotide
  Target: LAMA2; (+) strand; PAM type: YTN; PAM sequence: TTT
tctccttcaactgcagatca

SEQ ID NO: 366108 - DNA, 20 bp, Artificial Sequence
  Description of Artificial Sequence: Synthetic oligonucleotide
  Target: LAMA2; (+) strand; PAM type: YTN; PAM sequence: TTT
ctccttcaactgcagatcaa

SEQ ID NO: 366109 - DNA, 20 bp, Artificial Sequence
  Description of Artificial Sequence: Synthetic oligonucleotide
  Target: LAMA2; (+) strand; PAM type: YTN; PAM sequence: TTC
tccttcaactgcagatcaaa

SEQ ID NO: 366110 - DNA, 20 bp, Artificial Sequence
  Description of Artificial Sequence: Synthetic oligonucleotide
  Target: LAMA2; (+) strand; PAM type: YTN; PAM sequence: CTC
cttcaactgcagatcaaact

SEQ ID NO: 366111 - DNA, 20 bp, Artificial Sequence
  Description of Artificial Sequence: Synthetic oligonucleotide
  Target: LAMA2; (+) strand; PAM type: YTN; PAM sequence: CTT
caactgcagatcaaacttcc

SEQ ID NO: 366112 - DNA, 20 bp, Artificial Sequence
  Description of Artificial Sequence: Synthetic oligonucleotide
  Target: LAMA2; (+) strand; PAM type: YTN; PAM sequence: TTC
aactgcagatcaaacttccc

SEQ ID NO: 366113 - DNA, 20 bp, Artificial Sequence
  Description of Artificial Sequence: Synthetic oligonucleotide
  Target: LAMA2; (+) strand; PAM type: YTN; PAM sequence: CTG
cagatcaaacttcccaaaca

SEQ ID NO: 366114 - DNA, 20 bp, Artificial Sequence
  Description of Artificial Sequence: Synthetic oligonucleotide
  Target: LAMA2; (+) strand; PAM type: YTN; PAM sequence: CTT
cccaaacactaaagcttcct

SEQ ID NO: 366115 - DNA, 20 bp, Artificial Sequence
  Description of Artificial Sequence: Synthetic oligonucleotide
  Target: LAMA2; (+) strand; PAM type: YTN; PAM sequence: TTC
ccaaacactaaagcttcctt

SEQ ID NO: 366116 - DNA, 20 bp, Artificial Sequence
  Description of Artificial Sequence: Synthetic oligonucleotide
  Target: LAMA2; (+) strand; PAM type: YTN; PAM sequence: CTA
aagcttccttattttaaaac

SEQ ID NO: 366117 - DNA, 20 bp, Artificial Sequence
  Description of Artificial Sequence: Synthetic oligonucleotide
  Target: LAMA2; (+) strand; PAM type: YTN; PAM sequence: CTT
ccttattttaaaacaaatgc

SEQ ID NO: 366118 - DNA, 20 bp, Artificial Sequence
  Description of Artificial Sequence: Synthetic oligonucleotide
  Target: LAMA2; (+) strand; PAM type: YTN; PAM sequence: TTC
cttattttaaaacaaatgca

SEQ ID NO: 366119 - DNA, 20 bp, Artificial Sequence
  Description of Artificial Sequence: Synthetic oligonucleotide
  Target: LAMA2; (+) strand; PAM type: YTN; PAM sequence: CTT
attttaaaacaaatgcattt

SEQ ID NO: 366120 - DNA, 20 bp, Artificial Sequence
  Description of Artificial Sequence: Synthetic oligonucleotide
  Target: LAMA2; (+) strand; PAM type: YTN; PAM sequence: TTA
ttttaaaacaaatgcatttg

SEQ ID NO: 366121 - DNA, 20 bp, Artificial Sequence
  Description of Artificial Sequence: Synthetic oligonucleotide
  Target: LAMA2; (+) strand; PAM type: YTN; PAM sequence: TTT
taaaacaaatgcatttgtgg

SEQ ID NO: 366122 - DNA, 20 bp, Artificial Sequence
  Description of Artificial Sequence: Synthetic oligonucleotide
  Target: LAMA2; (+) strand; PAM type: YTN; PAM sequence: TTT
aaaacaaatgcatttgtggt

SEQ ID NO: 366123 - DNA, 20 bp, Artificial Sequence
  Description of Artificial Sequence: Synthetic oligonucleotide
  Target: LAMA2; (+) strand; PAM type: YTN; PAM sequence: TTA
aaacaaatgcatttgtggtt

SEQ ID NO: 366124 - DNA, 20 bp, Artificial Sequence
  Description of Artificial Sequence: Synthetic oligonucleotide
  Target: LAMA2; (+) strand; PAM type: YTN; PAM sequence: TTT
gtggttcaccagtctgcagt

SEQ ID NO: 366125 - DNA, 20 bp, Artificial Sequence
  Description of Artificial Sequence: Synthetic oligonucleotide
  Target: LAMA2; (+) strand; PAM type: YTN; PAM sequence: TTG
tggttcaccagtctgcagta

SEQ ID NO: 366126 - DNA, 20 bp, Artificial Sequence
  Description of Artificial Sequence: Synthetic oligonucleotide
  Target: LAMA2; (+) strand; PAM type: YTN; PAM sequence: TTC
accagtctgcagtacagtaa

SEQ ID NO: 366127 - DNA, 20 bp, Artificial Sequence
  Description of Artificial Sequence: Synthetic oligonucleotide
  Target: LAMA2; (+) strand; PAM type: YTN; PAM sequence: CTG
cagtacagtaagctttttat

SEQ ID NO: 366128 - DNA, 20 bp, Artificial Sequence
  Description of Artificial Sequence: Synthetic oligonucleotide
  Target: LAMA2; (+) strand; PAM type: YTN; PAM sequence: CTT
tttataggtaagctcaaatc

SEQ ID NO: 366129 - DNA, 20 bp, Artificial Sequence
  Description of Artificial Sequence: Synthetic oligonucleotide
  Target: LAMA2; (+) strand; PAM type: YTN; PAM sequence: TTT
ttataggtaagctcaaatca

SEQ ID NO: 366130 - DNA, 20 bp, Artificial Sequence
  Description of Artificial Sequence: Synthetic oligonucleotide
  Target: LAMA2; (+) strand; PAM type: YTN; PAM sequence: TTT
tataggtaagctcaaatcac

SEQ ID NO: 366131 - DNA, 20 bp, Artificial Sequence
  Description of Artificial Sequence: Synthetic oligonucleotide
  Target: LAMA2; (+) strand; PAM type: YTN; PAM sequence: TTT
ataggtaagctcaaatcaca

SEQ ID NO: 366132 - DNA, 20 bp, Artificial Sequence
  Description of Artificial Sequence: Synthetic oligonucleotide
  Target: LAMA2; (+) strand; PAM type: YTN; PAM sequence: TTA
taggtaagctcaaatcacag

SEQ ID NO: 366133 - DNA, 20 bp, Artificial Sequence
  Description of Artificial Sequence: Synthetic oligonucleotide
  Target: LAMA2; (+) strand; PAM type: YTN; PAM sequence: CTC
aaatcacagaaaagctcaaa

SEQ ID NO: 366134 - DNA, 20 bp, Artificial Sequence
  Description of Artificial Sequence: Synthetic oligonucleotide
  Target: LAMA2; (+) strand; PAM type: YTN; PAM sequence: CTC
aaatagatacatctccttta

SEQ ID NO: 366135 - DNA, 20 bp, Artificial Sequence
  Description of Artificial Sequence: Synthetic oligonucleotide
  Target: LAMA2; (+) strand; PAM type: YTN; PAM sequence: CTC
ctttagcctatttttaggac

SEQ ID NO: 366136 - DNA, 20 bp, Artificial Sequence
  Description of Artificial Sequence: Synthetic oligonucleotide
  Target: LAMA2; (+) strand; PAM type: YTN; PAM sequence: CTT
tagcctatttttaggactga

SEQ ID NO: 366137 - DNA, 20 bp, Artificial Sequence
  Description of Artificial Sequence: Synthetic oligonucleotide
  Target: LAMA2; (+) strand; PAM type: YTN; PAM sequence: TTT
agcctatttttaggactgat

SEQ ID NO: 366138 - DNA, 20 bp, Artificial Sequence
  Description of Artificial Sequence: Synthetic oligonucleotide
  Target: LAMA2; (+) strand; PAM type: YTN; PAM sequence: TTA
gcctatttttaggactgata

SEQ ID NO: 366139 - DNA, 20 bp, Artificial Sequence
  Description of Artificial Sequence: Synthetic oligonucleotide
  Target: LAMA2; (+) strand; PAM type: YTN; PAM sequence: CTA
tttttaggactgataaagct

SEQ ID NO: 366140 - DNA, 20 bp, Artificial Sequence
  Description of Artificial Sequence: Synthetic oligonucleotide
  Target: LAMA2; (+) strand; PAM type: YTN; PAM sequence: TTT
ttaggactgataaagctaag

SEQ ID NO: 366141 - DNA, 20 bp, Artificial Sequence
  Description of Artificial Sequence: Synthetic oligonucleotide
  Target: LAMA2; (+) strand; PAM type: YTN; PAM sequence: TTT
taggactgataaagctaaga

SEQ ID NO: 366142 - DNA, 20 bp, Artificial Sequence
  Description of Artificial Sequence: Synthetic oligonucleotide
  Target: LAMA2; (+) strand; PAM type: YTN; PAM sequence: TTT
aggactgataaagctaagaa

SEQ ID NO: 366143 - DNA, 20 bp, Artificial Sequence
  Description of Artificial Sequence: Synthetic oligonucleotide
  Target: LAMA2; (+) strand; PAM type: YTN; PAM sequence: TTA
ggactgataaagctaagaac

SEQ ID NO: 366144 - DNA, 20 bp, Artificial Sequence
  Description of Artificial Sequence: Synthetic oligonucleotide
  Target: LAMA2; (+) strand; PAM type: YTN; PAM sequence: CTG
ataaagctaagaacagagaa

SEQ ID NO: 366145 - DNA, 20 bp, Artificial Sequence
  Description of Artificial Sequence: Synthetic oligonucleotide
  Target: LAMA2; (+) strand; PAM type: YTN; PAM sequence: CTA
agaacagagaaaccaataaa

SEQ ID NO: 366146 - DNA, 20 bp, Artificial Sequence
  Description of Artificial Sequence: Synthetic oligonucleotide
  Target: LAMA2; (+) strand; PAM type: YTN; PAM sequence: TTT
taatgatggcagggtatctc

SEQ ID NO: 366147 - DNA, 20 bp, Artificial Sequence
  Description of Artificial Sequence: Synthetic oligonucleotide
  Target: LAMA2; (+) strand; PAM type: YTN; PAM sequence: TTT
aatgatggcagggtatctca

SEQ ID NO: 366148 - DNA, 20 bp, Artificial Sequence
  Description of Artificial Sequence: Synthetic oligonucleotide
  Target: LAMA2; (+) strand; PAM type: YTN; PAM sequence: TTA
atgatggcagggtatctcat

SEQ ID NO: 366149 - DNA, 20 bp, Artificial Sequence
  Description of Artificial Sequence: Synthetic oligonucleotide
  Target: LAMA2; (+) strand; PAM type: YTN; PAM sequence: CTC
atggggtagtacaaatttat

SEQ ID NO: 366150 - DNA, 20 bp, Artificial Sequence
  Description of Artificial Sequence: Synthetic oligonucleotide
  Target: LAMA2; (+) strand; PAM type: YTN; PAM sequence: TTT
atcccagttttttatgcctt

SEQ ID NO: 366151 - DNA, 20 bp, Artificial Sequence
  Description of Artificial Sequence: Synthetic oligonucleotide
  Target: LAMA2; (+) strand; PAM type: YTN; PAM sequence: TTA
tcccagttttttatgccttc

SEQ ID NO: 366152 - DNA, 20 bp, Artificial Sequence
  Description of Artificial Sequence: Synthetic oligonucleotide
  Target: LAMA2; (+) strand; PAM type: YTN; PAM sequence: TTT
tttatgccttctctatgtgt

SEQ ID NO: 366153 - DNA, 20 bp, Artificial Sequence
  Description of Artificial Sequence: Synthetic oligonucleotide
  Target: LAMA2; (+) strand; PAM type: YTN; PAM sequence: TTT
ttatgccttctctatgtgta

SEQ ID NO: 366154 - DNA, 20 bp, Artificial Sequence
  Description of Artificial Sequence: Synthetic oligonucleotide
  Target: LAMA2; (+) strand; PAM type: YTN; PAM sequence: TTT
tatgccttctctatgtgtaa

SEQ ID NO: 366155 - DNA, 20 bp, Artificial Sequence
  Description of Artificial Sequence: Synthetic oligonucleotide
  Target: LAMA2; (+) strand; PAM type: YTN; PAM sequence: TTT
atgccttctctatgtgtaat

SEQ ID NO: 366156 - DNA, 20 bp, Artificial Sequence
  Description of Artificial Sequence: Synthetic oligonucleotide
  Target: LAMA2; (+) strand; PAM type: YTN; PAM sequence: TTA
tgccttctctatgtgtaata

SEQ ID NO: 366157 - DNA, 20 bp, Artificial Sequence
  Description of Artificial Sequence: Synthetic oligonucleotide
  Target: LAMA2; (+) strand; PAM type: YTN; PAM sequence: CTT
ctctatgtgtaatacattga

SEQ ID NO: 366158 - DNA, 20 bp, Artificial Sequence
  Description of Artificial Sequence: Synthetic oligonucleotide
  Target: LAMA2; (+) strand; PAM type: YTN; PAM sequence: TTC
tctatgtgtaatacattgaa

SEQ ID NO: 366159 - DNA, 20 bp, Artificial Sequence
  Description of Artificial Sequence: Synthetic oligonucleotide
  Target: LAMA2; (+) strand; PAM type: YTN; PAM sequence: CTC
tatgtgtaatacattgaagt

SEQ ID NO: 366160 - DNA, 20 bp, Artificial Sequence
  Description of Artificial Sequence: Synthetic oligonucleotide
  Target: LAMA2; (+) strand; PAM type: YTN; PAM sequence: CTA
tgtgtaatacattgaagtga

SEQ ID NO: 366161 - DNA, 20 bp, Artificial Sequence
  Description of Artificial Sequence: Synthetic oligonucleotide
  Target: LAMA2; (+) strand; PAM type: YTN; PAM sequence: TTG
aagtgatatatggtgttgaa

SEQ ID NO: 366162 - DNA, 20 bp, Artificial Sequence
  Description of Artificial Sequence: Synthetic oligonucleotide
  Target: LAMA2; (+) strand; PAM type: YTN; PAM sequence: TTG
aatgtgattaaaattcagca

SEQ ID NO: 366163 - DNA, 20 bp, Artificial Sequence
  Description of Artificial Sequence: Synthetic oligonucleotide
  Target: LAMA2; (+) strand; PAM type: YTN; PAM sequence: TTA
aaattcagcagatacttatg

SEQ ID NO: 366164 - DNA, 20 bp, Artificial Sequence
  Description of Artificial Sequence: Synthetic oligonucleotide
  Target: LAMA2; (+) strand; PAM type: YTN; PAM sequence: TTC
agcagatacttatgcaagat

SEQ ID NO: 366165 - DNA, 20 bp, Artificial Sequence
  Description of Artificial Sequence: Synthetic oligonucleotide
  Target: LAMA2; (+) strand; PAM type: YTN; PAM sequence: CTT
atgcaagatctactatctat

SEQ ID NO: 366166 - DNA, 20 bp, Artificial Sequence
  Description of Artificial Sequence: Synthetic oligonucleotide
  Target: LAMA2; (+) strand; PAM type: YTN; PAM sequence: TTA
tgcaagatctactatctata

SEQ ID NO: 366167 - DNA, 20 bp, Artificial Sequence
  Description of Artificial Sequence: Synthetic oligonucleotide
  Target: LAMA2; (+) strand; PAM type: YTN; PAM sequence: CTA
ctatctataagatgcttatg

SEQ ID NO: 366168 - DNA, 20 bp, Artificial Sequence
  Description of Artificial Sequence: Synthetic oligonucleotide
  Target: LAMA2; (+) strand; PAM type: YTN; PAM sequence: CTA
tctataagatgcttatgcaa

SEQ ID NO: 366169 - DNA, 20 bp, Artificial Sequence
  Description of Artificial Sequence: Synthetic oligonucleotide
  Target: LAMA2; (+) strand; PAM type: YTN; PAM sequence: CTA
taagatgcttatgcaaaatt

SEQ ID NO: 366170 - DNA, 20 bp, Artificial Sequence
  Description of Artificial Sequence: Synthetic oligonucleotide
  Target: LAMA2; (+) strand; PAM type: YTN; PAM sequence: CTT
atgcaaaattccatagggaa

SEQ ID NO: 366171 - DNA, 20 bp, Artificial Sequence
  Description of Artificial Sequence: Synthetic oligonucleotide
  Target: LAMA2; (+) strand; PAM type: YTN; PAM sequence: TTA
tgcaaaattccatagggaaa

SEQ ID NO: 366172 - DNA, 20 bp, Artificial Sequence
  Description of Artificial Sequence: Synthetic oligonucleotide
  Target: LAMA2; (+) strand; PAM type: YTN; PAM sequence: TTC
catagggaaacattaagacg

SEQ ID NO: 366173 - DNA, 20 bp, Artificial Sequence
  Description of Artificial Sequence: Synthetic oligonucleotide
  Target: LAMA2; (+) strand; PAM type: YTN; PAM sequence: TTA
agacgtgaataaaatctgaa

SEQ ID NO: 366174 - DNA, 20 bp, Artificial Sequence
  Description of Artificial Sequence: Synthetic oligonucleotide
  Target: LAMA2; (+) strand; PAM type: YTN; PAM sequence: CTG
aattgggccatcactatgat

SEQ ID NO: 366175 - DNA, 20 bp, Artificial Sequence
  Description of Artificial Sequence: Synthetic oligonucleotide
  Target: LAMA2; (+) strand; PAM type: YTN; PAM sequence: TTG
ggccatcactatgatctctc

SEQ ID NO: 366176 - DNA, 20 bp, Artificial Sequence
  Description of Artificial Sequence: Synthetic oligonucleotide
  Target: LAMA2; (+) strand; PAM type: YTN; PAM sequence: CTA
tgatctctccccaaaacgtg

SEQ ID NO: 366177 - DNA, 20 bp, Artificial Sequence
  Description of Artificial Sequence: Synthetic oligonucleotide
  Target: LAMA2; (+) strand; PAM type: YTN; PAM sequence: CTC
tccccaaaacgtgggatttt

SEQ ID NO: 366178 - DNA, 20 bp, Artificial Sequence
  Description of Artificial Sequence: Synthetic oligonucleotide
  Target: LAMA2; (+) strand; PAM type: YTN; PAM sequence: CTC
cccaaaacgtgggattttca

SEQ ID NO: 366179 - DNA, 20 bp, Artificial Sequence
  Description of Artificial Sequence: Synthetic oligonucleotide
  Target: LAMA2; (+) strand; PAM type: YTN; PAM sequence: TTT
tcaagtgcatttagaattat

SEQ ID NO: 366180 - DNA, 20 bp, Artificial Sequence
  Description of Artificial Sequence: Synthetic oligonucleotide
  Target: LAMA2; (+) strand; PAM type: YTN; PAM sequence: TTT
caagtgcatttagaattatg

SEQ ID NO: 366181 - DNA, 20 bp, Artificial Sequence
  Description of Artificial Sequence: Synthetic oligonucleotide
  Target: LAMA2; (+) strand; PAM type: YTN; PAM sequence: TTC
aagtgcatttagaattatga

SEQ ID NO: 366182 - DNA, 20 bp, Artificial Sequence
  Description of Artificial Sequence: Synthetic oligonucleotide
  Target: LAMA2; (+) strand; PAM type: YTN; PAM sequence: TTT
agaattatgaaataaaccac

SEQ ID NO: 366183 - DNA, 20 bp, Artificial Sequence
  Description of Artificial Sequence: Synthetic oligonucleotide
  Target: LAMA2; (+) strand; PAM type: YTN; PAM sequence: TTA
gaattatgaaataaaccact

SEQ ID NO: 366184 - DNA, 20 bp, Artificial Sequence
  Description of Artificial Sequence: Synthetic oligonucleotide
  Target: LAMA2; (+) strand; PAM type: YTN; PAM sequence: TTA
tgaaataaaccactaggttt

SEQ ID NO: 366185 - DNA, 20 bp, Artificial Sequence
  Description of Artificial Sequence: Synthetic oligonucleotide
  Target: LAMA2; (+) strand; PAM type: YTN; PAM sequence: CTA
ggtttttagtgtgaaatgtt

SEQ ID NO: 366186 - DNA, 20 bp, Artificial Sequence
  Description of Artificial Sequence: Synthetic oligonucleotide
  Target: LAMA2; (+) strand; PAM type: YTN; PAM sequence: TTT
ttagtgtgaaatgtttacag

SEQ ID NO: 366187 - DNA, 20 bp, Artificial Sequence
  Description of Artificial Sequence: Synthetic oligonucleotide
  Target: LAMA2; (+) strand; PAM type: YTN; PAM sequence: TTT
tagtgtgaaatgtttacagt

SEQ ID NO: 366188 - DNA, 20 bp, Artificial Sequence
  Description of Artificial Sequence: Synthetic oligonucleotide
  Target: LAMA2; (+) strand; PAM type: YTN; PAM sequence: TTT
agtgtgaaatgtttacagta

SEQ ID NO: 366189 - DNA, 20 bp, Artificial Sequence
  Description of Artificial Sequence: Synthetic oligonucleotide
  Target: LAMA2; (+) strand; PAM type: YTN; PAM sequence: TTA
gtgtgaaatgtttacagtat

SEQ ID NO: 366190 - DNA, 20 bp, Artificial Sequence
  Description of Artificial Sequence: Synthetic oligonucleotide
  Target: LAMA2; (+) strand; PAM type: YTN; PAM sequence: TTT
acagtattttaattttgaaa

SEQ ID NO: 366191 - DNA, 20 bp, Artificial Sequence
  Description of Artificial Sequence: Synthetic oligonucleotide
  Target: LAMA2; (+) strand; PAM type: YTN; PAM sequence: TTA
cagtattttaattttgaaaa

SEQ ID NO: 366192 - DNA, 20 bp, Artificial Sequence
  Description of Artificial Sequence: Synthetic oligonucleotide
  Target: LAMA2; (+) strand; PAM type: YTN; PAM sequence: TTT
taattttgaaaactatactt

SEQ ID NO: 366193 - DNA, 20 bp, Artificial Sequence
  Description of Artificial Sequence: Synthetic oligonucleotide
  Target: LAMA2; (+) strand; PAM type: YTN; PAM sequence: TTT
aattttgaaaactatactta

SEQ ID NO: 366194 - DNA, 20 bp, Artificial Sequence
  Description of Artificial Sequence: Synthetic oligonucleotide
  Target: LAMA2; (+) strand; PAM type: YTN; PAM sequence: TTA
attttgaaaactatacttat

SEQ ID NO: 366195 - DNA, 20 bp, Artificial Sequence
  Description of Artificial Sequence: Synthetic oligonucleotide
  Target: LAMA2; (+) strand; PAM type: YTN; PAM sequence: TTT
tgaaaactatacttattaaa

SEQ ID NO: 366196 - DNA, 20 bp, Artificial Sequence
  Description of Artificial Sequence: Synthetic oligonucleotide
  Target: LAMA2; (+) strand; PAM type: YTN; PAM sequence: TTT
gaaaactatacttattaaaa

SEQ ID NO: 366197 - DNA, 20 bp, Artificial Sequence
  Description of Artificial Sequence: Synthetic oligonucleotide
  Target: LAMA2; (+) strand; PAM type: YTN; PAM sequence: TTG
aaaactatacttattaaaac

SEQ ID NO: 366198 - DNA, 20 bp, Artificial Sequence
  Description of Artificial Sequence: Synthetic oligonucleotide
  Target: LAMA2; (+) strand; PAM type: YTN; PAM sequence: CTA
tacttattaaaacagtatga

SEQ ID NO: 366199 - DNA, 20 bp, Artificial Sequence
  Description of Artificial Sequence: Synthetic oligonucleotide
  Target: LAMA2; (+) strand; PAM type: YTN; PAM sequence: CTT
attaaaacagtatgacaaca

SEQ ID NO: 366200 - DNA, 20 bp, Artificial Sequence
  Description of Artificial Sequence: Synthetic oligonucleotide
  Target: LAMA2; (+) strand; PAM type: YTN; PAM sequence: TTA
ttaaaacagtatgacaacat

SEQ ID NO: 366201 - DNA, 20 bp, Artificial Sequence
  Description of Artificial Sequence: Synthetic oligonucleotide
  Target: LAMA2; (+) strand; PAM type: YTN; PAM sequence: TTA
aaacagtatgacaacattta

SEQ ID NO: 366202 - DNA, 20 bp, Artificial Sequence
  Description of Artificial Sequence: Synthetic oligonucleotide
  Target: LAMA2; (+) strand; PAM type: YTN; PAM sequence: TTT
attgaatacatgttatgtgc

SEQ ID NO: 366203 - DNA, 20 bp, Artificial Sequence
  Description of Artificial Sequence: Synthetic oligonucleotide
  Target: LAMA2; (+) strand; PAM type: YTN; PAM sequence: TTA
ttgaatacatgttatgtgct

SEQ ID NO: 366204 - DNA, 20 bp, Artificial Sequence
  Description of Artificial Sequence: Synthetic oligonucleotide
  Target: LAMA2; (+) strand; PAM type: YTN; PAM sequence: TTG
aatacatgttatgtgctagg

SEQ ID NO: 366205 - DNA, 20 bp, Artificial Sequence
  Description of Artificial Sequence: Synthetic oligonucleotide
  Target: LAMA2; (+) strand; PAM type: YTN; PAM sequence: TTA
tgtgctaggtaccaagtggg

SEQ ID NO: 366206 - DNA, 20 bp, Artificial Sequence
  Description of Artificial Sequence: Synthetic oligonucleotide
  Target: LAMA2; (+) strand; PAM type: YTN; PAM sequence: CTA
ggtaccaagtggggagtttt

SEQ ID NO: 366207 - DNA, 20 bp, Artificial Sequence
  Description of Artificial Sequence: Synthetic oligonucleotide
  Target: LAMA2; (+) strand; PAM type: YTN; PAM sequence: TTT
tatgtttattttctcatttc

SEQ ID NO: 366208 - DNA, 20 bp, Artificial Sequence
  Description of Artificial Sequence: Synthetic oligonucleotide
  Target: LAMA2; (+) strand; PAM type: YTN; PAM sequence: TTT
atgtttattttctcatttca

SEQ ID NO: 366209 - DNA, 20 bp, Artificial Sequence
  Description of Artificial Sequence: Synthetic oligonucleotide
  Target: LAMA2; (+) strand; PAM type: YTN; PAM sequence: TTA
tgtttattttctcatttcat

SEQ ID NO: 366210 - DNA, 20 bp, Artificial Sequence
  Description of Artificial Sequence: Synthetic oligonucleotide
  Target: LAMA2; (+) strand; PAM type: YTN; PAM sequence: TTT
attttctcatttcatcctaa

SEQ ID NO: 366211 - DNA, 20 bp, Artificial Sequence
  Description of Artificial Sequence: Synthetic oligonucleotide
  Target: LAMA2; (+) strand; PAM type: YTN; PAM sequence: TTA
ttttctcatttcatcctaag

SEQ ID NO: 366212 - DNA, 20 bp, Artificial Sequence
  Description of Artificial Sequence: Synthetic oligonucleotide
  Target: LAMA2; (+) strand; PAM type: YTN; PAM sequence: TTT
tctcatttcatcctaagagc

SEQ ID NO: 366213 - DNA, 20 bp, Artificial Sequence
  Description of Artificial Sequence: Synthetic oligonucleotide
  Target: LAMA2; (+) strand; PAM type: YTN; PAM sequence: TTT
ctcatttcatcctaagagca

SEQ ID NO: 366214 - DNA, 20 bp, Artificial Sequence
  Description of Artificial Sequence: Synthetic oligonucleotide
  Target: LAMA2; (+) strand; PAM type: YTN; PAM sequence: TTC
tcatttcatcctaagagcaa

SEQ ID NO: 366215 - DNA, 20 bp, Artificial Sequence
  Description of Artificial Sequence: Synthetic oligonucleotide
  Target: LAMA2; (+) strand; PAM type: YTN; PAM sequence: CTC
atttcatcctaagagcaaac

SEQ ID NO: 366216 - DNA, 20 bp, Artificial Sequence
  Description of Artificial Sequence: Synthetic oligonucleotide
  Target: LAMA2; (+) strand; PAM type: YTN; PAM sequence: TTT
catcctaagagcaaacttcg

SEQ ID NO: 366217 - DNA, 20 bp, Artificial Sequence
  Description of Artificial Sequence: Synthetic oligonucleotide
  Target: LAMA2; (+) strand; PAM type: YTN; PAM sequence: TTC
atcctaagagcaaacttcgg

SEQ ID NO: 366218 - DNA, 20 bp, Artificial Sequence
  Description of Artificial Sequence: Synthetic oligonucleotide
  Target: LAMA2; (+) strand; PAM type: YTN; PAM sequence: CTA
agagcaaacttcggaggtag

SEQ ID NO: 366219 - DNA, 20 bp, Artificial Sequence
  Description of Artificial Sequence: Synthetic oligonucleotide
  Target: LAMA2; (+) strand; PAM type: YTN; PAM sequence: CTT
cggaggtaggtgtgattcgt

SEQ ID NO: 366220 - DNA, 20 bp, Artificial Sequence
  Description of Artificial Sequence: Synthetic oligonucleotide
  Target: LAMA2; (+) strand; PAM type: YTN; PAM sequence: TTC
ggaggtaggtgtgattcgtc

SEQ ID NO: 366221 - DNA, 20 bp, Artificial Sequence
  Description of Artificial Sequence: Synthetic oligonucleotide
  Target: LAMA2; (+) strand; PAM type: YTN; PAM sequence: TTC
gtctcattttagtgaaaatt

SEQ ID NO: 366222 - DNA, 20 bp, Artificial Sequence
  Description of Artificial Sequence: Synthetic oligonucleotide
  Target: LAMA2; (+) strand; PAM type: YTN; PAM sequence: CTC
attttagtgaaaattcactg

SEQ ID NO: 366223 - DNA, 20 bp, Artificial Sequence
  Description of Artificial Sequence: Synthetic oligonucleotide
  Target: LAMA2; (+) strand; PAM type: YTN; PAM sequence: TTT
tagtgaaaattcactgatgc

SEQ ID NO: 366224 - DNA, 20 bp, Artificial Sequence
  Description of Artificial Sequence: Synthetic oligonucleotide
  Target: LAMA2; (+) strand; PAM type: YTN; PAM sequence: TTT
agtgaaaattcactgatgct

SEQ ID NO: 366225 - DNA, 20 bp, Artificial Sequence
  Description of Artificial Sequence: Synthetic oligonucleotide
  Target: LAMA2; (+) strand; PAM type: YTN; PAM sequence: TTA
gtgaaaattcactgatgctc

SEQ ID NO: 366226 - DNA, 20 bp, Artificial Sequence
  Description of Artificial Sequence: Synthetic oligonucleotide
  Target: LAMA2; (+) strand; PAM type: YTN; PAM sequence: TTC
actgatgctctgaaagcaaa

SEQ ID NO: 366227 - DNA, 20 bp, Artificial Sequence
  Description of Artificial Sequence: Synthetic oligonucleotide
  Target: LAMA2; (+) strand; PAM type: YTN; PAM sequence: CTG
atgctctgaaagcaaaatta

SEQ ID NO: 366228 - DNA, 20 bp, Artificial Sequence
  Description of Artificial Sequence: Synthetic oligonucleotide
  Target: LAMA2; (+) strand; PAM type: YTN; PAM sequence: CTC
tgaaagcaaaattaactttc

SEQ ID NO: 366229 - DNA, 20 bp, Artificial Sequence
  Description of Artificial Sequence: Synthetic oligonucleotide
  Target: LAMA2; (+) strand; PAM type: YTN; PAM sequence: CTG
aaagcaaaattaactttccc

SEQ ID NO: 366230 - DNA, 20 bp, Artificial Sequence
  Description of Artificial Sequence: Synthetic oligonucleotide
  Target: LAMA2; (+) strand; PAM type: YTN; PAM sequence: TTA
actttcccaagggccttgta

SEQ ID NO: 366231 - DNA, 20 bp, Artificial Sequence
  Description of Artificial Sequence: Synthetic oligonucleotide
  Target: LAMA2; (+) strand; PAM type: YTN; PAM sequence: CTT
tcccaagggccttgtagtgc

SEQ ID NO: 366232 - DNA, 20 bp, Artificial Sequence
  Description of Artificial Sequence: Synthetic oligonucleotide
  Target: LAMA2; (+) strand; PAM type: YTN; PAM sequence: TTT
cccaagggccttgtagtgct

SEQ ID NO: 366233 - DNA, 20 bp, Artificial Sequence
  Description of Artificial Sequence: Synthetic oligonucleotide
  Target: LAMA2; (+) strand; PAM type: YTN; PAM sequence: TTC
ccaagggccttgtagtgctt

SEQ ID NO: 366234 - DNA, 20 bp, Artificial Sequence
  Description of Artificial Sequence: Synthetic oligonucleotide
  Target: LAMA2; (+) strand; PAM type: YTN; PAM sequence: CTT
gtagtgcttaaaggcagaat

SEQ ID NO: 366235 - DNA, 20 bp, Artificial Sequence
  Description of Artificial Sequence: Synthetic oligonucleotide
  Target: LAMA2; (+) strand; PAM type: YTN; PAM sequence: TTG
tagtgcttaaaggcagaatc

SEQ ID NO: 366236 - DNA, 20 bp, Artificial Sequence
  Description of Artificial Sequence: Synthetic oligonucleotide
  Target: LAMA2; (+) strand; PAM type: YTN; PAM sequence: CTT
aaaggcagaatcaaaatcca

SEQ ID NO: 366237 - DNA, 20 bp, Artificial Sequence
  Description of Artificial Sequence: Synthetic oligonucleotide
  Target: LAMA2; (+) strand; PAM type: YTN; PAM sequence: TTA
aaggcagaatcaaaatccac

SEQ ID NO: 366238 - DNA, 20 bp, Artificial Sequence
  Description of Artificial Sequence: Synthetic oligonucleotide
  Target: LAMA2; (+) strand; PAM type: YTN; PAM sequence: CTC
tggaaaatctccagaaatga

SEQ ID NO: 366239 - DNA, 20 bp, Artificial Sequence
  Description of Artificial Sequence: Synthetic oligonucleotide
  Target: LAMA2; (+) strand; PAM type: YTN; PAM sequence: CTG
gaaaatctccagaaatgagc

SEQ ID NO: 366240 - DNA, 20 bp, Artificial Sequence
  Description of Artificial Sequence: Synthetic oligonucleotide
  Target: LAMA2; (+) strand; PAM type: YTN; PAM sequence: CTC
cagaaatgagcttaattttt

SEQ ID NO: 366241 - DNA, 20 bp, Artificial Sequence
  Description of Artificial Sequence: Synthetic oligonucleotide
  Target: LAMA2; (+) strand; PAM type: YTN; PAM sequence: CTT
aattttttgtgtgatttata

SEQ ID NO: 366242 - DNA, 20 bp, Artificial Sequence
  Description of Artificial Sequence: Synthetic oligonucleotide
  Target: LAMA2; (+) strand; PAM type: YTN; PAM sequence: TTA
attttttgtgtgatttatat

SEQ ID NO: 366243 - DNA, 20 bp, Artificial Sequence
  Description of Artificial Sequence: Synthetic oligonucleotide
  Target: LAMA2; (+) strand; PAM type: YTN; PAM sequence: TTT
tttgtgtgatttatatatga

SEQ ID NO: 366244 - DNA, 20 bp, Artificial Sequence
  Description of Artificial Sequence: Synthetic oligonucleotide
  Target: LAMA2; (+) strand; PAM type: YTN; PAM sequence: TTT
ttgtgtgatttatatatgac

SEQ ID NO: 366245 - DNA, 20 bp, Artificial Sequence
  Description of Artificial Sequence: Synthetic oligonucleotide
  Target: LAMA2; (+) strand; PAM type: YTN; PAM sequence: TTT
tgtgtgatttatatatgact

SEQ ID NO: 366246 - DNA, 20 bp, Artificial Sequence
  Description of Artificial Sequence: Synthetic oligonucleotide
  Target: LAMA2; (+) strand; PAM type: YTN; PAM sequence: TTT
gtgtgatttatatatgactc

SEQ ID NO: 366247 - DNA, 20 bp, Artificial Sequence
  Description of Artificial Sequence: Synthetic oligonucleotide
  Target: LAMA2; (+) strand; PAM type: YTN; PAM sequence: TTG
tgtgatttatatatgactcc

SEQ ID NO: 366248 - DNA, 20 bp, Artificial Sequence
  Description of Artificial Sequence: Synthetic oligonucleotide
  Target: LAMA2; (+) strand; PAM type: YTN; PAM sequence: TTT
atatatgactccaatattaa

SEQ ID NO: 366249 - DNA, 20 bp, Artificial Sequence
  Description of Artificial Sequence: Synthetic oligonucleotide
  Target: LAMA2; (+) strand; PAM type: YTN; PAM sequence: TTA
tatatgactccaatattaac

SEQ ID NO: 366250 - DNA, 20 bp, Artificial Sequence
  Description of Artificial Sequence: Synthetic oligonucleotide
  Target: LAMA2; (+) strand; PAM type: YTN; PAM sequence: CTC
caatattaacagacatgtca

SEQ ID NO: 366251 - DNA, 20 bp, Artificial Sequence
  Description of Artificial Sequence: Synthetic oligonucleotide
  Target: LAMA2; (+) strand; PAM type: YTN; PAM sequence: TTA
acagacatgtcaaacaacta

SEQ ID NO: 366252 - DNA, 20 bp, Artificial Sequence
  Description of Artificial Sequence: Synthetic oligonucleotide
  Target: LAMA2; (+) strand; PAM type: YTN; PAM sequence: CTA
acacaaccctttacctgttt

SEQ ID NO: 366253 - DNA, 20 bp, Artificial Sequence
  Description of Artificial Sequence: Synthetic oligonucleotide
  Target: LAMA2; (+) strand; PAM type: YTN; PAM sequence: CTT
tacctgtttattttggaaga

SEQ ID NO: 366254 - DNA, 20 bp, Artificial Sequence
  Description of Artificial Sequence: Synthetic oligonucleotide
  Target: LAMA2; (+) strand; PAM type: YTN; PAM sequence: TTT
acctgtttattttggaagaa

SEQ ID NO: 366255 - DNA, 20 bp, Artificial Sequence
  Description of Artificial Sequence: Synthetic oligonucleotide
  Target: LAMA2; (+) strand; PAM type: YTN; PAM sequence: TTA
cctgtttattttggaagaag

SEQ ID NO: 366256 - DNA, 20 bp, Artificial Sequence
  Description of Artificial Sequence: Synthetic oligonucleotide
  Target: LAMA2; (+) strand; PAM type: YTN; PAM sequence: CTG
tttattttggaagaagacac

SEQ ID NO: 366257 - DNA, 20 bp, Artificial Sequence
  Description of Artificial Sequence: Synthetic oligonucleotide
  Target: LAMA2; (+) strand; PAM type: YTN; PAM sequence: TTT
attttggaagaagacactta

SEQ ID NO: 366258 - DNA, 20 bp, Artificial Sequence
  Description of Artificial Sequence: Synthetic oligonucleotide
  Target: LAMA2; (+) strand; PAM type: YTN; PAM sequence: TTA
ttttggaagaagacacttaa

SEQ ID NO: 366259 - DNA, 20 bp, Artificial Sequence
  Description of Artificial Sequence: Synthetic oligonucleotide
  Target: LAMA2; (+) strand; PAM type: YTN; PAM sequence: TTT
tggaagaagacacttaaaat

SEQ ID NO: 366260 - DNA, 20 bp, Artificial Sequence
  Description of Artificial Sequence: Synthetic oligonucleotide
  Target: LAMA2; (+) strand; PAM type: YTN; PAM sequence: TTT
ggaagaagacacttaaaatg

SEQ ID NO: 366261 - DNA, 20 bp, Artificial Sequence
  Description of Artificial Sequence: Synthetic oligonucleotide
  Target: LAMA2; (+) strand; PAM type: YTN; PAM sequence: TTG
gaagaagacacttaaaatgt

SEQ ID NO: 366262 - DNA, 20 bp, Artificial Sequence
  Description of Artificial Sequence: Synthetic oligonucleotide
  Target: LAMA2; (+) strand; PAM type: YTN; PAM sequence: CTT
aaaatgtattttattaccct

SEQ ID NO: 366263 - DNA, 20 bp, Artificial Sequence
  Description of Artificial Sequence: Synthetic oligonucleotide
  Target: LAMA2; (+) strand; PAM type: YTN; PAM sequence: TTA
aaatgtattttattaccctg

SEQ ID NO: 366264 - DNA, 20 bp, Artificial Sequence
  Description of Artificial Sequence: Synthetic oligonucleotide
  Target: LAMA2; (+) strand; PAM type: YTN; PAM sequence: TTT
tattaccctgttgattctcc

SEQ ID NO: 366265 - DNA, 20 bp, Artificial Sequence
  Description of Artificial Sequence: Synthetic oligonucleotide
  Target: LAMA2; (+) strand; PAM type: YTN; PAM sequence: TTT
attaccctgttgattctcct

SEQ ID NO: 366266 - DNA, 20 bp, Artificial Sequence
  Description of Artificial Sequence: Synthetic oligonucleotide
  Target: LAMA2; (+) strand; PAM type: YTN; PAM sequence: TTA
ttaccctgttgattctcctc

SEQ ID NO: 366267 - DNA, 20 bp, Artificial Sequence
  Description of Artificial Sequence: Synthetic oligonucleotide
  Target: LAMA2; (+) strand; PAM type: YTN; PAM sequence: TTA
ccctgttgattctcctctgg

SEQ ID NO: 366268 - DNA, 20 bp, Artificial Sequence
  Description of Artificial Sequence: Synthetic oligonucleotide
  Target: LAMA2; (+) strand; PAM type: YTN; PAM sequence: CTG
ttgattctcctctggagtgt

SEQ ID NO: 366269 - DNA, 20 bp, Artificial Sequence
  Description of Artificial Sequence: Synthetic oligonucleotide
  Target: LAMA2; (+) strand; PAM type: YTN; PAM sequence: TTG
attctcctctggagtgtgac

SEQ ID NO: 366270 - DNA, 20 bp, Artificial Sequence
  Description of Artificial Sequence: Synthetic oligonucleotide
  Target: LAMA2; (+) strand; PAM type: YTN; PAM sequence: TTC
tcctctggagtgtgacttag

SEQ ID NO: 366271 - DNA, 20 bp, Artificial Sequence
  Description of Artificial Sequence: Synthetic oligonucleotide
  Target: LAMA2; (+) strand; PAM type: YTN; PAM sequence: CTC
ctctggagtgtgacttagta

SEQ ID NO: 366272 - DNA, 20 bp, Artificial Sequence
  Description of Artificial Sequence: Synthetic oligonucleotide
  Target: LAMA2; (+) strand; PAM type: YTN; PAM sequence: CTC
tggagtgtgacttagtatcc

SEQ ID NO: 366273 - DNA, 20 bp, Artificial Sequence
  Description of Artificial Sequence: Synthetic oligonucleotide
  Target: LAMA2; (+) strand; PAM type: YTN; PAM sequence: CTG
gagtgtgacttagtatccat

SEQ ID NO: 366274 - DNA, 20 bp, Artificial Sequence
  Description of Artificial Sequence: Synthetic oligonucleotide
  Target: LAMA2; (+) strand; PAM type: YTN; PAM sequence: CTT
agtatccattgcacctttgg

SEQ ID NO: 366275 - DNA, 20 bp, Artificial Sequence
  Description of Artificial Sequence: Synthetic oligonucleotide
  Target: LAMA2; (+) strand; PAM type: YTN; PAM sequence: TTA
gtatccattgcacctttggg

SEQ ID NO: 366276 - DNA, 20 bp, Artificial Sequence
  Description of Artificial Sequence: Synthetic oligonucleotide
  Target: LAMA2; (+) strand; PAM type: YTN; PAM sequence: TTG
cacctttgggattcttatct

SEQ ID NO: 366277 - DNA, 20 bp, Artificial Sequence
  Description of Artificial Sequence: Synthetic oligonucleotide
  Target: LAMA2; (+) strand; PAM type: YTN; PAM sequence: CTT
tgggattcttatcttctaaa

SEQ ID NO: 366278 - DNA, 20 bp, Artificial Sequence
  Description of Artificial Sequence: Synthetic oligonucleotide
  Target: LAMA2; (+) strand; PAM type: YTN; PAM sequence: TTT
gggattcttatcttctaaaa

SEQ ID NO: 366279 - DNA, 20 bp, Artificial Sequence
  Description of Artificial Sequence: Synthetic oligonucleotide
  Target: LAMA2; (+) strand; PAM type: YTN; PAM sequence: TTG
ggattcttatcttctaaaat

SEQ ID NO: 366280 - DNA, 20 bp, Artificial Sequence
  Description of Artificial Sequence: Synthetic oligonucleotide
  Target: LAMA2; (+) strand; PAM type: YTN; PAM sequence: TTC
ttatcttctaaaattcacaa

SEQ ID NO: 366281 - DNA, 20 bp, Artificial Sequence
  Description of Artificial Sequence: Synthetic oligonucleotide
  Target: LAMA2; (+) strand; PAM type: YTN; PAM sequence: CTT
atcttctaaaattcacaacc

SEQ ID NO: 366282 - DNA, 20 bp, Artificial Sequence
  Description of Artificial Sequence: Synthetic oligonucleotide
  Target: LAMA2; (+) strand; PAM type: YTN; PAM sequence: TTA
tcttctaaaattcacaacca

SEQ ID NO: 366283 - DNA, 20 bp, Artificial Sequence
  Description of Artificial Sequence: Synthetic oligonucleotide
  Target: LAMA2; (+) strand; PAM type: YTN; PAM sequence: CTT
ctaaaattcacaaccacttt

SEQ ID NO: 366284 - DNA, 20 bp, Artificial Sequence
  Description of Artificial Sequence: Synthetic oligonucleotide
  Target: LAMA2; (+) strand; PAM type: YTN; PAM sequence: TTC
taaaattcacaaccactttc

SEQ ID NO: 366285 - DNA, 20 bp, Artificial Sequence
  Description of Artificial Sequence: Synthetic oligonucleotide
  Target: LAMA2; (+) strand; PAM type: YTN; PAM sequence: CTA
aaattcacaaccactttcta

SEQ ID NO: 366286 - DNA, 20 bp, Artificial Sequence
  Description of Artificial Sequence: Synthetic oligonucleotide
  Target: LAMA2; (+) strand; PAM type: YTN; PAM sequence: TTC
acaaccactttctactgctg

SEQ ID NO: 366287 - DNA, 20 bp, Artificial Sequence
  Description of Artificial Sequence: Synthetic oligonucleotide
  Target: LAMA2; (+) strand; PAM type: YTN; PAM sequence: CTT
tctactgctgtaagaaagaa

SEQ ID NO: 366288 - DNA, 20 bp, Artificial Sequence
  Description of Artificial Sequence: Synthetic oligonucleotide
  Target: LAMA2; (+) strand; PAM type: YTN; PAM sequence: TTT
ctactgctgtaagaaagaat

SEQ ID NO: 366289 - DNA, 20 bp, Artificial Sequence
  Description of Artificial Sequence: Synthetic oligonucleotide
  Target: LAMA2; (+) strand; PAM type: YTN; PAM sequence: TTC
tactgctgtaagaaagaatc

SEQ ID NO: 366290 - DNA, 20 bp, Artificial Sequence
  Description of Artificial Sequence: Synthetic oligonucleotide
  Target: LAMA2; (+) strand; PAM type: YTN; PAM sequence: CTA
ctgctgtaagaaagaatcac

SEQ ID NO: 366291 - DNA, 20 bp, Artificial Sequence
  Description of Artificial Sequence: Synthetic oligonucleotide
  Target: LAMA2; (+) strand; PAM type: YTN; PAM sequence: CTG
ctgtaagaaagaatcacctg

SEQ ID NO: 366292 - DNA, 20 bp, Artificial Sequence
  Description of Artificial Sequence: Synthetic oligonucleotide
  Target: LAMA2; (+) strand; PAM type: YTN; PAM sequence: CTG
taagaaagaatcacctgcag

SEQ ID NO: 366293 - DNA, 20 bp, Artificial Sequence
  Description of Artificial Sequence: Synthetic oligonucleotide
  Target: LAMA2; (+) strand; PAM type: YTN; PAM sequence: CTG
cagagttcacgaatgaggga

SEQ ID NO: 366294 - DNA, 20 bp, Artificial Sequence
  Description of Artificial Sequence: Synthetic oligonucleotide
  Target: LAMA2; (+) strand; PAM type: YTN; PAM sequence: TTC
acgaatgagggaagagtgaa

SEQ ID NO: 366295 - DNA, 20 bp, Artificial Sequence
  Description of Artificial Sequence: Synthetic oligonucleotide
  Target: LAMA2; (+) strand; PAM type: YTN; PAM sequence: CTT
ggcatcacatcaaaatagta

SEQ ID NO: 366296 - DNA, 20 bp, Artificial Sequence
  Description of Artificial Sequence: Synthetic oligonucleotide
  Target: LAMA2; (+) strand; PAM type: YTN; PAM sequence: TTG
gcatcacatcaaaatagtat

SEQ ID NO: 366297 - DNA, 20 bp, Artificial Sequence
  Description of Artificial Sequence: Synthetic oligonucleotide
  Target: LAMA2; (+) strand; PAM type: YTN; PAM sequence: TTC
caaggttggtgttctggctt

SEQ ID NO: 366298 - DNA, 20 bp, Artificial Sequence
  Description of Artificial Sequence: Synthetic oligonucleotide
  Target: LAMA2; (+) strand; PAM type: YTN; PAM sequence: TTG
gtgttctggcttctgctttt

SEQ ID NO: 366299 - DNA, 20 bp, Artificial Sequence
  Description of Artificial Sequence: Synthetic oligonucleotide
  Target: LAMA2; (+) strand; PAM type: YTN; PAM sequence: TTC
tggcttctgcttttctggga

SEQ ID NO: 366300 - DNA, 20 bp, Artificial Sequence
  Description of Artificial Sequence: Synthetic oligonucleotide
  Target: LAMA2; (+) strand; PAM type: YTN; PAM sequence: CTG
gcttctgcttttctgggaaa

SEQ ID NO: 366301 - DNA, 20 bp, Artificial Sequence
  Description of Artificial Sequence: Synthetic oligonucleotide
  Target: LAMA2; (+) strand; PAM type: YTN; PAM sequence: CTT
ctgcttttctgggaaatacg

SEQ ID NO: 366302 - DNA, 20 bp, Artificial Sequence
  Description of Artificial Sequence: Synthetic oligonucleotide
  Target: LAMA2; (+) strand; PAM type: YTN; PAM sequence: TTC
tgcttttctgggaaatacgt

SEQ ID NO: 366303 - DNA, 20 bp, Artificial Sequence
  Description of Artificial Sequence: Synthetic oligonucleotide
  Target: LAMA2; (+) strand; PAM type: YTN; PAM sequence: CTG
cttttctgggaaatacgttg

SEQ ID NO: 366304 - DNA, 20 bp, Artificial Sequence
  Description of Artificial Sequence: Synthetic oligonucleotide
  Target: LAMA2; (+) strand; PAM type: YTN; PAM sequence: CTT
ttctgggaaatacgttgtct

SEQ ID NO: 366305 - DNA, 20 bp, Artificial Sequence
  Description of Artificial Sequence: Synthetic oligonucleotide
  Target: LAMA2; (+) strand; PAM type: YTN; PAM sequence: TTT
tctgggaaatacgttgtctg

SEQ ID NO: 366306 - DNA, 20 bp, Artificial Sequence
  Description of Artificial Sequence: Synthetic oligonucleotide
  Target: LAMA2; (+) strand; PAM type: YTN; PAM sequence: TTT
ctgggaaatacgttgtctgc

SEQ ID NO: 366307 - DNA, 20 bp, Artificial Sequence
  Description of Artificial Sequence: Synthetic oligonucleotide
  Target: LAMA2; (+) strand; PAM type: YTN; PAM sequence: TTC
tgggaaatacgttgtctgct

SEQ ID NO: 366308 - DNA, 20 bp, Artificial Sequence
  Description of Artificial Sequence: Synthetic oligonucleotide
  Target: LAMA2; (+) strand; PAM type: YTN; PAM sequence: CTG
ggaaatacgttgtctgctat

SEQ ID NO: 366309 - DNA, 20 bp, Artificial Sequence
  Description of Artificial Sequence: Synthetic oligonucleotide
  Target: LAMA2; (+) strand; PAM type: YTN; PAM sequence: TTG
tctgctatttcaaaatgccc

SEQ ID NO: 366310 - DNA, 20 bp, Artificial Sequence
  Description of Artificial Sequence: Synthetic oligonucleotide
  Target: LAMA2; (+) strand; PAM type: YTN; PAM sequence: CTG
ctatttcaaaatgccctcca

SEQ ID NO: 366311 - DNA, 20 bp, Artificial Sequence
  Description of Artificial Sequence: Synthetic oligonucleotide
  Target: LAMA2; (+) strand; PAM type: YTN; PAM sequence: CTA
tttcaaaatgccctccatct

SEQ ID NO: 366312 - DNA, 20 bp, Artificial Sequence
  Description of Artificial Sequence: Synthetic oligonucleotide
  Target: LAMA2; (+) strand; PAM type: YTN; PAM sequence: TTT
caaaatgccctccatctgaa

SEQ ID NO: 366313 - DNA, 20 bp, Artificial Sequence
  Description of Artificial Sequence: Synthetic oligonucleotide
  Target: LAMA2; (+) strand; PAM type: YTN; PAM sequence: TTC
aaaatgccctccatctgaat

SEQ ID NO: 366314 - DNA, 20 bp, Artificial Sequence
  Description of Artificial Sequence: Synthetic oligonucleotide
  Target: LAMA2; (+) strand; PAM type: YTN; PAM sequence: CTC
catctgaataatgtaacctg

SEQ ID NO: 366315 - DNA, 20 bp, Artificial Sequence
  Description of Artificial Sequence: Synthetic oligonucleotide
  Target: LAMA2; (+) strand; PAM type: YTN; PAM sequence: CTG
aataatgtaacctgaaattc

SEQ ID NO: 366316 - DNA, 20 bp, Artificial Sequence
  Description of Artificial Sequence: Synthetic oligonucleotide
  Target: LAMA2; (+) strand; PAM type: YTN; PAM sequence: CTG
aaattcattcaactcatatt

SEQ ID NO: 366317 - DNA, 20 bp, Artificial Sequence
  Description of Artificial Sequence: Synthetic oligonucleotide
  Target: LAMA2; (+) strand; PAM type: YTN; PAM sequence: TTC
attcaactcatatttagcac

SEQ ID NO: 366318 - DNA, 20 bp, Artificial Sequence
  Description of Artificial Sequence: Synthetic oligonucleotide
  Target: LAMA2; (+) strand; PAM type: YTN; PAM sequence: TTC
aactcatatttagcacttta

SEQ ID NO: 366319 - DNA, 20 bp, Artificial Sequence
  Description of Artificial Sequence: Synthetic oligonucleotide
  Target: LAMA2; (+) strand; PAM type: YTN; PAM sequence: CTC
atatttagcactttaggcca

SEQ ID NO: 366320 - DNA, 20 bp, Artificial Sequence
  Description of Artificial Sequence: Synthetic oligonucleotide
  Target: LAMA2; (+) strand; PAM type: YTN; PAM sequence: TTT
agcactttaggccatatcca

SEQ ID NO: 366321 - DNA, 20 bp, Artificial Sequence
  Description of Artificial Sequence: Synthetic oligonucleotide
  Target: LAMA2; (+) strand; PAM type: YTN; PAM sequence: TTA
gcactttaggccatatccag

SEQ ID NO: 366322 - DNA, 20 bp, Artificial Sequence
  Description of Artificial Sequence: Synthetic oligonucleotide
  Target: LAMA2; (+) strand; PAM type: YTN; PAM sequence: CTT
taggccatatccagggttgt

SEQ ID NO: 366323 - DNA, 20 bp, Artificial Sequence
  Description of Artificial Sequence: Synthetic oligonucleotide
  Target: LAMA2; (+) strand; PAM type: YTN; PAM sequence: TTT
aggccatatccagggttgtg

SEQ ID NO: 366324 - DNA, 20 bp, Artificial Sequence
  Description of Artificial Sequence: Synthetic oligonucleotide
  Target: LAMA2; (+) strand; PAM type: YTN; PAM sequence: TTA
ggccatatccagggttgtgg

SEQ ID NO: 366325 - DNA, 20 bp, Artificial Sequence
  Description of Artificial Sequence: Synthetic oligonucleotide
  Target: LAMA2; (+) strand; PAM type: YTN; PAM sequence: TTG
tggaaggtgtacgtaagcaa

SEQ ID NO: 366326 - DNA, 20 bp, Artificial Sequence
  Description of Artificial Sequence: Synthetic oligonucleotide
  Target: LAMA2; (+) strand; PAM type: YTN; PAM sequence: TTG
cctacaaggcaagatgagaa

SEQ ID NO: 366327 - DNA, 20 bp, Artificial Sequence
  Description of Artificial Sequence: Synthetic oligonucleotide
  Target: LAMA2; (+) strand; PAM type: YTN; PAM sequence: CTA
caaggcaagatgagaactct

SEQ ID NO: 366328 - DNA, 20 bp, Artificial Sequence
  Description of Artificial Sequence: Synthetic oligonucleotide
  Target: LAMA2; (+) strand; PAM type: YTN; PAM sequence: CTC
tgttttctatactttctatt

SEQ ID NO: 366329 - DNA, 20 bp, Artificial Sequence
  Description of Artificial Sequence: Synthetic oligonucleotide
  Target: LAMA2; (+) strand; PAM type: YTN; PAM sequence: CTG
ttttctatactttctattgt

SEQ ID NO: 366330 - DNA, 20 bp, Artificial Sequence
  Description of Artificial Sequence: Synthetic oligonucleotide
  Target: LAMA2; (+) strand; PAM type: YTN; PAM sequence: TTT
tctatactttctattgttcc

SEQ ID NO: 366331 - DNA, 20 bp, Artificial Sequence
  Description of Artificial Sequence: Synthetic oligonucleotide
  Target: LAMA2; (+) strand; PAM type: YTN; PAM sequence: TTT
ctatactttctattgttcct

SEQ ID NO: 366332 - DNA, 20 bp, Artificial Sequence
  Description of Artificial Sequence: Synthetic oligonucleotide
  Target: LAMA2; (+) strand; PAM type: YTN; PAM sequence: TTC
tatactttctattgttcctc

SEQ ID NO: 366333 - DNA, 20 bp, Artificial Sequence
  Description of Artificial Sequence: Synthetic oligonucleotide
  Target: LAMA2; (+) strand; PAM type: YTN; PAM sequence: CTA
tactttctattgttcctccc

SEQ ID NO: 366334 - DNA, 20 bp, Artificial Sequence
  Description of Artificial Sequence: Synthetic oligonucleotide
  Target: LAMA2; (+) strand; PAM type: YTN; PAM sequence: CTT
tctattgttcctccctttgc

SEQ ID NO: 366335 - DNA, 20 bp, Artificial Sequence
  Description of Artificial Sequence: Synthetic oligonucleotide
  Target: LAMA2; (+) strand; PAM type: YTN; PAM sequence: TTT
ctattgttcctccctttgca

SEQ ID NO: 366336 - DNA, 20 bp, Artificial Sequence
  Description of Artificial Sequence: Synthetic oligonucleotide
  Target: LAMA2; (+) strand; PAM type: YTN; PAM sequence: TTC
tattgttcctccctttgcaa

SEQ ID NO: 366337 - DNA, 20 bp, Artificial Sequence
  Description of Artificial Sequence: Synthetic oligonucleotide
  Target: LAMA2; (+) strand; PAM type: YTN; PAM sequence: CTA
ttgttcctccctttgcaaca

SEQ ID NO: 366338 - DNA, 20 bp, Artificial Sequence
  Description of Artificial Sequence: Synthetic oligonucleotide
  Target: LAMA2; (+) strand; PAM type: YTN; PAM sequence: TTG
ttcctccctttgcaacagaa

SEQ ID NO: 366339 - DNA, 20 bp, Artificial Sequence
  Description of Artificial Sequence: Synthetic oligonucleotide
  Target: LAMA2; (+) strand; PAM type: YTN; PAM sequence: TTC
ctccctttgcaacagaagta

SEQ ID NO: 366340 - DNA, 20 bp, Artificial Sequence
  Description of Artificial Sequence: Synthetic oligonucleotide
  Target: LAMA2; (+) strand; PAM type: YTN; PAM sequence: CTC
cctttgcaacagaagtagaa

SEQ ID NO: 366341 - DNA, 20 bp, Artificial Sequence
  Description of Artificial Sequence: Synthetic oligonucleotide
  Target: LAMA2; (+) strand; PAM type: YTN; PAM sequence: CTT
tgcaacagaagtagaaaggg

SEQ ID NO: 366342 - DNA, 20 bp, Artificial Sequence
  Description of Artificial Sequence: Synthetic oligonucleotide
  Target: LAMA2; (+) strand; PAM type: YTN; PAM sequence: TTT
gcaacagaagtagaaagggc

SEQ ID NO: 366343 - DNA, 20 bp, Artificial Sequence
  Description of Artificial Sequence: Synthetic oligonucleotide
  Target: LAMA2; (+) strand; PAM type: YTN; PAM sequence: TTG
caacagaagtagaaagggcc

SEQ ID NO: 366344 - DNA, 20 bp, Artificial Sequence
  Description of Artificial Sequence: Synthetic oligonucleotide
  Target: LAMA2; (+) strand; PAM type: YTN; PAM sequence: CTA
ctgtccaacatgatgaatat

SEQ ID NO: 366345 - DNA, 20 bp, Artificial Sequence
  Description of Artificial Sequence: Synthetic oligonucleotide
  Target: LAMA2; (+) strand; PAM type: YTN; PAM sequence: CTG
tccaacatgatgaatatcct

SEQ ID NO: 366346 - DNA, 20 bp, Artificial Sequence
  Description of Artificial Sequence: Synthetic oligonucleotide
  Target: LAMA2; (+) strand; PAM type: YTN; PAM sequence: CTT
aaagacaaaatctttaagca

SEQ ID NO: 366347 - DNA, 20 bp, Artificial Sequence
  Description of Artificial Sequence: Synthetic oligonucleotide
  Target: LAMA2; (+) strand; PAM type: YTN; PAM sequence: TTA
aagacaaaatctttaagcag

SEQ ID NO: 366348 - DNA, 20 bp, Artificial Sequence
  Description of Artificial Sequence: Synthetic oligonucleotide
  Target: LAMA2; (+) strand; PAM type: YTN; PAM sequence: CTT
taagcagtaagtgaaaggtt

SEQ ID NO: 366349 - DNA, 20 bp, Artificial Sequence
  Description of Artificial Sequence: Synthetic oligonucleotide
  Target: LAMA2; (+) strand; PAM type: YTN; PAM sequence: TTT
aagcagtaagtgaaaggtta

SEQ ID NO: 366350 - DNA, 20 bp, Artificial Sequence
  Description of Artificial Sequence: Synthetic oligonucleotide
  Target: LAMA2; (+) strand; PAM type: YTN; PAM sequence: TTA
agcagtaagtgaaaggttaa

SEQ ID NO: 366351 - DNA, 20 bp, Artificial Sequence
  Description of Artificial Sequence: Synthetic oligonucleotide
  Target: LAMA2; (+) strand; PAM type: YTN; PAM sequence: TTA
actacaattctcatttaaaa

SEQ ID NO: 366352 - DNA, 20 bp, Artificial Sequence
  Description of Artificial Sequence: Synthetic oligonucleotide
  Target: LAMA2; (+) strand; PAM type: YTN; PAM sequence: CTA
caattctcatttaaaaagaa

SEQ ID NO: 366353 - DNA, 20 bp, Artificial Sequence
  Description of Artificial Sequence: Synthetic oligonucleotide
  Target: LAMA2; (+) strand; PAM type: YTN; PAM sequence: TTC
tcatttaaaaagaaaattgc

SEQ ID NO: 366354 - DNA, 20 bp, Artificial Sequence
  Description of Artificial Sequence: Synthetic oligonucleotide
  Target: LAMA2; (+) strand; PAM type: YTN; PAM sequence: CTC
atttaaaaagaaaattgcat

SEQ ID NO: 366355 - DNA, 20 bp, Artificial Sequence
  Description of Artificial Sequence: Synthetic oligonucleotide
  Target: LAMA2; (+) strand; PAM type: YTN; PAM sequence: TTT
aaaaagaaaattgcattgct

SEQ ID NO: 366356 - DNA, 20 bp, Artificial Sequence
  Description of Artificial Sequence: Synthetic oligonucleotide
  Target: LAMA2; (+) strand; PAM type: YTN; PAM sequence: TTA
aaaagaaaattgcattgctg

SEQ ID NO: 366357 - DNA, 20 bp, Artificial Sequence
  Description of Artificial Sequence: Synthetic oligonucleotide
  Target: LAMA2; (+) strand; PAM type: YTN; PAM sequence: TTG
cattgctgatatctctttgt

SEQ ID NO: 366358 - DNA, 20 bp, Artificial Sequence
  Description of Artificial Sequence: Synthetic oligonucleotide
  Target: LAMA2; (+) strand; PAM type: YTN; PAM sequence: TTG
ctgatatctctttgttacat

SEQ ID NO: 366359 - DNA, 20 bp, Artificial Sequence
  Description of Artificial Sequence: Synthetic oligonucleotide
  Target: LAMA2; (+) strand; PAM type: YTN; PAM sequence: CTG
atatctctttgttacataaa

SEQ ID NO: 366360 - DNA, 20 bp, Artificial Sequence
  Description of Artificial Sequence: Synthetic oligonucleotide
  Target: LAMA2; (+) strand; PAM type: YTN; PAM sequence: CTC
tttgttacataaattttcca

SEQ ID NO: 366361 - DNA, 20 bp, Artificial Sequence
  Description of Artificial Sequence: Synthetic oligonucleotide
  Target: LAMA2; (+) strand; PAM type: YTN; PAM sequence: CTT
tgttacataaattttccaca

SEQ ID NO: 366362 - DNA, 20 bp, Artificial Sequence
  Description of Artificial Sequence: Synthetic oligonucleotide
  Target: LAMA2; (+) strand; PAM type: YTN; PAM sequence: TTT
gttacataaattttccacaa

SEQ ID NO: 366363 - DNA, 20 bp, Artificial Sequence
  Description of Artificial Sequence: Synthetic oligonucleotide
  Target: LAMA2; (+) strand; PAM type: YTN; PAM sequence: TTG
ttacataaattttccacaag

SEQ ID NO: 366364 - DNA, 20 bp, Artificial Sequence
  Description of Artificial Sequence: Synthetic oligonucleotide
  Target: LAMA2; (+) strand; PAM type: YTN; PAM sequence: TTA
cataaattttccacaaggat

SEQ ID NO: 366365 - DNA, 20 bp, Artificial Sequence
  Description of Artificial Sequence: Synthetic oligonucleotide
  Target: LAMA2; (+) strand; PAM type: YTN; PAM sequence: TTT
tccacaaggattatacattt

SEQ ID NO: 366366 - DNA, 20 bp, Artificial Sequence
  Description of Artificial Sequence: Synthetic oligonucleotide
  Target: LAMA2; (+) strand; PAM type: YTN; PAM sequence: TTT
ccacaaggattatacatttt

SEQ ID NO: 366367 - DNA, 20 bp, Artificial Sequence
  Description of Artificial Sequence: Synthetic oligonucleotide
  Target: LAMA2; (+) strand; PAM type: YTN; PAM sequence: TTC
cacaaggattatacattttc

SEQ ID NO: 366368 - DNA, 20 bp, Artificial Sequence
  Description of Artificial Sequence: Synthetic oligonucleotide
  Target: LAMA2; (+) strand; PAM type: YTN; PAM sequence: TTA
tacattttctttttattcat

SEQ ID NO: 366369 - DNA, 20 bp, Artificial Sequence
  Description of Artificial Sequence: Synthetic oligonucleotide
  Target: LAMA2; (+) strand; PAM type: YTN; PAM sequence: TTT
tctttttattcatttgttat

SEQ ID NO: 366370 - DNA, 20 bp, Artificial Sequence
  Description of Artificial Sequence: Synthetic oligonucleotide
  Target: LAMA2; (+) strand; PAM type: YTN; PAM sequence: TTT
ctttttattcatttgttatc

SEQ ID NO: 366371 - DNA, 20 bp, Artificial Sequence
  Description of Artificial Sequence: Synthetic oligonucleotide
  Target: LAMA2; (+) strand; PAM type: YTN; PAM sequence: TTC
tttttattcatttgttatct

SEQ ID NO: 366372 - DNA, 20 bp, Artificial Sequence
  Description of Artificial Sequence: Synthetic oligonucleotide
  Target: LAMA2; (+) strand; PAM type: YTN; PAM sequence: CTT
tttattcatttgttatctat

SEQ ID NO: 366373 - DNA, 20 bp, Artificial Sequence
  Description of Artificial Sequence: Synthetic oligonucleotide
  Target: LAMA2; (+) strand; PAM type: YTN; PAM sequence: TTT
ttattcatttgttatctatt

SEQ ID NO: 366374 - DNA, 20 bp, Artificial Sequence
  Description of Artificial Sequence: Synthetic oligonucleotide
  Target: LAMA2; (+) strand; PAM type: YTN; PAM sequence: TTT
tattcatttgttatctattt

SEQ ID NO: 366375 - DNA, 20 bp, Artificial Sequence
  Description of Artificial Sequence: Synthetic oligonucleotide
  Target: LAMA2; (+) strand; PAM type: YTN; PAM sequence: TTT
attcatttgttatctatttg

SEQ ID NO: 366376 - DNA, 20 bp, Artificial Sequence
  Description of Artificial Sequence: Synthetic oligonucleotide
  Target: LAMA2; (+) strand; PAM type: YTN; PAM sequence: TTA
ttcatttgttatctatttga

SEQ ID NO: 366377 - DNA, 20 bp, Artificial Sequence
  Description of Artificial Sequence: Synthetic oligonucleotide
  Target: LAMA2; (+) strand; PAM type: YTN; PAM sequence: TTC
atttgttatctatttgacaa

SEQ ID NO: 366378 - DNA, 20 bp, Artificial Sequence
  Description of Artificial Sequence: Synthetic oligonucleotide
  Target: LAMA2; (+) strand; PAM type: YTN; PAM sequence: TTT
gttatctatttgacaatagc

SEQ ID NO: 366379 - DNA, 20 bp, Artificial Sequence
  Description of Artificial Sequence: Synthetic oligonucleotide
  Target: LAMA2; (+) strand; PAM type: YTN; PAM sequence: TTG
ttatctatttgacaatagca

SEQ ID NO: 366380 - DNA, 20 bp, Artificial Sequence
  Description of Artificial Sequence: Synthetic oligonucleotide
  Target: LAMA2; (+) strand; PAM type: YTN; PAM sequence: TTA
tctatttgacaatagcaagc

SEQ ID NO: 366381 - DNA, 20 bp, Artificial Sequence
  Description of Artificial Sequence: Synthetic oligonucleotide
  Target: LAMA2; (+) strand; PAM type: YTN; PAM sequence: CTA
tttgacaatagcaagcctgt

SEQ ID NO: 366382 - DNA, 20 bp, Artificial Sequence
  Description of Artificial Sequence: Synthetic oligonucleotide
  Target: LAMA2; (+) strand; PAM type: YTN; PAM sequence: TTT
gacaatagcaagcctgtttc

SEQ ID NO: 366383 - DNA, 20 bp, Artificial Sequence
  Description of Artificial Sequence: Synthetic oligonucleotide
  Target: LAMA2; (+) strand; PAM type: YTN; PAM sequence: TTG
acaatagcaagcctgtttct

SEQ ID NO: 366384 - DNA, 20 bp, Artificial Sequence
  Description of Artificial Sequence: Synthetic oligonucleotide
  Target: LAMA2; (+) strand; PAM type: YTN; PAM sequence: CTG
tttctctttagcttaaagga

SEQ ID NO: 366385 - DNA, 20 bp, Artificial Sequence
  Description of Artificial Sequence: Synthetic oligonucleotide
  Target: LAMA2; (+) strand; PAM type: YTN; PAM sequence: TTT
ctctttagcttaaaggaact

SEQ ID NO: 366386 - DNA, 20 bp, Artificial Sequence
  Description of Artificial Sequence: Synthetic oligonucleotide
  Target: LAMA2; (+) strand; PAM type: YTN; PAM sequence: TTC
tctttagcttaaaggaactt

SEQ ID NO: 366387 - DNA, 20 bp, Artificial Sequence
  Description of Artificial Sequence: Synthetic oligonucleotide
  Target: LAMA2; (+) strand; PAM type: YTN; PAM sequence: CTC
tttagcttaaaggaacttgg

SEQ ID NO: 366388 - DNA, 20 bp, Artificial Sequence
  Description of Artificial Sequence: Synthetic oligonucleotide
  Target: LAMA2; (+) strand; PAM type: YTN; PAM sequence: CTT
tagcttaaaggaacttggat

SEQ ID NO: 366389 - DNA, 20 bp, Artificial Sequence
  Description of Artificial Sequence: Synthetic oligonucleotide
  Target: LAMA2; (+) strand; PAM type: YTN; PAM sequence: TTT
agcttaaaggaacttggatt

SEQ ID NO: 366390 - DNA, 20 bp, Artificial Sequence
  Description of Artificial Sequence: Synthetic oligonucleotide
  Target: LAMA2; (+) strand; PAM type: YTN; PAM sequence: TTA
gcttaaaggaacttggatta

SEQ ID NO: 366391 - DNA, 20 bp, Artificial Sequence
  Description of Artificial Sequence: Synthetic oligonucleotide
  Target: LAMA2; (+) strand; PAM type: YTN; PAM sequence: CTT
aaaggaacttggattaaaat

SEQ ID NO: 366392 - DNA, 20 bp, Artificial Sequence
  Description of Artificial Sequence: Synthetic oligonucleotide
  Target: LAMA2; (+) strand; PAM type: YTN; PAM sequence: TTA
aaggaacttggattaaaatt

SEQ ID NO: 366393 - DNA, 20 bp, Artificial Sequence
  Description of Artificial Sequence: Synthetic oligonucleotide
  Target: LAMA2; (+) strand; PAM type: YTN; PAM sequence: CTT
ggattaaaattttttctgtt

SEQ ID NO: 366394 - DNA, 20 bp, Artificial Sequence
  Description of Artificial Sequence: Synthetic oligonucleotide
  Target: LAMA2; (+) strand; PAM type: YTN; PAM sequence: TTG
gattaaaattttttctgtta

SEQ ID NO: 366395 - DNA, 20 bp, Artificial Sequence
  Description of Artificial Sequence: Synthetic oligonucleotide
  Target: LAMA2; (+) strand; PAM type: YTN; PAM sequence: TTA
aaattttttctgttatttta

SEQ ID NO: 366396 - DNA, 20 bp, Artificial Sequence
  Description of Artificial Sequence: Synthetic oligonucleotide
  Target: LAMA2; (+) strand; PAM type: YTN; PAM sequence: TTT
tttctgttattttaatcagc

SEQ ID NO: 366397 - DNA, 20 bp, Artificial Sequence
  Description of Artificial Sequence: Synthetic oligonucleotide
  Target: LAMA2; (+) strand; PAM type: YTN; PAM sequence: TTT
ttctgttattttaatcagca

SEQ ID NO: 366398 - DNA, 20 bp, Artificial Sequence
  Description of Artificial Sequence: Synthetic oligonucleotide
  Target: LAMA2; (+) strand; PAM type: YTN; PAM sequence: TTT
tctgttattttaatcagcat

SEQ ID NO: 366399 - DNA, 20 bp, Artificial Sequence
  Description of Artificial Sequence: Synthetic oligonucleotide
  Target: LAMA2; (+) strand; PAM type: YTN; PAM sequence: TTT
ctgttattttaatcagcatt

SEQ ID NO: 366400 - DNA, 20 bp, Artificial Sequence
  Description of Artificial Sequence: Synthetic oligonucleotide
  Target: LAMA2; (+) strand; PAM type: YTN; PAM sequence: TTC
tgttattttaatcagcattg

SEQ ID NO: 366401 - DNA, 20 bp, Artificial Sequence
  Description of Artificial Sequence: Synthetic oligonucleotide
  Target: LAMA2; (+) strand; PAM type: YTN; PAM sequence: CTG
ttattttaatcagcattgat

SEQ ID NO: 366402 - DNA, 20 bp, Artificial Sequence
  Description of Artificial Sequence: Synthetic oligonucleotide
  Target: LAMA2; (+) strand; PAM type: YTN; PAM sequence: TTA
ttttaatcagcattgatgtt

SEQ ID NO: 366403 - DNA, 20 bp, Artificial Sequence
  Description of Artificial Sequence: Synthetic oligonucleotide
  Target: LAMA2; (+) strand; PAM type: YTN; PAM sequence: TTT
taatcagcattgatgttgta

SEQ ID NO: 366404 - DNA, 20 bp, Artificial Sequence
  Description of Artificial Sequence: Synthetic oligonucleotide
  Target: LAMA2; (+) strand; PAM type: YTN; PAM sequence: TTT
aatcagcattgatgttgtat

SEQ ID NO: 366405 - DNA, 20 bp, Artificial Sequence
  Description of Artificial Sequence: Synthetic oligonucleotide
  Target: LAMA2; (+) strand; PAM type: YTN; PAM sequence: TTA
atcagcattgatgttgtata

SEQ ID NO: 366406 - DNA, 20 bp, Artificial Sequence
  Description of Artificial Sequence: Synthetic oligonucleotide
  Target: LAMA2; (+) strand; PAM type: YTN; PAM sequence: TTG
atgttgtatattatgagcgt

SEQ ID NO: 366407 - DNA, 20 bp, Artificial Sequence
  Description of Artificial Sequence: Synthetic oligonucleotide
  Target: LAMA2; (+) strand; PAM type: YTN; PAM sequence: TTG
tatattatgagcgtgtggct

SEQ ID NO: 366408 - DNA, 20 bp, Artificial Sequence
  Description of Artificial Sequence: Synthetic oligonucleotide
  Target: LAMA2; (+) strand; PAM type: YTN; PAM sequence: TTA
tgagcgtgtggctttttgtt

SEQ ID NO: 366409 - DNA, 20 bp, Artificial Sequence
  Description of Artificial Sequence: Synthetic oligonucleotide
  Target: LAMA2; (+) strand; PAM type: YTN; PAM sequence: CTT
tttgttttcttggcagagac

SEQ ID NO: 366410 - DNA, 20 bp, Artificial Sequence
  Description of Artificial Sequence: Synthetic oligonucleotide
  Target: LAMA2; (+) strand; PAM type: YTN; PAM sequence: TTT
ttgttttcttggcagagacc

SEQ ID NO: 366411 - DNA, 20 bp, Artificial Sequence
  Description of Artificial Sequence: Synthetic oligonucleotide
  Target: LAMA2; (+) strand; PAM type: YTN; PAM sequence: TTT
tgttttcttggcagagacct

SEQ ID NO: 366412 - DNA, 20 bp, Artificial Sequence
  Description of Artificial Sequence: Synthetic oligonucleotide
  Target: LAMA2; (+) strand; PAM type: YTN; PAM sequence: TTT
gttttcttggcagagacctt

SEQ ID NO: 366413 - DNA, 20 bp, Artificial Sequence
  Description of Artificial Sequence: Synthetic oligonucleotide
  Target: LAMA2; (+) strand; PAM type: YTN; PAM sequence: TTG
ttttcttggcagagaccttg

SEQ ID NO: 366414 - DNA, 20 bp, Artificial Sequence
  Description of Artificial Sequence: Synthetic oligonucleotide
  Target: LAMA2; (+) strand; PAM type: YTN; PAM sequence: TTT
tcttggcagagaccttgaaa

SEQ ID NO: 366415 - DNA, 20 bp, Artificial Sequence
  Description of Artificial Sequence: Synthetic oligonucleotide
  Target: LAMA2; (+) strand; PAM type: YTN; PAM sequence: TTT
cttggcagagaccttgaaaa

SEQ ID NO: 366416 - DNA, 20 bp, Artificial Sequence
  Description of Artificial Sequence: Synthetic oligonucleotide
  Target: LAMA2; (+) strand; PAM type: YTN; PAM sequence: TTC
ttggcagagaccttgaaaaa

SEQ ID NO: 366417 - DNA, 20 bp, Artificial Sequence
  Description of Artificial Sequence: Synthetic oligonucleotide
  Target: LAMA2; (+) strand; PAM type: YTN; PAM sequence: CTT
ggcagagaccttgaaaaaat

SEQ ID NO: 366418 - DNA, 20 bp, Artificial Sequence
  Description of Artificial Sequence: Synthetic oligonucleotide
  Target: LAMA2; (+) strand; PAM type: YTN; PAM sequence: TTG
gcagagaccttgaaaaaatt

SEQ ID NO: 366419 - DNA, 20 bp, Artificial Sequence
  Description of Artificial Sequence: Synthetic oligonucleotide
  Target: LAMA2; (+) strand; PAM type: YTN; PAM sequence: CTT
gaaaaaattttgaaccctag

SEQ ID NO: 366420 - DNA, 20 bp, Artificial Sequence
  Description of Artificial Sequence: Synthetic oligonucleotide
  Target: LAMA2; (+) strand; PAM type: YTN; PAM sequence: TTG
aaaaaattttgaaccctagt

SEQ ID NO: 366421 - DNA, 20 bp, Artificial Sequence
  Description of Artificial Sequence: Synthetic oligonucleotide
  Target: LAMA2; (+) strand; PAM type: YTN; PAM sequence: TTT
tgaaccctagtcaataagaa

SEQ ID NO: 366422 - DNA, 20 bp, Artificial Sequence
  Description of Artificial Sequence: Synthetic oligonucleotide
  Target: LAMA2; (+) strand; PAM type: YTN; PAM sequence: TTT
gaaccctagtcaataagaaa

SEQ ID NO: 366423 - DNA, 20 bp, Artificial Sequence
  Description of Artificial Sequence: Synthetic oligonucleotide
  Target: LAMA2; (+) strand; PAM type: YTN; PAM sequence: TTG
aaccctagtcaataagaaat

SEQ ID NO: 366424 - DNA, 20 bp, Artificial Sequence
  Description of Artificial Sequence: Synthetic oligonucleotide
  Target: LAMA2; (+) strand; PAM type: YTN; PAM sequence: CTA
gtcaataagaaatctctgta

SEQ ID NO: 366425 - DNA, 20 bp, Artificial Sequence
  Description of Artificial Sequence: Synthetic oligonucleotide
  Target: LAMA2; (+) strand; PAM type: YTN; PAM sequence: CTC
tgtattaatataaaactata

SEQ ID NO: 366426 - DNA, 20 bp, Artificial Sequence
  Description of Artificial Sequence: Synthetic oligonucleotide
  Target: LAMA2; (+) strand; PAM type: YTN; PAM sequence: CTG
tattaatataaaactataac

SEQ ID NO: 366427 - DNA, 20 bp, Artificial Sequence
  Description of Artificial Sequence: Synthetic oligonucleotide
  Target: LAMA2; (+) strand; PAM type: YTN; PAM sequence: TTA
atataaaactataacttatg

SEQ ID NO: 366428 - DNA, 20 bp, Artificial Sequence
  Description of Artificial Sequence: Synthetic oligonucleotide
  Target: LAMA2; (+) strand; PAM type: YTN; PAM sequence: CTA
taacttatggtttatttgat

SEQ ID NO: 366429 - DNA, 20 bp, Artificial Sequence
  Description of Artificial Sequence: Synthetic oligonucleotide
  Target: LAMA2; (+) strand; PAM type: YTN; PAM sequence: CTT
atggtttatttgattagatc

SEQ ID NO: 366430 - DNA, 20 bp, Artificial Sequence
  Description of Artificial Sequence: Synthetic oligonucleotide
  Target: LAMA2; (+) strand; PAM type: YTN; PAM sequence: TTA
tggtttatttgattagatca

SEQ ID NO: 366431 - DNA, 20 bp, Artificial Sequence
  Description of Artificial Sequence: Synthetic oligonucleotide
  Target: LAMA2; (+) strand; PAM type: YTN; PAM sequence: TTT
atttgattagatcaatgttt

SEQ ID NO: 366432 - DNA, 20 bp, Artificial Sequence
  Description of Artificial Sequence: Synthetic oligonucleotide
  Target: LAMA2; (+) strand; PAM type: YTN; PAM sequence: TTA
tttgattagatcaatgttta

SEQ ID NO: 366433 - DNA, 20 bp, Artificial Sequence
  Description of Artificial Sequence: Synthetic oligonucleotide
  Target: LAMA2; (+) strand; PAM type: YTN; PAM sequence: TTT
gattagatcaatgtttaatt

SEQ ID NO: 366434 - DNA, 20 bp, Artificial Sequence
  Description of Artificial Sequence: Synthetic oligonucleotide
  Target: LAMA2; (+) strand; PAM type: YTN; PAM sequence: TTG
attagatcaatgtttaatta

SEQ ID NO: 366435 - DNA, 20 bp, Artificial Sequence
  Description of Artificial Sequence: Synthetic oligonucleotide
  Target: LAMA2; (+) strand; PAM type: YTN; PAM sequence: TTA
gatcaatgtttaattatgga

SEQ ID NO: 366436 - DNA, 20 bp, Artificial Sequence
  Description of Artificial Sequence: Synthetic oligonucleotide
  Target: LAMA2; (+) strand; PAM type: YTN; PAM sequence: TTT
aattatggataacatgtatt

SEQ ID NO: 366437 - DNA, 20 bp, Artificial Sequence
  Description of Artificial Sequence: Synthetic oligonucleotide
  Target: LAMA2; (+) strand; PAM type: YTN; PAM sequence: TTA
attatggataacatgtattt

SEQ ID NO: 366438 - DNA, 20 bp, Artificial Sequence
  Description of Artificial Sequence: Synthetic oligonucleotide
  Target: LAMA2; (+) strand; PAM type: YTN; PAM sequence: TTA
tggataacatgtattttttg

SEQ ID NO: 366439 - DNA, 20 bp, Artificial Sequence
  Description of Artificial Sequence: Synthetic oligonucleotide
  Target: LAMA2; (+) strand; PAM type: YTN; PAM sequence: TTT
tttgcactgaatatttacac

SEQ ID NO: 366440 - DNA, 20 bp, Artificial Sequence
  Description of Artificial Sequence: Synthetic oligonucleotide
  Target: LAMA2; (+) strand; PAM type: YTN; PAM sequence: TTT
ttgcactgaatatttacaca

SEQ ID NO: 366441 - DNA, 20 bp, Artificial Sequence
  Description of Artificial Sequence: Synthetic oligonucleotide
  Target: LAMA2; (+) strand; PAM type: YTN; PAM sequence: TTT
tgcactgaatatttacacac

SEQ ID NO: 366442 - DNA, 20 bp, Artificial Sequence
  Description of Artificial Sequence: Synthetic oligonucleotide
  Target: LAMA2; (+) strand; PAM type: YTN; PAM sequence: TTT
gcactgaatatttacacaca

SEQ ID NO: 366443 - DNA, 20 bp, Artificial Sequence
  Description of Artificial Sequence: Synthetic oligonucleotide
  Target: LAMA2; (+) strand; PAM type: YTN; PAM sequence: TTG
cactgaatatttacacacaa

SEQ ID NO: 366444 - DNA, 20 bp, Artificial Sequence
  Description of Artificial Sequence: Synthetic oligonucleotide
  Target: LAMA2; (+) strand; PAM type: YTN; PAM sequence: CTG
aatatttacacacaaattaa

SEQ ID NO: 366445 - DNA, 20 bp, Artificial Sequence
  Description of Artificial Sequence: Synthetic oligonucleotide
  Target: LAMA2; (+) strand; PAM type: YTN; PAM sequence: TTT
acacacaaattaatctagcc

SEQ ID NO: 366446 - DNA, 20 bp, Artificial Sequence
  Description of Artificial Sequence: Synthetic oligonucleotide
  Target: LAMA2; (+) strand; PAM type: YTN; PAM sequence: TTA
cacacaaattaatctagccc

SEQ ID NO: 366447 - DNA, 20 bp, Artificial Sequence
  Description of Artificial Sequence: Synthetic oligonucleotide
  Target: LAMA2; (+) strand; PAM type: YTN; PAM sequence: TTA
atctagcccatagtaaaagt

SEQ ID NO: 366448 - DNA, 20 bp, Artificial Sequence
  Description of Artificial Sequence: Synthetic oligonucleotide
  Target: LAMA2; (+) strand; PAM type: YTN; PAM sequence: CTA
gcccatagtaaaagtgctaa

SEQ ID NO: 366449 - DNA, 20 bp, Artificial Sequence
  Description of Artificial Sequence: Synthetic oligonucleotide
  Target: LAMA2; (+) strand; PAM type: YTN; PAM sequence: CTA
atggaatgtttcatccaaac

SEQ ID NO: 366450 - DNA, 20 bp, Artificial Sequence
  Description of Artificial Sequence: Synthetic oligonucleotide
  Target: LAMA2; (+) strand; PAM type: YTN; PAM sequence: TTT
catccaaacataagttagta

SEQ ID NO: 366451 - DNA, 20 bp, Artificial Sequence
  Description of Artificial Sequence: Synthetic oligonucleotide
  Target: LAMA2; (+) strand; PAM type: YTN; PAM sequence: TTC
atccaaacataagttagtaa

SEQ ID NO: 366452 - DNA, 20 bp, Artificial Sequence
  Description of Artificial Sequence: Synthetic oligonucleotide
  Target: LAMA2; (+) strand; PAM type: YTN; PAM sequence: TTA
gtaaatggaaaacaaacagc

SEQ ID NO: 366453 - DNA, 20 bp, Artificial Sequence
  Description of Artificial Sequence: Synthetic oligonucleotide
  Target: LAMA2; (+) strand; PAM type: YTN; PAM sequence: CTG
ttgcaaagaccctgtttttg

SEQ ID NO: 366454 - DNA, 20 bp, Artificial Sequence
  Description of Artificial Sequence: Synthetic oligonucleotide
  Target: LAMA2; (+) strand; PAM type: YTN; PAM sequence: TTG
caaagaccctgtttttgggt

SEQ ID NO: 366455 - DNA, 20 bp, Artificial Sequence
  Description of Artificial Sequence: Synthetic oligonucleotide
  Target: LAMA2; (+) strand; PAM type: YTN; PAM sequence: CTG
tttttgggtctgggcctaac

SEQ ID NO: 366456 - DNA, 20 bp, Artificial Sequence
  Description of Artificial Sequence: Synthetic oligonucleotide
  Target: LAMA2; (+) strand; PAM type: YTN; PAM sequence: TTT
ttgggtctgggcctaacagc

SEQ ID NO: 366457 - DNA, 20 bp, Artificial Sequence
  Description of Artificial Sequence: Synthetic oligonucleotide
  Target: LAMA2; (+) strand; PAM type: YTN; PAM sequence: TTT
tgggtctgggcctaacagca

SEQ ID NO: 366458 - DNA, 20 bp, Artificial Sequence
  Description of Artificial Sequence: Synthetic oligonucleotide
  Target: LAMA2; (+) strand; PAM type: YTN; PAM sequence: TTT
gggtctgggcctaacagcac

SEQ ID NO: 366459 - DNA, 20 bp, Artificial Sequence
  Description of Artificial Sequence: Synthetic oligonucleotide
  Target: LAMA2; (+) strand; PAM type: YTN; PAM sequence: TTG
ggtctgggcctaacagcacg

SEQ ID NO: 366460 - DNA, 20 bp, Artificial Sequence
  Description of Artificial Sequence: Synthetic oligonucleotide
  Target: LAMA2; (+) strand; PAM type: YTN; PAM sequence: CTG
ggcctaacagcacgaagcac

SEQ ID NO: 366461 - DNA, 20 bp, Artificial Sequence
  Description of Artificial Sequence: Synthetic oligonucleotide
  Target: LAMA2; (+) strand; PAM type: YTN; PAM sequence: CTA
acagcacgaagcacttcaga

SEQ ID NO: 366462 - DNA, 20 bp, Artificial Sequence
  Description of Artificial Sequence: Synthetic oligonucleotide
  Target: LAMA2; (+) strand; PAM type: YTN; PAM sequence: CTT
cagagaatttcaccactacc

SEQ ID NO: 366463 - DNA, 20 bp, Artificial Sequence
  Description of Artificial Sequence: Synthetic oligonucleotide
  Target: LAMA2; (+) strand; PAM type: YTN; PAM sequence: TTC
agagaatttcaccactacca

SEQ ID NO: 366464 - DNA, 20 bp, Artificial Sequence
  Description of Artificial Sequence: Synthetic oligonucleotide
  Target: LAMA2; (+) strand; PAM type: YTN; PAM sequence: TTT
caccactaccatttactcac

SEQ ID NO: 366465 - DNA, 20 bp, Artificial Sequence
  Description of Artificial Sequence: Synthetic oligonucleotide
  Target: LAMA2; (+) strand; PAM type: YTN; PAM sequence: TTC
accactaccatttactcaca

SEQ ID NO: 366466 - DNA, 20 bp, Artificial Sequence
  Description of Artificial Sequence: Synthetic oligonucleotide
  Target: LAMA2; (+) strand; PAM type: YTN; PAM sequence: CTA
ccatttactcacatctgttg

SEQ ID NO: 366467 - DNA, 20 bp, Artificial Sequence
  Description of Artificial Sequence: Synthetic oligonucleotide
  Target: LAMA2; (+) strand; PAM type: YTN; PAM sequence: TTT
actcacatctgttgagattg

SEQ ID NO: 366468 - DNA, 20 bp, Artificial Sequence
  Description of Artificial Sequence: Synthetic oligonucleotide
  Target: LAMA2; (+) strand; PAM type: YTN; PAM sequence: TTA
ctcacatctgttgagattgt

SEQ ID NO: 366469 - DNA, 20 bp, Artificial Sequence
  Description of Artificial Sequence: Synthetic oligonucleotide
  Target: LAMA2; (+) strand; PAM type: YTN; PAM sequence: CTC
acatctgttgagattgtact

SEQ ID NO: 366470 - DNA, 20 bp, Artificial Sequence
  Description of Artificial Sequence: Synthetic oligonucleotide
  Target: LAMA2; (+) strand; PAM type: YTN; PAM sequence: CTG
ttgagattgtactatttcaa

SEQ ID NO: 366471 - DNA, 20 bp, Artificial Sequence
  Description of Artificial Sequence: Synthetic oligonucleotide
  Target: LAMA2; (+) strand; PAM type: YTN; PAM sequence: TTG
agattgtactatttcaactc

SEQ ID NO: 366472 - DNA, 20 bp, Artificial Sequence
  Description of Artificial Sequence: Synthetic oligonucleotide
  Target: LAMA2; (+) strand; PAM type: YTN; PAM sequence: TTG
tactatttcaactcaagatt

SEQ ID NO: 366473 - DNA, 20 bp, Artificial Sequence
  Description of Artificial Sequence: Synthetic oligonucleotide
  Target: LAMA2; (+) strand; PAM type: YTN; PAM sequence: CTA
tttcaactcaagatttgatc

SEQ ID NO: 366474 - DNA, 20 bp, Artificial Sequence
  Description of Artificial Sequence: Synthetic oligonucleotide
  Target: LAMA2; (+) strand; PAM type: YTN; PAM sequence: TTT
caactcaagatttgatcagt

SEQ ID NO: 366475 - DNA, 20 bp, Artificial Sequence
  Description of Artificial Sequence: Synthetic oligonucleotide
  Target: LAMA2; (+) strand; PAM type: YTN; PAM sequence: TTC
aactcaagatttgatcagtg

SEQ ID NO: 366476 - DNA, 20 bp, Artificial Sequence
  Description of Artificial Sequence: Synthetic oligonucleotide
  Target: LAMA2; (+) strand; PAM type: YTN; PAM sequence: CTC
aagatttgatcagtgtatgt

SEQ ID NO: 366477 - DNA, 20 bp, Artificial Sequence
  Description of Artificial Sequence: Synthetic oligonucleotide
  Target: LAMA2; (+) strand; PAM type: YTN; PAM sequence: TTT
gatcagtgtatgtcataaag

SEQ ID NO: 366478 - DNA, 20 bp, Artificial Sequence
  Description of Artificial Sequence: Synthetic oligonucleotide
  Target: LAMA2; (+) strand; PAM type: YTN; PAM sequence: TTG
atcagtgtatgtcataaagt

SEQ ID NO: 366479 - DNA, 20 bp, Artificial Sequence
  Description of Artificial Sequence: Synthetic oligonucleotide
  Target: LAMA2; (+) strand; PAM type: YTN; PAM sequence: CTA
agtcagaaaacttaaaggaa

SEQ ID NO: 366480 - DNA, 20 bp, Artificial Sequence
  Description of Artificial Sequence: Synthetic oligonucleotide
  Target: LAMA2; (+) strand; PAM type: YTN; PAM sequence: CTT
aaaggaaacattaaatactc

SEQ ID NO: 366481 - DNA, 20 bp, Artificial Sequence
  Description of Artificial Sequence: Synthetic oligonucleotide
  Target: LAMA2; (+) strand; PAM type: YTN; PAM sequence: TTA
aaggaaacattaaatactca

SEQ ID NO: 366482 - DNA, 20 bp, Artificial Sequence
  Description of Artificial Sequence: Synthetic oligonucleotide
  Target: LAMA2; (+) strand; PAM type: YTN; PAM sequence: TTA
aatactcatttcctatatgg

SEQ ID NO: 366483 - DNA, 20 bp, Artificial Sequence
  Description of Artificial Sequence: Synthetic oligonucleotide
  Target: LAMA2; (+) strand; PAM type: YTN; PAM sequence: CTC
atttcctatatggaatgttg

SEQ ID NO: 366484 - DNA, 20 bp, Artificial Sequence
  Description of Artificial Sequence: Synthetic oligonucleotide
  Target: LAMA2; (+) strand; PAM type: YTN; PAM sequence: TTT
cctatatggaatgttgcctt

SEQ ID NO: 366485 - DNA, 20 bp, Artificial Sequence
  Description of Artificial Sequence: Synthetic oligonucleotide
  Target: LAMA2; (+) strand; PAM type: YTN; PAM sequence: TTC
ctatatggaatgttgccttt

SEQ ID NO: 366486 - DNA, 20 bp, Artificial Sequence
  Description of Artificial Sequence: Synthetic oligonucleotide
  Target: LAMA2; (+) strand; PAM type: YTN; PAM sequence: CTA
tatggaatgttgcctttcta

SEQ ID NO: 366487 - DNA, 20 bp, Artificial Sequence
  Description of Artificial Sequence: Synthetic oligonucleotide
  Target: LAMA2; (+) strand; PAM type: YTN; PAM sequence: TTG
cctttctaagcacatcatct

SEQ ID NO: 366488 - DNA, 20 bp, Artificial Sequence
  Description of Artificial Sequence: Synthetic oligonucleotide
  Target: LAMA2; (+) strand; PAM type: YTN; PAM sequence: CTT
tctaagcacatcatcttctt

SEQ ID NO: 366489 - DNA, 20 bp, Artificial Sequence
  Description of Artificial Sequence: Synthetic oligonucleotide
  Target: LAMA2; (+) strand; PAM type: YTN; PAM sequence: TTT
ctaagcacatcatcttcttc

SEQ ID NO: 366490 - DNA, 20 bp, Artificial Sequence
  Description of Artificial Sequence: Synthetic oligonucleotide
  Target: LAMA2; (+) strand; PAM type: YTN; PAM sequence: TTC
taagcacatcatcttcttct

SEQ ID NO: 366491 - DNA, 20 bp, Artificial Sequence
  Description of Artificial Sequence: Synthetic oligonucleotide
  Target: LAMA2; (+) strand; PAM type: YTN; PAM sequence: CTA
agcacatcatcttcttctat

SEQ ID NO: 366492 - DNA, 20 bp, Artificial Sequence
  Description of Artificial Sequence: Synthetic oligonucleotide
  Target: LAMA2; (+) strand; PAM type: YTN; PAM sequence: CTT
cttctatgtgatgttttgca

SEQ ID NO: 366493 - DNA, 20 bp, Artificial Sequence
  Description of Artificial Sequence: Synthetic oligonucleotide
  Target: LAMA2; (+) strand; PAM type: YTN; PAM sequence: TTC
ttctatgtgatgttttgcaa

SEQ ID NO: 366494 - DNA, 20 bp, Artificial Sequence
  Description of Artificial Sequence: Synthetic oligonucleotide
  Target: LAMA2; (+) strand; PAM type: YTN; PAM sequence: CTT
ctatgtgatgttttgcaaat

SEQ ID NO: 366495 - DNA, 20 bp, Artificial Sequence
  Description of Artificial Sequence: Synthetic oligonucleotide
  Target: LAMA2; (+) strand; PAM type: YTN; PAM sequence: TTC
tatgtgatgttttgcaaatc

SEQ ID NO: 366496 - DNA, 20 bp, Artificial Sequence
  Description of Artificial Sequence: Synthetic oligonucleotide
  Target: LAMA2; (+) strand; PAM type: YTN; PAM sequence: CTA
tgtgatgttttgcaaatcta

SEQ ID NO: 366497 - DNA, 20 bp, Artificial Sequence
  Description of Artificial Sequence: Synthetic oligonucleotide
  Target: LAMA2; (+) strand; PAM type: YTN; PAM sequence: TTT
tgcaaatctattcataggag

SEQ ID NO: 366498 - DNA, 20 bp, Artificial Sequence
  Description of Artificial Sequence: Synthetic oligonucleotide
  Target: LAMA2; (+) strand; PAM type: YTN; PAM sequence: TTT
gcaaatctattcataggaga

SEQ ID NO: 366499 - DNA, 20 bp, Artificial Sequence
  Description of Artificial Sequence: Synthetic oligonucleotide
  Target: LAMA2; (+) strand; PAM type: YTN; PAM sequence: TTG
caaatctattcataggagat

SEQ ID NO: 366500 - DNA, 20 bp, Artificial Sequence
  Description of Artificial Sequence: Synthetic oligonucleotide
  Target: LAMA2; (+) strand; PAM type: YTN; PAM sequence: CTA
ttcataggagatttatattt

SEQ ID NO: 366501 - DNA, 20 bp, Artificial Sequence
  Description of Artificial Sequence: Synthetic oligonucleotide
  Target: LAMA2; (+) strand; PAM type: YTN; PAM sequence: TTC
ataggagatttatattttca

SEQ ID NO: 366502 - DNA, 20 bp, Artificial Sequence
  Description of Artificial Sequence: Synthetic oligonucleotide
  Target: LAMA2; (+) strand; PAM type: YTN; PAM sequence: TTT
atattttcaagtgtgctcaa

SEQ ID NO: 366503 - DNA, 20 bp, Artificial Sequence
  Description of Artificial Sequence: Synthetic oligonucleotide
  Target: LAMA2; (+) strand; PAM type: YTN; PAM sequence: TTA
tattttcaagtgtgctcaaa

SEQ ID NO: 366504 - DNA, 20 bp, Artificial Sequence
  Description of Artificial Sequence: Synthetic oligonucleotide
  Target: LAMA2; (+) strand; PAM type: YTN; PAM sequence: TTT
tcaagtgtgctcaaatggat

SEQ ID NO: 366505 - DNA, 20 bp, Artificial Sequence
  Description of Artificial Sequence: Synthetic oligonucleotide
  Target: LAMA2; (+) strand; PAM type: YTN; PAM sequence: TTT
caagtgtgctcaaatggatc

SEQ ID NO: 366506 - DNA, 20 bp, Artificial Sequence
  Description of Artificial Sequence: Synthetic oligonucleotide
  Target: LAMA2; (+) strand; PAM type: YTN; PAM sequence: TTC
aagtgtgctcaaatggatct

SEQ ID NO: 366507 - DNA, 20 bp, Artificial Sequence
  Description of Artificial Sequence: Synthetic oligonucleotide
  Target: LAMA2; (+) strand; PAM type: YTN; PAM sequence: CTC
aaatggatctgtgttgggga

SEQ ID NO: 366508 - DNA, 20 bp, Artificial Sequence
  Description of Artificial Sequence: Synthetic oligonucleotide
  Target: LAMA2; (+) strand; PAM type: YTN; PAM sequence: CTG
tgttggggaaagatacgtga

SEQ ID NO: 366509 - DNA, 20 bp, Artificial Sequence
  Description of Artificial Sequence: Synthetic oligonucleotide
  Target: LAMA2; (+) strand; PAM type: YTN; PAM sequence: TTG
gggaaagatacgtgaaataa

SEQ ID NO: 366510 - DNA, 20 bp, Artificial Sequence
  Description of Artificial Sequence: Synthetic oligonucleotide
  Target: LAMA2; (+) strand; PAM type: YTN; PAM sequence: CTA
atccatttgttttaaaattt

SEQ ID NO: 366511 - DNA, 20 bp, Artificial Sequence
  Description of Artificial Sequence: Synthetic oligonucleotide
  Target: LAMA2; (+) strand; PAM type: YTN; PAM sequence: TTT
gttttaaaattttgtctgcc

SEQ ID NO: 366512 - DNA, 20 bp, Artificial Sequence
  Description of Artificial Sequence: Synthetic oligonucleotide
  Target: LAMA2; (+) strand; PAM type: YTN; PAM sequence: TTG
ttttaaaattttgtctgcct

SEQ ID NO: 366513 - DNA, 20 bp, Artificial Sequence
  Description of Artificial Sequence: Synthetic oligonucleotide
  Target: LAMA2; (+) strand; PAM type: YTN; PAM sequence: TTT
taaaattttgtctgcctacc

SEQ ID NO: 366514 - DNA, 20 bp, Artificial Sequence
  Description of Artificial Sequence: Synthetic oligonucleotide
  Target: LAMA2; (+) strand; PAM type: YTN; PAM sequence: TTT
aaaattttgtctgcctacca

SEQ ID NO: 366515 - DNA, 20 bp, Artificial Sequence
  Description of Artificial Sequence: Synthetic oligonucleotide
  Target: LAMA2; (+) strand; PAM type: YTN; PAM sequence: TTA
aaattttgtctgcctaccac

SEQ ID NO: 366516 - DNA, 20 bp, Artificial Sequence
  Description of Artificial Sequence: Synthetic oligonucleotide
  Target: LAMA2; (+) strand; PAM type: YTN; PAM sequence: TTT
tgtctgcctaccacattttg

SEQ ID NO: 366517 - DNA, 20 bp, Artificial Sequence
  Description of Artificial Sequence: Synthetic oligonucleotide
  Target: LAMA2; (+) strand; PAM type: YTN; PAM sequence: TTT
gtctgcctaccacattttgt

SEQ ID NO: 366518 - DNA, 20 bp, Artificial Sequence
  Description of Artificial Sequence: Synthetic oligonucleotide
  Target: LAMA2; (+) strand; PAM type: YTN; PAM sequence: TTG
tctgcctaccacattttgtt

SEQ ID NO: 366519 - DNA, 20 bp, Artificial Sequence
  Description of Artificial Sequence: Synthetic oligonucleotide
  Target: LAMA2; (+) strand; PAM type: YTN; PAM sequence: CTG
cctaccacattttgttggac

SEQ ID NO: 366520 - DNA, 20 bp, Artificial Sequence
  Description of Artificial Sequence: Synthetic oligonucleotide
  Target: LAMA2; (+) strand; PAM type: YTN; PAM sequence: CTA
ccacattttgttggacttct

SEQ ID NO: 366521 - DNA, 20 bp, Artificial Sequence
  Description of Artificial Sequence: Synthetic oligonucleotide
  Target: LAMA2; (+) strand; PAM type: YTN; PAM sequence: TTT
tgttggacttcttgttatat

SEQ ID NO: 366522 - DNA, 20 bp, Artificial Sequence
  Description of Artificial Sequence: Synthetic oligonucleotide
  Target: LAMA2; (+) strand; PAM type: YTN; PAM sequence: TTT
gttggacttcttgttatatg

SEQ ID NO: 366523 - DNA, 20 bp, Artificial Sequence
  Description of Artificial Sequence: Synthetic oligonucleotide
  Target: LAMA2; (+) strand; PAM type: YTN; PAM sequence: TTG
ttggacttcttgttatatga

SEQ ID NO: 366524 - DNA, 20 bp, Artificial Sequence
  Description of Artificial Sequence: Synthetic oligonucleotide
  Target: LAMA2; (+) strand; PAM type: YTN; PAM sequence: TTG
gacttcttgttatatgagaa

SEQ ID NO: 366525 - DNA, 20 bp, Artificial Sequence
  Description of Artificial Sequence: Synthetic oligonucleotide
  Target: LAMA2; (+) strand; PAM type: YTN; PAM sequence: CTT
cttgttatatgagaactcct

SEQ ID NO: 366526 - DNA, 20 bp, Artificial Sequence
  Description of Artificial Sequence: Synthetic oligonucleotide
  Target: LAMA2; (+) strand; PAM type: YTN; PAM sequence: TTC
ttgttatatgagaactccta

SEQ ID NO: 366527 - DNA, 20 bp, Artificial Sequence
  Description of Artificial Sequence: Synthetic oligonucleotide
  Target: LAMA2; (+) strand; PAM type: YTN; PAM sequence: CTT
gttatatgagaactcctaat

SEQ ID NO: 366528 - DNA, 20 bp, Artificial Sequence
  Description of Artificial Sequence: Synthetic oligonucleotide
  Target: LAMA2; (+) strand; PAM type: YTN; PAM sequence: TTG
ttatatgagaactcctaatt

SEQ ID NO: 366529 - DNA, 20 bp, Artificial Sequence
  Description of Artificial Sequence: Synthetic oligonucleotide
  Target: LAMA2; (+) strand; PAM type: YTN; PAM sequence: TTA
tatgagaactcctaattgtc

SEQ ID NO: 366530 - DNA, 20 bp, Artificial Sequence
  Description of Artificial Sequence: Synthetic oligonucleotide
  Target: LAMA2; (+) strand; PAM type: YTN; PAM sequence: CTC
ctaattgtctggttttcaat

SEQ ID NO: 366531 - DNA, 20 bp, Artificial Sequence
  Description of Artificial Sequence: Synthetic oligonucleotide
  Target: LAMA2; (+) strand; PAM type: YTN; PAM sequence: CTA
attgtctggttttcaattgc

SEQ ID NO: 366532 - DNA, 20 bp, Artificial Sequence
  Description of Artificial Sequence: Synthetic oligonucleotide
  Target: LAMA2; (+) strand; PAM type: YTN; PAM sequence: TTG
tctggttttcaattgcagcc

SEQ ID NO: 366533 - DNA, 20 bp, Artificial Sequence
  Description of Artificial Sequence: Synthetic oligonucleotide
  Target: LAMA2; (+) strand; PAM type: YTN; PAM sequence: CTG
gttttcaattgcagccaaaa

SEQ ID NO: 366534 - DNA, 20 bp, Artificial Sequence
  Description of Artificial Sequence: Synthetic oligonucleotide
  Target: LAMA2; (+) strand; PAM type: YTN; PAM sequence: TTT
tcaattgcagccaaaagcat

SEQ ID NO: 366535 - DNA, 20 bp, Artificial Sequence
  Description of Artificial Sequence: Synthetic oligonucleotide
  Target: LAMA2; (+) strand; PAM type: YTN; PAM sequence: TTT
caattgcagccaaaagcatt

SEQ ID NO: 366536 - DNA, 20 bp, Artificial Sequence
  Description of Artificial Sequence: Synthetic oligonucleotide
  Target: LAMA2; (+) strand; PAM type: YTN; PAM sequence: TTC
aattgcagccaaaagcattc

SEQ ID NO: 366537 - DNA, 20 bp, Artificial Sequence
  Description of Artificial Sequence: Synthetic oligonucleotide
  Target: LAMA2; (+) strand; PAM type: YTN; PAM sequence: TTG
cagccaaaagcattcttacc

SEQ ID NO: 366538 - DNA, 20 bp, Artificial Sequence
  Description of Artificial Sequence: Synthetic oligonucleotide
  Target: LAMA2; (+) strand; PAM type: YTN; PAM sequence: TTC
ttacctgatcaaactcttca

SEQ ID NO: 366539 - DNA, 20 bp, Artificial Sequence
  Description of Artificial Sequence: Synthetic oligonucleotide
  Target: LAMA2; (+) strand; PAM type: YTN; PAM sequence: CTT
acctgatcaaactcttcaaa

SEQ ID NO: 366540 - DNA, 20 bp, Artificial Sequence
  Description of Artificial Sequence: Synthetic oligonucleotide
  Target: LAMA2; (+) strand; PAM type: YTN; PAM sequence: TTA
cctgatcaaactcttcaaat

SEQ ID NO: 366541 - DNA, 20 bp, Artificial Sequence
  Description of Artificial Sequence: Synthetic oligonucleotide
  Target: LAMA2; (+) strand; PAM type: YTN; PAM sequence: CTG
atcaaactcttcaaattcta

SEQ ID NO: 366542 - DNA, 20 bp, Artificial Sequence
  Description of Artificial Sequence: Synthetic oligonucleotide
  Target: LAMA2; (+) strand; PAM type: YTN; PAM sequence: CTC
ttcaaattctatttactttg

SEQ ID NO: 366543 - DNA, 20 bp, Artificial Sequence
  Description of Artificial Sequence: Synthetic oligonucleotide
  Target: LAMA2; (+) strand; PAM type: YTN; PAM sequence: CTT
caaattctatttactttgaa

SEQ ID NO: 366544 - DNA, 20 bp, Artificial Sequence
  Description of Artificial Sequence: Synthetic oligonucleotide
  Target: LAMA2; (+) strand; PAM type: YTN; PAM sequence: TTC
aaattctatttactttgaat

SEQ ID NO: 366545 - DNA, 20 bp, Artificial Sequence
  Description of Artificial Sequence: Synthetic oligonucleotide
  Target: LAMA2; (+) strand; PAM type: YTN; PAM sequence: TTC
tatttactttgaattatagc

SEQ ID NO: 366546 - DNA, 20 bp, Artificial Sequence
  Description of Artificial Sequence: Synthetic oligonucleotide
  Target: LAMA2; (+) strand; PAM type: YTN; PAM sequence: CTA
tttactttgaattatagctg

SEQ ID NO: 366547 - DNA, 20 bp, Artificial Sequence
  Description of Artificial Sequence: Synthetic oligonucleotide
  Target: LAMA2; (+) strand; PAM type: YTN; PAM sequence: TTT
actttgaattatagctgagt

SEQ ID NO: 366548 - DNA, 20 bp, Artificial Sequence
  Description of Artificial Sequence: Synthetic oligonucleotide
  Target: LAMA2; (+) strand; PAM type: YTN; PAM sequence: TTA
ctttgaattatagctgagta

SEQ ID NO: 366549 - DNA, 20 bp, Artificial Sequence
  Description of Artificial Sequence: Synthetic oligonucleotide
  Target: LAMA2; (+) strand; PAM type: YTN; PAM sequence: CTT
tgaattatagctgagtacat

SEQ ID NO: 366550 - DNA, 20 bp, Artificial Sequence
  Description of Artificial Sequence: Synthetic oligonucleotide
  Target: LAMA2; (+) strand; PAM type: YTN; PAM sequence: TTT
gaattatagctgagtacatg

SEQ ID NO: 366551 - DNA, 20 bp, Artificial Sequence
  Description of Artificial Sequence: Synthetic oligonucleotide
  Target: LAMA2; (+) strand; PAM type: YTN; PAM sequence: TTG
aattatagctgagtacatgg

SEQ ID NO: 366552 - DNA, 20 bp, Artificial Sequence
  Description of Artificial Sequence: Synthetic oligonucleotide
  Target: LAMA2; (+) strand; PAM type: YTN; PAM sequence: TTA
tagctgagtacatggaaagt

SEQ ID NO: 366553 - DNA, 20 bp, Artificial Sequence
  Description of Artificial Sequence: Synthetic oligonucleotide
  Target: LAMA2; (+) strand; PAM type: YTN; PAM sequence: CTG
agtacatggaaagtataatt

SEQ ID NO: 366554 - DNA, 20 bp, Artificial Sequence
  Description of Artificial Sequence: Synthetic oligonucleotide
  Target: LAMA2; (+) strand; PAM type: YTN; PAM sequence: TTG
ggccttactttgttacacag

SEQ ID NO: 366555 - DNA, 20 bp, Artificial Sequence
  Description of Artificial Sequence: Synthetic oligonucleotide
  Target: LAMA2; (+) strand; PAM type: YTN; PAM sequence: CTT
actttgttacacagcagaca

SEQ ID NO: 366556 - DNA, 20 bp, Artificial Sequence
  Description of Artificial Sequence: Synthetic oligonucleotide
  Target: LAMA2; (+) strand; PAM type: YTN; PAM sequence: TTA
ctttgttacacagcagacaa

SEQ ID NO: 366557 - DNA, 20 bp, Artificial Sequence
  Description of Artificial Sequence: Synthetic oligonucleotide
  Target: LAMA2; (+) strand; PAM type: YTN; PAM sequence: CTT
tgttacacagcagacaaaac

SEQ ID NO: 366558 - DNA, 20 bp, Artificial Sequence
  Description of Artificial Sequence: Synthetic oligonucleotide
  Target: LAMA2; (+) strand; PAM type: YTN; PAM sequence: TTT
gttacacagcagacaaaaca

SEQ ID NO: 366559 - DNA, 20 bp, Artificial Sequence
  Description of Artificial Sequence: Synthetic oligonucleotide
  Target: LAMA2; (+) strand; PAM type: YTN; PAM sequence: TTG
ttacacagcagacaaaacat

SEQ ID NO: 366560 - DNA, 20 bp, Artificial Sequence
  Description of Artificial Sequence: Synthetic oligonucleotide
  Target: LAMA2; (+) strand; PAM type: YTN; PAM sequence: TTA
cacagcagacaaaacatatg

SEQ ID NO: 366561 - DNA, 20 bp, Artificial Sequence
  Description of Artificial Sequence: Synthetic oligonucleotide
  Target: LAMA2; (+) strand; PAM type: YTN; PAM sequence: CTC
aagataggtcagtgctattc

SEQ ID NO: 366562 - DNA, 20 bp, Artificial Sequence
  Description of Artificial Sequence: Synthetic oligonucleotide
  Target: LAMA2; (+) strand; PAM type: YTN; PAM sequence: CTA
ttccagtgaataaacatttt

SEQ ID NO: 366563 - DNA, 20 bp, Artificial Sequence
  Description of Artificial Sequence: Synthetic oligonucleotide
  Target: LAMA2; (+) strand; PAM type: YTN; PAM sequence: TTC
cagtgaataaacattttaac

SEQ ID NO: 366564 - DNA, 20 bp, Artificial Sequence
  Description of Artificial Sequence: Synthetic oligonucleotide
  Target: LAMA2; (+) strand; PAM type: YTN; PAM sequence: TTT
taacaaaaatttgtatgaga

SEQ ID NO: 366565 - DNA, 20 bp, Artificial Sequence
  Description of Artificial Sequence: Synthetic oligonucleotide
  Target: LAMA2; (+) strand; PAM type: YTN; PAM sequence: TTT
aacaaaaatttgtatgagaa

SEQ ID NO: 366566 - DNA, 20 bp, Artificial Sequence
  Description of Artificial Sequence: Synthetic oligonucleotide
  Target: LAMA2; (+) strand; PAM type: YTN; PAM sequence: TTA
acaaaaatttgtatgagaaa

SEQ ID NO: 366567 - DNA, 20 bp, Artificial Sequence
  Description of Artificial Sequence: Synthetic oligonucleotide
  Target: LAMA2; (+) strand; PAM type: YTN; PAM sequence: TTT
gtatgagaaattcatgttgg

SEQ ID NO: 366568 - DNA, 20 bp, Artificial Sequence
  Description of Artificial Sequence: Synthetic oligonucleotide
  Target: LAMA2; (+) strand; PAM type: YTN; PAM sequence: TTG
tatgagaaattcatgttggc

SEQ ID NO: 366569 - DNA, 20 bp, Artificial Sequence
  Description of Artificial Sequence: Synthetic oligonucleotide
  Target: LAMA2; (+) strand; PAM type: YTN; PAM sequence: TTC
atgttggcctctcattcctc

SEQ ID NO: 366570 - DNA, 20 bp, Artificial Sequence
  Description of Artificial Sequence: Synthetic oligonucleotide
  Target: LAMA2; (+) strand; PAM type: YTN; PAM sequence: TTG
gcctctcattcctctctata

SEQ ID NO: 366571 - DNA, 20 bp, Artificial Sequence
  Description of Artificial Sequence: Synthetic oligonucleotide
  Target: LAMA2; (+) strand; PAM type: YTN; PAM sequence: CTC
tcattcctctctatatgcct

SEQ ID NO: 366572 - DNA, 20 bp, Artificial Sequence
  Description of Artificial Sequence: Synthetic oligonucleotide
  Target: LAMA2; (+) strand; PAM type: YTN; PAM sequence: CTC
attcctctctatatgccttt

SEQ ID NO: 366573 - DNA, 20 bp, Artificial Sequence
  Description of Artificial Sequence: Synthetic oligonucleotide
  Target: LAMA2; (+) strand; PAM type: YTN; PAM sequence: TTC
ctctctatatgcctttcaca

SEQ ID NO: 366574 - DNA, 20 bp, Artificial Sequence
  Description of Artificial Sequence: Synthetic oligonucleotide
  Target: LAMA2; (+) strand; PAM type: YTN; PAM sequence: CTC
tctatatgcctttcacagtt

SEQ ID NO: 366575 - DNA, 20 bp, Artificial Sequence
  Description of Artificial Sequence: Synthetic oligonucleotide
  Target: LAMA2; (+) strand; PAM type: YTN; PAM sequence: CTC
tatatgcctttcacagttac

SEQ ID NO: 366576 - DNA, 20 bp, Artificial Sequence
  Description of Artificial Sequence: Synthetic oligonucleotide
  Target: LAMA2; (+) strand; PAM type: YTN; PAM sequence: CTA
tatgcctttcacagttactc

SEQ ID NO: 366577 - DNA, 20 bp, Artificial Sequence
  Description of Artificial Sequence: Synthetic oligonucleotide
  Target: LAMA2; (+) strand; PAM type: YTN; PAM sequence: CTT
tcacagttactctttttccc

SEQ ID NO: 366578 - DNA, 20 bp, Artificial Sequence
  Description of Artificial Sequence: Synthetic oligonucleotide
  Target: LAMA2; (+) strand; PAM type: YTN; PAM sequence: TTT
cacagttactctttttcccc

SEQ ID NO: 366579 - DNA, 20 bp, Artificial Sequence
  Description of Artificial Sequence: Synthetic oligonucleotide
  Target: LAMA2; (+) strand; PAM type: YTN; PAM sequence: TTC
acagttactctttttcccct

SEQ ID NO: 366580 - DNA, 20 bp, Artificial Sequence
  Description of Artificial Sequence: Synthetic oligonucleotide
  Target: LAMA2; (+) strand; PAM type: YTN; PAM sequence: TTA
ctctttttccccttgccaat

SEQ ID NO: 366581 - DNA, 20 bp, Artificial Sequence
  Description of Artificial Sequence: Synthetic oligonucleotide
  Target: LAMA2; (+) strand; PAM type: YTN; PAM sequence: CTC
tttttccccttgccaatcaa

SEQ ID NO: 366582 - DNA, 20 bp, Artificial Sequence
  Description of Artificial Sequence: Synthetic oligonucleotide
  Target: LAMA2; (+) strand; PAM type: YTN; PAM sequence: CTT
tttccccttgccaatcaaaa

SEQ ID NO: 366583 - DNA, 20 bp, Artificial Sequence
  Description of Artificial Sequence: Synthetic oligonucleotide
  Target: LAMA2; (+) strand; PAM type: YTN; PAM sequence: TTT
ttccccttgccaatcaaaac

SEQ ID NO: 366584 - DNA, 20 bp, Artificial Sequence
  Description of Artificial Sequence: Synthetic oligonucleotide
  Target: LAMA2; (+) strand; PAM type: YTN; PAM sequence: TTT
tccccttgccaatcaaaaca

SEQ ID NO: 366585 - DNA, 20 bp, Artificial Sequence
  Description of Artificial Sequence: Synthetic oligonucleotide
  Target: LAMA2; (+) strand; PAM type: YTN; PAM sequence: TTT
ccccttgccaatcaaaacac

SEQ ID NO: 366586 - DNA, 20 bp, Artificial Sequence
  Description of Artificial Sequence: Synthetic oligonucleotide
  Target: LAMA2; (+) strand; PAM type: YTN; PAM sequence: TTC
cccttgccaatcaaaacact

SEQ ID NO: 366587 - DNA, 20 bp, Artificial Sequence
  Description of Artificial Sequence: Synthetic oligonucleotide
  Target: LAMA2; (+) strand; PAM type: YTN; PAM sequence: CTT
gccaatcaaaacactataat

SEQ ID NO: 366588 - DNA, 20 bp, Artificial Sequence
  Description of Artificial Sequence: Synthetic oligonucleotide
  Target: LAMA2; (+) strand; PAM type: YTN; PAM sequence: TTG
ccaatcaaaacactataatg

SEQ ID NO: 366589 - DNA, 20 bp, Artificial Sequence
  Description of Artificial Sequence: Synthetic oligonucleotide
  Target: LAMA2; (+) strand; PAM type: YTN; PAM sequence: CTA
taatgaatatctcttggcct

SEQ ID NO: 366590 - DNA, 20 bp, Artificial Sequence
  Description of Artificial Sequence: Synthetic oligonucleotide
  Target: LAMA2; (+) strand; PAM type: YTN; PAM sequence: CTC
ttggccttaacgataagaaa

SEQ ID NO: 366591 - DNA, 20 bp, Artificial Sequence
  Description of Artificial Sequence: Synthetic oligonucleotide
  Target: LAMA2; (+) strand; PAM type: YTN; PAM sequence: CTT
ggccttaacgataagaaaca

SEQ ID NO: 366592 - DNA, 20 bp, Artificial Sequence
  Description of Artificial Sequence: Synthetic oligonucleotide
  Target: LAMA2; (+) strand; PAM type: YTN; PAM sequence: TTG
gccttaacgataagaaacac

SEQ ID NO: 366593 - DNA, 20 bp, Artificial Sequence
  Description of Artificial Sequence: Synthetic oligonucleotide
  Target: LAMA2; (+) strand; PAM type: YTN; PAM sequence: CTT
aacgataagaaacactgtat

SEQ ID NO: 366594 - DNA, 20 bp, Artificial Sequence
  Description of Artificial Sequence: Synthetic oligonucleotide
  Target: LAMA2; (+) strand; PAM type: YTN; PAM sequence: TTA
acgataagaaacactgtata

SEQ ID NO: 366595 - DNA, 20 bp, Artificial Sequence
  Description of Artificial Sequence: Synthetic oligonucleotide
  Target: LAMA2; (+) strand; PAM type: YTN; PAM sequence: CTG
tatataaatattgtctaggc

SEQ ID NO: 366596 - DNA, 20 bp, Artificial Sequence
  Description of Artificial Sequence: Synthetic oligonucleotide
  Target: LAMA2; (+) strand; PAM type: YTN; PAM sequence: TTG
tctaggctgtattttatgag

SEQ ID NO: 366597 - DNA, 20 bp, Artificial Sequence
  Description of Artificial Sequence: Synthetic oligonucleotide
  Target: LAMA2; (+) strand; PAM type: YTN; PAM sequence: CTA
ggctgtattttatgagaatg

SEQ ID NO: 366598 - DNA, 20 bp, Artificial Sequence
  Description of Artificial Sequence: Synthetic oligonucleotide
  Target: LAMA2; (+) strand; PAM type: YTN; PAM sequence: CTG
tattttatgagaatgtggag

SEQ ID NO: 366599 - DNA, 20 bp, Artificial Sequence
  Description of Artificial Sequence: Synthetic oligonucleotide
  Target: LAMA2; (+) strand; PAM type: YTN; PAM sequence: TTT
tatgagaatgtggagttata

SEQ ID NO: 366600 - DNA, 20 bp, Artificial Sequence
  Description of Artificial Sequence: Synthetic oligonucleotide
  Target: LAMA2; (+) strand; PAM type: YTN; PAM sequence: TTT
atgagaatgtggagttatat

SEQ ID NO: 366601 - DNA, 20 bp, Artificial Sequence
  Description of Artificial Sequence: Synthetic oligonucleotide
  Target: LAMA2; (+) strand; PAM type: YTN; PAM sequence: TTA
tgagaatgtggagttatatg

SEQ ID NO: 366602 - DNA, 20 bp, Artificial Sequence
  Description of Artificial Sequence: Synthetic oligonucleotide
  Target: LAMA2; (+) strand; PAM type: YTN; PAM sequence: TTA
tatgaaatgtaggaagaaaa

SEQ ID NO: 366603 - DNA, 20 bp, Artificial Sequence
  Description of Artificial Sequence: Synthetic oligonucleotide
  Target: LAMA2; (+) strand; PAM type: YTN; PAM sequence: CTG
tgagcagtggacgggctgag

SEQ ID NO: 366604 - DNA, 20 bp, Artificial Sequence
  Description of Artificial Sequence: Synthetic oligonucleotide
  Target: LAMA2; (+) strand; PAM type: YTN; PAM sequence: CTG
agcttctaggacactgataa

SEQ ID NO: 366605 - DNA, 20 bp, Artificial Sequence
  Description of Artificial Sequence: Synthetic oligonucleotide
  Target: LAMA2; (+) strand; PAM type: YTN; PAM sequence: CTT
ctaggacactgataagcaat

SEQ ID NO: 366606 - DNA, 20 bp, Artificial Sequence
  Description of Artificial Sequence: Synthetic oligonucleotide
  Target: LAMA2; (+) strand; PAM type: YTN; PAM sequence: TTC
taggacactgataagcaatc

SEQ ID NO: 366607 - DNA, 20 bp, Artificial Sequence
  Description of Artificial Sequence: Synthetic oligonucleotide
  Target: LAMA2; (+) strand; PAM type: YTN; PAM sequence: CTA
ggacactgataagcaatcag

SEQ ID NO: 366608 - DNA, 20 bp, Artificial Sequence
  Description of Artificial Sequence: Synthetic oligonucleotide
  Target: LAMA2; (+) strand; PAM type: YTN; PAM sequence: CTG
ataagcaatcagtgttagtt

SEQ ID NO: 366609 - DNA, 20 bp, Artificial Sequence
  Description of Artificial Sequence: Synthetic oligonucleotide
  Target: LAMA2; (+) strand; PAM type: YTN; PAM sequence: TTA
gttacacttgaggcagtatc

SEQ ID NO: 366610 - DNA, 20 bp, Artificial Sequence
  Description of Artificial Sequence: Synthetic oligonucleotide
  Target: LAMA2; (+) strand; PAM type: YTN; PAM sequence: TTA
cacttgaggcagtatctctg

SEQ ID NO: 366611 - DNA, 20 bp, Artificial Sequence
  Description of Artificial Sequence: Synthetic oligonucleotide
  Target: LAMA2; (+) strand; PAM type: YTN; PAM sequence: CTT
gaggcagtatctctggtggt

SEQ ID NO: 366612 - DNA, 20 bp, Artificial Sequence
  Description of Artificial Sequence: Synthetic oligonucleotide
  Target: LAMA2; (+) strand; PAM type: YTN; PAM sequence: TTG
aggcagtatctctggtggtc

SEQ ID NO: 366613 - DNA, 20 bp, Artificial Sequence
  Description of Artificial Sequence: Synthetic oligonucleotide
  Target: LAMA2; (+) strand; PAM type: YTN; PAM sequence: CTC
tggtggtctgttccagaact

SEQ ID NO: 366614 - DNA, 20 bp, Artificial Sequence
  Description of Artificial Sequence: Synthetic oligonucleotide
  Target: LAMA2; (+) strand; PAM type: YTN; PAM sequence: CTG
gtggtctgttccagaactat

SEQ ID NO: 366615 - DNA, 20 bp, Artificial Sequence
  Description of Artificial Sequence: Synthetic oligonucleotide
  Target: LAMA2; (+) strand; PAM type: YTN; PAM sequence: CTG
ttccagaactatgtccttga

SEQ ID NO: 366616 - DNA, 20 bp, Artificial Sequence
  Description of Artificial Sequence: Synthetic oligonucleotide
  Target: LAMA2; (+) strand; PAM type: YTN; PAM sequence: TTC
cagaactatgtccttgactc

SEQ ID NO: 366617 - DNA, 20 bp, Artificial Sequence
  Description of Artificial Sequence: Synthetic oligonucleotide
  Target: LAMA2; (+) strand; PAM type: YTN; PAM sequence: CTA
tgtccttgactctgtcacat

SEQ ID NO: 366618 - DNA, 20 bp, Artificial Sequence
  Description of Artificial Sequence: Synthetic oligonucleotide
  Target: LAMA2; (+) strand; PAM type: YTN; PAM sequence: CTT
gactctgtcacattcatact

SEQ ID NO: 366619 - DNA, 20 bp, Artificial Sequence
  Description of Artificial Sequence: Synthetic oligonucleotide
  Target: LAMA2; (+) strand; PAM type: YTN; PAM sequence: TTG
actctgtcacattcatactt

SEQ ID NO: 366620 - DNA, 20 bp, Artificial Sequence
  Description of Artificial Sequence: Synthetic oligonucleotide
  Target: LAMA2; (+) strand; PAM type: YTN; PAM sequence: CTC
tgtcacattcatacttttca

SEQ ID NO: 366621 - DNA, 20 bp, Artificial Sequence
  Description of Artificial Sequence: Synthetic oligonucleotide
  Target: LAMA2; (+) strand; PAM type: YTN; PAM sequence: CTG
tcacattcatacttttcatc

SEQ ID NO: 366622 - DNA, 20 bp, Artificial Sequence
  Description of Artificial Sequence: Synthetic oligonucleotide
  Target: LAMA2; (+) strand; PAM type: YTN; PAM sequence: TTC
atacttttcatcactacttt

SEQ ID NO: 366623 - DNA, 20 bp, Artificial Sequence
  Description of Artificial Sequence: Synthetic oligonucleotide
  Target: LAMA2; (+) strand; PAM type: YTN; PAM sequence: CTT
ttcatcactactttttatac

SEQ ID NO: 366624 - DNA, 20 bp, Artificial Sequence
  Description of Artificial Sequence: Synthetic oligonucleotide
  Target: LAMA2; (+) strand; PAM type: YTN; PAM sequence: TTT
tcatcactactttttatact

SEQ ID NO: 366625 - DNA, 20 bp, Artificial Sequence
  Description of Artificial Sequence: Synthetic oligonucleotide
  Target: LAMA2; (+) strand; PAM type: YTN; PAM sequence: TTT
catcactactttttatactt

SEQ ID NO: 366626 - DNA, 20 bp, Artificial Sequence
  Description of Artificial Sequence: Synthetic oligonucleotide
  Target: LAMA2; (+) strand; PAM type: YTN; PAM sequence: TTC
atcactactttttatacttc

SEQ ID NO: 366627 - DNA, 20 bp, Artificial Sequence
  Description of Artificial Sequence: Synthetic oligonucleotide
  Target: LAMA2; (+) strand; PAM type: YTN; PAM sequence: CTA
ctttttatacttctgcaatt

SEQ ID NO: 366628 - DNA, 20 bp, Artificial Sequence
  Description of Artificial Sequence: Synthetic oligonucleotide
  Target: LAMA2; (+) strand; PAM type: YTN; PAM sequence: CTT
tttatacttctgcaatttag

SEQ ID NO: 366629 - DNA, 20 bp, Artificial Sequence
  Description of Artificial Sequence: Synthetic oligonucleotide
  Target: LAMA2; (+) strand; PAM type: YTN; PAM sequence: TTT
ttatacttctgcaatttagg

SEQ ID NO: 366630 - DNA, 20 bp, Artificial Sequence
  Description of Artificial Sequence: Synthetic oligonucleotide
  Target: LAMA2; (+) strand; PAM type: YTN; PAM sequence: TTT
tatacttctgcaatttaggt

SEQ ID NO: 366631 - DNA, 20 bp, Artificial Sequence
  Description of Artificial Sequence: Synthetic oligonucleotide
  Target: LAMA2; (+) strand; PAM type: YTN; PAM sequence: TTT
atacttctgcaatttaggtc

SEQ ID NO: 366632 - DNA, 20 bp, Artificial Sequence
  Description of Artificial Sequence: Synthetic oligonucleotide
  Target: LAMA2; (+) strand; PAM type: YTN; PAM sequence: TTA
tacttctgcaatttaggtca

SEQ ID NO: 366633 - DNA, 20 bp, Artificial Sequence
  Description of Artificial Sequence: Synthetic oligonucleotide
  Target: LAMA2; (+) strand; PAM type: YTN; PAM sequence: CTT
ctgcaatttaggtcacccaa

SEQ ID NO: 366634 - DNA, 20 bp, Artificial Sequence
  Description of Artificial Sequence: Synthetic oligonucleotide
  Target: LAMA2; (+) strand; PAM type: YTN; PAM sequence: TTC
tgcaatttaggtcacccaat

SEQ ID NO: 366635 - DNA, 20 bp, Artificial Sequence
  Description of Artificial Sequence: Synthetic oligonucleotide
  Target: LAMA2; (+) strand; PAM type: YTN; PAM sequence: CTG
caatttaggtcacccaatac

SEQ ID NO: 366636 - DNA, 20 bp, Artificial Sequence
  Description of Artificial Sequence: Synthetic oligonucleotide
  Target: LAMA2; (+) strand; PAM type: YTN; PAM sequence: TTT
aggtcacccaatacaggtta

SEQ ID NO: 366637 - DNA, 20 bp, Artificial Sequence
  Description of Artificial Sequence: Synthetic oligonucleotide
  Target: LAMA2; (+) strand; PAM type: YTN; PAM sequence: TTA
ggtcacccaatacaggttat

SEQ ID NO: 366638 - DNA, 20 bp, Artificial Sequence
  Description of Artificial Sequence: Synthetic oligonucleotide
  Target: LAMA2; (+) strand; PAM type: YTN; PAM sequence: TTA
tcttatcaggttaaactgat

SEQ ID NO: 366639 - DNA, 20 bp, Artificial Sequence
  Description of Artificial Sequence: Synthetic oligonucleotide
  Target: LAMA2; (+) strand; PAM type: YTN; PAM sequence: CTT
atcaggttaaactgattgta

SEQ ID NO: 366640 - DNA, 20 bp, Artificial Sequence
  Description of Artificial Sequence: Synthetic oligonucleotide
  Target: LAMA2; (+) strand; PAM type: YTN; PAM sequence: TTA
tcaggttaaactgattgtag

SEQ ID NO: 366641 - DNA, 20 bp, Artificial Sequence
  Description of Artificial Sequence: Synthetic oligonucleotide
  Target: LAMA2; (+) strand; PAM type: YTN; PAM sequence: TTA
aactgattgtagtggtcaca

SEQ ID NO: 366642 - DNA, 20 bp, Artificial Sequence
  Description of Artificial Sequence: Synthetic oligonucleotide
  Target: LAMA2; (+) strand; PAM type: YTN; PAM sequence: CTG
attgtagtggtcacattgaa

SEQ ID NO: 366643 - DNA, 20 bp, Artificial Sequence
  Description of Artificial Sequence: Synthetic oligonucleotide
  Target: LAMA2; (+) strand; PAM type: YTN; PAM sequence: TTG
tagtggtcacattgaaaaag

SEQ ID NO: 366644 - DNA, 20 bp, Artificial Sequence
  Description of Artificial Sequence: Synthetic oligonucleotide
  Target: LAMA2; (+) strand; PAM type: YTN; PAM sequence: TTG
aaaaagaaaaaaaaaatccc

SEQ ID NO: 366645 - DNA, 20 bp, Artificial Sequence
  Description of Artificial Sequence: Synthetic oligonucleotide
  Target: LAMA2; (+) strand; PAM type: YTN; PAM sequence: TTC
aggacttttcccaaccagtt

SEQ ID NO: 366646 - DNA, 20 bp, Artificial Sequence
  Description of Artificial Sequence: Synthetic oligonucleotide
  Target: LAMA2; (+) strand; PAM type: YTN; PAM sequence: CTT
ttcccaaccagttctaatta

SEQ ID NO: 366647 - DNA, 20 bp, Artificial Sequence
  Description of Artificial Sequence: Synthetic oligonucleotide
  Target: LAMA2; (+) strand; PAM type: YTN; PAM sequence: TTT
tcccaaccagttctaattaa

SEQ ID NO: 366648 - DNA, 20 bp, Artificial Sequence
  Description of Artificial Sequence: Synthetic oligonucleotide
  Target: LAMA2; (+) strand; PAM type: YTN; PAM sequence: TTT
cccaaccagttctaattaat

SEQ ID NO: 366649 - DNA, 20 bp, Artificial Sequence
  Description of Artificial Sequence: Synthetic oligonucleotide
  Target: LAMA2; (+) strand; PAM type: YTN; PAM sequence: TTC
ccaaccagttctaattaatg

SEQ ID NO: 366650 - DNA, 20 bp, Artificial Sequence
  Description of Artificial Sequence: Synthetic oligonucleotide
  Target: LAMA2; (+) strand; PAM type: YTN; PAM sequence: TTC
taattaatgcacgtgtgaaa

SEQ ID NO: 366651 - DNA, 20 bp, Artificial Sequence
  Description of Artificial Sequence: Synthetic oligonucleotide
  Target: LAMA2; (+) strand; PAM type: YTN; PAM sequence: CTA
attaatgcacgtgtgaaagg

SEQ ID NO: 366652 - DNA, 20 bp, Artificial Sequence
  Description of Artificial Sequence: Synthetic oligonucleotide
  Target: LAMA2; (+) strand; PAM type: YTN; PAM sequence: TTA
atgcacgtgtgaaaggacat

SEQ ID NO: 366653 - DNA, 20 bp, Artificial Sequence
  Description of Artificial Sequence: Synthetic oligonucleotide
  Target: LAMA2; (+) strand; PAM type: YTN; PAM sequence: TTA
ttgtgaaaagaaatgctatc

SEQ ID NO: 366654 - DNA, 20 bp, Artificial Sequence
  Description of Artificial Sequence: Synthetic oligonucleotide
  Target: LAMA2; (+) strand; PAM type: YTN; PAM sequence: TTG
tgaaaagaaatgctatcaaa

SEQ ID NO: 366655 - DNA, 20 bp, Artificial Sequence
  Description of Artificial Sequence: Synthetic oligonucleotide
  Target: LAMA2; (+) strand; PAM type: YTN; PAM sequence: CTA
tcaaaacagtctaatggcta

SEQ ID NO: 366656 - DNA, 20 bp, Artificial Sequence
  Description of Artificial Sequence: Synthetic oligonucleotide
  Target: LAMA2; (+) strand; PAM type: YTN; PAM sequence: CTA
atggctacaagaagaaaaag

SEQ ID NO: 366657 - DNA, 20 bp, Artificial Sequence
  Description of Artificial Sequence: Synthetic oligonucleotide
  Target: LAMA2; (+) strand; PAM type: YTN; PAM sequence: CTA
caagaagaaaaagaaaagaa

SEQ ID NO: 366658 - DNA, 20 bp, Artificial Sequence
  Description of Artificial Sequence: Synthetic oligonucleotide
  Target: LAMA2; (+) strand; PAM type: YTN; PAM sequence: CTA
aggagaagatgggtaacagg

SEQ ID NO: 366659 - DNA, 20 bp, Artificial Sequence
  Description of Artificial Sequence: Synthetic oligonucleotide
  Target: LAMA2; (+) strand; PAM type: YTN; PAM sequence: TTT
tcctcgaggttttttattta

SEQ ID NO: 366660 - DNA, 20 bp, Artificial Sequence
  Description of Artificial Sequence: Synthetic oligonucleotide
  Target: LAMA2; (+) strand; PAM type: YTN; PAM sequence: TTT
cctcgaggttttttatttat

SEQ ID NO: 366661 - DNA, 20 bp, Artificial Sequence
  Description of Artificial Sequence: Synthetic oligonucleotide
  Target: LAMA2; (+) strand; PAM type: YTN; PAM sequence: TTC
ctcgaggttttttatttata

SEQ ID NO: 366662 - DNA, 20 bp, Artificial Sequence
  Description of Artificial Sequence: Synthetic oligonucleotide
  Target: LAMA2; (+) strand; PAM type: YTN; PAM sequence: CTC
gaggttttttatttatatcc

SEQ ID NO: 366663 - DNA, 20 bp, Artificial Sequence
  Description of Artificial Sequence: Synthetic oligonucleotide
  Target: LAMA2; (+) strand; PAM type: YTN; PAM sequence: TTT
tttatttatatcccctggac

SEQ ID NO: 366664 - DNA, 20 bp, Artificial Sequence
  Description of Artificial Sequence: Synthetic oligonucleotide
  Target: LAMA2; (+) strand; PAM type: YTN; PAM sequence: TTT
ttatttatatcccctggact

SEQ ID NO: 366665 - DNA, 20 bp, Artificial Sequence
  Description of Artificial Sequence: Synthetic oligonucleotide
  Target: LAMA2; (+) strand; PAM type: YTN; PAM sequence: TTT
tatttatatcccctggactg

SEQ ID NO: 366666 - DNA, 20 bp, Artificial Sequence
  Description of Artificial Sequence: Synthetic oligonucleotide
  Target: LAMA2; (+) strand; PAM type: YTN; PAM sequence: TTT
atttatatcccctggactgc

SEQ ID NO: 366667 - DNA, 20 bp, Artificial Sequence
  Description of Artificial Sequence: Synthetic oligonucleotide
  Target: LAMA2; (+) strand; PAM type: YTN; PAM sequence: TTA
tttatatcccctggactgca

SEQ ID NO: 366668 - DNA, 20 bp, Artificial Sequence
  Description of Artificial Sequence: Synthetic oligonucleotide
  Target: LAMA2; (+) strand; PAM type: YTN; PAM sequence: TTT
atatcccctggactgcataa

SEQ ID NO: 366669 - DNA, 20 bp, Artificial Sequence
  Description of Artificial Sequence: Synthetic oligonucleotide
  Target: LAMA2; (+) strand; PAM type: YTN; PAM sequence: TTA
tatcccctggactgcataac

SEQ ID NO: 366670 - DNA, 20 bp, Artificial Sequence
  Description of Artificial Sequence: Synthetic oligonucleotide
  Target: LAMA2; (+) strand; PAM type: YTN; PAM sequence: CTG
gactgcataactcagtttat

SEQ ID NO: 366671 - DNA, 20 bp, Artificial Sequence
  Description of Artificial Sequence: Synthetic oligonucleotide
  Target: LAMA2; (+) strand; PAM type: YTN; PAM sequence: CTG
cataactcagtttattccct

SEQ ID NO: 366672 - DNA, 20 bp, Artificial Sequence
  Description of Artificial Sequence: Synthetic oligonucleotide
  Target: LAMA2; (+) strand; PAM type: YTN; PAM sequence: CTC
agtttattcccttctaaacc

SEQ ID NO: 366673 - DNA, 20 bp, Artificial Sequence
  Description of Artificial Sequence: Synthetic oligonucleotide
  Target: LAMA2; (+) strand; PAM type: YTN; PAM sequence: TTT
attcccttctaaaccaactt

SEQ ID NO: 366674 - DNA, 20 bp, Artificial Sequence
  Description of Artificial Sequence: Synthetic oligonucleotide
  Target: LAMA2; (+) strand; PAM type: YTN; PAM sequence: TTA
ttcccttctaaaccaacttt

SEQ ID NO: 366675 - DNA, 20 bp, Artificial Sequence
  Description of Artificial Sequence: Synthetic oligonucleotide
  Target: LAMA2; (+) strand; PAM type: YTN; PAM sequence: TTC
ccttctaaaccaacttttct

SEQ ID NO: 366676 - DNA, 20 bp, Artificial Sequence
  Description of Artificial Sequence: Synthetic oligonucleotide
  Target: LAMA2; (+) strand; PAM type: YTN; PAM sequence: CTT
ctaaaccaacttttctagaa

SEQ ID NO: 366677 - DNA, 20 bp, Artificial Sequence
  Description of Artificial Sequence: Synthetic oligonucleotide
  Target: LAMA2; (+) strand; PAM type: YTN; PAM sequence: TTC
taaaccaacttttctagaat

SEQ ID NO: 366678 - DNA, 20 bp, Artificial Sequence
  Description of Artificial Sequence: Synthetic oligonucleotide
  Target: LAMA2; (+) strand; PAM type: YTN; PAM sequence: CTA
aaccaacttttctagaatgt

SEQ ID NO: 366679 - DNA, 20 bp, Artificial Sequence
  Description of Artificial Sequence: Synthetic oligonucleotide
  Target: LAMA2; (+) strand; PAM type: YTN; PAM sequence: CTT
ttctagaatgtgttgtctct

SEQ ID NO: 366680 - DNA, 20 bp, Artificial Sequence
  Description of Artificial Sequence: Synthetic oligonucleotide
  Target: LAMA2; (+) strand; PAM type: YTN; PAM sequence: TTT
tctagaatgtgttgtctctg

SEQ ID NO: 366681 - DNA, 20 bp, Artificial Sequence
  Description of Artificial Sequence: Synthetic oligonucleotide
  Target: LAMA2; (+) strand; PAM type: YTN; PAM sequence: TTT
ctagaatgtgttgtctctgt

SEQ ID NO: 366682 - DNA, 20 bp, Artificial Sequence
  Description of Artificial Sequence: Synthetic oligonucleotide
  Target: LAMA2; (+) strand; PAM type: YTN; PAM sequence: TTC
tagaatgtgttgtctctgtt

SEQ ID NO: 366683 - DNA, 20 bp, Artificial Sequence
  Description of Artificial Sequence: Synthetic oligonucleotide
  Target: LAMA2; (+) strand; PAM type: YTN; PAM sequence: CTA
gaatgtgttgtctctgttcg

SEQ ID NO: 366684 - DNA, 20 bp, Artificial Sequence
  Description of Artificial Sequence: Synthetic oligonucleotide
  Target: LAMA2; (+) strand; PAM type: YTN; PAM sequence: TTG
tctctgttcgacacctacaa

SEQ ID NO: 366685 - DNA, 20 bp, Artificial Sequence
  Description of Artificial Sequence: Synthetic oligonucleotide
  Target: LAMA2; (+) strand; PAM type: YTN; PAM sequence: CTC
tgttcgacacctacaactct

SEQ ID NO: 366686 - DNA, 20 bp, Artificial Sequence
  Description of Artificial Sequence: Synthetic oligonucleotide
  Target: LAMA2; (+) strand; PAM type: YTN; PAM sequence: CTG
ttcgacacctacaactctgg

SEQ ID NO: 366687 - DNA, 20 bp, Artificial Sequence
  Description of Artificial Sequence: Synthetic oligonucleotide
  Target: LAMA2; (+) strand; PAM type: YTN; PAM sequence: TTC
gacacctacaactctggttc

SEQ ID NO: 366688 - DNA, 20 bp, Artificial Sequence
  Description of Artificial Sequence: Synthetic oligonucleotide
  Target: LAMA2; (+) strand; PAM type: YTN; PAM sequence: CTA
caactctggttcattttcta

SEQ ID NO: 366689 - DNA, 20 bp, Artificial Sequence
  Description of Artificial Sequence: Synthetic oligonucleotide
  Target: LAMA2; (+) strand; PAM type: YTN; PAM sequence: CTC
tggttcattttctatgcatt

SEQ ID NO: 366690 - DNA, 20 bp, Artificial Sequence
  Description of Artificial Sequence: Synthetic oligonucleotide
  Target: LAMA2; (+) strand; PAM type: YTN; PAM sequence: CTG
gttcattttctatgcattaa

SEQ ID NO: 366691 - DNA, 20 bp, Artificial Sequence
  Description of Artificial Sequence: Synthetic oligonucleotide
  Target: LAMA2; (+) strand; PAM type: YTN; PAM sequence: TTC
attttctatgcattaaggat

SEQ ID NO: 366692 - DNA, 20 bp, Artificial Sequence
  Description of Artificial Sequence: Synthetic oligonucleotide
  Target: LAMA2; (+) strand; PAM type: YTN; PAM sequence: TTT
tctatgcattaaggatgatg

SEQ ID NO: 366693 - DNA, 20 bp, Artificial Sequence
  Description of Artificial Sequence: Synthetic oligonucleotide
  Target: LAMA2; (+) strand; PAM type: YTN; PAM sequence: TTT
ctatgcattaaggatgatgt

SEQ ID NO: 366694 - DNA, 20 bp, Artificial Sequence
  Description of Artificial Sequence: Synthetic oligonucleotide
  Target: LAMA2; (+) strand; PAM type: YTN; PAM sequence: TTC
tatgcattaaggatgatgta

SEQ ID NO: 366695 - DNA, 20 bp, Artificial Sequence
  Description of Artificial Sequence: Synthetic oligonucleotide
  Target: LAMA2; (+) strand; PAM type: YTN; PAM sequence: CTA
tgcattaaggatgatgtaac

SEQ ID NO: 366696 - DNA, 20 bp, Artificial Sequence
  Description of Artificial Sequence: Synthetic oligonucleotide
  Target: LAMA2; (+) strand; PAM type: YTN; PAM sequence: TTA
aggatgatgtaactttaaaa

SEQ ID NO: 366697 - DNA, 20 bp, Artificial Sequence
  Description of Artificial Sequence: Synthetic oligonucleotide
  Target: LAMA2; (+) strand; PAM type: YTN; PAM sequence: CTT
taaaacctctcatgtaaatt

SEQ ID NO: 366698 - DNA, 20 bp, Artificial Sequence
  Description of Artificial Sequence: Synthetic oligonucleotide
  Target: LAMA2; (+) strand; PAM type: YTN; PAM sequence: TTT
aaaacctctcatgtaaattc

SEQ ID NO: 366699 - DNA, 20 bp, Artificial Sequence
  Description of Artificial Sequence: Synthetic oligonucleotide
  Target: LAMA2; (+) strand; PAM type: YTN; PAM sequence: TTA
aaacctctcatgtaaattct

SEQ ID NO: 366700 - DNA, 20 bp, Artificial Sequence
  Description of Artificial Sequence: Synthetic oligonucleotide
  Target: LAMA2; (+) strand; PAM type: YTN; PAM sequence: CTC
tcatgtaaattctgcctgtt

SEQ ID NO: 366701 - DNA, 20 bp, Artificial Sequence
  Description of Artificial Sequence: Synthetic oligonucleotide
  Target: LAMA2; (+) strand; PAM type: YTN; PAM sequence: CTC
atgtaaattctgcctgtttt

SEQ ID NO: 366702 - DNA, 20 bp, Artificial Sequence
  Description of Artificial Sequence: Synthetic oligonucleotide
  Target: LAMA2; (+) strand; PAM type: YTN; PAM sequence: TTC
tgcctgttttctaattctac

SEQ ID NO: 366703 - DNA, 20 bp, Artificial Sequence
  Description of Artificial Sequence: Synthetic oligonucleotide
  Target: LAMA2; (+) strand; PAM type: YTN; PAM sequence: CTG
cctgttttctaattctacaa

SEQ ID NO: 366704 - DNA, 20 bp, Artificial Sequence
  Description of Artificial Sequence: Synthetic oligonucleotide
  Target: LAMA2; (+) strand; PAM type: YTN; PAM sequence: CTG
ttttctaattctacaatcct

SEQ ID NO: 366705 - DNA, 20 bp, Artificial Sequence
  Description of Artificial Sequence: Synthetic oligonucleotide
  Target: LAMA2; (+) strand; PAM type: YTN; PAM sequence: TTT
tctaattctacaatcctctt

SEQ ID NO: 366706 - DNA, 20 bp, Artificial Sequence
  Description of Artificial Sequence: Synthetic oligonucleotide
  Target: LAMA2; (+) strand; PAM type: YTN; PAM sequence: TTT
ctaattctacaatcctcttg

SEQ ID NO: 366707 - DNA, 20 bp, Artificial Sequence
  Description of Artificial Sequence: Synthetic oligonucleotide
  Target: LAMA2; (+) strand; PAM type: YTN; PAM sequence: TTC
taattctacaatcctcttgt

SEQ ID NO: 366708 - DNA, 20 bp, Artificial Sequence
  Description of Artificial Sequence: Synthetic oligonucleotide
  Target: LAMA2; (+) strand; PAM type: YTN; PAM sequence: CTA
attctacaatcctcttgttt

SEQ ID NO: 366709 - DNA, 20 bp, Artificial Sequence
  Description of Artificial Sequence: Synthetic oligonucleotide
  Target: LAMA2; (+) strand; PAM type: YTN; PAM sequence: TTC
tacaatcctcttgtttatgt

SEQ ID NO: 366710 - DNA, 20 bp, Artificial Sequence
  Description of Artificial Sequence: Synthetic oligonucleotide
  Target: LAMA2; (+) strand; PAM type: YTN; PAM sequence: CTA
caatcctcttgtttatgttc

SEQ ID NO: 366711 - DNA, 20 bp, Artificial Sequence
  Description of Artificial Sequence: Synthetic oligonucleotide
  Target: LAMA2; (+) strand; PAM type: YTN; PAM sequence: CTC
ttgtttatgttctattctaa

SEQ ID NO: 366712 - DNA, 20 bp, Artificial Sequence
  Description of Artificial Sequence: Synthetic oligonucleotide
  Target: LAMA2; (+) strand; PAM type: YTN; PAM sequence: CTT
gtttatgttctattctaata

SEQ ID NO: 366713 - DNA, 20 bp, Artificial Sequence
  Description of Artificial Sequence: Synthetic oligonucleotide
  Target: LAMA2; (+) strand; PAM type: YTN; PAM sequence: TTG
tttatgttctattctaataa

SEQ ID NO: 366714 - DNA, 20 bp, Artificial Sequence
  Description of Artificial Sequence: Synthetic oligonucleotide
  Target: LAMA2; (+) strand; PAM type: YTN; PAM sequence: TTT
atgttctattctaataatta

SEQ ID NO: 366715 - DNA, 20 bp, Artificial Sequence
  Description of Artificial Sequence: Synthetic oligonucleotide
  Target: LAMA2; (+) strand; PAM type: YTN; PAM sequence: TTA
tgttctattctaataattat

SEQ ID NO: 366716 - DNA, 20 bp, Artificial Sequence
  Description of Artificial Sequence: Synthetic oligonucleotide
  Target: LAMA2; (+) strand; PAM type: YTN; PAM sequence: TTC
tattctaataattatcgagc

SEQ ID NO: 366717 - DNA, 20 bp, Artificial Sequence
  Description of Artificial Sequence: Synthetic oligonucleotide
  Target: LAMA2; (+) strand; PAM type: YTN; PAM sequence: CTA
ttctaataattatcgagctt

SEQ ID NO: 366718 - DNA, 20 bp, Artificial Sequence
  Description of Artificial Sequence: Synthetic oligonucleotide
  Target: LAMA2; (+) strand; PAM type: YTN; PAM sequence: TTC
taataattatcgagctttta

SEQ ID NO: 366719 - DNA, 20 bp, Artificial Sequence
  Description of Artificial Sequence: Synthetic oligonucleotide
  Target: LAMA2; (+) strand; PAM type: YTN; PAM sequence: CTA
ataattatcgagcttttaaa

SEQ ID NO: 366720 - DNA, 20 bp, Artificial Sequence
  Description of Artificial Sequence: Synthetic oligonucleotide
  Target: LAMA2; (+) strand; PAM type: YTN; PAM sequence: TTA
tcgagcttttaaagaagaga

SEQ ID NO: 366721 - DNA, 20 bp, Artificial Sequence
  Description of Artificial Sequence: Synthetic oligonucleotide
  Target: LAMA2; (+) strand; PAM type: YTN; PAM sequence: CTT
ttaaagaagagaaatctgtt

SEQ ID NO: 366722 - DNA, 20 bp, Artificial Sequence
  Description of Artificial Sequence: Synthetic oligonucleotide
  Target: LAMA2; (+) strand; PAM type: YTN; PAM sequence: TTT
taaagaagagaaatctgttc

SEQ ID NO: 366723 - DNA, 20 bp, Artificial Sequence
  Description of Artificial Sequence: Synthetic oligonucleotide
  Target: LAMA2; (+) strand; PAM type: YTN; PAM sequence: TTT
aaagaagagaaatctgttct

SEQ ID NO: 366724 - DNA, 20 bp, Artificial Sequence
  Description of Artificial Sequence: Synthetic oligonucleotide
  Target: LAMA2; (+) strand; PAM type: YTN; PAM sequence: TTA
aagaagagaaatctgttctt

SEQ ID NO: 366725 - DNA, 20 bp, Artificial Sequence
  Description of Artificial Sequence: Synthetic oligonucleotide
  Target: LAMA2; (+) strand; PAM type: YTN; PAM sequence: CTG
ttcttaactcaaatttatac

SEQ ID NO: 366726 - DNA, 20 bp, Artificial Sequence
  Description of Artificial Sequence: Synthetic oligonucleotide
  Target: LAMA2; (+) strand; PAM type: YTN; PAM sequence: TTC
ttaactcaaatttatacata

SEQ ID NO: 366727 - DNA, 20 bp, Artificial Sequence
  Description of Artificial Sequence: Synthetic oligonucleotide
  Target: LAMA2; (+) strand; PAM type: YTN; PAM sequence: CTT
aactcaaatttatacataca

SEQ ID NO: 366728 - DNA, 20 bp, Artificial Sequence
  Description of Artificial Sequence: Synthetic oligonucleotide
  Target: LAMA2; (+) strand; PAM type: YTN; PAM sequence: TTA
actcaaatttatacatacac

SEQ ID NO: 366729 - DNA, 20 bp, Artificial Sequence
  Description of Artificial Sequence: Synthetic oligonucleotide
  Target: LAMA2; (+) strand; PAM type: YTN; PAM sequence: CTC
aaatttatacatacactgaa

SEQ ID NO: 366730 - DNA, 20 bp, Artificial Sequence
  Description of Artificial Sequence: Synthetic oligonucleotide
  Target: LAMA2; (+) strand; PAM type: YTN; PAM sequence: TTT
atacatacactgaaggaaat

SEQ ID NO: 366731 - DNA, 20 bp, Artificial Sequence
  Description of Artificial Sequence: Synthetic oligonucleotide
  Target: LAMA2; (+) strand; PAM type: YTN; PAM sequence: TTA
tacatacactgaaggaaata

SEQ ID NO: 366732 - DNA, 20 bp, Artificial Sequence
  Description of Artificial Sequence: Synthetic oligonucleotide
  Target: LAMA2; (+) strand; PAM type: YTN; PAM sequence: CTG
aaggaaataacaaaaccttg

SEQ ID NO: 366733 - DNA, 20 bp, Artificial Sequence
  Description of Artificial Sequence: Synthetic oligonucleotide
  Target: LAMA2; (+) strand; PAM type: YTN; PAM sequence: CTT
gaagtaaaacactgtttcta

SEQ ID NO: 366734 - DNA, 20 bp, Artificial Sequence
  Description of Artificial Sequence: Synthetic oligonucleotide
  Target: LAMA2; (+) strand; PAM type: YTN; PAM sequence: TTG
aagtaaaacactgtttctat

SEQ ID NO: 366735 - DNA, 20 bp, Artificial Sequence
  Description of Artificial Sequence: Synthetic oligonucleotide
  Target: LAMA2; (+) strand; PAM type: YTN; PAM sequence: CTG
tttctatgataaaagagagc

SEQ ID NO: 366736 - DNA, 20 bp, Artificial Sequence
  Description of Artificial Sequence: Synthetic oligonucleotide
  Target: LAMA2; (+) strand; PAM type: YTN; PAM sequence: TTT
ctatgataaaagagagctct

SEQ ID NO: 366737 - DNA, 20 bp, Artificial Sequence
  Description of Artificial Sequence: Synthetic oligonucleotide
  Target: LAMA2; (+) strand; PAM type: YTN; PAM sequence: TTC
tatgataaaagagagctcta

SEQ ID NO: 366738 - DNA, 20 bp, Artificial Sequence
  Description of Artificial Sequence: Synthetic oligonucleotide
  Target: LAMA2; (+) strand; PAM type: YTN; PAM sequence: CTA
tgataaaagagagctctaca

SEQ ID NO: 366739 - DNA, 20 bp, Artificial Sequence
  Description of Artificial Sequence: Synthetic oligonucleotide
  Target: LAMA2; (+) strand; PAM type: YTN; PAM sequence: CTC
tacaaatagatgcatgaata

SEQ ID NO: 366740 - DNA, 20 bp, Artificial Sequence
  Description of Artificial Sequence: Synthetic oligonucleotide
  Target: LAMA2; (+) strand; PAM type: YTN; PAM sequence: CTA
caaatagatgcatgaataaa

SEQ ID NO: 366741 - DNA, 20 bp, Artificial Sequence
  Description of Artificial Sequence: Synthetic oligonucleotide
  Target: LAMA2; (+) strand; PAM type: YTN; PAM sequence: CTT
ctatgggagggatacctttt

SEQ ID NO: 366742 - DNA, 20 bp, Artificial Sequence
  Description of Artificial Sequence: Synthetic oligonucleotide
  Target: LAMA2; (+) strand; PAM type: YTN; PAM sequence: TTC
tatgggagggataccttttc

SEQ ID NO: 366743 - DNA, 20 bp, Artificial Sequence
  Description of Artificial Sequence: Synthetic oligonucleotide
  Target: LAMA2; (+) strand; PAM type: YTN; PAM sequence: CTA
tgggagggataccttttcag

SEQ ID NO: 366744 - DNA, 20 bp, Artificial Sequence
  Description of Artificial Sequence: Synthetic oligonucleotide
  Target: LAMA2; (+) strand; PAM type: YTN; PAM sequence: CTT
ttcagagtttaaggctcgcg

SEQ ID NO: 366745 - DNA, 20 bp, Artificial Sequence
  Description of Artificial Sequence: Synthetic oligonucleotide
  Target: LAMA2; (+) strand; PAM type: YTN; PAM sequence: TTT
tcagagtttaaggctcgcgg

SEQ ID NO: 366746 - DNA, 20 bp, Artificial Sequence
  Description of Artificial Sequence: Synthetic oligonucleotide
  Target: LAMA2; (+) strand; PAM type: YTN; PAM sequence: TTT
cagagtttaaggctcgcggg

SEQ ID NO: 366747 - DNA, 20 bp, Artificial Sequence
  Description of Artificial Sequence: Synthetic oligonucleotide
  Target: LAMA2; (+) strand; PAM type: YTN; PAM sequence: TTC
agagtttaaggctcgcgggc

SEQ ID NO: 366748 - DNA, 20 bp, Artificial Sequence
  Description of Artificial Sequence: Synthetic oligonucleotide
  Target: LAMA2; (+) strand; PAM type: YTN; PAM sequence: TTT
aaggctcgcgggctttggga

SEQ ID NO: 366749 - DNA, 20 bp, Artificial Sequence
  Description of Artificial Sequence: Synthetic oligonucleotide
  Target: LAMA2; (+) strand; PAM type: YTN; PAM sequence: TTA
aggctcgcgggctttgggat

SEQ ID NO: 366750 - DNA, 20 bp, Artificial Sequence
  Description of Artificial Sequence: Synthetic oligonucleotide
  Target: LAMA2; (+) strand; PAM type: YTN; PAM sequence: CTC
gcgggctttgggatctaaga

SEQ ID NO: 366751 - DNA, 20 bp, Artificial Sequence
  Description of Artificial Sequence: Synthetic oligonucleotide
  Target: LAMA2; (+) strand; PAM type: YTN; PAM sequence: CTT
tgggatctaagaagatgaat

SEQ ID NO: 366752 - DNA, 20 bp, Artificial Sequence
  Description of Artificial Sequence: Synthetic oligonucleotide
  Target: LAMA2; (+) strand; PAM type: YTN; PAM sequence: TTT
gggatctaagaagatgaatc

SEQ ID NO: 366753 - DNA, 20 bp, Artificial Sequence
  Description of Artificial Sequence: Synthetic oligonucleotide
  Target: LAMA2; (+) strand; PAM type: YTN; PAM sequence: TTG
ggatctaagaagatgaatcg

SEQ ID NO: 366754 - DNA, 20 bp, Artificial Sequence
  Description of Artificial Sequence: Synthetic oligonucleotide
  Target: LAMA2; (+) strand; PAM type: YTN; PAM sequence: CTA
agaagatgaatcgcttgccc

SEQ ID NO: 366755 - DNA, 20 bp, Artificial Sequence
  Description of Artificial Sequence: Synthetic oligonucleotide
  Target: LAMA2; (+) strand; PAM type: YTN; PAM sequence: CTT
gccctgtttgtgatcctaaa

SEQ ID NO: 366756 - DNA, 20 bp, Artificial Sequence
  Description of Artificial Sequence: Synthetic oligonucleotide
  Target: LAMA2; (+) strand; PAM type: YTN; PAM sequence: TTG
ccctgtttgtgatcctaaat

SEQ ID NO: 366757 - DNA, 20 bp, Artificial Sequence
  Description of Artificial Sequence: Synthetic oligonucleotide
  Target: LAMA2; (+) strand; PAM type: YTN; PAM sequence: CTG
tttgtgatcctaaatggaaa

SEQ ID NO: 366758 - DNA, 20 bp, Artificial Sequence
  Description of Artificial Sequence: Synthetic oligonucleotide
  Target: LAMA2; (+) strand; PAM type: YTN; PAM sequence: TTT
gtgatcctaaatggaaattg

SEQ ID NO: 366759 - DNA, 20 bp, Artificial Sequence
  Description of Artificial Sequence: Synthetic oligonucleotide
  Target: LAMA2; (+) strand; PAM type: YTN; PAM sequence: TTG
tgatcctaaatggaaattga

SEQ ID NO: 366760 - DNA, 20 bp, Artificial Sequence
  Description of Artificial Sequence: Synthetic oligonucleotide
  Target: LAMA2; (+) strand; PAM type: YTN; PAM sequence: CTA
aatggaaattgacagatatg

SEQ ID NO: 366761 - DNA, 20 bp, Artificial Sequence
  Description of Artificial Sequence: Synthetic oligonucleotide
  Target: LAMA2; (+) strand; PAM type: YTN; PAM sequence: TTG
acagatatgtttaatttatc

SEQ ID NO: 366762 - DNA, 20 bp, Artificial Sequence
  Description of Artificial Sequence: Synthetic oligonucleotide
  Target: LAMA2; (+) strand; PAM type: YTN; PAM sequence: TTT
aatttatcctgctcagtatt

SEQ ID NO: 366763 - DNA, 20 bp, Artificial Sequence
  Description of Artificial Sequence: Synthetic oligonucleotide
  Target: LAMA2; (+) strand; PAM type: YTN; PAM sequence: TTA
atttatcctgctcagtatta

SEQ ID NO: 366764 - DNA, 20 bp, Artificial Sequence
  Description of Artificial Sequence: Synthetic oligonucleotide
  Target: LAMA2; (+) strand; PAM type: YTN; PAM sequence: TTT
atcctgctcagtattataaa

SEQ ID NO: 366765 - DNA, 20 bp, Artificial Sequence
  Description of Artificial Sequence: Synthetic oligonucleotide
  Target: LAMA2; (+) strand; PAM type: YTN; PAM sequence: TTA
tcctgctcagtattataaag

SEQ ID NO: 366766 - DNA, 20 bp, Artificial Sequence
  Description of Artificial Sequence: Synthetic oligonucleotide
  Target: LAMA2; (+) strand; PAM type: YTN; PAM sequence: CTG
ctcagtattataaagccttt

SEQ ID NO: 366767 - DNA, 20 bp, Artificial Sequence
  Description of Artificial Sequence: Synthetic oligonucleotide
  Target: LAMA2; (+) strand; PAM type: YTN; PAM sequence: CTC
agtattataaagcctttttc

SEQ ID NO: 366768 - DNA, 20 bp, Artificial Sequence
  Description of Artificial Sequence: Synthetic oligonucleotide
  Target: LAMA2; (+) strand; PAM type: YTN; PAM sequence: TTA
taaagcctttttctcatttg

SEQ ID NO: 366769 - DNA, 20 bp, Artificial Sequence
  Description of Artificial Sequence: Synthetic oligonucleotide
  Target: LAMA2; (+) strand; PAM type: YTN; PAM sequence: CTT
tttctcatttgatttttgtg

SEQ ID NO: 366770 - DNA, 20 bp, Artificial Sequence
  Description of Artificial Sequence: Synthetic oligonucleotide
  Target: LAMA2; (+) strand; PAM type: YTN; PAM sequence: TTT
ttctcatttgatttttgtgt

SEQ ID NO: 366771 - DNA, 20 bp, Artificial Sequence
  Description of Artificial Sequence: Synthetic oligonucleotide
  Target: LAMA2; (+) strand; PAM type: YTN; PAM sequence: TTT
tctcatttgatttttgtgta

SEQ ID NO: 366772 - DNA, 20 bp, Artificial Sequence
  Description of Artificial Sequence: Synthetic oligonucleotide
  Target: LAMA2; (+) strand; PAM type: YTN; PAM sequence: TTT
ctcatttgatttttgtgtat

SEQ ID NO: 366773 - DNA, 20 bp, Artificial Sequence
  Description of Artificial Sequence: Synthetic oligonucleotide
  Target: LAMA2; (+) strand; PAM type: YTN; PAM sequence: TTC
tcatttgatttttgtgtatc

SEQ ID NO: 366774 - DNA, 20 bp, Artificial Sequence
  Description of Artificial Sequence: Synthetic oligonucleotide
  Target: LAMA2; (+) strand; PAM type: YTN; PAM sequence: CTC
atttgatttttgtgtatccc

SEQ ID NO: 366775 - DNA, 20 bp, Artificial Sequence
  Description of Artificial Sequence: Synthetic oligonucleotide
  Target: LAMA2; (+) strand; PAM type: YTN; PAM sequence: TTT
gatttttgtgtatccctcct

SEQ ID NO: 366776 - DNA, 20 bp, Artificial Sequence
  Description of Artificial Sequence: Synthetic oligonucleotide
  Target: LAMA2; (+) strand; PAM type: YTN; PAM sequence: TTG
atttttgtgtatccctcctg

SEQ ID NO: 366777 - DNA, 20 bp, Artificial Sequence
  Description of Artificial Sequence: Synthetic oligonucleotide
  Target: LAMA2; (+) strand; PAM type: YTN; PAM sequence: TTT
ttgtgtatccctcctgaaat

SEQ ID NO: 366778 - DNA, 20 bp, Artificial Sequence
  Description of Artificial Sequence: Synthetic oligonucleotide
  Target: LAMA2; (+) strand; PAM type: YTN; PAM sequence: TTT
tgtgtatccctcctgaaata

SEQ ID NO: 366779 - DNA, 20 bp, Artificial Sequence
  Description of Artificial Sequence: Synthetic oligonucleotide
  Target: LAMA2; (+) strand; PAM type: YTN; PAM sequence: TTT
gtgtatccctcctgaaatat

SEQ ID NO: 366780 - DNA, 20 bp, Artificial Sequence
  Description of Artificial Sequence: Synthetic oligonucleotide
  Target: LAMA2; (+) strand; PAM type: YTN; PAM sequence: TTG
tgtatccctcctgaaatatt

SEQ ID NO: 366781 - DNA, 20 bp, Artificial Sequence
  Description of Artificial Sequence: Synthetic oligonucleotide
  Target: LAMA2; (+) strand; PAM type: YTN; PAM sequence: CTC
ctgaaatatttgctctggta

SEQ ID NO: 366782 - DNA, 20 bp, Artificial Sequence
  Description of Artificial Sequence: Synthetic oligonucleotide
  Target: LAMA2; (+) strand; PAM type: YTN; PAM sequence: CTG
aaatatttgctctggtaagc

SEQ ID NO: 366783 - DNA, 20 bp, Artificial Sequence
  Description of Artificial Sequence: Synthetic oligonucleotide
  Target: LAMA2; (+) strand; PAM type: YTN; PAM sequence: TTT
gctctggtaagcaaaagcaa

SEQ ID NO: 366784 - DNA, 20 bp, Artificial Sequence
  Description of Artificial Sequence: Synthetic oligonucleotide
  Target: LAMA2; (+) strand; PAM type: YTN; PAM sequence: TTG
ctctggtaagcaaaagcaaa

SEQ ID NO: 366785 - DNA, 20 bp, Artificial Sequence
  Description of Artificial Sequence: Synthetic oligonucleotide
  Target: LAMA2; (+) strand; PAM type: YTN; PAM sequence: CTC
tggtaagcaaaagcaaatat

SEQ ID NO: 366786 - DNA, 20 bp, Artificial Sequence
  Description of Artificial Sequence: Synthetic oligonucleotide
  Target: LAMA2; (+) strand; PAM type: YTN; PAM sequence: CTG
gtaagcaaaagcaaatatta

SEQ ID NO: 366787 - DNA, 20 bp, Artificial Sequence
  Description of Artificial Sequence: Synthetic oligonucleotide
  Target: LAMA2; (+) strand; PAM type: YTN; PAM sequence: TTA
ggttttacactccatttagt

SEQ ID NO: 366788 - DNA, 20 bp, Artificial Sequence
  Description of Artificial Sequence: Synthetic oligonucleotide
  Target: LAMA2; (+) strand; PAM type: YTN; PAM sequence: TTT
tacactccatttagtgaaat

SEQ ID NO: 366789 - DNA, 20 bp, Artificial Sequence
  Description of Artificial Sequence: Synthetic oligonucleotide
  Target: LAMA2; (+) strand; PAM type: YTN; PAM sequence: TTT
acactccatttagtgaaata

SEQ ID NO: 366790 - DNA, 20 bp, Artificial Sequence
  Description of Artificial Sequence: Synthetic oligonucleotide
  Target: LAMA2; (+) strand; PAM type: YTN; PAM sequence: TTA
cactccatttagtgaaataa

SEQ ID NO: 366791 - DNA, 20 bp, Artificial Sequence
  Description of Artificial Sequence: Synthetic oligonucleotide
  Target: LAMA2; (+) strand; PAM type: YTN; PAM sequence: CTC
catttagtgaaataacagtg

SEQ ID NO: 366792 - DNA, 20 bp, Artificial Sequence
  Description of Artificial Sequence: Synthetic oligonucleotide
  Target: LAMA2; (+) strand; PAM type: YTN; PAM sequence: TTT
agtgaaataacagtgatgat

SEQ ID NO: 366793 - DNA, 20 bp, Artificial Sequence
  Description of Artificial Sequence: Synthetic oligonucleotide
  Target: LAMA2; (+) strand; PAM type: YTN; PAM sequence: TTA
gtgaaataacagtgatgata

SEQ ID NO: 366794 - DNA, 20 bp, Artificial Sequence
  Description of Artificial Sequence: Synthetic oligonucleotide
  Target: LAMA2; (+) strand; PAM type: YTN; PAM sequence: CTG
acatcagagaaccaaatgtt

SEQ ID NO: 366795 - DNA, 20 bp, Artificial Sequence
  Description of Artificial Sequence: Synthetic oligonucleotide
  Target: LAMA2; (+) strand; PAM type: YTN; PAM sequence: TTC
caggcttatttcatgaaaag

SEQ ID NO: 366796 - DNA, 20 bp, Artificial Sequence
  Description of Artificial Sequence: Synthetic oligonucleotide
  Target: LAMA2; (+) strand; PAM type: YTN; PAM sequence: CTT
atttcatgaaaaggatttcc

SEQ ID NO: 366797 - DNA, 20 bp, Artificial Sequence
  Description of Artificial Sequence: Synthetic oligonucleotide
  Target: LAMA2; (+) strand; PAM type: YTN; PAM sequence: TTA
tttcatgaaaaggatttcct

SEQ ID NO: 366798 - DNA, 20 bp, Artificial Sequence
  Description of Artificial Sequence: Synthetic oligonucleotide
  Target: LAMA2; (+) strand; PAM type: YTN; PAM sequence: TTT
catgaaaaggatttcctctc

SEQ ID NO: 366799 - DNA, 20 bp, Artificial Sequence
  Description of Artificial Sequence: Synthetic oligonucleotide
  Target: LAMA2; (+) strand; PAM type: YTN; PAM sequence: TTC
atgaaaaggatttcctctcc

SEQ ID NO: 366800 - DNA, 20 bp, Artificial Sequence
  Description of Artificial Sequence: Synthetic oligonucleotide
  Target: LAMA2; (+) strand; PAM type: YTN; PAM sequence: TTT
cctctccagaaacattatcc

SEQ ID NO: 366801 - DNA, 20 bp, Artificial Sequence
  Description of Artificial Sequence: Synthetic oligonucleotide
  Target: LAMA2; (+) strand; PAM type: YTN; PAM sequence: TTC
ctctccagaaacattatcct

SEQ ID NO: 366802 - DNA, 20 bp, Artificial Sequence
  Description of Artificial Sequence: Synthetic oligonucleotide
  Target: LAMA2; (+) strand; PAM type: YTN; PAM sequence: CTC
tccagaaacattatcctcaa

SEQ ID NO: 366803 - DNA, 20 bp, Artificial Sequence
  Description of Artificial Sequence: Synthetic oligonucleotide
  Target: LAMA2; (+) strand; PAM type: YTN; PAM sequence: CTC
cagaaacattatcctcaata

SEQ ID NO: 366804 - DNA, 20 bp, Artificial Sequence
  Description of Artificial Sequence: Synthetic oligonucleotide
  Target: LAMA2; (+) strand; PAM type: YTN; PAM sequence: TTA
tcctcaataggttatcccat

SEQ ID NO: 366805 - DNA, 20 bp, Artificial Sequence
  Description of Artificial Sequence: Synthetic oligonucleotide
  Target: LAMA2; (+) strand; PAM type: YTN; PAM sequence: CTC
aataggttatcccatccttc

SEQ ID NO: 366806 - DNA, 20 bp, Artificial Sequence
  Description of Artificial Sequence: Synthetic oligonucleotide
  Target: LAMA2; (+) strand; PAM type: YTN; PAM sequence: TTA
tcccatccttcattcctcaa

SEQ ID NO: 366807 - DNA, 20 bp, Artificial Sequence
  Description of Artificial Sequence: Synthetic oligonucleotide
  Target: LAMA2; (+) strand; PAM type: YTN; PAM sequence: CTT
cattcctcaattcatatttc

SEQ ID NO: 366808 - DNA, 20 bp, Artificial Sequence
  Description of Artificial Sequence: Synthetic oligonucleotide
  Target: LAMA2; (+) strand; PAM type: YTN; PAM sequence: TTC
attcctcaattcatatttct

SEQ ID NO: 366809 - DNA, 20 bp, Artificial Sequence
  Description of Artificial Sequence: Synthetic oligonucleotide
  Target: LAMA2; (+) strand; PAM type: YTN; PAM sequence: TTC
ctcaattcatatttcttgag

SEQ ID NO: 366810 - DNA, 20 bp, Artificial Sequence
  Description of Artificial Sequence: Synthetic oligonucleotide
  Target: LAMA2; (+) strand; PAM type: YTN; PAM sequence: CTC
aattcatatttcttgagatt

SEQ ID NO: 366811 - DNA, 20 bp, Artificial Sequence
  Description of Artificial Sequence: Synthetic oligonucleotide
  Target: LAMA2; (+) strand; PAM type: YTN; PAM sequence: TTC
atatttcttgagattgagag

SEQ ID NO: 366812 - DNA, 20 bp, Artificial Sequence
  Description of Artificial Sequence: Synthetic oligonucleotide
  Target: LAMA2; (+) strand; PAM type: YTN; PAM sequence: TTT
cttgagattgagagggaaaa

SEQ ID NO: 366813 - DNA, 20 bp, Artificial Sequence
  Description of Artificial Sequence: Synthetic oligonucleotide
  Target: LAMA2; (+) strand; PAM type: YTN; PAM sequence: TTC
ttgagattgagagggaaaaa

SEQ ID NO: 366814 - DNA, 20 bp, Artificial Sequence
  Description of Artificial Sequence: Synthetic oligonucleotide
  Target: LAMA2; (+) strand; PAM type: YTN; PAM sequence: CTT
gagattgagagggaaaaaaa

SEQ ID NO: 366815 - DNA, 20 bp, Artificial Sequence
  Description of Artificial Sequence: Synthetic oligonucleotide
  Target: LAMA2; (+) strand; PAM type: YTN; PAM sequence: TTG
agattgagagggaaaaaaaa

SEQ ID NO: 366816 - DNA, 20 bp, Artificial Sequence
  Description of Artificial Sequence: Synthetic oligonucleotide
  Target: LAMA2; (+) strand; PAM type: YTN; PAM sequence: TTG
agagggaaaaaaaaagaggc

SEQ ID NO: 366817 - DNA, 20 bp, Artificial Sequence
  Description of Artificial Sequence: Synthetic oligonucleotide
  Target: LAMA2; (+) strand; PAM type: YTN; PAM sequence: CTA
ctgctaaattcttttatgaa

SEQ ID NO: 366818 - DNA, 20 bp, Artificial Sequence
  Description of Artificial Sequence: Synthetic oligonucleotide
  Target: LAMA2; (+) strand; PAM type: YTN; PAM sequence: CTG
ctaaattcttttatgaagct

SEQ ID NO: 366819 - DNA, 20 bp, Artificial Sequence
  Description of Artificial Sequence: Synthetic oligonucleotide
  Target: LAMA2; (+) strand; PAM type: YTN; PAM sequence: CTA
aattcttttatgaagcttag

SEQ ID NO: 366820 - DNA, 20 bp, Artificial Sequence
  Description of Artificial Sequence: Synthetic oligonucleotide
  Target: LAMA2; (+) strand; PAM type: YTN; PAM sequence: TTC
ttttatgaagcttagtttta

SEQ ID NO: 366821 - DNA, 20 bp, Artificial Sequence
  Description of Artificial Sequence: Synthetic oligonucleotide
  Target: LAMA2; (+) strand; PAM type: YTN; PAM sequence: CTT
ttatgaagcttagttttatg

SEQ ID NO: 366822 - DNA, 20 bp, Artificial Sequence
  Description of Artificial Sequence: Synthetic oligonucleotide
  Target: LAMA2; (+) strand; PAM type: YTN; PAM sequence: TTT
tatgaagcttagttttatga

SEQ ID NO: 366823 - DNA, 20 bp, Artificial Sequence
  Description of Artificial Sequence: Synthetic oligonucleotide
  Target: LAMA2; (+) strand; PAM type: YTN; PAM sequence: TTT
atgaagcttagttttatgaa

SEQ ID NO: 366824 - DNA, 20 bp, Artificial Sequence
  Description of Artificial Sequence: Synthetic oligonucleotide
  Target: LAMA2; (+) strand; PAM type: YTN; PAM sequence: TTA
tgaagcttagttttatgaat

SEQ ID NO: 366825 - DNA, 20 bp, Artificial Sequence
  Description of Artificial Sequence: Synthetic oligonucleotide
  Target: LAMA2; (+) strand; PAM type: YTN; PAM sequence: CTT
agttttatgaattacctttt

SEQ ID NO: 366826 - DNA, 20 bp, Artificial Sequence
  Description of Artificial Sequence: Synthetic oligonucleotide
  Target: LAMA2; (+) strand; PAM type: YTN; PAM sequence: TTA
gttttatgaattacctttta

SEQ ID NO: 366827 - DNA, 20 bp, Artificial Sequence
  Description of Artificial Sequence: Synthetic oligonucleotide
  Target: LAMA2; (+) strand; PAM type: YTN; PAM sequence: TTT
tatgaattaccttttagcct

SEQ ID NO: 366828 - DNA, 20 bp, Artificial Sequence
  Description of Artificial Sequence: Synthetic oligonucleotide
  Target: LAMA2; (+) strand; PAM type: YTN; PAM sequence: TTT
atgaattaccttttagcctt

SEQ ID NO: 366829 - DNA, 20 bp, Artificial Sequence
  Description of Artificial Sequence: Synthetic oligonucleotide
  Target: LAMA2; (+) strand; PAM type: YTN; PAM sequence: TTA
tgaattaccttttagccttc

SEQ ID NO: 366830 - DNA, 20 bp, Artificial Sequence
  Description of Artificial Sequence: Synthetic oligonucleotide
  Target: LAMA2; (+) strand; PAM type: YTN; PAM sequence: TTA
ccttttagccttctccagtc

SEQ ID NO: 366831 - DNA, 20 bp, Artificial Sequence
  Description of Artificial Sequence: Synthetic oligonucleotide
  Target: LAMA2; (+) strand; PAM type: YTN; PAM sequence: CTT
ttagccttctccagtcatgt

SEQ ID NO: 366832 - DNA, 20 bp, Artificial Sequence
  Description of Artificial Sequence: Synthetic oligonucleotide
  Target: LAMA2; (+) strand; PAM type: YTN; PAM sequence: TTT
tagccttctccagtcatgtg

SEQ ID NO: 366833 - DNA, 20 bp, Artificial Sequence
  Description of Artificial Sequence: Synthetic oligonucleotide
  Target: LAMA2; (+) strand; PAM type: YTN; PAM sequence: TTT
agccttctccagtcatgtgg

SEQ ID NO: 366834 - DNA, 20 bp, Artificial Sequence
  Description of Artificial Sequence: Synthetic oligonucleotide
  Target: LAMA2; (+) strand; PAM type: YTN; PAM sequence: TTA
gccttctccagtcatgtggg

SEQ ID NO: 366835 - DNA, 20 bp, Artificial Sequence
  Description of Artificial Sequence: Synthetic oligonucleotide
  Target: LAMA2; (+) strand; PAM type: YTN; PAM sequence: CTT
ctccagtcatgtgggaaaac

SEQ ID NO: 366836 - DNA, 20 bp, Artificial Sequence
  Description of Artificial Sequence: Synthetic oligonucleotide
  Target: LAMA2; (+) strand; PAM type: YTN; PAM sequence: TTC
tccagtcatgtgggaaaact

SEQ ID NO: 366837 - DNA, 20 bp, Artificial Sequence
  Description of Artificial Sequence: Synthetic oligonucleotide
  Target: LAMA2; (+) strand; PAM type: YTN; PAM sequence: CTC
cagtcatgtgggaaaacttt

SEQ ID NO: 366838 - DNA, 20 bp, Artificial Sequence
  Description of Artificial Sequence: Synthetic oligonucleotide
  Target: LAMA2; (+) strand; PAM type: YTN; PAM sequence: CTT
tcctgcctcattaaatcttt

SEQ ID NO: 366839 - DNA, 20 bp, Artificial Sequence
  Description of Artificial Sequence: Synthetic oligonucleotide
  Target: LAMA2; (+) strand; PAM type: YTN; PAM sequence: TTT
cctgcctcattaaatcttta

SEQ ID NO: 366840 - DNA, 20 bp, Artificial Sequence
  Description of Artificial Sequence: Synthetic oligonucleotide
  Target: LAMA2; (+) strand; PAM type: YTN; PAM sequence: TTC
ctgcctcattaaatctttaa

SEQ ID NO: 366841 - DNA, 20 bp, Artificial Sequence
  Description of Artificial Sequence: Synthetic oligonucleotide
  Target: LAMA2; (+) strand; PAM type: YTN; PAM sequence: CTG
cctcattaaatctttaatgc

SEQ ID NO: 366842 - DNA, 20 bp, Artificial Sequence
  Description of Artificial Sequence: Synthetic oligonucleotide
  Target: LAMA2; (+) strand; PAM type: YTN; PAM sequence: CTC
attaaatctttaatgcaatg

SEQ ID NO: 366843 - DNA, 20 bp, Artificial Sequence
  Description of Artificial Sequence: Synthetic oligonucleotide
  Target: LAMA2; (+) strand; PAM type: YTN; PAM sequence: TTA
aatctttaatgcaatgtgca

SEQ ID NO: 366844 - DNA, 20 bp, Artificial Sequence
  Description of Artificial Sequence: Synthetic oligonucleotide
  Target: LAMA2; (+) strand; PAM type: YTN; PAM sequence: CTT
taatgcaatgtgcaccatgc

SEQ ID NO: 366845 - DNA, 20 bp, Artificial Sequence
  Description of Artificial Sequence: Synthetic oligonucleotide
  Target: LAMA2; (+) strand; PAM type: YTN; PAM sequence: TTT
aatgcaatgtgcaccatgca

SEQ ID NO: 366846 - DNA, 20 bp, Artificial Sequence
  Description of Artificial Sequence: Synthetic oligonucleotide
  Target: LAMA2; (+) strand; PAM type: YTN; PAM sequence: TTA
atgcaatgtgcaccatgcac

SEQ ID NO: 366847 - DNA, 20 bp, Artificial Sequence
  Description of Artificial Sequence: Synthetic oligonucleotide
  Target: LAMA2; (+) strand; PAM type: YTN; PAM sequence: CTG
tattgttatttgtgacatta

SEQ ID NO: 366848 - DNA, 20 bp, Artificial Sequence
  Description of Artificial Sequence: Synthetic oligonucleotide
  Target: LAMA2; (+) strand; PAM type: YTN; PAM sequence: TTG
ttatttgtgacattaggtta

SEQ ID NO: 366849 - DNA, 20 bp, Artificial Sequence
  Description of Artificial Sequence: Synthetic oligonucleotide
  Target: LAMA2; (+) strand; PAM type: YTN; PAM sequence: TTA
tttgtgacattaggttatat

SEQ ID NO: 366850 - DNA, 20 bp, Artificial Sequence
  Description of Artificial Sequence: Synthetic oligonucleotide
  Target: LAMA2; (+) strand; PAM type: YTN; PAM sequence: TTT
gtgacattaggttatatatt

SEQ ID NO: 366851 - DNA, 20 bp, Artificial Sequence
  Description of Artificial Sequence: Synthetic oligonucleotide
  Target: LAMA2; (+) strand; PAM type: YTN; PAM sequence: TTG
tgacattaggttatatattg

SEQ ID NO: 366852 - DNA, 20 bp, Artificial Sequence
  Description of Artificial Sequence: Synthetic oligonucleotide
  Target: LAMA2; (+) strand; PAM type: YTN; PAM sequence: TTA
ggttatatattgcatagtaa

SEQ ID NO: 366853 - DNA, 20 bp, Artificial Sequence
  Description of Artificial Sequence: Synthetic oligonucleotide
  Target: LAMA2; (+) strand; PAM type: YTN; PAM sequence: TTA
tatattgcatagtaactata

SEQ ID NO: 366854 - DNA, 20 bp, Artificial Sequence
  Description of Artificial Sequence: Synthetic oligonucleotide
  Target: LAMA2; (+) strand; PAM type: YTN; PAM sequence: TTG
catagtaactataatattac

SEQ ID NO: 366855 - DNA, 20 bp, Artificial Sequence
  Description of Artificial Sequence: Synthetic oligonucleotide
  Target: LAMA2; (+) strand; PAM type: YTN; PAM sequence: CTA
taatattacttgcaaacaag

SEQ ID NO: 366856 - DNA, 20 bp, Artificial Sequence
  Description of Artificial Sequence: Synthetic oligonucleotide
  Target: LAMA2; (+) strand; PAM type: YTN; PAM sequence: TTA
cttgcaaacaagctggtttt

SEQ ID NO: 366857 - DNA, 20 bp, Artificial Sequence
  Description of Artificial Sequence: Synthetic oligonucleotide
  Target: LAMA2; (+) strand; PAM type: YTN; PAM sequence: CTT
gcaaacaagctggtttttcc

SEQ ID NO: 366858 - DNA, 20 bp, Artificial Sequence
  Description of Artificial Sequence: Synthetic oligonucleotide
  Target: LAMA2; (+) strand; PAM type: YTN; PAM sequence: TTG
caaacaagctggtttttccc

SEQ ID NO: 366859 - DNA, 20 bp, Artificial Sequence
  Description of Artificial Sequence: Synthetic oligonucleotide
  Target: LAMA2; (+) strand; PAM type: YTN; PAM sequence: CTG
gtttttccccctgaaggtag

SEQ ID NO: 366860 - DNA, 20 bp, Artificial Sequence
  Description of Artificial Sequence: Synthetic oligonucleotide
  Target: LAMA2; (+) strand; PAM type: YTN; PAM sequence: TTT
ttccccctgaaggtagaatt

SEQ ID NO: 366861 - DNA, 20 bp, Artificial Sequence
  Description of Artificial Sequence: Synthetic oligonucleotide
  Target: LAMA2; (+) strand; PAM type: YTN; PAM sequence: TTT
tccccctgaaggtagaatta

SEQ ID NO: 366862 - DNA, 20 bp, Artificial Sequence
  Description of Artificial Sequence: Synthetic oligonucleotide
  Target: LAMA2; (+) strand; PAM type: YTN; PAM sequence: TTT
ccccctgaaggtagaattaa

SEQ ID NO: 366863 - DNA, 20 bp, Artificial Sequence
  Description of Artificial Sequence: Synthetic oligonucleotide
  Target: LAMA2; (+) strand; PAM type: YTN; PAM sequence: TTC
cccctgaaggtagaattaaa

SEQ ID NO: 366864 - DNA, 20 bp, Artificial Sequence
  Description of Artificial Sequence: Synthetic oligonucleotide
  Target: LAMA2; (+) strand; PAM type: YTN; PAM sequence: CTG
aaggtagaattaaaacaggt

SEQ ID NO: 366865 - DNA, 20 bp, Artificial Sequence
  Description of Artificial Sequence: Synthetic oligonucleotide
  Target: LAMA2; (+) strand; PAM type: YTN; PAM sequence: TTA
aaacaggtactcatgggaaa

SEQ ID NO: 366866 - DNA, 20 bp, Artificial Sequence
  Description of Artificial Sequence: Synthetic oligonucleotide
  Target: LAMA2; (+) strand; PAM type: YTN; PAM sequence: CTC
atgggaaacagctacttgtg

SEQ ID NO: 366867 - DNA, 20 bp, Artificial Sequence
  Description of Artificial Sequence: Synthetic oligonucleotide
  Target: LAMA2; (+) strand; PAM type: YTN; PAM sequence: CTA
cttgtgttcttcttttctta

SEQ ID NO: 366868 - DNA, 20 bp, Artificial Sequence
  Description of Artificial Sequence: Synthetic oligonucleotide
  Target: LAMA2; (+) strand; PAM type: YTN; PAM sequence: CTT
gtgttcttcttttcttaatg

SEQ ID NO: 366869 - DNA, 20 bp, Artificial Sequence
  Description of Artificial Sequence: Synthetic oligonucleotide
  Target: LAMA2; (+) strand; PAM type: YTN; PAM sequence: TTG
tgttcttcttttcttaatgg

SEQ ID NO: 366870 - DNA, 20 bp, Artificial Sequence
  Description of Artificial Sequence: Synthetic oligonucleotide
  Target: LAMA2; (+) strand; PAM type: YTN; PAM sequence: TTC
ttcttttcttaatggggtga

SEQ ID NO: 366871 - DNA, 20 bp, Artificial Sequence
  Description of Artificial Sequence: Synthetic oligonucleotide
  Target: LAMA2; (+) strand; PAM type: YTN; PAM sequence: CTT
cttttcttaatggggtgaag

SEQ ID NO: 366872 - DNA, 20 bp, Artificial Sequence
  Description of Artificial Sequence: Synthetic oligonucleotide
  Target: LAMA2; (+) strand; PAM type: YTN; PAM sequence: TTC
ttttcttaatggggtgaagc

SEQ ID NO: 366873 - DNA, 20 bp, Artificial Sequence
  Description of Artificial Sequence: Synthetic oligonucleotide
  Target: LAMA2; (+) strand; PAM type: YTN; PAM sequence: CTT
ttcttaatggggtgaagctg

SEQ ID NO: 366874 - DNA, 20 bp, Artificial Sequence
  Description of Artificial Sequence: Synthetic oligonucleotide
  Target: LAMA2; (+) strand; PAM type: YTN; PAM sequence: TTT
tcttaatggggtgaagctga

SEQ ID NO: 366875 - DNA, 20 bp, Artificial Sequence
  Description of Artificial Sequence: Synthetic oligonucleotide
  Target: LAMA2; (+) strand; PAM type: YTN; PAM sequence: TTT
cttaatggggtgaagctgaa

SEQ ID NO: 366876 - DNA, 20 bp, Artificial Sequence
  Description of Artificial Sequence: Synthetic oligonucleotide
  Target: LAMA2; (+) strand; PAM type: YTN; PAM sequence: TTC
ttaatggggtgaagctgaag

SEQ ID NO: 366877 - DNA, 20 bp, Artificial Sequence
  Description of Artificial Sequence: Synthetic oligonucleotide
  Target: LAMA2; (+) strand; PAM type: YTN; PAM sequence: CTT
aatggggtgaagctgaagaa

SEQ ID NO: 366878 - DNA, 20 bp, Artificial Sequence
  Description of Artificial Sequence: Synthetic oligonucleotide
  Target: LAMA2; (+) strand; PAM type: YTN; PAM sequence: TTA
atggggtgaagctgaagaac

SEQ ID NO: 366879 - DNA, 20 bp, Artificial Sequence
  Description of Artificial Sequence: Synthetic oligonucleotide
  Target: LAMA2; (+) strand; PAM type: YTN; PAM sequence: CTG
aagaacaggaaagtgaatgg

SEQ ID NO: 366880 - DNA, 20 bp, Artificial Sequence
  Description of Artificial Sequence: Synthetic oligonucleotide
  Target: LAMA2; (+) strand; PAM type: YTN; PAM sequence: CTT
agcctagaaccatctccagg

SEQ ID NO: 366881 - DNA, 20 bp, Artificial Sequence
  Description of Artificial Sequence: Synthetic oligonucleotide
  Target: LAMA2; (+) strand; PAM type: YTN; PAM sequence: TTA
gcctagaaccatctccagga

SEQ ID NO: 366882 - DNA, 20 bp, Artificial Sequence
  Description of Artificial Sequence: Synthetic oligonucleotide
  Target: LAMA2; (+) strand; PAM type: YTN; PAM sequence: CTA
gaaccatctccaggaatgga

SEQ ID NO: 366883 - DNA, 20 bp, Artificial Sequence
  Description of Artificial Sequence: Synthetic oligonucleotide
  Target: LAMA2; (+) strand; PAM type: YTN; PAM sequence: CTC
caggaatggaggtaaatttt

SEQ ID NO: 366884 - DNA, 20 bp, Artificial Sequence
  Description of Artificial Sequence: Synthetic oligonucleotide
  Target: LAMA2; (+) strand; PAM type: YTN; PAM sequence: TTT
tttcctgcagtgccttctca

SEQ ID NO: 366885 - DNA, 20 bp, Artificial Sequence
  Description of Artificial Sequence: Synthetic oligonucleotide
  Target: LAMA2; (+) strand; PAM type: YTN; PAM sequence: TTT
ttcctgcagtgccttctcaa

SEQ ID NO: 366886 - DNA, 20 bp, Artificial Sequence
  Description of Artificial Sequence: Synthetic oligonucleotide
  Target: LAMA2; (+) strand; PAM type: YTN; PAM sequence: TTT
tcctgcagtgccttctcaat

SEQ ID NO: 366887 - DNA, 20 bp, Artificial Sequence
  Description of Artificial Sequence: Synthetic oligonucleotide
  Target: LAMA2; (+) strand; PAM type: YTN; PAM sequence: TTT
cctgcagtgccttctcaatt

SEQ ID NO: 366888 - DNA, 20 bp, Artificial Sequence
  Description of Artificial Sequence: Synthetic oligonucleotide
  Target: LAMA2; (+) strand; PAM type: YTN; PAM sequence: TTC
ctgcagtgccttctcaattt

SEQ ID NO: 366889 - DNA, 20 bp, Artificial Sequence
  Description of Artificial Sequence: Synthetic oligonucleotide
  Target: LAMA2; (+) strand; PAM type: YTN; PAM sequence: CTG
cagtgccttctcaatttgat

SEQ ID NO: 366890 - DNA, 20 bp, Artificial Sequence
  Description of Artificial Sequence: Synthetic oligonucleotide
  Target: LAMA2; (+) strand; PAM type: YTN; PAM sequence: CTT
ctcaatttgatatctgaatc

SEQ ID NO: 366891 - DNA, 20 bp, Artificial Sequence
  Description of Artificial Sequence: Synthetic oligonucleotide
  Target: LAMA2; (+) strand; PAM type: YTN; PAM sequence: TTC
tcaatttgatatctgaatct

SEQ ID NO: 366892 - DNA, 20 bp, Artificial Sequence
  Description of Artificial Sequence: Synthetic oligonucleotide
  Target: LAMA2; (+) strand; PAM type: YTN; PAM sequence: CTC
aatttgatatctgaatctcc

SEQ ID NO: 366893 - DNA, 20 bp, Artificial Sequence
  Description of Artificial Sequence: Synthetic oligonucleotide
  Target: LAMA2; (+) strand; PAM type: YTN; PAM sequence: TTT
gatatctgaatctccctgaa

SEQ ID NO: 366894 - DNA, 20 bp, Artificial Sequence
  Description of Artificial Sequence: Synthetic oligonucleotide
  Target: LAMA2; (+) strand; PAM type: YTN; PAM sequence: TTG
atatctgaatctccctgaag

SEQ ID NO: 366895 - DNA, 20 bp, Artificial Sequence
  Description of Artificial Sequence: Synthetic oligonucleotide
  Target: LAMA2; (+) strand; PAM type: YTN; PAM sequence: CTG
aatctccctgaagagaattt

SEQ ID NO: 366896 - DNA, 20 bp, Artificial Sequence
  Description of Artificial Sequence: Synthetic oligonucleotide
  Target: LAMA2; (+) strand; PAM type: YTN; PAM sequence: CTC
cctgaagagaatttgcctta

SEQ ID NO: 366897 - DNA, 20 bp, Artificial Sequence
  Description of Artificial Sequence: Synthetic oligonucleotide
  Target: LAMA2; (+) strand; PAM type: YTN; PAM sequence: CTG
aagagaatttgccttagtag

SEQ ID NO: 366898 - DNA, 20 bp, Artificial Sequence
  Description of Artificial Sequence: Synthetic oligonucleotide
  Target: LAMA2; (+) strand; PAM type: YTN; PAM sequence: TTT
gccttagtagatatggagaa

SEQ ID NO: 366899 - DNA, 20 bp, Artificial Sequence
  Description of Artificial Sequence: Synthetic oligonucleotide
  Target: LAMA2; (+) strand; PAM type: YTN; PAM sequence: TTG
ccttagtagatatggagaaa

SEQ ID NO: 366900 - DNA, 20 bp, Artificial Sequence
  Description of Artificial Sequence: Synthetic oligonucleotide
  Target: LAMA2; (+) strand; PAM type: YTN; PAM sequence: CTT
agtagatatggagaaagagg

SEQ ID NO: 366901 - DNA, 20 bp, Artificial Sequence
  Description of Artificial Sequence: Synthetic oligonucleotide
  Target: LAMA2; (+) strand; PAM type: YTN; PAM sequence: TTA
gtagatatggagaaagaggg

SEQ ID NO: 366902 - DNA, 20 bp, Artificial Sequence
  Description of Artificial Sequence: Synthetic oligonucleotide
  Target: LAMA2; (+) strand; PAM type: YTN; PAM sequence: CTT
tggagacccttatgaaatgg

SEQ ID NO: 366903 - DNA, 20 bp, Artificial Sequence
  Description of Artificial Sequence: Synthetic oligonucleotide
  Target: LAMA2; (+) strand; PAM type: YTN; PAM sequence: TTT
ggagacccttatgaaatgga

SEQ ID NO: 366904 - DNA, 20 bp, Artificial Sequence
  Description of Artificial Sequence: Synthetic oligonucleotide
  Target: LAMA2; (+) strand; PAM type: YTN; PAM sequence: TTG
gagacccttatgaaatggaa

SEQ ID NO: 366905 - DNA, 20 bp, Artificial Sequence
  Description of Artificial Sequence: Synthetic oligonucleotide
  Target: LAMA2; (+) strand; PAM type: YTN; PAM sequence: CTT
atgaaatggaatgaaccgct

SEQ ID NO: 366906 - DNA, 20 bp, Artificial Sequence
  Description of Artificial Sequence: Synthetic oligonucleotide
  Target: LAMA2; (+) strand; PAM type: YTN; PAM sequence: TTA
tgaaatggaatgaaccgctc

SEQ ID NO: 366907 - DNA, 20 bp, Artificial Sequence
  Description of Artificial Sequence: Synthetic oligonucleotide
  Target: LAMA2; (+) strand; PAM type: YTN; PAM sequence: CTC
tcactaaattcactttctct

SEQ ID NO: 366908 - DNA, 20 bp, Artificial Sequence
  Description of Artificial Sequence: Synthetic oligonucleotide
  Target: LAMA2; (+) strand; PAM type: YTN; PAM sequence: CTC
actaaattcactttctcttt

SEQ ID NO: 366909 - DNA, 20 bp, Artificial Sequence
  Description of Artificial Sequence: Synthetic oligonucleotide
  Target: LAMA2; (+) strand; PAM type: YTN; PAM sequence: CTA
aattcactttctctttgtat

SEQ ID NO: 366910 - DNA, 20 bp, Artificial Sequence
  Description of Artificial Sequence: Synthetic oligonucleotide
  Target: LAMA2; (+) strand; PAM type: YTN; PAM sequence: TTC
actttctctttgtattgaaa

SEQ ID NO: 366911 - DNA, 20 bp, Artificial Sequence
  Description of Artificial Sequence: Synthetic oligonucleotide
  Target: LAMA2; (+) strand; PAM type: YTN; PAM sequence: CTT
tctctttgtattgaaaagag

SEQ ID NO: 366912 - DNA, 20 bp, Artificial Sequence
  Description of Artificial Sequence: Synthetic oligonucleotide
  Target: LAMA2; (+) strand; PAM type: YTN; PAM sequence: TTT
ctctttgtattgaaaagaga

SEQ ID NO: 366913 - DNA, 20 bp, Artificial Sequence
  Description of Artificial Sequence: Synthetic oligonucleotide
  Target: LAMA2; (+) strand; PAM type: YTN; PAM sequence: TTC
tctttgtattgaaaagagat

SEQ ID NO: 366914 - DNA, 20 bp, Artificial Sequence
  Description of Artificial Sequence: Synthetic oligonucleotide
  Target: LAMA2; (+) strand; PAM type: YTN; PAM sequence: CTC
tttgtattgaaaagagatat

SEQ ID NO: 366915 - DNA, 20 bp, Artificial Sequence
  Description of Artificial Sequence: Synthetic oligonucleotide
  Target: LAMA2; (+) strand; PAM type: YTN; PAM sequence: CTT
tgtattgaaaagagatataa

SEQ ID NO: 366916 - DNA, 20 bp, Artificial Sequence
  Description of Artificial Sequence: Synthetic oligonucleotide
  Target: LAMA2; (+) strand; PAM type: YTN; PAM sequence: TTT
gtattgaaaagagatataat

SEQ ID NO: 366917 - DNA, 20 bp, Artificial Sequence
  Description of Artificial Sequence: Synthetic oligonucleotide
  Target: LAMA2; (+) strand; PAM type: YTN; PAM sequence: TTG
tattgaaaagagatataatt

SEQ ID NO: 366918 - DNA, 20 bp, Artificial Sequence
  Description of Artificial Sequence: Synthetic oligonucleotide
  Target: LAMA2; (+) strand; PAM type: YTN; PAM sequence: TTG
aaaagagatataattttcat

SEQ ID NO: 366919 - DNA, 20 bp, Artificial Sequence
  Description of Artificial Sequence: Synthetic oligonucleotide
  Target: LAMA2; (+) strand; PAM type: YTN; PAM sequence: TTT
tcatccctagtaaatatagt

SEQ ID NO: 366920 - DNA, 20 bp, Artificial Sequence
  Description of Artificial Sequence: Synthetic oligonucleotide
  Target: LAMA2; (+) strand; PAM type: YTN; PAM sequence: TTT
catccctagtaaatatagtc

SEQ ID NO: 366921 - DNA, 20 bp, Artificial Sequence
  Description of Artificial Sequence: Synthetic oligonucleotide
  Target: LAMA2; (+) strand; PAM type: YTN; PAM sequence: TTC
atccctagtaaatatagtcg

SEQ ID NO: 366922 - DNA, 20 bp, Artificial Sequence
  Description of Artificial Sequence: Synthetic oligonucleotide
  Target: LAMA2; (+) strand; PAM type: YTN; PAM sequence: CTA
gtaaatatagtcgaatccat

SEQ ID NO: 366923 - DNA, 20 bp, Artificial Sequence
  Description of Artificial Sequence: Synthetic oligonucleotide
  Target: LAMA2; (+) strand; PAM type: YTN; PAM sequence: TTG
cctcaaagtgaactaaaatt

SEQ ID NO: 366924 - DNA, 20 bp, Artificial Sequence
  Description of Artificial Sequence: Synthetic oligonucleotide
  Target: LAMA2; (+) strand; PAM type: YTN; PAM sequence: CTC
aaagtgaactaaaattgcac

SEQ ID NO: 366925 - DNA, 20 bp, Artificial Sequence
  Description of Artificial Sequence: Synthetic oligonucleotide
  Target: LAMA2; (+) strand; PAM type: YTN; PAM sequence: CTA
aaattgcacttactcctacc

SEQ ID NO: 366926 - DNA, 20 bp, Artificial Sequence
  Description of Artificial Sequence: Synthetic oligonucleotide
  Target: LAMA2; (+) strand; PAM type: YTN; PAM sequence: TTG
cacttactcctacctgtgga

SEQ ID NO: 366927 - DNA, 20 bp, Artificial Sequence
  Description of Artificial Sequence: Synthetic oligonucleotide
  Target: LAMA2; (+) strand; PAM type: YTN; PAM sequence: CTT
actcctacctgtggaaaacc

SEQ ID NO: 366928 - DNA, 20 bp, Artificial Sequence
  Description of Artificial Sequence: Synthetic oligonucleotide
  Target: LAMA2; (+) strand; PAM type: YTN; PAM sequence: TTA
ctcctacctgtggaaaacca

SEQ ID NO: 366929 - DNA, 20 bp, Artificial Sequence
  Description of Artificial Sequence: Synthetic oligonucleotide
  Target: LAMA2; (+) strand; PAM type: YTN; PAM sequence: CTC
ctacctgtggaaaaccatat

SEQ ID NO: 366930 - DNA, 20 bp, Artificial Sequence
  Description of Artificial Sequence: Synthetic oligonucleotide
  Target: LAMA2; (+) strand; PAM type: YTN; PAM sequence: CTA
cctgtggaaaaccatatttc

SEQ ID NO: 366931 - DNA, 20 bp, Artificial Sequence
  Description of Artificial Sequence: Synthetic oligonucleotide
  Target: LAMA2; (+) strand; PAM type: YTN; PAM sequence: CTG
tggaaaaccatatttctcta

SEQ ID NO: 366932 - DNA, 20 bp, Artificial Sequence
  Description of Artificial Sequence: Synthetic oligonucleotide
  Target: LAMA2; (+) strand; PAM type: YTN; PAM sequence: TTT
ctctagccaagagaacaatg

SEQ ID NO: 366933 - DNA, 20 bp, Artificial Sequence
  Description of Artificial Sequence: Synthetic oligonucleotide
  Target: LAMA2; (+) strand; PAM type: YTN; PAM sequence: TTC
tctagccaagagaacaatga

SEQ ID NO: 366934 - DNA, 20 bp, Artificial Sequence
  Description of Artificial Sequence: Synthetic oligonucleotide
  Target: LAMA2; (+) strand; PAM type: YTN; PAM sequence: CTC
tagccaagagaacaatgaca

SEQ ID NO: 366935 - DNA, 20 bp, Artificial Sequence
  Description of Artificial Sequence: Synthetic oligonucleotide
  Target: LAMA2; (+) strand; PAM type: YTN; PAM sequence: CTA
gccaagagaacaatgacaga

SEQ ID NO: 366936 - DNA, 20 bp, Artificial Sequence
  Description of Artificial Sequence: Synthetic oligonucleotide
  Target: LAMA2; (+) strand; PAM type: YTN; PAM sequence: TTA
gttcctaaatagcaggagaa

SEQ ID NO: 366937 - DNA, 20 bp, Artificial Sequence
  Description of Artificial Sequence: Synthetic oligonucleotide
  Target: LAMA2; (+) strand; PAM type: YTN; PAM sequence: TTC
ctaaatagcaggagaaaatg

SEQ ID NO: 366938 - DNA, 20 bp, Artificial Sequence
  Description of Artificial Sequence: Synthetic oligonucleotide
  Target: LAMA2; (+) strand; PAM type: YTN; PAM sequence: CTA
aatagcaggagaaaatgaaa

SEQ ID NO: 366939 - DNA, 20 bp, Artificial Sequence
  Description of Artificial Sequence: Synthetic oligonucleotide
  Target: LAMA2; (+) strand; PAM type: YTN; PAM sequence: TTC
tattggctgaacacacagtg

SEQ ID NO: 366940 - DNA, 20 bp, Artificial Sequence
  Description of Artificial Sequence: Synthetic oligonucleotide
  Target: LAMA2; (+) strand; PAM type: YTN; PAM sequence: CTA
ttggctgaacacacagtgct

SEQ ID NO: 366941 - DNA, 20 bp, Artificial Sequence
  Description of Artificial Sequence: Synthetic oligonucleotide
  Target: LAMA2; (+) strand; PAM type: YTN; PAM sequence: TTG
gctgaacacacagtgctctg

SEQ ID NO: 366942 - DNA, 20 bp, Artificial Sequence
  Description of Artificial Sequence: Synthetic oligonucleotide
  Target: LAMA2; (+) strand; PAM type: YTN; PAM sequence: CTG
aacacacagtgctctgtaaa

SEQ ID NO: 366943 - DNA, 20 bp, Artificial Sequence
  Description of Artificial Sequence: Synthetic oligonucleotide
  Target: LAMA2; (+) strand; PAM type: YTN; PAM sequence: CTC
tgtaaaatcagagaaatcaa

SEQ ID NO: 366944 - DNA, 20 bp, Artificial Sequence
  Description of Artificial Sequence: Synthetic oligonucleotide
  Target: LAMA2; (+) strand; PAM type: YTN; PAM sequence: CTG
taaaatcagagaaatcaata

SEQ ID NO: 366945 - DNA, 20 bp, Artificial Sequence
  Description of Artificial Sequence: Synthetic oligonucleotide
  Target: LAMA2; (+) strand; PAM type: YTN; PAM sequence: TTG
tccccaaaatgaactaattt

SEQ ID NO: 366946 - DNA, 20 bp, Artificial Sequence
  Description of Artificial Sequence: Synthetic oligonucleotide
  Target: LAMA2; (+) strand; PAM type: YTN; PAM sequence: CTA
atttgaaagtctcaaagatg

SEQ ID NO: 366947 - DNA, 20 bp, Artificial Sequence
  Description of Artificial Sequence: Synthetic oligonucleotide
  Target: LAMA2; (+) strand; PAM type: YTN; PAM sequence: TTT
gaaagtctcaaagatgttca

SEQ ID NO: 366948 - DNA, 20 bp, Artificial Sequence
  Description of Artificial Sequence: Synthetic oligonucleotide
  Target: LAMA2; (+) strand; PAM type: YTN; PAM sequence: TTG
aaagtctcaaagatgttcaa

SEQ ID NO: 366949 - DNA, 20 bp, Artificial Sequence
  Description of Artificial Sequence: Synthetic oligonucleotide
  Target: LAMA2; (+) strand; PAM type: YTN; PAM sequence: CTC
aaagatgttcaattttatga

SEQ ID NO: 366950 - DNA, 20 bp, Artificial Sequence
  Description of Artificial Sequence: Synthetic oligonucleotide
  Target: LAMA2; (+) strand; PAM type: YTN; PAM sequence: TTC
aattttatgaaagactcgta

SEQ ID NO: 366951 - DNA, 20 bp, Artificial Sequence
  Description of Artificial Sequence: Synthetic oligonucleotide
  Target: LAMA2; (+) strand; PAM type: YTN; PAM sequence: TTT
tatgaaagactcgtaaaatt

SEQ ID NO: 366952 - DNA, 20 bp, Artificial Sequence
  Description of Artificial Sequence: Synthetic oligonucleotide
  Target: LAMA2; (+) strand; PAM type: YTN; PAM sequence: TTT
atgaaagactcgtaaaatta

SEQ ID NO: 366953 - DNA, 20 bp, Artificial Sequence
  Description of Artificial Sequence: Synthetic oligonucleotide
  Target: LAMA2; (+) strand; PAM type: YTN; PAM sequence: TTA
tgaaagactcgtaaaattaa

SEQ ID NO: 366954 - DNA, 20 bp, Artificial Sequence
  Description of Artificial Sequence: Synthetic oligonucleotide
  Target: LAMA2; (+) strand; PAM type: YTN; PAM sequence: CTC
gtaaaattaataaatgagtc

SEQ ID NO: 366955 - DNA, 20 bp, Artificial Sequence
  Description of Artificial Sequence: Synthetic oligonucleotide
  Target: LAMA2; (+) strand; PAM type: YTN; PAM sequence: TTA
ataaatgagtctgcaaagtc

SEQ ID NO: 366956 - DNA, 20 bp, Artificial Sequence
  Description of Artificial Sequence: Synthetic oligonucleotide
  Target: LAMA2; (+) strand; PAM type: YTN; PAM sequence: CTG
caaagtccaaaaatgtggaa

SEQ ID NO: 366957 - DNA, 20 bp, Artificial Sequence
  Description of Artificial Sequence: Synthetic oligonucleotide
  Target: LAMA2; (+) strand; PAM type: YTN; PAM sequence: TTA
cagttatttgcagtacgtat

SEQ ID NO: 366958 - DNA, 20 bp, Artificial Sequence
  Description of Artificial Sequence: Synthetic oligonucleotide
  Target: LAMA2; (+) strand; PAM type: YTN; PAM sequence: TTA
tttgcagtacgtataactta

SEQ ID NO: 366959 - DNA, 20 bp, Artificial Sequence
  Description of Artificial Sequence: Synthetic oligonucleotide
  Target: LAMA2; (+) strand; PAM type: YTN; PAM sequence: TTT
gcagtacgtataacttacca

SEQ ID NO: 366960 - DNA, 20 bp, Artificial Sequence
  Description of Artificial Sequence: Synthetic oligonucleotide
  Target: LAMA2; (+) strand; PAM type: YTN; PAM sequence: TTG
cagtacgtataacttaccaa

SEQ ID NO: 366961 - DNA, 20 bp, Artificial Sequence
  Description of Artificial Sequence: Synthetic oligonucleotide
  Target: LAMA2; (+) strand; PAM type: YTN; PAM sequence: CTT
accaagaccacttatatttt

SEQ ID NO: 366962 - DNA, 20 bp, Artificial Sequence
  Description of Artificial Sequence: Synthetic oligonucleotide
  Target: LAMA2; (+) strand; PAM type: YTN; PAM sequence: TTA
ccaagaccacttatattttg

SEQ ID NO: 366963 - DNA, 20 bp, Artificial Sequence
  Description of Artificial Sequence: Synthetic oligonucleotide
  Target: LAMA2; (+) strand; PAM type: YTN; PAM sequence: CTT
atattttgttagaatttttc

SEQ ID NO: 366964 - DNA, 20 bp, Artificial Sequence
  Description of Artificial Sequence: Synthetic oligonucleotide
  Target: LAMA2; (+) strand; PAM type: YTN; PAM sequence: TTA
tattttgttagaatttttca

SEQ ID NO: 366965 - DNA, 20 bp, Artificial Sequence
  Description of Artificial Sequence: Synthetic oligonucleotide
  Target: LAMA2; (+) strand; PAM type: YTN; PAM sequence: TTT
tgttagaatttttcaatgaa

SEQ ID NO: 366966 - DNA, 20 bp, Artificial Sequence
  Description of Artificial Sequence: Synthetic oligonucleotide
  Target: LAMA2; (+) strand; PAM type: YTN; PAM sequence: TTT
gttagaatttttcaatgaat

SEQ ID NO: 366967 - DNA, 20 bp, Artificial Sequence
  Description of Artificial Sequence: Synthetic oligonucleotide
  Target: LAMA2; (+) strand; PAM type: YTN; PAM sequence: TTG
ttagaatttttcaatgaatg

SEQ ID NO: 366968 - DNA, 20 bp, Artificial Sequence
  Description of Artificial Sequence: Synthetic oligonucleotide
  Target: LAMA2; (+) strand; PAM type: YTN; PAM sequence: TTA
gaatttttcaatgaatgtta

SEQ ID NO: 366969 - DNA, 20 bp, Artificial Sequence
  Description of Artificial Sequence: Synthetic oligonucleotide
  Target: LAMA2; (+) strand; PAM type: YTN; PAM sequence: TTT
ttcaatgaatgttaatggat

SEQ ID NO: 366970 - DNA, 20 bp, Artificial Sequence
  Description of Artificial Sequence: Synthetic oligonucleotide
  Target: LAMA2; (+) strand; PAM type: YTN; PAM sequence: TTT
tcaatgaatgttaatggatg

SEQ ID NO: 366971 - DNA, 20 bp, Artificial Sequence
  Description of Artificial Sequence: Synthetic oligonucleotide
  Target: LAMA2; (+) strand; PAM type: YTN; PAM sequence: TTT
caatgaatgttaatggatga

SEQ ID NO: 366972 - DNA, 20 bp, Artificial Sequence
  Description of Artificial Sequence: Synthetic oligonucleotide
  Target: LAMA2; (+) strand; PAM type: YTN; PAM sequence: TTC
aatgaatgttaatggatgaa

SEQ ID NO: 366973 - DNA, 20 bp, Artificial Sequence
  Description of Artificial Sequence: Synthetic oligonucleotide
  Target: LAMA2; (+) strand; PAM type: YTN; PAM sequence: TTA
atggatgaatttttttatat

SEQ ID NO: 366974 - DNA, 20 bp, Artificial Sequence
  Description of Artificial Sequence: Synthetic oligonucleotide
  Target: LAMA2; (+) strand; PAM type: YTN; PAM sequence: TTT
ttttatatagagttctccct

SEQ ID NO: 366975 - DNA, 20 bp, Artificial Sequence
  Description of Artificial Sequence: Synthetic oligonucleotide
  Target: LAMA2; (+) strand; PAM type: YTN; PAM sequence: TTT
tttatatagagttctccctg

SEQ ID NO: 366976 - DNA, 20 bp, Artificial Sequence
  Description of Artificial Sequence: Synthetic oligonucleotide
  Target: LAMA2; (+) strand; PAM type: YTN; PAM sequence: TTT
ttatatagagttctccctgt

SEQ ID NO: 366977 - DNA, 20 bp, Artificial Sequence
  Description of Artificial Sequence: Synthetic oligonucleotide
  Target: LAMA2; (+) strand; PAM type: YTN; PAM sequence: TTT
tatatagagttctccctgtt

SEQ ID NO: 366978 - DNA, 20 bp, Artificial Sequence
  Description of Artificial Sequence: Synthetic oligonucleotide
  Target: LAMA2; (+) strand; PAM type: YTN; PAM sequence: TTT
atatagagttctccctgttt

SEQ ID NO: 366979 - DNA, 20 bp, Artificial Sequence
  Description of Artificial Sequence: Synthetic oligonucleotide
  Target: LAMA2; (+) strand; PAM type: YTN; PAM sequence: TTA
tatagagttctccctgtttg

SEQ ID NO: 366980 - DNA, 20 bp, Artificial Sequence
  Description of Artificial Sequence: Synthetic oligonucleotide
  Target: LAMA2; (+) strand; PAM type: YTN; PAM sequence: TTC
tccctgtttggaatctttta

SEQ ID NO: 366981 - DNA, 20 bp, Artificial Sequence
  Description of Artificial Sequence: Synthetic oligonucleotide
  Target: LAMA2; (+) strand; PAM type: YTN; PAM sequence: CTC
cctgtttggaatcttttagt

SEQ ID NO: 366982 - DNA, 20 bp, Artificial Sequence
  Description of Artificial Sequence: Synthetic oligonucleotide
  Target: LAMA2; (+) strand; PAM type: YTN; PAM sequence: CTG
tttggaatcttttagttccc

SEQ ID NO: 366983 - DNA, 20 bp, Artificial Sequence
  Description of Artificial Sequence: Synthetic oligonucleotide
  Target: LAMA2; (+) strand; PAM type: YTN; PAM sequence: TTT
ggaatcttttagttccctta

SEQ ID NO: 366984 - DNA, 20 bp, Artificial Sequence
  Description of Artificial Sequence: Synthetic oligonucleotide
  Target: LAMA2; (+) strand; PAM type: YTN; PAM sequence: TTG
gaatcttttagttcccttat

SEQ ID NO: 366985 - DNA, 20 bp, Artificial Sequence
  Description of Artificial Sequence: Synthetic oligonucleotide
  Target: LAMA2; (+) strand; PAM type: YTN; PAM sequence: CTT
ttagttcccttatttactgt

SEQ ID NO: 366986 - DNA, 20 bp, Artificial Sequence
  Description of Artificial Sequence: Synthetic oligonucleotide
  Target: LAMA2; (+) strand; PAM type: YTN; PAM sequence: TTT
tagttcccttatttactgtg

SEQ ID NO: 366987 - DNA, 20 bp, Artificial Sequence
  Description of Artificial Sequence: Synthetic oligonucleotide
  Target: LAMA2; (+) strand; PAM type: YTN; PAM sequence: TTT
agttcccttatttactgtgg

SEQ ID NO: 366988 - DNA, 20 bp, Artificial Sequence
  Description of Artificial Sequence: Synthetic oligonucleotide
  Target: LAMA2; (+) strand; PAM type: YTN; PAM sequence: TTA
gttcccttatttactgtggt

SEQ ID NO: 366989 - DNA, 20 bp, Artificial Sequence
  Description of Artificial Sequence: Synthetic oligonucleotide
  Target: LAMA2; (+) strand; PAM type: YTN; PAM sequence: TTC
ccttatttactgtggttgcc

SEQ ID NO: 366990 - DNA, 20 bp, Artificial Sequence
  Description of Artificial Sequence: Synthetic oligonucleotide
  Target: LAMA2; (+) strand; PAM type: YTN; PAM sequence: CTT
atttactgtggttgccactg

SEQ ID NO: 366991 - DNA, 20 bp, Artificial Sequence
  Description of Artificial Sequence: Synthetic oligonucleotide
  Target: LAMA2; (+) strand; PAM type: YTN; PAM sequence: TTA
tttactgtggttgccactga

SEQ ID NO: 366992 - DNA, 20 bp, Artificial Sequence
  Description of Artificial Sequence: Synthetic oligonucleotide
  Target: LAMA2; (+) strand; PAM type: YTN; PAM sequence: TTT
actgtggttgccactgactc

SEQ ID NO: 366993 - DNA, 20 bp, Artificial Sequence
  Description of Artificial Sequence: Synthetic oligonucleotide
  Target: LAMA2; (+) strand; PAM type: YTN; PAM sequence: TTA
ctgtggttgccactgactct

SEQ ID NO: 366994 - DNA, 20 bp, Artificial Sequence
  Description of Artificial Sequence: Synthetic oligonucleotide
  Target: LAMA2; (+) strand; PAM type: YTN; PAM sequence: CTG
tggttgccactgactctgca

SEQ ID NO: 366995 - DNA, 20 bp, Artificial Sequence
  Description of Artificial Sequence: Synthetic oligonucleotide
  Target: LAMA2; (+) strand; PAM type: YTN; PAM sequence: TTG
ccactgactctgcatcaggc

SEQ ID NO: 366996 - DNA, 20 bp, Artificial Sequence
  Description of Artificial Sequence: Synthetic oligonucleotide
  Target: LAMA2; (+) strand; PAM type: YTN; PAM sequence: CTG
actctgcatcaggctttgga

SEQ ID NO: 366997 - DNA, 20 bp, Artificial Sequence
  Description of Artificial Sequence: Synthetic oligonucleotide
  Target: LAMA2; (+) strand; PAM type: YTN; PAM sequence: CTC
tgcatcaggctttggaaata

SEQ ID NO: 366998 - DNA, 20 bp, Artificial Sequence
  Description of Artificial Sequence: Synthetic oligonucleotide
  Target: LAMA2; (+) strand; PAM type: YTN; PAM sequence: CTG
catcaggctttggaaatatc

SEQ ID NO: 366999 - DNA, 20 bp, Artificial Sequence
  Description of Artificial Sequence: Synthetic oligonucleotide
  Target: LAMA2; (+) strand; PAM type: YTN; PAM sequence: CTT
tggaaatatcactaaaaaac

SEQ ID NO: 367000 - DNA, 20 bp, Artificial Sequence
  Description of Artificial Sequence: Synthetic oligonucleotide
  Target: LAMA2; (+) strand; PAM type: YTN; PAM sequence: TTT
ggaaatatcactaaaaaact

SEQ ID NO: 367001 - DNA, 20 bp, Artificial Sequence
  Description of Artificial Sequence: Synthetic oligonucleotide
  Target: LAMA2; (+) strand; PAM type: YTN; PAM sequence: TTG
gaaatatcactaaaaaactg

SEQ ID NO: 367002 - DNA, 20 bp, Artificial Sequence
  Description of Artificial Sequence: Synthetic oligonucleotide
  Target: LAMA2; (+) strand; PAM type: YTN; PAM sequence: CTA
aaaaactgttttttctttag

SEQ ID NO: 367003 - DNA, 20 bp, Artificial Sequence
  Description of Artificial Sequence: Synthetic oligonucleotide
  Target: LAMA2; (+) strand; PAM type: YTN; PAM sequence: CTG
ttttttctttagtcttctta

SEQ ID NO: 367004 - DNA, 20 bp, Artificial Sequence
  Description of Artificial Sequence: Synthetic oligonucleotide
  Target: LAMA2; (+) strand; PAM type: YTN; PAM sequence: TTT
tttctttagtcttcttacta

SEQ ID NO: 367005 - DNA, 20 bp, Artificial Sequence
  Description of Artificial Sequence: Synthetic oligonucleotide
  Target: LAMA2; (+) strand; PAM type: YTN; PAM sequence: TTT
ttctttagtcttcttactag

SEQ ID NO: 367006 - DNA, 20 bp, Artificial Sequence
  Description of Artificial Sequence: Synthetic oligonucleotide
  Target: LAMA2; (+) strand; PAM type: YTN; PAM sequence: TTT
tctttagtcttcttactagt

SEQ ID NO: 367007 - DNA, 20 bp, Artificial Sequence
  Description of Artificial Sequence: Synthetic oligonucleotide
  Target: LAMA2; (+) strand; PAM type: YTN; PAM sequence: TTT
ctttagtcttcttactagtc

SEQ ID NO: 367008 - DNA, 20 bp, Artificial Sequence
  Description of Artificial Sequence: Synthetic oligonucleotide
  Target: LAMA2; (+) strand; PAM type: YTN; PAM sequence: TTC
tttagtcttcttactagtca

SEQ ID NO: 367009 - DNA, 20 bp, Artificial Sequence
  Description of Artificial Sequence: Synthetic oligonucleotide
  Target: LAMA2; (+) strand; PAM type: YTN; PAM sequence: CTT
tagtcttcttactagtcaaa

SEQ ID NO: 367010 - DNA, 20 bp, Artificial Sequence
  Description of Artificial Sequence: Synthetic oligonucleotide
  Target: LAMA2; (+) strand; PAM type: YTN; PAM sequence: TTT
agtcttcttactagtcaaat

SEQ ID NO: 367011 - DNA, 20 bp, Artificial Sequence
  Description of Artificial Sequence: Synthetic oligonucleotide
  Target: LAMA2; (+) strand; PAM type: YTN; PAM sequence: TTA
gtcttcttactagtcaaata

SEQ ID NO: 367012 - DNA, 20 bp, Artificial Sequence
  Description of Artificial Sequence: Synthetic oligonucleotide
  Target: LAMA2; (+) strand; PAM type: YTN; PAM sequence: CTT
cttactagtcaaatatcagc

SEQ ID NO: 367013 - DNA, 20 bp, Artificial Sequence
  Description of Artificial Sequence: Synthetic oligonucleotide
  Target: LAMA2; (+) strand; PAM type: YTN; PAM sequence: TTC
ttactagtcaaatatcagct

SEQ ID NO: 367014 - DNA, 20 bp, Artificial Sequence
  Description of Artificial Sequence: Synthetic oligonucleotide
  Target: LAMA2; (+) strand; PAM type: YTN; PAM sequence: CTT
actagtcaaatatcagctaa

SEQ ID NO: 367015 - DNA, 20 bp, Artificial Sequence
  Description of Artificial Sequence: Synthetic oligonucleotide
  Target: LAMA2; (+) strand; PAM type: YTN; PAM sequence: TTA
ctagtcaaatatcagctaaa

SEQ ID NO: 367016 - DNA, 20 bp, Artificial Sequence
  Description of Artificial Sequence: Synthetic oligonucleotide
  Target: LAMA2; (+) strand; PAM type: YTN; PAM sequence: CTA
gtcaaatatcagctaaacaa

SEQ ID NO: 367017 - DNA, 20 bp, Artificial Sequence
  Description of Artificial Sequence: Synthetic oligonucleotide
  Target: LAMA2; (+) strand; PAM type: YTN; PAM sequence: CTA
aacaaacaaagaaaataagt

SEQ ID NO: 367018 - DNA, 20 bp, Artificial Sequence
  Description of Artificial Sequence: Synthetic oligonucleotide
  Target: LAMA2; (+) strand; PAM type: YTN; PAM sequence: TTT
gaatggtcagagaactataa

SEQ ID NO: 367019 - DNA, 20 bp, Artificial Sequence
  Description of Artificial Sequence: Synthetic oligonucleotide
  Target: LAMA2; (+) strand; PAM type: YTN; PAM sequence: TTG
aatggtcagagaactataag

SEQ ID NO: 367020 - DNA, 20 bp, Artificial Sequence
  Description of Artificial Sequence: Synthetic oligonucleotide
  Target: LAMA2; (+) strand; PAM type: YTN; PAM sequence: CTA
taagaatgagaattctggca

SEQ ID NO: 367021 - DNA, 20 bp, Artificial Sequence
  Description of Artificial Sequence: Synthetic oligonucleotide
  Target: LAMA2; (+) strand; PAM type: YTN; PAM sequence: TTC
tggcaggaaaattcattttt

SEQ ID NO: 367022 - DNA, 20 bp, Artificial Sequence
  Description of Artificial Sequence: Synthetic oligonucleotide
  Target: LAMA2; (+) strand; PAM type: YTN; PAM sequence: CTG
gcaggaaaattcatttttaa

SEQ ID NO: 367023 - DNA, 20 bp, Artificial Sequence
  Description of Artificial Sequence: Synthetic oligonucleotide
  Target: LAMA2; (+) strand; PAM type: YTN; PAM sequence: TTC
atttttaaaaatccaagtaa

SEQ ID NO: 367024 - DNA, 20 bp, Artificial Sequence
  Description of Artificial Sequence: Synthetic oligonucleotide
  Target: LAMA2; (+) strand; PAM type: YTN; PAM sequence: TTT
ttaaaaatccaagtaacaga

SEQ ID NO: 367025 - DNA, 20 bp, Artificial Sequence
  Description of Artificial Sequence: Synthetic oligonucleotide
  Target: LAMA2; (+) strand; PAM type: YTN; PAM sequence: TTT
taaaaatccaagtaacagaa

SEQ ID NO: 367026 - DNA, 20 bp, Artificial Sequence
  Description of Artificial Sequence: Synthetic oligonucleotide
  Target: LAMA2; (+) strand; PAM type: YTN; PAM sequence: TTT
aaaaatccaagtaacagaat

SEQ ID NO: 367027 - DNA, 20 bp, Artificial Sequence
  Description of Artificial Sequence: Synthetic oligonucleotide
  Target: LAMA2; (+) strand; PAM type: YTN; PAM sequence: TTA
aaaatccaagtaacagaatg

SEQ ID NO: 367028 - DNA, 20 bp, Artificial Sequence
  Description of Artificial Sequence: Synthetic oligonucleotide
  Target: LAMA2; (+) strand; PAM type: YTN; PAM sequence: CTA
gatcagacatacccagacat

SEQ ID NO: 367029 - DNA, 20 bp, Artificial Sequence
  Description of Artificial Sequence: Synthetic oligonucleotide
  Target: LAMA2; (+) strand; PAM type: YTN; PAM sequence: TTC
tcagttcagaatgttcatag

SEQ ID NO: 367030 - DNA, 20 bp, Artificial Sequence
  Description of Artificial Sequence: Synthetic oligonucleotide
  Target: LAMA2; (+) strand; PAM type: YTN; PAM sequence: CTC
agttcagaatgttcatagcg

SEQ ID NO: 367031 - DNA, 20 bp, Artificial Sequence
  Description of Artificial Sequence: Synthetic oligonucleotide
  Target: LAMA2; (+) strand; PAM type: YTN; PAM sequence: TTC
agaatgttcatagcgtattc

SEQ ID NO: 367032 - DNA, 20 bp, Artificial Sequence
  Description of Artificial Sequence: Synthetic oligonucleotide
  Target: LAMA2; (+) strand; PAM type: YTN; PAM sequence: TTC
atagcgtattcataattttt

SEQ ID NO: 367033 - DNA, 20 bp, Artificial Sequence
  Description of Artificial Sequence: Synthetic oligonucleotide
  Target: LAMA2; (+) strand; PAM type: YTN; PAM sequence: TTC
ataattttttcatagtgcct

SEQ ID NO: 367034 - DNA, 20 bp, Artificial Sequence
  Description of Artificial Sequence: Synthetic oligonucleotide
  Target: LAMA2; (+) strand; PAM type: YTN; PAM sequence: TTT
tttcatagtgcctccttgac

SEQ ID NO: 367035 - DNA, 20 bp, Artificial Sequence
  Description of Artificial Sequence: Synthetic oligonucleotide
  Target: LAMA2; (+) strand; PAM type: YTN; PAM sequence: TTT
ttcatagtgcctccttgacc

SEQ ID NO: 367036 - DNA, 20 bp, Artificial Sequence
  Description of Artificial Sequence: Synthetic oligonucleotide
  Target: LAMA2; (+) strand; PAM type: YTN; PAM sequence: TTT
tcatagtgcctccttgacca

SEQ ID NO: 367037 - DNA, 20 bp, Artificial Sequence
  Description of Artificial Sequence: Synthetic oligonucleotide
  Target: LAMA2; (+) strand; PAM type: YTN; PAM sequence: TTT
catagtgcctccttgaccaa

SEQ ID NO: 367038 - DNA, 20 bp, Artificial Sequence
  Description of Artificial Sequence: Synthetic oligonucleotide
  Target: LAMA2; (+) strand; PAM type: YTN; PAM sequence: TTC
atagtgcctccttgaccaac

SEQ ID NO: 367039 - DNA, 20 bp, Artificial Sequence
  Description of Artificial Sequence: Synthetic oligonucleotide
  Target: LAMA2; (+) strand; PAM type: YTN; PAM sequence: CTC
cttgaccaacagaaataagc

SEQ ID NO: 367040 - DNA, 20 bp, Artificial Sequence
  Description of Artificial Sequence: Synthetic oligonucleotide
  Target: LAMA2; (+) strand; PAM type: YTN; PAM sequence: CTT
gaccaacagaaataagccac

SEQ ID NO: 367041 - DNA, 20 bp, Artificial Sequence
  Description of Artificial Sequence: Synthetic oligonucleotide
  Target: LAMA2; (+) strand; PAM type: YTN; PAM sequence: TTG
accaacagaaataagccaca

SEQ ID NO: 367042 - DNA, 20 bp, Artificial Sequence
  Description of Artificial Sequence: Synthetic oligonucleotide
  Target: LAMA2; (+) strand; PAM type: YTN; PAM sequence: TTC
tatttcttaagtagttagtg

SEQ ID NO: 367043 - DNA, 20 bp, Artificial Sequence
  Description of Artificial Sequence: Synthetic oligonucleotide
  Target: LAMA2; (+) strand; PAM type: YTN; PAM sequence: CTA
tttcttaagtagttagtgcc

SEQ ID NO: 367044 - DNA, 20 bp, Artificial Sequence
  Description of Artificial Sequence: Synthetic oligonucleotide
  Target: LAMA2; (+) strand; PAM type: YTN; PAM sequence: TTT
cttaagtagttagtgccaaa

SEQ ID NO: 367045 - DNA, 20 bp, Artificial Sequence
  Description of Artificial Sequence: Synthetic oligonucleotide
  Target: LAMA2; (+) strand; PAM type: YTN; PAM sequence: TTC
ttaagtagttagtgccaaac

SEQ ID NO: 367046 - DNA, 20 bp, Artificial Sequence
  Description of Artificial Sequence: Synthetic oligonucleotide
  Target: LAMA2; (+) strand; PAM type: YTN; PAM sequence: CTT
aagtagttagtgccaaacaa

SEQ ID NO: 367047 - DNA, 20 bp, Artificial Sequence
  Description of Artificial Sequence: Synthetic oligonucleotide
  Target: LAMA2; (+) strand; PAM type: YTN; PAM sequence: TTA
agtagttagtgccaaacaac

SEQ ID NO: 367048 - DNA, 20 bp, Artificial Sequence
  Description of Artificial Sequence: Synthetic oligonucleotide
  Target: LAMA2; (+) strand; PAM type: YTN; PAM sequence: TTA
gtgccaaacaacttaataaa

SEQ ID NO: 367049 - DNA, 20 bp, Artificial Sequence
  Description of Artificial Sequence: Synthetic oligonucleotide
  Target: LAMA2; (+) strand; PAM type: YTN; PAM sequence: CTT
aataaatattcatgttttaa

SEQ ID NO: 367050 - DNA, 20 bp, Artificial Sequence
  Description of Artificial Sequence: Synthetic oligonucleotide
  Target: LAMA2; (+) strand; PAM type: YTN; PAM sequence: TTA
ataaatattcatgttttaac

SEQ ID NO: 367051 - DNA, 20 bp, Artificial Sequence
  Description of Artificial Sequence: Synthetic oligonucleotide
  Target: LAMA2; (+) strand; PAM type: YTN; PAM sequence: TTC
atgttttaacaacctagcaa

SEQ ID NO: 367052 - DNA, 20 bp, Artificial Sequence
  Description of Artificial Sequence: Synthetic oligonucleotide
  Target: LAMA2; (+) strand; PAM type: YTN; PAM sequence: TTT
taacaacctagcaattgttt

SEQ ID NO: 367053 - DNA, 20 bp, Artificial Sequence
  Description of Artificial Sequence: Synthetic oligonucleotide
  Target: LAMA2; (+) strand; PAM type: YTN; PAM sequence: TTT
aacaacctagcaattgttta

SEQ ID NO: 367054 - DNA, 20 bp, Artificial Sequence
  Description of Artificial Sequence: Synthetic oligonucleotide
  Target: LAMA2; (+) strand; PAM type: YTN; PAM sequence: TTA
acaacctagcaattgtttaa

SEQ ID NO: 367055 - DNA, 20 bp, Artificial Sequence
  Description of Artificial Sequence: Synthetic oligonucleotide
  Target: LAMA2; (+) strand; PAM type: YTN; PAM sequence: CTA
gcaattgtttaaaaagaaaa

SEQ ID NO: 367056 - DNA, 20 bp, Artificial Sequence
  Description of Artificial Sequence: Synthetic oligonucleotide
  Target: LAMA2; (+) strand; PAM type: YTN; PAM sequence: TTG
tttaaaaagaaaatggacag

SEQ ID NO: 367057 - DNA, 20 bp, Artificial Sequence
  Description of Artificial Sequence: Synthetic oligonucleotide
  Target: LAMA2; (+) strand; PAM type: YTN; PAM sequence: TTT
aaaaagaaaatggacagaaa

SEQ ID NO: 367058 - DNA, 20 bp, Artificial Sequence
  Description of Artificial Sequence: Synthetic oligonucleotide
  Target: LAMA2; (+) strand; PAM type: YTN; PAM sequence: TTA
aaaagaaaatggacagaaaa

SEQ ID NO: 367059 - DNA, 20 bp, Artificial Sequence
  Description of Artificial Sequence: Synthetic oligonucleotide
  Target: LAMA2; (+) strand; PAM type: YTN; PAM sequence: TTT
ttttcataaataaccagaat

SEQ ID NO: 367060 - DNA, 20 bp, Artificial Sequence
  Description of Artificial Sequence: Synthetic oligonucleotide
  Target: LAMA2; (+) strand; PAM type: YTN; PAM sequence: TTT
tttcataaataaccagaatc

SEQ ID NO: 367061 - DNA, 20 bp, Artificial Sequence
  Description of Artificial Sequence: Synthetic oligonucleotide
  Target: LAMA2; (+) strand; PAM type: YTN; PAM sequence: TTT
ttcataaataaccagaatca

SEQ ID NO: 367062 - DNA, 20 bp, Artificial Sequence
  Description of Artificial Sequence: Synthetic oligonucleotide
  Target: LAMA2; (+) strand; PAM type: YTN; PAM sequence: TTT
tcataaataaccagaatcac

SEQ ID NO: 367063 - DNA, 20 bp, Artificial Sequence
  Description of Artificial Sequence: Synthetic oligonucleotide
  Target: LAMA2; (+) strand; PAM type: YTN; PAM sequence: TTT
cataaataaccagaatcact

SEQ ID NO: 367064 - DNA, 20 bp, Artificial Sequence
  Description of Artificial Sequence: Synthetic oligonucleotide
  Target: LAMA2; (+) strand; PAM type: YTN; PAM sequence: TTC
ataaataaccagaatcactt

SEQ ID NO: 367065 - DNA, 20 bp, Artificial Sequence
  Description of Artificial Sequence: Synthetic oligonucleotide
  Target: LAMA2; (+) strand; PAM type: YTN; PAM sequence: CTT
actgatgggatgtggtacct

SEQ ID NO: 367066 - DNA, 20 bp, Artificial Sequence
  Description of Artificial Sequence: Synthetic oligonucleotide
  Target: LAMA2; (+) strand; PAM type: YTN; PAM sequence: TTA
ctgatgggatgtggtacctt

SEQ ID NO: 367067 - DNA, 20 bp, Artificial Sequence
  Description of Artificial Sequence: Synthetic oligonucleotide
  Target: LAMA2; (+) strand; PAM type: YTN; PAM sequence: CTG
atgggatgtggtacctttgg

SEQ ID NO: 367068 - DNA, 20 bp, Artificial Sequence
  Description of Artificial Sequence: Synthetic oligonucleotide
  Target: LAMA2; (+) strand; PAM type: YTN; PAM sequence: CTT
tggggtagtatataccttct

SEQ ID NO: 367069 - DNA, 20 bp, Artificial Sequence
  Description of Artificial Sequence: Synthetic oligonucleotide
  Target: LAMA2; (+) strand; PAM type: YTN; PAM sequence: TTT
ggggtagtatataccttctc

SEQ ID NO: 367070 - DNA, 20 bp, Artificial Sequence
  Description of Artificial Sequence: Synthetic oligonucleotide
  Target: LAMA2; (+) strand; PAM type: YTN; PAM sequence: TTG
gggtagtatataccttctca

SEQ ID NO: 367071 - DNA, 20 bp, Artificial Sequence
  Description of Artificial Sequence: Synthetic oligonucleotide
  Target: LAMA2; (+) strand; PAM type: YTN; PAM sequence: CTT
ctcaaacttgagtatcagat

SEQ ID NO: 367072 - DNA, 20 bp, Artificial Sequence
  Description of Artificial Sequence: Synthetic oligonucleotide
  Target: LAMA2; (+) strand; PAM type: YTN; PAM sequence: TTC
tcaaacttgagtatcagatt

SEQ ID NO: 367073 - DNA, 20 bp, Artificial Sequence
  Description of Artificial Sequence: Synthetic oligonucleotide
  Target: LAMA2; (+) strand; PAM type: YTN; PAM sequence: CTC
aaacttgagtatcagattgg

SEQ ID NO: 367074 - DNA, 20 bp, Artificial Sequence
  Description of Artificial Sequence: Synthetic oligonucleotide
  Target: LAMA2; (+) strand; PAM type: YTN; PAM sequence: CTT
gagtatcagattggataatg

SEQ ID NO: 367075 - DNA, 20 bp, Artificial Sequence
  Description of Artificial Sequence: Synthetic oligonucleotide
  Target: LAMA2; (+) strand; PAM type: YTN; PAM sequence: TTG
agtatcagattggataatgc

SEQ ID NO: 367076 - DNA, 20 bp, Artificial Sequence
  Description of Artificial Sequence: Synthetic oligonucleotide
  Target: LAMA2; (+) strand; PAM type: YTN; PAM sequence: TTG
gataatgctatccttatttc

SEQ ID NO: 367077 - DNA, 20 bp, Artificial Sequence
  Description of Artificial Sequence: Synthetic oligonucleotide
  Target: LAMA2; (+) strand; PAM type: YTN; PAM sequence: CTA
tccttatttccttttccaca

SEQ ID NO: 367078 - DNA, 20 bp, Artificial Sequence
  Description of Artificial Sequence: Synthetic oligonucleotide
  Target: LAMA2; (+) strand; PAM type: YTN; PAM sequence: CTT
atttccttttccacattgac

SEQ ID NO: 367079 - DNA, 20 bp, Artificial Sequence
  Description of Artificial Sequence: Synthetic oligonucleotide
  Target: LAMA2; (+) strand; PAM type: YTN; PAM sequence: TTA
tttccttttccacattgact

SEQ ID NO: 367080 - DNA, 20 bp, Artificial Sequence
  Description of Artificial Sequence: Synthetic oligonucleotide
  Target: LAMA2; (+) strand; PAM type: YTN; PAM sequence: TTT
ccttttccacattgactttt

SEQ ID NO: 367081 - DNA, 20 bp, Artificial Sequence
  Description of Artificial Sequence: Synthetic oligonucleotide
  Target: LAMA2; (+) strand; PAM type: YTN; PAM sequence: TTC
cttttccacattgacttttg

SEQ ID NO: 367082 - DNA, 20 bp, Artificial Sequence
  Description of Artificial Sequence: Synthetic oligonucleotide
  Target: LAMA2; (+) strand; PAM type: YTN; PAM sequence: CTT
ttccacattgacttttgtgc

SEQ ID NO: 367083 - DNA, 20 bp, Artificial Sequence
  Description of Artificial Sequence: Synthetic oligonucleotide
  Target: LAMA2; (+) strand; PAM type: YTN; PAM sequence: TTT
tccacattgacttttgtgca

SEQ ID NO: 367084 - DNA, 20 bp, Artificial Sequence
  Description of Artificial Sequence: Synthetic oligonucleotide
  Target: LAMA2; (+) strand; PAM type: YTN; PAM sequence: TTT
ccacattgacttttgtgcag

SEQ ID NO: 367085 - DNA, 20 bp, Artificial Sequence
  Description of Artificial Sequence: Synthetic oligonucleotide
  Target: LAMA2; (+) strand; PAM type: YTN; PAM sequence: TTC
cacattgacttttgtgcagt

SEQ ID NO: 367086 - DNA, 20 bp, Artificial Sequence
  Description of Artificial Sequence: Synthetic oligonucleotide
  Target: LAMA2; (+) strand; PAM type: YTN; PAM sequence: TTG
acttttgtgcagttcttgct

SEQ ID NO: 367087 - DNA, 20 bp, Artificial Sequence
  Description of Artificial Sequence: Synthetic oligonucleotide
  Target: LAMA2; (+) strand; PAM type: YTN; PAM sequence: CTT
ttgtgcagttcttgctttta

SEQ ID NO: 367088 - DNA, 20 bp, Artificial Sequence
  Description of Artificial Sequence: Synthetic oligonucleotide
  Target: LAMA2; (+) strand; PAM type: YTN; PAM sequence: TTT
tgtgcagttcttgcttttaa

SEQ ID NO: 367089 - DNA, 20 bp, Artificial Sequence
  Description of Artificial Sequence: Synthetic oligonucleotide
  Target: LAMA2; (+) strand; PAM type: YTN; PAM sequence: TTT
gtgcagttcttgcttttaat

SEQ ID NO: 367090 - DNA, 20 bp, Artificial Sequence
  Description of Artificial Sequence: Synthetic oligonucleotide
  Target: LAMA2; (+) strand; PAM type: YTN; PAM sequence: TTG
tgcagttcttgcttttaatt

SEQ ID NO: 367091 - DNA, 20 bp, Artificial Sequence
  Description of Artificial Sequence: Synthetic oligonucleotide
  Target: LAMA2; (+) strand; PAM type: YTN; PAM sequence: TTC
ttgcttttaattacagtctc

SEQ ID NO: 367092 - DNA, 20 bp, Artificial Sequence
  Description of Artificial Sequence: Synthetic oligonucleotide
  Target: LAMA2; (+) strand; PAM type: YTN; PAM sequence: CTT
gcttttaattacagtctctt

SEQ ID NO: 367093 - DNA, 20 bp, Artificial Sequence
  Description of Artificial Sequence: Synthetic oligonucleotide
  Target: LAMA2; (+) strand; PAM type: YTN; PAM sequence: TTG
cttttaattacagtctcttc

SEQ ID NO: 367094 - DNA, 20 bp, Artificial Sequence
  Description of Artificial Sequence: Synthetic oligonucleotide
  Target: LAMA2; (+) strand; PAM type: YTN; PAM sequence: CTT
ttaattacagtctcttctga

SEQ ID NO: 367095 - DNA, 20 bp, Artificial Sequence
  Description of Artificial Sequence: Synthetic oligonucleotide
  Target: LAMA2; (+) strand; PAM type: YTN; PAM sequence: TTT
taattacagtctcttctgaa

SEQ ID NO: 367096 - DNA, 20 bp, Artificial Sequence
  Description of Artificial Sequence: Synthetic oligonucleotide
  Target: LAMA2; (+) strand; PAM type: YTN; PAM sequence: TTT
aattacagtctcttctgaaa

SEQ ID NO: 367097 - DNA, 20 bp, Artificial Sequence
  Description of Artificial Sequence: Synthetic oligonucleotide
  Target: LAMA2; (+) strand; PAM type: YTN; PAM sequence: TTA
attacagtctcttctgaaaa

SEQ ID NO: 367098 - DNA, 20 bp, Artificial Sequence
  Description of Artificial Sequence: Synthetic oligonucleotide
  Target: LAMA2; (+) strand; PAM type: YTN; PAM sequence: TTA
cagtctcttctgaaaacctt

SEQ ID NO: 367099 - DNA, 20 bp, Artificial Sequence
  Description of Artificial Sequence: Synthetic oligonucleotide
  Target: LAMA2; (+) strand; PAM type: YTN; PAM sequence: CTC
ttctgaaaacctttcttaat

SEQ ID NO: 367100 - DNA, 20 bp, Artificial Sequence
  Description of Artificial Sequence: Synthetic oligonucleotide
  Target: LAMA2; (+) strand; PAM type: YTN; PAM sequence: CTT
ctgaaaacctttcttaataa

SEQ ID NO: 367101 - DNA, 20 bp, Artificial Sequence
  Description of Artificial Sequence: Synthetic oligonucleotide
  Target: LAMA2; (+) strand; PAM type: YTN; PAM sequence: TTC
tgaaaacctttcttaataaa

SEQ ID NO: 367102 - DNA, 20 bp, Artificial Sequence
  Description of Artificial Sequence: Synthetic oligonucleotide
  Target: LAMA2; (+) strand; PAM type: YTN; PAM sequence: CTG
aaaacctttcttaataaaga

SEQ ID NO: 367103 - DNA, 20 bp, Artificial Sequence
  Description of Artificial Sequence: Synthetic oligonucleotide
  Target: LAMA2; (+) strand; PAM type: YTN; PAM sequence: CTT
tcttaataaagatataaagt

SEQ ID NO: 367104 - DNA, 20 bp, Artificial Sequence
  Description of Artificial Sequence: Synthetic oligonucleotide
  Target: LAMA2; (+) strand; PAM type: YTN; PAM sequence: TTT
cttaataaagatataaagtg

SEQ ID NO: 367105 - DNA, 20 bp, Artificial Sequence
  Description of Artificial Sequence: Synthetic oligonucleotide
  Target: LAMA2; (+) strand; PAM type: YTN; PAM sequence: TTC
ttaataaagatataaagtgg

SEQ ID NO: 367106 - DNA, 20 bp, Artificial Sequence
  Description of Artificial Sequence: Synthetic oligonucleotide
  Target: LAMA2; (+) strand; PAM type: YTN; PAM sequence: CTT
aataaagatataaagtggcc

SEQ ID NO: 367107 - DNA, 20 bp, Artificial Sequence
  Description of Artificial Sequence: Synthetic oligonucleotide
  Target: LAMA2; (+) strand; PAM type: YTN; PAM sequence: TTA
ataaagatataaagtggcct

SEQ ID NO: 367108 - DNA, 20 bp, Artificial Sequence
  Description of Artificial Sequence: Synthetic oligonucleotide
  Target: LAMA2; (+) strand; PAM type: YTN; PAM sequence: CTA
aagtacaagtaagcagaaac

SEQ ID NO: 367109 - DNA, 20 bp, Artificial Sequence
  Description of Artificial Sequence: Synthetic oligonucleotide
  Target: LAMA2; (+) strand; PAM type: YTN; PAM sequence: CTC
aaaatgttgagaacattctt

SEQ ID NO: 367110 - DNA, 20 bp, Artificial Sequence
  Description of Artificial Sequence: Synthetic oligonucleotide
  Target: LAMA2; (+) strand; PAM type: YTN; PAM sequence: TTG
agaacattcttaagtggaat

SEQ ID NO: 367111 - DNA, 20 bp, Artificial Sequence
  Description of Artificial Sequence: Synthetic oligonucleotide
  Target: LAMA2; (+) strand; PAM type: YTN; PAM sequence: TTC
ttaagtggaatatagcatgt

SEQ ID NO: 367112 - DNA, 20 bp, Artificial Sequence
  Description of Artificial Sequence: Synthetic oligonucleotide
  Target: LAMA2; (+) strand; PAM type: YTN; PAM sequence: CTT
aagtggaatatagcatgttc

SEQ ID NO: 367113 - DNA, 20 bp, Artificial Sequence
  Description of Artificial Sequence: Synthetic oligonucleotide
  Target: LAMA2; (+) strand; PAM type: YTN; PAM sequence: TTA
agtggaatatagcatgttct

SEQ ID NO: 367114 - DNA, 20 bp, Artificial Sequence
  Description of Artificial Sequence: Synthetic oligonucleotide
  Target: LAMA2; (+) strand; PAM type: YTN; PAM sequence: TTC
taaggtttcaacttgtgaac

SEQ ID NO: 367115 - DNA, 20 bp, Artificial Sequence
  Description of Artificial Sequence: Synthetic oligonucleotide
  Target: LAMA2; (+) strand; PAM type: YTN; PAM sequence: CTA
aggtttcaacttgtgaacca

SEQ ID NO: 367116 - DNA, 20 bp, Artificial Sequence
  Description of Artificial Sequence: Synthetic oligonucleotide
  Target: LAMA2; (+) strand; PAM type: YTN; PAM sequence: TTT
caacttgtgaaccaccttga

SEQ ID NO: 367117 - DNA, 20 bp, Artificial Sequence
  Description of Artificial Sequence: Synthetic oligonucleotide
  Target: LAMA2; (+) strand; PAM type: YTN; PAM sequence: TTC
aacttgtgaaccaccttgaa

SEQ ID NO: 367118 - DNA, 20 bp, Artificial Sequence
  Description of Artificial Sequence: Synthetic oligonucleotide
  Target: LAMA2; (+) strand; PAM type: YTN; PAM sequence: CTT
gtgaaccaccttgaattagt

SEQ ID NO: 367119 - DNA, 20 bp, Artificial Sequence
  Description of Artificial Sequence: Synthetic oligonucleotide
  Target: LAMA2; (+) strand; PAM type: YTN; PAM sequence: TTG
tgaaccaccttgaattagtt

SEQ ID NO: 367120 - DNA, 20 bp, Artificial Sequence
  Description of Artificial Sequence: Synthetic oligonucleotide
  Target: LAMA2; (+) strand; PAM type: YTN; PAM sequence: CTT
gaattagttattgcagtgcc

SEQ ID NO: 367121 - DNA, 20 bp, Artificial Sequence
  Description of Artificial Sequence: Synthetic oligonucleotide
  Target: LAMA2; (+) strand; PAM type: YTN; PAM sequence: TTG
aattagttattgcagtgccc

SEQ ID NO: 367122 - DNA, 20 bp, Artificial Sequence
  Description of Artificial Sequence: Synthetic oligonucleotide
  Target: LAMA2; (+) strand; PAM type: YTN; PAM sequence: TTA
gttattgcagtgcccaacag

SEQ ID NO: 367123 - DNA, 20 bp, Artificial Sequence
  Description of Artificial Sequence: Synthetic oligonucleotide
  Target: LAMA2; (+) strand; PAM type: YTN; PAM sequence: TTA
ttgcagtgcccaacagatat

SEQ ID NO: 367124 - DNA, 20 bp, Artificial Sequence
  Description of Artificial Sequence: Synthetic oligonucleotide
  Target: LAMA2; (+) strand; PAM type: YTN; PAM sequence: TTG
cagtgcccaacagatattta

SEQ ID NO: 367125 - DNA, 20 bp, Artificial Sequence
  Description of Artificial Sequence: Synthetic oligonucleotide
  Target: LAMA2; (+) strand; PAM type: YTN; PAM sequence: TTT
agtattgctgtgtgtccttc

SEQ ID NO: 367126 - DNA, 20 bp, Artificial Sequence
  Description of Artificial Sequence: Synthetic oligonucleotide
  Target: LAMA2; (+) strand; PAM type: YTN; PAM sequence: TTA
gtattgctgtgtgtccttca

SEQ ID NO: 367127 - DNA, 20 bp, Artificial Sequence
  Description of Artificial Sequence: Synthetic oligonucleotide
  Target: LAMA2; (+) strand; PAM type: YTN; PAM sequence: TTG
ctgtgtgtccttcaaatgtt

SEQ ID NO: 367128 - DNA, 20 bp, Artificial Sequence
  Description of Artificial Sequence: Synthetic oligonucleotide
  Target: LAMA2; (+) strand; PAM type: YTN; PAM sequence: CTG
tgtgtccttcaaatgtttac

SEQ ID NO: 367129 - DNA, 20 bp, Artificial Sequence
  Description of Artificial Sequence: Synthetic oligonucleotide
  Target: LAMA2; (+) strand; PAM type: YTN; PAM sequence: CTT
caaatgtttacaatattcca

SEQ ID NO: 367130 - DNA, 20 bp, Artificial Sequence
  Description of Artificial Sequence: Synthetic oligonucleotide
  Target: LAMA2; (+) strand; PAM type: YTN; PAM sequence: TTC
aaatgtttacaatattccac

SEQ ID NO: 367131 - DNA, 20 bp, Artificial Sequence
  Description of Artificial Sequence: Synthetic oligonucleotide
  Target: LAMA2; (+) strand; PAM type: YTN; PAM sequence: TTT
acaatattccactgtgcctt

SEQ ID NO: 367132 - DNA, 20 bp, Artificial Sequence
  Description of Artificial Sequence: Synthetic oligonucleotide
  Target: LAMA2; (+) strand; PAM type: YTN; PAM sequence: TTA
caatattccactgtgccttt

SEQ ID NO: 367133 - DNA, 20 bp, Artificial Sequence
  Description of Artificial Sequence: Synthetic oligonucleotide
  Target: LAMA2; (+) strand; PAM type: YTN; PAM sequence: TTC
cactgtgcctttgtgagttc

SEQ ID NO: 367134 - DNA, 20 bp, Artificial Sequence
  Description of Artificial Sequence: Synthetic oligonucleotide
  Target: LAMA2; (+) strand; PAM type: YTN; PAM sequence: CTG
tgcctttgtgagttcactgc

SEQ ID NO: 367135 - DNA, 20 bp, Artificial Sequence
  Description of Artificial Sequence: Synthetic oligonucleotide
  Target: LAMA2; (+) strand; PAM type: YTN; PAM sequence: CTT
tgtgagttcactgcagcacc

SEQ ID NO: 367136 - DNA, 20 bp, Artificial Sequence
  Description of Artificial Sequence: Synthetic oligonucleotide
  Target: LAMA2; (+) strand; PAM type: YTN; PAM sequence: TTT
gtgagttcactgcagcaccc

SEQ ID NO: 367137 - DNA, 20 bp, Artificial Sequence
  Description of Artificial Sequence: Synthetic oligonucleotide
  Target: LAMA2; (+) strand; PAM type: YTN; PAM sequence: TTG
tgagttcactgcagcaccct

SEQ ID NO: 367138 - DNA, 20 bp, Artificial Sequence
  Description of Artificial Sequence: Synthetic oligonucleotide
  Target: LAMA2; (+) strand; PAM type: YTN; PAM sequence: TTC
actgcagcaccctggggcac

SEQ ID NO: 367139 - DNA, 20 bp, Artificial Sequence
  Description of Artificial Sequence: Synthetic oligonucleotide
  Target: LAMA2; (+) strand; PAM type: YTN; PAM sequence: CTG
cagcaccctggggcacctct

SEQ ID NO: 367140 - DNA, 20 bp, Artificial Sequence
  Description of Artificial Sequence: Synthetic oligonucleotide
  Target: LAMA2; (+) strand; PAM type: YTN; PAM sequence: CTG
gggcacctctacacacagtt

SEQ ID NO: 367141 - DNA, 20 bp, Artificial Sequence
  Description of Artificial Sequence: Synthetic oligonucleotide
  Target: LAMA2; (+) strand; PAM type: YTN; PAM sequence: CTC
tacacacagtttgtgaacac

SEQ ID NO: 367142 - DNA, 20 bp, Artificial Sequence
  Description of Artificial Sequence: Synthetic oligonucleotide
  Target: LAMA2; (+) strand; PAM type: YTN; PAM sequence: CTA
cacacagtttgtgaacacag

SEQ ID NO: 367143 - DNA, 20 bp, Artificial Sequence
  Description of Artificial Sequence: Synthetic oligonucleotide
  Target: LAMA2; (+) strand; PAM type: YTN; PAM sequence: TTT
gtgaacacaggggtagatag

SEQ ID NO: 367144 - DNA, 20 bp, Artificial Sequence
  Description of Artificial Sequence: Synthetic oligonucleotide
  Target: LAMA2; (+) strand; PAM type: YTN; PAM sequence: TTG
tgaacacaggggtagataga

SEQ ID NO: 367145 - DNA, 20 bp, Artificial Sequence
  Description of Artificial Sequence: Synthetic oligonucleotide
  Target: LAMA2; (+) strand; PAM type: YTN; PAM sequence: CTA
gaggcattgaaactacacgg

SEQ ID NO: 367146 - DNA, 20 bp, Artificial Sequence
  Description of Artificial Sequence: Synthetic oligonucleotide
  Target: LAMA2; (+) strand; PAM type: YTN; PAM sequence: TTG
aaactacacggaaacttgaa

SEQ ID NO: 367147 - DNA, 20 bp, Artificial Sequence
  Description of Artificial Sequence: Synthetic oligonucleotide
  Target: LAMA2; (+) strand; PAM type: YTN; PAM sequence: CTA
cacggaaacttgaatgacgt

SEQ ID NO: 367148 - DNA, 20 bp, Artificial Sequence
  Description of Artificial Sequence: Synthetic oligonucleotide
  Target: LAMA2; (+) strand; PAM type: YTN; PAM sequence: CTT
gaatgacgttagggatccca

SEQ ID NO: 367149 - DNA, 20 bp, Artificial Sequence
  Description of Artificial Sequence: Synthetic oligonucleotide
  Target: LAMA2; (+) strand; PAM type: YTN; PAM sequence: TTG
aatgacgttagggatcccag

SEQ ID NO: 367150 - DNA, 20 bp, Artificial Sequence
  Description of Artificial Sequence: Synthetic oligonucleotide
  Target: LAMA2; (+) strand; PAM type: YTN; PAM sequence: TTA
gggatcccagagccactggg

SEQ ID NO: 367151 - DNA, 20 bp, Artificial Sequence
  Description of Artificial Sequence: Synthetic oligonucleotide
  Target: LAMA2; (+) strand; PAM type: YTN; PAM sequence: CTG
gggaatcttcattagggaag

SEQ ID NO: 367152 - DNA, 20 bp, Artificial Sequence
  Description of Artificial Sequence: Synthetic oligonucleotide
  Target: LAMA2; (+) strand; PAM type: YTN; PAM sequence: CTT
cattagggaagtgcaacaac

SEQ ID NO: 367153 - DNA, 20 bp, Artificial Sequence
  Description of Artificial Sequence: Synthetic oligonucleotide
  Target: LAMA2; (+) strand; PAM type: YTN; PAM sequence: TTC
attagggaagtgcaacaaca

SEQ ID NO: 367154 - DNA, 20 bp, Artificial Sequence
  Description of Artificial Sequence: Synthetic oligonucleotide
  Target: LAMA2; (+) strand; PAM type: YTN; PAM sequence: TTA
gggaagtgcaacaacatatg

SEQ ID NO: 367155 - DNA, 20 bp, Artificial Sequence
  Description of Artificial Sequence: Synthetic oligonucleotide
  Target: LAMA2; (+) strand; PAM type: YTN; PAM sequence: CTC
attaaactttccctatcaaa

SEQ ID NO: 367156 - DNA, 20 bp, Artificial Sequence
  Description of Artificial Sequence: Synthetic oligonucleotide
  Target: LAMA2; (+) strand; PAM type: YTN; PAM sequence: TTA
aactttccctatcaaaaaaa

SEQ ID NO: 367157 - DNA, 20 bp, Artificial Sequence
  Description of Artificial Sequence: Synthetic oligonucleotide
  Target: LAMA2; (+) strand; PAM type: YTN; PAM sequence: CTT
tccctatcaaaaaaactgaa

SEQ ID NO: 367158 - DNA, 20 bp, Artificial Sequence
  Description of Artificial Sequence: Synthetic oligonucleotide
  Target: LAMA2; (+) strand; PAM type: YTN; PAM sequence: TTT
ccctatcaaaaaaactgaag

SEQ ID NO: 367159 - DNA, 20 bp, Artificial Sequence
  Description of Artificial Sequence: Synthetic oligonucleotide
  Target: LAMA2; (+) strand; PAM type: YTN; PAM sequence: TTC
cctatcaaaaaaactgaagt

SEQ ID NO: 367160 - DNA, 20 bp, Artificial Sequence
  Description of Artificial Sequence: Synthetic oligonucleotide
  Target: LAMA2; (+) strand; PAM type: YTN; PAM sequence: CTA
tcaaaaaaactgaagtcaga

SEQ ID NO: 367161 - DNA, 20 bp, Artificial Sequence
  Description of Artificial Sequence: Synthetic oligonucleotide
  Target: LAMA2; (+) strand; PAM type: YTN; PAM sequence: CTG
aagtcagagagatgaattca

SEQ ID NO: 367162 - DNA, 20 bp, Artificial Sequence
  Description of Artificial Sequence: Synthetic oligonucleotide
  Target: LAMA2; (+) strand; PAM type: YTN; PAM sequence: TTC
agatgcttgatgagaaccta

SEQ ID NO: 367163 - DNA, 20 bp, Artificial Sequence
  Description of Artificial Sequence: Synthetic oligonucleotide
  Target: LAMA2; (+) strand; PAM type: YTN; PAM sequence: CTT
gatgagaacctacttggtaa

SEQ ID NO: 367164 - DNA, 20 bp, Artificial Sequence
  Description of Artificial Sequence: Synthetic oligonucleotide
  Target: LAMA2; (+) strand; PAM type: YTN; PAM sequence: TTG
atgagaacctacttggtaat

SEQ ID NO: 367165 - DNA, 20 bp, Artificial Sequence
  Description of Artificial Sequence: Synthetic oligonucleotide
  Target: LAMA2; (+) strand; PAM type: YTN; PAM sequence: CTA
cttggtaatggatttgaagg

SEQ ID NO: 367166 - DNA, 20 bp, Artificial Sequence
  Description of Artificial Sequence: Synthetic oligonucleotide
  Target: LAMA2; (+) strand; PAM type: YTN; PAM sequence: CTT
ggtaatggatttgaaggaga

SEQ ID NO: 367167 - DNA, 20 bp, Artificial Sequence
  Description of Artificial Sequence: Synthetic oligonucleotide
  Target: LAMA2; (+) strand; PAM type: YTN; PAM sequence: TTG
gtaatggatttgaaggagag

SEQ ID NO: 367168 - DNA, 20 bp, Artificial Sequence
  Description of Artificial Sequence: Synthetic oligonucleotide
  Target: LAMA2; (+) strand; PAM type: YTN; PAM sequence: TTT
gaaggagagagtaaacgtta

SEQ ID NO: 367169 - DNA, 20 bp, Artificial Sequence
  Description of Artificial Sequence: Synthetic oligonucleotide
  Target: LAMA2; (+) strand; PAM type: YTN; PAM sequence: TTG
aaggagagagtaaacgttag

SEQ ID NO: 367170 - DNA, 20 bp, Artificial Sequence
  Description of Artificial Sequence: Synthetic oligonucleotide
  Target: LAMA2; (+) strand; PAM type: YTN; PAM sequence: TTA
ggatactgaagggattctaa

SEQ ID NO: 367171 - DNA, 20 bp, Artificial Sequence
  Description of Artificial Sequence: Synthetic oligonucleotide
  Target: LAMA2; (+) strand; PAM type: YTN; PAM sequence: CTG
aagggattctaagagagtgc

SEQ ID NO: 367172 - DNA, 20 bp, Artificial Sequence
  Description of Artificial Sequence: Synthetic oligonucleotide
  Target: LAMA2; (+) strand; PAM type: YTN; PAM sequence: TTC
taagagagtgcagaagcgag

SEQ ID NO: 367173 - DNA, 20 bp, Artificial Sequence
  Description of Artificial Sequence: Synthetic oligonucleotide
  Target: LAMA2; (+) strand; PAM type: YTN; PAM sequence: CTA
agagagtgcagaagcgaggg

SEQ ID NO: 367174 - DNA, 20 bp, Artificial Sequence
  Description of Artificial Sequence: Synthetic oligonucleotide
  Target: LAMA2; (+) strand; PAM type: YTN; PAM sequence: CTG
gaacatggaggagtggacag

SEQ ID NO: 367175 - DNA, 20 bp, Artificial Sequence
  Description of Artificial Sequence: Synthetic oligonucleotide
  Target: LAMA2; (+) strand; PAM type: YTN; PAM sequence: TTC
tttatctaaagcaagaggaa

SEQ ID NO: 367176 - DNA, 20 bp, Artificial Sequence
  Description of Artificial Sequence: Synthetic oligonucleotide
  Target: LAMA2; (+) strand; PAM type: YTN; PAM sequence: CTT
tatctaaagcaagaggaaag

SEQ ID NO: 367177 - DNA, 20 bp, Artificial Sequence
  Description of Artificial Sequence: Synthetic oligonucleotide
  Target: LAMA2; (+) strand; PAM type: YTN; PAM sequence: TTT
atctaaagcaagaggaaagg

SEQ ID NO: 367178 - DNA, 20 bp, Artificial Sequence
  Description of Artificial Sequence: Synthetic oligonucleotide
  Target: LAMA2; (+) strand; PAM type: YTN; PAM sequence: TTA
tctaaagcaagaggaaaggg

SEQ ID NO: 367179 - DNA, 20 bp, Artificial Sequence
  Description of Artificial Sequence: Synthetic oligonucleotide
  Target: LAMA2; (+) strand; PAM type: YTN; PAM sequence: CTA
aagcaagaggaaagggcaac

SEQ ID NO: 367180 - DNA, 20 bp, Artificial Sequence
  Description of Artificial Sequence: Synthetic oligonucleotide
  Target: LAMA2; (+) strand; PAM type: YTN; PAM sequence: CTC
agaatattctcaaagctttt

SEQ ID NO: 367181 - DNA, 20 bp, Artificial Sequence
  Description of Artificial Sequence: Synthetic oligonucleotide
  Target: LAMA2; (+) strand; PAM type: YTN; PAM sequence: TTC
tcaaagctttttccctgaat

SEQ ID NO: 367182 - DNA, 20 bp, Artificial Sequence
  Description of Artificial Sequence: Synthetic oligonucleotide
  Target: LAMA2; (+) strand; PAM type: YTN; PAM sequence: CTC
aaagctttttccctgaataa

SEQ ID NO: 367183 - DNA, 20 bp, Artificial Sequence
  Description of Artificial Sequence: Synthetic oligonucleotide
  Target: LAMA2; (+) strand; PAM type: YTN; PAM sequence: CTT
tttccctgaataatagcatc

SEQ ID NO: 367184 - DNA, 20 bp, Artificial Sequence
  Description of Artificial Sequence: Synthetic oligonucleotide
  Target: LAMA2; (+) strand; PAM type: YTN; PAM sequence: TTT
ttccctgaataatagcatcc

SEQ ID NO: 367185 - DNA, 20 bp, Artificial Sequence
  Description of Artificial Sequence: Synthetic oligonucleotide
  Target: LAMA2; (+) strand; PAM type: YTN; PAM sequence: TTT
tccctgaataatagcatcct

SEQ ID NO: 367186 - DNA, 20 bp, Artificial Sequence
  Description of Artificial Sequence: Synthetic oligonucleotide
  Target: LAMA2; (+) strand; PAM type: YTN; PAM sequence: TTT
ccctgaataatagcatcctt

SEQ ID NO: 367187 - DNA, 20 bp, Artificial Sequence
  Description of Artificial Sequence: Synthetic oligonucleotide
  Target: LAMA2; (+) strand; PAM type: YTN; PAM sequence: TTC
cctgaataatagcatccttc

SEQ ID NO: 367188 - DNA, 20 bp, Artificial Sequence
  Description of Artificial Sequence: Synthetic oligonucleotide
  Target: LAMA2; (+) strand; PAM type: YTN; PAM sequence: CTG
aataatagcatccttcagaa

SEQ ID NO: 367189 - DNA, 20 bp, Artificial Sequence
  Description of Artificial Sequence: Synthetic oligonucleotide
  Target: LAMA2; (+) strand; PAM type: YTN; PAM sequence: CTT
cagaaaagaagtcttgtaac

SEQ ID NO: 367190 - DNA, 20 bp, Artificial Sequence
  Description of Artificial Sequence: Synthetic oligonucleotide
  Target: LAMA2; (+) strand; PAM type: YTN; PAM sequence: TTC
agaaaagaagtcttgtaact

SEQ ID NO: 367191 - DNA, 20 bp, Artificial Sequence
  Description of Artificial Sequence: Synthetic oligonucleotide
  Target: LAMA2; (+) strand; PAM type: YTN; PAM sequence: CTT
gtaactgactcattgcaaag

SEQ ID NO: 367192 - DNA, 20 bp, Artificial Sequence
  Description of Artificial Sequence: Synthetic oligonucleotide
  Target: LAMA2; (+) strand; PAM type: YTN; PAM sequence: TTG
taactgactcattgcaaagt

SEQ ID NO: 367193 - DNA, 20 bp, Artificial Sequence
  Description of Artificial Sequence: Synthetic oligonucleotide
  Target: LAMA2; (+) strand; PAM type: YTN; PAM sequence: CTG
actcattgcaaagtctctta

SEQ ID NO: 367194 - DNA, 20 bp, Artificial Sequence
  Description of Artificial Sequence: Synthetic oligonucleotide
  Target: LAMA2; (+) strand; PAM type: YTN; PAM sequence: CTC
attgcaaagtctcttacaca

SEQ ID NO: 367195 - DNA, 20 bp, Artificial Sequence
  Description of Artificial Sequence: Synthetic oligonucleotide
  Target: LAMA2; (+) strand; PAM type: YTN; PAM sequence: TTG
caaagtctcttacacaatgg

SEQ ID NO: 367196 - DNA, 20 bp, Artificial Sequence
  Description of Artificial Sequence: Synthetic oligonucleotide
  Target: LAMA2; (+) strand; PAM type: YTN; PAM sequence: CTC
ttacacaatggtatgtactc

SEQ ID NO: 367197 - DNA, 20 bp, Artificial Sequence
  Description of Artificial Sequence: Synthetic oligonucleotide
  Target: LAMA2; (+) strand; PAM type: YTN; PAM sequence: CTT
acacaatggtatgtactctt

SEQ ID NO: 367198 - DNA, 20 bp, Artificial Sequence
  Description of Artificial Sequence: Synthetic oligonucleotide
  Target: LAMA2; (+) strand; PAM type: YTN; PAM sequence: TTA
cacaatggtatgtactcttt

SEQ ID NO: 367199 - DNA, 20 bp, Artificial Sequence
  Description of Artificial Sequence: Synthetic oligonucleotide
  Target: LAMA2; (+) strand; PAM type: YTN; PAM sequence: CTC
tttggggaagacacaactgg

SEQ ID NO: 367200 - DNA, 20 bp, Artificial Sequence
  Description of Artificial Sequence: Synthetic oligonucleotide
  Target: LAMA2; (+) strand; PAM type: YTN; PAM sequence: CTT
tggggaagacacaactggaa

SEQ ID NO: 367201 - DNA, 20 bp, Artificial Sequence
  Description of Artificial Sequence: Synthetic oligonucleotide
  Target: LAMA2; (+) strand; PAM type: YTN; PAM sequence: TTT
ggggaagacacaactggaaa

SEQ ID NO: 367202 - DNA, 20 bp, Artificial Sequence
  Description of Artificial Sequence: Synthetic oligonucleotide
  Target: LAMA2; (+) strand; PAM type: YTN; PAM sequence: TTG
gggaagacacaactggaaac

SEQ ID NO: 367203 - DNA, 20 bp, Artificial Sequence
  Description of Artificial Sequence: Synthetic oligonucleotide
  Target: LAMA2; (+) strand; PAM type: YTN; PAM sequence: CTG
gaaacaacaccaggaaaagc

SEQ ID NO: 367204 - DNA, 20 bp, Artificial Sequence
  Description of Artificial Sequence: Synthetic oligonucleotide
  Target: LAMA2; (+) strand; PAM type: YTN; PAM sequence: CTT
gattttacagcttatggaaa

SEQ ID NO: 367205 - DNA, 20 bp, Artificial Sequence
  Description of Artificial Sequence: Synthetic oligonucleotide
  Target: LAMA2; (+) strand; PAM type: YTN; PAM sequence: TTG
attttacagcttatggaaag

SEQ ID NO: 367206 - DNA, 20 bp, Artificial Sequence
  Description of Artificial Sequence: Synthetic oligonucleotide
  Target: LAMA2; (+) strand; PAM type: YTN; PAM sequence: TTT
tacagcttatggaaagattg

SEQ ID NO: 367207 - DNA, 20 bp, Artificial Sequence
  Description of Artificial Sequence: Synthetic oligonucleotide
  Target: LAMA2; (+) strand; PAM type: YTN; PAM sequence: TTT
acagcttatggaaagattgt

SEQ ID NO: 367208 - DNA, 20 bp, Artificial Sequence
  Description of Artificial Sequence: Synthetic oligonucleotide
  Target: LAMA2; (+) strand; PAM type: YTN; PAM sequence: TTA
cagcttatggaaagattgtg

SEQ ID NO: 367209 - DNA, 20 bp, Artificial Sequence
  Description of Artificial Sequence: Synthetic oligonucleotide
  Target: LAMA2; (+) strand; PAM type: YTN; PAM sequence: CTT
atggaaagattgtggagttg

SEQ ID NO: 367210 - DNA, 20 bp, Artificial Sequence
  Description of Artificial Sequence: Synthetic oligonucleotide
  Target: LAMA2; (+) strand; PAM type: YTN; PAM sequence: TTA
tggaaagattgtggagttga

SEQ ID NO: 367211 - DNA, 20 bp, Artificial Sequence
  Description of Artificial Sequence: Synthetic oligonucleotide
  Target: LAMA2; (+) strand; PAM type: YTN; PAM sequence: TTG
tggagttgaaggaaaaatag

SEQ ID NO: 367212 - DNA, 20 bp, Artificial Sequence
  Description of Artificial Sequence: Synthetic oligonucleotide
  Target: LAMA2; (+) strand; PAM type: YTN; PAM sequence: TTG
aaggaaaaatagaaggaaag

SEQ ID NO: 367213 - DNA, 20 bp, Artificial Sequence
  Description of Artificial Sequence: Synthetic oligonucleotide
  Target: LAMA2; (+) strand; PAM type: YTN; PAM sequence: TTT
taaaaagaataagttaatat

SEQ ID NO: 367214 - DNA, 20 bp, Artificial Sequence
  Description of Artificial Sequence: Synthetic oligonucleotide
  Target: LAMA2; (+) strand; PAM type: YTN; PAM sequence: TTT
aaaaagaataagttaatatt

SEQ ID NO: 367215 - DNA, 20 bp, Artificial Sequence
  Description of Artificial Sequence: Synthetic oligonucleotide
  Target: LAMA2; (+) strand; PAM type: YTN; PAM sequence: TTA
aaaagaataagttaatattc

SEQ ID NO: 367216 - DNA, 20 bp, Artificial Sequence
  Description of Artificial Sequence: Synthetic oligonucleotide
  Target: LAMA2; (+) strand; PAM type: YTN; PAM sequence: TTA
atattcctaggggtgcatcc

SEQ ID NO: 367217 - DNA, 20 bp, Artificial Sequence
  Description of Artificial Sequence: Synthetic oligonucleotide
  Target: LAMA2; (+) strand; PAM type: YTN; PAM sequence: TTC
ctaggggtgcatcctctaaa

SEQ ID NO: 367218 - DNA, 20 bp, Artificial Sequence
  Description of Artificial Sequence: Synthetic oligonucleotide
  Target: LAMA2; (+) strand; PAM type: YTN; PAM sequence: CTA
ggggtgcatcctctaaattg

SEQ ID NO: 367219 - DNA, 20 bp, Artificial Sequence
  Description of Artificial Sequence: Synthetic oligonucleotide
  Target: LAMA2; (+) strand; PAM type: YTN; PAM sequence: CTC
taaattgcagagtgatatct

SEQ ID NO: 367220 - DNA, 20 bp, Artificial Sequence
  Description of Artificial Sequence: Synthetic oligonucleotide
  Target: LAMA2; (+) strand; PAM type: YTN; PAM sequence: CTA
aattgcagagtgatatctta

SEQ ID NO: 367221 - DNA, 20 bp, Artificial Sequence
  Description of Artificial Sequence: Synthetic oligonucleotide
  Target: LAMA2; (+) strand; PAM type: YTN; PAM sequence: TTG
cagagtgatatcttaagcaa

SEQ ID NO: 367222 - DNA, 20 bp, Artificial Sequence
  Description of Artificial Sequence: Synthetic oligonucleotide
  Target: LAMA2; (+) strand; PAM type: YTN; PAM sequence: CTT
aagcaatccttttaagaatt

SEQ ID NO: 367223 - DNA, 20 bp, Artificial Sequence
  Description of Artificial Sequence: Synthetic oligonucleotide
  Target: LAMA2; (+) strand; PAM type: YTN; PAM sequence: TTA
agcaatccttttaagaatta

SEQ ID NO: 367224 - DNA, 20 bp, Artificial Sequence
  Description of Artificial Sequence: Synthetic oligonucleotide
  Target: LAMA2; (+) strand; PAM type: YTN; PAM sequence: CTT
ttaagaattacttaagagcc

SEQ ID NO: 367225 - DNA, 20 bp, Artificial Sequence
  Description of Artificial Sequence: Synthetic oligonucleotide
  Target: LAMA2; (+) strand; PAM type: YTN; PAM sequence: TTT
taagaattacttaagagcct

SEQ ID NO: 367226 - DNA, 20 bp, Artificial Sequence
  Description of Artificial Sequence: Synthetic oligonucleotide
  Target: LAMA2; (+) strand; PAM type: YTN; PAM sequence: TTT
aagaattacttaagagcctg

SEQ ID NO: 367227 - DNA, 20 bp, Artificial Sequence
  Description of Artificial Sequence: Synthetic oligonucleotide
  Target: LAMA2; (+) strand; PAM type: YTN; PAM sequence: TTA
agaattacttaagagcctga

SEQ ID NO: 367228 - DNA, 20 bp, Artificial Sequence
  Description of Artificial Sequence: Synthetic oligonucleotide
  Target: LAMA2; (+) strand; PAM type: YTN; PAM sequence: TTA
cttaagagcctgagcgtggt

SEQ ID NO: 367229 - DNA, 20 bp, Artificial Sequence
  Description of Artificial Sequence: Synthetic oligonucleotide
  Target: LAMA2; (+) strand; PAM type: YTN; PAM sequence: CTT
aagagcctgagcgtggtggc

SEQ ID NO: 367230 - DNA, 20 bp, Artificial Sequence
  Description of Artificial Sequence: Synthetic oligonucleotide
  Target: LAMA2; (+) strand; PAM type: YTN; PAM sequence: TTA
agagcctgagcgtggtggct

SEQ ID NO: 367231 - DNA, 20 bp, Artificial Sequence
  Description of Artificial Sequence: Synthetic oligonucleotide
  Target: LAMA2; (+) strand; PAM type: YTN; PAM sequence: CTG
agcgtggtggctcacacctg

SEQ ID NO: 367232 - DNA, 20 bp, Artificial Sequence
  Description of Artificial Sequence: Synthetic oligonucleotide
  Target: LAMA2; (+) strand; PAM type: YTN; PAM sequence: CTC
acacctgtaatcccagcact

SEQ ID NO: 367233 - DNA, 20 bp, Artificial Sequence
  Description of Artificial Sequence: Synthetic oligonucleotide
  Target: LAMA2; (+) strand; PAM type: YTN; PAM sequence: CTG
taatcccagcactttgggag

SEQ ID NO: 367234 - DNA, 20 bp, Artificial Sequence
  Description of Artificial Sequence: Synthetic oligonucleotide
  Target: LAMA2; (+) strand; PAM type: YTN; PAM sequence: CTT
tgggagacggaggtgagtag

SEQ ID NO: 367235 - DNA, 20 bp, Artificial Sequence
  Description of Artificial Sequence: Synthetic oligonucleotide
  Target: LAMA2; (+) strand; PAM type: YTN; PAM sequence: TTT
gggagacggaggtgagtaga

SEQ ID NO: 367236 - DNA, 20 bp, Artificial Sequence
  Description of Artificial Sequence: Synthetic oligonucleotide
  Target: LAMA2; (+) strand; PAM type: YTN; PAM sequence: TTG
ggagacggaggtgagtagat

SEQ ID NO: 367237 - DNA, 20 bp, Artificial Sequence
  Description of Artificial Sequence: Synthetic oligonucleotide
  Target: LAMA2; (+) strand; PAM type: YTN; PAM sequence: TTG
cttgaggttaggagttcaag

SEQ ID NO: 367238 - DNA, 20 bp, Artificial Sequence
  Description of Artificial Sequence: Synthetic oligonucleotide
  Target: LAMA2; (+) strand; PAM type: YTN; PAM sequence: CTT
gaggttaggagttcaagacc

SEQ ID NO: 367239 - DNA, 20 bp, Artificial Sequence
  Description of Artificial Sequence: Synthetic oligonucleotide
  Target: LAMA2; (+) strand; PAM type: YTN; PAM sequence: TTG
aggttaggagttcaagacca

SEQ ID NO: 367240 - DNA, 20 bp, Artificial Sequence
  Description of Artificial Sequence: Synthetic oligonucleotide
  Target: LAMA2; (+) strand; PAM type: YTN; PAM sequence: TTA
ggagttcaagaccagcctgg

SEQ ID NO: 367241 - DNA, 20 bp, Artificial Sequence
  Description of Artificial Sequence: Synthetic oligonucleotide
  Target: LAMA2; (+) strand; PAM type: YTN; PAM sequence: TTC
aagaccagcctggccaacat

SEQ ID NO: 367242 - DNA, 20 bp, Artificial Sequence
  Description of Artificial Sequence: Synthetic oligonucleotide
  Target: LAMA2; (+) strand; PAM type: YTN; PAM sequence: CTG
gccaacatggcgaaatccca

SEQ ID NO: 367243 - DNA, 20 bp, Artificial Sequence
  Description of Artificial Sequence: Synthetic oligonucleotide
  Target: LAMA2; (+) strand; PAM type: YTN; PAM sequence: CTC
tacaaaaaatacaaaaaatt

SEQ ID NO: 367244 - DNA, 20 bp, Artificial Sequence
  Description of Artificial Sequence: Synthetic oligonucleotide
  Target: LAMA2; (+) strand; PAM type: YTN; PAM sequence: CTA
caaaaaatacaaaaaattat

SEQ ID NO: 367245 - DNA, 20 bp, Artificial Sequence
  Description of Artificial Sequence: Synthetic oligonucleotide
  Target: LAMA2; (+) strand; PAM type: YTN; PAM sequence: TTA
tgcagtcatgatggcacaca

SEQ ID NO: 367246 - DNA, 20 bp, Artificial Sequence
  Description of Artificial Sequence: Synthetic oligonucleotide
  Target: LAMA2; (+) strand; PAM type: YTN; PAM sequence: CTG
tagtcccagatactcgggag

SEQ ID NO: 367247 - DNA, 20 bp, Artificial Sequence
  Description of Artificial Sequence: Synthetic oligonucleotide
  Target: LAMA2; (+) strand; PAM type: YTN; PAM sequence: CTC
gggaggctgaggcacaagaa

SEQ ID NO: 367248 - DNA, 20 bp, Artificial Sequence
  Description of Artificial Sequence: Synthetic oligonucleotide
  Target: LAMA2; (+) strand; PAM type: YTN; PAM sequence: CTG
aggcacaagaactgcttaag

SEQ ID NO: 367249 - DNA, 20 bp, Artificial Sequence
  Description of Artificial Sequence: Synthetic oligonucleotide
  Target: LAMA2; (+) strand; PAM type: YTN; PAM sequence: CTG
cttaagcctgggaggaggag

SEQ ID NO: 367250 - DNA, 20 bp, Artificial Sequence
  Description of Artificial Sequence: Synthetic oligonucleotide
  Target: LAMA2; (+) strand; PAM type: YTN; PAM sequence: CTT
aagcctgggaggaggaggtt

SEQ ID NO: 367251 - DNA, 20 bp, Artificial Sequence
  Description of Artificial Sequence: Synthetic oligonucleotide
  Target: LAMA2; (+) strand; PAM type: YTN; PAM sequence: TTA
agcctgggaggaggaggttg

SEQ ID NO: 367252 - DNA, 20 bp, Artificial Sequence
  Description of Artificial Sequence: Synthetic oligonucleotide
  Target: LAMA2; (+) strand; PAM type: YTN; PAM sequence: CTG
ggaggaggaggttgcagtga

SEQ ID NO: 367253 - DNA, 20 bp, Artificial Sequence
  Description of Artificial Sequence: Synthetic oligonucleotide
  Target: LAMA2; (+) strand; PAM type: YTN; PAM sequence: TTG
cagtgagctaagatggtgcc

SEQ ID NO: 367254 - DNA, 20 bp, Artificial Sequence
  Description of Artificial Sequence: Synthetic oligonucleotide
  Target: LAMA2; (+) strand; PAM type: YTN; PAM sequence: CTA
agatggtgccactccacatc

SEQ ID NO: 367255 - DNA, 20 bp, Artificial Sequence
  Description of Artificial Sequence: Synthetic oligonucleotide
  Target: LAMA2; (+) strand; PAM type: YTN; PAM sequence: CTC
cacatcagcctgaatgacag

SEQ ID NO: 367256 - DNA, 20 bp, Artificial Sequence
  Description of Artificial Sequence: Synthetic oligonucleotide
  Target: LAMA2; (+) strand; PAM type: YTN; PAM sequence: CTG
aatgacagagcaagactcta

SEQ ID NO: 367257 - DNA, 20 bp, Artificial Sequence
  Description of Artificial Sequence: Synthetic oligonucleotide
  Target: LAMA2; (+) strand; PAM type: YTN; PAM sequence: CTC
taggtcaaaaaataaagaaa

SEQ ID NO: 367258 - DNA, 20 bp, Artificial Sequence
  Description of Artificial Sequence: Synthetic oligonucleotide
  Target: LAMA2; (+) strand; PAM type: YTN; PAM sequence: CTA
ggtcaaaaaataaagaaaga

SEQ ID NO: 367259 - DNA, 20 bp, Artificial Sequence
  Description of Artificial Sequence: Synthetic oligonucleotide
  Target: LAMA2; (+) strand; PAM type: YTN; PAM sequence: TTA
cttaagtaagtacttgacta

SEQ ID NO: 367260 - DNA, 20 bp, Artificial Sequence
  Description of Artificial Sequence: Synthetic oligonucleotide
  Target: LAMA2; (+) strand; PAM type: YTN; PAM sequence: CTT
aagtaagtacttgactaact

SEQ ID NO: 367261 - DNA, 20 bp, Artificial Sequence
  Description of Artificial Sequence: Synthetic oligonucleotide
  Target: LAMA2; (+) strand; PAM type: YTN; PAM sequence: TTA
agtaagtacttgactaactg

SEQ ID NO: 367262 - DNA, 20 bp, Artificial Sequence
  Description of Artificial Sequence: Synthetic oligonucleotide
  Target: LAMA2; (+) strand; PAM type: YTN; PAM sequence: CTT
gactaactggttatataaat

SEQ ID NO: 367263 - DNA, 20 bp, Artificial Sequence
  Description of Artificial Sequence: Synthetic oligonucleotide
  Target: LAMA2; (+) strand; PAM type: YTN; PAM sequence: TTG
actaactggttatataaatg

SEQ ID NO: 367264 - DNA, 20 bp, Artificial Sequence
  Description of Artificial Sequence: Synthetic oligonucleotide
  Target: LAMA2; (+) strand; PAM type: YTN; PAM sequence: CTA
actggttatataaatgtgat

SEQ ID NO: 367265 - DNA, 20 bp, Artificial Sequence
  Description of Artificial Sequence: Synthetic oligonucleotide
  Target: LAMA2; (+) strand; PAM type: YTN; PAM sequence: CTG
gttatataaatgtgatcata

SEQ ID NO: 367266 - DNA, 20 bp, Artificial Sequence
  Description of Artificial Sequence: Synthetic oligonucleotide
  Target: LAMA2; (+) strand; PAM type: YTN; PAM sequence: TTA
tataaatgtgatcataaacg

SEQ ID NO: 367267 - DNA, 20 bp, Artificial Sequence
  Description of Artificial Sequence: Synthetic oligonucleotide
  Target: LAMA2; (+) strand; PAM type: YTN; PAM sequence: CTT
tagggtaaatgaaaaagaca

SEQ ID NO: 367268 - DNA, 20 bp, Artificial Sequence
  Description of Artificial Sequence: Synthetic oligonucleotide
  Target: LAMA2; (+) strand; PAM type: YTN; PAM sequence: TTT
agggtaaatgaaaaagacat

SEQ ID NO: 367269 - DNA, 20 bp, Artificial Sequence
  Description of Artificial Sequence: Synthetic oligonucleotide
  Target: LAMA2; (+) strand; PAM type: YTN; PAM sequence: TTA
gggtaaatgaaaaagacatt

SEQ ID NO: 367270 - DNA, 20 bp, Artificial Sequence
  Description of Artificial Sequence: Synthetic oligonucleotide
  Target: LAMA2; (+) strand; PAM type: YTN; PAM sequence: TTG
attctaatattgtgtaaatg

SEQ ID NO: 367271 - DNA, 20 bp, Artificial Sequence
  Description of Artificial Sequence: Synthetic oligonucleotide
  Target: LAMA2; (+) strand; PAM type: YTN; PAM sequence: TTC
taatattgtgtaaatgggta

SEQ ID NO: 367272 - DNA, 20 bp, Artificial Sequence
  Description of Artificial Sequence: Synthetic oligonucleotide
  Target: LAMA2; (+) strand; PAM type: YTN; PAM sequence: CTA
atattgtgtaaatgggtaac

SEQ ID NO: 367273 - DNA, 20 bp, Artificial Sequence
  Description of Artificial Sequence: Synthetic oligonucleotide
  Target: LAMA2; (+) strand; PAM type: YTN; PAM sequence: TTG
tgtaaatgggtaactgtggc

SEQ ID NO: 367274 - DNA, 20 bp, Artificial Sequence
  Description of Artificial Sequence: Synthetic oligonucleotide
  Target: LAMA2; (+) strand; PAM type: YTN; PAM sequence: CTG
tggcttgggaaaaaaacatc

SEQ ID NO: 367275 - DNA, 20 bp, Artificial Sequence
  Description of Artificial Sequence: Synthetic oligonucleotide
  Target: LAMA2; (+) strand; PAM type: YTN; PAM sequence: CTT
gggaaaaaaacatctagtaa

SEQ ID NO: 367276 - DNA, 20 bp, Artificial Sequence
  Description of Artificial Sequence: Synthetic oligonucleotide
  Target: LAMA2; (+) strand; PAM type: YTN; PAM sequence: TTG
ggaaaaaaacatctagtaac

SEQ ID NO: 367277 - DNA, 20 bp, Artificial Sequence
  Description of Artificial Sequence: Synthetic oligonucleotide
  Target: LAMA2; (+) strand; PAM type: YTN; PAM sequence: CTA
gtaacagtatcctgaaaatt

SEQ ID NO: 367278 - DNA, 20 bp, Artificial Sequence
  Description of Artificial Sequence: Synthetic oligonucleotide
  Target: LAMA2; (+) strand; PAM type: YTN; PAM sequence: CTG
aaaattgtttaaatggtccg

SEQ ID NO: 367279 - DNA, 20 bp, Artificial Sequence
  Description of Artificial Sequence: Synthetic oligonucleotide
  Target: LAMA2; (+) strand; PAM type: YTN; PAM sequence: TTG
tttaaatggtccgtgtttca

SEQ ID NO: 367280 - DNA, 20 bp, Artificial Sequence
  Description of Artificial Sequence: Synthetic oligonucleotide
  Target: LAMA2; (+) strand; PAM type: YTN; PAM sequence: TTT
aaatggtccgtgtttcacac

SEQ ID NO: 367281 - DNA, 20 bp, Artificial Sequence
  Description of Artificial Sequence: Synthetic oligonucleotide
  Target: LAMA2; (+) strand; PAM type: YTN; PAM sequence: TTA
aatggtccgtgtttcacaca

SEQ ID NO: 367282 - DNA, 20 bp, Artificial Sequence
  Description of Artificial Sequence: Synthetic oligonucleotide
  Target: LAMA2; (+) strand; PAM type: YTN; PAM sequence: TTT
cacacaacttaaatggaagt

SEQ ID NO: 367283 - DNA, 20 bp, Artificial Sequence
  Description of Artificial Sequence: Synthetic oligonucleotide
  Target: LAMA2; (+) strand; PAM type: YTN; PAM sequence: TTC
acacaacttaaatggaagta

SEQ ID NO: 367284 - DNA, 20 bp, Artificial Sequence
  Description of Artificial Sequence: Synthetic oligonucleotide
  Target: LAMA2; (+) strand; PAM type: YTN; PAM sequence: CTT
aaatggaagtaaaacagctt

SEQ ID NO: 367285 - DNA, 20 bp, Artificial Sequence
  Description of Artificial Sequence: Synthetic oligonucleotide
  Target: LAMA2; (+) strand; PAM type: YTN; PAM sequence: TTA
aatggaagtaaaacagcttc

SEQ ID NO: 367286 - DNA, 20 bp, Artificial Sequence
  Description of Artificial Sequence: Synthetic oligonucleotide
  Target: LAMA2; (+) strand; PAM type: YTN; PAM sequence: CTT
cgctcatgacaattttcagg

SEQ ID NO: 367287 - DNA, 20 bp, Artificial Sequence
  Description of Artificial Sequence: Synthetic oligonucleotide
  Target: LAMA2; (+) strand; PAM type: YTN; PAM sequence: TTC
gctcatgacaattttcaggc

SEQ ID NO: 367288 - DNA, 20 bp, Artificial Sequence
  Description of Artificial Sequence: Synthetic oligonucleotide
  Target: LAMA2; (+) strand; PAM type: YTN; PAM sequence: CTC
atgacaattttcaggcaatt

SEQ ID NO: 367289 - DNA, 20 bp, Artificial Sequence
  Description of Artificial Sequence: Synthetic oligonucleotide
  Target: LAMA2; (+) strand; PAM type: YTN; PAM sequence: TTT
tcaggcaattcaaaatacgt

SEQ ID NO: 367290 - DNA, 20 bp, Artificial Sequence
  Description of Artificial Sequence: Synthetic oligonucleotide
  Target: LAMA2; (+) strand; PAM type: YTN; PAM sequence: TTT
caggcaattcaaaatacgtt

SEQ ID NO: 367291 - DNA, 20 bp, Artificial Sequence
  Description of Artificial Sequence: Synthetic oligonucleotide
  Target: LAMA2; (+) strand; PAM type: YTN; PAM sequence: TTC
aggcaattcaaaatacgttg

SEQ ID NO: 367292 - DNA, 20 bp, Artificial Sequence
  Description of Artificial Sequence: Synthetic oligonucleotide
  Target: LAMA2; (+) strand; PAM type: YTN; PAM sequence: TTC
aaaatacgttgtaataatgg

SEQ ID NO: 367293 - DNA, 20 bp, Artificial Sequence
  Description of Artificial Sequence: Synthetic oligonucleotide
  Target: LAMA2; (+) strand; PAM type: YTN; PAM sequence: TTG
taataatggcaaacatgagt

SEQ ID NO: 367294 - DNA, 20 bp, Artificial Sequence
  Description of Artificial Sequence: Synthetic oligonucleotide
  Target: LAMA2; (+) strand; PAM type: YTN; PAM sequence: TTT
agaaaaaaatcattttatga

SEQ ID NO: 367295 - DNA, 20 bp, Artificial Sequence
  Description of Artificial Sequence: Synthetic oligonucleotide
  Target: LAMA2; (+) strand; PAM type: YTN; PAM sequence: TTA
gaaaaaaatcattttatgaa

SEQ ID NO: 367296 - DNA, 20 bp, Artificial Sequence
  Description of Artificial Sequence: Synthetic oligonucleotide
  Target: LAMA2; (+) strand; PAM type: YTN; PAM sequence: TTT
tatgaaatatgagctaaaac

SEQ ID NO: 367297 - DNA, 20 bp, Artificial Sequence
  Description of Artificial Sequence: Synthetic oligonucleotide
  Target: LAMA2; (+) strand; PAM type: YTN; PAM sequence: TTT
atgaaatatgagctaaaaca

SEQ ID NO: 367298 - DNA, 20 bp, Artificial Sequence
  Description of Artificial Sequence: Synthetic oligonucleotide
  Target: LAMA2; (+) strand; PAM type: YTN; PAM sequence: TTA
tgaaatatgagctaaaacaa

SEQ ID NO: 367299 - DNA, 20 bp, Artificial Sequence
  Description of Artificial Sequence: Synthetic oligonucleotide
  Target: LAMA2; (+) strand; PAM type: YTN; PAM sequence: CTA
aaacaatgttttactattat

SEQ ID NO: 367300 - DNA, 20 bp, Artificial Sequence
  Description of Artificial Sequence: Synthetic oligonucleotide
  Target: LAMA2; (+) strand; PAM type: YTN; PAM sequence: TTT
tactattatcgctattatta

SEQ ID NO: 367301 - DNA, 20 bp, Artificial Sequence
  Description of Artificial Sequence: Synthetic oligonucleotide
  Target: LAMA2; (+) strand; PAM type: YTN; PAM sequence: TTT
actattatcgctattattat

SEQ ID NO: 367302 - DNA, 20 bp, Artificial Sequence
  Description of Artificial Sequence: Synthetic oligonucleotide
  Target: LAMA2; (+) strand; PAM type: YTN; PAM sequence: TTA
ctattatcgctattattatt

SEQ ID NO: 367303 - DNA, 20 bp, Artificial Sequence
  Description of Artificial Sequence: Synthetic oligonucleotide
  Target: LAMA2; (+) strand; PAM type: YTN; PAM sequence: CTA
ttatcgctattattattagc

SEQ ID NO: 367304 - DNA, 20 bp, Artificial Sequence
  Description of Artificial Sequence: Synthetic oligonucleotide
  Target: LAMA2; (+) strand; PAM type: YTN; PAM sequence: TTA
tcgctattattattagccct

SEQ ID NO: 367305 - DNA, 20 bp, Artificial Sequence
  Description of Artificial Sequence: Synthetic oligonucleotide
  Target: LAMA2; (+) strand; PAM type: YTN; PAM sequence: CTA
ttattattagccctcagcag

SEQ ID NO: 367306 - DNA, 20 bp, Artificial Sequence
  Description of Artificial Sequence: Synthetic oligonucleotide
  Target: LAMA2; (+) strand; PAM type: YTN; PAM sequence: TTA
ttattagccctcagcagaat

SEQ ID NO: 367307 - DNA, 20 bp, Artificial Sequence
  Description of Artificial Sequence: Synthetic oligonucleotide
  Target: LAMA2; (+) strand; PAM type: YTN; PAM sequence: TTA
ttagccctcagcagaatagg

SEQ ID NO: 367308 - DNA, 20 bp, Artificial Sequence
  Description of Artificial Sequence: Synthetic oligonucleotide
  Target: LAMA2; (+) strand; PAM type: YTN; PAM sequence: TTA
gccctcagcagaatagggta

SEQ ID NO: 367309 - DNA, 20 bp, Artificial Sequence
  Description of Artificial Sequence: Synthetic oligonucleotide
  Target: LAMA2; (+) strand; PAM type: YTN; PAM sequence: CTC
agcagaatagggtaaattat

SEQ ID NO: 367310 - DNA, 20 bp, Artificial Sequence
  Description of Artificial Sequence: Synthetic oligonucleotide
  Target: LAMA2; (+) strand; PAM type: YTN; PAM sequence: TTA
tttctattccttagttcatg

SEQ ID NO: 367311 - DNA, 20 bp, Artificial Sequence
  Description of Artificial Sequence: Synthetic oligonucleotide
  Target: LAMA2; (+) strand; PAM type: YTN; PAM sequence: TTT
ctattccttagttcatgttt

SEQ ID NO: 367312 - DNA, 20 bp, Artificial Sequence
  Description of Artificial Sequence: Synthetic oligonucleotide
  Target: LAMA2; (+) strand; PAM type: YTN; PAM sequence: TTC
tattccttagttcatgtttt

SEQ ID NO: 367313 - DNA, 20 bp, Artificial Sequence
  Description of Artificial Sequence: Synthetic oligonucleotide
  Target: LAMA2; (+) strand; PAM type: YTN; PAM sequence: CTA
ttccttagttcatgttttat

SEQ ID NO: 367314 - DNA, 20 bp, Artificial Sequence
  Description of Artificial Sequence: Synthetic oligonucleotide
  Target: LAMA2; (+) strand; PAM type: YTN; PAM sequence: TTC
cttagttcatgttttatatt

SEQ ID NO: 367315 - DNA, 20 bp, Artificial Sequence
  Description of Artificial Sequence: Synthetic oligonucleotide
  Target: LAMA2; (+) strand; PAM type: YTN; PAM sequence: CTT
agttcatgttttatattatc

SEQ ID NO: 367316 - DNA, 20 bp, Artificial Sequence
  Description of Artificial Sequence: Synthetic oligonucleotide
  Target: LAMA2; (+) strand; PAM type: YTN; PAM sequence: TTA
gttcatgttttatattatcg

SEQ ID NO: 367317 - DNA, 20 bp, Artificial Sequence
  Description of Artificial Sequence: Synthetic oligonucleotide
  Target: LAMA2; (+) strand; PAM type: YTN; PAM sequence: TTC
atgttttatattatcgctga

SEQ ID NO: 367318 - DNA, 20 bp, Artificial Sequence
  Description of Artificial Sequence: Synthetic oligonucleotide
  Target: LAMA2; (+) strand; PAM type: YTN; PAM sequence: TTT
tatattatcgctgacctgca

SEQ ID NO: 367319 - DNA, 20 bp, Artificial Sequence
  Description of Artificial Sequence: Synthetic oligonucleotide
  Target: LAMA2; (+) strand; PAM type: YTN; PAM sequence: TTT
atattatcgctgacctgcat

SEQ ID NO: 367320 - DNA, 20 bp, Artificial Sequence
  Description of Artificial Sequence: Synthetic oligonucleotide
  Target: LAMA2; (+) strand; PAM type: YTN; PAM sequence: TTA
tattatcgctgacctgcatg

SEQ ID NO: 367321 - DNA, 20 bp, Artificial Sequence
  Description of Artificial Sequence: Synthetic oligonucleotide
  Target: LAMA2; (+) strand; PAM type: YTN; PAM sequence: TTA
tcgctgacctgcatgaggag

SEQ ID NO: 367322 - DNA, 20 bp, Artificial Sequence
  Description of Artificial Sequence: Synthetic oligonucleotide
  Target: LAMA2; (+) strand; PAM type: YTN; PAM sequence: CTG
acctgcatgaggagccccta

SEQ ID NO: 367323 - DNA, 20 bp, Artificial Sequence
  Description of Artificial Sequence: Synthetic oligonucleotide
  Target: LAMA2; (+) strand; PAM type: YTN; PAM sequence: CTG
catgaggagcccctattttt

SEQ ID NO: 367324 - DNA, 20 bp, Artificial Sequence
  Description of Artificial Sequence: Synthetic oligonucleotide
  Target: LAMA2; (+) strand; PAM type: YTN; PAM sequence: CTA
tttttctgcgtatttatttg

SEQ ID NO: 367325 - DNA, 20 bp, Artificial Sequence
  Description of Artificial Sequence: Synthetic oligonucleotide
  Target: LAMA2; (+) strand; PAM type: YTN; PAM sequence: TTT
ttctgcgtatttatttgttc

SEQ ID NO: 367326 - DNA, 20 bp, Artificial Sequence
  Description of Artificial Sequence: Synthetic oligonucleotide
  Target: LAMA2; (+) strand; PAM type: YTN; PAM sequence: TTT
tctgcgtatttatttgttcc

SEQ ID NO: 367327 - DNA, 20 bp, Artificial Sequence
  Description of Artificial Sequence: Synthetic oligonucleotide
  Target: LAMA2; (+) strand; PAM type: YTN; PAM sequence: TTT
ctgcgtatttatttgttcct

SEQ ID NO: 367328 - DNA, 20 bp, Artificial Sequence
  Description of Artificial Sequence: Synthetic oligonucleotide
  Target: LAMA2; (+) strand; PAM type: YTN; PAM sequence: TTC
tgcgtatttatttgttcctc

SEQ ID NO: 367329 - DNA, 20 bp, Artificial Sequence
  Description of Artificial Sequence: Synthetic oligonucleotide
  Target: LAMA2; (+) strand; PAM type: YTN; PAM sequence: CTG
cgtatttatttgttcctctt
